(19) United States
(12) Patent Application Publication
(10) Pub. No.: US 2004/0077565 A1
(43) Pub. Date: Apr. 22, 2004

(54) Enzymatic nucleic acid-mediated treatment of ocular diseases or conditions related to levels of vascular endothelial growth factor receptor (VEGF-R)

(75) Inventors: Pamela Pavco, Lafayette, CO (US); James McSwiggen, Boulder, CO (US); Dan Stinchcomb, Ft. Collins, CO (US); Jaime Escobedo, Alamo, CA (US)

Correspondence Address: MCDONNELL BOEHNEN HULBERT & BERGHOFF, 300 SOUTH WACKER DRIVE, SUITE 3200, CHICAGO, IL, 60606, US

(73) Assignee: Ribozyme Pharmaceuticals, Inc. and Chiron.

(21) Appl. No.: 10/138,674

(22) Filed: May 3, 2002

Related U.S. Application Data
(63) Continuation-in-part of application No. 09/870,161, filed on May 29, 2001.
Application No. 09/870,161 is a continuation-in-part of application No. 09/708,690, filed on Nov. 7, 2000.
Application No. 09/708,690 is a continuation-in-part of application No. 09/371,722, filed on Aug. 10, 1999.
Application No. 09/371,722 is a continuation-in-part of application No. 08/584,040, filed on Jan. 11, 1996, now Pat. No. 6,346,398.
(60) Provisional application No. 60/005,974, filed on Oct. 26, 1995.

(51) Int. Cl. A61K 48/00; C07H 21/04; A61K 9/127; C12N 15/88

(52) U.S. Cl. 514/44; 536/23.1; 435/458; 424/450

(57) ABSTRACT

The present invention relates to nucleic acid molecules such as ribozymes, DNAzymes, and antisense which modulate the synthesis, expression and/or stability of an mRNA encoding one or more receptors of vascular endothelial growth factor, such as flt-1 and KDR. Nucleic acid molecules and methods for the inhibition of angiogenesis and treatment of cancer and ocular diseases are provided, optionally in conjunction with other therapeutic agents.

[0001] This patent application is a continuation-in-part of Pavco et al., U.S. Ser. No. 09/870,161, filed May 29, 2001, which is a continuation-in-part of Pavco et al., U.S. Ser. No. 09/708,690, filed Nov. 7, 2000, which is a continuation-in-part of Pavco et al., U.S. Ser. No. 09/371,722, filed Aug. 10, 1999, which is a continuation-in-part of Pavco et al., U.S. Ser. No. 08/584,040, filed Jan. 11, 1996, which claims the benefit of Pavco et al., U.S. S No. 60/005,974, filed on Oct. 26, 1995, all of these earlier applications are entitled “Method and Reagent for Treatment of Diseases or Conditions Related To Levels of Vascular Endothelial Growth Factor Receptor”. Each of these applications is hereby incorporated by reference herein in its entirety including the drawings and tables.

### BACKGROUND OF THE INVENTION

[0002] This invention relates to methods and reagents for the treatment of diseases or conditions relating to the levels of expression of vascular endothelial growth factor (VEGF) receptor(s).

[0003] The following is a discussion of relevant art, none of which is admitted to be prior art to the present invention.

[0004] VEGF, also referred to as vascular permeability factor (VPF) and vasculotropin, is a potent and highly specific mitogen of vascular endothelial cells (for a review see Ferrara, 1993 Trends Cardiovas. Med. 3, 244; Neufeld et al., 1994 Prog. Growth Factor Res. 5, 89). VEGF induced neovascularization is implicated in various pathological conditions such as tumor angiogenesis, proliferative diabetic retinopathy, hypoxia-induced angiogenesis, rheumatoid arthritis, psoriasis, wound healing and others.

[0005] VEGF, an endothelial cell-specific mitogen, is a 34-45 kDa glycoprotein with a wide range of activities that include promotion of angiogenesis, enhancement of vascular-permeability and others. VEGF belongs to the platelet-derived growth factor (PDGF) family of growth factors with approximately 18% homology with the A and B chain of PDGF at the amino acid level. Additionally, VEGF contains the eight conserved cysteine residues common to all growth factors belonging to the PDGF family (Neufeld et al., supra). VEGF protein is believed to exist predominantly as disulfide-linked homodimers; monomers of VEGF have been shown to be inactive (Plouet et al., 1989 EMBO J. 8, 3801).

[0006] VEGF exerts its influence on vascular endothelial cells by binding to specific high-affinity cell surface receptors. Covalent cross-linking experiments with ^{125lI -labeled VEGF protein have led to the identification of three high molecular weight complexes of} 225, 195 and 175 kDa presumed to be VEGF and VEGF receptor complexes (Vaisman et al., 1990 J. Biol. Chem. 265, 19461). Based on these studies VEGF-specific receptors of 180, 150 and 130 kDa molecular mass were predicted. In endothelial cells, receptors of 150 and the 130 kDa have been identified. The VEGF receptors belong to the superfamily of receptor tyrosine kinases (RTKs) characterized by a conserved cytoplasmic catalytic kinase domain and a hydrophylic kinase sequence. The extracellular domains of the VEGF receptors consist of seven immunoglobulin-like domains that are thought to be involved in VEGF binding functions.

[0007] The two most abundant and high-affinity receptors of VEGF are flt-1 (fms-like tyrosine kinase) cloned by Shibuya et al., 1990 Oncogene 5, 519 and KDR (kinase-insert-domain-containing receptor) cloned by Terman et al., 1991 Oncogene 6, 1677. The murine homolog of KDR, cloned by Mathews et al., 1991, Proc. Natl. Acad. Sci., USA, 88, 9026, shares 85% amino acid homology with KDR and is termed as flk-1 (fetal liver kinase-1). Recently it has been shown that the high-affinity binding of VEGF to its receptors is modulated by cell surface-associated heparin and heparin-like molecules (Gitay-Goren et al., 1992 J. Biol. Chem. 267, 6093).

[0008] VEGF expression has been associated with several pathological states such as tumor angiogenesis, several forms of blindness, rheumatoid arthritis, psoriasis and others. Following is a brief summary of evidence supporting the involvement of VEGF in various diseases:

[0009] 1) Tumor angiogenesis: Increased levels of VEGF gene expression have been reported in vascularized and edema-associated brain tumors (Berkman et al., 1993 J. Clini. Invest. 91, 153). A more direct demostration of the role of VEGF in tumor angiogenesis was demonstrated by Jim Kim et al., 1993 Nature 362,841 wherein, monoclonal antibodies against VEGF were successfully used to inhibit the growth of rhabdomyosarcoma, glioblastoma multiforme cells in nude mice. Similarly, expression of a dominant negative mutated form of the flt-1 VEGF receptor inhibits vascularization induced by human glioblastoma cells in nude mice (Millauer et al., 1994, Nature 367, 576).

[0010] 2) Ocular diseases: Aiello et al., 1994 New Engl. J. Med. 331, 1480, showed that the ocular fluid of a majority of patients suffering from diabetic retinopathy and other retinal disorders, contains a high concentration of VEGF. Miller et al., 1994 Am. J. Pathol. 145, 574, reported elevated levels of VEGF mRNA in patients suffering from retinal ischemia. These observations support a direct role for VEGF in ocular diseases.

[0011] 3) Psoriasis: Detmar et al., 1994 J. Exp. Med. 180, 1141 reported that VEGF and its receptors were over-expressed in psoriatic skin and psoriatic dermal microvessels, suggesting that VEGF plays a significant role in psoriasis.

[0012] 4) Rheumatoid arthritis: Immunohistochemistry and in situ hybridization studies on tissues from the joints of patients suffering from rheumatoid arthritis show an increased level of VEGF and its receptors (Fava et al., 1994 J. Exp. Med. 180, 341). Additionally, Koch et al., 1994 J. Immunol. 152, 4149, found that VEGF-specific antibodies were able to significantly reduce the mitogenic activity of synovial tissues from patients suffering from rheumatoid arthritis. These observations support a direct role for VEGF in rheumatoid arthritis.

[0013] In addition to the above data on pathological conditions involving excessive angiogenesis, a number of studies have demonstrated that VEGF is both necessary and sufficient for neovascularization. Takashita et al., 1995 J. Clin. Invest. 93, 662, demonstrated that a single injection of VEGF augmented collateral vessel development in a rabbit model of ischemia. VEGF also can induce neovascularization when injected into the cornea. Expression of the VEGF gene in CHO cells is sufficient to confer tumorigenic potential to the cells. Kim et al., supra and Millauer et al., supra used monoclonal antibodies against VEGF or a dominant negative form of flk-1 receptor to inhibit tumor-induced neovascularization.

[0014] During development, VEGF and its receptors are associated with regions of new vascular growth (Millauer et al., 1993 Cell 72, 835; Shalaby et al., 1993 J. Clin. Invest. 91, 2235). Furthermore, transgenic mice lacking either of the VEGF receptors are defective in blood vessel formation, in fact these mice do not survive; flk-1 appears to be required for differentiation of endothelial cells, while flt-1 appears to be required at later stages of vessel formation (Shalaby et al., 1995 Nature 376, 62; Fung et al., 1995 Nature 376, 66). Thus, these receptors must be present to properly signal endothelial cells or their precursors to respond to vascularization-promoting stimuli.

[0015] All of the conditions listed above, involve extensive vascularization. This hyper-stimulation of endothelial cells may be alleviated by VEGF antagonists. Thus most of the therapeutic efforts for the above conditions have concentrated on finding inhibitors of the VEGF protein.

[0016] Kim et al., 1993 Nature 362, 841 have been successful in inhibiting VEGF-induced tumor growth and angiogenesis in nude mice by treating the mice with VEGF-specific monoclonal antibody.

[0017] Koch et al., 1994 J. Immunol. 152, 4149 showed that the mitogenic activity of microvascular endothelial cells found in rheumatoid arthritis (RA) synovial tissue explants and the chemotactic property of endothelial cells from RA synovial fluid can be neutralized significantly by treatment with VEGF-specific antibodies.

[0018] Ullrich et al., International PCT Publication No. WO 94/11499 and Millauer et al., 1994 Nature 367, 576 used a soluble form of flk-1 receptor (dominant-negative mutant) to prevent VEGF-mediated tumor angiogenesis in immunodeficient mice.

[0019] Kendall and Thomas, International PCT Publication No. WO 94/21679 describe the use of naturally occuring or recombinantly-engineered soluble forms of VEGF receptors to inhibit VEGF activity.

[0020] Robinson, International PCT Publication No. WO 95/04142 describes the use of antisense oligonucleotides targeted against VEGF RNA to inhibit VEGF expression.

[0021] Jellinek et al., 1994 Biochemistry 33, 10450 describe the use of VEGF-specific high-affinity RNA aptamers to inhibit the binding of VEGF to its receptors.

[0022] Rockwell and Goldstein, International PCT Publication No. WO 95/21868, describe the use of anti-VEGF receptor monoclonal antibodies to neutralize the effect of VEGF on endothelial cells.

### SUMMARY OF THE INVENTION

[0023] The invention features novel nucleic acid-based compounds [e.g., enzymatic nucleic acid molecules (ribozymes such as Inozyme, G-cleaver, amberzyme, zinzyme), DNAzyme, antisense nucleic acids, 2-5A antisense chimeras, triplex forming nucleic acid, decoy nucleic acids, aptamers, allozymes, antisense nucleic acids containing RNA cleaving chemical groups (Cook et al., U.S. Pat. No. 5,359,051)] and methods for their use to down regulate or inhibit the expression of receptors of VEGF (VEGF-R).

[0024] In one embodiment, the invention features the use of one or more of the nucleic acid-based compounds to inhibit the expression of flt-1 and/or flk-1/KDR receptors.

[0025] In another embodiment, the present invention features a compound having Formula I: (SEQ ID NO: 20818).

[0026] 5′ gₛaₛgₛuₛugcUGAuGagg ccgaaa ggccGaaAgucugB 3′

[0027] wherein each a is 2′-O-methyl adenosine nucleotide, each g is a 2′-O-methyl guanosine nucleotide, each c is a 2′-O-methyl cytidine nucleotide, each u is a 2′-O-methyl uridine nucleotide, each A is adenosine, each G is guanosine, each s individually represents a phosphorothioate internucleotide linkage, U is 2′-deoxy-2′-C-allyl uridine, and B is an inverted deoxyabasic moiety.

[0028] In another embodiment, the present invention features a compound having Formula II: (SEQ ID NO: 13488).

[0029] 5′-uₛaₛcₛ aₛau ucU GAu Gag gcg aaa gcc Gaa Aag aca aB-3′

[0030] wherein each a is 2′-O-methyl adenosine nucleotide, each g is a 2′-O-methyl guanosine nucleotide, each c is a 2′-O-methyl cytidine nucleotide, each u is a 2′-O-methyl uridine nucleotide, each A is adenosine, each G is guanosine, each s individually represents a phosphorothioate internucleotide linkage, U is 2′-deoxy-2′-C-allyl uridine, and B is an inverted deoxyabasic moiety.

[0031] In one embodiment, the invention features a composition comprising a compound of Formula I and/or II in a pharmaceutically acceptable carrier or diluent.

[0032] In another embodiment, the invention features a method of administering to a cell, for example a mammalian cell or human cell, the compound of Formula I and/or II, comprising contacting the cell with the compound under conditions suitable for administration, for example in the presence of a delivery reagent. Examples of suitable delivery reagents include a lipid, cationic lipid, phospholipid, or liposome as described herein and known in the art.

[0033] In one embodiment, the invention features a method of administering to a cell the compound of Formula I or II in conjunction with a chemotherapeutic agent comprising contacting the cell with the compound and the chemotherapeutic agent under conditions suitable for administration.

[0034] Examples of chemotherapeutic agents that can be combined with the compound of Formula I and/or II include but are not limited to 5-fluoro uridine, Leucovorin, Irinotecan (CAMPTOSAR® or CPT-11 or Camptothecin-11 or Campto), Paclitaxel, or Carboplatin or a combination thereof.

[0035] In another embodiment, the present invention also features a cell comprising the compound of Formula I and/or II, wherein the cell is a mammalian cell. For example, in one embodiment the mammalian cell is a human cell.

[0036] In one embodiment, the invention features a method of inhibiting angiogenesis, for example tumor angiogenesis, in a patient comprising the step of contacting the patient with the compound of Formula I and/or II under conditions suitable for said inhibition. In one embodiment, the patient is a mammal, for example, a human.

[0037] In another embodiment, the invention features a method of treatment of a patient having a condition associated with an increased level of VEGF receptor, for example, cancers such as breast cancer, lung cancer, colorectal cancer, renal cancer, pancreatic cancer, or melanoma, or ocular indications such as diabetic retinopathy, or age related macular degeneration, comprising contacting one or more cells of the patient with the compound of Formula I and/or II, under conditions suitable for the treatment. In one embodiment, the patient is a human.

[0038] In another embodiment, the invention features a method of treatment of a patient having an ocular condition associated with an increased level of a VEGF receptor, for example, diabetic retinopathy, or age related macular degeneration, comprising contacting one or more cells of the patient with a nucleic acid molecule, such as an enzymatic nucleic acid molecule, targeted against a VEGF receptor RNA, e.g., a molecule according to Formula I and/or II, under conditions suitable for the treatment. In one embodiment, the patient is a human.

[0039] In yet another embodiment, a method of treatment of the invention further comprises the use of one or more drug therapies under conditions suitable for the treatment.

[0040] In one embodiment, the present invention also features a method of cleaving RNA comprising a sequence of flt-1 comprising contacting the compound of Formula I with the RNA under conditions suitable for the cleavage of the RNA, for example, where the cleavage is carried out in the presence of a divalent cation such as Mg2+.

[0041] In another embodiment, the invention features a method of administering to a mammal, for example a human, the compound of Formula I and/or II comprising contacting the mammal with the compound under conditions suitable for the administration, for example, in the presence of a delivery reagent such as a lipid, cationic lipid, phospholipid, or liposome.

[0042] In yet another embodiment, the invention features a method of administering to a mammal the compound of Formula I and/or II in conjunction with a chemotherapeutic agent comprising contacting the mammal, for example a human, with the compound and the chemotherapeutic agent under conditions suitable for the administration.

[0043] In another embodiment, the invention features a composition comprising the nucleic acid molecule of the instant invention and a pharmaceutically acceptable carrier or diluent.

[0044] By “inhibit” it is meant that the activity of VEGF-R or level of VEGF-R mRNAs or equivalent RNAs encoding VEGF-R is reduced below that observed in the absence of a nucleic acid molecule of the instant invention. In one embodiment, inhibition with enzymatic nucleic acid preferably is below that level observed in the presence of an enzymatically inactive or attenuated molecule that is able to bind to the same site on the mRNA, but is unable to cleave that RNA. In another embodiment, inhibition with antisense oligonucleotides is preferably below that level observed in the presence of, for example, an oligonucleotide with scrambled sequence or with mismatches. In another embodiment, inhibition of a VEGF-R gene with the nucleic acid molecule of the instant invention is greater in the presence of the nucleic acid molecule than in its absence.

[0045] By “enzymatic nucleic acid molecule” it is meant an RNA molecule which has complementarity in a substrate binding region to a specified gene target, and also has an enzymatic activity which is active to specifically cleave target RNA. That is, the enzymatic RNA molecule is able to intermolecularly cleave RNA and thereby inactivate a target RNA molecule. The complementary region(s) allows sufficient hybridization of the enzymatic RNA molecule to the target RNA and thus permit cleavage. One hundred percent complementarity is preferred, but complementarity as low as 50-75% can also be useful in this invention. The nucleic acids can be modified at the base, sugar, and/or phosphate groups. The term enzymatic nucleic acid is used interchangeably with phrases such as ribozymes, catalytic RNA, enzymatic RNA, enzymatic DNA, catalytic DNA, catalytic oligonucleotides, nucleozyme, DNAzyme, Zinzyme, RNA enzyme, endoribonuclease, endonuclease, minizyme, leadzyme, oligozyme or DNA enzyme. All of these terminologies describe nucleic acid molecules with enzymatic activity. The specific enzymatic nucleic acid molecules described in the instant application are not meant to be limiting and those skilled in the art will recognize that all that is important in an enzymatic nucleic acid molecule of this invention is that it have a specific substrate binding site which is complementary to one or more of the target nucleic acid regions, and that it have nucleotide sequences within or surrounding that substrate binding site which impart a nucleic acid cleaving activity to the molecule (Cech et al., U.S. Pat. No. 4,987,071; Cech et al., 1988, JAMA).

[0046] By “enzymatic portion” or “catalytic domain” is meant that portion/region of the enzymatic nucleic acid essential for cleavage of a nucleic acid substrate (for example see FIG. 1).

[0047] By “substrate binding arm” or “substrate binding domain” is meant that portion/region of a enzymatic nucleic acid which is complementary to (i.e., able to base-pair with) a portion of its substrate. Generally, such complementarity is 100%, but can be less if desired. For example, as few as 10 bases out of 14 can be base-paired. Such arms are shown generally in FIG. 1. That is, these arms contain sequences within an enzymatic nucleic acid are intended to bring enzymatic nucleic acid and target RNA together through complementary base-pairing interactions. The enzymatic nucleic acid of the invention can have binding arms that are contiguous or non-contiguous and can be of varying lengths. The length of the binding arm(s) are preferably greater than or equal to four nucleotides, and are of sufficient length to stably interact with the target RNA; specifically 12-100 nucleotides; more specifically 14-24 nucleotides long. If two binding arms are chosen, the design is such that the length of the binding arms are symmetrical (i.e., each of the binding arms is of the same length; e.g., five and five nucleotides, six and six nucleotides or seven and seven nucleotides long) or asymmetrical (i.e., the binding arms are of different length; e.g., six and three nucleotides; three and six nucleotides long; four and five nucleotides long; four and six nucleotides long; four and seven nucleotides long; and the like).

[0048] By “DNAzyme” is meant an enzymatic nucleic acid molecule lacking a 2′-OH group. In particular embodiments, the enzymatic nucleic acid molecule can have an attached linker(s) or other attached or associated groups, moieties, or chains containing one or more nucleotides with 2′-OH groups.

[0049] By “zinzyme” motif or configuration is meant a class II enzymatic nucleic acid molecule comprising a motif as generally described in FIG. 32 and in Beigelman et al., International PCT publication No. WO 99/55857 and U.S. patent application Ser. No. 09/918,728, which is herein incorporated by reference in its entirety, including the drawings. Zinzymes possess endonuclease activity to cleave RNA substrates having a cleavage triplet including but not limited to, YG/Y, where Y is uridine or cytidine, and G is guanosine and/represents the cleavage site. Zinzymes can be chemically modified to increase nuclease stability through various substitutions, including substituting 2′-O-methyl guanosine nucleotides for guanosine nucleotides. In addition, differing nucleotide and/or non-nucleotide linkers can be used to substitute the 5′-gaaa-2′ loop of the motif. Zinzymes represent a non-limiting example of an enzymatic nucleic acid molecule that does not require a ribonucleotide (2′-OH) group within its own nucleic acid sequence for activity.

[0050] By “sufficient length” is meant a nucleic acid molecule long enough to provide the intended function under the expected condition. For example, a nucleic acid molecule of the invention needs to be of “sufficient length” to provide stable binding to a target site under the expected binding conditions and environment. In another non-limiting example, for the binding arms of an enzymatic nucleic acid, “sufficient length” means that the binding arm sequence is long enough to provide stable binding to a target site under the expected reaction conditions and environment. The binding arms are not so long as to prevent useful turnover of the nucleic acid molecule.

[0051] By “stably interact” is meant interaction of the oligonucleotides with target, such as a target protein or target nucleic acid (e.g., by forming hydrogen bonds with complementary amino acids or nucleotides in the target under physiological conditions) that is sufficient for the intended purpose (e.g., specific binding to a protein target to disrupt the function of that protein or cleavage of target RNA/DNA by an enzyme).

[0052] By “equivalent” RNA to VEGF-R is meant to include those naturally occurring RNA molecules having homology (partial or complete) to VEGF-R, or encoding for proteins with similar function as VEGF-R in various animals, including human, rodent, primate, rabbit and pig. The equivalent RNA sequence also includes in addition to the coding region, regions such as 5′untranslated region, 3′-untranslated region, introns, intron-exon junction and the like.

[0053] By “homology” is meant the nucleotide sequence of two or more nucleic acid molecules is partially or completely identical.

[0054] By “antisense nucleic acid” it is meant a non-enzymatic nucleic acid molecule that binds to target RNA by means of RNA-RNA or RNA-DNA or RNA-PNA (protein nucleic acid; Egholm et al., 1993 Nature 365, 566) interactions and alters the activity of the target RNA (for a review see Stein and Cheng, 1993 Science 261, 1004). Typically, antisense molecules will be complementary to a target sequence along a single contiguous sequence of the antisense molecule. However, in certain embodiments, an antisense molecule may bind to substrate such that the substrate molecule forms a loop, and/or an antisense molecule may bind such that the antisense molecule forms a loop. Thus, the antisense molecule may be complementary to two (or even more) non-contiguous substrate sequences or two (or even more) non-contiguous sequence portions of an antisense molecule may be complementary to a target sequence or both.

[0055] By “2-5A antisense chimera” it is meant, an antisense oligonucleotide containing a 5′ phosphorylated 2′-5′-linked adenylate residues. These chimeras bind to target RNA in a sequence-specific manner and activate a cellular 2-5A-dependent ribonuclease which, in turn, cleaves the target RNA (Torrence et al., 1993 Proc. Natl. Acad. Sci. USA 90, 1300).

[0056] By “triplex DNA” it is meant an oligonucleotide that can bind to a double-stranded DNA in a sequence-specific manner to form a triple-strand helix. Formation of such triple helix structure has been shown to inhibit transcription of the targeted gene (Duval-Valentin et al., 1992 Proc. Natl. Acad. Sci. USA 89, 504).

[0057] By “gene” it is meant a nucleic acid that encodes an RNA, for example, nucleic acid sequences including, but not limited to, structural genes encoding a polypeptide.

[0058] By “complementarity” is meant that a nucleic acid can form hydrogen bond(s) with another nucleic acid sequence by either traditional Watson-Crick or other non-traditional types. In reference to the nucleic molecules of the present invention, the binding free energy for a nucleic acid molecule with its target or complementary sequence is sufficient to allow the relevant function of the nucleic acid to proceed, e.g., ribozyme cleavage, antisense or triple helix inhibition. Determination of binding free energies for nucleic acid molecules is well known in the art (see, e.g., Turner et al., 1987, CSH Symp. Quant. Biol. LII pp. 123-133; Frier et al., 1986, Proc. Nat. Acad. Sci. USA 83:9373-9377; Turner et al., 1987, J. Am. Chem. Soc. 109:3783-3785. A percent complementarity indicates the percentage of contiguous residues in a nucleic acid molecule which can form hydrogen bonds (e.g., Watson-Crick base pairing) with a second nucleic acid sequence (e.g., 5, 6, 7, 8, 9, 10 out of 10 being 50%, 60%, 70%, 80%, 90%, and 100% complementary). “Perfectly complementary” means that all the contiguous residues of a nucleic acid sequence will hydrogen bond with the same number of contiguous residues in a second nucleic acid sequence.

[0059] Seven basic varieties of naturally-occurring enzymatic RNAs are known presently. Each can catalyze the hydrolysis of RNA phosphodiester bonds in trans (and thus can cleave other RNA molecules) under physiological conditions. Table I summarizes some of the characteristics of these ribozymes. In general, enzymatic nucleic acids act by first binding to a target RNA. Such binding occurs through the target binding portion of a enzymatic nucleic acid which is held in close proximity to an enzymatic portion of the molecule that acts to cleave the target RNA. Thus, the enzymatic nucleic acid first recognizes and then binds a target RNA through complementary base-pairing, and once bound to the correct site, acts enzymatically to cut the target RNA. Strategic cleavage of such a target RNA destroys its ability to direct synthesis of an encoded protein. After an enzymatic nucleic acid has bound and cleaved its RNA target, it is released from that RNA to search for another target and can repeatedly bind and cleave new targets. Thus, a single enzymatic nucleic acid molecule is able to cleave many molecules of target RNA. In addition, the enzymatic nucleic acid is a highly specific inhibitor of gene expression, with the specificity of inhibition depending not only on the base-pairing mechanism of binding to the target RNA, but also on the mechanism of target RNA cleavage. Single mismatches, or base-substitutions, near the site of cleavage can completely eliminate catalytic activity of a ribozyme.

[0060] Enzymatic nucleic acids that cleave the specified sites in VEGF-R mRNAs represent a novel therapeutic approach to treat tumor angiogenesis, and cancers including, but not limited to, tumor and cancer types shown under Diagnosis in Table XX, ocular diseases, rhuematoid arthritis, psoriasis and others. The enzymatic nucleic acid molecules of the instant invention are able to inhibit the activity of VEGF-R (specifically flt-1 and flk-1/KDR) and the catalytic activity of the enzymatic nucleic acid molecules is required for their inhibitory effect. Those of ordinary skill in the art will find it clear from the exemplary nucleic acid molecules described that other enzymatic nucleic acid molecules that cleave VEGF-R mRNAs can be readily designed and are within the scope of the invention.

[0061] In one of the embodiments of the inventions described herein, the enzymatic nucleic acid molecule is formed in a hammerhead or hairpin motif, but can also be formed in the motif of a hepatitis delta virus, group I intron, group II intron or RNase P RNA (in association with an RNA guide sequence), Neurospora VS RNA, DNAzymes, Zinzymes, NCH cleaving motifs, or G-cleavers. Examples of such hammerhead motifs are described by Dreyfus, supra, Rossi et al., 1992, AIDS Research and Human Retroviruses 8, 183; of hairpin motifs by Hampel et al., EP0360257, Hampel and Tritz, 1989 Biochemistry 28, 4929, Feldstein et al., 1989, Gene 82, 53, Haseloff and Gerlach, 1989, Gene, 82, 43, and Hampel et al., 1990 Nucleic Acids Res. 18, 299; Chowrira & McSwiggen, U.S. Pat. No. 5,631,359; of the hepatitis delta virus motif is described by Perrotta and Been, 1992 Biochemistry 31, 16; of the RNase P motif by Guerrier-Takada et al., 1983 Cell 35, 849; Forster and Altman, 1990, Science 249, 783; Li and Altman, 1996, Nucleic Acids Res. 24, 835; Neurospora VS RNA ribozyme motif is described by Collins (Saville and Collins, 1990 Cell 61, 685-696; Saville and Collins, 1991 Proc. Natl. Acad. Sci. USA 88, 8826-8830; Collins and Olive, 1993 Biochemistry 32, 2795-2799; Guo and Collins, 1995, EMBO. J. 14, 363); Group II introns are described by Griffin et al., 1995, Chem. Biol. 2, 761; Michels and Pyle, 1995, Biochemistry 34, 2965; Pyle et al., International PCT Publication No. WO 96/22689; of the Group I intron by Cech et al., U.S. Pat. No. 4,987,071; of Zinzymes as is generally described by Beigelman et al., International PCT publication No. WO 99/55857 (see for example FIG. 32); and of DNAzymes as is generally described by Usman et al., International PCT Publication No. WO 95/11304; Chartrand et al., 1995, NAR 23, 4092; Breaker et al., 1995, Chem. Bio. 2, 655; Santoro et al., 1997, PNAS 94, 4262 (see for example FIG. 33). NCH cleaving motifs are described in Ludwig & Sproat, International PCT Publication No. WO 98/58058; and G-cleavers are described in Kore et al., 1998, Nucleic Acids Research 26, 4116-4120 and Eckstein et al., International PCT Publication No. WO 99/16871. These specific motifs are not limiting in the invention and those skilled in the art will recognize that all that is important in an enzymatic nucleic acid molecule of this invention is that it has a specific substrate binding site which is complementary to one or more of the target gene RNA regions, and that it have nucleotide sequences within or surrounding that substrate binding site which impart an RNA cleaving activity to the molecule (Cech et al., U.S. Pat. No. 4,987,071).

[0062] Enzymatic nucleic acid molecules of the invention that are allosterically regulated (“allozymes”) can be used to modulate VEGR receptor expression. These allosteric enzymatic nucleic acids or allozymes (see for example George et al., U.S. Pat. Nos. 5,834,186 and 5,741,679, Shih et al., U.S. Pat. No. 5,589,332, Nathan et al., U.S. Pat. No. 5,871,914, Nathan and Ellington, International PCT publication No. WO 00/24931, Breaker et al., International PCT Publication Nos. WO 00/26226 and 98/27104, and Sullenger et al., International PCT publication No. WO 99/29842) are designed to respond to a signaling agent. For example, allozymes can be designed to respond to signaling agents, such as flt-1 or kdr protein, flt-1 or kdr RNA, other proteins and/or RNAs involved in VEGF activity, and also, for example, compounds, metals, polymers, molecules and/or drugs that are targeted to VEGF or VEGF receptor, such as flt-1 or kdr expressing cells etc., which in turn modulate the activity of the enzymatic nucleic acid molecule. In response to interaction with a predetermined signaling agent, the activity of the allosteric enzymatic nucleic acid molecule is activated or inhibited such that the expression of a particular target is selectively down-regulated. The target can comprise flt-1 or kdr and/or a predetermined cellular component or receptor that modulates VEGF activity.

[0063] In a specific example, allosteric enzymatic nucleic acid molecules that are activated by interaction with a RNA encoding a flt-1 protein are used as therapeutic agents in vivo. The presence of RNA encoding the flt-1 protein activates the allosteric enzymatic nucleic acid molecule that subsequently cleaves the RNA encoding the fit-1 protein, resulting in the inhibition of flt-1 protein expression. In this manner, cells that express the flt-1 protein are selectively targeted.

[0064] In another non-limiting example, an allozyme can be activated by an flt-1 protein or peptide that caused the allozyme to inhibit the expression of flt-1 gene by, for example, cleaving RNA encoded by flt-1 gene. In this non-limiting example, the allozyme acts as a decoy to inhibit the function of flt-1 and also inhibit the expression of flt-1 once activated by the flt-1 protein.

[0065] In one embodiment, the nucleic acid molecule of the invention, e.g., antisense molecule, triplex DNA, or ribozyme, is 13 to 100 nucleotides in length, e.g., in specific embodiments 35, 36, 37, or 38 nucleotides in length (e.g., for particular ribozymes). In particular embodiments, the nucleic acid molecule is 15-100, 17-100, 20-100, 21-100, 23-100, 25-100, 27-100, 30-100, 32-100, 35-100, 40-100, 50-100, 60-100, 70-100, or 80-100 nucleotides in length. Instead of 100 nucleotides being the upper limit on the length ranges specified above, the upper limit of the length range can be, for example, 30, 40, 50, 60, 70, or 80 nucleotides. Thus, for any of the length ranges, the length range for particular embodiments has a lower limit as specified, with an upper limit as specified which is greater than the lower limit. For example, in a particular embodiment, the length range can be 35-50 nucleotides in length. All such ranges are expressly included. Also in particular embodiments, a nucleic acid molecule can have a length which is any of the lengths specified above, for example, 21 nucleotides in length.

[0066] In one embodiment, the invention provides a method for producing a class of enzymatic cleaving agents which exhibit a high degree of specificity for the RNA of a desired target. The enzymatic nucleic acid molecule is preferably targeted to a highly conserved sequence region of target mRNAs encoding VEGF-R proteins (specifically flt-1 and flk-1/KDR) such that specific treatment of a disease or condition can be provided with either one or several enzymatic nucleic acids. Such enzymatic nucleic acid molecules can be delivered exogenously to specific tissue or cellular targets as required. Alternatively, the enzymatic nucleic acid molecules can be expressed from DNA and/or RNA vectors that are delivered to specific cells.

[0067] By “highly conserved sequence region” is meant a nucleotide sequence of one or more regions in a nucleic acid molecule that does not vary significantly from one generation to the other or from one biological system to the other.

[0068] Synthesis of nucleic acids greater than 100 nucleotides in length is difficult using automated methods, and the therapeutic cost of such molecules is prohibitive. In this invention, small nucleic acid motifs (e.g., antisense oligonucleotides, hammerhead or the hairpin ribozymes) are used for exogenous delivery. The simple structure of these molecules increases the ability of the nucleic acid to invade targeted regions of the mRNA structure. However, these nucleic acid molecules can also be expressed within cells from eukaryotic promoters (e.g., Izant and Weintraub, 1985 Science 229, 345; McGarry and Lindquist, 1986 Proc. Natl. Acad. Sci. USA 83, 399; SullengerScanlon et al., 1991, Proc. Natl. Acad. Sci. USA, 88, 10591-5; Kashani-Sabet et al., 1992 Antisense Res. Dev., 2, 3-15; Dropulic et al., 1992 J. Virol, 66, 1432-41; Weerasinghe et al., 1991 J. Virol, 65, 5531-4; Ojwang et al., 1992 Proc. Natl. Acad. Sci. USA 89, 10802-6; Chen et al., 1992 Nucleic Acids Res., 20, 4581-9; Sarver et al., 1990 Science 247, 1222-1225; Thompson et al., 1995 Nucleic Acids Res. 23, 2259). Those skilled in the art realize that any nucleic acid can be expressed in eukaryotic cells from the appropriate DNA/RNA vector. The activity of such nucleic acids can be augmented by their release from the primary transcript by a ribozyme (Draper et al., PCT WO93/23569, and Sullivan et al., PCT WO94/02595, both hereby incorporated in their totality by reference herein; Ohkawa et al., 1992 Nucleic Acids Symp. Ser., 27, 15-6; Taira et al., 1991, Nucleic Acids Res., 19, 5125-30; Ventura et al., 1993 Nucleic Acids Res., 21, 3249-55; Chowrira et al., 1994 J. Biol. Chem. 269, 25856).

[0069] The nucleic acid molecules of the invention are useful for the prevention of diseases and conditions related to the level of VEGF-R, including cancer (including but not limited to tumor and cancer types shown under Diagnosis in Table XX), diabetic retinopathy, macular degeneration, neovascular glaucoma, myopic degeneration, arthritis, psoriasis, verruca vulgaris, angiofibroma of tuberous sclerosis, pot-wine stains, Sturge Weber syndrome, Kippel-Trenaunay-Weber syndrome, Osler-Weber-Rendu syndrome and any other diseases or conditions that are related to the levels of VEGF-R (specifically flt-1 and flk-1/KDR) in a cell or tissue.

[0070] By “diseases or conditions related to the level of VEGF-R” is meant that the reduction of VEGF-R (specifically flt-1 and flk-1/KDR) RNA levels and thus reduction in the level of the respective protein will relieve, to some extent, the symptoms of the disease or condition.

[0071] Nucleic acid molecules of the invention are added directly, or can be complexed with cationic lipids, packaged within liposomes, or otherwise delivered to target cells or tissues. The nucleic acid or nucleic acid complexes can be locally administered to relevant tissues ex vivo, or in vivo through injection, infusion pump or stent, with or without their incorporation in biopolymers.

[0072] In one embodiment, the enzymatic nucleic acid molecule of the invention has one or more binding arms which are complementary to the substrate sequences in Tables II to IX, XIV-XIX, XXII, and XXIII. Examples of such enzymatic nucleic acid molecules also are shown in Tables II to IX, XIV-XIX, XXII, and XXIII. Examples of such enzymatic nucleic acid molecules consist essentially of sequences defined in these Tables.

[0073] In yet another embodiment, the invention features antisense nucleic acid molecules and 2-5A chimera including sequences complementary to the target sequences shown in Tables II to IX, XIV-XIX, XXII, and XXIII. Such nucleic acid molecules can include sequences as shown for the binding arms of the enzymatic nucleic acid molecules in Tables II to IX, XIV-XIX, XXII, and XXIII. Similarly, triplex molecules can be provided targeted to the corresponding DNA target regions, and containing the DNA equivalent of a target sequence or a sequence complementary to the specified target (substrate) sequence. Typically, antisense molecules are complementary to a target sequence along a single contiguous sequence of the antisense molecule. However, in certain embodiments, an antisense molecule can bind to substrate such that the substrate molecule forms a loop, and/or an antisense molecule can bind such that the antisense molecule forms a loop. Thus, the antisense molecule can be complementary to two (or even more) non-contiguous substrate sequences or two (or even more) non-contiguous sequence portions of an antisense molecule can be complementary to a target sequence or both.

[0074] By “consists essentially of” is meant that the active nucleic acid molecule of the invention, for example, an enzymatic nucleic acid molecule, contains an enzymatic center or core equivalent to those in the examples, and binding arms able to bind RNA such that cleavage at the target site occurs. Other sequences can be present that do not interfere with such cleavage. Thus, a core region can, for example, include one or more loop, stem-loop structure, or linker that does not prevent enzymatic activity. Thus, the underlined regions in the sequences in Tables II, IV, VI, VIII, XIV and XVI can be such a loop, stem-loop, nucleotide linker, and/or non-nucleotide linker and can be represented generally as sequence “X”. For example, a core sequence for a hammerhead enzymatic nucleic acid can comprise a conserved sequence, such as 5′-CUGAUGAG-3′ and 5′-CGAA-3′ connected by “X”, where X is 5′-GCCGUUAGGC-3′ (SEQ ID NO: 20822), or any other Stem II region known in the art, or a nucleotide and/or non-nucleotide linker. Similarly, for other nucleic acid molecules of the instant invention, such as Inozyme, G-cleaver, amberzyme, zinzyme, DNAzyme, antisense, 2-5A antisense, triplex forming nucleic acid, and decoy nucleic acids, other sequences or non-nucleotide linkers can be present that do not interfere with the function of the nucleic acid molecule.

[0075] X can be a linker of ≧2 nucleotides in length, preferably 3, 4, 5, 6, 7, 8, 9, 10, 15, 20, 26, 30, where the nucleotides can preferably be internally base-paired to form a stem of preferably ≧2 base pairs. Alternatively or in addition, X may be a non-nucleotide linker. In yet another embodiment, the nucleotide linker (X) can be a nucleic acid aptamer, such as an ATP aptamer, HIV Rev aptamer (RRE), HIV Tat aptamer (TAR) and others (for a review see Gold et al., 1995, Annu. Rev. Biochem., 64, 763; and Szostak & Ellington, 1993, in The RNA World, ed. Gesteland and Atkins, pp. 511, CSH Laboratory Press).

[0076] A “nucleic acid aptamer” as used herein is meant to indicate a nucleic acid sequence capable of interacting with a ligand. The ligand can be any natural or a synthetic molecule, including but not limited to a resin, metabolites, nucleosides, nucleotides, drugs, toxins, transition state analogs, peptides, lipids, proteins, amino acids, nucleic acid molecules, hormones, carbohydrates, receptors, cells, viruses, bacteria and others.

[0077] In yet another embodiment, the non-nucleotide linker (X) is as defined herein. The term “non-nucleotide” as used herein include either abasic nucleotide, polyether, polyamine, polyamide, peptide, carbohydrate, lipid, or polyhydrocarbon compounds. Specific examples include those described by Seela and Kaiser, Nucleic Acids Res. 1990, 18:6353 and Nucleic Acids Res. 1987, 15:3113; Cload and Schepartz, J. Am. Chem. Soc. 1991, 113:6324; Richardson and Schepartz, J. Am. Chem. Soc. 1991, 113:5109; Ma et al., Nucleic Acids Res. 1993, 21:2585 and Biochemistry 1993, 32:1751; Durand et al., Nucleic Acids Res. 1990, 18:6353; McCurdy et al., Nucleosides & Nucleotides 1991, 10:287; Jschke et al., Tetrahedron Lett. 1993, 34:301; Ono et al., Biochemistry 1991, 30:9914; Arnold et al., International Publication No. WO 89/02439; Usman et al., International Publication No. WO 95/06731; Dudycz et al., International Publication No. WO 95/11910 and Ferentz and Verdine, J. Am. Chem. Soc. 1991, 113:4000, all hereby incorporated by reference herein. A “non-nucleotide” further means any group or compound which can be incorporated into a nucleic acid chain in the place of one or more nucleotide units, including either sugar and/or phosphate substitutions, and allows the remaining bases to exhibit their enzymatic activity. The group or compound can be abasic in that it does not contain a commonly recognized nucleotide base, such as adenosine, guanine, cytosine, uracil or thymine. Thus, in one embodiment, the invention features an enzymatic nucleic acid molecule having one or more non-nucleotide moieties, and having enzymatic activity to cleave an RNA or DNA molecule.

[0078] In another aspect of the invention, enzymatic nucleic acid molecules that cleave target RNA molecules and inhibit VEGF-R (specifically flt-1 and flk-1/KDR) activity are expressed from transcription units inserted into DNA or RNA vectors. The recombinant vectors are preferably DNA plasmids or viral vectors. Enzymatic nucleic acid expressing viral vectors can be constructed based on, but not limited to, adeno-associated virus, retrovirus, adenovirus, or alphavirus vectors. Preferably, the recombinant vectors capable of expressing the enzymatic nucleic acid molecules are delivered as described above, and persist in target cells. Alternatively, viral vectors can be used that provide for transient expression of enzymatic nucleic acids. Such vectors can be repeatedly administered as necessary. Once expressed, the enzymatic nucleic acids cleave the target mRNA. Delivery of enzymatic nucleic acids expressing vectors can be systemic, such as by intravenous or intramuscular administration, by administration to target cells ex-planted from the patient followed by reintroduction into the patient, or by any other means that would allow for introduction into the desired target cell.

[0079] By “vectors” is meant any nucleic acid- and/or viral-based technique used to deliver a desired nucleic acid.

[0080] By “patient” is meant an organism which is a donor or recipient of explanted cells or the cells themselves. “Patient” also refers to an organism to which the nucleic acid molecules of the invention can be administered. In one embodiment, the patient is a mammal or mammalian cells. Preferably, the patient is a human or human cells.

[0081] The nucleic acid molecules of the instant invention, individually, or in combination or in conjunction with other drugs, can be used to treat diseases or conditions discussed above. For example, to treat a disease or condition associated with VEGF-R, the patient can be treated, or other appropriate cells can be treated, as is evident to those skilled in the art, individually with a nucleic acid molecule of the invention or in combination with one or more drugs under conditions suitable for the treatment.

[0082] For example, to treat a disease or condition associated with VEGF-R levels, such as cancer (e.g., colorectal cancer, breast cancer) or ocular diseases (e.g., diabetic retinopathy or age related macular degeneration) a patient may be treated, or other appropriate cells may be treated, as is evident to those skilled in the art, individually or in combination with one or more drugs under conditions suitable for the treatment.

[0083] In a further embodiment, the described molecules, such as antisense or enzymatic nucleic acid molecules can be used in combination with other known treatments to treat conditions or diseases discussed above. For example, the described molecules can be used in combination with one or more known therapeutic agents to treat cancer.

[0084] In another embodiment, the invention features nucleic acid-based techniques (e.g., enzymatic nucleic acid molecules (ribozymes such as Inozyme, G-cleaver, amberzyme, zinzyme), DNAzyme, antisense nucleic acids, 2-5A antisense chimeras, triplex forming nucleic acid, decoy nucleic acids, aptamers, allozymes, antisense nucleic acids containing RNA cleaving chemical groups (Cook et al., U.S. Pat. No. 5,359,051)] and methods for their use to down regulate or inhibit the expression of genes capable of inducing angiogenesis (e.g., flt-1 and kdr).

[0085] In another embodiment, the invention features nucleic acid-based techniques (e.g., enzymatic nucleic acid molecules (ribozymes such as Inozyme, G-cleaver, amberzyme, zinzyme), DNAzyme, antisense nucleic acids, 2-5A antisense chimeras, triplex forming nucleic acid, decoy nucleic acids, aptamers, allozymes, antisense nucleic acids containing RNA cleaving chemical groups (Cook et al., U.S. Pat. No. 5,359,051)] and methods for their use to down regulate or inhibit the expression of VEGF receptor.

[0086] Other features and advantages of the invention will be apparent from the following description of the preferred embodiments thereof, and from the claims.

### BRIEF DESCRIPTION OF THE DRAWINGS

[0087] FIG. 1 is a diagrammatic representation of the hammerhead ribozyme domain known in the art. Stem II can be ≧2 base-pair long.

[0088] FIGS. 2a-d show hammerhead ribozyme substrate motifs. FIG. 2a is a diagrammatic representation of the hammerhead ribozyme domain known in the art; FIG. 2b is a diagrammatic representation of the hammerhead ribozyme as divided by Uhlenbeck (1987, Nature, 327, 596-600) into a substrate and enzyme portion; FIG. 2c is a similar diagram showing the hammerhead divided by Haseloff and Gerlach (1988, Nature, 334, 585-591) into two portions; and FIG. 2d is a similar diagram showing the hammerhead divided by Jeffries and Symons (1989, Nucl. Acids. Res., 17, 1371-1371) into two portions.

[0089] FIG. 3 is a diagrammatic representation of the general structure of a hairpin ribozyme. Helix 2 (H2) is provided with at least 4 base pairs (i.e., n is 1, 2, 3 or 4) and helix 5 can be optionally provided of length 2 or more bases (preferably 3-20 bases, i.e., m is from 1-20 or more). Helix 2 and helix 5 can be covalently linked by one or more bases (i.e., r is ≧1 base). Helix 1, 4 or 5 can also be extended by 2 or more base pairs (e.g., 4-20 base pairs) to stabilize the ribozyme structure, and preferably is a protein binding site. In each instance, each N and N′ independently is any normal or modified base and each dash represents a potential base-pairing interaction. These nucleotides can be modified at the sugar, base or phosphate. Complete base-pairing is not required in the helices, but is preferred. Helix 1 and 4 can be of any size (i.e., o and p is each independently from 0 to any number, e.g., 20) as long as some base-pairing is maintained. Essential bases are shown as specific bases in the structure, but those in the art will recognize that one or more can be modified chemically (abasic, base, sugar and/or phosphate modifications) or replaced with another base without significant effect. Helix 4 can be formed from two separate molecules, i.e., without a connecting loop. The connecting loop when present can be a ribonucleotide with or without modifications to its base, sugar or phosphate. “q” is ≧2 bases. The connecting loop can also be replaced with a non-nucleotide linker molecule. H refers to bases A, U, or C. Y refers to pyrimidine bases. “______” refers to a covalent bond.

[0090] FIG. 4 is a representation of the general structure of the hepatitis delta virus ribozyme domain known in the art.

[0091] FIG. 5 is a representation of the general structure of the VS RNA ribozyme domain.

[0092] FIG. 6 is a schematic representation of an RNAseH accessibility assay. Specifically, the left side of FIG. 6 is a diagram of complementary DNA oligonucleotides bound to accessible sites on the target RNA. Complementary DNA oligonucleotides are represented by broad lines labeled A, B, and C. Target RNA is represented by the thin, twisted line. The right side of FIG. 6 is a schematic of a gel separation of uncut target RNA from a cleaved target RNA. Detection of target RNA is by autoradiography of body-labeled, T7 transcript. The bands common to each lane represent uncleaved target RNA; the bands unique to each lane represent the cleaved products.

[0093] FIG. 7 shows the effect of hammerhead ribozymes targeted against flt-1 receptor on the binding of VEGF to the surface of human microvascular endothelial cells. Sequences of the ribozymes used are shown in Table II; the length of stem II region is 3 bp. The hammerhead ribozymes were chemically modified such that the ribozyme consists of ribose residues at five positions (see FIG. 11); U4 and U7 positions contain 2′-NH₂ modifications, the remaining nucleotide positions contain 2′-O-methyl substitutions; four nucleotides at the 5′ terminus contains phosphorothioate substitutions. Additionally, the 3′ end of the ribozyme contains a 3′-3′ linked inverted abasic deoxyribose. The results of two separate experiments are shown as separate bars for each set. Each bar represents the average of triplicate samples. The standard deviation is shown with error bars. For the fit-1 data, 500 nM ribozyme (3:1 charge ratio with LipofectAMINE®) was used. Control 1-10 is the control for ribozymes 307-2797, control 11-20 is the control for ribozymes 3008-5585. The Control 1-10 and Control 11-20 represent the treatment of cells with LipofectAMINE® alone without any ribozymes.

[0094] FIG. 8 shows the effect of hammerhead ribozymes targeted against KDR receptor on the binding of VEGF to KDR on the surface of human microvascular endothelial cells. Sequences of the ribozymes used are shown in Table IV; the length of stem II region is 3 bp. The hammerhead ribozymes were chemically modified such that the ribozyme consists of ribose residues at five positions (see FIG. 11); U4 and U7 positions contain 2′-NH₂ modifications, the remaining nucleotide positions contain 2′-O-methyl substitutions; four nucleotides at the 5′ terminus contains phosphorothioate substitutions. Additionally, the 3′ end of the ribozyme contains a 3′-3′ linked inverted abasic deoxyribose. The Control 1-10 and Control 11-20 represent the treatment of cells with LipofectAMINE® alone without any ribozymes. Irrel. RZ, is a control experiment wherein the cells are treated with a non-KDR-targeted ribozyme complexed with Lipofectamine®. 200 nM ribozyme (3:1 charge ratio with LipofectAMINE®) was used. In addition to the KDR-targeted ribozymes, the effect on VEGF binding of a ribozyme targeted to an irrelevant mRNA (irrel. RZ) is also shown. Because the affinity of KDR for VEGF is about 10-fold lower than the affinity of flt-1 for VEGF, a higher concentration of VEGF was used in the binding assay.

[0095] FIG. 9 shows the specificity of hammerhead ribozymes targeted against flt-1 receptor. Inhibition of the binding of VEGF, urokinase plasminogen activator (UPA) and fibroblast growth factor (FGF) to their corresponding receptors as a function of anti-FLT ribozymes is shown. The sequence and description of the ribozymes used are as described in FIG. 7 above. The average of triplicate samples is given; percent inhibition as calculated below.

[0096] FIG. 10 shows the inhibition of the proliferation of Human aortic endothelial cells (HAEC) mediated by phosphorothioate antisense oligodeoxynucleotides targeted against human KDR receptor RNA. Cell proliferation (O.D. 490) as a function of antisense oligodeoxynucleotide concentration is shown. KDR 21AS represents a 21 nt phosphorothioate antisense oligodeoxynucleotide targeted against KDR RNA. KDR 21 Scram represents a 21 nt phosphorothioate oligodeoxynucleotide having a scrambled sequence. LF represents the lipid carrier Lipofectin.

[0097] FIGS. 11A and B show a diagrammatic representation of hammerhead ribozymes targeted against flt-1 RNA and in vitro cleavage of flt-1 RNA by hammerhead ribozymes. The hammerhead (HH) ribozymes were chemically modified such that the ribozyme consists of ribose residues at five positions; U4 and U7 positions contain 2′-NH₂ modifications, the remaining nucleotide positions contain 2′-O-methyl substitutions; four nucleotides at the 5′ terminus contains phosphorothioate substitutions. Additionally, the 3′ end of the ribozyme contains a 3′-3′ linked inverted abasic deoxyribose (designated as 3′-1H). FIG. 11A shows hammerhead ribozymes 1358 HH-A and 4229 HH-A, which contain a 3 base-paired stem II region. FIG. 11B shows hammerhead ribozymes 1358 HH-B and 4229 HH-B, which contain a 4 base-paired stem II region.

[0098] FIG. 12 shows a diagrammatic representation of hammerhead (HH) ribozymes targeted against sites 1358 and 4229 within the flt-1 RNA. The hammerhead (HH) ribozymes were chemically modified such that the ribozyme consists of ribose residues at five positions; U4 position contains 2′-C-allyl modification, the remaining nucleotide positions contain 2′-O-methyl substitutions; four nucleotides at the 5′ terminus contains phosphorothioate substitutions. Additionally, the 3′ end of the ribozyme contains a 3′-3′ linked inverted abasic deoxyribose (designated as 3′-iH).

[0099] FIG. 13 shows inhibition of human microvascular endothelial cell proliferation mediated by anti-KDR hammerhead ribozymes. The figure is a graphical representation of the inhibition of cell proliferation mediated by hammerhead ribozymes targeted against sites 527, 730, 3702 and 3950 within the KDR RNA. Irrelevant HH RZ is a hammerhead ribozyme targeted to an irrelevant target. All of these ribozymes, including the Irrelevant HH RZ, were chemically modified such that the ribozyme consists of ribose residues at five positions; U4 and U7 positions contain 2′-NH₂ modifications, the remaining nucleotide positions contain 2′-O-methyl substitutions; four nucleotides at the 5′ termini contain phosphorothioate substitutions. Additionally, the 3′ end of the ribozyme contains a 3′-3′ linked inverted abasic deoxyribose (3′-iH).

[0100] FIG. 14 shows in vitro cleavage of KDR RNA by hammerhead ribozymes. The hammerhead (HH) ribozymes were chemically modified such that the ribozyme consists of ribose residues at five positions; U4 and U7 positions contain 2′-NH₂ modifications, the remaining nucleotide positions contain 2′-O-methyl substitutions. Additionally, the 3′ end of the ribozyme contains a 3′-3′ linked inverted abasic deoxyribose (designated as 3′-iH). 726 HH and 527 HH contain 4 base-paired stem II region. Percent in vitro cleavage kinetics as a function of time of HH ribozymes targeted against sites 527 and 726 within the KDR RNA is shown.

[0101] FIG. 15 shows in vitro cleavage of KDR RNA by hammerhead ribozymes. The hammerhead (HH) ribozymes were chemically modified such that the ribozyme consists of ribose residues at five positions; U4 and U7 positions contain 2′-NH₂ modifications, the remaining nucleotide positions contain 2′-O-methyl substitutions. Additionally, the 3′ end of the ribozyme contains a 3′-3′ linked inverted abasic deoxyribose (designated as 3′-iH). 3702 HH and 3950 HH contain 4 base-paired stem II region. Percent in vitro cleavage kinetics as a function of time of HH ribozymes targeted against sites 3702 and 3950 within the KDR RNA is shown.

[0102] FIG. 16 shows in vitro cleavage of RNA by hammerhead ribozymes that are targeted to sites that are conserved between flt-1 and KDR RNA. The hammerhead (HH) ribozymes were chemically modified such that the ribozyme consists of ribose residues at five positions; U4 and U7 positions contain 2′-NH₂ modifications, the remaining nucleotide positions contain 2′-O-methyl substitutions. Additionally, the 3′ end of the ribozyme contains a 3′-3′ linked inverted abasic deoxyribose (designated as 3′-iH). FLT/KDR-IHH ribozyme was synthesized with either a 4 base-paired or a 3 base-paired stem II region. FLT/KDR-IHH can cleave site 3388 within fit-1 RNA and site 3151 within KDR RNA. Percent in vitro cleavage kinetics as a function of time of HH ribozymes targeted against sites 3702 and 3950 within the KDR RNA is shown.

[0103] FIG. 17 shows inhibition of human microvascular endothelial cell proliferation mediated by anti-KDR and anti-flt-1 hammerhead ribozymes. The figure is a graphical representation of the inhibition of cell proliferation mediated by hammerhead ribozymes targeted against sites KDR sites-527, 726 or 3950 or flt-1 site 4229. The figure also shows enhanced inhibition of cell proliferation by a combination of fit-1 and KDR hammerhead ribozymes. 4229+527, indicates the treatment of cells with both the fit 4229 and the KDR 527 ribozymes. 4229+726, indicates the treatment of cells with both the fit 4229 and the KDR 726 ribozymes. 4229+3950, indicates the treatment of cells with both the fit 4229 and the KDR 3950 ribozymes. VEGF−, indicates the basal level of cell proliferation in the absence of VEGF. A, indicates catalytically active ribozyme; I, indicates catalytically inactive ribozyme. All of these ribozymes were chemically modified such that the ribozyme consists of ribose residues at five positions; U4 and U7 positions contain 2′-NH₂ modifications, the remaining nucleotide positions contain 2′-O-methyl substitutions; four nucleotides at the 5′ termini contain phosphorothioate substitutions. Additionally, the 3′ end of the ribozyme contains a 3′-3′ linked inverted abasic deoxyribose (3′-iH).

[0104] FIG. 18 shows the inhibition of VEGF-induced angiogenesis in rat cornea mediated by anti-flt-1 hammerhead ribozyme. All of these ribozymes were chemically modified such that the ribozyme consists of ribose residues at five positions; U4 position contains 2′-C-allyl modifications, the remaining nucleotide positions contain 2′-O-methyl substitutions; four nucleotides at the 5′ termini contain phosphorothioate substitutions. Additionally, the 3′ end of the ribozyme contains a 3′-3′ linked inverted abasic deoxyribose (3′-iH). A decrease in the Surface Area corresponds to a reduction in angiogenesis. VEGF alone corresponds to treatment of the cornea with VEGF and no ribozymes. Vehicle alone corresponds to the treatment of the cornea with the carrier alone and no VEGF. This control gives a basal level of Surface Area. Active 4229 HH, corresponds to the treatment of cornea with the flt-1 4229 HH ribozyme in the absence of any VEGF. This control also gives a basal level of Surface Area. Active 4229 HH+VEGF, corresponds to the co-treatment of cornea with the flt-1 4229 HH ribozyme and VEGF. Inactive 4229 HH+VEGF, corresponds to the co-treatment of cornea with a catalytically inactive version of 4229 HH ribozyme and VEGF.

[0105] FIG. 19 shows ribozyme-mediated inhibition of cell proliferation. Cultured HMVEC-d were treated with ribozyme or attenuated controls as LIPOFECTAMINE™ complexes. After treatment, cells were stimulated with VEGF₁₆₅ or bFGF and allowed to grow for 48 h prior to determining the cell number. Each ribozyme was tested in triplicate at three concentrations and data are presented as mean cell number per well+SD. The data obtained following ribozyme treatment and VEGF stimulation are presented in panels A & B for anti-Flt-1 ribozymes and panels D & E for anti-KDR ribozymes. Representative data obtained following ribozyme treatment and bFGF stimulation are shown in panel C for one anti-Flt-1 ribozyme and in panel F for one anti-KDR ribozyme. In all panels, active ribozymes are represented with filled symbols; attenuated controls with open symbols. In addition to the ribozymes and attenuated controls listed in Table XII, a second set having the same sequences but with an additional basepair in the “stem II” region of the ribozyme are also shown for VEGF-induced proliferation studies. These 4 bp stem II ribozymes and attenuated controls have one additional base pair such that the stem II/loop sequence is ggccgaaaggcc. Therefore, ribozymes and controls with 3 or 4 basepair stem IIs are denoted with circles and squares, respectively. The data for one irrelevant ribozyme (filled triangle, panel B) are also shown. This irrelevant ribozyme contains an active core sequence but has no binding site in either Flt-1 or KDR mRNA. Its sequence is 5′-gₛaₛaₛgₛgaacUGAuGaggccgaaaggccGaaAgauggcT-3′ with modifications as in Table XII except that T indicates a 3′-3′ inverted deoxythymidine. For reference, the average number of cells in control wells after 48 h in the absence of VEGF or bFGF for each of the panels are as follows: A, B, C, 12477±617; D, E, F, 17182±1053.

[0106] FIG. 20 shows target specificity of anti-Flt-1 and KDR ribozymes. Cultured HMVEC-d were treated with LIPOFECTAMINE™ complexes containing 200 nM active ribozyme (A) or attenuated control (C) and analyzed by RNAse protection following 24 h of VEGF-stimulated growth. Data obtained for ribozymes and attenuated controls that target Flt-1 site 4229 or KDR site 726 are shown. Data were normalized to the level of an internal mRNA control (cyclophilin) and are presented as percent decrease in Flt-1 (left panel) or KDR mRNA (right panel) relative to an untreated control. Error bars indicate the range of duplicate samples.

[0107] FIG. 21 shows antiangiogenic efficacy of ribozyme in the rat corneal model of VEGF-induced angiogenesis. The percent inhibition of VEGF-induced angiogenesis for locally administered anti-Flt-1 (site 4229) ribozyme (filled circles) and their attenuated controls (open circles) are plotted over the dose range tested. Pixels associated with background structures including the iris were subtracted from all treatment groups. Data are expressed as mean percent reduction in VEGF-induced angiogenesis±SEM. *p<0.05 relative to VEGF/vehicle treated controls by Dunnett's, **p<0.05 relative to attenuated dose-matched controls by Tukey-Kramer.

[0108] FIG. 22 shows antiangiogenic efficacy of ribozyme in the rat corneal model of VEGF-induced angiogenesis. The percent inhibition of VEGF-induced angiogenesis for locally administered anti-KDR (site 726) ribozyme (filled circles) and their attenuated controls (open circles) are plotted over the dose range tested. Pixels associated with background structures including the iris were subtracted from all treatment groups. Data are expressed as mean percent reduction in VEGF-induced angiogenesis±SEM. *p<0.05 relative to VEGF/vehicle treated controls by Dunnett's, **p<0.05 relative to attenuated dose-matched controls by Tukey-Kramer.

[0109] FIG. 23 shows the effect of subcutaneous bolus administration of ANGIOZYME™ in a mouse Lewis Lung Carcinoma (LLC) model.

[0110] FIG. 24 shows the effect of ANGIOZYME™ in combination with gemcitabine or cyclophosphamide on primary tumor growth in the mouse LLC model.

[0111] FIG. 25 shows the effect of ANGIOZYME™ in combination with gemcitabine or cyclophosphamide on tumor metastases in the mouse LLC model.

[0112] FIG. 26 shows a secondary structure model of ANGIOZYME™ ribozyme bound to its RNA target.

[0113] FIG. 27 shows a time course of inhibition of primary tumor growth following systemic administration of ANGIOZYME™ in the LLC mouse model.

[0114] FIG. 28 shows inhibition of primary tumor growth following systemic administration of ANGIOZYME™ according to a certain dosing regimen in the LLC mouse model.

[0115] FIG. 29 shows a dose-dependent inhibition of tumor metastases following systemic administration of ANGIOZYME™ in a mouse colorectal model.

[0116] FIG. 30 shows inhibition of liver metastases following systemic administration of ANGIOZYME™ in a mouse colorectal model.

[0117] FIG. 31 is a graph showing the plasma concentration profile of ANGIOZYME™ after a single subcutaneous (SC) dose of 10, 30, 100 or 300 mg/m².

[0118] FIG. 32 shows an example of the Zinzyme enzymatic nucleic acid motif that is chemically stabilized (see for example Beigelman et al., International PCT publication No. WO 99/55857, incorporated by reference herein; also referred to as Class A or Class II Motif). The Zinzyme motif is a class of enzymatic nucleic molecules that do not require the presence of a ribonucleotide (2′-OH) group for its activity.

[0119] FIG. 33 shows an example of a DNAzyme motif described generally, for example in Santoro et al., 1997, PNAS, 94, 4262.

[0120] FIGS. 34A and B show a mouse model protocol and results of proliferative retinopathy. FIG. 34A shows anoutline for the mouse model of proliferative retinopathy showing the points of ribozyme administration. FIG. 34B shows a graph demonstrating the efficacy of a VEGF-receptor-targeted enzymatic nucleic acid molecule in a mouse model of proliferative retinopathy.

### DETAILED DESCRIPTION OF THE INVENTION

[0121] Mechanism of Action of Nucleic Acid Molecules of the Invention

[0122] Antisense: Antisense molecules can be modified or unmodified RNA, DNA, or mixed polymer oligonucleotides and primarily function by specifically binding to matching sequences resulting in inhibition of peptide synthesis (Wu-Pong, November 1994, BioPharm, 20-33). The antisense oligonucleotide binds to target RNA by Watson Crick base-pairing and blocks gene expression by preventing ribosomal translation of the bound sequences either by steric blocking or by activating RNase H enzyme. Antisense molecules can also alter protein synthesis by interfering with RNA processing or transport from the nucleus into the cytoplasm (Mukhopadhyay & Roth, 1996, Crit. Rev. in Oncogenesis 7, 151-190).

[0123] In addition, binding of single stranded DNA to RNA can result in nuclease degradation of the heteroduplex (Wu-Pong, supra; Crooke, supra). To date, the only backbone modified DNA chemistry which acts as substrates for RNase H are phosphorothioates and phosphorodithioates. Recently it has been reported that 2′-arabino and 2′-fluoro arabino-containing oligos can also activate RNase H activity.

[0124] A number of antisense molecules have been described that utilize novel configurations of chemically modified nucleotides, secondary structure, and/or RNase H substrate domains (Woolf et al., International PCT Publication No. WO 98/13526; Thompson et al., U.S. Ser. No. 60/082,404 which was filed on Apr. 20, 1998; Hartmann et al., U.S. Ser. No. 60/101,174 which was filed on Sep. 21, 1998) all of these are incorporated by reference herein in their entirety.

[0125] Triplex Forming Oligonucleotides (TFO): Single stranded DNA can be designed to bind to genomic DNA in a sequence specific manner. TFOs are comprised of pyrimidine-rich oligonucleotides which bind DNA helices through Hoogsteen Base-pairing (Wu-Pong, supra). The resulting triple helix composed of the DNA sense, DNA antisense, and TFO disrupts RNA synthesis by RNA polymerase. The TFO mechanism can result in gene expression or cell death since binding may be irreversible (Mukhopadhyay & Roth, supra).

[0126] 2-5A Antisense Chimera: The 2-5A system is an interferon mediated mechanism for RNA degradation found in higher vertebrates (Mitra et al., 1996, Proc Nat Acad Sci USA 93, 6780-6785). Two types of enzymes, 2-5A synthetase and RNase L, are required for RNA cleavage. The 2-5A synthetases require double stranded RNA to form 2′-5′ oligoadenylates (2-5A). 2-5A then acts as an allosteric effector for utilizing RNase L which has the ability to cleave single stranded RNA. The ability to form 2-5A structures with double stranded RNA makes this system particularly useful for inhibition of viral replication.

[0127] (2′-5′) oligoadenylate structures can be covalently linked to antisense molecules to form chimeric oligonucleotides capable of RNA cleavage (Torrence, supra). These molecules putatively bind and activate a 2-5A dependent RNase, the oligonucleotide/enzyme complex then binds to a target RNA molecule which can then be cleaved by the RNase enzyme.

[0128] Enzymatic Nucleic Acid: Seven basic varieties of naturally-occurring enzymatic RNAs are presently known. In addition, several in vitro selection (evolution) strategies (Orgel, 1979, Proc. R. Soc. London, B 205, 435) have been used to evolve new nucleic acid catalysts capable of catalyzing cleavage and ligation of phosphodiester linkages (Joyce, 1989, Gene, 82, 83-87; Beaudry et al., 1992, Science 257, 635-641; Joyce, 1992, Scientific American 267, 90-97; Breaker et al., 1994, TIBTECH 12, 268; Bartel et al., 1993, Science 261:1411-1418; Szostak, 1993, TIBS 17, 89-93; Kumar et al., 1995, FASEB J., 9, 1183; Breaker, 1996, Curr. Op. Biotech., 7, 442; Santoro et al., 1997, Proc. Natl. Acad. Sci., 94, 4262; Tang et al., 1997, RNA 3, 914; Nakamaye & Eckstein, 1994, supra; Long & Uhlenbeck, 1994, supra; Ishizaka et al., 1995, supra; Vaish et al., 1997, Biochemistry 36, 6495; all of these are incorporated by reference herein). Each can catalyze a series of reactions including the hydrolysis of phosphodiester bonds in trans (and thus can cleave other RNA molecules) under physiological conditions.

[0129] Enzymatic nucleic acid molecules of this invention block to some extent VEGF-R (specifically flt-1 and flk-1/KDR) production and can be used to treat disease or diagnose such disease. Enzymatic nucleic acid molecules are delivered to cells in culture, to cells or tissues in animal models of angiogenesis and/or RA and to human cells or tissues ex vivo or in vivo. Enzymatic nucleic acid molecule cleavage of VEGF-R RNAs (specifically RNAs that encode flt-1 and flk-1/KDR) in these systems can alleviate disease symptoms.

[0130] The enzymatic nature of enzymatic nucleic acid molecules, such as ribozymes, has significant advantages, such as the concentration of enzymatic nucleic acid necessary to affect a therapeutic treatment is lower. This advantage reflects the ability of the enucleic acid molecule to act enzymatically. Thus, a single enzymatic nucleic acid molecule is able to cleave many molecules of target RNA. In addition, the enzymatic nucleic acid molecule is a highly specific inhibitor, with the specificity of inhibition depending not only on the base-pairing mechanism of binding to the target RNA, but also on the mechanism of target RNA cleavage. Single mismatches, or base-substitutions, near the site of cleavage can be chosen to completely eliminate catalytic activity of an enzymatic nucleic acid molecule.

[0131] Nucleic acid molecules having an endonuclease enzymatic activity are able to repeatedly cleave other separate RNA molecules in a nucleotide base sequence-specific manner. Such enzymatic nucleic acid molecules can be targeted to virtually any RNA transcript, and achieved efficient cleavage in vitro (Zaug et al., 324, Nature 429 1986; Uhlenbeck, 1987 Nature 328, 596; Kim et al., 84 Proc. Natl. Acad. Sci. USA 8788, 1987; Dreyfus, 1988, Einstein Quart. J. Bio. Med., 6, 92; Haseloff and Gerlach, 334 Nature 585, 1988; Cech, 260 JAMA 3030, 1988; and Jefferies et al., 17 Nucleic Acids Research 1371, 1989; Santoro et al., 1997 supra).

[0132] Because of their sequence specificity, enzymatic nucleic acids, such as trans-cleaving ribozymes can be used as therapeutic agents for human disease (Usman & McSwiggen, 1995 Ann. Rep. Med. Chem. 30, 285-294; Christoffersen and Marr, 1995 J. Med. Chem. 38, 2023-2037). Enzymatic nucleic acid molecules can be designed to cleave specific RNA targets within the background of cellular RNA. Such a cleavage event renders the RNA non-functional and abrogates protein expression from that RNA. In this manner, synthesis of a protein associated with a disease state can be selectively inhibited.

[0133] Target sites

[0134] Targets for useful enzymatic nucleic acid molecules and antisense nucleic acids can be determined as disclosed in Draper et al., WO 93/23569; Sullivan et al., WO 93/23057; Thompson et al., WO 94/02595; Draper et al., WO 95/04818; McSwiggen et al., U.S. Pat. No. 5,525,468, and hereby incorporated by reference herein in totality. Other examples include the following PCT applications which concern inactivation of expression of disease-related genes: WO 95/23225, WO 95/13380, WO 94/02595, incorporated by reference herein. Rather than repeat the guidance provided in those documents here, below are provided specific examples of such methods, not limiting to those with skill in the art. Enzymatic nucleic acid molecules to such targets are designed as described in those applications and synthesized to be tested in vitro and in vivo, as also described. The sequence of human and mouse flt-1, KDR and/or flk-1 mRNAs were screened for optimal enzymatic nucleic acid target sites using a computer folding algorithn. Hammerhead, hairpin, NCH, or G-Cleaver ribozyme cleavage sites were identified. These sites are shown in Tables II to IX, XIV-XIX, XXII, and XXIII (all sequences are 5′ to 3′ in the tables; X can be any base-paired sequence, the actual sequence is not relevant here). The nucleotide base position is noted in the Tables as that site to be cleaved by the designated type of ribozyme. While mouse and human sequences can be screened and enzymatic nucleic acid molecules thereafter designed, the human targeted sequences are of most utility. However, as discussed in Stinchcomb et al., WO 95/23225, mouse targeted enzymatic nucleic acid can be useful to test efficacy of action of the enzymatic nucleic acid molecule prior to testing in humans. The nucleotide base position is noted in the Tables as that site to be cleaved by the designated type of enzymatic nucleic acid.

[0135] For example, hammerhead or hairpin ribozymes were designed that could bind and cleave target RNA in a sequence-specific manner. The ribozymes were individually analyzed by computer folding (Jaeger et al., 1989 Proc. Natl. Acad. Sci. USA, 86, 7706) to assess whether the ribozyme sequences fold into the appropriate secondary structure. Those ribozymes with unfavorable intramolecular interactions between the binding arms and the catalytic core were eliminated from consideration. Varying binding arm lengths can be chosen to optimize activity.

[0136] Referring to FIG. 6, mRNA was screened for accessible cleavage sites by the method described generally in Draper et al., PCT WO93/23569, hereby incorporated by reference herein. Briefly, DNA oligonucleotides complementary to potential hammerhead or hairpin ribozyme cleavage sites were synthesized. A polymerase chain reaction was used to generate substrates for T7 RNA polymerase transcription from human and mouse flt-1, KDR and/or flk-1 cDNA clones. Labeled RNA transcripts were synthesized in vitro from the templates. The oligonucleotides and the labeled transcripts were annealed, RNAseH was added and the mixtures were incubated for the designated times at 37° C. Reactions were stopped and RNA separated on sequencing polyacrylamide gels. The percentage of the substrate cleaved was determined by autoradiographic quantitation using a PhosphorImaging system. From these data, antisense oligonucleotides, and ribozymes, such as hammerhead or hairpin ribozyme sites are chosen as the most accessible.

[0137] Ribozymes of the hammerhead or hairpin motif were designed to anneal to various sites in the mRNA message. The binding arms are complementary to the target site sequences described above. The ribozymes were chemically synthesized. The method of synthesis used follows the procedure for normal RNA synthesis as described below and in Usman et al., 1987 J. Am. Chem. Soc., 109, 7845; Scaringe et al., 1990 Nucleic Acids Res., 18, 5433; and Wincott et al., 1995 Nucleic Acids Res. 23, 2677-2684.

[0138] Synthesis of Nucleic acid Molecules

[0139] Synthesis of nucleic acids greater than 100 nucleotides in length is difficult using automated methods, and the therapeutic cost of such molecules is prohibitive. In this invention, small nucleic acid motifs (“small refers to nucleic acid motifs no more than 100 nucleotides in length, preferably no more than 80 nucleotides in length, and most preferably no more than 50 nucleotides in length; e.g., antisense oligonucleotides, hammerhead or the hairpin ribozymes) are preferably used for exogenous delivery. The simple structure of these molecules increases the ability of the nucleic acid to invade targeted regions of RNA structure. Exemplary molecules of the instant invention were chemically synthesized, and others can similarly be synthesized. Oligodeoxyribonucleotides were synthesized using standard protocols as described in Caruthers et al., 1992, Methods in Enzymology 211,3-19, and is incorporated herein by reference.

[0140] The method of synthesis used for normal RNA including certain enzymatic nucleic acid molecules follows the procedure as described in Usman et al., 1987 J. Am. Chem. Soc., 109, 7845; Scaringe et al., 1990 Nucleic Acids Res., 18, 5433; and Wincott et al., 1995 Nucleic Acids Res. 23, 2677-2684 and makes use of common nucleic acid protecting and coupling groups, such as dimethoxytrityl at the 5′-end, and phosphoramidites at the 3′-end. In a non-limiting example, small scale syntheses were conducted on a 394 Applied Biosystems, Inc. synthesizer using a 0.2 μmol scale protocol with a 7.75 min coupling step for alkylsilyl protected nucleotides and a 2.5 min coupling step for 2′-O-methylated nucleotides. Table XI outlines the amounts and the contact times of the reagents used in the synthesis cycle. Alternatively, syntheses at the 0.2 μmol scale can be done on a 96-well plate synthesizer, such as the instrument produced by Protogene (Palo Alto, Calif.) with minimal modification to the cycle. A 15-fold excess (31 μL of 0.1 M=3.1 μmol) of phosphoramidite and a 38.7-fold excess of S-ethyl tetrazole (31 μL of 0.25 M=7.75 μmol) relative to polymer-bound 5′-hydroxyl was used in each coupling cycle. Average coupling yields on the 394 Applied Biosystems, Inc. synthesizer, determined by colorimetric quantitation of the trityl fractions, were 97.5-99%. Other oligonucleotide synthesis reagents for the 394 Applied Biosystems, Inc. synthesizer; detritylation solution was 3% TCA in methylene chloride (ABI); capping was performed with 16% N-methylimidazole in THF (ABI) and 10% acetic anhydride/10% 2,6-lutidine in THF (ABI); oxidation solution was 16.9 mM I₂, 49 mM pyridine, 9% water in THF (PERSEPTIVE™). Burdick & Jackson Synthesis Grade acetonitrile was used directly from the reagent bottle. S-Ethyltetrazole solution (0.25 M in acetonitrile) was made up from the solid obtained from American International Chemical, Inc.

[0141] Deprotection of the RNA was performed using either a two-pot or one-pot protocol. For the two-pot protocol, the polymer-bound trityl-on oligoribonucleotide was transferred to a 4 mL glass screw top vial and suspended in a solution of 40% aq. methylamine (1 mL) at 65° C. for 10 min. After cooling to −20° C., the supernatant was removed from the polymer support. The support was washed three times with 1.0 mL of EtOH:MeCN:H₂O/3:1:1, vortexed and the supernatant was then added to the first supernatant. The combined supernatants, containing the oligoribonucleotide, were dried to a white powder. The base deprotected oligoribonucleotide was resuspended in anhydrous TEA/HF/NMP solution (300 μL of a solution of 1.5 mL N-methylpyrrolidinone, 750 μL TEA and 1 mL TEA.3HF to provide a 1.4 M HF concentration) and heated to 65° C. After 1.5 h, the oligomer was quenched with 1.5 M NH₄HCO₃.

[0142] Alternatively, for the one-pot protocol, the polymer-bound trityl-on oligoribonucleotide was transferred to a 4 mL glass screw top vial and suspended in a solution of 33% ethanolic methylamine/DMSO:1/1 (0.8 mL) at 65° C. for 15 min. The vial was brought to r.t. TEA.3HF (0.1 mL) was added and the vial was heated at 65° C. for 15 min. The sample was cooled at −20° C. and then quenched with 1.5 M NH₄HCO₃.

[0143] For purification of the trityl-on oligomers, the quenched NH₄HCO₃ solution was loaded onto a C-18 containing cartridge that had been prewashed with acetonitrile followed by 50 mM TEAA. After washing the loaded cartridge with water, the RNA was detritylated with 0.5% TFA for 13 min. The cartridge was then washed again with water, salt exchanged with 1 M NaCl and washed with water again. The oligonucleotide was then eluted with 30% acetonitrile.

[0144] Inactive hammerhead ribozymes or binding attenuated control (BAC) oligonucleotides) were synthesized by substituting a U for G₅ and a U for A₁₄ (numbering from Hertel, K. J., et al., 1992, Nucleic Acids Res., 20, 3252).

[0145] The average stepwise coupling yields were >98% (Wincott et al., 1995 Nucleic Acids Res. 23, 2677-2684). Those of ordinary skill in the art will recognize that the scale of synthesis can be adapted to be larger or smaller than the example described above including but not limited to 96 well format, all that is important is the ratio of chemicals used in the reaction.

[0146] Alternatively, the nucleic acid molecules of the present invention can be synthesized separately and joined together by ligation (Moore et al., 1992, Science 256, 9923; Draper et al., International PCT publication No. WO 93/23569; Shabarova et al., 1991, Nucleic Acids Research 19, 4247).

[0147] Enzymatic nucleic acid molecules are modified extensively to enhance stability by modification with nuclease resistant groups, for example, 2′-amino, 2′-C-allyl, 2′-flouro, 2′-O-methyl, 2′-H (for a review see Usman and Cedergren, 1992 TIBS 17, 34; Usman et al., 1994 Nucleic Acids Symp. Ser. 31, 163). Enzymatic nucleic acid molecules are purified by gel electrophoresis using general methods or are purified by high pressure liquid chromatography (HPLC; See Wincott et al., Supra, the totality of which is hereby incorporated herein by reference) and are resuspended in water.

[0148] For example, the sequences of the ribozymes that are chemically synthesized, useful in this study, are shown in Tables II to IX, XIV-XIX, XXII, and XXIII. Those in the art will recognize that these sequences are representative only of many more such sequences where the enzymatic portion of the ribozyme (all but the binding arms) is altered to affect activity. Stem-loop IV sequence of hairpin ribozymes listed in, for example, Table III (5′-CACGUUGUG-3′) can be altered (substitution, deletion, and/or insertion) to contain any sequence, provided a minimum of two base-paired stem structure can form. Preferably, no more than 200 bases are inserted at these locations. The sequences listed in Tables II to X, XII-XIX, XXII, and XXIII may be formed of ribonucleotides or other nucleotides or non-nucleotides. Such ribozymes with enzymatic activity are equivalent to the ribozymes described specifically in the Tables.

[0149] Optimizing Activity of the Nucleic Acid Molecule of the Invention

[0150] Enzymatic nucleic acid activity can be optimized as described by Stinchcomb et al., supra. The details will not be repeated here, but include altering the length of the enzymatic nucleic acid binding arms (stems I and III, see FIG. 2c), or chemically synthesizing enzymatic nucleic acid with modifications that prevent their degradation by serum ribonucleases (see e.g., Eckstein et al., International Publication No. WO 92/07065; Perrault et al., 1990 Nature 344, 565; Pieken et al., 1991 Science 253, 314; Usman and Cedergren, 1992 Trends in Biochem. Sci. 17, 334; Usman et al., International Publication No. WO 93/15187; Rossi et al., International Publication No. WO 91/03162; Beigelman et al., 1995 J. Biol. Chem. in press; as well as Sproat, U.S. Pat. No. 5,334,711 which describe various chemical modifications that can be made to the sugar moieties of enzymatic RNA molecules). Modifications which enhance their efficacy in cells, and removal of stem II bases to shorten RNA synthesis times and reduce chemical requirements are desired. (All these publications are hereby incorporated by reference herein).

[0151] There are several examples in the art describing sugar, base and phosphate modifications that can be introduced into enzymatic nucleic acid molecules without significantly effecting catalysis and with significant enhancement in their nuclease stability and efficacy. For example, enzymatic nucleic acid molecules are modified to enhance stability and/or enhance catalytic activity by modification with nuclease resistant groups, for example, 2′-amino, 2′-C-allyl, 2′-fluoro, 2′-O-methyl, 2′-H, nucleotide base modifications (for a review see Usman and Cedergren, 1992 TIBS 17, 34; Usman et al., 1994 Nucleic Acids Symp. Ser. 31, 163; Burgin et al., 1996 Biochemistry 35, 14090). Sugar modification of enzymatic nucleic acid molecules have been extensively described in the art (see Eckstein et al., International Publication PCT No. WO 92/07065; Perrault et al. Nature 1990, 344, 565-568; Pieken et al. Science 1991, 253, 314-317; Usman and Cedergren, Trends in Biochem. Sci. 1992, 17, 334-339; Usman et al. International Publication PCT No. WO 93/15187; Sproat, U.S. Pat. No. 5,334,711 and Beigelman et al., 1995 J. Biol. Chem. 270, 25702; all of the references are hereby incorporated in their totality by reference herein). Such publications describe general methods and strategies to determine the location of incorporation of sugar, base and/or phosphate modifications and the like into enzymatic nucleic acid without inhibiting catalysis, and are incorporated by reference herein. In view of such teachings, similar modifications can be used as described herein to modify the nucleic acid catalysts of the instant invention.

[0152] Nucleic acid catalysts having chemical modifications which maintain or enhance enzymatic activity are provided. Such nucleic acid is also generally more resistant to nucleases than unmodified nucleic acid. Thus, in a cell and/or in vivo the activity may not be significantly lowered. As exemplified herein such enzymatic nucleic acid molecules are useful in a cell and/or in vivo even if activity over all is reduced 10 fold (Burgin et al., 1996, Biochemistry, 35, 14090). Such enzymatic nucleic acid molecules herein are said to “maintain” the enzymatic activity of an all RNA enzymatic nucleic acid molecules.

[0153] Therapeutic nucleic acid molecules (e.g., enzymatic nucleic acid molecules and antisense nucleic acid molecules) delivered exogenously must optimally be stable within cells until translation of the target RNA has been inhibited long enough to reduce the levels of the undesirable protein. This period of time varies between hours to days depending upon the disease state. Clearly, these nucleic acid molecules must be resistant to nucleases in order to function as effective intracellular therapeutic agents. Improvements in the chemical synthesis of nucleic acid molecules described in the instant invention and in the art have expanded the ability to modify nucleic acid molecules by introducing nucleotide modifications to enhance their nuclease stability as described above.

[0154] By “enhanced enzymatic activity” is meant to include activity measured in cells and/or in vivo where the activity is a reflection of both catalytic activity and enzymatic nucleic acid stability. In this invention, the product of these properties is increased or not significantly (less that 10 fold) decreased in vivo compared to an all RNA enzymatic nucleic acid molecule.

[0155] In one embodiment, the nucleic acid molecules comprises a 5′ and/or a 3′-cap structure.

[0156] By “cap structure” is meant chemical modifications, which have been incorporated at the terminus of the oligonucleotide (see for example Wincott et al., WO 97/26270, incorporated by reference herein). These terminal modifications protect the nucleic acid molecule from exonuclease degradation, and may help in delivery and/or localization within a cell. The cap may be present at the 5′-terminus (5′-cap) or at the 3′-terminus (3′-cap) or may be present on both terminus. In non-limiting examples: the 5′-cap is selected from the group comprising inverted abasic residue (moiety), 4′,5′-methylene nucleotide; 1-(beta-D-erythrofuranosyl) nucleotide, 4′-thio nucleotide, carbocyclic nucleotide; 1,5-anhydrohexitol nucleotide; L-nucleotides; alpha-nucleotides; modified base nucleotide; phosphorodithioate linkage; threo-pentofuranosyl nucleotide; acyclic 3′,4′-seco nucleotide; acyclic 3,4-dihydroxybutyl nucleotide; acyclic 3,5-dihydroxypentyl nucleotide, 3′-3′-inverted nucleotide moiety; 3′-3′-inverted abasic moiety; 3′-2′-inverted nucleotide moiety; 3′-2′-inverted abasic moiety; 1,4-butanediol phosphate; 3′-phosphoramidate; hexylphosphate; aminohexyl phosphate; 3′-phosphate; 3′-phosphorothioate; phosphorodithioate; or bridging or non-bridging methylphosphonate moiety (for more details see Beigelman et al., International PCT publication No. WO 97/26270, incorporated by reference herein).

[0157] In yet another embodiment, the 3′-cap is selected from a group comprising, 4′,5′-methylene nucleotide; 1-(beta-D-erythrofuranosyl) nucleotide; 4′-thio nucleotide, carbocyclic nucleotide; 5′-amino-alkyl phosphate; 1,3-diamino-2-propyl phosphate, 3-aminopropyl phosphate; 6-aminohexyl phosphate; 1,2-aminododecyl phosphate; hydroxypropyl phosphate; 1,5-anhydrohexitol nucleotide; L-nucleotide; alpha-nucleotide; modified base nucleotide; phosphorodithioate; threo-pentofuranosyl nucleotide; acyclic 3′,4′-seco nucleotide; 3,4-dihydroxybutyl nucleotide; 3,5-dihydroxypentyl nucleotide, 5′-5′-inverted nucleotide moeity; 5′-5′-inverted abasic moeity; 5′-phosphoramidate; 5′-phosphorothioate; 1,4-butanediol phosphate; 5′-amino; bridging and/or non-bridging 5′-phosphoramidate, phosphorothioate and/or phosphorodithioate, bridging or non bridging methylphosphonate and 5′-mercapto moeities (for more details see Beaucage and Iyer, 1993, Tetrahedron 49, 1925; incorporated by reference herein).

[0158] By the term “non-nucleotide” is meant any group or compound which can be incorporated into a nucleic acid chain in the place of one or more nucleotide units, including either sugar and/or phosphate substitutions, and allows the remaining bases to exhibit their enzymatic activity. The group or compound is abasic in that it does not contain a commonly recognized nucleotide base, such as adenosine, guanine, cytosine, uracil or thymine.

[0159] By “nucleotide” as used herein is as recognized in the art to include natural bases (standard), and modified bases well known in the art. Such bases are generally located at the 1′ position of a sugar moiety. A nucleotide generally comprises a base, sugar and a phosphate group. The nucleotide may also be abasic, i.e., lacking a base. The nucleotides can be unmodified or modified at the sugar, phosphate and/or base moiety, (also referred to interchangeably as nucleotide analogs, modified nucleotides, non-natural nucleotides, non-standard nucleotides and other; see for example, Usman and McSwiggen, supra; Eckstein et al., International PCT Publication No. WO 92/07065; Usman et al., International PCT Publication No. WO 93/15187; all hereby incorporated by reference herein). Several examples of modified nucleic acid bases are known in the art and has recently been summarized by Limbach et al., 1994, Nucleic Acids Res. 22, 2183. Some of the non-limiting examples of base modifications that can be introduced into enzymatic nucleic acids without significantly effecting their catalytic activity include, inosine, purine, pyridin-4-one, pyridin-2-one, phenyl, pseudouracil, 2,4,6-trimethoxy benzene, 3-methyl uracil, dihydrouridine, naphthyl, aminophenyl, 5-alkylcytidines (e.g., 5-methylcytidine), 5-alkyluridines (e.g., ribothymidine), 5-halouridine (e.g., 5-bromouridine) or 6-azapyrimidines or 6-alkylpyrimidines (e.g. 6-methyluridine) and others (Burgin et al., 1996, Biochemistry, 35, 14090).

[0160] By “modified bases” in this aspect is meant nucleotide bases other than adenine, guanine, cytosine and uracil at 1′ position or their equivalents; such bases may be used within the catalytic core of the enzyme and/or in the substrate-binding regions.

[0161] By “abasic” is meant sugar moieties lacking a base or having other chemical groups in place of a base at the 1′ position.

[0162] By “unmodified nucleoside” is meant one of the bases adenine, cytosine, guanine, uracil joined to the 1′ carbon of β-D-ribo-furanose.

[0163] By “modified nucleoside” is meant any nucleotide base that contains a modification in the chemical structure of an unmodified nucleotide base, sugar and/or phosphate.

[0164] In connection with 2′-modified nucleotides as described for the present invention, by “amino” is meant 2′-NH₂ or 2′-O—NH₂, which can be modified or unmodified. Such modified groups are described, for example, in Eckstein et al., U.S. Pat. No. 5,672,695 and Matulic-Adamic et al., WO 98/28317, respectively, which are both incorporated by reference in their entireties.

[0165] Various modifications to nucleic acid (e.g., antisense and ribozyme) structure can be made to enhance the utility of these molecules. Such modifications enhance shelf-life, half-life in vitro, stability, and ease of introduction of such oligonucleotides to the target site, e.g., to enhance penetration of cellular membranes, and confer the ability to recognize and bind to targeted cells.

[0166] Use of these molecules can lead to better treatment of the disease progression by affording the possibility of combination therapies (e.g., multiple enzymatic nucleic acid molecules targeted to different genes, enzymatic nucleic acid molecules coupled with known small molecule inhibitors, or intermittent treatment with combinations of enzymatic nucleic acid molecules (including different ribozyme motifs) and/or other chemical or biological molecules). The treatment of patients with nucleic acid molecules can also include combinations of different types of nucleic acid molecules. Therapies can be devised which include a mixture of enzymatic nucleic acid molecules (including different ribozyme motifs), antisense and/or 2-5A chimera molecules to one or more targets to alleviate symptoms of a disease.

[0167] Administration of Nucleic Acid Molecules

[0168] Sullivan, et al., supra, describes the general methods for delivery of enzymatic RNA molecules. Enzymatic nucleic acid molecules can be administered to cells by a variety of methods known to those familiar to the art, including, but not restricted to, encapsulation in liposomes, by iontophoresis, or by incorporation into other vehicles, such as hydrogels, cyclodextrins, biodegradable nanocapsules, and bioadhesive microspheres. For some indications, enzymatic nucleic acid molecules can be directly delivered ex vivo to cells or tissues with or without the aforementioned vehicles. Alternatively, the nucleic acid/vehicle combination is locally delivered by direct injection or by use of a catheter, infusion pump or stent. Other routes of delivery include, but are not limited to, intravascular, intramuscular, subcutaneous or joint injection, aerosol inhalation, oral (tablet or pill form), topical, systemic, ocular, intraperitoneal and/or intrathecal delivery. More detailed descriptions of nucleic acid delivery and administration are provided in Sullivan et al., supra and Draper et al., supra which have been incorporated by reference herein.

[0169] Methods for the delivery of nucleic acid molecules is described in Akhtar et al., 1992, Trends Cell Bio., 2, 139; and Delivery Strategies for Antisense Oligonucleotide Therapeutics, ed. Akhtar, 1995 which are both incorporated herein by reference. Sullivan et al., PCT WO 94/02595, further describes the general methods for delivery of enzymatic RNA molecules. These protocols can be utilized for the delivery of virtually any nucleic acid molecule. Nucleic acid molecules can be administered to cells by a variety of methods known to those familiar to the art, including, but not restricted to, encapsulation in liposomes, by iontophoresis, or by incorporation into other vehicles, such as hydrogels, cyclodextrins, biodegradable nanocapsules, and bioadhesive microspheres. For some indications, nucleic acid molecules can be directly delivered ex vivo to cells or tissues with or without the aforementioned vehicles. Alternatively, the nucleic acid/vehicle combination is locally delivered by direct injection or by use of a catheter, infusion pump or stent. Other routes of delivery include, but are not limited to, intravascular, intramuscular, subcutaneous or joint injection, aerosol inhalation, oral (tablet or pill form), topical, systemic, ocular, intraperitoneal and/or intrathecal delivery. More detailed descriptions of nucleic acid delivery and administration are provided in Sullivan et al., supra and Draper et al., PCT WO93/23569 which have been incorporated by reference herein.

[0170] The molecules of the instant invention can be used as pharmaceutical agents. Pharmaceutical agents prevent, inhibit the occurrence, or treat (alleviate a symptom to some extent, preferably all of the symptoms) of a disease state in a patient.

[0171] The negatively charged polynucleotides of the invention can be administered (e.g., RNA, DNA or protein) and introduced into a patient by any standard means, with or without stabilizers, buffers, and the like, to form a pharmaceutical composition. When it is desired to use a liposome delivery mechanism, standard protocols for formation of liposomes can be followed. The compositions of the present invention may also be formulated and used as tablets, capsules or elixirs for oral administration; suppositories for rectal administration; sterile solutions; suspensions for injectable administration; and the like.

[0172] The present invention also includes pharmaceutically acceptable formulations of the compounds described. These formulations include salts of the above compounds, e.g., acid addition salts, for example, salts of hydrochloric, hydrobromic, acetic acid, and benzene sulfonic acid.

[0173] A pharmacological composition or formulation refers to a composition or formulation in a form suitable for administration, e.g., systemic administration, into a cell or patient, preferably a human. Suitable forms, in part, depend upon the use or the route of entry, for example oral, transdermal, or by injection. Such forms should not prevent the composition or formulation to reach a target cell (i.e., a cell to which the negatively charged polymer is desired to be delivered to). For example, pharmacological compositions injected into the blood stream should be soluble. Other factors are known in the art, and include considerations such as toxicity and forms which prevent the composition or formulation from exerting its effect.

[0174] By “systemic administration” is meant in vivo systemic absorption or accumulation of drugs in the blood stream followed by distribution throughout the entire body. Administration routes which lead to systemic absorption include, without limitations: intravenous, subcutaneous, intraperitoneal, inhalation, oral, intrapulmonary and intramuscular. Each of these administration routes expose the desired negatively charged polymers, e.g., nucleic acids, to an accessible diseased tissue. The rate of entry of a drug into the circulation has been shown to be a function of molecular weight or size. The use of a liposome or other drug carrier comprising the compounds of the instant invention can potentially localize the drug, for example, in certain tissue types, such as the tissues of the reticular endothelial system (RES). A liposome formulation which can facilitate the association of drug with the surface of cells, such as, lymphocytes and macrophages is also useful. This approach may provide enhanced delivery of the drug to target cells by taking advantage of the specificity of macrophage and lymphocyte immune recognition of abnormal cells, such as the cancer cells.

[0175] The invention also features the use of a composition comprising surface-modified liposomes containing poly (ethylene glycol) lipids (PEG-modified, or long-circulating liposomes or stealth liposomes). These formulations offer a method for increasing the accumulation of drugs in target tissues. This class of drug carriers resists opsonization and elimination by the mononuclear phagocytic system (MPS or RES), thereby enabling longer blood circulation times and enhanced tissue exposure for the encapsulated drug (Lasic et al. Chem. Rev. 1995, 95, 2601-2627; Ishiwata et al., Chem. Pharm. Bull. 1995, 43, 1005-1011). Such liposomes have been shown to accumulate selectively in tumors, presumably by extravasation and capture in the neovascularized target tissues (Lasic et al., Science 1995, 267, 1275-1276; Oku et al., 1995, Biochim. Biophys. Acta, 1238, 86-90). Long-circulating liposomes enhance the pharmacokinetics and pharmacodynamics of DNA and RNA, particularly compared to conventional cationic liposomes which are known to accumulate in tissues of the MPS (Liu et al., J. Biol. Chem. 1995, 42, 24864-24870; Choi et al., International PCT Publication No. WO 96/10391; Ansell et al., International PCT Publication No. WO 96/10390; Holland et al., International PCT Publication No. WO 96/10392; all of these are incorporated by reference herein). Long-circulating liposomes are also likely to protect drugs from nuclease degradation to a greater extent compared to cationic liposomes, based on their ability to avoid accumulation in metabolically aggressive MPS tissues such as the liver and spleen. All of these references are incorporated by reference herein.

[0176] The present invention also includes compositions prepared for storage or administration which include a pharmaceutically effective amount of the desired compounds in a pharmaceutically acceptable carrier or diluent. Acceptable carriers or diluents for therapeutic use are well known in the pharmaceutical art, and are described, for example, in Remington's Pharmaceutical Sciences, Mack Publishing Co. (A. R. Gennaro edit. 1985) hereby incorporated by reference herein. For example, preservatives, stabilizers, dyes and flavoring agents may be provided. Id. at 1449. These include sodium benzoate, sorbic acid and esters of p-hydroxybenzoic acid. In addition, antioxidants and suspending agents can be used. Id.

[0177] A pharmaceutically effective dose is that dose required to prevent, inhibit the occurrence, or treat (alleviate a symptom to some extent, preferably all of the symptoms) of a disease state. The pharmaceutically effective dose depends on the type of disease, the composition used, the route of administration, the type of mammal being treated, the physical characteristics of the specific mammal under consideration, concurrent medication, and other factors which those skilled in the medical arts will recognize. Generally, an amount between 0.1 mg/kg and 100 mg/kg body weight/day of active ingredients is administered dependent upon potency of the negatively charged polymer.

[0178] The nucleic acid molecules of the invention and formulations thereof can be administered orally, topically, parenterally, by inhalation or spray or rectally in dosage unit formulations containing conventional non-toxic pharmaceutically acceptable carriers, adjuvants and vehicles. The term parenteral as used herein includes percutaneous, subcutaneous, intravascular (e.g., intravenous), intramuscular, or intrathecal injection or infusion techniques and the like. In addition, there is provided a pharmaceutical formulation comprising a nucleic acid molecule of the invention and a pharmaceutically acceptable carrier. One or more nucleic acid molecules of the invention can be present in association with one or more non-toxic pharmaceutically acceptable carriers and/or diluents and/or adjuvants, and if desired other active ingredients. The pharmaceutical compositions containing nucleic acid molecules of the invention can be in a form suitable for oral use, for example, as tablets, troches, lozenges, aqueous or oily suspensions, dispersible powders or granules, emulsion, hard or soft capsules, or syrups or elixirs.

[0179] Compositions intended for oral use can be prepared according to any method known to the art for the manufacture of pharmaceutical compositions and such compositions can contain one or more such sweetening agents, flavoring agents, coloring agents or preservative agents in order to provide pharmaceutically elegant and palatable preparations. Tablets contain the active ingredient in admixture with non-toxic pharmaceutically acceptable excipients that are suitable for the manufacture of tablets. These excipients can be for example, inert diluents, such as calcium carbonate, sodium carbonate, lactose, calcium phosphate or sodium phosphate; granulating and disintegrating agents, for example, corn starch, or alginic acid; binding agents, for example starch, gelatin or acacia, and lubricating agents, for example magnesium stearate, stearic acid or talc. The tablets can be uncoated or they can be coated by known techniques. In some cases such coatings can be prepared by known techniques to delay disintegration and absorption in the gastrointestinal tract and thereby provide a sustained action over a longer period. For example, a time delay material such as glyceryl monosterate or glyceryl distearate can be employed.

[0180] Formulations for oral use can also be presented as hard gelatin capsules wherein the active ingredient is mixed with an inert solid diluent, for example, calcium carbonate, calcium phosphate or kaolin, or as soft gelatin capsules wherein the active ingredient is mixed with water or an oil medium, for example peanut oil, liquid paraffin or olive oil.

[0181] Aqueous suspensions contain the active materials in admixture with excipients suitable for the manufacture of aqueous suspensions. Such excipients are suspending agents, for example sodium carboxymethylcellulose, methylcellulose, hydropropyl-methylcellulose, sodium alginate, polyvinylpyrrolidone, gum tragacanth and gum acacia; dispersing or wetting agents can be a naturally-occurring phosphatide, for example, lecithin, or condensation products of an alkylene oxide with fatty acids, for example polyoxyethylene stearate, or condensation products of ethylene oxide with long chain aliphatic alcohols, for example heptadecaethyleneoxycetanol, or condensation products of ethylene oxide with partial esters derived from fatty acids and a hexitol such as polyoxyethylene sorbitol monooleate, or condensation products of ethylene oxide with partial esters derived from fatty acids and hexitol anhydrides, for example polyethylene sorbitan monooleate. The aqueous suspensions can also contain one or more preservatives, for example ethyl, or n-propyl p-hydroxybenzoate, one or more coloring agents, one or more flavoring agents, and one or more sweetening agents, such as sucrose or saccharin.

[0182] Oily suspensions can be formulated by suspending the active ingredients in a vegetable oil, for example arachis oil, olive oil, sesame oil or coconut oil, or in a mineral oil such as liquid paraffin. The oily suspensions can contain a thickening agent, for example beeswax, hard paraffin or cetyl alcohol. Sweetening agents and flavoring agents can be added to provide palatable oral preparations. These compositions can be preserved by the addition of an anti-oxidant such as ascorbic acid.

[0183] Dispersible powders and granules suitable for preparation of an aqueous suspension by the addition of water provide the active ingredient in admixture with a dispersing or wetting agent, suspending agent and one or more preservatives. Suitable dispersing or wetting agents or suspending agents are exemplified by those already mentioned above. Additional excipients, for example sweetening, flavoring and coloring agents, can also be present.

[0184] Pharmaceutical compositions of the invention can also be in the form of oil-in-water emulsions. The oily phase can be a vegetable oil or a mineral oil or mixtures of these. Suitable emulsifying agents can be naturally-occurring gums, for example gum acacia or gum tragacanth, naturally-occurring phosphatides, for example soy bean, lecithin, and esters or partial esters derived from fatty acids and hexitol, anhydrides, for example sorbitan monooleate, and condensation products of the said partial esters with ethylene oxide, for example polyoxyethylene sorbitan monooleate. The emulsions can also contain sweetening and flavoring agents.

[0185] Syrups and elixirs can be formulated with sweetening agents, for example glycerol, propylene glycol, sorbitol, glucose or sucrose. Such formulations can also contain a demulcent, a preservative and flavoring and coloring agents. The pharmaceutical compositions can be in the form of a sterile injectable aqueous or oleaginous suspension. This suspension can be formulated according to the known art using those suitable dispersing or wetting agents and suspending agents that have been mentioned above. The sterile injectable preparation can also be a sterile injectable solution or suspension in a non-toxic parentally acceptable diluent or solvent, for example as a solution in 1,3-butanediol. Among the acceptable vehicles and solvents that can be employed are water, Ringer's solution and isotonic sodium chloride solution. In addition, sterile, fixed oils are conventionally employed as a solvent or suspending medium. For this purpose any bland fixed oil can be employed including synthetic mono- or diglycerides. In addition, fatty acids such as oleic acid find use in the preparation of injectables.

[0186] The nucleic acid molecules of the invention can also be administered in the form of suppositories, e.g., for rectal administration of the drug. These compositions can be prepared by mixing the drug with a suitable non-irritating excipient that is solid at ordinary temperatures but liquid at the rectal temperature and will therefore melt in the rectum to release the drug. Such materials include cocoa butter and polyethylene glycols.

[0187] Nucleic acid molecules of the invention can be administered parenterally in a sterile medium. The drug, depending on the vehicle and concentration used, can either be suspended or dissolved in the vehicle. Advantageously, adjuvants such as local anesthetics, preservatives and buffering agents can be dissolved in the vehicle.

[0188] Dosage levels of the order of from about 0.1 mg to about 140 mg per kilogram of body weight per day are useful in the treatment of the above-indicated conditions (about 0.5 mg to about 7 g per patient per day). The amount of active ingredient that can be combined with the carrier materials to produce a single dosage form varies depending upon the host treated and the particular mode of administration. Dosage unit forms generally contain between from about 1 mg to about 500 mg of an active ingredient.

[0189] It is understood that the specific dose level for any particular patient depends upon a variety of factors including the activity of the specific compound employed, the age, body weight, general health, sex, diet, time of administration, route of administration, and rate of excretion, drug combination and the severity of the particular disease undergoing therapy.

[0190] For administration to non-human animals, the composition can also be added to the animal feed or drinking water. It can be convenient to formulate the animal feed and drinking water compositions so that the animal takes in a therapeutically appropriate quantity of the composition along with its diet. It can also be convenient to present the composition as a premix for addition to the feed or drinking water.

[0191] The nucleic acid molecules of the present invention can also be administered to a patient in combination with other therapeutic compounds to increase the overall therapeutic effect. The use of multiple compounds to treat an indication can increase the beneficial effects while reducing the presence of side effects.

[0192] Another means of accumulating high concentrations of a nucleic acid molecule of the invention (e.g., ribozyme or antisense) within cells is to incorporate the nucleic acid-encoding sequences into a DNA or RNA expression vector. Transcription of the nucleic acid sequences are driven from a promoter for eukaryotic RNA polymerase I (pol I), RNA polymerase II (pol II), or RNA polymerase III (pol III). Transcripts from pol II or pol III promoters will be expressed at high levels in all cells; the levels of a given pol II promoter in a given cell type will depend on the nature of the gene regulatory sequences (enhancers, silencers, etc.) present nearby. Prokaryotic RNA polymerase promoters are also used, providing that the prokaryotic RNA polymerase enzyme is expressed in the appropriate cells (Elroy-Stein and Moss, 1990 Proc. Natl. Acad. Sci. USA, 87, 6743-7; Gao and Huang 1993 Nucleic Acids Res., 21, 2867-72; Lieber et al., 1993 Methods Enzymol., 217, 47-66; Zhou et al., 1990 Mol. Cell. Biol., 10, 4529-37; Thompson et al., 1995 supra). Several investigators have demonstrated that enzymatic nucleic acid or antisese expressed from such promoters can function in mammalian cells (e.g. Izant and Weintraub, 1985 Science 229, 345; McGarry and Lindquist, 1986 Proc. Natl. Acad. Sci. USA 83, 399; Kashani-Sabet et al., 1992 Antisense Res. Dev., 2, 3-15; Ojwang et al., 1992 Proc. Natl. Acad. Sci. USA, 89, 10802-6; Chen et al., 1992 Nucleic Acids Res., 20, 4581-9; Yu et al., 1993 Proc. Natl. Acad. Sci. USA, 90, 6340-4; L'Huillier et al., 1992 EMBO J. 11, 4411-8; Lisziewicz et al., 1993 Proc. Natl. Acad. Sci. U.S. A., 90, 8000-4; Thompson et al., 1995 Nucleic Acids Res. 23, 2259). The above nucleic acid transcription units can be incorporated into a variety of vectors for introduction into mammalian cells, including but not restricted to, plasmid DNA vectors, viral DNA vectors (such as adenovirus or adeno-associated virus vectors), or viral RNA vectors (such as retroviral or alphavirus vectors).

[0193] In one embodiment of the invention, a transcription unit expressing an enzymatic nucleic acid that cleaves RNAs that encode fit-1, KDR and/or flk-1 are inserted into a plasmid DNA vector or an adenovirus or adeno-associated virus DNA viral vector or a retroviral RNA vector. Viral vectors have been used to transfer genes and lead to either transient or long term gene expression (Zabner et al., 1993 Cell 75, 207; Carter, 1992 Curr. Opi. Biotech. 3, 533). The adenovirus, AAV or retroviral vector is delivered as recombinant viral particles. The DNA may be delivered alone or complexed with vehicles (as described for RNA above). The recombinant adenovirus or AAV or retroviral particles are locally administered to the site of treatment, e.g., through incubation or inhalation in vivo or by direct application to cells or tissues ex vivo. Retroviral vectors have also been used to express enzymatic nucleic acid in mammalian cells (Ojwang et al., 1992 supra; Thompson et al., 1995 supra).

[0194] Flt-1, KDR and/or flk-1 are attractive nucleic acid-based therapeutic targets by several criteria. The interaction between VEGF and VEGF-R is well-established. Efficacy can be tested in well-defined and predictive animal models. Finally, the disease conditions are serious and current therapies are inadequate. Whereas protein-based therapies would inhibit VEGF activity nucleic acid-based therapy provides a direct and elegant approach to directly modulate flt-1, KDR and/or flk-1 expression.

[0195] Because flt-1 and KDR mRNAs are highly homologous in certain regions, some enzymatic nucleic acid target sites are also homologous (see Table X). In this case, a single enzymatic nucleic acid cantarget both flt-1 and KDR mRNAs. At partially homologous sites, a single enzymatic nucleic acid can sometimes be designed to accommodate a site on both mRNAs by including G/U base pairing. For example, if there is a G present in an enzymatic nucleic acid target site in KDR mRNA at the same position there is an A in the flt-1 ribozyme target site, the enzymatic nucleic acid can be synthesized with a U at the complementary position and it will bind both to sites. The advantage of one enzymatic nucleic acid that targets both VEGF-R mRNAs is clear, especially in cases where both VEGF receptors may contribute to the progression of angiogenesis in the disease state.

[0196] “Angiogenesis” refers to formation of new blood vessels, which is an essential process in reproduction, development and wound repair. “Tumor angiogenesis” refers to the induction of the growth of blood vessels from surrounding tissue into a solid tumor. Tumor growth and tumor metastasis are dependent on angiogenesis (for a review see Folkman, 1985 supra; Folkman 1990 J. Natl. Cancer Inst., 82, 4; Folkman and Shing, 1992 J. Biol. Chem. 267, 10931).

[0197] Angiogenesis plays an important role in other diseases such as arthritis wherein new blood vessels have been shown to invade the joints and degrade cartilage (Folkinan and Shing, supra).

[0198] “Retinopathy” refers to inflammation of the retina and/or degenerative condition of the retina which may lead to occlusion of the retina and eventual blindness. In “diabetic retinopathy” angiogenesis causes the capillaries in the retina to invade the vitreous resulting in bleeding and blindness which is also seen in neonatal retinopathy (for a review see Folkman, 1985 supra; Folkman 1990 supra; Folkman and Shing, 1992 supra).

[0199] The following examples further illustrate the present invention but should not be construed to limit the present invention in any way.

### EXAMPLE 1

### flt-1, KDR and/or flk-1 ribozymes

[0200] By engineering ribozyme motifs, Applicant has designed several ribozymes directed against flt-1, KDR and/or flk-1 encoded mRNA sequences. These ribozymes were synthesized with modifications that improve their nuclease resistance (Beigelman et al., 1995 J Biol. Chem. 270, 25702) and enhance their activity in cells. The ability of ribozymes to cleave target sequences in vitro was evaluated essentially as described in Thompson et al., PCT Publication No. WO 93/23057; Draper et al., PCT Publication No. WO 95/04818.

### EXAMPLE 2

### Effect of Ribozymes on the Binding of VEGF to flt-1, KDR and/or flk-1 Receptors

[0201] Several common human cell lines are available that express endogenous flt-1, KDR and/or flk-1. flt-1, KDR and/or flk-1 which can be detected easily with monoclonal antibodies. Use of appropriate fluorescent reagents and fluorescence-activated cell-sorting (FACS) permit direct quantitation of surface flt-1, KDR and/or fik-1 on a cell-by-cell basis. Active ribozymes are expected to directly reduce flt-1, KDR and/or flk-1 expression and thereby reduce VEGF binding to the cells. In this example, human umbelical cord microvascular endothelial cells were used.

[0202] Cell Preparation

[0203] Plates were coated with 1.5% gelatin and allowed to stand for one hour. Cells (e.g., microvascular endothelial cells derived from human umbilical cord vein) were plated at 20,000 cells/well (24 well plate) in 200 μl growth media and incubated overnight (˜1 doubling) to yield ˜40,000 cells (75-80% confluent).

[0204] Ribozyme Treatment

[0205] Media was removed from cells and the cells were washed two times with 300 μl 1× PBS:Ca²⁺:Mg²⁺ mixture. A complex of 200-500 nM ribozyme and LipofectAMINE® (3:1 lipid:phosphate ratio) in 200 μl OptiMEM® (5% FBS) was added to the cells. The cells were incubated for 6 hr (equivalent to 2-3 VEGF-R turnovers).

[0206] ¹²⁵I VEGF Binding Assay

[0207] The assay was carried out on ice to inhibit internalization of VEGF during the experiment. The media containing the ribozyme was removed from the cells and the cells were washed twice with 300 μl 1× PBS: Ca²⁺:Mg²⁺ mixture containing 1% BSA. Appropriate ¹²⁵I VEGF solution (100,000 cpm/well, +/−10× cold 1× PBS, 1% BSA) was applied to the cells. The cells were incubated on ice for 1 hour. ¹²⁵I VEGF-containing solution was removed and the cells were washed three times with 300 μl 1× PBS: Ca²⁺: Mg²⁺ mixture containing 1% BSA. To each well 300 μl of 100 mM Tris-HCl, pH 8.0, 0.5% Triton X-100 was added and the mixture was incubated for 2 minutes. The ¹²⁵I VEGF-binding was quantitated using standard scintillation counting techniques. Percent inhibition was calculated as follows:

$$Percent Inhibition = \frac{\begin{matrix}{cpm}^{ 125} I VEGF bound by \\ the ribozyme \text{-} treated samples\end{matrix}}{\begin{matrix}{cpm}^{ 125} I VEGF bound by \\ the Control sample\end{matrix}} \times 100$$

### EXAMPLE 3

### Effect of Hammerhead Ribozymes Targeted Against flt-1 Receptor on the Binding of VEGF

[0208] Hammerhead ribozymes targeted to twenty sites within flt-1 RNA were synthesized as described above. The sequences of the ribozymes used are shown in Table II; the length of the stem II region is 3 bp. The hammerhead ribozymes were chemically modified such that the ribozyme consists of ribose residues at five positions; U4 and U7 positions contain 2′-NH₂ modifications, the remaining nucleotide positions contain 2′-O-methyl substitutions; four nucleotides at the 5′ terminus contains phosphorothioate substitutions. Additionally, 3′ end of the ribozyme contains a 3′-3′ linked inverted abasic ribose.

[0209] Referring to FIG. 7, the effect of hammerhead ribozymes targeted against flt-1 receptor on the binding of VEGF to flt-1 on the surface of human microvascular endothelial cells is shown. The majority of the ribozymes tested were able to inhibit the expression of flt-1 and thereby were able to inhibit the binding of VEGF.

[0210] In order to determine the specificity of ribozymes targeted against flt-1 RNA, the effect of five anti-flt-1 ribozymes on the binding of VEGF, UPA (urokinase plasminogen activator) and FGF (fibroblast growth factor) to their corresponding receptors were assayed. As shown in FIG. 9, there was significant inhibition of VEGF binding to its receptors on cells treated with anti-flt-1 ribozymes. There was no specific inhibition of the binding of UPA and FGF to their corresponding receptors. These data strongly suggest that anti-flt-1 ribozymes specifically cleave flt-1 RNA and not RNAs encoding the receptors for UPA and FGF, resulting in the inhibition of flt-1 receptor expression on the surface of the cells. Thus the ribozymes are responsible for the inhibition of VEGF binding but not the binding of UPA and FGF.

### EXAMPLE 4

### Effect of Hammerhead Ribozymes Targeted Against KDR Receptor on the Binding of VEGF

[0211] Hammerhead ribozymes targeted to twenty-one sites within KDR RNA were synthesized as described above. The sequences of the ribozymes used are shown in Table IV; the length of stem II region is 3 bp. The hammerhead ribozymes were chemically modified such that the ribozyme consists of ribose residues at five positions; U4 and U7 positions contain 2′-NH₂ modifications, the remaining nucleotide positions contain 2′-O-methyl substitutions; four nucleotides at the 5′ terminus contains phosphorothioate substitutions. Additionally, the 3′ end of the ribozyme contains a 3′-3′ linked inverted abasic deoxyribose.

[0212] Referring to FIG. 8, the effect of hammerhead ribozymes targeted against KDR receptor on the binding of VEGF to KDR on the surface of human microvascular endothelial cells is shown. A majority of the ribozymes tested were able to inhibit the expression of KDR and thereby were able to inhibit the binding of VEGF. As a control, the cells were treated with a ribozyme that is not targeted towards KDR RNA (irrel. RZ); there was no specific inhibition of VEGF binding. The results from this control experiment strongly suggest that the inhibition of VEGF binding observed with anti-KDR ribozymes is a ribozyme-mediated inhibition.

### EXAMPLE 5

### Effect of Ribozymes Targeted Against VEGF Receptors on Cell Proliferation

[0213] Cell Preparation

[0214] 24-well plates were coated with 1.5% gelatin (porcine skin 300 bloom). After 1 hour, excess gelatin is washed off of the plate. Microvascular endothelial cells were plated at 5,000 cells/well (24 well plate) in 200 μl growth media. The cells were allowed to grow for 18 hours (˜1 doubling) to yield ˜10,000 cells (25-30% confluent).

[0215] Ribozyme Treatment

[0216] Media was removed from the cells, and the cells were washed two times with 300 μl 1× PBS: Ca²⁺: Mg²⁺ mixture.

[0217] For anti-flt-1HH ribozyme experiment (FIG. 12) a complex of 500 nM ribozyme; 15 μM LFA (3:1 lipid:phosphate ratio) in 200 μl OptiMEM (5% FCS) media was added to the cells. Incubation of cells was carried out for 6 hours (equivalent to 2-3 VEGF receptor turnovers).

[0218] For anti-KDR HH ribozyme experiment (FIG. 13) a complex of 200 nM ribozyme; 5.25 μM LFA (3:1 lipid:phosphate ratio) in 200 μl OptiMEM (5% FCS) media was added to the cells. Incubation of cells was carried out for 3 hours.

[0219] Proliferation

[0220] After three or six hours, the media was removed from the cells and the cells were washed with 300 μl 1× PBS: Ca²⁺: Mg²⁺ mixture. Maintenance media (contains dialyzed 10% FBS) +/−VEGF or basic FGF at 10 ng/ml was added to the cells. The cells were incubated for 48 or 72 hours. The cells were trypsinized and counted (Coulter counter). Trypan blue was added on one well of each treatment as a control.

[0221] As shown in FIG. 12B, VEGF and basic FGF stimulate human microvascular endothelial cell proliferation. However, treatment of cells with 1358 HH or 4229 HH ribozymes, targeted against flt-1 mRNA, results in a significant decrease in the ability of VEGF to stimulate endothelial cell proliferation. These ribozymes do not inhibit the FGF-mediated stimulation of endothelial cell proliferation.

[0222] Human microvascular endothelial cells were also treated with hammerhead ribozymes targeted against sites 527, 730, 3702 or 3950 within the KDR mRNA. As shown in FIG. 13, all four ribozymes caused significant inhibition of VEGF-mediated induction of cell proliferation. No significant inhibition of cell proliferation was observed when the cells were treated with a hammerhead ribozyme targeted to an irrelevant RNA. Additionally, none of the ribozymes inhibited FGF-mediated stimulation of cell proliferation.

[0223] These results strongly suggest that hammerhead ribozymes targeted against either flt-1 or KDR mRNA specifically inhibit VEGF-mediated induction of endothelial cell proliferation.

### EXAMPLE 6

### Effect of Antisense Oligonucleotides Targeted Against VEGF Receptors on Cell Proliferation (Colorimetric Assay)

[0224] The following are some of the reagents used in the proliferation assay:

[0225] Cells: Human aortic endothelial cells (HAEC) from Clonetics®. Cells at early passage are preferably used.

[0226] Uptake Medium: EBM (from Clonetics®); 1% L-Glutamine; 20 mM Hepes; No serum; No antibiotics.

[0227] Growth Medium: EGM (from Clonetics®); FBS to 20%; 1% L-Glutamine; 20 mM Hepes.

[0228] Cell Plating: 96-well tissue culture plates were coated with 0.2% gelatin (50 μl/well). The gelatin was incubated in the wells at room temperature for 15-30 minutes. The gelatin was removed by aspiration and the wells were washed with PBS:Ca²⁺: Mg²⁺ mixture. PBS mixture was left in the wells until cells were ready to be added. HAEC cells were detached by trypsin treatment and resuspended at 1.25×10⁴/ml in growth medium. PBS was removed from plates and 200 μl of cells (i.e. 2.5×10³ cells/well) were added to each well. The cells were allowed to grow for 48 hours before the proliferation assay.

[0229] Assay: Growth medium was removed from the wells. The cells were washed twice with PBS:Ca²⁺: Mg²⁺ mixture without antibiotics. A formulation of lipid/antisense oligonucleotide (antisense oligonucleotide is used here as a non-limiting example) complex was added to each well (100 μl/well) in uptake medium. The cells were incubated for 2-3 hours at 37° C. in a CO₂ incubator. After uptake, 100 μl/well of growth medium was added (gives final FBS concentration of 10%). After approximately 72 hours, 40 μl MTS® stock solution (made as described by manufacturer) was added to each well and incubated at 37° C. for 1-3 hours, depending on the color development. (For this assay, 2 hours was sufficient). The intensity of color formation was determined on a plate reader at 490 nM.

[0230] Phosphorothioate-substituted antisense oligodeoxynucleotides were custom synthesized by The Midland Certified Reagent Company®, Midland, Tex. Following non-limiting antisense oligodeoxynucleotides targeted against KDR RNA were used in the proliferation assay:

KDR 21 AS:
5′-GCA GCA CCT TGC TCT CCA TCC-3′
SCRAMBLED CONTROL:
5′-CTG CCA ACT TCC CAT GCC TGC-3′

[0231] As shown in FIG. 10, proliferation of HAEC cells is specifically inhibited by increasing concentrations of the phosphorothioate anti-KDR-antisense oligodeoxynucleotide. The scrambled antisense oligonucleotide is not expected to bind the KDR RNA and therefore is not expected to inhibit KDR expression. As expected, there is no detectable inhibition of proliferation of HAEC cells treated with a phosphorothioate antisense oligonucleotide with scrambled sequence.

### EXAMPLE 7

### In vitro Cleavage of flt-1 RNA by Hammerhead Ribozymes

[0232] Referring to FIG. 11A, hammerhead ribozymes (HH) targeted against sites 1358 and 4229 within the flt-1 RNA were synthesized as described above.

[0233] RNA Cleavage Assay In Vitro

[0234] Substrate RNA was 5′ end-labeled using [γ-³²P] ATP and T4 polynucleotide kinase (US Biochemicals). Cleavage reactions were carried out under ribozyme “excess” conditions. Trace amount (≦1 nM) of 5′ end-labeled substrate and 40 nM unlabeled ribozyme were denatured and renatured separately by heating to 90° C. for 2 minutes and snap-cooling on ice for 10-15 minutes. The ribozyme and substrate were incubated, separately, at 37° C. for 10 minutes in a buffer containing 50 mM Tris-HCl and 10 mM MgCl₂. The reaction was initiated by mixing the ribozyme and substrate solutions and incubating at 37° C. Aliquots of 5 μl were taken at regular intervals of time and the reaction was quenched by mixing with equal volume of 2× formamide stop mix. The samples were resolved on 20% denaturing polyacrylamide gels. The results were quantified and percentage of target RNA cleaved is plotted as a function of time.

[0235] Referring to FIGS. 11B and 11C, hammerhead ribozymes targeted against sites 1358 and 4229 within the flt-1 RNA are capable of cleaving target RNA efficiently in vitro.

### EXAMPLE 8

### In vitro Cleavage of KDR RNA by Hammerhead Ribozymes

[0236] In this non-limiting example, hammerhead ribozymes targeted against sites 726, 527, 3702 and 3950 within KDR RNA were synthesized as described above. RNA cleavage reactions were carried out in vitro essentially as described under Example 7.

[0237] Referring to FIGS. 14 and 15, all four ribozymes were able to cleave their cognate target RNA efficiently in a sequence-specific manner.

### EXAMPLE 9

### In vitro Cleavage of RNA by Hammerhead Ribozymes Targeted Against Cleavage Sites that are Homologous Between KDR and flt-1 mRNA

[0238] Given that flt-1 and KDR mRNAs are highly homologous in certain regions, some ribozyme target sites are also homologous (see Table X). In this case, a single ribozyme will target both flt-1 and KDR mRNAs. Hammerhead ribozyme (FLT/KDR-1) targeted against one of the homologous sites between flt-1 and KDR (flt-1 site 3388 and KDR site 3151) was synthesized as described above. Ribozymes with either a 3 bp stem II or a 4 bp stem II were synthesized. RNA cleavage reactions were carried out in vitro essentially as described under Example 7.

[0239] Referring to FIG. 16, FLT/KDR-I ribozyme with either a 3 or a 4 bp stem II was able to cleave its target RNA efficiently in vitro.

### EXAMPLE 10

### Effect of Multiple Ribozymes Targeted Against Both flt-1 and KDR RNA on Cell Proliferation

[0240] Since both flt-1 and KDR receptors of VEGF are involved in angiogenesis, the inhibition of the expression of both of these genes can be an effective approach to inhibit angiogenesis.

[0241] Human microvascular endothalial cells were treated with hammerhead ribozyrnes targeted against sites flt-1 4229 alone, KDR 527 alone, KDR 726 alone, KDR 3950 alone, flt-1 4229+KDR 527, flt-1 4229+KDR 726 or flt-1 4229+KDR 3950. As shown in FIG. 17, all the combinations of active ribozymes (A) caused significant inhibition of VEGF-mediated induction of cell proliferation. No significant inhibition of cell proliferation was observed when the cells were treated with a catalytically inactive (I) hammerhead ribozymes. Additionally, cells treated with ribozymes targeted against both flt-1 and KDR RNAs-flt-1 4229+KDR 527; flt-1 4229+KDR 726; flt-1 4229+KDR 3950, were able to cause a greater inhibition of VEGF-mediated induction of cell proliferation when compared with individual ribozymes targeted against either flt-1 or KDR RNA (see flt-1 4229 alone; KDR 527 alone; KDR 726 alone; KDR 3950 alone). This strongly suggests that treatment of cells with multiple ribozymes can be a more effective means of inhibition of gene expression.

[0242] Animal Models

[0243] There are several animal models in which the anti-angiogenesis effect of nucleic acids of the present invention, such as enzymatic nucleic acids, directed against VEGF-R mRNAs can be tested. Typically a corneal model has been used to study angiogenesis in rat and rabbit since recruitment of vessels can easily be followed in this normally avascular tissue (Pandey et al., 1995 Science 268: 567-569). In these models, a small Teflon or Hydron disk pretreated with an angiogenesis factor (e.g. bFGF or VEGF) is inserted into a pocket surgically created in the cornea. Angiogenesis is monitored 3 to 5 days later. Enzymatic nucleic acids directed against VEGF-R mRNAs are delivered in the disk as well, or dropwise to the eye over the time course of the experiment. In another eye model, hypoxia has been shown to cause both increased expression of VEGF and neovascularization in the retina (Pierce et al., 1995 Proc. Natl. Acad. Sci. USA. 92: 905-909; Shweiki et al., 1992 J. Clin. Invest. 91: 2235-2243).

[0244] In human glioblastomas, it has been shown that VEGF is at least partially responsible for tumor angiogenesis (Plate et al., 1992 Nature 359, 845). Animal models have been developed in which glioblastoma cells are implanted subcutaneously into nude mice and the progress of tumor growth and angiogenesism is studied (Kim et al., 1993 supra; Millauer et al., 1994 supra).

[0245] Another animal model that addresses neovascularization involves Matrigel, an extract of basement membrane that becomes a solid gel when injected subcutaneously (Passaniti et al., 1992 Lab. Invest. 67: 519-528). When the Matrigel is supplemented with angiogenesis factors such as VEGF, vessels grow into the Matrigel over a period of 3 to 5 days and angiogenesis can be assessed. Again, nucleic acids directed against VEGF-R mRNAs are delivered in the Matrigel.

[0246] Several animal models exist for screening of anti-angiogenic agents. These include corneal vessel formation following corneal injury (Burger et al., 1985 Cornea 4: 35-41; Lepri, et al., 1994 J. Ocular Pharmacol. 10: 273-280; Ormerod et al., 1990 Am. J. Pathol. 137: 1243-1252) or intracorneal growth factor implant (Grant et al., 1993 Diabetologia 36: 282-291; Pandey et al. 1995 supra; Zieche et al., 1992 Lab. Invest. 67: 711-715), vessel growth into Matrigel matrix containing growth factors (Passaniti et al., 1992 supra), female reproductive organ neovascularization following hormonal manipulation (Shweiki et al., 1993 Clin. Invest. 91: 2235-2243), several models involving inhibition of tumor growth in highly vascularized solid tumors (O'Reilly et al., 1994 Cell 79: 315-328; Senger et al., 1993 Cancer and Metas. Rev. 12: 303-324; Takahasi et al., 1994 Cancer Res. 54: 4233-4237; Kim et al., 1993 supra), and transient hypoxia-induced neovascularization in the mouse retina (Pierce et al., 1995 Proc. Natl. Acad. Sci. USA. 92: 905-909).

[0247] The cornea model, described in Pandey et al. supra, is the most common and well characterized anti-angiogenic agent efficacy screening model. This model involves an avascular tissue into which vessels are recruited by a stimulating agent (growth factor, thermal or alkalai burn, endotoxin). The corneal model utilizes the intrastromal corneal implantation of a Teflon pellet soaked in a VEGF-Hydron solution to recruit blood vessels toward the pellet which can be quantitated using standard microscopic and image analysis techniques. To evaluate their anti-angiogenic efficacy, nucleic acids are applied topically to the eye or bound within Hydron on the Teflon pellet itself. This avascular cornea as well as the Matrigel (see below) provide for low background assays. While the corneal model has been performed extensively in the rabbit, studies in the rat have also been conducted.

[0248] The mouse model (Passaniti et al., supra) is a non-tissue model which utilizes Matrigel, an extract of basement membrane (Kleinman et al., 1986) or Millipore® filter disk, which can be impregnated with growth factors and anti-angiogenic agents in a liquid form prior to injection. Upon subcutaneous administration at body temperature, the Matrigel or Millipore® filter disk forms a solid implant. VEGF embedded in the Matrigel or Millipore® filter disk is used to recruit vessels within the matrix of the Matrigel or Millipore® filter disk which can be processed histologically for endothelial cell specific vWF (factor VIII antigen) immunohistochemistry, Trichrome-Masson stain, or hemoglobin content. Like the cornea, the Matrigel or Millipore® filter disk are avascular; however, it is not tissue. In the Matrigel or Millipore® filter disk model, nucleic acids are administered within the matrix of the Matrigel or Millipore® filter disk to test their anti-angiogenic efficacy. Thus, delivery issues in this model, as with delivery of nucleic acids by Hydron-coated Teflon pellets in the rat cornea model, may be less problematic due to the homogeneous presence of the nucleic acid within the respective matrix.

[0249] These models offer a distinct advantage over several other angiogenic models listed previously. The ability to use VEGF as a pro-angiogenic stimulus in both models is highly desirable since the instant nucleic acid molecules target only VEGFr mRNA. In other words, the involvement of other non-specific types of stimuli in the cornea and Matrigel models is not advantageous from the standpoint of understanding the pharmacologic mechanism by which the anti-VEGFr mRNA nucleic acid molecules produce their effects. In addition, the models allow for testing the specificity of the anti-VEGFr mRNA nucleic acids by using either a- or bFGF as a pro-angiogenic factor. Vessel recruitment using FGF should not be affected in either model by anti-VEGFr mRNA nucleic acid molecules. Other models of angiogenesis including vessel formation in the female reproductive system using hormonal manipulation (Shweiki et al., 1993 supra); a variety of vascular solid tumor models which involve indirect correltations with angiogenesis (O'Reilly et al., 1994 supra; Senger et al., 1993 supra; Takahasi et al., 1994 supra; Kim et al., 1993 supra); and retinal neovascularization following transient hypoxia (Pierce et al., 1995 supra) were not selected for efficacy screening due to their non-specific nature, although there is a correlation between VEGF and angiogenesis in these models.

[0250] Other model systems to study tumor angiogenesis is reviewed by Folkman, 1985 Adv. Cancer. Res. 43, 175.

[0251] Use of Murine Models

[0252] For a typical systemic study involving 10 mice (20 g each) per dose group, 5 doses (1, 3, 10, 30 and 100 mg/kg daily over 14 days continuous administration), approximately 400 mg of enzymatic nucleic acid, formulated in saline is used. A similar study in young adult rats (200 g) requires over 4 g. Parallel pharmacokinetic studies involve the use of similar quantities of enzymatic nucleic acid further justifying the use of murine models.

[0253] Enzymatic Nucleic Acids and Lewis Lung Carcinoma and B-16 Melanoma Murine Models

[0254] Identifying a common animal model for systemic efficacy testing of enzymatic nucleic acid is an efficient way of screening enzymatic nucleic acid for systemic efficacy.

[0255] The Lewis lung carcinoma and B-16 murine melanoma models are well accepted models of primary and metastatic cancer and are used for initial screening of anti-cancer agents. These murine models are not dependent upon the use of immunodeficient mice, are relatively inexpensive, and minimize housing concerns. Both the Lewis lung and B-16 melanoma models involve subcutaneous implantation of approximately 10⁶ tumor cells from metastatically aggressive tumor cell lines (Lewis lung lines 3LL or D122, LLc-LN7; B-16-BL6 melanoma) in C57BL/6J mice. Alternatively, the Lewis lung model can be produced by the surgical implantation of tumor spheres (approximately 0.8 mm in diameter). Metastasis also can be modeled by injecting the tumor cells directly intravenously. In the Lewis lung model, microscopic metastases can be observed approximately 14 days following implantation with quantifiable macroscopic metastatic tumors developing within 21-25 days. The B-16 melanoma exhibits a similar time course with tumor neovascularization beginning 4 days following implantation. Since both primary and metastatic tumors exist in these models after 21-25 days in the same animal, multiple measurements can be taken as indices of efficacy. Primary tumor volume and growth latency as well as the number of micro- and macroscopic metastatic lung foci or number of animals exhibiting metastases can be quantitated. The percent increase in lifespan can also be measured. Thus, these models provide suitable primary efficacy assays for screening systemically administered enzymatic nucleic acids and enzymatic nucleic acid formulations.

[0256] In the Lewis lung and B-16 melanoma models, systemic pharmacotherapy with a wide variety of agents usually begins 1-7 days following tumor implantation/inoculation with either continuous or multiple administration regimens. Concurrent pharmacokinetic studies can be performed to determine whether sufficient tissue levels of ribozymes can be achieved for pharmacodynamic effect to be expected. Furthermore, primary tumors and secondary lung metastases can be removed and subjected to a variety of in vitro studies (i.e. target RNA reduction).

[0257] Flt-1, KDR and/or flk-1 protein levels can be measured clinically or experimentally by FACS analysis. Flt-1, KDR and/or flk-1 encoded mRNA levels are assessed by Northern analysis, RNase-protection, primer extension analysis and/or quantitative RT-PCR. Enzymatic nucleic acids that block flt-1, KDR and/or flk-1 protein encoding mRNAs and therefore result in decreased levels of flt-1, KDR and/or flk-1 activity by more than 20% in vitro can be identified.

[0258] Enzymatic nucleic acids and/or genes encoding them are delivered by either free delivery, liposome delivery, cationic lipid delivery, adeno-associated virus vector delivery, adenovirus vector delivery, retrovirus vector delivery or plasmid vector delivery in these animal model experiments (see above).

[0259] Patients can be treated by locally administering nucleic acids targeted against VEGF-R by direct injection. Routes of administration include, but are not limited to, intravascular, intramuscular, subcutaneous, intraarticular, aerosol inhalation, oral (tablet, capsule or pill form), topical, systemic, ocular, intraperitoneal and/or intrathecal delivery.

### EXAMPLE 11

### Ribozyme-Mediated Inhibition of Angiogenesis in vivo

[0260] The purpose ot this study was to assess the anti-angiogenic activity of hammerhead ribozymes targeted against flt-1 4229 site in the rat cornea model of VEGF induced angiogenesis (see above). These ribozymes have either active or inactive catalytic core and either bind and cleave or just bind to VEGF-R mRNA of the flt-1 subtype. The active ribozymes, that are able to bind and cleave the target RNA, have been shown to inhibit (¹²⁵I-labeled) VEGF binding in cultured endothelial cells and produce a dose-dependent decrease in VEGF induced endothelial cell proliferation in these cells (see Examples 3-5 above). The catalytically inactive forms of these ribozymes, wherein the ribozymes can only bind to the RNA but cannot catalyze RNA cleavage, fail to show these characteristics. The ribozymes and VEGF were co-delivered using the filter disk method: Nitrocellulose filter disks (Millipore®) of 0.057 diameter were immersed in appropriate solutions and were surgically implanted in rat cornea as described by Pandey et al., supra. This delivery method has been shown to deliver rhodamine-labeled free ribozyme to scleral cells and, in all likelihood cells of the pericorneal vascular plexus. Since the active ribozymes show cell culture efficacy and can be delivered to the target site using the disk method, it is essential that these ribozymes be assessed for in vivo anti-angiogenic activity.

[0261] The stimulus for angiogenesis in this study was the treatment of the filter disk with 30 μM VEGF which is implanted within the cornea's stroma. This dose yields reproducible neovascularization stemming from the pericorneal vascular plexus growing toward the disk in a dose-response study 5 days following implant. Filter disks treated only with the vehicle for VEGF show no angiogenic response. The ribozymes were co-adminstered with VEGF on a disk in two different ribozyme concentrations. One concern with the simultaneous administration is that the ribozymes will not be able to inhibit angiogenesis since VEGF receptors can be stimulated. However, Applicant has observed that in low VEGF doses, the neovascular response reverts to normal suggesting that the VEGF stimulus is essential for maintaining the angiogenic response. Blocking the production of VEGF receptors using simultaneous administration of anti-VEGF-R mRNA ribozymes could attenuate the normal neovascularization induced by the filter disk treated with VEGF.

Materials and Methods:

| | |
|---|---|
| 1. | Stock hammerhead ribozyme solutions: |
| | a. fit-1 4229 (786 μM)-Active |
| | b. fit-1 4229 (736 μM)-Inactive |
| 2. | Experimantal solutions/groups: |

| | | |
|---|---|---|
| Group 1 | Solution 1 | Control VEGF solution: 30 μM in 82 mM Tris base |
| Group 2 | Solution 2 | fit-1 4229 (1 μg/μL) in 30 μM VEGF/82 mM |
| | | Tris base |
| Group 3 | Solution 3 | fit-1 4229 (10 μg/μL) in 30 μM VEGF/82 mM |
| | | Tris base |
| Group 4 | Solution 4 | No VEGF, fit-1 4229 (10 μg/μL) in 82 mM |
| | | Tris base |
| Group 5 | Solution 5 | No VEGF, No ribozyme in 82 mM Tris base |

10 eyes per group, 5 animals (Since they have similar molecular weights, the molar concentrations should be essentially similar).

[0262] Each solution (VEGF and RIBOZYMES) were prepared as a 2×solution for 1:1 mixing for final concentrations above, with the exception of solution 1 in which VEGF was 2× and diluted with ribozyme diluent (sterile water).

[0263] 3. VEGF Solutions

[0264] The 2× VEGF solution (60 μM) was prepared from a stock of 0.82 μg/μL in 50 mM Tris base. 200 μL of VEGF stock was concentrated by speed vac to a final volume of 60.8 μL, for a final concentration of 2.7 μg/μL or 60 μM. Six 10 μL aliquots were prepared for daily mixing. 2×solutions for VEGF and Ribozyme was stored at 4° C. until the day of the surgery. Solutions were mixed for each day of surgery. Original 2× solutions were prepared on the day before the first day of the surgery.

| | |
|---|---|
| 4. | Surgical Solutions: |

Anesthesia:

stock ketamine hydrochloride 100 mg/mL
stock xylazine hydrochloride 20 mg/mL
stock acepromazine 10 mg/mL
Final anesthesia solution: 50 mg/mL ketamine, 10 mg/mL xylazine,
and 0.5 mg/mL acepromazine
5% povidone iodine for opthalmic surgical wash
2% lidocaine (sterile) for opthalmic administration (2 drops per eye)
sterile 0.9% NaCl for opthalmic irrigation

[0265] 5. Surgical Methods

[0266] Standard surgical procedure was performed as described in Pandey et al., supra. Filter disks were incubated in 1 μL of each solution for approximately 30 minutes prior to implantation.

[0267] 6. Experimental Protocol

[0268] The animal corneas were treated with the treatment groups as described above. Animals were allowed to recover for 5 days after treatment with daily observation (scoring 0-3). On the fifth day animals were euthanized and digital images of each eye was obtained for quantitaion using Image Pro Plus. Quantitated neovascular surface areas were analyzed by ANOVA followed by two post-hoc tests including Dunnets and Tukey-Kramer tests for significance at the 95% confidence level. Dunnets provide information on the significance between the differences within the means of treatments vs. controls while Tukey-Kramer provide information on the significance of differences within the means of each group.

[0269] Results are graphically represented in FIG. 18. As shown in FIG. 18, flt-1 4229 active hammerhead ribozyme at both concentrations was effective at inhibiting angiogenesis, while the inactive ribozyme did not show any significant reduction in angiogenesis. A statistically signifiant reduction in neovascular surface area was observed only with active ribozymes. This result clearly shows that the ribozymes are capable of significantly inhibiting angiogenesis in vivo. Specifically, the mechanism of inhibition appears to be by the binding and cleavage of target RNA by ribozymes.

### EXAMPLE 12

### Bioactivity of Anti-Angiogenesis Ribozymes Targeting flt-1 and kdr RNA

[0270] Materials and Methods

[0271] Ribozymes: Hammerhead ribozymes and controls designed to have attenuated activity (attenuated controls) were synthesized and purified as previously described above. The attenuated ribozyme controls maintain the binding arm sequence of the parent ribozyme and thus are still capable of binding to the mRNA target. However, they have two nucleotide changes in the core sequence that substantially reduce their ability to carry out the cleavage reaction. Ribozymes were designed to target Flt-1 or KDR mRNA sites conserved in human, mouse, and rat. In general, ribozymes with binding arms of seven nucleotides were designed and tested. If, however, only six nucleotides surrounding the cleavage site were conserved in all three species, six nucleotide binding arms were used. A subset of ribozyme and attenuated control sequences and modifications are listed in Table XII. Data are presented herein for 2′-NH₂ uridine modified ribozymes in cell proliferation studies and for 2′-C-allyl uridine modified ribozymes in RNAse protection, in vitro cleavage and corneal studies.

[0272] In vitro ribozyme cleavage assays: In vitro RNA cleavage rates on a 15 nucleotide synthetic RNA substrate were measured as previously described above.

[0273] Cell culture: Human dermal microvascular endothelial cells (HMVEC-d, Clonetics Corp.) were maintained at 37° C. in flasks or plates coated with 1.5% porcine skin gelatin (300 bloom, Sigma) in Growth medium (Clonetics Corp.) supplemented with 10-20% fetal bovine serum (FBS, Hyclone). Cells were grown to confluency and used up to the seventh passage. Stimulation medium consisted of 50% Sigma 99 media and 50% RPMI 1640 with L-glutamine and additional supplementation with 10 μg/mL Insulin-Transferrin-Selenium (Gibco BRL) and 10% FBS. Cell growth was stimulated by incubation in Stimulation medium supplemented with 20 ng/mL of either VEGF₁₆₅ or bFGF. VEGF₁₆₅ (165 amino acids) was selected for cell culture and animal studies because it is the predominant form of the four native forms of VEGF generated by alternative mRNA splicing. Cell culture assays were carried out in triplicate.

[0274] Ribozyme and Ribozyme/LIPOFECTAMINE™ Formulations:

[0275] Cell culture: Ribozymes or attenuated controls (50-200 nM) were formulated for cell culture studies and used immediately. Formulations were carried out with LIPOFECTAMINE™ (Gibco BRL) at a 3:1 lipid to phosphate charge ratio in serum-free medium (OPTI-MEM™, Gibco BRL) by mixing for 20 minutes at room temperature. For example, a 3:1 lipid to phosphate charge ratio was established by complexing 200 nM ribozyme with 10.8 μg/μL LIPOFECTAMINE™ (13.5 μM DOSPA).

[0276] In vivo: For corneal studies, lyophilized ribozyme or attenuated controls were resuspended in sterile water at a final stock concentration of 170 μg/μL (highest dose). Lower doses (1.7-50 μg/μL) were prepared by serial dilution in sterile water.

[0277] Proliferation assay: HMVEC-d were seeded (5×10³ cells/well) in 48-well plates (Costar) and incubated 24-30 hours in Growth medium at 37° C. After removal of the Growth medium, cells were treated with 50-200 DM LIPOFECTAMINE™ complexes of ribozyrne or attenuated controls for 2 hours in OPTI-MEM™. The ribozyme/control-containing medium was removed and the cells were washed extensively in 1× PBS. The medium was then replaced with Stimulation medium or Stimulation medium supplemented with 20 ng/mL VEGF₁₆₅ or bFGF. After 48 hours, the cell number was determined using a Coulter™ cell counter. Data are presented as cell number per well following 48 h of VEGF stimulation.

[0278] RNAse protection assay: HMVEC-d were seeded (2×10⁵ cells/well) in 6-well plates (Costar) and allowed to grow 32-36 hours in Growth medium at 37° C. Cells were treated with LIPOFECTAMINE™ complexes containing 200 nM ribozyme or attenuated control for 2 hours as described under “Proliferation Assay” and then incubated in Growth medium containing 20 ng/mL VEGF₁₆₅ for 24 hours. Cells were harvested and an RNAse protection assay was carried out using the Ambion Direct Protect kit and protocol with the exception that 50 mM EDTA was added to the lysis buffer to eliminate the possibility of ribozyme cleavage during sample preparation. Antisense RNA probes targeting portions of Flt-1 and KDR were prepared by transcription in the presence of [³²P]-UTP. Samples were analyzed on polyacrylamide gels and the level of protected RNA fragments was quantified using a Molecular Dynamics Phosphorlmager. The levels of Flt-1 and KDR were normalized to the level of cyclophilin (human cyclophilin probe template, Ambion) in each sample. The coefficient of variation for cyclophilin levels was 11% [265940 cpm±29386 (SD)] for all conditions tested here (i.e. in the presence of either active ribozymes or attenuated controls). Thus, cyclophilin is useful as an internal standard in these studies.

[0279] Rat Corneal Pocket Assay of VEGF-Induced Angiogenesis

[0280] Animal guidelines and anesthesia. Animal housing and experimentation adhered to standards outlined in the 1996 Guide for the Care and Use of Laboratory Animals (National Research Council). Male Sprague Dawley rats (250-300 g) were anesthetized with ketamine (50 mg/kg), xylazine (10 mg/kg), and acepromazine (0.5 mg/kg) administered intramuscularly (im). The level of anesthesia was monitored every 2-3 min by applying hind limb paw pressure and examining for limb withdrawal. Atropine (0.4 mg/kg, im) was also administered to prevent potential corneal reflex-induced bradycardia.

[0281] Preparation of VEGF soaked disk. For corneal implantation, 0.57 mm diameter nitrocellulose disks, prepared from 0.45 μm pore diameter nitrocellulose filter membranes (Millipore Corporation), were soaked for 30 min in 1 μL of 30 μM VEGF₁₆₅ in 82 mM Tris HCl (pH 6.9) in covered petri dishes on ice.

[0282] Corneal surgery. The rat corneal model used in this study was a modified from Koch et al. Supra and Pandey et al., supra. Briefly, corneas were irrigated with 0.5% povidone iodine solution followed by normal saline and two drops of 2% lidocaine. Under a dissecting microscope (Leica MZ-6), a stromal pocket was created and a presoaked filter disk (see above) was inserted into the pocket such that its edge was 1 mm from the corneal limbus.

[0283] Intraconjunctival injection of test solutions. Immediately after disk insertion, the tip of a 40-50 μm OD injector (constructed in our laboratory) was inserted within the conjunctival tissue 1 mm away from the edge of the corneal limbus that was directly adjacent to the VEGF-soaked filter disk. Six hundred nanoliters of test solution (ribozyme, attenuated control or sterile water vehicle) were dispensed at a rate of 12 μL/min using a syringe pump (Kd Scientific). The injector was then removed, serially rinsed in 70% ethanol and sterile water and immersed in sterile water between each injection. Once the test solution was injected, closure of the eyelid was maintained using microaneurism clips until the animal began to recover gross motor activity. Following treatment, animals were warmed on a heating pad at 37° C.

[0284] Animal treatment groups/experimental protocol. Ribozymes targeting Flt-1 site 4229 and KDR mRNA site 726 were tested in the corneal model along with their attenuated controls. Five treatment groups were assigned to examine the effects of five doses of each test substance over a dose range of 1-100 μg on VEGF-stimulated angiogenesis. Negative (30 μM VEGF soaked filter disk and intraconjunctival injection of 600 nL sterile water) and no stimulus (Tris-soaked filter disk and intraconjunctival injection of sterile water) control groups were also included. Each group consisted of five animals (10 eyes) receiving the same treatment.

[0285] Quantitation of angiogenic response. Five days after disk implantation, animals were euthanized following im administration of 0.4 mg/kg atropine and corneas were digitally imaged. The neovascular surface area (NSA, expressed in pixels) was measured postmortem from blood-filled corneal vessels using computerized morphometry (Inage Pro Plus, Media Cybernetics, v2.0). The individual mean NSA was determined in triplicate from three regions of identical size in the area of maximal neovascularization between the filter disk and the limbus. The number of pixels corresponding to the blood-filled corneal vessels in these regions was summated to produce an index of NSA. A group mean NSA was then calculated. Data from each treatment group were normalized to VEGF/ribozyme vehicle-treated control NSA and finally expressed as percent inhibition of VEGF-induced angiogenesis.

[0286] Statistics. After determining the normality of treatment group means, group mean percent inhibition of VEGF-induced angiogenesis was subjected to a one-way analysis of variance. This was followed by two post-hoc tests for significance including Dunnett's (comparison to VEGF control) and Tukey-Kramer (all other group mean comparisons) at alpha=0.05. Statistical analyses were performed using JMP v.3.1.6 (SAS Institute).

[0287] Results

[0288] Ribozyme-mediated reduction of VEGF-induced cell proliferation: Ribozyme cleavage of Flt-1 or KDR mRNA should result in a decrease in the density of cell surface VEGF receptors. This decrease should limit VEGF binding and consequently interfere with the mitogenic signaling induced by VEGF. To determine if cell proliferation was impacted by anti-Flt-1 and/or anti-KDR ribozyme treatment, proliferation assays using cultured human microvascular cells were carried out. Ribozymes included in the proliferation assays were initially chosen by their ability to decrease the level of VEGF binding to treated cells (see FIG. 8). In these initial studies, ribozymes targeting 20 sites in the coding region of each mRNA were screened. The most effective ribozymes against two sites in each target (Table XII), Flt-1 sites 1358 and 4229 and KDR sites 726 and 3950, were included in the proliferation assays reported here (FIG. 19). In addition, attenuated analogs of each ribozyme were used as controls (Table XII). These attenuated controls are still capable of binding to the mRNA target since the binding arm sequence is maintained. However, these controls have two nucleotide changes in the core sequence that substantially reduce their ability to carry out the cleavage reaction.

[0289] The antiproliferative effect of active ribozymes targeting two lead sites on each VEGF receptor mRNA is shown in FIG. 19. The active ribozymes tested decreased the relative proliferation of HMVEC-d after VEGF stimulation, an effect that increased with ribozyme concentration. This concentration dependency was not observed following treatment with the attenuated controls designed for these sites. In fact, little or no change in cell growth was noted following treatment with the attenuated controls, even though these controls can still bind to the specific target sequences. At 200 nM, there was a distinct “window” between the anti-proliferative effects of each ribozyme and its attenuated control; a trend also observed at lower doses. This window of inhibition of proliferation (56-77% based on total cells/well) reflects the contribution of ribozyme-mediated activity. In comparison, no effect of anti-Flt-1 or anti-KDR ribozymes was noted on bFGF-stimulated cell proliferation (FIGS. 19C, 19F). Moreover, an irrelevant, but active, ribozyine whose binding sequence is not found in either Flt-1 or KDR mRNA had no effect in this assay (FIG. 19B). These data are consistent with the basic ribozyme mechanism in which binding and cleavage are necessary components. Although the relative surface distribution of Flt-1 and KDR receptors in this cell type is not known, the antiproliferative effects of these ribozymes indicate that, at least in cell culture, both receptors are functionally coupled to proliferation.

[0290] Specific reduction of Fit-1 or KDR mRNA by ribozyme treatment: To confirm that anti-Flt-1 and anti-KDR ribozymes reduce their respective mRNA targets, cellular levels of Flt-1 or KDR were quantified using an RNAse protection assay with specific Flt-1 or KDR probes. For each target, one ribozyme/attenuated control pair was chosen for continued study. Data from a representative experiment are shown in FIG. 20. Exposure of HMVEC-d to active ribozyme targeting Flt-1 site 4229 decreased Flt-1 mRNA, but not KDR mRNA. Likewise, treatment with the active ribozyme targeting KDR site 726 decreased KDR, but not Flt-1 mRNA. Both ribozymes decreased the level of their respective target RNA by greater than 50%. The degree of reduction associated with the corresponding attenuated controls was not greater than 13%.

[0291] In vitro Activity of Anti-Flt and Anti-KDR Ribozymes

[0292] To confirm further the necessity of an active ribozyme core, in vitro cleavage activities were determined for the Flt-1 site 4229 ribozyme and the KDR site 726 ribozyme as well as their paired attenuated controls. The first order rate constants calculated from the time-course of short substrate cleavage for the anti-Flt-1 ribozyme and its attenuated control were 0.081+0.0007 min⁻¹ and 0.001±6×10⁻⁵ min⁻¹, respectively. For the anti-KDR ribozyme and its paired control, the first order rate constants were 0.434±0.024 min⁻¹ and 0.002±1×10⁻⁴ min⁻¹, respectively. Although the attenuated controls retain a very slight level of cleavage activity under these optimized conditions, the decrease in in vitro cleavage activity between each active ribozyme and its paired attenuated control is about two orders of magnitude. Thus, an active core is essential for cleavage activity in vitro and is also necessary for ribozyme activity in cell culture.

[0293] Ribozyme-mediated reduction of VEGF-induced angiogenesis in vivo. To assess whether ribozymes targeting VEGF receptor mRNA could impact the complex process of angiogenesis, prototypic anti-Flt-1 and KDR ribozymes that were identified in cell culture studies were screened in a rat corneal pocket assay of VEGF-induced angiogenesis. In this assay, corneas implanted with VEGF-containing filter disks exhibited a robust neovascular response in the corneal region between the disk and the corneal limbus (from which the new vessels emerge). Disks containing a vehicle solution elicited no angiogenic response. In separate studies, intraconjunctival injections of sterile water vehicle did not affect the magnitude of the VEGF-induced angiogenic response. In addition, ribozyme injections alone did not induce angiogenesis.

[0294] The dose-related effects of anti-Flt-1 or KDR ribozymes on the VEGF-induced angiogenic response were then examined. FIGS. 21 and 22 illustrate the quantified antiangiogenic effect of the anti-Flt-1 (site 4229) and KDR (site 726) ribozymes and their attenuated controls over a dose range from 1 to 100 μg, respectively. For both ribozymes, the maximal antiangiogenic response (48 and 36% for anti-Flt-1 and KDR ribozymes, respectively) was observed at a dose of 10 μg.

[0295] The anti-Flt-1 ribozyme produced a significantly greater antiangiogenic response than its attenuated control at 3 and 10 μg (p<0.05; FIG. 21). Its attenuated control exhibited a small but significant antiangiogenic response at doses above 10 μg compared to vehicle treated VEGF controls (p<0.05; FIG. 21). At its maximum, this response was not significantly greater than that observed with the lowest dose of active anti-Flt-1 ribozyme. The anti-KDR ribozyme significantly inhibited angiogenesis from 3 to 30 μg (p<0.05; FIG. 22). The anti-KDR attenuated control had no significant effect at any dose tested.

### EXAMPLE 13

### In Vivo Inhibition of Tumor Growth and Metastases by VEGF-R Ribozymes

[0296] A. Lewis Lung Carcinoma Mouse Model: Ribozymes were chemically synthesized as described above. The sequence of ANGIOZYME™ bound to its target RNA is shown in FIG. 26.

[0297] The tumors in this study were derived from a cell line (LLC-HM) which gives rise to reproducible numbers of spontaneous lung metastases when propagated in vivo. The LLC-HM line was obtained from Dr. Michael O'Reilly, Harvard University. Tumor neovascularization in Lewis lung carcinoma has been shown to be VEGF-dependent. Tumors from mice bearing LLC-HM (selected for the highly metastatic phenotype by serial propagation) were harvested 20 days post-inoculation. A tumor brei suspension was prepared from these tumors according to standard protocols. On day 0 of the study, 0.5×10⁶ viable LLC-HM tumor cells were injected subcutaneously (sc) into the dorsum or flank of previously untreated mice (100 μL injectate). Tumors were allowed to grow for a period of 3 days prior to initiating continuous intravenous administration of saline or 30 mg/kg/d ANGIOZYME™ via Alzet mini-pumps. One set of animals was dosed from days 3 to 17, inclusive. Tumor length and width measurements and volumes were calculated according to the formula: Volume=0.5(length)(width)². At post-inoculation day 25, animals were euthanized and lungs harvested. The number of lung macrometastatic nodules was counted. It should be noted that metastatic foci were quantified 8 days after the cessation of dosing. Ribozyme solutions were prepared to deliver to another set of animals 100, 10, 3, or 1 mg/kg/day of ANGIOZYME™ via Alzet mini-pumps. A total of 10 animals per dose or saline control group were surgically implanted on the left flank with osmotic mini-pumps pre-filled with the respective test solution three days following tumor inoculation. Pumps were attached to indwelling jugular vein catheters.

[0298] FIG. 27 shows the antitumor effects of ANGIOZYME™. There is a statistically significant inhibition (p<0.05) of primary LLC-HM tumor growth in tumors grown in the flank regions compared to saline control. ANGIOZYME™ significantly reduced (p<0.05) the number of lung metastatic foci in animals inoculated either in the flank regions. FIG. 28 illustrates the dose-dependent anti-metastatic effect of ANGIOZYME™ compared to saline control.

[0299] B. Mouse Colorectal Cancer Model. KM12L4a-16 is a human colorectal cancer cell line. On day 0 of the study, 0.5×10⁶ KM12L4a-16 cells were implanted into the spleen of nude mice. Three days after tumor inoculation, Alzet minipumps were implanted and continuous subcutaneous delivery of either saline or 12, 36 or 100 mg/kg/day of ANGIOZYME™ was initiated. On day 5, the spleens containing the primary tumors were removed. On day 18, the Alzet minipumps were replaced with fresh pumps so that delivery of saline or ANGIOZYME™ was continuous over a 28 day period from day 3 to day 32. Animals were euthanized on day 41 and the liver tumor burden was evaluated.

[0300] Following treatment with 100 mg/kg/day of ANGIOZYME™, there was a significant reduction in the incidence and median number of liver metastasis (FIGS. 29 and 30). In saline-treated animals, the median number of metastases was 101. However, at the high dose of ANGIOZYME™ (100 mg/kg/day), the median number of metastases was zero.

### EXAMPLE 14

### Effect of ANGIOZYME™ Alone or in Combination with Chemotherapeutic Agents in the Mouse Lewis Lung Carcinoma Model

[0301] Methods

[0302] Tumor inoculations. Male C57/BL6 mice, age 6 to 8 weeks, were inoculated subcutaneously in the flank with 5×10⁵ LLC-HM cells from brei preparations made from tumors grown in mice.

[0303] Ribozymes and controls. The ribozyme and controls tested in this study are given in Table XIII. RPI.4610, also known as ANGIOZYME™, is an anti-Flt-1 ribozyme that targets site 4229 in the human Flt-1 receptor mRNA (EMBL accession no. X51602). The controls tested include RPI.13141, an attenuated version of RPI.4610 in which four nucleotides in the catalytic core are changed so that the cleavage activity is dramatically decreased. RPI.13141, however, maintains the base composition and binding arms of RPI.4610 and so is still capable of binding to the target site. The second control (RPI.13030) also has changes to the catalytic core (three) to inhibit cleavage activity, but in addition the sequence of the binding arms has been scrambled so that it can no longer bind to the target sequence. One nucleotide in the arm of RPI.13030 is also changed to maintain the same base composition as RPI.4610.

[0304] Ribozyme administrations. Ribozymes and controls were resuspended in normal saline. Administration was initiated seven days following tumor inoculation. Animals either received a daily subcutaneous injection (30 mg/kg test substance) from day 7 to day 20 or were instrumented with an Alzet osmotic minipump (12 μL/day flow rate) containing a solution of ribozyme or control. Subcutaneous infusion pumps delivered the test substances (30 mg/kg/day) from day 7 to 20 (14-day pumps, 420 mg/kg total test substance) or days 7-34 (28-day pumps, 840 mg/kg total test substance). Where indicated, chemotherapeutic agents were given in combination with ribozyme treatment. Cyclophosphamide was given by ip administration on days 7, 9 and 11 (125 mg/kg). Gemcitabine was given by intraperitoneal administration on days 8, 11 and 14 (125 mg/kg). Untreated, uninstrumented animals were used as comparison. Five animals were included in each group.

[0305] Results

[0306] The antiangiogenic ribozyme, ANGIOZYME™, was tested in a model of Lewis lung carcinoma alone and in combination with two chemotherapeutic agents. Previously (see above), 30 mg/kg/day ANGIOZYME™ alone was determined to inhibit both primary tumor growth and lung metastases in a highly metastatic variant of Lewis lung (continuous 14-day intraveneous delivery via Alzet minipump).

[0307] In this study, 30 mg/kg/day ANGIOZYME™ delivered either as a daily subcutaneous bolus injection or as a continuous infusion from an Alzet minipump resulted in a delay in tumor growth (FIG. 23). On average, tumor growth to 500 mm³ was delayed by approximately 7 days in animals being treated with ANGIOZYME™ compared to an untreated group. Growth of tumors in animals being treated with either of two attenuated controls was delayed by only approximately 2 days.

[0308] ANGIOZYME™ delivered by subcutaneous bolus was also tested in combination with either Gemcytabine or cyclophosphamide (FIG. 24). Tumor growth delay increased by about 3 days in the presence of combination therapy with ANGIOZYME™ and Gemcytabine over the effects of either treatment alone. The combination of ANGIOZYME™ and cyclophosphamide did not increase tumor growth delay over that of cyclophosphamide alone, however, suboptimal doses of cyclophosphamide were not included in this study. Neither of the attenuated controls increased the effect of the chemotherapeutic agents.

[0309] The effect of ANGIOZYME™ on metastases to the lung was also determined in the presence and absence of additional chemotherapeutic treatment. Macrometastases to the lungs were counted in two animals in each treatment group on day 20. Data for the daily subcutaneous administration of 30 mg/kg ANGIOZYME™ alone or with Gemcytabine or cyclophosphamide is given in FIG. 25. In the presence of ANGIOZYME™, with or without a chemotherapeutic agent, the lung metastases were reduced to zero. Treatment with either Gemcytabine or cyclophosphamide alone (mean number of metastases 4.5 and 4, respectively) were not as effective as ANGIOZYME™ alone or when used in combination with ANGIOZYME™. Neither of the attenuated controls increased the effect of the chemotherapeutic agents.

[0310] The effect on metastases to the lung was also determined following continuous treatment with ANGIOZYME™. At day 20, an average of approximately 8 macrometastases were noted in the treatment groups which had been instrumented with Alzet minipumps (either 14- or 28-day pumps). This is a decrease in metastases of approximately 50% from the untreated group. Since ANGIOZYME™ delivered by a daily subcutaneous bolus resulted in zero metastases (FIG. 4) in the two animals counted, it is possible that the additional burden of being instrumented with the minipump contributes to a slightly decreased response to ANGIOZYME™.

### EXAMPLE 15

### Phase I/II Study of Repetitive Dose ANGIOZYME™ Targeting the FLT-1 Receptor of VEGF

[0311] A ribozyme therapeutic agent ANGIOZYME™, was assessed by daily subcutaneous administration in a phase I/II trial for 31 patients with refractory solid tumors. Demographic information relating to patients enrolled in the study are shown in Table XX. The primary study endpoint was to determine the safety and maximum tolerated dose of ANGIOZYME™. Secondary endpoints assessed ANGIOZYME™ pharmacokinetics and clinical response. Patients were treated in four cohorts of three patients at doses of 10, 30, 100, and 300 mg/m²/day. Following the dose escalation phase, an additional 15 evaluable patients were entered in an expanded cohort at 100 mg/m2/day. Patients were dosed for a minimum of 29 consecutive days with 24-hour pharmacokinetic analyses on Day 1 and 29. Clinical response was assessed monthly.

[0312] Results

[0313] The data from 20 patients indicated that ANGIOZYME™ was well tolerated, with no systemic adverse events. FIG. 31 shows the plasma concentration profile of ANGIOZYME™ after a single SC (sub-cutaneous) dose of 10, 30, 100, or 300 mg/m². The pharmacokinetic parameters of ANGIOZYME™ after SC bolus administration are outlined in Table XXI. An MTD (maximum tolerated dose) could not be established. One patient in the 300 mg/m²/d group experienced a grade 3 injection site reaction. Patients in the other groups experienced intermittent grade 1 and grade 2 injection site reactions with erythema and induration. No systemic or laboratory toxicities were observed. Pharmacokinetic analyses demonstrated dose-dependent plasma concentrations with good bioavailability (70-90%), t1/2=209-384 min, and no accumulation after repeated doses. To date, 17/28 (61%) of evaluable patients have had stable disease for periods of one to six months and two patients (nasopharyngeal squamous cell carcinoma and melanoma) had minor clinical responses. The patient with nasopharyngeal carcinoma demonstrated central tumor necrosis as indicated by MRI. The longest period of treatment thus far has been 8 months for two patients at 100 mg/m²/d (breast, peritoneal mesothelioma).

### EXAMPLE 16

### In vivo Inhibition of Neovascularization in an Ocular Animal Model by VEGF-R Ribozymes

[0314] Summary of the Mouse Model: A mouse model of proliferative retinopathy (Aiello et al., 1995, Proc. Natl. Acad. Sci. USA 92: 10457-10461; Robinson et al., 1996, Proc. Natl. Acad. Sci. USA 93: 4851-4856; Pierce et al., 1996, Archives of Ophthalmology 114: 1219-1228) in which neovascularization of the mouse retina is induced by exposure of 7-day old mice to 75% oxygen followed by a return to normal room air. The initial period in high oxygen causes an obliteration of developing blood vessels in the retina. Exposure to room air five days later is perceived as hypoxia by the now underperfused retina. The result is an immediate upregulation of VEGF mRNA and VEGF protein (between 6-12 hours) followed by an extensive retinal neovascularization that peaks in approximately 5 days. Although this model is more representative of retinopathy of prematurity than diabetic retinopathy, it is an accepted small animal model in which to study neovascular pathophysiology of the retina. In fact, intravitreal injection of certain antisense DNA constructs targeting VEGF mRNA have been found to be antiangiogenic in this model, as were soluble VEGF receptor chimeric proteins designed to bind VEGF in the vitreous humor (Aiello et al., 1995, Proc. Natl. Acad. Sci. USA 92: 10457-10461; Robinson et al., 1996, Proc. Natl. Acad. Sci. USA 93: 4851-4856; Pierce et al., 1996, Archives of Ophthalmology 114: 1219-1228).

[0315] Summary of experiment: The effect of an anti-KDR/Flk-1 ribozyme on the peak level of neovascularization was tested in the mouse model described above. As shown in FIG. 34A, P7 mice were removed from the hyperoxic chamber and the mice received two intraocular injections (P12 and P13) in the right eye of 10 μg RPI.4731, the anti-KDR/Flk-1 ribozyme. The left eye of each mouse was treated as a control and received intraocular injections of saline. Five days after being exposed to room air, neovascular nuclei in the retina of both eyes were counted. Data are presented in FIG. 34B. There was a significant decrease in retinal neovascularization (approximately 40%) compared to the control, saline-injected eyes.

[0316] RPI.4731 sequence and chemical composition:

[0317] 5′-uₛaₛcₛ aₛau ucU GAu Gag gcg aaa gcc Gaa Aag aca aB-3′ (SEQ ID NO: 13488)

[0318] where: uppercase G, A=ribonucleotides

[0319] lowercase=2′-OMe

[0320] U=2′-C-allyl uridine

[0321] B=inverted abasic nucleotide

[0322] S=phosphorothioate linkage

[0323] Indications

[0324] 1) Tumor angiogenesis: Angiogenesis has been shown to be necessary for tumors to grow into pathological size (Folkman, 1971, PNAS 76, 5217-5221; Wellstein & Czubayko, 1996, Breast Cancer Res and Treatment 38, 109-119). In addition, it allows tumor cells to travel through the circulatory system during metastasis. Increased levels of gene expression of a number of angiogenic factors such as vascular endothelial growth factor (VEGF) have been reported in vascularized and edema-associated brain tumors (Berkman et al., 1993 J. Clini. Invest. 91, 153). A more direct demonstration of the role of VEGF in tumor angiogenesis was demonstrated by Jim Kim et al., 1993 Nature 362,841 wherein, monoclonal antibodies against VEGF were successfully used to inhibit the growth of rhabdomyosarcoma, glioblastoma multiforme cells in nude mice. Similarly, expression of a dominant negative mutated form of the flt-1 VEGF receptor inhibits vascularization induced by human glioblastoma cells in nude mice (Millauer et al., 1994, Nature 367, 576). Specific tumor/cancer types that can be targeted using the nucleic acid molecules of the invention include but are not limited to the tumor/cancer types described under Diagnosis in Table XX.

[0325] 2) Ocular diseases: Neovascularization has been shown to cause or exacerbate ocular diseases including but not limited to, macular degeneration, neovascular glaucoma, diabetic retinopathy, myopic degeneration, and trachoma (Norrby, 1997, APMIS 105, 417-437). Aiello et al., 1994 New Engl. J. Med. 331, 1480, showed that the ocular fluid, of a majority of patients suffering from diabetic retinopathy and other retinal disorders, contains a high concentration of VEGF. Miller et al., 1994 Am. J. Pathol. 145, 574, reported elevated levels of VEGF mRNA in patients suffering from retinal ischemia. These observations support a direct role for VEGF in ocular diseases. Other factors, including those that stimulate VEGF synthesis, may also contribute to these indications.

[0326] 3) Dermatological Disorders: Many indications have been identified which may be angiogenesis dependent including, but not limited to, psoriasis, verruca vulgaris, angiofibroma of tuberous sclerosis, pot-wine stains, Sturge Weber syndrome, Kippel-Trenaunay-Weber syndrome, and Osler-Weber-Rendu syndrome (Norrby, supra). Intradermal injection of the angiogenic factor b-FGF demonstrated angiogenesis in nude mice (Weckbecker et al., 1992, Angiogenesis: Key principles-Science-Technology-Medicine, ed R. Steiner) Detmar et al., 1994 J. Exp. Med. 180, 1141 reported that VEGF and its receptors were over-expressed in psoriatic skin and psoriatic dermal microvessels, suggesting that VEGF plays a significant role in psoriasis.

[0327] 4) Rheumatoid arthritis: Immunohistochemistry and in situ hybridization studies on tissues from the joints of patients suffering from rheumatoid arthritis show an increased level of VEGF and its receptors (Fava et al., 1994 J. Exp. Med. 180, 341). Additionally, Koch et al., 1994 J. Immunol. 152, 4149, found that VEGF-specific antibodies were able to significantly reduce the mitogenic activity of synovial tissues from patients suffering from rheumatoid arthritis. These observations support a direct role for VEGF in rheumatoid arthritis. Other angiogenic factors including those of the present invention may also be involved in arthritis.

[0328] Combination Therapies

[0329] Gemcytabine and cyclophosphamide are non-limiting examples of chemotherapeutic agents that can be combined with or used in conjunction with the nucleic acid molecules (e.g. ribozyrnes and antisense molecules) of the instant invention. Those skilled in the art will recognize that other anti-angiogenic and/or anti-cancer compounds and therapies can be similarly be readily combined with the nucleic acid molecules of the instant invention (e.g. ribozymes and antisense molecules) and are hence within the scope of the instant invention. Such compounds and therapies are well known in the art (see for example Cancer: Principles and Pranctice of Oncology, Volumes 1 and 2, eds Devita, V. T., Hellman, S., and Rosenberg, S. A., J. B. Lippincott Company, Philadelphia, USA; incorporated herein by reference) and include, without limitations, folates, antifolates, pyrimidine analogs, fluoropyrimidines, purine analogs, adenosine analogs, topoisomerase I inhibitors, anthrapyrazoles, retinoids, antibiotics, anthacyclins, platinum analogs, alkylating agents, nitrosoureas, plant derived compounds such as vinca alkaloids, epipodophyllotoxins, tyrosine kinase inhibitors, taxols, radiation therapy, surgery, nutritional supplements, gene therapy, radiotherapy, for example 3D-CRT, immunotoxin therapy, for example ricin, and monoclonal antibodies. Specific examples of chemotherapeutic compounds that can be combined with or used in conjuction with the nucleic acid molecules of the invention include, but are not limited to, Paclitaxel; Docetaxel; Methotrexate; Doxorubin; Edatrexate; Vinorelbine; Tomaxifen; Leucovorin; 5-fluoro uridine (5-FU); Ionotecan; Cisplatin; Carboplatin; Amsacrine; Cytarabine; Bleomycin; Mitomycin C; Dactinomycin; Mithramycin; Hexamethylmelamine; Dacarbazine; L-asperginase; Nitrogen mustard; Melphalan, Chlorambucil; Busulfan; Ifosfamide; 4-hydroperoxycyclophosphamide, Thiotepa; Irinotecan (CAMPTOSAR®, CPT-11, Camptothecin-11, Campto) Tamoxifen, Herceptin; IMC C225; ABX-EGF: and combinations thereof.

[0330] Diagnostic Uses

[0331] The nucleic acid molecules of this invention (e.g., enzymatic nucleic acid) can be used as diagnostic tools to examine genetic drift and mutations within diseased cells or to detect the presence of flt-1, KDR and/or flk-1 RNA in a cell. The close relationship between enzymatic nucleic acid activity and the structure of the target RNA allows the detection of mutations in any region of the molecule which alters the base-pairing and three-dimensional structure of the target RNA. By using multiple enzymatic nucleic acids described in this invention, one can map nucleotide changes which are important to RNA structure and function in vitro, as well as in cells and tissues. Cleavage of target RNAs with enzymatic nucleic acid can be used to inhibit gene expression and define the role (essentially) of specified gene products in the progression of disease. In this manner, other genetic targets can be defined as important mediators of the disease. These experiments can lead to better treatment of the disease progression by affording the possibility of combinational therapies (e.g., multiple enzymatic nucleic acids targeted to different genes, enzymatic nucleic acids coupled with known small molecule inhibitors, or intermittent treatment with combinations of enzymatic nucleic acids and/or other chemical or biological molecules). Other in vitro uses of enzymatic nucleic acids of the invention are well known in the art, and include detection of the presence of mRNAs associated with flt-1, KDR and/or flk-1 related condition. Such RNA is detected by determining the presence of a cleavage product after treatment with a ribozyme using standard methodology.

[0332] In a specific example, enzymatic nucleic acids which can cleave only wild-type or mutant forms of the target RNA are used for the assay. The first enzymatic nucleic acid is used to identify wild-type RNA present in the sample and the second enzymatic nucleic acid is used to identify mutant RNA in the sample. As reaction controls, synthetic substrates of both wild-type and mutant RNA are cleaved by both enzymatic nucleic acids to demonstrate the relative enzymatic nucleic acid efficiencies in the reactions and the absence of cleavage of the “non-targeted” RNA species. The cleavage products from the synthetic substrates also serve to generate size markers for the analysis of wild-type and mutant RNAs in the sample population. Thus, each analysis requires two enzymatic nucleic acids, two substrates and one unknown sample which is combined into six reactions. The presence of cleavage products is determined using an RNAse protection assay so that full-length and cleavage fragments of each RNA can be analyzed in one lane of a polyacrylamide gel. It is not absolutely required to quantify the results to gain insight into the expression of mutant RNAs and putative risk of the desired phenotypic changes in target cells. The expression of mRNA whose protein product is implicated in the development of the phenotype (i.e., flt-1, KDR and/or flk-1) is adequate to establish risk. If probes of comparable specific activity are used for both transcripts, then a qualitative comparison of RNA levels is adequate and decreases the cost of the initial diagnosis. Higher mutant form to wild-type ratios is correlated with higher risk whether RNA levels are compared qualitatively or quantitatively. The use of enzymatic nucleic acid molecules in diagnostic applications contemplated by the instant invention is more fully described in George et al., U.S. Pat. Nos. 5,834,186 and 5,741,679, Shih et al., U.S. Pat. No. 5,589,332, Nathan et al., U.S. Pat. No. 5,871,914, Nathan and Ellington, International PCT publication No. WO 00/24931, Breaker et al., International PCT Publication Nos. WO 00/26226 and 98/27104, and Sullenger et al., International PCT publication No. WO 99/29842.

[0333] Additional Uses

[0334] Potential usefulness of sequence-specific enzymatic nucleic acid molecules of the instant invention have many of the same applications for the study of RNA that DNA restriction endonucleases have for the study of DNA (Nathans et al., 1975 Ann. Rev. Biochem. 44:273). For example, the pattern of restriction fragments can be used to establish sequence relationships between two related RNAs, and large RNAs can be specifically cleaved to fragments of a size more useful for study. The ability to engineer sequence specificity of the enzymatic nucleic acid molecule is ideal for cleavage of RNAs of unknown sequence. Applicant describes the use of nucleic acid molecules to down-regulate gene expression of target genes in bacterial, microbial, fungal, viral, and eukaryotic systems including plant, or mammalian cells.

[0335] All patents and publications mentioned in the specification are indicative of the levels of skill of those skilled in the art to which the invention pertains. All references cited in this disclosure are incorporated by reference to the same extent as if each reference had been incorporated by reference in its entirety individually.

[0336] One skilled in the art would readily appreciate that the present invention is well adapted to carry out the objects and obtain the ends and advantages mentioned, as well as those inherent therein. The methods and compositions described herein as presently representative of preferred embodiments are exemplary and are not intended as limitations on the scope of the invention. Changes therein and other uses will occur to those skilled in the art, which are encompassed within the spirit of the invention, are defined by the scope of the claims.

[0337] It will be readily apparent to one skilled in the art that varying substitutions and modifications may be made to the invention disclosed herein without departing from the scope and spirit of the invention. Thus, such additional embodiments are within the scope of the present invention and the following claims.

[0338] The invention illustratively described herein suitably may be practiced in the absence of any element or elements, limitation or limitations which is not specifically disclosed herein. Thus, for example, in each instance herein any of the terms “comprising”, “consisting essentially of” and “consisting of” may be replaced with either of the other two terms. The terms and expressions which have been employed are used as terms of description and not of limitation, and there is no intention that in the use of such terms and expressions of excluding any equivalents of the features shown and described or portions thereof, but it is recognized that various modifications are possible within the scope of the invention claimed. Thus, it should be understood that although the present invention has been specifically disclosed by preferred embodiments, optional features, modification and variation of the concepts herein disclosed may be resorted to by those skilled in the art, and that such modifications and variations are considered to be within the scope of this invention as defined by the description and the appended claims.

[0339] In addition, where features or aspects of the invention are described in terms of Markush groups or other grouping of alternatives, those skilled in the art will recognize that the invention is also thereby described in terms of any individual member or subgroup of members of the Markush group or other group.

[0340] Other embodiments are within the claims that follow.

TABLE I
Characteristics of Ribozymes

Group I Introns
Size: ˜200 to >1000 nucleotides.
Requires a U in the target sequence immediately 5′ of the cleavage
site.
Binds 4-6 nucleotides at 5′ side of cleavage site.
Over 75 known members of this class. Found in Tetrahymena
thermophila rRNA, fungal mitochondria, chloroplasts, phage T4,
blue-green algae, and others.
RNAseP RNA (M1 RNA)
Size: ˜290 to 400 nucleotides.
RNA portion of a ribonucleoprotein enzyme. Cleaves tRNA
precursors to form mature tRNA.
Roughly 10 known members of this group all are bacterial in origin.
Hammerhead Ribozyme
Size: ˜13 to 40 nucleotides.
Requires the target sequence UH immediately 5′ of the cleavage
site.
Binds a variable number of nucleotides on both sides of the
cleavage site.
14 known members of this class. Found in a number of plant
pathogens (virusoids) that use RNA as the infectious agent (FIGS. 1
and 2)
Hairpin Ribozyme
Size: ˜50 nucleotides.
Requires the target sequence GUC immediately 3′ of the cleavage
site.
Binds 4-6 nucleotides at 5′ side of the cleavage site and a variable
number to the 3′ side of the cleavage site.
Only 3 known member of this class. Found in three plant pathogen
(satellite RNAs of the tobacco ringspot virus, arabis mosaic virus
and chicory yellow mottle virus) which uses RNA as the infectious
agent (FIG. 3).
Hepatitis Delta Virus (HDV) Ribozyme
Size: 50-60 nucleotides (at present).
Sequence requirements not fully determined.
Binding sites and structural requirements not fully determined,
although no sequences 5′ of cleavage site are required.
Only 1 known member of this class. Found in human HDV (FIG.
4).
Neuraspora VS RNA Ribozyme
Size: ˜144 nucleotides (at present)
Cleavage of target RNAs recently demonstrated.
Sequence requirements not fully determined.
Binding sites and structural requirements not fully determined. Only
1 known member of this class. Found in Neurospora VS RNA
(FIG. 5).

[0341] TABLE II
Human flt1 VEGF Receptor—Hammerhead Ribozyme and Substrate Sequence

| | | Seq ID | | Seq ID |
|---|---|---|---|---|
| Pos | Substrate | No | HH Ribozyme | No |
| 10 | CGGACACUC CUCUCGGC | 1 | GCCGAGAG CUGAUGAGGCCGUUAGGCCGAA AGUGUCCG | 9420 |
| 13 | ACACUCCUC UCGGCUCC | 2 | GGAGCCGA CUGAUGAGGCCGUUAGGCCGAA AGGAGUGU | 9421 |
| 15 | ACUCCUCUC GGCUCCUC | 3 | GAGGAGCC CUGAUGAGGCCGUUAGGCCGAA AGAGGACU | 9422 |
| 20 | UCUCGGCUC CUCCCCGG | 4 | CCGGGGAG CUGAUGAGGCCGUUAGGCCGAA AGCCGAGA | 9423 |
| 23 | CGGCUCCUC CCCGGCAG | 5 | CUGCCGGG CUGAUGAGGCCGUUAGGCCGAA AGGAGCCG | 9424 |
| 43 | CGGCGGCUC GGAGCGGG | 6 | CCCGCUCC CUGAUGAGGCCGUUAGGCCGAA AGCCGCCG | 9425 |
| 54 | AGCGGGCUC CGGGGCUC | 7 | GAGCCCCG CUGAUGAGGCCGUUAGGCCGAA AGCCCGCU | 9426 |
| 62 | CCGGGGCUC GGGUGCAG | 8 | CUGCACCC CUGAUGAGGCCGUUAGGCCGAA AGCCCCGG | 9427 |
| 97 | GCGAGGAUU ACCCGGGG | 9 | CCCCGGGU CUGAUGAGGCCGUUAGGCCGAA AUCCUCGC | 9429 |
| 98 | CGAGGAUUA CCCGGGGA | 10 | UCCCCGGG CUGAUGAGGCCGUUAGGCCGAA AAUCCUCG | 9429 |
| 113 | GAAGUGCUU GUCUCCUG | 11 | CAGGAGAC CUGAUGAGGCCGUUAGGCCGAA ACCACUUC | 9430 |
| 116 | GUGGUUGUC UCCUGGCU | 12 | AGCCAGGA CUGAUGAGGCCGUUAGGCCGAA ACAACCAC | 9431 |
| 118 | GGUUGUCUC CUGGCUGG | 13 | CCAGCCAG CUGAUGAGGCCGUUAGGCCGAA AGACAACC | 9432 |
| 145 | CGCGCGCUC AGGGCGCG | 14 | CGCGCCCU CUGAUGAGGCCGUUAGGCCGAA AGCGCCCG | 9433 |
| 185 | GACGGACUC UGGCGGCC | 15 | GGCCGCCA CUGAUGAGGCCGUUAGGCCGAA AGUCCGUC | 9434 |
| 198 | GGCCGGGUC GUUGGCCG | 16 | CGGCCAAC CUGAUGAGGCCGUUAGGCCGAA ACCCGGCC | 9435 |
| 201 | CGGGUCGUU GGCCGGGG | 17 | CCCCGGCC CUGAUGAGGCCGUUAGGCCGAA ACGACCCG | 9436 |
| 240 | GGCCGCGUC GCGCUCAC | 18 | GUGAGCGC CUGAUGAGGCCGUUAGGCCGAA ACGCGGCC | 9437 |
| 246 | GUCGCGCUC ACCAUGGU | 19 | ACCAUGGU CUGAUGAGGCCGUUAGGCCGAA AGCGCGAC | 9438 |
| 255 | ACCAUGGUC AGCUACUG | 20 | CAGUAGCU CUGAUGAGGCCGUUAGGCCGAA ACCAUGGU | 9439 |
| 260 | GGUCAGCUA CUGGGACA | 21 | UGUCCCAG CUGAUGAGGCCGUUAGGCCGAA AGCUGACC | 9440 |
| 276 | ACCGGGGUC CUGCUGUG | 22 | CACAGCAG CUGAUGAGGCCGUUAGGCCGAA ACCCCGGU | 9441 |
| 294 | GCGCUGCUC AGCUGUCU | 23 | ACACAGCU CUGAUGAGGCCGUUAGGCCGAA AGCAGCGC | 9442 |
| 301 | UCAGCUGUC UGCUUCUC | 24 | GAGAAGCA CUGAUGAGGCCGUUAGGCCGAA ACAGCUGA | 9443 |
| 306 | UGUCUGCUU CUCACAGG | 25 | CCUGUGAG CUGAUGAGGCCGUUAGGCCGAA AGCAGACA | 9444 |
| 307 | GUCUGCUUC UCACAGGA | 26 | UCCUGUGA CUGAUGAGGCCGUUAGGCCGAA AAGCAGAC | 9445 |
| 309 | CUGCUUCUC ACAGGAUC | 27 | GAUCCUGU CUGAUGAGGCCGUUAGGCCGAA AGAAGCAG | 9446 |
| 317 | CACAGGAUC UAGUUCAG | 28 | CUGAACUA CUGAUGAGGCCGUUAGGCCGAA AUCCUGUG | 9447 |
| 319 | CAGGAUCUA GUUCAGGU | 29 | ACCUGAAC CUGAUGAGGCCGUUAGGCCGAA AGAUCCUG | 9448 |
| 322 | GAUCUAGUU CAGGUUCA | 30 | UGAACCUG CUGAUGAGGCCGUUAGGCCGAA ACUAGAUC | 9449 |
| 323 | AUCUAGUUC AGGUUCAA | 31 | UUGAACCU CUGAUGAGGCCGUUAGGCCGAA AACUAGAU | 9450 |
| 328 | GUUCAGGUU CAAAAUUA | 32 | UAAUUUUG CUGAUGAGGCCGUUAGGCCGAA ACCUGAAC | 9451 |
| 329 | UUCAGGUUC AAAAUUAA | 33 | UUAAUUUU CUGAUGAGGCCGUUAGGCCGAA AACCUGAA | 9452 |
| 335 | UUCAAAAUU AAAAGAUC | 34 | GAUCUUUU CUGAUGAGGCCGUUAGGCCGAA AUUUUGAA | 9453 |
| 336 | UCAAAAUUA AAAGAUCC | 35 | GGAUCUUU CUGAUGAGGCCGUUAGGCCGAA AAUUUUGA | 9454 |
| 343 | UAAAAGAUC CUGAACUG | 36 | CAGUUCAG CUGAUGAGGCCGUUAGGCCGAA AUCUUUUA | 9455 |
| 355 | AACUGAGUU UAAAAGGC | 37 | GCCUUUUA CUGAUGAGGCCGUUAGGCCGAA ACUCAGUU | 9456 |
| 356 | ACUGAGUUU AAAAGGCA | 38 | UGCCUUUU CUGAUGAGGCCGUUAGGCCGAA AACUCAGU | 9457 |
| 357 | CUGAGUUUA AAAGGCAC | 39 | GUGCCUUU CUGAUGAGGCCGUUAGGCCGAA AAACUCAG | 9458 |
| 375 | CAGCACAUC AUGCAAGC | 40 | GCUUGCAU CUGAUGAGGCCGUUAGGCCGAA AUGUGCUG | 9459 |
| 400 | CACUGCAUC UCCAAUGC | 41 | GCAUUGGA CUGAUGAGGCCGUUAGGCCGAA AUGCAGUG | 9460 |
| 402 | CUGCAUCUC CAAUGCAG | 42 | CUGCAUUG CUGAUGAGGCCGUUAGGCCGAA AGAUGCAG | 9461 |
| 427 | CAGCCCAUA AAUGGUCU | 43 | AGACCAUU CUGAUGAGGCCGUUAGGCCGAA AUGGGCUG | 9462 |
| 434 | UAAAUGGUC UUUGCCUG | 44 | CAGGCAAA CUGAUGAGGCCGUUAGGCCGAA ACCAUUUA | 9463 |
| 436 | AAUGGUCUU UGCCUGAA | 45 | UUCAGGCA CUGAUGAGGCCGUUAGGCCGAA AGACCAUU | 9464 |
| 437 | AUGGUCUUU GCCUGAAA | 46 | UUUCAGGC CUGAUGAGGCCGUUAGGCCGAA AAGACCAU | 9465 |
| 454 | UGGUGAGUA AGGAAAGC | 47 | GCUUUCCU CUGAUGAGGCCGUUAGGCCGAA ACUCACCA | 9466 |
| 477 | CUGAGCAUA ACUAAAUC | 48 | GAUUUAGU CUGAUGAGGCCGUUAGGCCGAA AUGCUCAG | 9467 |
| 481 | GCAUAACUA AAUCUGCC | 49 | GGCAGAUU CUGAUGAGGCCGUUAGGCCGAA AGUUAUGC | 9468 |
| 485 | AACUAAAUC UGCCUGUG | 50 | CACAGGCA CUGAUGAGGCCGUUAGGCCGAA AUUUAGUU | 9469 |
| 512 | CAAACAAUU CUGCAGUA | 51 | UACUGCAG CUGAUGAGGCCGUUAGGCCGAA AUUGUUUG | 9470 |
| 513 | AAACAAUUC UGCAGUAC | 52 | GUACUGCA CUGAUGAGGCCGUUAGGCCGAA AAUUGUUU | 9471 |
| 520 | UCUGCAGUA CUUUAACC | 53 | GGUUAAAG CUGAUGAGGCCGUUAGGCCGAA ACUGCAGA | 9472 |
| 523 | GCAGUACUU UAACCUUG | 54 | CAAGGUUA CUGAUGAGGCCGUUAGGCCGAA AGUACUGC | 9473 |
| 524 | CAGUACUUU AACCUUGA | 55 | UCAAGGUU CUGAUGAGGCCGUUAGGCCGAA AAGUACUG | 9474 |
| 525 | AGUACUUUA ACCUUGAA | 56 | UUCAAGGU CUGAUGAGGCCGUUAGGCCGAA AAAGUACU | 9475 |
| 530 | UUUAACCUU GAACACAG | 57 | CUGUGUUC CUGAUGAGGCCGUUAGGCCGAA AGGUUAAA | 9476 |
| 541 | ACACAGCUC AAGCAAAC | 58 | GUUUGCUU CUGAUGAGGCCGUUAGGCCGAA AGCUGUCU | 9477 |
| 560 | CACUGGCUU CUACAGCU | 59 | AGCUGUAG CUGAUGAGGCCGUUAGGCCGAA AGCCAGUG | 9478 |
| 561 | ACUGGCUUC UACAGCUG | 60 | CAGCUGUA CUGAUGAGGCCGUUAGGCCGAA AAGCCAGU | 9479 |
| 563 | UGGCUUCUA CAGCUGCA | 61 | UGCAGCUO CUGAUGAGGCCGUUAGGCCGAA AGAAGCCA | 9480 |
| 575 | CUGCAAAUA UCUAGCUG | 62 | CAGGUAGA CUGAUGAGGCCGUUAGGCCGAA AUUUGCAG | 9481 |
| 577 | GCAAAUAUC UAGCUGUA | 63 | UACAGCUA CUGAUGAGGCCGUUAGGCCGAA AUAUUUGC | 9482 |
| 579 | AAAUAUCUA GCUGUACC | 64 | GGUACAGC CUGAUGAGGCCGUUAGGCCGAA AGAUAUUU | 9483 |
| 585 | CUAGCUGUA CCUACUUC | 65 | GAAGUAGG CUGAUGAGGCCGUUAGGCCGAA ACAGCUAG | 9484 |
| 589 | CUGUACCUA CUUCAAAG | 66 | CUUUGAAG CUGAUGAGGCCGUUAGGCCGAA AGGUACAG | 9485 |
| 592 | UACCUACUU CAAAGAAG | 67 | CUUCUUUG CUGAUGAGGCCGUUAGGCCGAA AGUAGGUA | 9486 |
| 593 | ACCUACUUC AAAGAAGA | 68 | UCUUCUUU CUGAUGAGGCCGUUAGGCCGAA AAGUAGGU | 9487 |
| 614 | AACAGAAUC UGCAAUCU | 69 | AGAUUGCA CUGAUGAGGCCGUUAGGCCGAA AUUCUGUU | 9488 |
| 621 | UCUGCAAUC UAUAUAUU | 70 | AAUAUAUA CUGAUGAGGCCGUUAGGCCGAA AUUGCAGA | 9489 |
| 623 | UGCAAUCUA UAUAUUUA | 71 | UAAAUAUA CUGAUGAGGCCGUUAGGCCGAA AGAUUGCA | 9490 |
| 625 | CAAUCUAUA UAUUUAUU | 72 | AAUAAAUA CUGAUGAGGCCGUUAGGCCGAA AUAGAUUG | 9491 |
| 627 | AUCUAUAUA UUUAUUAG | 73 | CUAAUAAA CUGAUGAGGCCGUUAGGCCGAA AUAUAGAU | 9492 |
| 629 | CUAUAUAUU UAUUAGUG | 74 | CACUAAUA CUGAUGAGGCCGUUAGGCCGAA AUAUAUAG | 9493 |
| 630 | UAUAUAUUU AUUAGUGA | 75 | UCACUAAU CUGAUGAGGCCGUUAGGCCGAA AAUAUAUA | 9494 |
| 631 | AUAUAUUUA UUAGUGAU | 76 | AUCACUAA CUGAUGAGGCCGUUAGGCCGAA AAAUAUAU | 9495 |
| 633 | AUAUUUAUU AGUGAUAC | 77 | GUAUCACU CUGAUGAGGCCGUUAGGCCGAA AUAAAUAU | 9496 |
| 634 | UAUUUAUUA GUGAUACA | 78 | UGUAUCAC CUGAUGAGGCCGUUAGGCCGAA AAUAAAUA | 9497 |
| 640 | UUAGUGAUA CAGGUAGA | 79 | UCUACCUG CUGAUGAGGCCGUUAGGCCGAA AUCACUAA | 9498 |
| 646 | AUACAGGUA GACCUUUC | 80 | GAAAGGUC CUGAUGAGGCCGUUAGGCCGAA ACCUGUAU | 9499 |
| 652 | GUAGACCUU UCGUAGAG | 81 | CUCUACGA CUGAUGAGGCCGUUAGGCCGAA AGGUCUAC | 9500 |
| 653 | UAGACCUUU CGUAGAGA | 82 | UCUCUACG CUGAUGAGGCCGUUAGGCCGAA AAGGUCUA | 9501 |
| 654 | AGACCUUUC GUAGAGAU | 83 | AUCUCUAC CUGAUGAGGCCGUUAGGCCGAA AAAGGUCU | 9502 |
| 657 | CCUUUCGUA GAGAUGUA | 84 | UACAUCUC CUGAUGAGGCCGUUAGGCCGAA ACGAAAGG | 9503 |
| 665 | AGAGAUGUA CAGUGAAA | 85 | UUUCACUG CUGAUGAGGCCGUUAGGCCGAA ACAUCUCU | 9504 |
| 675 | AGUGAAAUC CCCGAAAU | 86 | AUUUCGGG CUGAUGAGGCCGUUAGGCCGAA AUUUCACU | 9505 |
| 684 | CCCGAAAUU AUACACAU | 87 | AUGUGUAU CUGAUGAGGCCGUUAGGCCGAA AUUUCGGG | 9506 |
| 685 | CCGAAAUUA UACACAUG | 88 | CAUGUGUA CUGAUGAGGCCGUUAGGCCGAA AAUUUCGG | 9507 |
| 687 | GAAAUUAUA CACAUGAC | 89 | GUCAUGUG CUGAUGAGGCCGUUAGGCCGAA AUAAUUUC | 9508 |
| 711 | AGGGAGCUC GUCAUUCC | 90 | GGAAUGAC CUGAUGAGGCCGUUAGGCCGAA AGCUCCCU | 9509 |
| 714 | GAGCUCGUC AUUCCCUG | 91 | CAGGGAAU CUGAUGAGGCCGUUAGGCCGAA ACGAGCUC | 9510 |
| 717 | CUCGUCAUU CCCUGCCG | 92 | CGGCAGGG CUGAUGAGGCCGUUAGGCCGAA AUGACGAG | 9511 |
| 718 | UCGUCAUUC CCUGCCGG | 93 | CCGGCAGG CUGAUGAGGCCGUUAGGCCGAA AAUGACGA | 9512 |
| 729 | UGCCGGGUU ACGUCACC | 94 | GGUGACGU CUGAUGAGGCCGUUAGGCCGAA ACCCGGCA | 9513 |
| 730 | GCCGGGUUA CGUCACCU | 95 | AGGUGACG CUGAUGAGGCCGUUAGGCCGAA AACCCGGC | 9514 |
| 734 | GGUUACGUC ACCUAACA | 96 | UGUUAGGU CUGAUGAGGCCGUUAGGCCGAA ACGUAACC | 9515 |
| 739 | CGUCACCUA ACAUCACU | 97 | AGUGAUGU CUGAUGAGGCCGUUAGGCCGAA AGGUGACG | 9516 |
| 744 | CCUAACAUC ACUGUUAC | 98 | GUAACAGU CUGAUGAGGCCGUUAGGCCGAA AUGUUAGG | 9517 |
| 750 | AUCACUGUU ACUUUAAA | 99 | UUUAAAGU CUGAUGAGGCCGUUAGGCCGAA ACAGUGAU | 9518 |
| 751 | UCACUGUUA CUUUAAAA | 100 | UUUUAAAG CUGAUGAGGCCGUUAGGCCGAA AACAGUGA | 9519 |
| 754 | CUGUUACUU UAAAAAAG | 101 | CUUUUUUA CUGAUGAGGCCGUUAGGCCGAA AGUAACAG | 9520 |
| 755 | UGUUACUUU AAAAAAGU | 102 | ACUUUUUU CUGAUGAGGCCGUUAGGCCGAA AAGUAACA | 9521 |
| 756 | GUUACUUUA AAAAAGUU | 103 | AACUUUUU CUGAUGAGGCCGUUAGGCCGAA AAAGUAAC | 9522 |
| 764 | AAAAAAGUU UCCACUUG | 104 | CAAGUGGA CUGAUGAGGCCGUUAGGCCGAA ACUUUUUU | 9523 |
| 765 | AAAAAGUUU CCACUUGA | 105 | UCAAGUGG CUGAUGAGGCCGUUAGGCCGAA AACUUUUU | 9524 |
| 766 | AAAAGUUUC CACUUGAC | 106 | GUCAAGUG CUGAUGAGGCCGUUAGGCCGAA AAACUUUU | 9525 |
| 771 | UUUCCACUU GACACUUU | 107 | AAAGUGUC CUGAUGAGGCCGUUAGGCCGAA AGUGGAAA | 9526 |
| 778 | UUGACACUU UGAUCCCU | 108 | AGGGAUCA CUGAUGAGGCCGUUAGGCCGAA AGUGUCAA | 9527 |
| 779 | UGACACUUU GAUCCCUG | 109 | CAGGGAUC CUGAUGAGGCCGUUAGGCCGAA AAGUGUCA | 9528 |
| 783 | ACUUUGAUC CCUGAUGG | 110 | CCAUCAGG CUGAUGAGGCCGUUAGGCCGAA AUCAAAGU | 9529 |
| 801 | AAACGCAUA AUCUGGGA | 111 | UCCCAGAU CUGAUGAGGCCGUUAGGCCGAA AUGCGUUU | 9530 |
| 804 | CGCAUAAUC UGGGACAG | 112 | CUGUCCCA CUGAUGAGGCCGUUAGGCCGAA AUUAUGCG | 9531 |
| 814 | GGGACAGUA GAAAGGGC | 113 | GCCCUUUC CUGAUGAGGCCGUUAGGCCGAA ACUGUCCC | 9532 |
| 824 | AAAGGGCUU CAUCAUAU | 114 | AUAUGAUG CUGAUGAGGCCGUUAGGCCGAA AGCCCUUU | 9533 |
| 825 | AAGGGCUUC AUCAUAUC | 115 | GAUAUGAU CUGAUGACGCCGUUAGGCCGAA AAGCCCUU | 9534 |
| 828 | GGCUUCAUC AUAUCAAA | 116 | UUUGAUAU CUGAUGAGGCCGUUAGGCCGAA AUGAAGCC | 9535 |
| 831 | UUCAUCAUA UCAAAUGC | 117 | GCAUUUGA CUGAUGAGGCCGUUAGGCCGAA AUGAUGAA | 9536 |
| 833 | CAUCAUAUC AAAUGCAA | 118 | UUGCAUUU CUGAUGAGGCCGUUAGGCCGAA AUAUGAUG | 9537 |
| 845 | UGCAACGUA CAAAGAAA | 119 | UUUCUUUG CUGAUGAGGCCGUUAGGCCGAA ACGUUGCA | 9538 |
| 855 | AAAGAAAUA GGGCUUCU | 120 | ACAAGCCC CUGAUGAGGCCGUUAGGCCGAA AUUUCUUU | 9539 |
| 861 | AUAGGGCUU CUGACCUG | 121 | CAGGUCAG CUGAUGAGGCCGUUAGGCCGAA AGCCCUAU | 9540 |
| 862 | UAGGGCUUC UGACCUGU | 122 | ACAGGUCA CUGAUGAGGCCGUUAGGCCGAA AAGCCCUA | 9541 |
| 882 | GCAACAGUC AAUGGGCA | 123 | UGCCCAUU CUGAUGAGGCCGUUAGGCCGAA ACUGUUGC | 9542 |
| 892 | AUGGGCAUU UGUAUAAG | 124 | CUUAUACA CUGAUGAGGCCGUUAGGCCGAA AUGCCCAU | 9543 |
| 893 | UGGGCAUUU GUAUAAGA | 125 | UCUUAUAC CUGAUGAGGCCGUUAGGCCGAA AAUGCCCA | 9544 |
| 896 | GCAUUUGUA UAAGACAA | 126 | UUGUCUUA CUCAUGAGGCCGUUAGGCCGAA ACAAAUGC | 9545 |
| 898 | AUUUGUAUA AGACAAAC | 127 | GUUUGUCU CUGAUGAGGCCGUUAGGCCGAA AUACAAAU | 9546 |
| 908 | GACAAACUA UCUCACAC | 128 | GUGUGAGA CUGAUGAGGCCGUUAGGCCGAA AGUUUGUC | 9547 |
| 910 | CAAACUAUC UCACACAU | 129 | AUGUGUGA CUGAUGAGGCCGUUAGGCCGAA AUAGUUUG | 9548 |
| 912 | AACUAUCUC ACACAUCG | 130 | CGAUGUGU CUGAUGAGGCCGUUAGGCCGAA AGAUAGUU | 9549 |
| 919 | UCACACAUC GACAAACC | 131 | GGUUUGUC CUGAUGAGGCCGUUAGGCCGAA AUGUGUGA | 9550 |
| 931 | AAACCAAUA CAAUCAUA | 132 | UAUGAUUG CUGAUGAGGCCGUUAGGCCGAA AUUGGUUU | 9551 |
| 936 | AAUACAAUC AUAGAUGU | 133 | ACAUCUAU CUGAUGAGGCCGUUAGGCCGAA AUUGUAUU | 9552 |
| 939 | ACAAUCAUA GAUGUCCA | 134 | UGGACAUC CUGAUGAGGCCGUUAGGCCGAA AUGAUUGU | 9553 |
| 945 | AUAGAUGUC CAAAUAAG | 135 | CUUAUUUG CUGAUGAGGCCGUUAGGCCGAA ACAUCUAG | 9554 |
| 951 | GUCCAAAUA AGCACACC | 136 | GGUGUGCU CUGAUGAGGCCGUUAGGCCGAA AUCUGGAC | 9555 |
| 969 | CGCCCAGUC AAAUUACU | 137 | AGUAAUUU CUGAUGAGGCCGUUAGGCCGAA ACUGGGCG | 9556 |
| 974 | AGUCAAAUU ACUUAGAG | 138 | CUCUAAGU CUGAUGAGGCCGUUAGGCCGAA AUUUGACU | 9557 |
| 975 | GUCAAAUUA CUUAGAGG | 139 | CCUCUAAG CUGAUGAGGCCGUUAGGCCGAA AAUVUGAC | 9558 |
| 978 | AAAUUACUU AGAGOCCA | 140 | UGGCCUCU CUGAUGAGGCCGUUAGGCCGAA AGUAAUUU | 9559 |
| 979 | AAUUACUUA GAGGCCAU | 141 | AUGGCCUC CUGAUGAGGCCGUUAGGCCGAA AAGUAAUU | 9560 |
| 988 | GAGGCCAUA CUCUUGUC | 142 | GACAAGAG CUGAUGAGGCCGUUAGGCCGAA AUGGCCUC | 9561 |
| 991 | GCCAUACUC UUGUCCUC | 143 | GAGGACAA CUGAUGAGGCCGUUAGGCCGAA AGUAUGGC | 9562 |
| 993 | CAUACUCUU GUCCUCAA | 144 | UUGAGGAC CUGAUGAGGCCGUUAGGCCGAA AGAGUAUG | 9563 |
| 996 | ACUCUUGUC CUCAAUUG | 145 | CAAUUGAG CUGAUGAGGCCGUUAGGCCGAA ACAAGAGU | 9564 |
| 999 | CUUGUCCUC AAUUGUAC | 146 | GUACAAUU CUGAUGAGGCCGUUAGGCCGAA AGGACAAG | 9565 |
| 1003 | UCCUCAAUU GUACUGCU | 147 | AGCAGUAC CUGAUGAGGCCGUUAGGCCGAA AUUGAGGA | 9566 |
| 1006 | UCAAUUGUA CUGCUACC | 148 | GGUAGCAG CUGAUGAGGCCGUUAGGCCGAA ACAAUUGA | 9567 |
| 1012 | GUACUGCUA CCACUCCC | 149 | GGGACUGG CUGAUGAGGCCGUUAGGCCGAA AGCAGUAC | 9568 |
| 1018 | CUACCACUC CCUUGAAC | 150 | GUUCAAGG CUGAUGAGGCCGUUAGGCCGAA AGUGGUAG | 9569 |
| 1022 | CACUCCCUU GAACACGA | 151 | UCGUGUUC CUGAUGAGGCCGUUAGGCCGAA AGGGAGUG | 9570 |
| 1035 | ACGAGAGUU CAAAUGAC | 152 | GUCAUUUG CUGAUGAGGCCGUUAGGCCGAA ACUCUCGU | 9571 |
| 1036 | CGAGAGUUC AAAUGACC | 153 | GGUCAUUU CUGAUGAGGCCGUUAGGCCGAA AACUCUCG | 9572 |
| 1051 | CCUGGAGUU ACCCUGAU | 154 | AUCAGGGU CUGAUGAGGCCGUUAGGCCGAA ACUCCAGG | 9573 |
| 1052 | CUGGAGUUA CCCUGAUG | 155 | CAUCAGUG CUGAUGAGGCCGUUAGGCCGAA AACUCCAG | 9574 |
| 1069 | AAAAAAAUA AGAGAGCU | 156 | AGCUCUCU CUGAUGAGGCCGUUAGGCCGAA AUUUUUUU | 9575 |
| 1078 | AGAGAGCUU CCGUAAGG | 157 | CCUUACGG CUGAUGAGGCCGUUAGGCCGAA AGCUCUCU | 9576 |
| 1079 | GAGAGCUUC CGUAAGGC | 158 | GCCUUACG CUGAUGAGGCCGUUAGGCCGAA AAGCUCUC | 9577 |
| 1083 | GCUUCCGUA AGGCGACG | 159 | CGUCGCCU CUGAUGAGGCCGUUAGGCCGAA ACGGAAGC | 9578 |
| 1095 | CGACGAAUU GACCAAAG | 160 | CUUUGGUC CUGAUGAGGCCGUUAGGCCGAA AUUCGUCG | 9579 |
| 1108 | AAAGCAAUU CCCAUGCC | 161 | GGCAUGGG CUGAUGAGGCCGUUAGGCCGAA AUUGCUUU | 9580 |
| 1109 | AAGCAAUUC CCAUGCCA | 162 | UGGCAUGG CUGAUGAGGCCGUUAGGCCGAA AAUUGCUU | 9581 |
| 1122 | GCCAACAUA UUCUACAG | 163 | CUGUAGAA CUGAUGAGGCCGUUAGGCCGAA AUGUUGGC | 9582 |
| 1124 | CAACAUAUU CUACAGUG | 164 | CACUGUAG CUGAUGAGGCCGUUAGGCCGAA AUAUGUUG | 9583 |
| 1125 | AACAUAUUC UACAGUGU | 165 | ACACUGUA CUGAUGAGGCCGUUAGGCCGAA AAUAUGUU | 9584 |
| 1127 | CAUAUUCUA CAGUGUUC | 166 | GAACACUG CUGAUGAGGCCGUUAGGCCGAA AGAAUAUG | 9585 |
| 1134 | UACAGUGUU CUUACUAU | 167 | AUAGUAAG CUGAUGAGGCCGUUAGGCCGAA ACACUGUA | 9586 |
| 1135 | ACAGUGUUC UUACUAUU | 168 | AAUAGUAA CUGAUGAGGCCGUUAGGCCGAA AACACUGU | 9587 |
| 1137 | AGUGUUCUU ACUAUUGA | 169 | UCAAUAGU CUGAUGAGGCCGUUAGGCCGAA AGAACACU | 9588 |
| 1138 | GUGUUCUUA CUAUUGAC | 170 | GUCAAUAG CUGAUGAGGCCGUUAGGCCGAA AAGAACAC | 9589 |
| 1141 | UUCUUACUA UUGACAAA | 171 | UUUGUCAA CUGAUGAGGCCGUUAGGCCGAA AGUAAGAA | 9590 |
| 1143 | CUUACUAUU GACAAAAU | 172 | AUUUUGUC CUGAUGAGGCCGUUAGGCCGAA AUAGUAAG | 9591 |
| 1173 | AAAGGACUU UAUACUUG | 173 | CAAGUAUA CUGAUGAGGCCGUUAGGCCGAA AGUCCUUU | 9592 |
| 1174 | AAGGACUUU AUACUUGU | 174 | ACAAGUAU CUGAUGAGGCCGUUAGGCCGAA AAGUCCUU | 9593 |
| 1175 | AGGACUUUA UACUUGUC | 175 | GACAAGUA CUGAUGAGGCCGUUAGGCCGAA AAAGUCCU | 9594 |
| 1177 | GACUUUAUA CUUGUCGU | 176 | ACGACAAG CUGAUGAGGCCGUUAGGCCGAA AUAAAGUC | 9595 |
| 1180 | UUUAUACUU GUCGUGUA | 177 | UACACGAC CUGAUGAGGCCGUUAGGCCGAA AGUAUAAA | 9596 |
| 1183 | AUACUUGUC GUGUAAGG | 178 | CCUUACAC CUGAUGAGGCCGUUAGGCCGAA ACAAGUAU | 9597 |
| 1188 | UGUCGUGUA AGGAGUGG | 179 | CCACUCCU CUGAUGAGGCCGUUAGGCCGAA ACACGACA | 9598 |
| 1202 | UGGACCAUC AUUCAAAU | 180 | AUUUGAAU CUGAUGAGGCCGUUAGGCCGAA AUGGUCCA | 9599 |
| 1205 | ACCAUCAUU CAAAUCUG | 181 | CAGAUUUG CUGAUGAGGCCGUUAGGCCGAA AUGAUGGU | 9600 |
| 1206 | CCAUCAUUC AAAUCUGU | 182 | ACAGAUUU CUGAUGAGGCCGUUAGGCCGAA AAUGAUGG | 9601 |
| 1211 | AUUCAAAUC UGUUAACA | 183 | UGUUAACA CUGAUGAGGCCGUUAGGCCGAA AUUUGAAU | 9602 |
| 1215 | AAAUCUGUU AACACCUC | 184 | GAGGUGUU CUGAUGAGGCCGUUAGGCCGAA ACAGAUUU | 9603 |
| 1216 | AAUCUGUUA ACACCUCA | 185 | UGAGGUGU CUGAUGAGGCCGUUAGGCCGAA AACAGAUU | 9604 |
| 1223 | UAACACCUC AGUGCAUA | 186 | UAUGCACU CUGAUGAGGCCGUUAGGCCGAA AGGUGUUA | 9605 |
| 1231 | CAGUGCAUA UAUAUGAU | 187 | AUCAUAUA CUGAUGAGGCCGUUAGGCCGAA AUGCACUG | 9606 |
| 1233 | GUGCAUAUA UAUGAUAA | 188 | UUAUCAUA CUGAUGAGGCCGUUAGGCCGAA AUAUGCAC | 9607 |
| 1235 | GCAUAUAUA UGAUAAAG | 189 | CUUUAUCA CUGAUGAGGCCGUUAGGCCGAA AUAUAUGC | 9608 |
| 1240 | UAUAUGAUA AAGCAUUC | 190 | GAAUGCUU CUGAUGAGGCCGUUAGGCCGAA AUCAUAUA | 9609 |
| 1247 | UAAAGCAUU CAUCACUG | 191 | CAGUGAUG CUGAUGAGGCCGUUAGGCCGAA AUGCUUUA | 9610 |
| 1248 | AAAGCAUUC AUCACUGU | 192 | ACAGUGAU CUGAUGAGGCCGUUAGGCCGAA AAUGCUUU | 9611 |
| 1251 | GCAUUCAUC ACUGUGAA | 193 | UUCACAGU CUGAUGAGGCCGUUAGGCCGAA AUGAAUGC | 9612 |
| 1264 | UGAAACAUC GAAAACAG | 194 | CUGUUUUC CUGAUGAGGCCGUUAGGCCGAA AUGUUUCA | 9613 |
| 1281 | CAGGUGCUU GAAACCGU | 195 | ACGGUUUC CUGAUGAGGCCGUUAGGCCGAA AGCACCUG | 9614 |
| 1290 | GAAACCGUA GCUGGCAA | 196 | UUGCCAGC CUGAUGAGGCCGUUAGGCCGAA ACGGUUUC | 9615 |
| 1304 | CAAGCGGUC UUACCGGC | 197 | GCCGGUAA CUGAUGAGGCCGUUAGGCCGAA ACCGCUUG | 9616 |
| 1306 | AGCGGUCUU ACCGGCUC | 198 | GAGCCGGU CUGAUGAGGCCGUUAGGCCGAA AGACCGCU | 9617 |
| 1307 | GCGGUCUUA CCGGCUCU | 199 | AGAGCCGG CUGAUGAGGCCGUUAGGCCGAA AAGACCGC | 9618 |
| 1314 | UACCGGCUC UCUAUGAA | 200 | UUCAUAGA CUGAUGAGGCCGUUAGGCCGAA AGCCGGUA | 9619 |
| 1316 | CCGGCUCUC UAUGAAAG | 201 | CUUUCAUA CUGAUGAGGCCGUUAGGCCGAA AGAGCCGG | 9620 |
| 1318 | GGCUCUCUA UGAAAGUG | 202 | CACUUUCA CUGAUGAGGCCGUUAGGCCGAA AGAGAGCC | 9621 |
| 1334 | GAAGGCAUU UCCCUCGC | 203 | GCGAGGGA CUGAUGAGGCCGUUAGGCCGAA AUGCCUUC | 9622 |
| 1335 | AAGGCAUUU CCCUCGCC | 204 | GGCGAGGG CUGAUGAGGCCGUUAGGCCGAA AAUGCCUU | 9623 |
| 1336 | AGGCAUUUC CCUCGCCG | 205 | CGGCGAGG CUGAUGAGGCCGUUAGGCCGAA AAAUGCCU | 9624 |
| 1340 | AUUUCCCUC GCCGGAAG | 206 | CUUCCGGC CUGAUGAGGCCGUUAGGCCGAA AGGGAAAU | 9625 |
| 1350 | CCGGAAGUU GUAUGGUU | 207 | AACCAUAC CUGAUGAGGCCGUUAGGCCGAA ACUUCCGG | 9626 |
| 1353 | GAAGUUGUA UGGUUAAA | 208 | UUUAACCA CUGAUGAGGCCGUUAGGCCGAA ACAACUUC | 9627 |
| 1358 | UGUAUGGUU AAAAGAUG | 209 | CAUCUUUU CUGAUGAGGCCGUUAGGCCGAA ACCAUACA | 9628 |
| 1359 | GUAUGGUUA AAAGAUGG | 210 | CCAUCUUU CUGAUGAGGCCGUUAGGCCGAA AACCAUAC | 9629 |
| 1370 | AGAUGGGUU ACCUGCGA | 211 | UCGCAGGU CUGAUGAGGCCGUUAGGCCGAA ACCCAUCU | 9630 |
| 1371 | GAUGGGUUA CCUGCGAC | 212 | GUCGCAGG CUGAUGAGGCCGUUAGGCCGAA AACCCAUC | 9631 |
| 1388 | UGAGAAAUC UGCUCGCU | 213 | AGCGAGCA CUGAUGAGGCCGUUAGGCCGAA AUUUCUCA | 9632 |
| 1393 | AAUCUGCUC GCUAUUUG | 214 | CAAAUAGC CUGAUGAGGCCGUUAGGCCGAA AGCAGAUU | 9633 |
| 1397 | UGCUCGCUA UUUGACUC | 215 | GAGUCAAA CUGAUGAGGCCGUUAGGCCGAA AGCGAGCA | 9634 |
| 1399 | CUCGCUAUU UGACUCGU | 216 | ACGAGUCA CUGAUGAGGCCGUUAGGCCGAA AUAGCGAG | 9635 |
| 1400 | UCGCUAUUU GACUCGUG | 217 | CACGAGUC CUGAUGAGGCCGUUAGGCCGAA AAUAGCGA | 9636 |
| 1405 | AUUUGACUC GUGGCUAC | 218 | GUAGCCAC CUGAUGAGGCCGUUAGGCCGAA AGUCAAAU | 9637 |
| 1412 | UCGUGGCUA CUCGUUAA | 219 | UUAACGAG CUGAUGAGGCCGUUAGGCCGAA AGCCACGA | 9638 |
| 1415 | UGGCUACUC GUUAAUUA | 220 | UAAUUAAC CUGAUGAGGCCGUUAGGCCGAA AGUAGCCA | 9639 |
| 1418 | CUACUCGUU AAUUAUCA | 221 | UGAUAAUU CUGAUGAGGCCGUUAGGCCGAA ACGAGUAG | 9640 |
| 1419 | UACUCGUUA AUUAUCAA | 222 | UUGAUAAU CUGAUGAGGCCGUUAGGCCGAA AACGAGUA | 9641 |
| 1422 | UCGUUAAUU AUCAAGGA | 223 | UCCUUGAU CUGAUGAGGCCGUUAGGCCGAA AUUAACGA | 9642 |
| 1423 | CGUUAAUUA UCAAGGAC | 224 | GUCCUUGA CUGAUGAGGCCGUUAGGCCGAA AAUUAACG | 9643 |
| 1425 | UUAAUUAUC AAGGACGU | 225 | ACGUCCUU CUGAUGAGGCCGUUAGGCCGAA AUAAUUAA | 9644 |
| 1434 | AAGGACGUA ACUGAAGA | 226 | UCUUCAGU CUGAUGAGGCCGUUAGGCCGAA ACGUCCUU | 9645 |
| 1456 | CAGGGAAUU AUACAAUC | 227 | GAUUGUAU CUGAUGAGGCCGUUAGGCCGAA AUUCCCUG | 9646 |
| 1457 | AGGGAAUUA UACAAUCU | 228 | AGAUUGUA CUGAUGAGGCCGUUAGGCCGAA AAUUCCCU | 9647 |
| 1459 | GGAAUUAUA CAAUCUUG | 229 | CAAGAUUG CUGAUGAGGCCGUUAGGCCGAA AUAAUUCC | 9648 |
| 1464 | UAUACAAUC UUCCUGAG | 230 | CUCAGCAA CUGAUGAGGCCGUUAGGCCGAA AUUGUAUA | 9649 |
| 1466 | UACAAUCUU GCUGAGCA | 231 | UGCUCAGC CUGAUGAGGCCGUUAGGCCGAA AGAUUGUA | 9650 |
| 1476 | CUGAGCAUA AAACAGUC | 232 | GACUGUUU CUGAUGAGGCCGUUAGGCCGAA AUGCUCAG | 9651 |
| 1484 | AAAACAGUC AAAUGUGU | 233 | ACACAUUU CUGAUGAGGCCGUUAGGCCGAA ACUGUUUU | 9652 |
| 1493 | AAAUGUGUU UAAAAACC | 234 | GGUUUUUA CUGAUGAGGCCGUUAGGCCGAA ACACAUUU | 9653 |
| 1494 | AAUGUGUUU AAAAACCU | 235 | AGGUUUUU CUGAUGAGGCCGUUAGGCCGAA AACACAUU | 9654 |
| 1495 | AUGUGUUUA AAAACCUC | 236 | GAGGUUUU CUGAUGAGGCCGUUAGGCCGAA AAACACAU | 9655 |
| 1503 | AAAAACCUC ACUGCCAC | 237 | GUGGCAGU CUGAUGAGGCCGUUAGGCCGAA AGGUUUUU | 9656 |
| 1513 | CUGCCACUC UAAUUGUC | 238 | GACAAUUA CUGAUGAGGCCGUUAGGCCGAA AGUGGCAG | 9657 |
| 1515 | GCCACUCUA AUUGUCAA | 239 | UUGACAAU CUGAUGAGGCCGUUAGGCCGAA AGAGUGGC | 9658 |
| 1518 | ACUCUAAUU GUCAAUGU | 240 | ACAUUGAC CUGAUGAGGCCGUUAGGCCGAA AUUAGAGU | 9659 |
| 1521 | CUAAUUGUC AAUGUGAA | 241 | UUCACAUU CUGAUGAGGCCGUUAGGCCGAA ACAAUUAG | 9660 |
| 1539 | CCCCAGAUU UACGAAAA | 242 | UUUUCGUA CUGAUGAGGCCGUUAGGCCGAA AUCUGGGG | 9661 |
| 1540 | CCCAGAUUU ACGAAAAG | 243 | CUUUUCGU CUGAUGAGGCCGUUAGGCCGAA AAUCUGGG | 9662 |
| 1541 | CCAGAUUUA CGAAAAGG | 244 | CCUUUUCG CUGAUGAGGCCGUUAGGCCGAA AAAUCUGG | 9663 |
| 1556 | GGCCGUGUC AUCGUUUC | 245 | GAAACGAU CUGAUGAGGCCGUUAGGCCGAA ACACGGCC | 9664 |
| 1559 | CGUGUCAUC GUUUCCAG | 246 | CUGGAAAC CUGAUGAGGCCGUUAGGCCGAA AUGACACG | 9665 |
| 1562 | GUCAUCGUU UCCAGACC | 247 | GGUCUGGA CUGAUGAGGCCGUUAGGCCGAA ACGAUGAC | 9666 |
| 1563 | UCAUCGUUU CCAGACCC | 248 | GGGUCUGG CUGAUGAGGCCGUUAGGCCGAA AACGAUGA | 9667 |
| 1564 | CAUCGUUUC CAGACCCG | 249 | CGGGUCUG CUGAUGAGGCCGUUAGGCCGAA AAACGAUG | 9668 |
| 1576 | ACCCGGCUC UCUACCCA | 250 | UGGGUAGA CUGAUGAGGCCGUUAGGCCGAA AGCCGGGU | 9669 |
| 1578 | CCGGCUCUC UACCCACU | 251 | AGUGGGUA CUGAUGAGGCCGUUAGGCCGAA AGAGCCGG | 9670 |
| 1580 | GGCUCUCUA CCCACUGG | 252 | CCAGUGGG CUGAUGAGGCCGUUAGGCCGAA AGAGAGCC | 9671 |
| 1602 | AGACAAAUC CUCACUUG | 253 | CAAGUCAG CUGAUGAGGCCGUUAGGCCGAA AUUUGUCU | 9672 |
| 1609 | UCCUGACUU GUACCGCA | 254 | UGCGGUAC CUGAUGAGGCCGUUAGGCCGAA AGUCAGGA | 9673 |
| 1612 | UGACUUGUA CCGCAUAU | 255 | AUAUGCGG CUGAUGAGGCCGUUAGGCCGAA ACAAGUCA | 9674 |
| 1619 | UACCGCAUA UGGUAUCC | 256 | GGAUACCA CUGAUGAGGCCGUUAGGCCGAA AUGCGGUA | 9675 |
| 1624 | CAUAUGGUA UCCCUCAA | 257 | UUGAGGGA CUGAUGAGGCCGUUAGGCCGAA ACCAUAUG | 9676 |
| 1626 | UAUGGUAUC CCUCAACC | 258 | GGUUGAGG CUGAUGAGGCCGUUAGGCCGAA AUACCAUA | 9677 |
| 1630 | GUAUCCCUC AACCUACA | 259 | UGUAGGUU CUGAUGAGGCCGUUAGGCCGAA AGGGAUAC | 9678 |
| 1636 | CUCAACCUA CAAUCAAG | 260 | CUUGAUUG CUGAUGAGGCCGUUAGGCCGAA AGGUUGAG | 9679 |
| 1641 | CCUACAAUC AAGUGGUU | 261 | AACCACUU CUGAUGAGGCCGUUAGGCCGAA AUUGUAGG | 9680 |
| 1649 | CAAGUGGUU CUGGCACC | 262 | GGUGCCAG CUGAUGAGGCCGUUAGGCCGAA ACCACUUG | 9681 |
| 1650 | AAGUGGUUC UGGCACCC | 263 | GGGUGCCA CUGAUGAGGCCGUUAGGCCGAA AACCACUU | 9682 |
| 1663 | ACCCCUGUA ACCAUAAU | 264 | AUUAUGGU CUGAUGAGGCCGUUAGGCCGAA ACAGGCGU | 9683 |
| 1669 | GUAACCAUA AUCAUUCC | 265 | GGAAUGAU CUGAUGAGGCCGUUAGGCCGAA AUGGUUAC | 9684 |
| 1672 | ACCAUAAUC AUUCCGAA | 266 | UUCGGAAU CUGAUGAGGCCGUUAGGCCGAA AUUAUGGU | 9685 |
| 1675 | AUAAUCAUU CCGAAGCA | 267 | UGCUUCGG CUGAUGAGGCCGUUAGGCCGAA AUGAUUAU | 9686 |
| 1676 | UAAUCAUUC CGAAGCAA | 268 | UUGCUUCG CUGAUGAGGCCGUUAGGCCGAA AAUGAUUA | 9687 |
| 1694 | GUGUGACUU UUGUUCCA | 269 | UGGAACAA CUGAUGAGGCCGUUAGGCCGAA AGUCACAC | 9688 |
| 1695 | UGUGACUUU UGUUCCAA | 270 | UUGGAACA CUGAUGAGGCCGUUAGGCCGAA AAGUCACA | 9689 |
| 1696 | GUGACUUUU GUUCCAAU | 271 | AUUGGAAC CUGAUGAGGCCGUUAGGCCGAA AAAGUCAC | 9690 |
| 1699 | ACUUUUGUU CCAAUAAU | 272 | AUUAUUGG CUGAUGAGGCCGUUAGGCCGAA ACAAAAGU | 9691 |
| 1700 | CUUUUGUUC CAAUAAUG | 273 | CAUUAUUG CUGAUGAGGCCGUUAGGCCGAA AACAAAAG | 9692 |
| 1705 | GUUCCAAUA AUGAAGAG | 274 | CUCUUCAU CUGAUGAGGCCGUUAGGCCGAA AUUGGAAC | 9693 |
| 1715 | UGAAGAGUC CUUUAUCC | 275 | GGAUAAAG CUGAUGAGGCCGUUAGGCCGAA ACUCUUCA | 9694 |
| 1718 | AGAGUCCUU UAUCCUGG | 276 | CCAGGAUA CUGAUGAGGCCGUUAGGCCGAA AGGACUCU | 9695 |
| 1719 | GAGUCCUUU AUCCUGGA | 277 | UCCAGGAU CUGAUGAGGCCGUUAGGCCGAA AAGGACUC | 9696 |
| 1720 | AGUCCUUUA UCCUGGAU | 278 | AUCCAGGA CUGAUGAGGCCGUUAGGCCGAA AAAGGACU | 9697 |
| 1722 | UCCUUUAUC CUGGAUGC | 279 | GCAUCCAG CUGAUGAGGCCGUUAGGCCGAA AUAAAGGA | 9698 |
| 1755 | AACAGAAUU GAGAGCAU | 280 | AUGCUCUC CUGAUGAGGCCGUUAGGCCGAA AUUCUGUU | 9699 |
| 1764 | GAGAGCAUC ACUCAGCG | 281 | CGCUGAGU CUGAUGAGGCCGUUAGGCCGAA AUGCUCUC | 9700 |
| 1768 | GCAUCACUC AGCGCAUG | 282 | CAUGCGCU CUGAUGAGGCCGUUAGGCCGAA AGUGAUGC | 9701 |
| 1782 | AUGGCAAUA AUAGAAGG | 283 | CCUUCUAU CUGAUGAGGCCGUUAGGCCGAA AUUGCCAU | 9702 |
| 1785 | GCAAUAAUA GAAGGAAA | 284 | UUUCCUUC CUGAUGAGGCCGUUAGGCCGAA AUUAUUGC | 9703 |
| 1798 | GAAAGAAUA AGAUGGCU | 285 | AGCCAUCU CUGAUGAGGCCGUUAGGCCGAA AUUCUUUC | 9704 |
| 1807 | AGAUGGCUA GCACCUUG | 286 | CAAGGUGC CUGAUGAGGCCGUUAGGCCGAA AGCCAUCU | 9705 |
| 1814 | UAGCACCUU GGUUGUGG | 287 | CCACAACC CUGAUGAGGCCGUUAGGCCGAA AGGUGCUA | 9706 |
| 1818 | ACCUUGGUU GUGGCUGA | 288 | UCAGCCAC CUGAUGAGGCCGUUAGGCCGAA ACCAAGGU | 9707 |
| 1829 | GGCUGACUC UAGAAUUU | 289 | AAAUUCUA CUGAUGAGGCCGUUAGGCCGAA AGUCAGCC | 9708 |
| 1831 | CUGACUCUA GAAUUUCU | 290 | AGAAAUUC CUGAUGAGGCCGUUAGGCCGAA AGAGUCAG | 9709 |
| 1836 | UCUAGAAUU UCUGGAAU | 291 | AUUCCAGA CUGAUGAGGCCGUUAGGCCGAA AGUCUAGA | 9710 |
| 1837 | CUAGAAUUU CUGGAAUC | 292 | GAUUCCAG CUGAUGAGGCCGUUAGGCCGAA AAUUCUAG | 9711 |
| 1838 | UAGAAUUUC UGGAAUCU | 293 | AGAUUCCA CUGAUGAGGCCGUUAGGCCGAA AAAUUCUA | 9712 |
| 1845 | UCUGGAAUC UACAUUUG | 294 | CAAAUGUA CUGAUGAGGCCGUUAGGCCGAA AUUCCAGA | 9713 |
| 1847 | UGGAAUCUA CAUUUGCA | 295 | UGCAAAUG CUGAUGAGGCCGUUAGGCCGAA AGAUUCCA | 9714 |
| 1851 | AUCUACAUU UGCAUAGC | 296 | GCUAUGCA CUGAUGAGGCCGUUAGGCCGAA AUGUAGAU | 9715 |
| 1852 | UCUACAUUU GCAUAGCU | 297 | AGCUAUGC CUGAUGAGGCCGUUAGGCCGAA AAUGUAGA | 9716 |
| 1857 | AUUUGCAUA GCUUCCAA | 298 | UUGGAAGC CUGAUGAGGCCGUUAGGCCGAA AUGCAAAU | 9717 |
| 1861 | GCAUAGCUU CCAAUAAA | 299 | UUUAUUGG CUGAUGAGGCCGUUAGGCCGAA AGCUAUGC | 9718 |
| 1862 | CAUAGCUUC CAAUAAAG | 300 | CUUUAUUG CUGAUGAGGCCGUUAGGCCGAA AAGCUAUG | 9719 |
| 1867 | CUUCCAAUA AAGUUGGG | 301 | CCCAACUU CUGAUGAGGCCGUUAGGCCGAA AUUGGAAG | 9720 |
| 1872 | AAUAAAGUU GGGACUGU | 302 | ACAGUCCC CUGAUGAGGCCGUUAGGCCGAA ACUUUAUU | 9721 |
| 1893 | AGAAACAUA AGCUUUUA | 303 | UAAAAGCU CUGAUGAGGCCGUUAGGCCGAA AUGUUUCU | 9722 |
| 1898 | CAUAAGCUU UUAUAUCA | 304 | UGAUAUAA CUGAUGAGGCCGUUAGGCCGAA AGCUUAUG | 9723 |
| 1899 | AUAAGCUUU UAUAUCAC | 305 | GUGAUAUA CUGAUGAGGCCGUUAGGCCGAA AAGCUUAU | 9724 |
| 1900 | UAAGCUUUU AUAUCACA | 306 | UGUGAUAU CUGAUGAGGCCGUUAGGCCGAA AAAGCUUA | 9725 |
| 1901 | AAGCUUUUA UAUCACAG | 307 | CUGUGAUA CUGAUGAGGCCGUUAGGCCGAA AAAAGCUU | 9726 |
| 1903 | GCUUUUAUA UCACAGAU | 308 | AUCUGUGA CUGAUGAGGCCGUUAGGCCGAA AUAAAAGC | 9727 |
| 1905 | UUUUAUAUC ACAGAUGU | 309 | ACAUCUGU CUGAUGAGGCCGUUAGGCCGAA AUAUAAAA | 9728 |
| 1925 | AAAUGGGUU UCAUGUUA | 310 | UAACAUGA CUGAUGAGGCCGUUAGGCCGAA ACCCAUUU | 9729 |
| 1926 | AAUGGGUUU CAUGUUAA | 311 | UUAACAUG CUGAUGAGGCCGUUAGGCCGAA AACCCAUU | 9730 |
| 1927 | AUGGGUUUC AUGUUAAC | 312 | GUUAACAU CUGAUGAGGCCGUUAGGCCGAA AAACCCAU | 9731 |
| 1932 | UUUCAUGUU AACUUGGA | 313 | UCCAAGUU CUGAUGAGGCCGUUAGGCCGAA ACAUGAAA | 9732 |
| 1933 | UUCAUGUUA ACUUGGAA | 314 | UUCCAAGU CUGAUGAGGCCGUUAGGCCGAA AACAUGAA | 9733 |
| 1937 | UGUUAACUU GGAAAAAA | 315 | UUUUUUCC CUGAUGAGGCCGUUAGGCCGAA AGUUAACA | 9734 |
| 1976 | GAAACUGUC UUGCACAG | 316 | CUGUGCAA CUGAUGAGGCCGUUAGGCCGAA ACAGUUUC | 9735 |
| 1978 | AACUGUCUU GCACAGUU | 317 | AACUGUGC CUGAUGAGGCCGUUAGGCCGAA AGACAGUU | 9736 |
| 1986 | UGCACAGUU AACAAGUU | 318 | AACUUGUU CUGAUGAGGCCGUUAGGCCGAA ACUGUGCA | 9737 |
| 1987 | GCACAGUUA ACAAGUUC | 319 | GACCUUGU CUGAUGAGGCCGUUAGGCCGAA AACUGUGC | 9738 |
| 1994 | UAACAAGUU CUUAUACA | 320 | UGUAUAAG CUGAUGAGGCCGUUAGGCCGAA ACUUGUUA | 9739 |
| 1995 | AACAAGUUC UUAUACAG | 321 | CUGUAUAA CUGAUGAGGCCGUUAGGCCGAA AACUUGUU | 9740 |
| 1997 | CAAGUUCUU AUACAGAG | 322 | CUCUGUAU CUGAUGAGGCCGUUAGGCCGAA AGAACUUG | 9741 |
| 1998 | AAGUUCUUA UACAGAGA | 323 | UCUCUGUA CUGAUGAGGCCGUUAGGCCGAA AAGAACUU | 9742 |
| 2000 | GUUCUUAUA CAGAGACG | 324 | CGUCUCUG CUGAUGAGGCCGUUAGGCCGAA AUAAGAAC | 9743 |
| 2010 | AGAGACCUU ACUUGGAU | 325 | AUCCAAGU CUGAUGAGGCCGUUAGGCCGAA ACGUCUCU | 9744 |
| 2011 | GAGACGUUA CUUGGAUU | 326 | AAUCCAAG CUGAUGAGGCCGUUAGGCCGAA AACGUCUC | 9745 |
| 2014 | ACGUUACUU GGAUUUUA | 327 | UAAAAUCC CUGAUGAGGCCGUUAGGCCGAA AGUAACGU | 9746 |
| 2019 | ACUUGGAUU UUACUGCG | 328 | CGCAGUAA CUGAUGAGGCCGUUAGGCCGAA AUCCAAGU | 9747 |
| 2020 | CUUGGAUUU UACUGCGG | 329 | CCGCAGUA CUGAUGAGGCCGUUAGGCCGAA AAUCCAAG | 9748 |
| 2021 | UUGGAUUUU ACUGCGGA | 330 | UCCGCAGU CUGAUGAGGCCGUUAGGCCGAA AAAUCCAA | 9749 |
| 2022 | UGGAUUUUA CUGGGGAC | 331 | GUCCGCAG CUGAUGAGGCCGUUAGGCCGAA AAAAUCCA | 9750 |
| 2034 | CGGACAGUU AAUAACAG | 332 | CUGUUAUU CUGAUGAGGCCGUUAGGCCGAA ACUGUCUG | 9751 |
| 2035 | GGACAGUUA AUAACAGA | 333 | UCUGUUAU CUGAUGAGGCCGUUAGGCCGAA AACUGUCC | 9752 |
| 2038 | CAGUUAAUA ACAGAACA | 334 | UGUUCUGU CUGAUGAGGCCGUUAGGCCGAA AUUAACUG | 9753 |
| 2054 | AAUGCACUA CAGUAUUA | 335 | UAAUACUG CUGAUGAGGCCGUUAGGCCGAA AGUGCAUU | 9754 |
| 2059 | ACUACAGUA UUAGCAAG | 336 | CUUGCUAA CUGAUGAGGCCGUUAGGCCGAA ACUGUAGU | 9755 |
| 2061 | UACAGUAUU AGCAAGCA | 337 | UGCUUGCU CUGAUGAGGCCGUUAGGCCGAA AUACUGUA | 9756 |
| 2062 | ACAGUAUUA GCAAGCAA | 338 | UUGCUUGC CUGAUGAGGCCGUUAGGCCGAA AAUACUGU | 9757 |
| 2082 | AUGGCCAUC ACUAAGGA | 339 | UCCUUAGU CUGAUGAGGCCGUUAGGCCGAA AUGGCCAU | 9758 |
| 2086 | CCAUCACUA AGGAGCAC | 340 | GUGCUCCU CUGAUGAGGCCGUUAGGCCGAA AGUGAUGG | 9759 |
| 2096 | GGAGCACUC CAUCACUC | 341 | GAGUGAUG CUGAUGAGGCCGUUAGGCCGAA AGUGCUCC | 9760 |
| 2100 | CACUCCAUC ACUCUUAA | 342 | UUAAGAGU CUGAUGAGGCCGUUAGGCCGAA AUGGAGUG | 9761 |
| 2104 | CCAUCACUC UUAAUCUU | 343 | AAGAUUAA CUGAUGAGGCCGUUAGGCCGAA AGUGAUGG | 9762 |
| 2106 | AUCACUCUU AAUCUUAC | 344 | GUAAGAUU CUGAUGAGGCCGUUAGGCCGAA AGAGUGAU | 9763 |
| 2107 | UCACUCUUA AUCUUACC | 345 | GGUAAGAU CUGAUGAGGCCGUUAGGCCGAA AAGAGUGA | 9764 |
| 2110 | CUCUUAAUC UUACCAUC | 346 | GAUGGUAA CUGAUGAGGCCGUUAGGCCGAA AUUAAGAG | 9765 |
| 2112 | CUUAAUCUU ACCAUCAU | 347 | AUGAUGGU CUGAUGAGGCCGUUAGGCCGAA AGAUUAAG | 9766 |
| 2113 | UUAAUCUUA CCAUCAUG | 348 | CAUGAUGG CUGAUGAGGCCGUUAGGCCGAA AAGAUUAA | 9767 |
| 2118 | CUUACCAUC AUGAAUGU | 349 | ACAUUCAU CUGAUGAGGCCGUUAGGCCGAA AUGGUAAG | 9768 |
| 2127 | AUGAAUGUU UCCCUGCA | 350 | UGCAGGGA CUGAUGAGGCCGUUAGGCCGAA ACAUUCAU | 9769 |
| 2128 | UGAAUGUUU CCCUGCAA | 351 | UUGCAGGG CUGAUGAGGCCGUUAGGCCGAA AACAUUCA | 9770 |
| 2129 | GAAUGUUUC CCUGCAAG | 352 | CUUGCAGG CUGAUGAGGCCGUUAGGCCGAA AAACAUUC | 9771 |
| 2140 | UGCAAGAUU CAGGCACC | 353 | GGUGCCUG CUGAUGAGGCCGUUAGGCCGAA AUCUUGCA | 9772 |
| 2141 | GCAAGAUUC AGGCACCU | 354 | AGCUGCCU CUGAUGAGGCCGUUAGGCCGAA AAUCUUGC | 9773 |
| 2150 | AGGCACCUA UGCCUGCA | 355 | UGCAGGCA CUGAUGAGGCCGUUAGGCCGAA AGGUCCCU | 9774 |
| 2172 | AGGAAUGUA UACACAGG | 356 | CCUGUGUA CUGAUGAGGCCGUUAGGCCGAA ACAUUCCU | 9775 |
| 2174 | GAAUGUAUA CACAGGGG | 357 | CCCCUGUG CUGAUGAGGCCGUUAGGCCGAA AUACAUUC | 9776 |
| 2190 | GAAGAAAUC CUCCAGAA | 358 | UUCUGGAG CUGAUGAGGCCGUUAGGCCGAA AUUUCUUC | 9777 |
| 2193 | GAAAUCCUC CAGAAGAA | 359 | UUCUUCUC CUGAUGAGGCCGUUAGGCCGAA AGGAUUUC | 9778 |
| 2208 | AAAGAAAUU ACAAUCAG | 360 | CUGAUUGU CUGAUGAGGCCGUUAGGCCGAA AUUUCUUU | 9779 |
| 2209 | AAGAAAUUA CAAUCAGA | 361 | UCUGAUUG CUGAUGAGGCCGUUAGGCCGAA AAUUUCUU | 9780 |
| 2214 | AUUACAAUC AGAGAUCA | 362 | UGAUCUCU CUGAUGAGGCCGUUAGGCCGAA AUUGUAAU | 9781 |
| 2221 | UCAGAGAUC AGGAAGCA | 363 | UGCUUCCU CUGAUGAGGCCGUUAGGCCGAA AUCUCUGA | 9782 |
| 2234 | AGCACCAUA CCUCCUGC | 364 | GCAGGAGG CUGAUGAGGCCGUUAGGCCGAA AUGGUGCU | 9783 |
| 2238 | CCAUACCUC CUGCGAAA | 365 | UUUCGCAG CUGAUGAGGCCGUUAGGCCGAA AGGUAUGG | 9784 |
| 2250 | CGAAACCUC AGUGAUCA | 366 | UGAUCACU CUGAUGAGGCCGUUAGGCCGAA AGGUUUCG | 9785 |
| 2257 | UCAGUGAUC ACACAGUG | 367 | CACUGUGU CUGAUGAGGCCGUUAGGCCGAA AUCACUGA | 9786 |
| 2271 | GUGGCCAUC AGCAGUUC | 368 | GAACUGCU CUGAUGAGGCCGUUAGGCCGAA AUGGCCAC | 9787 |
| 2278 | UCAGCAGUU CCACCACU | 369 | AGUGGUGG CUGAUGAGGCCGUUAGGCCGAA ACUGCUGA | 9788 |
| 2279 | CAGCAGUUC CACCACUU | 370 | AAGUGGUG CUGAUGAGGCCGUUAGGCCGAA AACUGCUG | 9789 |
| 2287 | CCACCACUU UAGACUGU | 371 | ACAGUCUA CUGAUGAGGCCGUUAGGCCGAA AGUGGUGG | 9790 |
| 2288 | CACCACUUU AGACUGUC | 372 | GACAGUCU CUGAUGAGGCCGUUAGGCCGAA AAGUGGUG | 9791 |
| 2289 | ACCACUUUA GACUGUCA | 373 | UGACAGUC CUGAUGAGGCCGUUAGGCCGAA AAAGUGGU | 9792 |
| 2296 | UAGACUGUC AUGCUAAU | 374 | AUUAGCAU CUGAUGAGGCCGUUAGGCCGAA ACAGUCUA | 9793 |
| 2302 | GUCAUGCUA AUGGUGUC | 375 | GACACCAU CUGAUGAGGCCGUUAGGCCGAA AGCAUGAC | 9794 |
| 2310 | AAUGGUGUC CCCGAGCC | 376 | GGCUCGGG CUGAUGAGGCCGUUAGGCCGAA ACACCAUU | 9795 |
| 2320 | CCGAGCCUC AGAUCACU | 377 | AGUGAUCU CUGAUGAGGCCGUUAGGCCGAA AGGCUCGG | 9796 |
| 2325 | CCUCAGAUC ACUUGGUU | 378 | AACCAAGU CUGAUGAGGCCGUUAGGCCGAA AUCUGAGG | 9797 |
| 2329 | AGAUCACUU GGUUUAAA | 379 | UUUAAACC CUGAUGAGGCCGUUAGGCCGAA AGUGAUCU | 9798 |
| 2333 | CACUUGGUU UAAAAACA | 380 | UGUUUUUA CUGAUGAGGCCGUUAGGCCGAA ACCAAGUG | 9799 |
| 2334 | ACUUGGUUU AAAAACAA | 381 | UUGUUUUU CUGAUGAGGCCGUUAGGCCGAA AACCAAGU | 9800 |
| 2335 | CUUGGUUUA AAAACAAC | 382 | GUUGUUUU CUGAUGAGGCCGUUAGGCCGAA AAACCAAG | 9801 |
| 2352 | CACAAAAUA CAACAAGA | 383 | UCUUGUUG CUGAUGAGGCCGUUAGGCCGAA AUUUUGUG | 9802 |
| 2370 | CCUGGAAUU AUUUUAGG | 384 | CCUAAAAU CUGAUGAGGCCGUUAGGCCGAA AUUCCAGG | 9803 |
| 2371 | CUGGAAUUA UUUUAGGA | 385 | UCCUAAAA CUGAUGAGGCCGUUAGGCCGAA AAUUCCAG | 9804 |
| 2373 | GGAAUUAUU UUAGGACC | 386 | GGUCCUAA CUGAUGAGGCCGUUAGGCCGAA AUAAUUCC | 9805 |
| 2374 | GAAUUAUUU UAGGACCA | 387 | UGGUCCUA CUGAUGAGGCCGUUAGGCCGAA AAUAAUUC | 9806 |
| 2375 | AAUUAUUUU AGGACCAG | 388 | CUGGUCCU CUGAUGAGGCCGUUAGGCCGAA AAAUAAUU | 9807 |
| 2376 | AUUAUUUUA GGACCAGG | 389 | CCUGGUCC CUGAUGAGGCCGUUAGGCCGAA AAAAUAAU | 9808 |
| 2399 | CACGCUGUU UAUUGAAA | 390 | UUUCAAUA CUGAUGAGGCCGUUAGGCCGAA ACAGCGUG | 9809 |
| 2400 | ACGCUGUUU AUUGAAAG | 391 | CUUUCAAU CUGAUGAGGCCGUUAGGCCGAA AACAGCGU | 9810 |
| 2401 | CGCUGUUUA UUGAAAGA | 392 | UCUUUCAA CUGAUGAGGCCGUUAGGCCGAA AAACAGCG | 9811 |
| 2403 | CUGUUUAUU GAAAGAGU | 393 | ACUCUUUC CUGAUGAGGCCGUUAGGCCGAA AUAAACAG | 9812 |
| 2412 | GAAAGAGUC ACAGAAGA | 394 | UCUUCUGU CUGAUGAGGCCGUUAGGCCGAA ACUCUUVC | 9813 |
| 2433 | GAAGGUGUC UAUCACUG | 395 | CAGUGAUA CUGAUGAGGCCGUUAGGCCGAA ACACCUUC | 9814 |
| 2435 | AGGUGUCUA UCACUGCA | 396 | UGCAGUGA CUGAUGAGGCCGUUAGGCCGAA AGACACCU | 9815 |
| 2437 | GUGUCUAUC ACUGCAAA | 397 | UUUGCAGU CUGAUGAGGCCGUUAGGCCGAA AUAGACAC | 9816 |
| 2465 | GAAGGGCUC UGUGGAAA | 398 | UUUCCACA CUGAUGAGGCCGUUAGGCCGAA AGCCCUUC | 9817 |
| 2476 | UGGAAAGUU CAGCAUAC | 399 | GUAUGCUG CUGAUGAGGCCGUUAGGCCGAA ACUUUCCA | 9818 |
| 2477 | GGAAAGUUC AGCAUACC | 400 | GGUAUGCU CUGAUGAGGCCGUUAGGCCGAA AACUUUCC | 9819 |
| 2483 | UUCAGCAUA CCUCACUG | 401 | CAGUGAGG CUGAUGAGGCCGUUAGGCCGAA AUGCUGAA | 9820 |
| 2487 | GCAUACCUC ACUGUUCA | 402 | UGAACAGU CUGAUGAGGCCGUUAGGCCGAA AGGUAUGC | 9821 |
| 2493 | CUCACUGUU CAAGGAAC | 403 | GUUCCUUG CUGAUGAGGCCGUUAGGCCGAA ACAGUGAG | 9822 |
| 2494 | UCACUGUUC AAGGAACC | 404 | GGUUCCUU CUGAUGAGGCCGUUAGGCCGAA AACAGUGA | 9823 |
| 2504 | AGGAACCUC GGACAAGU | 405 | ACUUGUCC CUGAUGAGGCCGUUAGGCCGAA AGGUUCCU | 9824 |
| 2513 | GGACAAGUC UAAUCUGG | 406 | CCAGAUUA CUGAUGAGGCCGUUAGGCCGAA ACUUGUCC | 9825 |
| 2515 | ACAAGUCUA AUCUGGAG | 407 | CUCCAGAU CUGAUGAGGCCGUUAGGCCGAA AGACUUGU | 9826 |
| 2518 | AGUCUAAUC UGGAGCUG | 408 | CAGCUCCA CUGAUGAGGCCGUUAGGCCGAA AUUAGACU | 9827 |
| 2529 | GAGCUGAUC ACUCUAAC | 409 | GUUAGAGU CUGAUGAGGCCGUUAGGCCGAA AUCAGCUC | 9828 |
| 2533 | UGAUCACUC UAACAUGC | 410 | GCAUGUUA CUGAUGAGGCCGUUAGGCCGAA AGUGAUCA | 9829 |
| 2535 | AUCACUCUA ACAUGCAC | 411 | GUGCAUGU CUGAUGAGGCCGUUAGGCCGAA AGAGUGAU | 9830 |
| 2560 | CUGCGACUC UCUUCUGG | 412 | CCAGAAGA CUGAUGAGGCCGUUAGGCCGAA AGUCGCAG | 9831 |
| 2562 | GCGACUCUC UUCUGGCU | 413 | AGCCAGAA CUGAUGAGGCCGUUAGGCCGAA AGAGUCGC | 9832 |
| 2564 | GACUCUCUU CUGGCUCC | 414 | GGAGCCAG CUGAUGAGGCCGUUAGGCCGAA AGAGAGUC | 9833 |
| 2565 | ACUCUCUUC UGGCUCCU | 415 | AGGAGCCA CUGAUGAGGCCGUUAGGCCGAA AAGAGAGU | 9834 |
| 2571 | UUCUGGCUC CUAUUAAC | 416 | GUUAAUAG CUGAUGAGGCCGUUAGGCCGAA AGCCAGAA | 9835 |
| 2574 | UGGCUCCUA UUAACCCU | 417 | AGGGUUAA CUGAUGAGGCCGUUAGGCCGAA AGGAGCCA | 9836 |
| 2576 | GCUCCUAUU AACCCUCC | 418 | GGAGGGUU CUGAUGAGGCCGUUAGGCCGAA AUAGGAGC | 9837 |
| 2577 | CUCCUAUUA ACCCUCCU | 419 | AGGAGGGU CUGAUGAGGCCGUUAGGCCGAA AAUAGGAG | 9838 |
| 2583 | UUAACCCUC CUUAUCCG | 420 | CGGAUAAG CUGAUGAGGCCGUUAGGCCGAA AGGGUUAA | 9839 |
| 2586 | ACCCUCCUU AUCCGAAA | 421 | UUUCGGAU CUGAUGAGGCCGUUAGGCCGAA AGGAGGGU | 9840 |
| 2587 | CCCUCCUUA UCCGAAAA | 422 | UUUUCGGA CUGAUGAGGCCGUUAGGCCGAA AAGGAGGG | 9841 |
| 2589 | CUCCUUAUC CGAAAAAU | 423 | AUUUUUCG CUGAUGAGGCCGUUAGGCCGAA AUAAGGAG | 9842 |
| 2606 | GAAAAGGUC UUCUUCUG | 424 | CAGAAGAA CUGAUGAGGCCGUUAGGCCGAA ACCUUUUC | 9843 |
| 2608 | AAAGGUCUU CUUCUGAA | 425 | UUCAGAAG CUGAUGAGGCCGUUAGGCCGAA AGACCUUU | 9844 |
| 2809 | AAGGUCUUC UUCUGAAA | 426 | UUUCAGAA CUGAUGAGGCCGUUAGGCCGAA AAGACCUU | 9845 |
| 2611 | GGUCUUCUU CUGAAAUA | 427 | UAUUUCAG CUGAUGAGGCCGUUAGGCCGAA AGAAGACC | 9846 |
| 2612 | GUCUUCUUC UGAAAUAA | 428 | UUAUUUCA CUGAUGAGGCCGUUAGGCCGAA AAGAAGAC | 9847 |
| 2619 | UCUGAAAUA AAGACUGA | 429 | UCAGUCUU CUGAUGAGGCCGUUAGGCCGAA AUUUCAGA | 9848 |
| 2630 | GACUGACUA CCUAUCAA | 430 | UUGAUAGG CUGAUGAGGCCGUUAGGCCGAA AGUCAGUC | 9849 |
| 2634 | GACUACCUA UCAAUUAU | 431 | AUAAUUGA CUGAUGAGGCCGUUAGGCCGAA AGGUAGUC | 9850 |
| 2636 | CUACCUAUC AAUUAUAA | 432 | UUAUAAUU CUGAUGAGGCCGUUAGGCCGAA AUAGGUAG | 9851 |
| 2640 | CUAUCAAUU AUAAUGGA | 433 | UCCAUUAU CUGAUGAGGCCGUUAGGCCGAA AUUGAUAG | 9852 |
| 2641 | UAUCAAUUA UAAUGGAC | 434 | GUCCAUUA CUGAUGAGGCCGUUAGGCCGAA AAUUGAUA | 9853 |
| 2643 | UCAAUUAUA AUGGACCC | 435 | GGGUCCAU CUGAUGAGGCCGUUAGGCCGAA AUAAUUGA | 9854 |
| 2661 | GAUGAAGUU CCUUUGGA | 436 | UCCAAAGG CUGAUGAGGCCGUUAGGCCGAA ACUUCAUC | 9855 |
| 2662 | AUGAAGUUC CUUUGGAU | 437 | AUCCAAAG CUGAUGAGGCCGUUAGGCCGAA AACUUCAU | 9856 |
| 2665 | AAGUUCCUU UGGAUGAG | 438 | CUCAUCCA CUGAUGAGGCCGUUAGGCCGAA AGGAACUU | 9857 |
| 2666 | AGUUCCUUU GGAUGAGC | 439 | GCUCAUCC CUGAUGAGGCCGUUAGGCCGAA AAGGAACU | 9858 |
| 2688 | GAGCGGCUC CCUUAUGA | 440 | UCAUAAGG CUGAUGAGGCCGUUAGGCCGAA AGCCGCUC | 9859 |
| 2692 | GGCUCCCUU AUGAUGCC | 441 | GGCAUCAU CUGAUGAGGCCGUUAGGCCGAA AGGGAGCC | 9860 |
| 2693 | GCUCCCUUA UGAUGCCA | 442 | UGGCAUCA CUGAUGAGGCCGUUAGGCCGAA AAGGGAGC | 9861 |
| 2714 | GUGGGAGUU UGCCCGGG | 443 | CCCGGGCA CUGAUGAGGCCGUUAGGCCGAA ACUCCCAC | 9862 |
| 2715 | UGGGAGUUU GCCCGGGA | 444 | UCCCGGGC CUGAUGAGGCCGUUAGGCCGAA AACUCCCA | 9863 |
| 2730 | GAGAGACUU AAACUGGG | 445 | CCCAGUUU CUGAUGAGGCCGUUAGGCCGAA AGUCUCUC | 9864 |
| 2731 | AGAGACUUA AACUGGCC | 446 | GCCCAGUU CUGAUGAGGCCGUUAGGCCGAA AAGUCUCU | 9865 |
| 2744 | GGGCAAAUC ACUUGGAA | 447 | UUCCAAGU CUGAUGAGGCCGUUAGGCCGAA AUUUGCCC | 9866 |
| 2748 | AAAUCACUU GGAAGAGG | 448 | CCUCUUCC CUGAUGAGGCCGUUAGGCCGAA AGUGAUUU | 9867 |
| 2761 | GAGGGGCUU UUGGAAAA | 449 | UUUUCCAA CUGAUGAGGCCGUUAGGCCGAA AGCCCCUC | 9868 |
| 2762 | AGGGGCUUU UGGAAAAG | 450 | CUUUUCCA CUGAUGAGGCCGUUAGGCCGAA AAGCCCCU | 9869 |
| 2763 | GGGGCUUUU GGAAAAGU | 451 | ACUUUUCC CUGAUGAGGCCGUUAGGCCGAA AAAGCCCC | 9870 |
| 2775 | AAAGUGGUU CAAGCAUC | 452 | GAUGCUUG CUGAUGAGGCCGUUAGGCCGAA ACCACUUU | 9871 |
| 2776 | AAGUGGUUC AAGCAUCA | 453 | UGAUGCUU CUGAUGAGGCCGUUAGGCCGAA AACCACUU | 9872 |
| 2783 | UCAAGCAUC AGCAUUUG | 454 | CAAAUGCU CUGAUGAGGCCGUUAGGCCGAA AUGCUUGA | 9873 |
| 2789 | AUCAGCAUU UGGCAUUA | 455 | UAAUGCCA CUGAUGAGGCCGUUAGGCCGAA AUGCUGAU | 9874 |
| 2790 | UCAGCAUUU GGCAUUAA | 456 | UUAAUGCC CUGAUGAGGCCGUUAGGCCGAA AAUGCUGA | 9875 |
| 2796 | UUUGGCAUU AAGAAAUC | 457 | GAUUUCUU CUGAUGAGGCCGUUAGGCCGAA AUGCCAAA | 9876 |
| 2797 | UUGGCAUUA AGAAAUCA | 458 | UGAUUUCU CUGAUGAGGCCGUUAGGCCGAA AAUGCCAA | 9877 |
| 2804 | UAAGAAAUC ACCUACGU | 459 | ACGUAGGU CUGAUGAGGCCGUUAGGCCGAA AUUUCUUA | 9878 |
| 2809 | AAUCACCUA CGUGCCGG | 460 | CCGGCACG CUGAUGAGGCCGUUAGGCCGAA AGGUCAUU | 9879 |
| 2864 | CAGCGAGUA CAAAGCUC | 461 | GAGCUUUG CUGAUGAGGCCGUUAGGCCGAA ACUCGCUG | 9880 |
| 2872 | ACAAAGCUC UGAUGACU | 462 | AGUCAUCA CUGAUGAGGCCGUUAGGCCGAA AGCUUUGU | 9881 |
| 2886 | ACUGAGCUA AAAAUCUU | 463 | AAGAUUUU CUGAUGAGGCCGUUAGGCCGAA AGCUCAGU | 9882 |
| 2892 | CUAAAAAUC UUGACCCA | 464 | UGGGUCAA CUGAUGAGGCCGUUAGGCCGAA AUUUUUAG | 9883 |
| 2894 | AAAAAUCUU GACCCACA | 465 | UGUGOGUC CUGAUGAGGCCGUUAGGCCGAA AGAUUUUU | 9884 |
| 2904 | ACCCACAUU GGCCACCA | 466 | UGGUGGCC CUGAUGAGGCCGUUAGGCCGAA AUGUGGGU | 9885 |
| 2914 | GCCACCAUC UGAACGUG | 467 | CACGUUCA CUGAUGAGGCCGUUAGGCCGAA AUGGUGGC | 9886 |
| 2925 | AACGUGGUU AACCUGCU | 468 | AGCAGGUU CUGAUGAGGCCGUUAGGCCGAA ACCACGUU | 9887 |
| 2926 | ACGUGGUUA ACCUGCUG | 469 | CAGCAGGU CUGAUGAGGCCGUUAGGCCGAA AACCACGU | 9888 |
| 2962 | GAGGGCCUC UGAUGGUG | 470 | CACCAUCA CUGAUGAGGCCGUUAGGCCGAA AGGCCCUC | 9889 |
| 2973 | AUGGUGAUU GUUGAAUA | 471 | UAUUCAAC CUGAUGAGGCCGUUAGGCCGAA AUCACCAU | 9890 |
| 2976 | GUGAUUGUU GAAUACUG | 472 | CAGUAUUC CUGAUGAGGCCGUUAGGCCGAA ACAAUCAC | 9891 |
| 2981 | UGUUGAAUA CUGCAAAU | 473 | AUUUGCAG CUGAUGAGGCCGUUAGGCCGAA AUUCAACA | 9892 |
| 2990 | CUGCAAAUA UGGAAAUC | 474 | GAUUUCCA CUGAUGAGGCCGUUAGGCCGAA AUUUGCAG | 9893 |
| 2998 | AUGGAAAUC UCUCCAAC | 475 | GUUGGAGA CUGAUGAGGCCGUUAGGCCGAA AUUUCCAU | 9894 |
| 3000 | GGAAAUCUC UCCAACUA | 476 | UAGUUGGA CUGAUGAGGCCGUUAGGCCGAA AGAUUUCC | 9895 |
| 3002 | AAAUCUCUC CAACUACC | 477 | GGUAGUUG CUGAUGAGGCCGUUAGGCCGAA AGAGAUUU | 9896 |
| 3008 | CUCCAACUA CCUCAAGA | 478 | UCUUGAGG CUGAUGAGGCCGUUAGGCCGAA AGUUGGAG | 9897 |
| 3012 | AACUACCUC AAGAGCAA | 479 | UUGCUCUU CUGAUGAGGCCGUUAGGCCGAA AGGUAGUU | 9898 |
| 3029 | ACGUGACUU AUUUUUUC | 480 | GAAAAAAU CUGAUGAGGCCGUUAGGCCGAA AGUCACGU | 9899 |
| 3030 | CGUGACUUA UUUUUUCU | 481 | AGAAAAAA CUGAUGAGGCCGUUAGGCCGAA AAGUCACG | 9900 |
| 3032 | UGACUUAUU UUUUCUCA | 482 | UGAGAAAA CUGAUGAGGCCGUUAGGCCGAA AUAAGUCA | 9901 |
| 3033 | GACUUAUUU UUUCUCAA | 483 | UUGAGAAA CUGAUGAGGCCGUUAGGCCGAA AAUAAGUC | 9902 |
| 3034 | ACUUAUUUU UUCUCAAC | 484 | GUUGAGAA CUGAUGAGGCCGUUAGGCCGAA AAAUAAGU | 9903 |
| 3035 | CUUAUUUUU UCUCAACA | 485 | UGUUGAGA CUGAUGAGGCCGUUAGGCCGAA AAAAUAAG | 9904 |
| 3036 | UUAUUUUUU CUCAACAA | 486 | UUGUUGAG CUGAUGAGGCCGUUAGGCCGAA AAAAAUAA | 9905 |
| 3037 | UAUUUUUUC UCAACAAG | 487 | CUUGUUGA CUGAUGAGGCCGUUAGGCCGAA AAAAAAUA | 9906 |
| 3039 | UUUUUUCUC AACAAGGA | 488 | UCCUUGUU CUGAUGAGGCCGUUAGGCCGAA AGAAAAAA | 9907 |
| 3057 | GCAGCACUA CACAUGGA | 489 | UCCAUGUG CUGAUGAGGCCGUUAGGCCGAA AGUGCUGC | 9908 |
| 3070 | UGGAGCCUA AGAAAGAA | 490 | UUCUUUCU CUGAUGAGGCCGUUAGGCCGAA AGGCUCCA | 9909 |
| 3120 | CCAAGACUA GAUAGCGU | 491 | ACGCUAUC CUGAUGAGGCCGUUAGGCCGAA AGUCUUGG | 9910 |
| 3124 | GACUAGAUA GCGUCACC | 492 | GGUGACGC CUGAUGAGGCCGUUAGGCCGAA AUCUAGUC | 9911 |
| 3129 | GAUAGCGUC ACCAGCAG | 493 | CUGCUGGU CUGAUGAGGCCGUUAGGCCGAA ACGCUAUC | 9912 |
| 3146 | CGAAAGCUU UGCGAGCU | 494 | AGCUCGCA CUGAUGAGGCCGUUAGGCCGAA AGCUUUCG | 9913 |
| 3147 | GAAAGCUUU GCGAGCUC | 495 | GAGCUCGC CUGAUGAGGCCGUUAGGCCGAA AAGCUUUC | 9914 |
| 3155 | UGCGAGCUC CGGCUUUC | 496 | GAAAGCCG CUGAUGAGGCCGUUAGGCCGAA AGCUCGCA | 9915 |
| 3161 | CUCCGGCUU UCAGGAAG | 497 | CUUCCUGA CUGAUGAGGCCGUUAGGCCGAA AGCCGGAG | 9916 |
| 3162 | UCCGGCUUU CAGGAAGA | 498 | UCUUCCUG CUGAUGAGGCCGUUAGGCCGAA AAGCCGGA | 9917 |
| 3163 | CCGGCUUUC AGGAAGAU | 499 | AUCUUCCU CUGAUGAGGCCGUUAGGCCGAA AAAGCCGG | 9918 |
| 3172 | AGGAAGAUA AAAGUCUG | 500 | CAGACUUU CUGAUGAGGCCGUUAGGCCGAA AUCUUCCU | 9919 |
| 3178 | AUAAAAGUC UGAGUGAG | 501 | AUCACUCA CUGAUGAGGCCGUUAGGCCGAA ACUUUUAU | 9920 |
| 3189 | AGUGAUGUU GAGGAAGA | 502 | UCUUCCUC CUGAUGAGGCCGUUAGGCCGAA ACAUCACU | 9921 |
| 3205 | AGGAGGAUU CUGACGGU | 503 | ACCGUCAG CUGAUGAGGCCGUUAGGCCGAA AUCCUCCU | 9922 |
| 3206 | UGAGGAUUC UGACGGUU | 504 | AACCGUCA CUGAUGAGGCCGUUAGGCCGAA AAUCCUCC | 9923 |
| 3214 | CUGACUGUU UCUACAAG | 505 | CUUGUAGA CUGAUGAGGCCGUUAGGCCGAA ACCGUCAG | 9924 |
| 3215 | UGACGGUUU CUACAAGG | 506 | CCUUGUAG CUGAUGAGGCCGUUAGGCCGAA AACCGUCA | 9925 |
| 3216 | GACGGUUUC UACAAGGA | 507 | UCCUGGUA CUGAUGAGGCCGUUAGGCCGAA AAACCGUC | 9926 |
| 3218 | CGGUUUCUA CAAGGAGC | 508 | GCUCCUUG CUGAUGAGGCCGUUAGGCCGAA AGAAACCG | 9927 |
| 3231 | GAGCCCAUC ACUAUGGA | 509 | UCCAUAGU CUGAUGAGGCCGUUAGGCCGAA AUGGGCUC | 9928 |
| 3235 | CCAUCACUA UGGAAGAU | 510 | AUCUUCCA CUGAUGAGGCCGUUAGGCCGAA AGUGAUGG | 9929 |
| 3244 | UGGAAGAUC UGAUUUCU | 511 | AGAAAUCA CUGAUGAGGCCGUUAGGCCGAA AUCUUCCA | 9930 |
| 3249 | GAUCUGAUG UCUGACAG | 512 | CUGUAAGA CUGAUGAGGCCGUUAGGCCGAA AUCAGAUC | 9931 |
| 3250 | AUCUGAUUU CUUACAGU | 513 | ACUGUAAG CUGAUGAGGCCGUUAGGCCGAA AAUCAGAU | 9932 |
| 3251 | UCUGAUUUC UUACAGUU | 514 | AACUGUAA CUGAUGAGGCCGUUAGGCCGAA AAAUCAGA | 9933 |
| 3253 | UGAUUUCUU ACAGUUUU | 515 | AAAACUGU CUGAUGAGGCCGUUAGGCCGAA AGAAAUCA | 9934 |
| 3254 | GAUUUCUUA CAGUUUUC | 516 | GAAAACUG CUGAUGAGGCCGUUAGGCCGAA AAGAAAUC | 9935 |
| 3259 | CUUACAGUU UUCAAGUG | 517 | CACUUGAA CUGAUGAGGCCGUUAGGCCGAA ACUGUAAG | 9936 |
| 3260 | UUACAGUUU UCAAGUGG | 518 | CCACUUGA CUGAUGAGGCCGUUAGGCCGAA AACUGUAA | 9937 |
| 3261 | UACAGUUUU CAAGUGGC | 519 | GCCACUUG CUGAUGAGGCCGUUAGGCCGAA AAACUGUA | 9938 |
| 3262 | ACAGUUUUC AAGUGGCC | 520 | GGCCACUU CUGAUGAGGCCGUUAGGCCGAA AAAACUGU | 9939 |
| 3284 | CAUGGAGUU CCUGUCUU | 521 | AAGACAGG CUGAUGAGGCCGUUAGGCCGAA ACUCCAUG | 9940 |
| 3285 | AUGGAGUUC CUGUCUUC | 522 | GAAGACAG CUGAUGAGGCCGUUAGGCCGAA AACUCCAU | 9941 |
| 3290 | GUUCCUGUC UUCCAGAA | 523 | UUCUGGAA CUGAUGAGGCCGUUAGGCCGAA ACAGGAAC | 9942 |
| 3292 | UCCUGUCUU CCAGAAAG | 524 | CUUUCUGG CUGAUGAGGCCGUUAGGCCGAA AGACAGGA | 9943 |
| 3293 | CCUGUCUUC CAGAAAGU | 525 | ACUUUCUG CUGAUGAGGCCGUUAGGCCGAA AAGACAGG | 9944 |
| 3306 | AAGUGCAUU CAUCGGGA | 526 | UCCCGAUG CUGAUGAGGCCGUUAGGCCGAA AUGCACUU | 9945 |
| 3307 | AGUGCAUUC AUCGGGAC | 527 | GUCCCGAU CUGAUGAGGCCGUUAGGCCGAA AAUGCACU | 9946 |
| 3310 | GCAUUCAUC GGGACCUG | 528 | CAGGUCCC CUGAUGAGGCCGUUAGGCCGAA AUGAAUGC | 9947 |
| 3333 | AGAAACAUU CUUUUAUC | 529 | GAUAAAAG CUGAUGAGGCCGUUAGGCCGAA AUGUUUCU | 9948 |
| 3334 | GAAACAUUC UUUUAUCU | 530 | AGAUAAAA CUGAUGAGGCCGUUAGGCCGAA AAUGUUUC | 9949 |
| 3336 | AACAUUCUU UUAUCUGA | 531 | UCAGAUAA CUGAUGAGGCCGUUAGGCCGAA AGAAUGUU | 9950 |
| 3337 | ACAUUCUUU UAUCUGAG | 532 | CUCAGAUA CUGAUGAGGCCGUUAGGCCGAA AAGAAUGU | 9951 |
| 3338 | CAUUCUUUU AUCUGAGA | 533 | UCUCAGAU CUGAUGAGGCCGUUAGGCCGAA AAAGAAUG | 9952 |
| 3339 | AUUCUUUUA UCUGAGAA | 534 | UUCUCAGA CUGAUGAGGCCGUUAGGCCGAA AAAAGAAU | 9953 |
| 3341 | UCUUUUAUC UGAGAACA | 535 | UGUUCUCA CUGAUGAGGCCGUUAGGCCGAA AUAAAAGA | 9954 |
| 3363 | GUGAAGAUU UGUGAUUU | 536 | AAAUCACA CUGAUGAGGCCGUUAGGCCGAA AUCUUCAC | 9955 |
| 3364 | UGAAGAUUU GUGAUUUG | 537 | AAAAUCAC CUGAUGAGGCCGUUAGGCCGAA AAUCUUCA | 9956 |
| 3370 | UUUGUGAUU UUGGCCUU | 538 | AAGGCCAA CUGAUGAGGCCGUGAGGCCGAA AUCACAAA | 9957 |
| 3371 | UUGUGAUUU UGGCCUUG | 539 | CAAGGCCA CUGAUGAGGCCGUUAGGCCGAA AAUCACAA | 9958 |
| 3372 | UGUGAUUUU GGCCUUGC | 540 | GCAAGGCC CUGAUGAGGCCGUUAGGCCGAA AAAUCACA | 9959 |
| 3378 | UUUGGCCUU GCCCGGGA | 541 | UCCCGGGC CUGAUGAGGCCGUUAGGCCGAA AGGCCAAA | 9960 |
| 3388 | CCCGGGAUA UUUAUAAG | 542 | CUUAUAAA CUGAUGAGGCCGUUAGGCCGAA AUCCCGGG | 9961 |
| 3390 | CGGGAUAUU UAUAAGAA | 543 | UUCUUAUA CUGAUGAGGCCGUUAGGCCGAA AUAUCCCG | 9962 |
| 3391 | GGGAUAUUU AUAAGAAC | 544 | GUUCUUAU CUGAUGAGGCCGUUAGGCCGAA AAUAUCCC | 9963 |
| 3392 | GGAUAUUUA UAAGAACC | 545 | GGUUCUUA CUGAUGAGGCCGUUAGGCCGAA AAAUAUCC | 9964 |
| 3394 | AUAUUUAUA AGAACCCC | 546 | GGGGUUCU CUGAUGAGGCCGUUAGGCCGAA AUAAAUAU | 9965 |
| 3406 | ACCCCGAUU AUGUGAGA | 547 | UCUCACAU CUGAUGAGGCCGUUAGGCCGAA AUCGGGGU | 9966 |
| 3407 | CCCCGAUUA UGUGAGAA | 548 | UUCUCACA CUGAUGAGGCCGUUAGGCCGAA AAUCGGGG | 9967 |
| 3424 | AAGGAGAUA CUCGACUU | 549 | AAGUCGAG CUGAUGAGGCCGUUAGGCCGAA AUCUCCUU | 9968 |
| 3427 | GAGAUACUC GACUUCCU | 550 | AGGAAGUC CUGAUGAGGCCGUUAGGCCGAA AGUAUCUC | 9969 |
| 3432 | ACUCGACUU CCUCUGAA | 551 | UUCAGAGG CUGAUGAGGCCGUUAGGCCGAA AGUCGAGU | 9970 |
| 3433 | CUCGACUUC CUCUGAAA | 552 | UUUCAGAG CUGAUGAGGCCGUUAGGCCGAA AAGUCGAG | 9971 |
| 3436 | GACUUCCUC UGAAAUGG | 553 | CCAUUUCA CUGAUGAGGCCGUUAGGCCGAA AGGAAGUC | 9972 |
| 3451 | GGAUGGCUC CCGAAUCU | 554 | AGAUUCGG CUGAUGAGGCCGUUAGGCCGAA AGCCAUCC | 9973 |
| 3458 | UCCCGAAUC UAUCUUUG | 555 | CAAAGAUA CUGAUGAGGCCGUUAGGCCGAA AUUCGGGA | 9974 |
| 3460 | CCGAAUCUA UCUUUGAC | 556 | GUCAAAGA CUGAUGAGGCCGUUAGGCCGAA AGAUUCGG | 9975 |
| 3462 | GAAUCUAUC UUUGACAA | 557 | UUGUCAAA CUGAUGAGGCCGUUAGGCCGAA AUAGAUUC | 9976 |
| 3464 | AUCUAUCUU UGACAAAA | 558 | UUUUGUCA CUGAUGAGGCCGUUAGGCCGAA AGAUAGAU | 9977 |
| 3465 | UCUAUCUUU GACAAAAU | 559 | AUUUUGUC CUGAUGAGGCCGUUAGGCCGAA AAGAUAGA | 9978 |
| 3474 | GACAAAAUC UACAGCAC | 560 | GUGCUGUA CUGAUGAGGCCGUUAGGCCGAA AUUUUGUC | 9979 |
| 3476 | CAAAAUCUA CAGGACCA | 561 | UGGUGCUG CUGAUGAGGCCGUUAGGCCGAA AGAUUUUG | 9980 |
| 3500 | CGUGUGGUC UUACGGAG | 562 | CUCCGUAA CUGAUGAGGCCGUUAGGCCGAA ACCACACG | 9981 |
| 3502 | UGUGGUCUU ACGGAGUA | 563 | UACUCCGU CUGAUGAGGCCGUUAGGCCGAA AGACCACA | 9982 |
| 3503 | GUGGUCUUA CGGAGUAU | 564 | AUACUCCG CUGAUGAGGCCGUUAGGCCGAA AAGACCAC | 9983 |
| 3510 | UACGGAGUA UUGCUGUG | 565 | CACAGCAA CUGAUGAGGCCGUUAGGCCGAA ACUCCGUA | 9984 |
| 3512 | CGGAGUAUU GCUGUGGG | 566 | CCCACAGC CUGAUGAGGCCGUUAGGCCGAA AUACUCCG | 9985 |
| 3525 | UGGGAAAUC UUCUCCUU | 567 | AAGGAGAA CUGAUGAGGCCGUUAGGCCGAA AUUUCCCA | 9986 |
| 3527 | GGAAAUCUU CUCCUUAG | 568 | CUAAGGAG CUGAUGAGGCCGUUAGGCCGAA AGAUUUCC | 9987 |
| 3528 | GAAAUCUUC UCCUUAGG | 569 | CCUAAGGA CUGAUGAGGCCGUUAGGCCGAA AAGAUUUC | 9988 |
| 3530 | AAUCUUCUC CUUAGGUG | 570 | CACCUAAG CUGAUGAGGCCGUUAGGCCGAA AGAAGAUU | 9989 |
| 3533 | CUUCUCCUU AGGUGGGU | 571 | ACCCACCU CUGAUGAGGCCGUUAGGCCGAA AGGAGAAG | 9990 |
| 3534 | UUCUCCUUA GGUGGGUC | 572 | GACCCACC CUGAUGAGGCCGUUAGGCCGAA AAGGAGAA | 9991 |
| 3542 | AGGUOGGUC UCCAUACC | 573 | GGUAUGGA CUGAUGAGGCCGUUAGGCCGAA ACCCACCU | 9992 |
| 3544 | GUGGGUCUC CAUACCCA | 574 | UGGGUAUG CUGAUGAGGCCGUUAGGCCGAA AGACCCAC | 9993 |
| 3548 | GUCUCCAUA CCCAGGAG | 575 | CUCCUGGG CUGAUGAGGCCGUUAGGCCGAA AUGGAGAC | 9994 |
| 3558 | CCAGGAGUA CAAAUGGA | 576 | UCCAUUUG CUGAUGAGGCCGUUAGGCCGAA ACUCCUGG | 9995 |
| 3575 | UGAGGACUU UUGCAGUC | 577 | GACUGCAA CUGAUGAGGCCGUUAGGCCGAA AGUCCUCA | 9996 |
| 3576 | GAGGACUUU UGCAGUCG | 578 | CGACUGCA CUGAUGAGGCCGUUAGGCCGAA AAGUCCUC | 9997 |
| 3577 | AGGACUUUU GCAGUCGC | 579 | GCGACUGC CUGAUGAGGCCGUUAGGCCGAA AAAGUCCU | 9998 |
| 3583 | UUUGCAGUC GCCUGAGG | 580 | CCUCAGGC CUGAUGAGGCCGUUAGGCCGAA ACUGCAAA | 9999 |
| 3613 | UGAGAGCUC CUGAGUAC | 581 | GUACUCAG CUGAUGAGGCCGUUAGGCCGAA ACCUCUCA | 10000 |
| 3620 | UCCUGAGUA CUCUACUC | 582 | GAGUAGAG CUGAUGAGGCCGUUAGGCCGAA ACUCAGGA | 10001 |
| 3623 | UGAGUACUC UACUCCUG | 583 | CAGGAGUA CUGAUGAGGCCGUUAGGCCGAA AGUACUCA | 10002 |
| 3625 | AGUACUCUA CUCCUGAA | 584 | UUCAGGAG CUGAUGAGGCCGUUAGGCCGAA AGAGUACU | 10003 |
| 3628 | ACUCUACUC CUGAAAUC | 585 | GAUUUCAG CUGAUGAGGCCGUUAGGCCGAA AGUAGAGU | 10004 |
| 3636 | CCUGAAAUC UAUCAGAU | 586 | AUCUGAUA CUGAUGAGGCCGUUAGGCCGAA AUUUCAGG | 10005 |
| 3638 | UGAAAUCUA UCAGAUCA | 587 | UGAUCUGA CUGAUGAGGCCGUUAGGCCGAA AGAUUUCA | 10006 |
| 3640 | AAAUCUAUC AGAUCAUG | 588 | CAUGAUCU CUGAUGAGGCCGUUAGGCCGAA AUAGAUUU | 10007 |
| 3645 | UAUCAGAUC AUGCUGGA | 589 | UCCAGCAU CUGAUGAGGCCGUUAGGCCGAA AUCUGAUA | 10008 |
| 3689 | GCCAAGAUU UGCAGAAC | 590 | GUUCUGCA CUGAUGAGGCCGUUAGGCCGAA AUCUUGGC | 10009 |
| 3690 | CCAAGAUUU GCAGAACU | 591 | AGUUCUGC CUGAUGAGGCCGUUAGGCCGAA AAUCUUGG | 10010 |
| 3699 | GCAGAACUU GUGGAAAA | 592 | UUUUCCAC CUGAUGAGGCCGUUAGGCCGAA AGUUCUGC | 10011 |
| 3711 | GAAAAACUA GGUGAUUU | 593 | AAAUCACC CUGAUGAGGCCGUUAGGCCGAA AGUUUUUC | 10012 |
| 3718 | UAGGUGAUU UGCUUCAA | 594 | UUGAAGCA CUGAUGAGGCCGUUAGGCCGAA AUCACCUA | 10013 |
| 3719 | AGGUGAUUU GCUUCAAG | 595 | CUUGAACC CUGAUGAGGCCGUUAGGCCGAA AAUCACCU | 10014 |
| 3723 | GAUUUGCUU CAAGCAAA | 596 | UUUGCUUG CUGAUGAGGCCGUUAGGCCGAA AGCAAAUC | 10015 |
| 3724 | AUUUGCUUC AAGCAAAU | 597 | AUUUGCUU CUGAUGAGGCCGUUAGGCCGAA AAGCAAAU | 10016 |
| 3735 | GCAAAUGUA CAACAGGA | 598 | UCCUGUUG CUGAUGAGGCCGUUAGGCCGAA ACAUUUGC | 10017 |
| 3748 | AGGAUGGUA AAGACUAC | 599 | GUAGUCUU CUGAUGAGGCCGUUAGGCCGAA ACCAUCCU | 10018 |
| 3755 | UAAAGACUA CAUCCCAA | 600 | UUGGGAUG CUGAUGAGGCCGUUAGGCCGAA AGUCUUUA | 10019 |
| 3759 | GACUACAUC CCAAUCAA | 601 | UUGAUUGG CUGAUGAGGCCGUUAGGCCGAA AUGUAGUC | 10020 |
| 3765 | AUCCCAAUC AAUGCCAU | 602 | AUGGCAUU CUGAUGAGGCCGUUAGGCCGAA AUUGGGAU | 10021 |
| 3774 | AAUGCCAUA CUGACAGG | 603 | CCUGUCAG CUGAUGAGGCCGUUAGGCCGAA AUGGCAUU | 10022 |
| 3787 | CAGGAAAUA CUGGGUUU | 604 | AAACCCAC CUGAUGAGGCCGUUAGGCCGAA AUUUCCUG | 10023 |
| 3794 | UAGUGGGUU UACAUACU | 605 | AGUAUGUA CUGAUGAGGCCGUUAGGCCGAA ACCCACUA | 10024 |
| 3795 | AGUGGGUUU ACAUACUC | 606 | GAGUAUGU CUGAUGAGGCCGUUAGGCCGAA AACCCACU | 10025 |
| 3796 | GUGGGUUUA CAUACUCA | 607 | UGAGUAUG CUGAUGAGGCCGUUAGGCCGAA AAACCCAC | 10026 |
| 3800 | GUUUACAUA CUCAACUC | 608 | GAGUUGAG CUGAUGAGGCCGUUAGGCCGAA AUGUAAAC | 10027 |
| 3803 | UACAUACUC AACUCCUG | 609 | CAGGAGUU CUGAUGAGGCCGUUAGGCCGAA AGUAUGUA | 10028 |
| 3808 | ACUCAACUC CUGCCUUC | 610 | GAAGGCAG CUGAUGAGGCCGUUAGGCCGAA AGUUCAGU | 10029 |
| 3815 | UCCUGCCUU CUCUGAGG | 611 | CCUCAGAG CUGAUGAGGCCGUUAGGCCGAA AGGCAGGA | 10030 |
| 3816 | CCUGCCUUC UCUGAGGA | 612 | UCCUCAGA CUGAUGAGGCCGUUAGGCCGAA AAGGCAGG | 10031 |
| 3818 | UGCCUUCUC UGAGGACU | 613 | AGUCCUCA CUGAUGAGGCCGUUAGGCCGAA AGAAGGCA | 10032 |
| 3827 | UGAGGACUU CUUCAAGG | 614 | CCUUGAAG CUGAUGAGGCCGUUAGGCCGAA AGUCCUCA | 10033 |
| 3828 | GAGGACUUC UUCAAGGA | 615 | UCCUUGAA CUGAUGAGGCCGUUAGGCCGAA AAGUCCUC | 10034 |
| 3830 | GGACUUCUU CAAGGAAA | 616 | UUUCCUUG CUGAUGAGGCCGUUAGGCCGAA AGAAGUCC | 10035 |
| 3831 | GACUUCUUC AAGGAAAG | 617 | CUUUCCUU CUGAUGAGGCCGUUAGGCCGAA AAGAAGUC | 10036 |
| 3841 | AGGAAAGUA UUUCAGCU | 618 | AGCUGAAA CUGAUGAGGCCGUUAGGCCGAA ACUUUCCU | 10037 |
| 3843 | GAAAGUAUU UCAGCUCC | 619 | GGAGCUGA CUGAUGAGGCCGUUAGGCCGAA AUACUUUC | 10038 |
| 3844 | AAAGUAUUU CAGCUCCG | 620 | CGGAGCUG CUGAUGAGGCCGUUAGGCCGAA AAUACUUU | 10039 |
| 3845 | AAGUAUUUC AGCUCCGA | 621 | UCGGAGCU CUGAUGAGGCCGUUAGGCCGAA AAAUACUU | 10040 |
| 3850 | UUUCAGCUC CGAAGUUU | 622 | AAACUUCG CUGAUGAGGCCGUUAGGCCGAA AGCUGAAA | 10041 |
| 3857 | UCCGAAGUU UAAUUCAG | 623 | CUGAAUUA CUGAUGAGGCCGUUAGGCCGAA ACUUCGGA | 10042 |
| 3858 | CCGAAGUUU AAUUCAGG | 624 | CCUGAAUU CUGAUGAGGCCGUUAGGCCGAA AACUUCGG | 10043 |
| 3859 | CGAAGUUUA AUUCAGGA | 625 | UCCUGAAU CUGAUGAGGCCGUUAGGCCGAA AAACUUCG | 10044 |
| 3862 | AGUUUAAUU CAGGAAGC | 626 | GCUUCCUG CUGAUGAGGCCGUUAGGCCGAA AUUAAACU | 10045 |
| 3863 | GUUUAAUUC AGGAAGCU | 627 | AGCUUCCU CUGAUGAGGCCGUUAGGCCGAA AAUUAAAC | 10046 |
| 3872 | AGGAAGCUC UGAUGAUG | 628 | CAUCAUCA CUGAUGAGGCCGUUAGGCCGAA AGCUUCCU | 10047 |
| 3882 | GAUGAUGUC AGAUAUGU | 629 | ACAUAUCU CUGAUGAGGCCGUUAGGCCGAA ACAUCAUC | 10048 |
| 3887 | UGUCAGAUA UGUAAAUG | 630 | CAUUUACA CUGAUGAGGCCGUUAGGCCGAA AUCUGACA | 10049 |
| 3891 | AGAUAUGUA AAUGCUUU | 631 | AAAGCAUU CUGAUGAGGCCGUUAGGCCGAA ACAUAUCU | 10050 |
| 3898 | UAAAUGCUU UCAAGUUC | 632 | GAACUUGA CUGAUGAGGCCGUUAGGCCGAA AGCAUUUA | 10051 |
| 3899 | AAAUGCUUU CAAGUUCA | 633 | UGAACUUG CUGAUGAGGCCGUUAGGCCGAA AAGCAUUU | 10052 |
| 3900 | AAUGCUUUC AAGUUCAU | 634 | AUGAACUU CUGAUGAGGCCGUUAGGCCGAA AAAGCAUU | 10053 |
| 3905 | UUUCAAGUU CAUGAGCC | 635 | GGCUCAUG CUGAUGAGGCCGUUAGGCCGAA ACUUGAAA | 10054 |
| 3906 | UUCAAGUUC AUGAGCCU | 636 | AGGCUCAU CUGAUGAGGCCGUUAGGCCGAA AACUUGAA | 10055 |
| 3924 | GAAAGAAUC AAAACCUU | 637 | AAGGUUUU CUGAUGAGGCCGUUAGGCCGAA AUUCUUUC | 10056 |
| 3932 | CAAAACCUU UGAAGAAC | 638 | GUUCUUCA CUGAUGAGGCCGUUAGGCCGAA AGGUUUUG | 10057 |
| 3933 | AAAACCUUU GAAGAACU | 639 | AGUUCUUC CUGAUGAGGCCGUUAGGCCGAA AAGGUUUU | 10058 |
| 3942 | GAAGAACUU UUACCGAA | 640 | UUCGGUAA CUGAUGAGGCCGUUAGGCCGAA AGUUCUUC | 10059 |
| 3943 | AAGAACUUU UACCGAAU | 641 | AUUCGGUA CUGAUGAGGCCGUUAGGCCGAA AAGUUCUU | 10060 |
| 3944 | AGAACUUUU ACCGAAUC | 642 | CAUUCGGU CUGAUGAGGCCGUUAGGCCGAA AAAGUUCU | 10061 |
| 3945 | GAACUUUUA CCGAAUGC | 643 | GCAUUCGG CUGAUGAGGCCGUUAGGCCGAA AAAAGUUC | 10062 |
| 3959 | UGCCACCUC CAUGUUUG | 644 | CAAACAUG CUGAUGAGGCCGUUAGGCCGAA AGGUGGCA | 10063 |
| 3965 | CUCCAUGUU UGAUGACU | 645 | AGUCAUCA CUGAUGAGGCCGUUAGGCCGAA ACAUGGAG | 10064 |
| 3966 | UCCAUGUUU GAUGACUA | 646 | UAGUCAUC CUGAUGAGGCCGUUAGGCCGAA AACAUGGA | 10065 |
| 3974 | UGAUGACUA CCAGGGCG | 647 | CGCCCUGG CUGAUGAGGCCGUUAGGCCGAA AGUCAUCA | 10066 |
| 3994 | GCAGCACUC UGUUGGCC | 648 | GGCCAACA CUGAUGAGGCCGUUAGGCCGAA AGUGCUGC | 10067 |
| 3998 | CACUCUGUU GGCCUCUC | 649 | GAGAGGCC CUGAUGAGGCCGUUAGGCCGAA ACAGAGUG | 10068 |
| 4004 | GUUGGCCUC UCCCAUGC | 650 | GCAUGGGA CUGAUGAGGCCGUUAGGCCGAA AGGCCAAC | 10069 |
| 4006 | UGGCCUCUC CCAUGCUG | 651 | CAGCAUGG CUGAUGAGGCCGUUAGGCCGAA AGAGGCCA | 10070 |
| 4022 | GAAGCGCUU CACCUGGA | 652 | UCCAGGUG CUGAUGAGGCCGUUAGGCCGAA AGCGCUUC | 10071 |
| 4023 | AAGCGCUUC ACCUGGAC | 653 | GUCCAGGU CUGAUGAGGCCGUUAGGCCGAA AAGCGCUU | 10072 |
| 4052 | CAAGGCCUC GCUCAAGA | 654 | UCUUGAGC CUGAUGAGGCCGUUAGGCCGAA AGGCCUUG | 10073 |
| 4056 | GCCUCGCUC AAGAUUGA | 655 | UCAAUCUU CUGAUGAGGCCGUUAGGCCGAA AGCGAGGC | 10074 |
| 4062 | CUCAAGAUU GACUUGAG | 656 | CUCAAGUC CUGAUGAGGCCGUUAGGCCGAA AUCUUGAG | 10075 |
| 4067 | GAUUGACUU GAGAGUAA | 657 | UUACUCUC CUGAUGAGGCCGUUAGGCCGAA AGUCAAUC | 10076 |
| 4074 | UUGAGAGUA ACCAGUAA | 658 | UUACUGGU CUGAUGAGGCCGUUAGGCCGAA ACUCUCAA | 10077 |
| 4081 | UAACCAGUA AAAGUAAG | 659 | CUUACUUU CUGAUGAGGCCGUUAGGCCGAA ACUGGUUA | 10078 |
| 4087 | GUAAAAGUA AGGAGUCG | 660 | CGACUCCU CUGAUGAGGCCGUUAGGCCGAA ACUUUUAC | 10079 |
| 4094 | UAAGGAGUC GGGGCUGU | 661 | ACAGCCCC CUGAUGAGGCCGUUAGGCCGAA ACUCCUUA | 10080 |
| 4103 | GGGGCUGUC UGAUGUCA | 662 | UGACAUCA CUGAUGAGGCCGUUAGGCCGAA ACAGCCCC | 10081 |
| 4110 | UCUGAUGUC AGCAGGCC | 663 | GGCCUGCU CUGAUGAGGCCGUUAGGCCGAA ACAUCAGA | 10082 |
| 4123 | GGCCCAGUU UCUGCCAU | 664 | AUGGCAGA CUGAUGAGGCCGUUAGGCCGAA ACUGGGCC | 10083 |
| 4124 | GCCCAGUUU CUGCCAUU | 665 | AAUGGCAG CUGAUGAGGCCGUUAGGCCGAA AACUGGGC | 10084 |
| 4125 | CCCAGUUUC UGCCAUUC | 666 | GAAUGGCA CUGAUGAGGCCGUUAGGCCGAA AAACUGGG | 10085 |
| 4132 | UCUGCCAUU CCAGCUGU | 667 | ACAGCUGG CUGAUGAGGCCGUUAGGCCGAA AUGGCAGA | 10086 |
| 4133 | CUGCCAUUC CAGCUGUG | 668 | CACAGCUG CUGAUGAGGCCGUUAGGCCGAA AAUGGCAG | 10087 |
| 4149 | GGGCACGUC AGCGAAGG | 669 | CCUUCGCU CUGAUGAGGCCGUUAGGCCGAA ACGUGCCC | 10088 |
| 4169 | GCGCAGGUU CACCUACG | 670 | CGUAGGUG CUGAUGAGGCCGUUAGGCCGAA ACCUGCGC | 10089 |
| 4170 | CGCAGGUUC ACCUACGA | 671 | UCGUAGGU CUGAUGAGGCCGUUAGGCCGAA AACCUGCG | 10090 |
| 4175 | GUUCACCUA CGACCACG | 672 | CGUGGUCG CUGAUGAGGCCGUUAGGCCGAA AGGUGAAC | 10091 |
| 4203 | AGGAAAAUC GCGUGCUG | 673 | CAGCACGC CUGAUGAGGCCGUUAGGCCGAA AUUUUCCU | 10092 |
| 4214 | GUGCUGCUC CCCGCCCC | 674 | GGGGCGGG CUGAUGAGGCCGUUAGGCCGAA AGCAGCAC | 10093 |
| 4229 | CCCAGACUA CAACUCGG | 675 | CCGAGUUG CUGAUGAGGCCGUUAGGCCGAA AGUCUGGG | 10094 |
| 4235 | CUACAACUC GGUGGUCC | 676 | GGACCACC CUGAUGAGGCCGUUAGGCCGAA AGUUGUAG | 10095 |
| 4242 | UCGGUGGUC CUGUACUC | 677 | GAGUACAG CUGAUGAGGCCGUUAGGCCGAA ACCACCGA | 10096 |
| 4247 | GGUCCUGUA CUCCACCC | 678 | GGGUGGAG CUGAUGAGGCCGUUAGGCCGAA ACAGGACC | 10097 |
| 4250 | CCUGUACUC CACCCCAC | 679 | GUGGGGUG CUGAUGAGGCCGUUAGGCCGAA AGUACAGG | 10098 |
| 4263 | CCACCCAUC UAGAGUUU | 680 | AAACUCUA CUGAUGAGGCCGUUAGGCCGAA AUGGGUGG | 10099 |
| 4265 | ACCCAUCUA GAGUUUGA | 681 | UCAAACUC CUGAUGAGGCCGUUAGGCCGAA AGAUGGGU | 10100 |
| 4270 | UCUAGAGUU UGACACGA | 682 | UCGUGUCA CUGAUGAGGCCGUUAGGCCGAA ACUCUAGA | 10101 |
| 4271 | CUAGAGUUU GACACGAA | 683 | UUCGUGUC CUGAUGAGGCCGUUAGGCCGAA AACUCUAG | 10102 |
| 4284 | CGAAGCCUU AUUUCUAG | 684 | CUAGAAAU CUGAUGAGGCCGUUAGGCCGAA AGGCUUCG | 10103 |
| 4285 | GAAGCCUUA UUUCUAGA | 685 | UCUAGAAA CUGAUGAGGCCGUUAGGCCGAA AAGGCUUC | 10104 |
| 4287 | AGCCUUAUU UCUAGAAG | 686 | CUUCUAGA CUGAUGAGGCCGUUAGGCCGAA AUAAGGCU | 10105 |
| 4288 | GCCUUAUUU CUAGAAGC | 687 | GCUUCUAG CUGAUGAGGCCGUUAGGCCGAA AAUAAGGC | 10106 |
| 4289 | CCUUAUUUC UAGAAGCA | 688 | UGCUUCUA CUGAUGAGGCCGUUAGGCCGAA AAAUAAGG | 10107 |
| 4291 | UUAUUUCUA GAAGCACA | 689 | UGUGCUUC CUGAUGAGGCCGUUAGGCCGAA AGAAAUAA | 10108 |
| 4305 | ACAUGUGUA UUUAUACC | 690 | GGUAUAAA CUGAUGAGGCCGUUAGGCCGAA ACACAUGU | 10109 |
| 4307 | AUGUGUAUU UAUACCCC | 691 | GGGGUAUA CUGAUGAGGCCGUUAGGCCGAA AUACACAU | 10110 |
| 4308 | UGUGUAUUU AUACCCCC | 692 | GGGGGUAU CUGAUGAGGCCGUUAGGCCGAA AAUACACA | 10111 |
| 4309 | GUGUAUUUA UACCCCCA | 693 | UGGGGGUA CUGAUGAGGCCGUUAGGCCGAA AAAUACAC | 10112 |
| 4311 | GUAUUUAUA CCCCCAGG | 694 | CCUGGGGG CUGAUGAGGCCGUUAGGCCGAA AUAAAUAC | 10113 |
| 4325 | AGGAAACUA GCUUUUGC | 695 | GCAAAAGC CUGAUGAGGCCGUUAGGCCGAA AGUUUCCU | 10114 |
| 4329 | AACUAGCUU UUGCCAGU | 696 | ACUGGCAA CUGAUGAGGCCGUUAGGCCGAA AGCUAGUU | 10115 |
| 4330 | ACUAGCUUU UGCCAGUA | 697 | UACUGGCA CUGAUGAGGCCGUUAGGCCGAA AAGCUAGU | 10116 |
| 4331 | CUAGCUUUU GCCAGUAU | 698 | AUACUGGC CUGAUGAGGCCGUUAGGCCGAA AAAGCUAG | 10117 |
| 4338 | UUGCCAGUA UUAUGCAU | 699 | AUGCAUAA CUGAUGAGGCCGUUAGGCCGAA ACUGGCAA | 10118 |
| 4340 | GCCAGUAUU AUGCAUAU | 700 | AUAUGCAU CUGAUGAGGCCGUUAGGCCGAA AUACUGGC | 10119 |
| 4341 | CCAGUAUUA UGCAUAUA | 701 | UAUAUGCA CUGAUGAGGCCGUUAGGCCGAA AAUACUGG | 10120 |
| 4347 | UUAUGCAUA UAUAAGUU | 702 | AACUUAUA CUGAUGAGGCCGUUAGGCCGAA AUGCAUAA | 10121 |
| 4349 | AUGCAUAUA UAACUUUA | 703 | UAAACUUA CUGAUGAGGCCGUUAGGCCGAA AUAUGCAU | 10122 |
| 4351 | GCAUAUAUA AGUUUACA | 704 | UGUAAACU CUGAUGAGGCCGUUAGGCCGAA AUAUAUGC | 10123 |
| 4355 | AUAUAAGUU UACACCUU | 705 | AAGGUGUA CUGAUGAGGCCGUUAGGCCGAA ACUUAUAU | 10124 |
| 4356 | UAUAAGUUU ACACCUUU | 706 | AAAGGUGU CUGAUGAGGCCGUUAGGCCGAA AACUUAUA | 10125 |
| 4357 | AUAAGUUUA CACCUUUA | 707 | UAAAGGUG CUGAUGAGGCCGUUAGGCCGAA AAACUUAU | 10126 |
| 4363 | UUACACCUU UAUCUUUC | 708 | GAAAGAUA CUGAUGAGGCCGUUAGGCCGAA AGGUGUAA | 10127 |
| 4364 | UACACCUUU AUCUUUCC | 709 | GGAAAGAU CUGAUGAGGCCGUUAGGCCGAA AAGGUGUA | 10128 |
| 4365 | ACACCUUUA UCUUUCCA | 710 | UGGAAAGA CUGAUGAGGCCGUUAGGCCGAA AAAGGUGU | 10129 |
| 4367 | ACCUUUAUC UUUCCAUG | 711 | CAUGGAAA CUGAUGAGGCCGUUAGGCCGAA AUAAAGGU | 10130 |
| 4369 | CUUUAUCUU UCCAUGGG | 712 | CCCAUGGA CUGAUGAGGCCGUUAGGCCGAA AGAUAAAG | 10131 |
| 4370 | UUUAUCUUU CCAUGGGA | 713 | UCCCAUGG CUGAUGAGGCCGUUAGGCCGAA AAGAUAAA | 10132 |
| 4371 | UUAUCUUUC CAUGGGAG | 714 | CUCCCAUG CUGAUGAGGCCGUUAGGCCGAA AAAGAUAA | 10133 |
| 4389 | CAGCUGCUU UUUGUGAU | 715 | AUCACAAA CUGAUGAGGCCGUUAGGCCGAA AGCAGCUG | 10134 |
| 4390 | AGCUGCUUU UUGUGAUU | 716 | AAUCACAA CUGAUGAGGCCGUUAGGCCGAA AAGCAGCU | 10135 |
| 4391 | GCUGCUUUU UGUGAUUU | 717 | AAAUCACA CUGAUGAGGCCGUUAGGCCGAA AAAGCAGC | 10136 |
| 4392 | CUGCUUUUU GUGAUUUU | 718 | AAAAUCAC CUGAUGAGGCCGUUAGGCCGAA AAAAGCAG | 10137 |
| 4398 | UUUGUGAUU UUUUUAAU | 719 | AUUAAAAA CUGAUGAGGCCGUUAGGCCGAA AUCACAAA | 10138 |
| 4399 | UUGUGAUUU UUUUAAUA | 720 | UAUUAAAA CUGAUGAGGCCGUUAGGCCGAA AAUCACAA | 10139 |
| 4400 | UGUGAUUUU UUUAAUAG | 721 | CUAUUAAA CUGAUGAGGCCGUUAGGCCGAA AAAUCACA | 10140 |
| 4401 | GUGAUUUUU UUAAUAGU | 722 | ACUAUUAA CUGAUGAGGCCGUUAGGCCGAA AAAAUCAC | 10141 |
| 4402 | UGAUUUUUU UAAUAGUG | 723 | CACUAUUA CUGAUGAGGCCGUUAGGCCGAA AAAAAUCA | 10142 |
| 4403 | GAUUUUUUU AAUAGUGC | 724 | GCACUAUU CUGAUGAGGCCGUUAGGCCGAA AAAAAAUC | 10143 |
| 4404 | AUUUUUUUA AUAGUGCU | 725 | AGCACUAU CUGAUGAGGCCGUUAGGCCGAA AAAAAAAU | 10144 |
| 4407 | UUUUUAAUA GUGCUUUU | 726 | AAAAGCAC CUGAUGAGGCCGUUAGGCCGAA AUUAAAAA | 10145 |
| 4413 | AUAGUGCUU UUUUUUUU | 727 | AAAAAAAA CUGAUGAGGCCGUUAGGCCGAA AGCACUAU | 10146 |
| 4414 | UAGUGCUUU UUUUUUUU | 728 | AAAAAAAA CUGAUGAGGCCGUUAGGCCGAA AAGCACUA | 10147 |
| 4415 | AGUGCUUUU UUUUUUUG | 729 | CAAAAAAA CUGAUGAGGCCGUUAGGCCGAA AAAGCACU | 10148 |
| 4416 | GUGCUUUUU UUUUUUGA | 730 | UCAAAAAA CUGAUGAGGCCGUUAGGCCGAA AAAAGCAC | 10149 |
| 4417 | UGCUUUUUU UUUUUGAC | 731 | GUCAAAAA CUGAUGAGGCCGUUAGGCCGAA AAAAAGCA | 10150 |
| 4418 | GCUUUUUUU UUUUGACU | 732 | AGUCAAAA CUGAUGAGGCCGUUAGGCCGAA AAAAAAGC | 10151 |
| 4419 | CUUUUUUUU UUUGACUA | 733 | UAGUCAAA CUGAUGAGGCCGUUAGGCCGAA AAAAAAAG | 10152 |
| 4420 | UUUUUUUUU UUGACUAA | 734 | UUAGUCAA CUGAUGAGGCCGUUAGGCCGAA AAAAAAAA | 10153 |
| 4421 | UUUUUUUUU UGACUAAC | 735 | GUUAGUCA CUGAUGAGGCCGUUAGGCCGAA AAAAAAAA | 10154 |
| 4422 | UUUUUUUUU GACUAACA | 736 | UGUUAGUC CUGAUGAGGCCGUUAGGCCGAA AAAAAAAA | 10155 |
| 4427 | UUUUGACUA ACAAGAAU | 737 | AUUCUUGU CUGAUGAGGCCGUUAGGCCGAA AGUCAAAA | 10156 |
| 4438 | AAGAAUGUA ACUCCAGA | 738 | UCUGGAGU CUGAUGAGGCCGUUAGGCCGAA ACAUUCUU | 10157 |
| 4442 | AUGUAACUC CAGAUAGA | 739 | UCUAUCUG CUGAUGAGGCCGUUAGGCCGAA AGUUACAU | 10158 |
| 4448 | CUCCAGAUA GAGAAAUA | 740 | UAUUUCUC CUGAUGAGGCCGUUAGGCCGAA AUCUGGAG | 10159 |
| 4456 | AGAGAAAUA GUGACAAG | 741 | CUUGUCAC CUGAUGAGGCCGUUAGGCCGAA AUUUCUCU | 10160 |
| 4476 | AGAACACUA CUGCUAAA | 742 | UUUAGCAG CUGAUGAGGCCGUUAGGCCGAA AGUGUUCU | 10161 |
| 4482 | CUACUGCUA AAUCCUCA | 743 | UGAGGAUU CUGAUGAGGCCGUUAGGCCGAA AGCAGUAG | 10162 |
| 4486 | UGCUAAAUC CUCAUGUU | 744 | AACAUGAG CUGAUGAGGCCGUUAGGCCGAA AUUUAGCA | 10163 |
| 4489 | UAAAUCCUC AUGUUACU | 745 | AGUAACAU CUGAUGAGGCCGUUAGGCCGAA AGGAUUUA | 10164 |
| 4494 | CCUCAUGUU ACUCAGUG | 746 | CACUGAGU CUGAUGAGGCCGUUAGGCCGAA ACAUGAGG | 10165 |
| 4495 | CUCAUGUUA CUCAGUGU | 747 | ACACUGAG CUGAUGAGGCCGUUAGGCCGAA AACAUGAG | 10166 |
| 4498 | AUGUUACUC AGUGUUAG | 748 | CUAACACU CUGAUGAGGCCGUUAGGCCGAA AGUAACAU | 10167 |
| 4504 | CUCAGUGUU AGAGAAAU | 749 | AUUUCUCU CUGAUGAGGCCGUUAGGCCGAA ACACUGAG | 10168 |
| 4505 | UCAGUGUUA GAGAAAUC | 750 | GAUUUCUC CUGAUGAGGCCGUUAGGCCGAA AACACUGA | 10169 |
| 4513 | AGAGAAAUC CUUCCUAA | 751 | UUAGGAAG CUGAUGAGGCCGUUAGGCCGAA AUUUCUCU | 10170 |
| 4516 | GAAAUCCUU CCUAAACC | 752 | GGUUUAGG CUGAUGAGGCCGUUAGGCCGAA AGGAUUUC | 10171 |
| 4517 | AAAUCCUUC CUAAACCC | 753 | GGGUUUAG CUGAUGAGGCCGUUAGGCCGAA AAGGAUUU | 10172 |
| 4520 | UCCUUCCUA AACCCAAU | 754 | AUUGGGUU CUGAUGAGGCCGUUAGGCCGAA AGGAAGGA | 10173 |
| 4533 | CAAUGACUU CCCUGCUC | 755 | GAGCAGGG CUGAUGAGGCCGUUAGGCCGAA AGUCAUUG | 10174 |
| 4534 | AAUGACUUC CCUGCUCC | 756 | GGAGCAGG CUGAUGAGGCCGUUAGGCCGAA AAGUCAUU | 10175 |
| 4541 | UCCCUGCUC CAACCCCC | 757 | GGGGGUUG CUGAUGAGGCCGUUAGGCCGAA AGCAGGGA | 10176 |
| 4557 | CGCCACCUC AGGGCACG | 758 | CGUGCCCU CUGAUGAGGCCGUUAGGCCGAA AGGUGGCG | 10177 |
| 4576 | GGACCAGUU UGAUUGAG | 759 | CUCAAUCA CUGAUGAGGCCGUUAGGCCGAA ACUGGUCC | 10178 |
| 4577 | GACCAGUUU GAUUGAGG | 760 | CCUCAAUC CUGAUGAGGCCGUUAGGCCGAA AACUGGUC | 10179 |
| 4581 | AGUUUGAUU GAGGAGCU | 761 | AGCUCCUC CUGAUGAGGCCGUUAGGCCGAA AUCAAACU | 10180 |
| 4598 | GCACUGAUC ACCCAAUG | 762 | CAUUGGGU CUGAUGAGGCCGUUAGGCCGAA AUCAGUGC | 10181 |
| 4610 | CAAUGCAUC ACGUACCC | 763 | GGGUACGU CUGAUGAGGCCGUUAGGCCGAA AUGCAUUG | 10182 |
| 4615 | CAUCACGUA CCCCACUG | 764 | CAGUGGGG CUGAUGAGGCCGUUAGGCCGAA ACGUGAUG | 10183 |
| 4664 | AAGCCCGUU AGCCCCAG | 765 | CUGGGGCU CUGAUGAGGCCGUUAGGCCGAA ACGGGCUU | 10184 |
| 4665 | AGCCCGUUA GCCCCAGG | 766 | CCUGGGGC CUGAUGAGGCCGUUAGGCCGAA AACGGGCU | 10185 |
| 4678 | CAGGGGAUC ACUGGCUG | 767 | CAGCCAGU CUGAUGAGGCCGUUAGGCCGAA AUCCCCUG | 10186 |
| 4700 | AGCAACAUC UCGGGAGU | 768 | ACUCCCGA CUGAUGAGGCCGUUAGGCCGAA AUGUUGCU | 10187 |
| 4702 | CAACAUCUC GGGAGUCC | 769 | GGACUCCC CUGAUGAGGCCGUUAGGCCGAA AGAUGUUG | 10188 |
| 4709 | UCGGGAGUC CUCUAGCA | 770 | UGCUAGAG CUGAUGAGGCCGUUAGGCCGAA ACUCCCGA | 10189 |
| 4712 | GGAGUCCUC UAGCAGGC | 771 | GCCUGCUA CUGAUGAGGCCGUUAGGCCGAA AGGACUCC | 10190 |
| 4714 | AGUCCUCUA GCAGGCCU | 772 | AGGCCUGC CUGAUGAGGCCGUUAGGCCGAA AGAGGACU | 10191 |
| 4723 | GCAGGCCUA AGACAUGU | 773 | ACAUGUCU CUGAUGAGGCCGUUAGGCCGAA AGGCCUGC | 10192 |
| 4802 | GAAAGAAUU UGAGACGC | 774 | GCGUCUCA CUGAUGAGGCCGUUAGGCCGAA AUUCUUUC | 10193 |
| 4803 | AAAGAAUUU GAGACGCA | 775 | UGCGUCUC CUGAUGAGGCCGUUAGGCCGAA AAUUCUUU | 10194 |
| 4840 | ACGGGGCUC AGCAAUGC | 776 | GCAUUGCU CUGAUGAGGCCGUUAGGCCGAA AGCCCCGU | 10195 |
| 4852 | AAUGCCAUU UCAGUGGC | 777 | GCCACUGA CUGAUGAGGCCGUUAGGCCGAA AUGGCAUU | 10196 |
| 4853 | AUGCCAUUU CAGUGGCU | 778 | AGCCACUG CUGAUGAGGCCGUUAGGCCGAA AAUGGCAU | 10197 |
| 4854 | UGCCAUUUC AGUGGCUU | 779 | AAGCCACU CUGAUGAGGCCGUUAGGCCGAA AAAUGGCA | 10198 |
| 4862 | CAGUGGCUU CCCAGCUC | 780 | GAGCUGGG CUGAUGAGGCCGUUAGGCCGAA AGCCACUG | 10199 |
| 4863 | AGUGGCUUC CCAGCUCU | 781 | AGAGCUGG CUGAUGAGGCCGUUAGGCCGAA AAGCCACU | 10200 |
| 4870 | UCCCAGCUC UGACCCUU | 782 | AAGGGUCA CUGAUGAGGCCGUUAGGCCGAA AGCUGGGA | 10201 |
| 4878 | CUGACCCUU CUACAUUU | 783 | AAAUGUAG CUGAUGAGGCCGUUAGGCCGAA AGGGUCAG | 10202 |
| 4879 | UGACCCUUC UACAUUUG | 784 | CAAAUGUA CUGAUGAGGCCGUUAGGCCGAA AAGGGUCA | 10203 |
| 4881 | ACCCUUCUA CAUUUGAG | 785 | CUCAAAUG CUGAUGAGGCCGUUAGGCCGAA AGAAGGGU | 10204 |
| 4885 | UUCUACAUU UGAGGGCC | 786 | GGCCCUCA CUGAUGAGGCCGUUAGGCCGAA AUGUAGAA | 10205 |
| 4886 | UCUACAUUU GAGGGCCC | 787 | GGGCCCUC CUGAUGAGGCCGUUAGGCCGAA AAUGUAGA | 10206 |
| 4929 | GGGGACAUU UUCUGGAU | 788 | AUCCAGAA CUGAUGAGGCCGUUAGGCCGAA AUGUCCCC | 10207 |
| 4930 | GGGACAUUU UCUGGAUU | 789 | AAUCCAGA CUGAUGAGGCCGUUAGGCCGAA AAUGUCCC | 10208 |
| 4931 | GGACAUUUU CUGGAUUC | 790 | GAAUCCAG CUGAUGAGGCCGUUAGGCCGAA AAAUGUCC | 10209 |
| 4932 | GACAUUUUC UGGAUUCU | 791 | AGAAUCCA CUGAUGAGGCCGUUAGGCCGAA AAAAUGUC | 10210 |
| 4938 | UUCUGGAUU CUGGGAGG | 792 | CCUCCCAG CUGAUGAGGCCGUUAGGCCGAA AUCCAGAA | 10211 |
| 4939 | UCUGGAUUC UGGGAGGC | 793 | GCCUCCCA CUGAUGAGGCCGUUAGGCCGAA AAUCCAGA | 10212 |
| 4963 | GGACAAAUA UCUUUUUU | 794 | AAAAAAGA CUGAUGAGGCCGUUAGGCCGAA AUUUGUCC | 10213 |
| 4965 | ACAAAUAUC UUUUUUGG | 795 | CCAAAAAA CUGAUGAGGCCGUUAGGCCGAA AUAUUUGU | 10214 |
| 4967 | AAAUAUCUU UUUUGGAA | 796 | UUCCAAAA CUGAUGAGGCCGUUAGGCCGAA AGAUAUUU | 10215 |
| 4968 | AAUAUCUUU UUUGGAAC | 797 | GUUCCAAA CUGAUGAGGCCGUUAGGCCGAA AAGAUAUU | 10216 |
| 4969 | AUAUCUUUU UUGGAACU | 798 | AGUUCCAA CUGAUGAGGCCGUUAGGCCGAA AAAGAUAU | 10217 |
| 4970 | UAUCUUUUU UGGAACUA | 799 | UAGUUCCA CUGAUGAGGCCGUUAGGCCGAA AAAAGAUA | 10218 |
| 4971 | AUCUUUUUU GGAACUAA | 800 | UUAGUUCC CUGAUGAGGCCGUUAGGCCGAA AAAAAGAU | 10219 |
| 4978 | UUGGAACUA AAGCAAAU | 801 | AUUUGCUU CUGAUGAGGCCGUUAGGCCGAA AGUUCCAA | 10220 |
| 4987 | AAGCAAAUU UUAGACCU | 802 | AGGUCUAA CUGAUGAGGCCGUUAGGCCGAA AUUUGCUU | 10221 |
| 4988 | AGCAAAUUU UAGACCUU | 803 | AAGGUCUA CUGAUGAGGCCGUUAGGCCGAA AAUUUGCU | 10222 |
| 4989 | GCAAAUUUU AGACCUUU | 804 | AAAGGUCU CUGAUGAGGCCGUUAGGCCGAA AAAUUUGC | 10223 |
| 4990 | CAAAUUUUA GACCUUUA | 805 | UAAAGGUC CUGAUGAGGCCGUUAGGCCGAA AAAAUUUG | 10224 |
| 4996 | UUAGACCUU UACCUAUG | 806 | CAUAGGUA CUGAUGAGGCCGUUAGGCCGAA AGGUCUAA | 10225 |
| 4997 | UAGACCUUU ACCUAUGG | 807 | CCAUAGGU CUGAUGAGGCCGUUAGGCCGAA AAGGUCUA | 10226 |
| 4998 | AGACCUUUA CCUAUGGA | 808 | UCCAUAGG CUGAUGAGGCCGUUAGGCCGAA AAAGGUCU | 10227 |
| 5002 | CUUUACCUA UGGAAGUG | 809 | CACUUCCA CUGAUGAGGCCGUUAGGCCGAA AGGUAAAG | 10228 |
| 5013 | GAAGUGGUU CUAUGUCC | 810 | GGACAUAG CUGAUGAGGCCGUUAGGCCGAA ACCACUUC | 10229 |
| 5014 | AAGUGGUUC UAUGUCCA | 811 | UGGACAUA CUGAUGAGGCCGUUAGGCCGAA AACCACUU | 10230 |
| 5016 | GUGGUUCUA UGUCCAUU | 812 | AAUGGACA CUGAUGAGGCCGUUAGGCCGAA AGAACCAC | 10231 |
| 5020 | UUCUAUGUC CAUUCUCA | 813 | UGAGAAUG CUGAUGAGGCCGUUAGGCCGAA ACAUAGAA | 10232 |
| 5024 | AUGUCCAUU CUCAUUCG | 814 | CGAAUGAG CUGAUGAGGCCGUUAGGCCGAA AUGGACAU | 10233 |
| 5025 | UGUCCAUUC UCAUUCGU | 815 | ACGAAUGA CUGAUGAGGCCGUUAGGCCGAA AAUGGACA | 10234 |
| 5027 | UCCAUUCUC AUUCGUGG | 816 | CCACGAAU CUGAUGAGGCCGUUAGGCCGAA AGAAUGGA | 10235 |
| 5030 | AUUCUCAUU CGUGGCAU | 817 | AUGCCACG CUGAUGAGGCCGUUAGGCCGAA AUGAGAAU | 10236 |
| 5031 | UUCUCAUUC GUGGCAUG | 818 | CAUGCCAC CUGAUGAGGCCGUUAGGCCGAA AAUGAGAA | 10237 |
| 5041 | UGGCAUGUU UUGAUUUG | 819 | CAAAUCAA CUGAUGAGGCCGUUAGGCCGAA ACAUGCCA | 10238 |
| 5042 | GGCAUGUUU UGAUUUGU | 820 | ACAAAUCA CUGAUGAGGCCGUUAGGCCGAA AACAUGCC | 10239 |
| 5043 | GCAUGUUUU GAUUUGUA | 821 | UACAAAUC CUGAUGAGGCCGUUAGGCCGAA AAACAUGC | 10240 |
| 5047 | GUUUUGAUU UGUAGCAC | 822 | GUGCUACA CUGAUGAGGCCGUUAGGCCGAA AUCAAAAC | 10241 |
| 5048 | UUUUGAUUU GUAGCACU | 823 | AGUGCUAC CUGAUGAGGCCGUUAGGCCGAA AAUCAAAA | 10242 |
| 5051 | UGAUUUGUA GCACUGAG | 824 | CUCAGUGC CUGAUGAGGCCGUUAGGCCGAA ACAAAUCA | 10243 |
| 5069 | GUGGCACUC AACUCUGA | 825 | UCAGAGUU CUGAUGAGGCCGUUAGGCCGAA AGUGCCAC | 10244 |
| 5074 | ACUCAACUC UGAGCCCA | 826 | UGGGCUCA CUGAUGAGGCCGUUAGGCCGAA AGUUGAGU | 10245 |
| 5084 | GAGCCCAUA CUUUUGGC | 827 | GCCAAAAG CUGAUGAGGCCGUUAGGCCGAA AUGGGCUC | 10246 |
| 5087 | CCCAUACUU UUGGCUCC | 828 | GGAGCCAA CUGAUGAGGCCGUUAGGCCGAA AGUAUGGG | 10247 |
| 5088 | CCAUACUUU UGGCUCCU | 829 | AGGAGCCA CUGAUGAGGCCGUUAGGCCGAA AAGUAUGG | 10248 |
| 5089 | CAUACUUUU GGCUCCUC | 830 | GAGGAGCC CUGAUGAGGCCGUUAGGCCGAA AAAGUAUG | 10249 |
| 5094 | UUUUGGCUC CUCUAGUA | 831 | UACUAGAG CUGAUGAGGCCGUUAGGCCGAA AGCCAAAA | 10250 |
| 5097 | UGGCUCCUC UAGUAAGA | 832 | UCUUACUA CUGAUGAGGCCGUUAGGCCGAA AGGAGCCA | 10251 |
| 5099 | GCUCCUCUA GUAAGAUG | 833 | CAUCUUAC CUGAUGAGGCCGUUAGGCCGAA AGAGGAGC | 10252 |
| 5102 | CCUCUAGUA AGAUGCAC | 834 | GUGCAUCU CUGAUGAGGCCGUUAGGCCGAA ACUAGAGG | 10253 |
| 5119 | UGAAAACUU AGCCAGAG | 835 | CUCUGGCU CUGAUGAGGCCGUUAGGCCGAA AGUUUUCA | 10254 |
| 5120 | GAAAACUUA GCCAGAGU | 836 | ACUCUGGC CUGAUGAGGCCGUUAGGCCGAA AAGUUUUC | 10255 |
| 5129 | GCCAGAGUU AGGUUGUC | 837 | GACAACCU CUGAUGAGGCCGUUAGGCCGAA ACUCUGGC | 10256 |
| 5130 | CCAGAGUUA GGUUGUCU | 838 | AGACAACC CUGAUGAGGCCGUUAGGCCGAA AACUCUGG | 10257 |
| 5134 | AGUUAGGUU GUCUCCAG | 839 | CUGGAGAC CUGAUGAGGCCGUUAGGCCGAA ACCUAACU | 10258 |
| 5137 | UAGGUUGUC UCCAGGCC | 840 | GGCCUGGA CUGAUGAGGCCGUUAGGCCGAA ACAACCUA | 10259 |
| 5139 | GGUUGUCUC CAGGCCAU | 841 | AUGGCCUG CUGAUGAGGCCGUUAGGCCGAA AGACAACC | 10260 |
| 5156 | GAUGGCCUU ACACUGAA | 842 | UUCAGUGU CUGAUGAGGCCGUUAGGCCGAA AGGCCAUC | 10261 |
| 5157 | AUGGCCUUA CACUGAAA | 843 | UUUCAGUG CUGAUGAGGCCGUUAGGCCGAA AAGGCCAU | 10262 |
| 5170 | GAAAAUGUC ACAUUCUA | 844 | UAGAAUGU CUGAUGAGGCCGUUAGGCCGAA ACAUUUUC | 10263 |
| 5175 | UGUCACAUU CUAUUUUG | 845 | CAAAAUAG CUGAUGAGGCCGUUAGGCCGAA AUGUGACA | 10264 |
| 5176 | GUCACAUUC UAUUUUGG | 846 | CCAAAAUA CUGAUGAGGCCGUUAGGCCGAA AAUGUGAC | 10265 |
| 5178 | CACAUUCUA UUUUGGGU | 847 | ACCCAAAA CUGAUGAGGCCGUUAGGCCGAA AGAAUGUG | 10266 |
| 5180 | CAUUCUAUU UUGGGUAU | 848 | AUACCCAA CUGAUGAGGCCGUUAGGCCGAA AUAGAAUG | 10267 |
| 5181 | AUUCUAUUU UGGGUAUU | 849 | AAUACCCA CUGAUGAGGCCGUUAGGCCGAA AAUAGAAU | 10268 |
| 5182 | UUCUAUUUU GGGUAUUA | 850 | UAAUACCC CUGAUGAGGCCGUUAGGCCGAA AAAUAGAA | 10269 |
| 5187 | UUUUGGGUA UUAAUAUA | 851 | UAUAUUAA CUGAUGAGGCCGUUAGGCCGAA ACCCAAAA | 10270 |
| 5189 | UUGGGUAUU AAUAUAUA | 852 | UAUAUAUU CUGAUGAGGCCGUUAGGCCGAA AUACCCAA | 10271 |
| 5190 | UGGGUAUUA AUAUAUAG | 853 | CUAUAUAU CUGAUGAGGCCGUUAGGCCGAA AAUACCCA | 10272 |
| 5193 | GUAUUAAUA UAUAGUCC | 854 | GGACUAUA CUGAUGAGGCCGUUAGGCCGAA AUUAAUAC | 10273 |
| 5195 | AUUAAUAUA UAGUCCAG | 855 | CUGGACUA CUGAUGAGGCCGUUAGGCCGAA AUAUUAAU | 10274 |
| 5197 | UAAUAUAUA GUCCAGAC | 856 | GUCUGGAC CUGAUGAGGCCGUUAGGCCGAA AUAUAUUA | 10275 |
| 5200 | UAUAUAGUC CAGACACU | 857 | AGUGUCUG CUGAUGAGGCCGUUAGGCCGAA ACUAUAUA | 10276 |
| 5209 | CAGACACUU AACUCAAU | 858 | AUUGAGUU CUGAUGAGGCCGUUAGGCCGAA AGUGUCUG | 10277 |
| 5210 | AGACACUUA ACUCAAUU | 859 | AAUUGAGU CUGAUGAGGCCGUUAGGCCGAA AAGUGUCU | 10278 |
| 5214 | ACUUAACUC AAUUUCUU | 860 | AAGAAAUU CUGAUGAGGCCGUUAGGCCGAA AGUUAAGU | 10279 |
| 5218 | AACUCAAUU UCUUGGUA | 861 | UACCAAGA CUGAUGAGGCCGUUAGGCCGAA AUUGAGUU | 10280 |
| 5219 | ACUCAAUUU CUUGGUAU | 862 | AUACCAAG CUGAUGAGGCCGUUAGGCCGAA AAUUGAGU | 10281 |
| 5220 | CUCAAUUUC UUGGUAUU | 863 | AAUACCAA CUGAUGAGGCCGUUAGGCCGAA AAAUUGAG | 10282 |
| 5222 | CAAUUUCUU GGUAUUAU | 864 | AUAAUACC CUGAUGAGGCCGUUAGGCCGAA AGAAAUUG | 10283 |
| 5226 | UUCUUGGUA UUAUUCUG | 865 | CAGAAUAA CUGAUGAGGCCGUUAGGCCGAA ACCAAGAA | 10284 |
| 5228 | CUUGGUAUU AUUCUGUU | 866 | AACAGAAU CUGAUGAGGCCGUUAGGCCGAA AUACCAAG | 10285 |
| 5229 | UUGGUAUUA UUCUGUUU | 867 | AAACAGAA CUGAUGAGGCCGUUAGGCCGAA AAUACCAA | 10286 |
| 5231 | GGUAUUAUU CUGUUUUG | 868 | CAAAACAG CUGAUGAGGCCGUUAGGCCGAA AUAAUACC | 10287 |
| 5232 | GUAUUAUUC UGUUUUGC | 869 | GCAAAACA CUGAUGAGGCCGUUAGGCCGAA AAUAAUAC | 10288 |
| 5236 | UAUUCUGUU UUGCACAG | 870 | CUGUGCAA CUGAUGAGGCCGUUAGGCCGAA ACAGAAUA | 10289 |
| 5237 | AUUCUGUUU UGCACAGU | 871 | ACUGUGCA CUGAUGAGGCCGUUAGGCCGAA AACAGAAU | 10290 |
| 5238 | UUCUGUUUU GCACAGUU | 872 | AACUGUGC CUGAUGAGGCCGUUAGGCCGAA AAACAGAA | 10291 |
| 5246 | UGCACAGUU AGUUGUGA | 873 | UCACAACU CUGAUGAGGCCGUUAGGCCGAA ACUGUGCA | 10292 |
| 5247 | GCACAGUUA GUUGUGAA | 874 | UUCACAAC CUGAUGAGGCCGUUAGGCCGAA AACUGUGC | 10293 |
| 5250 | CAGUUAGUU GUGAAAGA | 875 | UCUUUCAC CUGAUGAGGCCGUUAGGCCGAA ACUAACUG | 10294 |
| 5284 | AAUGCAGUC CUGAGGAG | 876 | CUCCUCAG CUGAUGAGGCCGUUAGGCCGAA ACUGCAUU | 10295 |
| 5296 | AGGAGAGUU UUCUCCAU | 877 | AUGGAGAA CUGAUGAGGCCGUUAGGCCGAA ACUCUCCU | 10296 |
| 5297 | GGAGAGUUU UCUCCAUA | 878 | UAUGGAGA CUGAUGAGGCCGUUAGGCCGAA AACUCUCC | 10297 |
| 5298 | GAGAGUUUU CUCCAUAU | 879 | AUAUGGAG CUGAUGAGGCCGUUAGGCCGAA AAACUCUC | 10298 |
| 5299 | AGAGUUUUC UCCAUAUC | 880 | GAUAUGGA CUGAUGAGGCCGUUAGGCCGAA AAAACUCU | 10299 |
| 5301 | AGUUUUCUC CAUAUCAA | 881 | UUGAUAUG CUGAUGAGGCCGUUAGGCCGAA AGAAAACU | 10300 |
| 5305 | UUCUCCAUA UCAAAACG | 882 | CGUUUUGA CUGAUGAGGCCGUUAGGCCGAA AUGGAGAA | 10301 |
| 5307 | CUCCAUAUC AAAACGAG | 883 | CUCGUUUU CUGAUGAGGCCGUUAGGCCGAA AUAUGGAG | 10302 |
| 5336 | AAAAAGGUC AAUAAGGU | 884 | ACCUUAUU CUGAUGAGGCCGUUAGGCCGAA ACCUUUUU | 10303 |
| 5340 | AGGUCAAUA AGGUCAAG | 885 | CUUGACCU CUGAUGAGGCCGUUAGGCCGAA AUUGACCU | 10304 |
| 5345 | AAUAAGGUC AAGGGAAG | 886 | CUUCCCUU CUGAUGAGGCCGUUAGGCCGAA ACCUUAUU | 10305 |
| 5361 | GACCCCGUC UCUAUACC | 887 | GGUAUAGA CUGAUGAGGCCGUUAGGCCGAA ACGGGGUC | 10306 |
| 5363 | CCCCGUCUC UAUACCAA | 888 | UUGGUAUA CUGAUGAGGCCGUUAGGCCGAA AGACGGGG | 10307 |
| 5365 | CCGUCUCUA UACCAACC | 889 | GGUUGGUA CUGAUGAGGCCGUUAGGCCGAA AGAGACGG | 10308 |
| 5367 | GUCUCUAUA CCAACCAA | 890 | UUGGUUGG CUGAUGAGGCCGUUAGGCCGAA AUAGAGAC | 10309 |
| 5382 | AAACCAAUU CACCAACA | 891 | UGUUGGUG CUGAUGAGGCCGUUAGGCCGAA AUUGGUUU | 10310 |
| 5383 | AACCAAUUC ACCAACAC | 892 | GUGUUGGU CUGAUGAGGCCGUUAGGCCGAA AAUUGGUU | 10311 |
| 5395 | AACACAGUU GGGACCCA | 893 | UGGGUCCC CUGAUGAGGCCGUUAGGCCGAA ACUGUGUU | 10312 |
| 5417 | CAGGAAGUC AGUCACGU | 894 | ACGUGACU CUGAUGAGGCCGUUAGGCCGAA ACUUCCUG | 10313 |
| 5421 | AAGUCAGUC ACGUUUCC | 895 | GGAAACGU CUGAUGAGGCCGUUAGGCCGAA ACUGACUU | 10314 |
| 5426 | AGUCACGUU UCCUUUUC | 896 | GAAAAGGA CUGAUGAGGCCGUUAGGCCGAA ACGUGACU | 10315 |
| 5427 | GUCACGUUU CCUUUUCA | 897 | UGAAAAGG CUGAUGAGGCCGUUAGGCCGAA AACGUGAC | 10316 |
| 5428 | UCACGUUUC CUUUUCAU | 898 | AUGAAAAG CUGAUGAGGCCGUUAGGCCGAA AAACGUGA | 10317 |
| 5431 | CGUUUCCUU UUCAUUUA | 899 | UAAAUGAA CUGAUGAGGCCGUUAGGCCGAA AGGAAACG | 10318 |
| 5432 | GUUUCCUUU UCAUUUAA | 900 | UUAAAUGA CUGAUGAGGCCGUUAGGCCGAA AAGGAAAC | 10319 |
| 5433 | UUUCCUUUU CAUUUAAU | 901 | AUUAAAUG CUGAUGAGGCCGUUAGGCCGAA AAAGGAAA | 10320 |
| 5434 | UUCCUUUUC AUUUAAUG | 902 | CAUUAAAU CUGAUGAGGCCGUUAGGCCGAA AAAAGGAA | 10321 |
| 5437 | CUUUUCAUU UAAUGGGG | 903 | CCCCAUUA CUGAUGAGGCCGUUAGGCCGAA AUGAAAAG | 10322 |
| 5438 | UUUUCAUUU AAUGGGGA | 904 | UCCCCAUU CUGAUGAGGCCGUUAGGCCGAA AAUGAAAA | 10323 |
| 5439 | UUUCAUUUA AUGGGGAU | 905 | AUCCCCAU CUGAUGAGGCCGUUAGGCCGAA AAAUGAAA | 10324 |
| 5448 | AUGGGGAUU CCACUAUC | 906 | GAUAGUGG CUGAUGAGGCCGUUAGGCCGAA AUCCCCAU | 10325 |
| 5449 | UGGGGAUUC CACUAUCU | 907 | AGAUAGUG CUGAUGAGGCCGUUAGGCCGAA AAUCCCCA | 10326 |
| 5454 | AUUCCACUA UCUCACAC | 908 | GUGUGAGA CUGAUGAGGCCGUUAGGCCGAA AGUGGAAU | 10327 |
| 5456 | UCCACUAUC UCACACUA | 909 | UAGUGUGA CUGAUGAGGCCGUUAGGCCGAA AUAGUGGA | 10328 |
| 5458 | CACUAUCUC ACACUAAU | 910 | AUUAGUGU CUGAUGAGGCCGUUAGGCCGAA AGAUAGUG | 10329 |
| 5464 | CUCACACUA AUCUGAAA | 911 | UUUCAGAU CUGAUGAGGCCGUUAGGCCGAA AGUGUGAG | 10330 |
| 5467 | ACACUAAUC UGAAAGGA | 912 | UCCUUUCA CUGAUGAGGCCGUUAGGCCGAA AUUAGUGU | 10331 |
| 5489 | AAGAGCAUU AGCUGGCG | 913 | CGCCAGCU CUGAUGAGGCCGUUAGGCCGAA AUGCUCUU | 10332 |
| 5490 | AGAGCAUUA GCUGGCGC | 914 | GCGCCAGC CUGAUGAGGCCGUUAGGCCGAA AAUGCUCU | 10333 |
| 5501 | UGGCGCAUA UUAAGCAC | 915 | GUGCUUAA CUGAUGAGGCCGUUAGGCCGAA AUGCGCCA | 10334 |
| 5503 | GCGCAUAUU AAGCACUU | 916 | AAGUGCUU CUGAUGAGGCCGUUAGGCCGAA AUAUGCGC | 10335 |
| 5504 | CGCAUAUUA AGCACUUU | 917 | AAAGUGCU CUGAUGAGGCCGUUAGGCCGAA AAUAUGCG | 10336 |
| 5511 | UAAGCACUU UAAGCUCC | 918 | GGAGCUUA CUGAUGAGGCCGUUAGGCCGAA AGUGCUUA | 10337 |
| 5512 | AAGCACUUU AAGCUCCU | 919 | AGGAGCUU CUGAUGAGGCCGUUAGGCCGAA AAGUGCUU | 10338 |
| 5513 | AGCACUUUA AGCUCCUU | 920 | AAGGAGCU CUGAUGAGGCCGUUAGGCCGAA AAAGUGCU | 10339 |
| 5518 | UUUAAGCUC CUUGAGUA | 921 | UACUCAAG CUGAUGAGGCCGUUAGGCCGAA AGCUUAAA | 10340 |
| 5521 | AAGCUCCUU GAGUAAAA | 922 | UUUUACUC CUGAUGAGGCCGUUAGGCCGAA AGGAGCUU | 10341 |
| 5526 | CCUUGAGUA AAAAGGUG | 923 | CACCUUUU CUGAUGAGGCCGUUAGGCCGAA ACUCAAGG | 10342 |
| 5537 | AAGGUGGUA UGUAAUUU | 924 | AAAUUACA CUGAUGAGGCCGUUAGGCCGAA ACCACCUU | 10343 |
| 5541 | UGGUAUGUA AUUUAUGC | 925 | GCAUAAAU CUGAUGAGGCCGUUAGGCCGAA ACAUACCA | 10344 |
| 5544 | UAUGUAAUU UAUGCAAG | 926 | CUUGCAUA CUGAUGAGGCCGUUAGGCCGAA AUUACAUA | 10345 |
| 5545 | AUGUAAUUU AUGCAAGG | 927 | CCUUGCAU CUGAUGAGGCCGUUAGGCCGAA AAUUACAU | 10346 |
| 5546 | UGUAAUUUA UGCAAGGU | 928 | ACCUUGCA CUGAUGAGGCCGUUAGGCCGAA AAAUUACA | 10347 |
| 5555 | UGCAAGGUA UUUCUCCA | 929 | UGGAGAAA CUGAUGAGGCCGUUAGGCCGAA ACCUUGCA | 10348 |
| 5557 | CAAGGUAUU UCUCCAGU | 930 | ACUGGAGA CUGAUGAGGCCGUUAGGCCGAA AUACCUUG | 10349 |
| 5558 | AAGGUAUUU CUCCAGUU | 931 | AACUGGAG CUGAUGAGGCCGUUAGGCCGAA AAUACCUU | 10350 |
| 5559 | AGGUAUUUC UCCAGUUG | 932 | CAACUGGA CUGAUGAGGCCGUUAGGCCGAA AAAUACCU | 10351 |
| 5561 | GUAUUUCUC CAGUUGGG | 933 | CCCAACUG CUGAUGAGGCCGUUAGGCCGAA AGAAAUAC | 10352 |
| 5566 | UCUCCAGUU GGGACUCA | 934 | UGAGUCCC CUGAUGAGGCCGUUAGGCCGAA ACUGGAGA | 10353 |
| 5573 | UUGGGACUC AGGAUAUU | 935 | AAUAUCCU CUGAUGAGGCCGUUAGGCCGAA AGUCCCAA | 10354 |
| 5579 | CUCAGGAUA UUAGUUAA | 936 | UUAACUAA CUGAUGAGGCCGUUAGGCCGAA AUCCUGAG | 10355 |
| 5581 | CAGGAUAUU AGUUAAUG | 937 | CAUUAACU CUGAUGAGGCCGUUAGGCCGAA AUAUCCUG | 10356 |
| 5582 | AGGAUAUUA GUUAAUGA | 938 | UCAUUAAC CUGAUGAGGCCGUUAGGCCGAA AAUAUCCU | 10357 |
| 5585 | AUAUUAGUU AAUGAGCC | 939 | GGCUCAUU CUGAUGAGGCCGUUAGGCCGAA ACUAAUAU | 10358 |
| 5586 | UAUUAGUUA AUGAGCCA | 940 | UGGCUCAU CUGAUGAGGCCGUUAGGCCGAA AACUAAUA | 10359 |
| 5596 | UGAGCCAUC ACUAGAAG | 941 | CUUCUAGU CUGAUGAGGCCGUUAGGCCGAA AUGGCUCA | 10360 |
| 5600 | CCAUCACUA GAAGAAAA | 942 | UUUUCUUC CUGAUGAGGCCGUUAGGCCGAA AGUGAUGG | 10361 |
| 5615 | AAGCCCAUU UUCAACUG | 943 | CAGUUGAA CUGAUGAGGCCGUUAGGCCGAA AUGGGCUU | 10362 |
| 5616 | AGCCCAUUU UCAACUGC | 944 | GCAGUUGA CUGAUGAGGCCGUUAGGCCGAA AAUGGGCU | 10363 |
| 5617 | GCCCAUUUU CAACUGCU | 945 | AGCACUUG CUGAUGAGGCCGUUAGGCCGAA AAAUGGGC | 10364 |
| 5618 | CCCAUUUUC AACUGCUU | 946 | AAGCAGUU CUGAUGAGGCCGUUAGGCCGAA AAAAUGGG | 10365 |
| 5626 | CAACUGCUU UGAAACUU | 947 | AAGUUUCA CUGAUGAGGCCGUUAGGCCGAA AGCAGUUG | 10366 |
| 5627 | AACUGCUUU GAAACUUG | 948 | CAAGUUUC CUGAUGAGGCCGUUAGGCCGAA AAGCAGUU | 10367 |
| 5634 | UUGAAACUU GCCUGGGG | 949 | CCCCAGGC CUGAUGAGGCCGUUAGGCCGAA AGUUUCAA | 10368 |
| 5644 | CCUGGGGUC UGAGCAUG | 950 | CAUGCUCA CUGAUGAGGCCGUUAGGCCGAA ACCCCAGG | 10369 |
| 5661 | AUGGGAAUA GGGAGACA | 951 | UGUCUCCC CUGAUGAGGCCGUUAGGCCGAA AUUCCCAU | 10370 |
| 5674 | GACAGGGUA GGAAAGGG | 952 | CCCUUUCC CUGAUGAGGCCGUUAGGCCGAA ACCCUGUC | 10371 |
| 5688 | GGGCGCCUA CUCUUCAG | 953 | CUGAAGAG CUGAUGAGGCCGUUAGGCCGAA AGGCGCCC | 10372 |
| 5691 | CGCCUACUC UUCAGGGU | 954 | ACCCUGAA CUGAUGAGGCCGUUAGGCCGAA AGUAGGCG | 10373 |
| 5693 | CCUACUCUU CAGGGUCU | 955 | AGACCCUG CUGAUGAGGCCGUUAGGCCGAA AGAGUAGG | 10374 |
| 5694 | CUACUCUUC AGGGUCUA | 956 | UAGACCCU CUGAUGAGGCCGUUAGGCCGAA AAGAGUAG | 10375 |
| 5700 | UUCAGGGUC UAAAGAUC | 957 | GAUCUUUA CUGAUGAGGCCGUUAGGCCGAA ACCCUGAA | 10376 |
| 5702 | CAGGGUCUA AAGAUCAA | 958 | UUGAUCUU CUGAUGAGGCCGUUAGGCCGAA AGACCCUG | 10377 |
| 5708 | CUAAAGAUC AAGUGGGC | 959 | GCCCACUU CUGAUGAGGCCGUUAGGCCGAA AUCUUUAG | 10378 |
| 5719 | GUGGGCCUU GGAUCGCU | 960 | AGCGAUCC CUGAUGAGGCCGUUAGGCCGAA AGGCCCAC | 10379 |
| 5724 | CCUUGGAUC GCUAAGCU | 961 | AGCUUAGC CUGAUGAGGCCGUUAGGCCGAA AUCCAAGG | 10380 |
| 5728 | GGAUCGCUA AGCUGGCU | 962 | AGCCAGCU CUGAUGAGGCCGUUAGGCCGAA AGCGAUCC | 10381 |
| 5737 | AGCUGGCUC UGUUUGAU | 963 | AUCAAACA CUGAUGAGGCCGUUAGGCCGAA AGCCAGCU | 10382 |
| 5741 | GGCUCUGUU UGAUGCUA | 964 | UAGCAUCA CUGAUGAGGCCGUUAGGCCGAA ACAGAGCC | 10383 |
| 5742 | GCUCUGUTU GAUGCUAU | 965 | AUAGCAUC CUGAUGAGGCCGUUAGGCCGAA AACAGAGC | 10384 |
| 5749 | UUGAUGCUA UUUAUGCA | 966 | UGCAUAAA CUGAUGAGGCCGUUAGGCCGAA AGCAUCAA | 10385 |
| 5751 | GAUGCUAUU UAUGCAAG | 967 | CUUGCAUA CUGAUGAGGCCGUUAGGCCGAA AUAGCAUC | 10386 |
| 5752 | AUGCUAUUU AUGCAAGU | 968 | ACUUGCAU CUGAUGAGGCCGUUAGGCCGAA AAUAGCAU | 10387 |
| 5753 | UGCUAUUUA UGCAAGUU | 969 | AACUUGCA CUGAUGAGGCCGUUAGGCCGAA AAAUAQCA | 10388 |
| 5761 | AUGCAAGUU AGGGUCUA | 970 | UAGACCCU CUGAUGAGGCCGUUAGGCCGAA ACUUGCAU | 10389 |
| 5762 | UGCAAGUUA GGGUCUAU | 971 | AUAGACCC CUGAUGAGGCCGUUAGGCCGAA AACUUGCA | 10390 |
| 5767 | GUUAGGGUC UAUGUAUU | 972 | AAUACAUA CUGAUGAGGCCGUUAGGCCGAA ACCCUAAC | 10391 |
| 5769 | UAGGGUCUA UGUAUUUA | 973 | UAAAUACA CUGAUGAGGCCGUUAGGCCGAA AGACCCUA | 10392 |
| 5773 | GUCUAUGUA UUUAGGAU | 974 | AUCCUAAA CUGAUGAGGCCGUUAGGCCGAA ACAUAGAC | 10393 |
| 5775 | CUAUGUAUU UAGGAUGC | 975 | GCAUCCUA CUGAUGAGGCCGUUAGGCCGAA AUACAUAG | 10394 |
| 5776 | UAUGUAUUU AGGAUGCG | 976 | CGCAUCCU CUGAUGAGGCCGUUAGGCCGAA AAUACAUA | 10395 |
| 5777 | AUGUAUUUA GGAUGCGC | 977 | GCGCAUCC CUGAUGAGGCCGUUAGGCCGAA AAAUACAU | 10396 |
| 5788 | AUGCGCCUA CUCUUCAG | 978 | CUGAAGAG CUGAUGAGGCCGUUAGGCCGAA AGGCGCAU | 10397 |
| 5791 | CGCCUACUC UUCAGGGU | 954 | ACCCUGAA CUGAUGAGGCCGUUAGGCCGAA AGUAGGCG | 10373 |
| 5793 | CCUACUCUU CAGGGUCU | 955 | AGACCCUG CUGAUGAGGCCGUUAGGCCGAA AGAGUAGG | 10374 |
| 5794 | CUACUCUUC AGGGUCUA | 956 | UAGACCOU CUGAUGAGGCCGUUAGGCCGAA AAGAGUAG | 10375 |
| 5800 | UUCAGGGUC UAAAGAUC | 957 | GAUCUUUA CUGAUGAGGCCGUUAGGCCGAA ACCCUGAA | 10376 |
| 5802 | CAGGGUCUA AAGAUCAA | 958 | UUGAUCUU CUGAUGAGGCCGUUAGGCCGAA AGACCCUG | 10377 |
| 5808 | CUAAAGAUC AAGUGGGC | 959 | GCCCACUU CUGAUGAGGCCGUUAGGCCGAA AUCUUUAG | 10378 |
| 5819 | GUGGGCCUU GGAUCGCU | 960 | AGCGAUCC CUGAUGAGGCCGUUAGGCCGAA AGGCCCAC | 10379 |
| 5824 | CCUUGGAUC GCUAAGCU | 961 | AGCUUAGC CUGAUGAGGCCGUUAGGCCGAA AUCCAAGG | 10380 |
| 5828 | GGAUCGCUA AGCUGGCU | 962 | AGCCAGCU CUGAUGAGGCCGUUAGGCCGAA AGCGAUCC | 10381 |
| 5837 | AGCUGGCUC UGUUUGAU | 963 | AUCAAACA CUGAUGAGGCCGUUAGGCCGAA AGCCAGCU | 10382 |
| 5841 | GGCUCUGUU UGAUGCUA | 964 | UAGCAUCA CUGAUGAGGCCGUUAGGCCGAA ACAGAGCC | 10383 |
| 5842 | GCUCUGUUU GAUGCUAU | 965 | AUAGCAUC CUGAUGAGGCCGUUAGGCCGAA AACAGAGC | 10384 |
| 5849 | UUGAUGCUA UUUAUGCA | 966 | UGCAUAAA CUGAUGAGGCCGUUAGGCCGAA AGCAUCAA | 10385 |
| 5851 | GAUGCUAUU UAUGCAAG | 967 | CUUGCAUA CUGAUGAGGCCGUUAGGCCGAA AUAGCAUC | 10386 |
| 5852 | AUGCUAUUU AUGCAAGU | 968 | ACUUCCAU CUGAUGAGGCCGUUAGGCCGAA AAUAGCAU | 10387 |
| 5853 | UGCUAUUUA UGCAAGUU | 969 | AACUUGCA CUGAUGAGGCCGUUAGGCCGAA AAAUAGCA | 10388 |
| 5861 | AUGCAAGUU AGGGUCUA | 970 | UAGACCCU CUGAUGAGGCCGUUAGGCCGAA ACUUGCAU | 10389 |
| 5862 | UGCAAGUUA GGGUCUAU | 971 | AUAGACCC CUGAUGAGGCCGUUAGGCCGAA AACUUGCA | 10390 |
| 5867 | GUUAGGGUC UAUGUAUU | 972 | AAUACAUA CUGAUGAGGCCGUUAGGCCGAA ACCCUAAC | 10391 |
| 5869 | UAGGGUCUA UGUAUUUA | 973 | UAAAUACA CUGAUGAGGCCGUUAGGCCGAA AGACCCUA | 10392 |
| 5873 | GUCUAUGUA UUUAGGAU | 974 | AUCCUAAA CUGAUGAGGCCGUUAGGCCGAA ACAUAGAC | 10393 |
| 5875 | CUAUGUAUU UAGGAUGU | 979 | ACAUCCUA CUGAUGAGGCCGUUAGGCCGAA AUACAUAG | 10398 |
| 5876 | UAUGUAUUU AGGAUGUC | 980 | GACAUCCU CUGAUGAGGCCGUUAGGCCGAA AAUACAUA | 10399 |
| 5877 | AUGUAUUUA GGAUGUCU | 981 | AGACAUCC CUGAUGAGGCCGUUAGGCCGAA AAAUACAU | 10400 |
| 5884 | UAGGAUGUC UGCACCUU | 982 | AAGGUGCA CUGAUGAGGCCGUUAGGCCGAA ACAUCCUA | 10401 |
| 5892 | CUGCACCUU CUGCAGCC | 983 | GGCUGCAG CUGAUGAGGCCGUUAGGCCGAA AGGUGCAG | 10402 |
| 5893 | UGCACCUUC UGCAGCCA | 984 | UGGCUGCA CUGAUGAGGCCGUUAGGCCGAA AAGGUGCA | 10403 |
| 5904 | CAGCCAGUC AGAAGCUG | 985 | CAGCUUCU CUGAUGAGGCCGUUAGGCCGAA ACUGGCUG | 10404 |
| 5930 | CAGUGGAUU GCUGCUUC | 986 | GAAGCAGC CUGAUGAGGCCGUUAGGCCGAA AUCCACUG | 10405 |
| 5937 | UUGCUGCUU CUUGGGGA | 987 | UCCCCAAG CUGAUGAGGCCGUUAGGCCGAA AGCAGCAA | 10406 |
| 5938 | UGCUGCUUC UUGGGGAG | 988 | CUCCCCAA CUGAUGAGGCCGUUAGGCCGAA AAGCAGCA | 10407 |
| 5940 | CUGCUUCUU GGGGAGAA | 989 | UUCUCCCC CUGAUGAGGCCGUUAGGCCGAA AGAAGCAG | 10408 |
| 5953 | AGAAGAGUA UGCUUCCU | 990 | AGGAAGCA CUGAUGAGGCCGUUAGGCCGAA ACUCUUCU | 10409 |
| 5958 | AGUAUGCUU CCUUUUAU | 991 | AUAAAAGG CUGAUGAGGCCGUUAGGCCGAA AGCAUACU | 10410 |
| 5959 | GUAUGCUUC CUUUUAUC | 992 | GAUAAAAG CUGAUGAGGCCGUUAGGCCGAA AAGCAUAC | 10411 |
| 5962 | UGCUUCCUU UUAUCCAU | 993 | AUGGAUAA CUGAUGAGGCCGUUAGGCCGAA AGGAAGCA | 10412 |
| 5963 | GCUUCCUUU UAUCCAUG | 994 | CAUGGAUA CUGAUGAGGCCGUUAGGCCGAA AAGGAAGC | 10413 |
| 5964 | CUUCCUUUU AUCCAUGU | 995 | ACAUCGAU CUGAUGAGGCCGUUAGGCCGAA AAAGGAAG | 10414 |
| 5965 | UUCCUUUUA UCCAUGUA | 996 | UACAUGGA CUGAUGAGGCCGUUAGGCCGAA AAAAGGAA | 10415 |
| 5967 | CCUUUUAUC CAUGUAAU | 997 | AUUACAUG CUGAUGAGGCCGUUAGGCCGAA AUAAAAGG | 10416 |
| 5973 | AUCCAUGUA AUUUAACU | 998 | AGUUAAAU CUGAUGAGGCCGUUAGGCCGAA ACAUGGAU | 10417 |
| 5976 | CAUGUAAUU UAACUGUA | 999 | UACAGUUA CUGAUGAGGCCGUUAGGCCGAA AUUACAUG | 10418 |
| 5977 | AUGUAAUUU AACUGUAG | 1000 | CUACAGUU CUGAUGAGGCCGUUAGGCCGAA AAUUACAU | 10419 |
| 5978 | UGUAAUUUA ACUGUAGA | 1001 | UCUACAGU CUGAUGAGGCCGUUAGGCCGAA AAAUUACA | 10420 |
| 5984 | UUAACUGUA GAACCUGA | 1002 | UCAGGUUC CUGAUGAGGCCGUUAGGCCGAA ACAGUUAA | 10421 |
| 5996 | CCUGAGCUC UAAGUAAC | 1003 | GUUACUUA CUGAUGAGGCCGUUAGGCCGAA AGCUCAGG | 10422 |
| 5998 | UGAGCUCUA AGUAACCG | 1004 | CGGUUACU CUGAUGAGGCCGUUAGGCCGAA AGAGCUCA | 10423 |
| 6002 | CUCUAAGUA ACCGAAGA | 1005 | UCUUCGGU CUGAUGAGGCCGUUAGGCCGAA ACUUAGAG | 10424 |
| 6015 | AAGAAUGUA UGCCUCUG | 1006 | CAGAGGCA CUGAUGAGGCCGUUAGGCCGAA ACAUUCUU | 10425 |
| 6021 | GUAUGCCUC UGUUCUUA | 1007 | UAAGAACA CUGAUGAGGCCGUUAGGCCGAA AGGCAUAC | 10426 |
| 6025 | GCCUCUGUU CUUAUGUG | 1008 | CACAUAAG CUGAUGAGGCCGUUAGGCCGAA ACAGAGGC | 10427 |
| 6026 | CCUCUGUUC UUAUGUGC | 1009 | GCACAUAA CUGAUGAGGCCGUUAGGCCGAA AACAGAGG | 10428 |
| 6028 | UCUGUUCUU AUGUGCCA | 1010 | UGGCACAU CUGAUGAGGCCGUUAGGCCGAA AGAACAGA | 10429 |
| 6029 | CUGUUCUUA UGUGCCAC | 1011 | GUGGCACA CUGAUGAGGCCGUUAGGCCGAA AAGAACAG | 10430 |
| 6040 | UGCCACAUC CUUGUUUA | 1012 | UAAACAAG CUGAUGAGGCCGUUAGGCCGAA AUGUGGCA | 10431 |
| 6043 | CACAUCCUU GUUUAAAG | 1013 | CUUUAAAC CUGAUGAGGCCGUUAGGCCGAA AGGAUGUG | 10432 |
| 6046 | AUCCUUGUU UAAAGGCU | 1014 | AGCCUUUA CUGAUGAGGCCGUUAGGCCGAA ACAAGGAU | 10433 |
| 6047 | UCCUUGUUU AAAGGCUC | 1015 | GAGCCUUU CUGAUGAGGCCGUUAGGCCGAA AACAAGGA | 10434 |
| 6048 | CCUUGUUUA AAGGCUCU | 1016 | AGAGCCUU CUGAUGAGGCCGUUAGGCCGAA AAACAAGG | 10435 |
| 6055 | UAAAGGCUC UCUGUAUG | 1017 | CAUACAGA CUGAUGAGGCCGUUAGGCCGAA AGCCUUUA | 10436 |
| 6057 | AAGGCUCUC UGUAUGAA | 1018 | UUCAUACA CUGAUGAGGCCGUUAGGCCGAA AGAGCCUU | 10437 |
| 6061 | CUCUCUGUA UGAAGAGA | 1019 | UCUCUUCA CUGAUGAGGCCGUUAGGCCGAA ACAGAGAG | 10438 |
| 6079 | GGGACCGUC AUCAGCAC | 1020 | GUGCUGAU CUGAUGAGGCCGUUAGGCCGAA ACGGUCCC | 10439 |
| 6082 | ACCGUCAUC AGCACAUU | 1021 | AAUGUGCU CUGAUGAGGCCGUUAGGCCGAA AUGACGGU | 10440 |
| 6090 | CAGCACAUU CCCUAGUG | 1022 | CACUAGGG CUGAUGAGGCCGUUAGGCCGAA AUGUGCUG | 10441 |
| 6091 | AGCACAUUC CCUAGUGA | 1023 | UCACUAGG CUGAUGAGGCCGUUAGGCCGAA AAUGUGCU | 10442 |
| 6095 | CAUUCCCUA GUGAGCCU | 1024 | AGGCUCAC CUGAUGAGGCCGUUAGGCCGAA AGGGAAUG | 10443 |
| 6104 | GUGAGCCUA CUGGCUCC | 1025 | GGAGCCAG CUGAUGAGGCCGUUAGGCCGAA AGGCUCAC | 10444 |
| 6111 | UACUGGCUC CUGGCAGC | 1026 | GCUGCCAG CUGAUGAGGCCGUUAGGCCGAA AGCCAGUA | 10445 |
| 6124 | CAGCGGCUU UUGUGGAA | 1027 | UUCCACAA CUGAUGAGGCCGUUAGGCCGAA AGCCGCUG | 10446 |
| 6125 | AGCGGCUUU UGUGGAAG | 1028 | CUUCCACA CUGAUGAGGCCGUUAGGCCGAA AAGCCGCU | 10447 |
| 6126 | GCGGCUUUU GUGGAAGA | 1029 | UCUUCCAC CUGAUGAGGCCGUUAGGCCGAA AAAGCCGC | 10448 |
| 6137 | GGAAGACUC ACUAGCCA | 1030 | UGGCUAGU CUGAUCAGGCCGUUAGGCCGAA AGUCUUCC | 10449 |
| 6141 | GACUCACUA GCCAGAAG | 1031 | CUUCUGGC CUGAUGAGGCCGUUAGGCCGAA AGUGAGUC | 10450 |
| 6166 | GGGACAGUC CUCUCCAC | 1032 | GUGGAGAG CUGAUGAGGCCGUUAGGCCGAA ACUGUCCC | 10451 |
| 6169 | ACAGUCCUC UCCACCAA | 1033 | UUGGUGGA CUGAUGAGGCCGUUAGGCCGAA AGGACUGU | 10452 |
| 6171 | AGUCCUCUC CACCAAGA | 1034 | UCUUCGUG CUGAUGAGGCCGUUAGGCCGAA AGAGGACU | 10453 |
| 6181 | ACCAAGAUC UAAAUCCA | 1035 | UGGAUUUA CUGAUGAGGCCGUUAGGCCGAA AUCUUGGU | 10454 |
| 6183 | CAAGAUCUA AAUCCAAA | 1036 | UUUGGAUU CUGAUGAGGCCGUUAGGCCGAA AGAUCUUG | 10455 |
| 6187 | AUCUAAAUC CAAACAAA | 1037 | UUUGUUUG CUGAUGAGGCCGUUAGGCCGAA AUUUAGAU | 10456 |
| 6204 | AGCAGGCUA GAGCCAGA | 1038 | UCUGGCUC CUGAUGAGGCCGUUAGGCCGAA AGCCUGCU | 10457 |
| 6226 | GGACAAAUC UUUGUUGU | 1039 | ACAACAAA CUGAUGAGGCCGUUAGGCCGAA AUUUGUCC | 10458 |
| 6228 | ACAAAUCUU UGUUGUUC | 1040 | GAACAACA CUGAUGAGGCCGUUAGGCCGAA AGAUUUGU | 10459 |
| 6229 | CAAAUCUUU GUUGUUCC | 1041 | GGAACAAC CUGAUGAGGCCGUUAGGCCGAA AAGAUUUG | 10460 |
| 6232 | AUCUUUGUU GUUCCUCU | 1042 | AGAGGAAC CUGAUGAGGCCGUUAGGCCGAA ACAAAGAU | 10461 |
| 6235 | UUUGUUGUU CCUCUUCU | 1043 | AGAAGAGG CUGAUGAGGCCGUUAGGCCGAA ACAACAAA | 10462 |
| 6236 | UUGUUGUUC CUCUUCUU | 1044 | AAGAAGAG CUGAUGAGGCCGUUAGGCCGAA AACAACAA | 10463 |
| 6239 | UUGUUCCUC UUCUUUAC | 1045 | GUAAAGAA CUGAUGAGGCCGUUAGGCCGAA AGGAACAA | 10464 |
| 6241 | GUUCCUCUU CUUUACAC | 1046 | GUGUAAAG CUGAUGAGGCCGUUAGGCCGAA AGAGGAAC | 10465 |
| 6242 | UUCCUCUUC UUUACACA | 1047 | UGUGUAAA CUGAUGAGGCCGUUAGGCCGAA AAGAGGAA | 10466 |
| 6244 | CCUCUUCUU UACACAUA | 1048 | UAUGUGUA CUGAUGAGGCCGUUAGGCCGAA AGAAGAGG | 10467 |
| 6245 | CUCUUCUUU ACACAUAC | 1049 | GUAUGUGU CUGAUGAGGCCGUUAGGCCGAA AAGAAGAG | 10468 |
| 6246 | UCUUCUUUA CACAUACG | 1050 | CGUAUGUG CUGAUGAGGCCGUUAGGCCGAA AAAGAAGA | 10469 |
| 6252 | UUACACAUA CGCAAACC | 1051 | GGUUUGCG CUGAUGAGGCCGUUAGGCCGAA AUGUGUAA | 10470 |
| 6280 | CUGGCAAUU UUAUAAAU | 1052 | AUUUAUAA CUGAUGAGGCCGUUAGGCCGAA AUUGCCAG | 10471 |
| 6281 | UGGCAAUUU UAUAAAUC | 1053 | GAUUUAUA CUGAUGAGGCCGUUAGGCCGAA AAUUGCCA | 10472 |
| 6282 | GGCAAUUUU AUAAAUCA | 1054 | UGAUUUAU CUGAUGAGGCCGUUAGGCCGAA AAAUUGCC | 10473 |
| 6283 | GCAAUUUUA UAAAUCAG | 1055 | CUGAUUUA CUGAUGAGGCCGUUAGGCCGAA AAAAUUGC | 10474 |
| 6285 | AAUUUUAUA AAUCAGGU | 1056 | ACCUGAUU CUGAUGAGGCCGUUAGGCCGAA AUAAAAUU | 10475 |
| 6289 | UUAUAAAUC AGGUAACU | 1057 | AGUUACCU CUGAUGAGGCCGUUAGGCCGAA AUUUAUAA | 10476 |
| 6294 | AAUCAGGUA ACUGGAAG | 1058 | CUUCCAGU CUGAUGAGGCCGUUAGGCCGAA ACCUGAUU | 10477 |
| 6308 | AAGGAGGUU AAACUCAG | 1059 | CUGAGUUU CUGAUGAGGCCGUUAGGCCGAA ACCUCCUU | 10478 |
| 6309 | AGGAGGUUA AACUCAGA | 1060 | UCUGAGUU CUGAUGAGGCCGUUAGGCCGAA AACCUCCU | 10479 |
| 6314 | GUUAAACUC AGAAAAAA | 1061 | UUUUUUCU CUGAUGAGGCCGUUAGGCCGAA AGUUUAAC | 10480 |
| 6331 | GAAGACCUC AGUCAAUU | 1062 | AAUUGACU CUGAUGAGGCCGUUAGGCCGAA AGGUCUUC | 10481 |
| 6335 | ACCUCAGUC AAUUCUCU | 1063 | AGAGAAUU CUGAUGAGGCCGUUAGGCCGAA ACUGAGGU | 10482 |
| 6339 | CAGUCAAUU CUCUACUU | 1064 | AAGUAGAG CUGAUGAGGCCGUUAGGCCGAA AUUGACUG | 10483 |
| 6340 | AGUCAAUUC UCUACUUU | 1065 | AAAGUAGA CUGAUGAGGCCGUUAGGCCGAA AAUUGACU | 10484 |
| 6342 | UCAAUUCUC UACUUUUU | 1066 | AAAAAGUA CUGAUGAGGCCGUUAGGCCGAA AGAAUUGA | 10485 |
| 6344 | AAUUCUCUA CUUUUUUU | 1067 | AAAAAAAG CUGAUGAGGCCGUUAGGCCGAA AGAGAAUU | 10486 |
| 6347 | UCUCUACUU UUUUUUUU | 1068 | AAAAAAAA CUGAUGAGGCCGUUAGGCCGAA AGUAGAGA | 10487 |
| 6348 | CUCUACUUU UUUUUUUU | 1069 | AAAAAAAA CUGAUGAGGCCGUUAGGCCGAA AAGUAGAG | 10488 |
| 6349 | UCUACUUUU UUUUUUUU | 1070 | AAAAAAAA CUGAUGAGGCCGUUAGGCCGAA AAAGUAGA | 10489 |
| 6350 | CUACUUUUU UUUUUUUU | 1071 | AAAAAAAA CUGAUGAGGCCGUUAGGCCGAA AAAAGUAG | 10490 |
| 6351 | UACUUUUUU UUUUUUUU | 1072 | AAAAAAAA CUGAUGAGGCCGUUAGGCCGAA AAAAAGUA | 10491 |
| 6352 | ACUUUUUUU UUUUUUUU | 1073 | AAAAAAAA CUGAUGAGGCCGUUAGGCCGAA AAAAAAGU | 10492 |
| 6353 | CUUUUUUUU UUUUUUUU | 1074 | AAAAAAAA CUGAUGAGGCCGUUAGGCCGAA AAAAAAAG | 10493 |
| 6354 | UUUUUUUUU UUUUUUUC | 1075 | GAAAAAAA CUGAUGAGGCCGUUAGGCCGAA AAAAAAAA | 10494 |
| 6355 | UUUUUUUUU UUUUUUCC | 1076 | GGAAAAAA CUGAUGAGGCCGUUAGGCCGAA AAAAAAAA | 10495 |
| 6356 | UUUUUUUUU UUUUUCCA | 1077 | UGGAAAAA CUGAUGAGGCCGUUAGGCCGAA AAAAAAAA | 10496 |
| 6357 | UUUUUUUUU UUUUCCAA | 1078 | UUGGAAAA CUGAUGAGGCCGUUAGGCCGAA AAAAAAAA | 10497 |
| 6358 | UUUUUUUUU UUUCCAAA | 1079 | UUUGGAAA CUGAUGAGGCCGUUAGGCCGAA AAAAAAAA | 10498 |
| 6359 | UUUUUUUUU UUCCAAAU | 1080 | AUUUGGAA CUGAUGAGGCCGUUAGGCCGAA AAAAAAAA | 10499 |
| 6360 | UUUUUUUUU UCCAAAUC | 1081 | GAUUUGGA CUGAUGAGGCCGUUAGGCCGAA AAAAAAAA | 10500 |
| 6361 | UUUUUUUUU CCAAAUCA | 1082 | UGAUUUGG CUGAUGAGGCCGUUAGGCCGAA AAAAAAAA | 10501 |
| 6362 | UUUUUUUUC CAAAUCAG | 1083 | CUGAUUUG CUGAUGAGGCCGUUAGGCCGAA AAAAAAAA | 10502 |
| 6368 | UUCCAAAUC AGAUAAUA | 1084 | UAUUAUCU CUGAUGAGGCCGUUAGGCCGAA AUUUGGAA | 10503 |
| 6373 | AAUCAGAUA AUAGCCCA | 1085 | UGGGCUAU CUGAUGAGGCCGUUAGGCCGAA AUCUGAUU | 10504 |
| 6376 | CAGAUAAUA GCCCAGCA | 1086 | UGCUGGGC CUGAUGAGGCCGUUAGGCCGAA AUUAUCUG | 10505 |
| 6388 | CAGCAAAUA GUGAUAAC | 1087 | GUUAUCAC CUGAUGAGGCCGUUAGGCCGAA AUUUGCUG | 10506 |
| 6394 | AUAGUGAUA ACAAAUAA | 1088 | UUAUUUGU CUGAUGAGGCCGUUAGGCCGAA AUCACUAU | 10507 |
| 6401 | UAACAAAUA AAACCUUA | 1089 | UAAGGUUU CUGAUGAGGCCGUUAGGCCGAA AUUUGUUA | 10508 |
| 6408 | UAAAACCUU AGCUGUUC | 1090 | GAACAGCU CUGAUGAGGCCGUUAGGCCGAA AGGUUUUA | 10509 |
| 6409 | AAAACCUUA GCUGUUCA | 1091 | UGAACAGC CUGAUGAGGCCGUUAGGCCGAA AAGGUUUU | 10510 |
| 6415 | UUAGCUGUU CAUGUCUU | 1092 | AAGACAUG CUGAUGAGGCCGUUAGGCCGAA ACAGUCAA | 10511 |
| 6416 | UAGCUGUUC AUGUCUUG | 1093 | CAAGACAU CUGAUGAGGCCGUUAGGCCGAA AACAGCUA | 10512 |
| 6421 | GUUCAUGUC UUGAUUUC | 1094 | GAAAUCAA CUGAUGAGGCCGUUAGGCCGAA ACAUGAAC | 10513 |
| 6423 | UCAUGUCUU GAUUUCAA | 1095 | UUGAAAUC CUGAUGAGGCCGUUAGGCCGAA AGACAUGA | 10514 |
| 6427 | GUCUUGAUU UCAAUAAU | 1096 | AUUAUUGA CUGAUGAGGCCGUUAGGCCGAA AUCAAGAC | 10515 |
| 6428 | UUTUGAUUU CAAUAAUU | 1097 | AAUUAUUG CUGAUGAGGCCGUUAGGCCGAA AAUCAAGA | 10516 |
| 6429 | CUUGAUUUC AAUAAUUA | 1098 | UAAUUAUU CUGAUGAGGCCGUUAGGCCGAA AAAUCAAG | 10517 |
| 6433 | AUUUCAAUA AUUAAUUC | 1099 | GAAUUAAU CUGAUGAGGCCGUUAGGCCGAA AUUGAAAU | 10518 |
| 6436 | UCAAUAAUU AAUUCUUA | 1100 | UAAGAAUU CUGAUGAGGCCGUUAGGCCGAA AUUAUUGA | 10519 |
| 6437 | CAAUAAUUA AUUCUUAA | 1101 | UUAAGAAU CUGAUGAGGCCGUUAGGCCGAA AAUUAUUG | 10520 |
| 6440 | UAAUUAATU CUUAAUCA | 1102 | UGAUUAAG CUGAUGAGGCCGUUAGGCCGAA AUUAAUUA | 10521 |
| 6441 | AAUUAAUUC UUAAUCAU | 1103 | AUGAUUAA CUGAUGAGGCCGUUAGGCCGAA AAUUAAUU | 10522 |
| 6443 | UUAAUUCUU AAUCAUUA | 1104 | UAAUGAUU CUGAUGAGGCCGUUAGGCCGAA AGAAUUAA | 10523 |
| 6444 | UAAUUCUUA AUCAUUAA | 1105 | UUAAUGAU CUGAUGAGGCCGUUAGGCCGAA AAGAAUUA | 10524 |
| 6447 | UUCUUAAUC AUUAAGAG | 1106 | CUCUUAAU CUGAUGAGGCCGUUAGGCCGAA AUUAAGAA | 10525 |
| 6450 | UUAAUCAUU AAGAGACC | 1107 | GGUCUCUU CUGAUGAGGCCGUUAGGCCGAA AUGAUUAA | 10526 |
| 6451 | UAAUCAUUA AGAGACCA | 1108 | UGGUCUCU CUGAUGAGGCCGUUAGGCCGAA AAUGAUUA | 10527 |
| 6461 | GAGACCAUA AUAAAUAC | 1109 | GUAUUUAU CUGAUGAGGCCGUUAGGCCGAA AUGGUCUC | 10528 |
| 6464 | ACCAUAAUA AAUACUCC | 1110 | GGAGUAUU CUGAUGAGGCCGUUAGGCCGAA AUUAUGGU | 10529 |
| 6468 | UAAUAAAUA CUCCUUUU | 1111 | AAAAGGAG CUGAUGAGGCCGUUAGGCCGAA AUUUAUUA | 10530 |
| 6471 | UAAAUACUC CUUUUCAA | 1112 | UUGAAAAG CUGAUGAGGCCGUUAGGCCGAA AGUAUUUA | 10531 |
| 6474 | AUACUCCUU UUCAAGAG | 1113 | CUCUUGAA CUGAUGAGGCCGUUAGGCCGAA AGGAGUAU | 10532 |
| 6475 | UACUCCUUU UCAAGAGA | 1114 | UCUCUUGA CUGAUGAGGCCGUUAGGCCGAA AAGGAGUA | 10533 |
| 6476 | ACUCCUUUU CAAGAGAA | 1115 | UUCUCUUG CUGAUGAGGCCGUUAGGCCGAA AAAGGAGU | 10534 |
| 6477 | CUCCUUUUC AAGAGAAA | 1116 | UUUCUCUU CUGAUGAGGCCGUUAGGCCGAA AAAAGGAG | 10535 |
| 6497 | AAAACCAUU AGAAUUGU | 1117 | ACAAUUCU CUGAUGAGGCCGUUAGGCCGAA AUGGUUUU | 10536 |
| 6498 | AAACCAUUA GAAUUGUU | 1118 | AACAAUUC CUGAUGAGGCCGUUAGGCCGAA AAUGGUUU | 10537 |
| 6503 | AUUAGAAUU GUUACUCA | 1119 | UGAGUAAC CUGAUGAGGCCGUUAGGCCGAA AUUCUAAU | 10538 |
| 6506 | AGAAUUGUU ACUCAGCU | 1120 | AGCUGAGU CUGAUGAGGCCGUUAGGCCGAA ACAAUUCU | 10539 |
| 6507 | GAAUUGUUA CUCAGCUC | 1121 | GACCUGAG CUGAUGAGGCCGUUAGGCCGAA AACAAUUC | 10540 |
| 6510 | UUGUUACUC AGCUCCUU | 1122 | AAGGAGCU CUGAUGAGGCCGUUAGGCCGAA AGUAACAA | 10541 |
| 6515 | ACUCAGCUC CUUCAAAC | 1123 | GUUUGAAG CUGAUGAGGCCGUUAGGCCGAA AGCUGAGU | 10542 |
| 6518 | CAGCUCCUU CAAACUCA | 1124 | UGAGUUUG CUGAUGAGGCCGUUAGGCCGAA AGGAGCUG | 10543 |
| 6519 | AGCUCCUUC AAACUCAG | 1125 | CUGAGUUU CUGAUGAGGCCGUUAGGCCGAA AAGGAGCU | 10544 |
| 6525 | UUCAAACUC AGGUUUCU | 1126 | ACAAACCU CUGAUGAGGCCGUUAGGCCGAA AGUUUGAA | 10545 |
| 6530 | ACUCAGGUU UGUAGCAU | 1127 | AUGCUACA CUGAUGAGGCCGUUAGGCCGAA ACCUGAGU | 10546 |
| 6531 | CUCAGGUUU GUAGCAUA | 1128 | UAUGCUAC CUGAUGAGGCCGUUAGGCCGAA AACCUGAG | 10547 |
| 6534 | AGGUUUGUA GCAUACAU | 1129 | AUGUAUGC CUGAUGAGGCCGUUAGGCCGAA ACAAACCU | 10548 |
| 6539 | UGUAGCAUA CAUGAGUC | 1130 | GACUCAUG CUGAUGAGGCCGUUAGGCCGAA AUGCUACA | 10549 |
| 6547 | ACAUGAGUC CAUCCAUC | 1131 | GAUGGAUG CUGAUGAGGCCGUUAGGCCGAA ACUCAUGU | 10550 |
| 6551 | GAGUCCAUC CAUCAGUC | 1132 | GACUGAUG CUGAUGAGGCCGUUAGGCCGAA AUGGACUC | 10551 |
| 6555 | CCAUCCAUC AGUCAAAG | 1133 | CUUUGACU CUGAUGAGGCCGUUAGGCCGAA AUGGAUGG | 10552 |
| 6559 | CCAUCAGUC AAAGAAUG | 1134 | CAUUCUUU CUGAUGAGGCCGUUAGGCCGAA ACUGAUGG | 10553 |
| 6570 | AGAAUGGUU CCAUCUGG | 1135 | CCAGAUGG CUGAUGAGGCCGUUAGGCCGAA ACCAUUCU | 10554 |
| 6571 | GAAUGGUUC CAUCUGGA | 1136 | UCCAGAUG CUGAUGAGGCCGUUAGGCCGAA AACCAUUC | 10555 |
| 6575 | GGUUCCAUC UGGAGUCU | 1137 | AGACUCCA CUGAUGAGGCCGUUAGGCCGAA AUGGAACC | 10556 |
| 6582 | UCUGCAGUC UUAAUGUA | 1138 | UACAUUAA CUGAUGAGGCCGUUAGGCCGAA ACUCCAGA | 10557 |
| 6584 | UGGAGUCUU AAUGUAGA | 1139 | UCUACAUU CUGAUGAGGCCGUUAGGCCGAA AGACUCCA | 10558 |
| 6585 | GGAGUCUUA AUGUAGAA | 1140 | UUCUACAU CUGAUGAGGCCGUUAGGCCGAA AAGACUCC | 10559 |
| 6590 | CUUAAUGUA GAAAGAAA | 1141 | UUUCUUUC CUGAUGAGGCCGUUAGGCCGAA ACAUUAAG | 10560 |
| 6609 | UGGAGACUU GUAAUAAU | 1142 | AUUAUUAC CUGAUGAGGCCGUUAGGCCGAA AGUCUCCA | 10561 |
| 6612 | AGACUUGUA AUAAUGAG | 1143 | CUCAUUAU CUGAUGAGGCCGUUAGGCCGAA ACAAGUCU | 10562 |
| 6615 | CUUGUAAUA AUGAGCUA | 1144 | UAGCUCAU CUGAUGAGGCCGUUAGGCCGAA AUUACAAG | 10563 |
| 6623 | AAUGAGCUA GUUACAAA | 1145 | UUUGUAAC CUGAUGAGGCCGUUAGGCCGAA AGCUCAUU | 10564 |
| 6626 | GAGCUAGUU ACAAAGUG | 1146 | CACUUUGU CUGAUGAGGCCGUUAGGCCGAA ACUAGCUC | 10565 |
| 6627 | AGCUAGUUA CAAAGUGC | 1147 | GCACUUUG CUGAUGAGGCCGUUAGGCCGAA AACUAGCU | 10566 |
| 6637 | AAAGUGCUU GUUCAUUA | 1148 | UAAUGAAC CUGAUGAGGCCGUUAGGCCGAA AGCACUUU | 10567 |
| 6640 | GUGCUUGUU CAUUAAAA | 1149 | UUUUAAUG CUGAUGAGGCCGUUAGGCCGAA ACAAGCAC | 10568 |
| 6641 | UGCUUGUUC AUUAAAAU | 1150 | AUUUUAAU CUGAUGAGGCCGUUAGGCCGAA AACAAGCA | 10569 |
| 6644 | UUGUUCAUU AAAAUAGC | 1151 | GCUAUUUU CUGAUGAGGCCGUUAGGCCGAA AUGAACAA | 10570 |
| 6645 | UGUUCAUUA AAAUAGCA | 1152 | UGCUAUUU CUGAUGAGGCCGUUAGGCCGAA AAUGAACA | 10571 |
| 6650 | AUUAAAAUA GCACUGAA | 1153 | UUCAGUGC CUGAUGAGGCCGUUAGGCCGAA AUUUUAAU | 10572 |
| 6662 | CUGAAAAUU GAAACAUG | 1154 | CAUGUUUC CUGAUGAGGCCGUUAGGCCGAA AUUUUCAG | 10573 |
| 6674 | ACAUGAAUU AACUGAUA | 1155 | UAUCAGUU CUGAUGAGGCCGUUAGGCCGAA AUUCAUGU | 10574 |
| 6675 | CAUGAAUUA ACUGAUAA | 1156 | UUAUCAGU CUGAUGAGGCCGUUAGGCCGAA AAUUCAUG | 10575 |
| 6682 | UAACUGAUA AUAUUCCA | 1157 | UGGAAUAU CUGAUGAGGCCGUUAGGCCGAA AUCAGUUA | 10576 |
| 6685 | CUGAUAAUA UUCCAAUC | 1158 | GAUUGGAA CUGAUGAGGCCGUUAGGCCGAA AUUAUCAG | 10577 |
| 6687 | GAUAAUAUU CCAAUCAU | 1159 | AUGAUUGG CUGAUGAGGCCGUUAGGCCGAA AUAUUAUC | 10578 |
| 6688 | AUAAUAUUC CAAUCAUU | 1160 | AAUGAUUG CUGAUGAGGCCGUUAGGCCGAA AAUAUUAU | 10579 |
| 6693 | AUUCCAAUC AUUUGCCA | 1161 | UGGCAAAU CUGAUGAGGCCGUUAGGCCGAA AUUGGAAU | 10580 |
| 6696 | CCAAUCAUU UGCCAUUU | 1162 | AAAUGGCA CUGAUGAGGCCGUUAGGCCGAA AUGAUUGG | 10581 |
| 6697 | CAAUCAUUU GCCAUUUA | 1163 | UAAAUGGC CUGAUGAGGCCGUUAGGCCGAA AAUGAUUG | 10582 |
| 6703 | UUUGCCAUU UAUGACAA | 1164 | UUGUCAUA CUGAUGAGGCCGUUAGGCCGAA AUGGCAAA | 10583 |
| 6704 | UUGCCAUUU AUGACAAA | 1165 | UUUGUCAU CUGAUGAGGCCGUUAGGCCGAA AAUGGCAA | 10584 |
| 6705 | UGCCAUUUA UGACAAAA | 1166 | UUUUGUCA CUGAUGAGGCCGUUAGGCCGAA AAAUGGCA | 10585 |
| 6719 | AAAAUGGUU GGCACUAA | 1167 | UUAGUGCC CUGAUGAGGCCGUUAGGCCGAA ACCAUUUU | 10586 |
| 6726 | UUGGCACUA ACAAAGAA | 1168 | UUCUUUGU CUGAUGAGGCCGUUAGGCCGAA AGUGCCAA | 10587 |
| 6743 | CGAGCACUU CCUUUCAG | 1169 | CUGAAAGG CUGAUGAGGCCGUUAGGCCGAA AGUGCUCG | 10588 |
| 6744 | GAGCACUUC CUUUCAGA | 1170 | UCUGAAAG CUGAUGAGGCCGUUAGGCCGAA AAGUGCUC | 10589 |
| 6747 | CACUUCCUU UCAGAGUU | 1171 | AACUCUGA CUGAUGAGGCCGUUAGGCCGAA AGGAAGUG | 10590 |
| 6748 | ACUUCCUUU CAGAGUUU | 1172 | AAACUCUG CUGAUGAGGCCGUUAGGCCGAA AAGGAAGU | 10591 |
| 6749 | CUUCCUUUC AGAGUUUC | 1173 | GAAACUCU CUGAUGAGGCCGUUAGGCCGAA AAAGGAAG | 10592 |
| 6755 | UUCAGAGUU UCUGAGAU | 1174 | AUCUCAGA CUGAUGAGGCCGUUAGGCCGAA ACUCUGAA | 10593 |
| 6756 | UCAGAGUUU CUGAGAUA | 1175 | CAUCUCAG CUGAUGAGGCCGUUAGGCCGAA AACUCUGA | 10594 |
| 6757 | CAGAGUUUC UGAGAUAA | 1176 | UGAUCUCA CUGAUGAGGCCGUUAGGCCGAA AAACUCUG | 10595 |
| 6764 | UCUGAGAGA AUGUACGU | 1177 | ACGUACAU CUGAUGAGGCCGUUAGGCCGAA AUCUCAGA | 10596 |
| 6769 | GAUAAUGUA CGUGGAAC | 1178 | GUUCCACG CUGAUGAGGCCGUUAGGCCGAA ACAUUAUC | 10597 |
| 6781 | GGAACAGUC UGGGUGGA | 1179 | UCCACCCA CUGAUGAGGCCGUUAGGCCGAA ACUGUUCC | 10598 |
| 6814 | GUGCAAGUC UGUGUCUU | 1180 | AAGACACA CUGAUGAGGCCGUUAGGCCGAA ACUUGCAC | 10599 |
| 6820 | GUCUGUGUC UUGUCAGU | 1181 | ACUGACAA CUGAUGAGGCCGUUAGGCCGAA ACACAGAC | 10600 |
| 6822 | CUGUGUCUU GUCAGUCC | 1182 | GGACUGAC CUGAUGAGGCCGUUAGGCCGAA AGACACAG | 10601 |
| 6825 | UGUCCUGUC AGUCCAAG | 1183 | CUUGGACU CUGAUGAGGCCGUUAGGCCGAA ACAAGACA | 10602 |
| 6829 | UGGUCAGUC CAAGAAGU | 1184 | ACUUCUUG CUGAUGAGGCCGUUAGGCCGAA ACUGACAA | 10603 |
| 6851 | CGAGAUGUU AAUUUUAG | 1185 | CUAAAAUU CUGAUGAGGCCGUUAGGCCGAA ACAUCUCG | 10604 |
| 6852 | GAGAUGUGA AUUUUAGG | 1186 | CCUAAAAU CUGAUGAGGCCGUUAGGCCGAA AACAUCUC | 10605 |
| 6855 | AUGUUAAUU UUAGGGAC | 1187 | GUCCCUAA CUGAUGAGGCCGUUAGGCCGAA AUUAACAU | 10606 |
| 6856 | UGUUAAUUU UAGGGACC | 1188 | GGUCCCUA CUGAUGAGGCCGUUAGGCCGAA AAUUAACA | 10607 |
| 6857 | GUUAAUUUU AGGGACCC | 1189 | GGGUCCCU CUGAUGAGGCCGUUAGGCCGAA AAAUUAAC | 10608 |
| 6858 | UUAAUUUUA GGGACCCG | 1190 | CGGGUCCC CUGAUGAGGCCGUUAGGCCGAA AAAAUUAA | 10609 |
| 6872 | CCGUGCCUU GUUUCCUA | 1191 | UAGGAAAC CUGAUGAGGCCGUUAGGCCGAA AGGCACGG | 10610 |
| 6875 | UGCCUUGUU UCCUAGCC | 1192 | GGCUAGGA CUGAUGAGGCCGUUAGGCCGAA ACAAGGCA | 10611 |
| 6876 | GCCUUGUUU CCUAGCCC | 1193 | GGGCUAGG CUGAUGAGGCCGUUAGGCCGAA AACAAGGC | 10612 |
| 6877 | CCUUGUUUC CUAGCCCA | 1194 | UGGGCUAG CUGAUGAGGCCGUUAGGCCGAA AAACAAGG | 10613 |
| 6880 | UGUUUCCUA GCCCACAA | 1195 | UUGUGGGC CUGAUGAGGCCGUUAGGCCGAA AGGAAACA | 10614 |
| 6901 | GCAAACAUC AAACAGAU | 1196 | AUCUGUUU CUGAUGAGGCCGUUAGGCCGAA AUGUGUGC | 10615 |
| 6910 | AAACAGAUA CUCGCUAG | 1197 | CUAGCGAG CUGAUGAGGCCGUUAGGCCGAA AUCUGUUU | 10616 |
| 6913 | CAGAUACUC GCUAGCCU | 1198 | AGGCUAGC CUGAUGAGGCCGUUAGGCCGAA AGUAUCUG | 10617 |
| 6917 | UACUCGCUA GCCUCAUU | 1199 | AAUGAGGC CUGAUGAGGCCGUUAGGCCGAA AGCGAGUA | 10618 |
| 6922 | GCUAGCCUC AUUUAAAU | 1200 | AUUUAAAU CUGAUGAGGCCGUUAGGCCGAA AGGCUAGC | 10619 |
| 6925 | AGCCUCAUU UAAAUUGA | 1201 | UCAAUUUA CUGAUGAGGCCGUUAGGCCGAA AUGAGGCU | 10620 |
| 6926 | GCCUCAUUU AAAUUGAU | 1202 | AUCAAUUU CUGAUGAGGCCGUUAGGCCGAA AAUGAGGC | 10621 |
| 6927 | CCUCAUUUA AAUUGAUU | 1203 | AAUCAAUU CUGAUGAGGCCGUUAGGCCGAA AAAUGAGG | 10622 |
| 6931 | AUUUAAAUU GAUUAAAG | 1204 | CUUUAAUC CUGAUGAGGCCGUUAGGCCGAA AUUUAAAU | 10623 |
| 6935 | AAAUUGAUU AAAGGAGG | 1205 | CCUCCUUU CUGAUGAGGCCGUUAGGCCGAA AUCAAUUU | 10624 |
| 6936 | AAUUGAUUA AAGGAGGA | 1206 | UCCUCCUG CUGAUGAGGCCGUUAGGCCGAA AAUCAAUU | 10625 |
| 6951 | GAGUGCAUC UUUGGCCG | 1207 | CGGCCAAA CUGAUGAGGCCGUUAGGCCGAA AUGCACUC | 10626 |
| 6953 | GUGCAUCUU UGGCCGAC | 1208 | GUCGGCCA CUGAUGAGGCCGUUAGGCCGAA AGAUGCAC | 10627 |
| 6954 | UGCAUCUUU GGCCGACA | 1209 | UGUCGGCC CUGAUGAGGCCGUUAGGCCGAA AAGAUGCA | 10628 |
| 6970 | AGUGGUGGA ACUGUGUG | 1210 | CACACAGU CUGAUGAGGCCGUUAGGCCGAA ACACCACU | 10629 |
| 7026 | GUGGGUGUA UGUGUGUU | 1211 | AACACACA CUGAUGAGGCCGUUAGGCCGAA ACACCCAC | 10630 |
| 7034 | AUGUGUGUU UUGUGCAU | 1212 | AUGCACAA CUGAUGAGGCCGUUAGGCCGAA ACACACAU | 10631 |
| 7035 | UGUGUGUUU UGUGCAUA | 1213 | UAUGCACA CUGAUGAGGCCGUUAGGCCGAA AACACACA | 10632 |
| 7036 | GUGUGUGUG GUGCAUAA | 1214 | UUAUGCAC CUGAUGAGGCCGUUAGGCCGAA AAACACAC | 10633 |
| 7043 | UUGUGCAUA ACUAUUUA | 1215 | UAAAUAGU CUGAUGAGGCCGUUAGGCCGAA AUGCACAA | 10634 |
| 7047 | GCAUAACUA UUUAAGGA | 1216 | UCCUUAAA CUGAUGAGGCCGUUAGGCCGAA AGUUAUGC | 10635 |
| 7049 | AUAACUAUU UAAGGAAA | 1217 | UUUCCUUA CUGAUGAGGCCGUUAGGCCGAA AUAGUUAU | 10636 |
| 7050 | UAACUAUUU AAGGAAAC | 1218 | GUUUCCUU CUGAUGAGGCCGUUAGGCCGAA AAUAGUUA | 10637 |
| 7051 | AACUAUUUA AGGAAACU | 1219 | AGUUUCCU CUGAUGAGGCCGUUAGGCCGAA AAAUAGUU | 10638 |
| 7065 | ACUGGAAUU UUAAAGUU | 1220 | AACUUUAA CUGAUGAGGCCGUUAGGCCGAA AUUCCAGU | 10639 |
| 7066 | CUGGAAUUU UAAAGUUA | 1221 | UAACUUUA CUGAUGAGGCCGUUAGGCCGAA AAUUCCAG | 10640 |
| 7067 | UGGAAUUUU AAAGUUAC | 1222 | GUAACUUU CUGAUGAGGCCGUUAGGCCGAA AAAUUCCA | 10641 |
| 7068 | GGAAUUUUA AAGUUACU | 1223 | AGUAACUU CUGAUGAGGCCGUUAGGCCGAA AAAAUUCC | 10642 |
| 7073 | UUUAAAGUU ACUUUUAU | 1224 | AUAAAAGU CUGAUGAGGCCGUUAGGCCGAA ACUUUAAA | 10643 |
| 7074 | UUAAAGUUA CUUUUAUA | 1225 | UAUAAAAG CUGAUGAGGCCGUUAGGCCGAA AACUUUAA | 10644 |
| 7077 | AAGUUACUU UUAUACAA | 1226 | UUGUAUAA CUGAUGAGGCCGUUAGGCCGAA AGUAACUU | 10645 |
| 7078 | AGUUACUUU UAUACAAA | 1227 | UUUGUAUA CUCAUGAGGCCGUUAGGCCGAA AAGUAACU | 10646 |
| 7079 | GUUACUUUU AUACAAAC | 1228 | GUUUGUAU CUGAUGAGGCCGUUAGGCCGAA AAAGUAAC | 10647 |
| 7080 | UUACUUUUA UACAAACC | 1229 | GGUUUGUA CUGAUGAGGCCGUUAGGCCGAA AAAAGUAA | 10648 |
| 7082 | ACUUUUAUA CAAACCAA | 1230 | UUGGUUUG CUGAUGAGGCCGUUAGGCCGAA AUAAAAGU | 10649 |
| 7095 | CCAAGAAUA UAUGCUAC | 1231 | GUAGCAUA CUGAUGAGGCCGUUAGGCCGAA AUUCUUGG | 10650 |
| 7097 | AAGAAUAUA UGCUACAG | 1232 | CUGUAGCA CUGAUGAGGCCGUUAGGCCGAA AUAUUCUU | 10651 |
| 7102 | UAUAUGCUA CAGAUAUA | 1233 | UAUAUCUG CUGAUGAGGCCGUUAGGCCGAA AGCAUAUA | 10652 |
| 7108 | CUACAGAUA UAAGACAG | 1234 | CUGUCUUA CUGAUGAGGCCGUUAGGCCGAA AUCUGUAG | 10653 |
| 7110 | ACAGAUAUA AGACAGAC | 1235 | GUCUGUCU CUGAUGAGGCCGUUAGGCCGAA AUAUCUGU | 10654 |
| 7124 | GACAUGGUU UGGUCCUA | 1236 | UAGGACCA CUGAUGAGGCCGUUAGGCCGAA ACCAUGUC | 10655 |
| 7125 | ACAUGGUUU GGUCCUAU | 1237 | AUAGGACC CUGAUGAGGCCGUUAGGCCGAA AACCAUGU | 10656 |
| 7129 | GGUUUGGUC CUAUAUUU | 1238 | AAAUAUAG CUGAUGAGGCCGUUAGGCCGAA ACCAAACC | 10657 |
| 7132 | UUGGUCCUA UAUUUCUA | 1239 | UAGAAAUA CUGAUGAGGCCGUUAGGCCGAA AGGACCAA | 10658 |
| 7134 | UGUCCUAGA UUUCUAGU | 1240 | ACUAGAAA CUGAUGAGGCCGUUAGGCCGAA AUAGGACC | 10659 |
| 7136 | UCCUAUAUU UCUAGUCA | 1241 | UGACUAGA CUGAUGAGGCCGUUAGGCCGAA AUAUAGGA | 10660 |
| 7137 | CCUAUAUUU CUAGUCAU | 1242 | AUGACUAG CUGAUGAGGCCGUUAGGCCGAA AAUAUAGG | 10661 |
| 7138 | CUAUAUUUC UAGUCAUG | 1243 | CAUGACUA CUGAUGAGGCCGUUAGGCCGAA AAAUAUAG | 10662 |
| 7140 | AUAUUUCUA GUCAUGAU | 1244 | AUCAUGAC CUGAUGAGGCCGUUAGGCCGAA AGAAAUAU | 10663 |
| 7143 | UUUCUAGUC AUGAUGAA | 1245 | GUCAUCAG CUGAUGAGGCCGUUAGGCCGAA ACUAGAAA | 10664 |
| 7155 | AUGAAUGUA UUUUGUAU | 1246 | AUACAAAA CUGAUGAGGCCGUUAGGCCGAA ACAUUCAU | 10665 |
| 7157 | GAAUGUAUU UUGUAUAC | 1247 | GUAUACAA CUGAUGAGGCCGUUAGGCCGAA AUACAUUC | 10666 |
| 7158 | AAUGUAUUU UGUAUACC | 1248 | GGUAUACA CUGAUGAGGCCGUUAGGCCGAA AAUACAUU | 10667 |
| 7159 | AUGUAUUUU GUAUACCA | 1249 | UGGUAUAC CUGAUGAGGCCGUUAGGCCGAA AAAUACAU | 10668 |
| 7162 | UAUUUUGUA UACCAUCU | 1250 | AGAUGGUA CUGAUGAGGCCGUUAGGCCGAA ACAAAAUA | 10669 |
| 7164 | UUUUGUAUA CCAUCUUC | 1251 | GAAGAUGG CUGAUGAGGCCGUUAGGCCGAA AUACAAAA | 10670 |
| 7169 | UAUACCAUC UUCAUAUA | 1252 | UAUAUGAA CUGAUGAGGCCGUUAGGCCGAA AUGGUAUA | 10671 |
| 7171 | UACCAUCUU CAUAUAAU | 1253 | AUUAUAUG CUGAUGAGGCCGUUAGGCCGAA AGAUGGUA | 10672 |
| 7172 | ACCAUCUUC AUAUAAUA | 1254 | UAUUAUAU CUGAUGAGGCCGUUAGGCCGAA AAGAUGGU | 10673 |
| 7175 | AUCUUCAUA UAAUAUAC | 1255 | GUAUAUUA CUGAUGAGGCCGUUAGGCCGAA AUGAAGAU | 10674 |
| 7177 | CUUCAUAUA AUAUACUU | 1256 | AAGUAUAU CUGAUGAGGCCGUUAGGCCGAA AUAUGAAG | 10675 |
| 7180 | CAUAUAAUA UACUUAAA | 1257 | UUUAAGUA CUGAUGAGGCCGUUAGGCCGAA AUUAUAUG | 10676 |
| 7182 | UAUAAUAUA CUUAAAAA | 1258 | UUUUUAAG CUGAUGAGGCCGUUAGGCCGAA AUAUUAUA | 10677 |
| 7185 | AAUAUACUU AAAAAUAU | 1259 | AUAUUUUU CUGAUGAGGCCGUUAGGCCGAA AGUAUAUU | 10678 |
| 7186 | AUAUACUUA AAAAUAUU | 1260 | AAUAUUUU CUGAUGAGGCCGUUAGGCCGAA AAGUAUAU | 10679 |
| 7192 | UUAAAAAUA UUUCUUAA | 1261 | UUAAGAAA CUGAUGAGGCCGUUAGGCCGAA AUUUUUAA | 10680 |
| 7194 | AAAAAUAUU UCUUAAUU | 1262 | AAUUAAGA CUGAUGAGGCCGUUAGGCCGAA AUAUUUUU | 10681 |
| 7195 | AAAAUAUUU CUUAAUUG | 1263 | CAAUUAAG CUGAUGAGGCCGUUAGGCCGAA AAUAUUUU | 10682 |
| 7196 | AAAUAUUUC UUAAUUGG | 1264 | CCAAUUAA CUGAUGAGGCCGUUAGGCCGAA AAAUAUUU | 10683 |
| 7198 | AUAUUUCUU AAUUGGGA | 1265 | UCCCAAUU CUGAUGAGGCCGUUAGGCCGAA AGAAAUAU | 10684 |
| 7199 | UAUUUCUUA AUUGGGAU | 1266 | AUCCCAAU CUGAUGAGGCCGUUAGGCCGAA AAGAAAUA | 10685 |
| 7202 | UUCUUAAUU GGGAUUUG | 1267 | CAAAUCCC CUGAUGAGGCCGUUAGGCCGAA AUUAAGAA | 10686 |
| 7208 | AUUGGGAUU UGUAAUCG | 1268 | CGAUUACA CUGAUGAGGCCGUUAGGCCGAA AUCCCAAU | 10687 |
| 7209 | UUGGGAUUU GUAAUCGU | 1269 | ACGAUUAC CUGAUGAGGCCGUUAGGCCGAA AAUCCCAA | 10688 |
| 7212 | GGAUUUGUA AUCGUACC | 1270 | GGUACGAU CUGAUGAGGCCGUUAGGCCGAA ACAAAUCC | 10689 |
| 7215 | UUUGUAAUC GUACCAAC | 1271 | GUUGGUAC CUGAUGAGGCCGUUAGGCCGAA AUUACAAA | 10690 |
| 7218 | GUAAUCGUA CCAACUUA | 1272 | UAAGUUGG CUGAUGAGGCCGUUAGGCCGAA ACGAUUAC | 10691 |
| 7225 | UACCAACUU AAUUGAUA | 1273 | UAUCAAUU CUGAUGAGGCCGUUAGGCCGAA AGUUGGUA | 10692 |
| 7226 | ACCAACUUA AUUGAUAA | 1274 | UUAUCAAU CUGAUGAGGCCGUUAGGCCGAA AAGUUGGU | 10693 |
| 7229 | AACUUAAUU GAUAAACU | 1275 | AGUUUAUC CUGAUGAGGCCGUUAGGCCGAA AUUAAGUU | 10694 |
| 7233 | UAAUUGAUA AACUUGGC | 1276 | GCCAAGUU CUGAUGAGGCCGUUAGGCCGAA AUCAAUUA | 10695 |
| 7238 | GAUAAACUU GGCAACUG | 1277 | CAGUUGCC CUGAUGAGGCCGUUAGGCCGAA AGUUUAUC | 10696 |
| 7249 | CAACUGCUU UUAUGUUC | 1278 | GAACAUAA CUGAUGAGGCCGUUAGGCCGAA AGCAGUUG | 10697 |
| 7250 | AACUGCUUU UAUGUUCU | 1279 | AGAACAUA CUGAUGAGGCCGUUAGGCCGAA AAGCAGUU | 10698 |
| 7251 | ACUGCUUUU AUGUUCUG | 1280 | CAGAACAU CUGAUGAGGCCGUUAGGCCGAA AAAGCAGU | 10699 |
| 7252 | CUGCUUUUA UGUUCUGU | 1281 | ACAGAACA CUGAUGAGGCCGUUAGGCCGAA AAAAGCAG | 10700 |
| 7256 | UUUUAUGUU CUGUCUCC | 1282 | GGAGACAG CUGAUGAGGCCGUUAGGCCGAA ACAUAAAA | 10701 |
| 7257 | UUUAUGUUC UGUCUCCU | 1283 | AGGAGACA CUGAUGAGGCCGUUAGGCCGAA AACAUAAA | 10702 |
| 7261 | UGUUCUGUC UCCUUCCA | 1284 | UGGAAGGA CUGAUGAGGCCGUUAGGCCGAA ACAGAACA | 10703 |
| 7263 | UUCUGUCUC CUUCCAUA | 1285 | UAUGGAAG CUGAUGAGGCCGUUAGGCCGAA AGACAGAA | 10704 |
| 7266 | UGUCUCCUU CCAUAAAU | 1286 | AUUUAUGG CUGAUGAGGCCGUUAGGCCGAA AGGAGACA | 10705 |
| 7267 | GUCUCCUUC CAUAAAUU | 1287 | AAUUUAUG CUGAUGAGGCCGUUAGGCCGAA AAGGAGAC | 10706 |
| 7271 | CCLUUCAUA AAUUUUUC | 1288 | GAAAAAUU CUGAUGAGGCCGUUAGGCCGAA AUGGAAGG | 10707 |
| 7275 | CCAUAAAUU UUUCAAAA | 1289 | UUUUGAAA CUGAUGAGGCCGUUAGGCCGAA AUUUAUGG | 10708 |
| 7276 | CAUAAAUUU UUCAAAAU | 1290 | AUUUUGAA CUGAUGAGGCCGUUAGGCCGAA AAUUUAUG | 10709 |
| 7277 | AUAAAUUUU UCAAAAUA | 1291 | UAUUUUGA CUGAUGAGGCCGUUAGGCCGAA AAAUUUAU | 10710 |
| 7278 | UAAAUUUUU CAAAAUAC | 1292 | GUAUUUUG CUGAUGAGGCCGUUAGGCCGAA AAAAUUUA | 10711 |
| 7279 | AAAUUUUUC AAAAUACU | 1293 | AGUAUUUU CUGAUGAGGCCGUUAGGCCGAA AAAAAUUU | 10712 |
| 7285 | UUCAAAAUA CUAAUUCA | 1294 | UGAAUUAG CUGAUGAGGCCGUUAGGCCGAA AUUUUGAA | 10713 |
| 7288 | AAAAUACUA AUUCAACA | 1295 | UGUUGAAU CUGAUGAGGCCGUUAGGCCGAA AGUAUUUU | 10714 |
| 7291 | AUACUAAUU CAACAAAG | 1296 | CUUUGUUG CUGAUGAGGCCGUUAGGCCGAA AUUAGUAU | 10715 |
| 7292 | UACUAAUUC AACAAAGA | 1297 | UCUUUGUU CUGAUGAGGCCGUUAGGCCGAA AAUUAGUA | 10716 |
| 7308 | AAAAAGCUC UUUUUUUU | 1298 | AAAAAAAA CUGAUGAGGCCGUUAGGCCGAA AGCUUUUU | 10717 |
| 7310 | AAAGCUCUU UUUUUUCC | 1299 | GGAAAAAA CUGAUGAGGCCGUUAGGCCGAA AGAGCUUU | 10718 |
| 7311 | AAGCUCUUU UUUUUCCU | 1300 | AGGAAAAA CUGAUGAGGCCGUUAGGCCGAA AAGAGCUU | 10719 |
| 7312 | AGCUCUUUU UUUUCCUA | 1301 | UAGGAAAA CUGAUGAGGCCGUUAGGCCGAA AAAGAGCU | 10720 |
| 7313 | GCUCUUTUU UUUCCUAA | 1302 | UUAGGAAA CUGAUGAGGCCGUUAGGCCGAA AAAAGAGC | 10721 |
| 7314 | CUCUUUUUU UUCCUAAA | 1303 | UUUAGGAA CUGAUGAGGCCGUUAGGCCGAA AAAAAGAG | 10722 |
| 7315 | UCUTUUUUU UCCUAAAA | 1304 | UUUUAGGA CUGAUGAGGCCGUUAGGCCGAA AAAAAAGA | 10723 |
| 7316 | CUUUUUUUU CCUAAAAU | 1305 | AUUUUAGG CUGAUGAGGCCGUUAGGCCGAA AAAAAAAG | 10724 |
| 7317 | UUUUUUUUC CUAAAAUA | 1306 | UAUUUUAG CUGAUGAGGCCGUUAGGCCGAA AAAAAAAA | 10725 |
| 7320 | UUUUUCCUA AAAUAAAC | 1307 | GUUUAUUU CUGAUGAGGCCGUUAGGCCGAA AGGAAAAA | 10726 |
| 7325 | CCUAAAAUA AACUCAAA | 1308 | UUUGAGUU CUGAUGAGGCCGUUAGGCCGAA AUUUUAGG | 10727 |
| 7330 | AAUAAACUC AAAUUUAU | 1309 | AUAAAUUU CUGAUGAGGCCGUUAGGCCGAA AGUUUAUU | 10728 |
| 7335 | ACUCAAAUU UAUCCUUG | 1310 | CAAGGAUA CUGAUGAGGCCGUUAGGCCGAA AUUUGAGU | 10729 |
| 7336 | CUCAAAUUU AUCCUUGU | 1311 | ACAAGGAU CUGAUGAGGCCGUUAGGCCGAA AAUUUGAG | 10730 |
| 7337 | UCAAAUUUA UCCUUGUU | 1312 | AACAAGGA CUGAUGAGGCCGUUAGGCCGAA AAAUUUGA | 10731 |
| 7339 | AAAUUUAUC CUUGUUUA | 1313 | UAAACAAG CUGAUGAGGCCGUUAGGCCGAA AUAAAUUU | 10732 |
| 7342 | UUUAUCCUU GUUUAGAG | 1314 | CUCUAAAC CUGAUGAGGCCGUUAGGCCGAA AGGAUAAA | 10733 |
| 7345 | AUCCUUGUU UAGAGCAG | 1315 | CUGCUCUA CUGAUGAGGCCGUUAGGCCGAA ACAAGGAU | 10734 |
| 7346 | UCCUUGUUU AGAGCAGA | 1316 | UCUGCUCU CUGAUGAGGCCGUUAGGCCGAA AACAAGGA | 10735 |
| 7347 | CCUUGUUUA GAGCAGAG | 1317 | CUCUGCUC CUGAUGAGGCCGUUAGGCCGAA AAACAAGG | 10736 |
| 7362 | AGAAAAAUU AAGAAAAA | 1318 | UUUUUCUU CUGAUGAGGCCGUUAGGCCGAA AUUUUUCU | 10737 |
| 7363 | GAAAAAUUA AGAAAAAC | 1319 | GUUUUUCU CUGAUGAGGCCGUUAGGCCGAA AAUUUUUC | 10738 |
| 7373 | GAAAAACUU UGAAAUGG | 1320 | CCAUUUCA CUGAUGAGGCCGUUAGGCCGAA AGUUUUUC | 10739 |
| 7374 | AAAAACUUU GAAAUGGU | 1321 | ACCAUUUC CUGAUGAGGCCGUUAGGCCGAA AAGUUUUU | 10740 |
| 7383 | GAAAUGGUC UCAAAAAA | 1322 | UUUUUUGA CUGAUGAGGCCGUUAGGCCGAA ACCAUUUC | 10741 |
| 7385 | AAUGGUCUC AAAAAAUU | 1323 | AAUUUUUU CUGAUGAGGCCGUUAGGCCGAA AGACCAUU | 10742 |
| 7393 | CAAAAAAUU GCUAAAUA | 1324 | UAUUUAGC CUGAUGAGGCCGUUAGGCCGAA AUUUUUUG | 10743 |
| 7397 | AAAUUGCUA AAUAUUUU | 1325 | AAAAUAUU CUGAUGAGGCCGUUAGGCCGAA AGCAAUUU | 10744 |
| 7401 | UGCUAAAUA UUUUCAAU | 1326 | AUUGAAAA CUGAUGAGGCCGUUAGGCCGAA AUUUAGCA | 10745 |
| 7403 | CUAAAUAUU UUCAAUGG | 1327 | CCAUUGAA CUGAUGAGGCCGUUAGGCCGAA AUAUUUAG | 10746 |
| 7404 | UAAAUAUUU UCAAUGGA | 1328 | UCCAUUGA CUGAUGAGGCCGUUAGGCCGAA AAUAUUUA | 10747 |
| 7405 | AAAUAUUUU CAAUGGAA | 1329 | UUCCAUUG CUGAUGAGGCCGUUAGGCCGAA AAAUAUUU | 10748 |
| 7406 | AAUAUUUUC AAUGGAAA | 1330 | UUUCCAUU CUGAUGAGGCCGUUAGGCCGAA AAAAUAUU | 10749 |
| 7418 | GGAAAACUA AAUGUUAG | 1331 | CUAACAUU CUGAUGAGGCCGUUAGGCCGAA AGUUUUCC | 10750 |
| 7424 | CUAAAUGUU AGUUUAGC | 1332 | GCUAAACU CUGAUGAGGCCGUUAGGCCGAA ACAUUUAG | 10751 |
| 7425 | UAAAUGUUA GUUUAGCU | 1333 | AGCUAAAC CUGAUGAGGCCGUUAGGCCGAA AACAUUUA | 10752 |
| 7428 | AUGUUAGUU UAGCUGAU | 1334 | AUCAGCUA CUGAUGAGGCCGUUAGGCCGAA ACUAACAU | 10753 |
| 7429 | UGUUAGUUU AGCUGAUU | 1335 | AAUCAGCU CUGAUGAGGCCGUUAGGCCGAA AACUAACA | 10754 |
| 7430 | GUUAGUUUA GCUGAUUG | 1336 | CAAUCAGC CUGAUGAGGCCGUUAGGCCGAA AAACUAAC | 10755 |
| 7437 | UAGCUGAUU GUAUGGGG | 1337 | CCCCAUAC CUGAUGAGGCCGUUAGGCCGAA AUCAGCUA | 10756 |
| 7440 | CUGAUUGUA UGGGGUUU | 1338 | AAACCCCA CUGAUGAGGCCGUUAGGCCGAA ACAAUCAG | 10757 |
| 7447 | UAUGGGGUU UUCGAACC | 1339 | GGUUCGAA CUGAUGAGGCCGUUAGGCCGAA ACCCCAUA | 10758 |
| 7448 | AUGGGGUUU UCGAACCU | 1340 | AGGUUCGA CUGAUGAGGCCGUUAGGCCGAA AACCCCAU | 10759 |
| 7449 | UGGGGUUUU CGAACCUU | 1341 | AAGGUUCG CUGAUGAGGCCGUUAGGCCGAA AAACCCCA | 10760 |
| 7450 | GGGGUUUUC GAACCUUU | 1342 | AAAGGUUC CUGAUGAGGCCGUUAGGCCGAA AAAACCCC | 10761 |
| 7457 | UCGAACCUU UCACUUUU | 1343 | AAAAGUGA CUGAUGAGGCCGUUAGGCCGAA AGGUUCGA | 10762 |
| 7458 | CGAACCUUU CACUUUUU | 1344 | AAAAAGUG CUGAUGAGGCCGUUAGGCCGAA AAGGUUCG | 10763 |
| 7459 | GAACCUUUC ACUUUUUG | 1345 | CAAAAAGU CUGAUGAGGCCGUUAGGCCGAA AAAGGUUC | 10764 |
| 7463 | CUUUCACUU UUUGUUUG | 1346 | CAAACAAA CUGAUGAGGCCGUUAGGCCGAA AGUGAAAG | 10765 |
| 7464 | UUUCACUUU UUGUUUGU | 1347 | ACAAACAA CUGAUGAGGCCGUUAGGCCGAA AAGUGAAA | 10766 |
| 7465 | UUCACUUUU UGUUUGUU | 1348 | AACAAACA CUGAUGAGGCCGUUAGGCCGAA AAAGUGAA | 10767 |
| 7466 | UCACUUUUU GUUUGUUU | 1349 | AAACAAAC CUGAUGAGGCCGUUAGGCCGAA AAAAGUGA | 10768 |
| 7469 | CUUUUUGUU UGUUUUAC | 1350 | GUAAAACA CUGAUGAGGCCGUUAGGCCGAA ACAAAAAG | 10769 |
| 7470 | UUUUUGUUU GUUUUACC | 1351 | GGUAAAAC CUGAUGAGGCCGUUAGGCCGAA AACAAAAA | 10770 |
| 7473 | UUGUUUGUU UUACCUAU | 1352 | AUAGGUAA CUGAUGAGGCCGUUAGGCCGAA ACAAACAA | 10771 |
| 7474 | UGUUUGUUU UACCUAUU | 1353 | AAUAGGUA CUGAUGAGGCCGUUAGGCCGAA AACAAACA | 10772 |
| 7475 | UUUUGUUUU ACCUAUUU | 1354 | AAAUAGGU CUGAUGAGGCCGUUAGGCCGAA AAACAAAC | 10773 |
| 7476 | UUUGUUUUA CCUAUUUC | 1355 | GAAAUAGG CUGAUGAGGCCGUUAGGCCGAA AAAACAAA | 10774 |
| 7480 | UUUUACCUA UUUCACAA | 1356 | UUGUGAAA CUGAUGAGGCCGUUAGGCCGAA AGGUAAAA | 10775 |
| 7482 | UUACCUAUU UCACAACU | 1357 | AGUUGUGA CUGAUGAGGCCGUUAGGCCGAA AUAGGUAA | 10776 |
| 7483 | UACCUAUUU CACAACUG | 1358 | CAGUUGUG CUGAUGAGGCCGUUAGGCCGAA AAUAGGUA | 10777 |
| 7484 | ACCUAUUUC ACAACUGU | 1359 | ACAGUUGU CUGAUGAGGCCGUUAGGCCGAA AAAUAGGU | 10778 |
| 7495 | AACUGUGUA AAUUGCCA | 1360 | UGGCAAUU CUGAUGAGGCCGUUAGGCCGAA ACACAGUU | 10779 |
| 7499 | GUGUAAAUU GCCAAUAA | 1361 | UUAUUGGC CUGAUGAGGCCGUUAGGCCGAA AUUUACAC | 10780 |
| 7506 | UUGCCAAUA AUUCCUGU | 1362 | ACAGGAAU CUGAUGAGGCCGUUAGGCCGAA AUUGGCAA | 10781 |
| 7509 | CCAAUAUUU CCUGUCCA | 1363 | UGGACAGG CUGAUGAGGCCGUUAGGCCGAA AUUAUUGG | 10782 |
| 7510 | CAAUAAUUC CUGUCCAU | 1364 | AUGGACAG CUGAUGAGGCCGUUAGGCCGAA AAUUAUUG | 10783 |
| 7515 | AUUCCUGUC CAUGAAAA | 1365 | UUUUCAUG CUGAUGAGGCCGUUAGGCCGAA ACAGGAAU | 10784 |
| 7531 | AUGCAAAUU AUCCAGUG | 1366 | CACUGGAU CUGAUGAGGCCGUUAGGCCGAA AUUUGCAU | 10785 |
| 7532 | UGCAAAUUA UCCAGUGU | 1367 | ACACUGGA CUGAUGAGGCCGUUAGGCCGAA AAUUUGCA | 10786 |
| 7534 | CAAAUUAUC CAGUGUAG | 1368 | CUACACUG CUGAUGAGGCCGUUAGGCCGAA AUAAUUUG | 10787 |
| 7541 | UCCAGUGUA GAUAUAUU | 1369 | AAUAUAUC CUGAUGAGGCCGUUAGGCCGAA ACACUGGA | 10788 |
| 7545 | GUGUAGAUA UAUUUGAC | 1370 | GUCAAAUA CUGAUGAGGCCGUUAGGCCGAA AUCUACAC | 10789 |
| 7547 | GUAGAUAUA UUUGACCA | 1371 | UGGUCAAA CUGAUGAGGCCGUUAGGCCGAA AUAUCUAC | 10790 |
| 7549 | AGAUAUAUU UGACCAUC | 1372 | GAUGGUCA CUGAUGAGGCCGUUAGGCCGAA AUAUAUCU | 10791 |
| 7550 | GAUAUAUUU GACCAUCA | 1373 | UGAUGGUC CUGAUGAGGCCGUUAGGCCGAA AAUAUAUC | 10792 |
| 7557 | UUGACCAUC ACCCUAUG | 1374 | CAUAGGGU CUGAUGAGGCCGUUAGGCCGAA AUGGUCAA | 10793 |
| 7563 | AUCACCCUA UGGAUAUU | 1375 | AAUAUCCA CUGAUGAGGCCGUUAGGCCGAA AGGGUGAU | 10794 |
| 7569 | CUAUGGAUA UUGOCUAG | 1376 | CUAGCCAA CUGAUGAGGCCGUUAGGCCGAA AUCCAUAG | 10795 |
| 7571 | AUGGAUAUU GGCUAGUU | 1377 | AACUAGCC CUGAUGAGGCCGUUAGGCCGAA AUAUCCAU | 10796 |
| 7576 | UAUUGGCUA GUUUUGCC | 1378 | GGCAAAAC CUGAUGAGGCCGUUAGGCCGAA AGCCAAUA | 10797 |
| 7579 | UGGCUAGUU UUGCCUUU | 1379 | AAAGGCAA CUGAUGAGGCCGUUAGGCCGAA ACUAGCCA | 10798 |
| 7580 | GGCUAGUUU UGCCUUUA | 1380 | UAAAGGCA CUGAUGAGGCCGUUAGGCCGAA AACUAGCC | 10799 |
| 7581 | GCUAGUUUU GCCUUUAU | 1381 | AUAAAGGC CUGAUGAGGCCGUUAGGCCGAA AAACUAGC | 10800 |
| 7586 | UUUUGCCUU UAUUAAGC | 1382 | GCUUAAUA CUGAUGAGGCCGUUAGGCCGAA AGGCAAAA | 10801 |
| 7587 | UUUGCCUUU AUUAAGCA | 1383 | UGCUUAAU CUGAUGAGGCCGUUAGGCCGAA AAGGCAAA | 10802 |
| 7588 | UUGCCUUUA UUAAGCAA | 1384 | UUGCUUAA CUGAUGAGGCCGUUAGGCCGAA AAAGGCAA | 10803 |
| 7590 | GCCUUUAUU AAGCAAAU | 1385 | AUUUGCUU CUGAUGAGGCCGUUAGGCCGAA AUAAAGGC | 10804 |
| 7591 | CCUUUAUUA AGCAAAUU | 1386 | AAUUUGCU CUGAUGAGGCCGUUAGGCCGAA AAUAAAGG | 10805 |
| 7599 | AAGCAAAUU CAUUUCAG | 1387 | CUGAAAUG CUGAUGAGGCCGUUAGGCCGAA AUUUGCUU | 10806 |
| 7600 | AGCAAAUUC AUUUCAGC | 1388 | GCUGAAAU CUGAUGAGGCCGUUAGGCCGAA AAUUUGCU | 10807 |
| 7603 | AAAUUCAUU UCAGCCUG | 1389 | CAGGCUGA CUGAUGAGGCCGUUAGGCCGAA AUGAAUUU | 10808 |
| 7604 | AAUUCAUUU CAGCCUGA | 1390 | UCAGGCUG CUGAUGAGGCCGUUAGGCCGAA AAUGAAUU | 10809 |
| 7605 | AUUCAUUUC AGCCUGAA | 1391 | UUCAGGCU CUGAUGAGGCCGUUAGGCCGAA AAAUGAAU | 10810 |
| 7617 | CUGAAUGUC UGCCUAUA | 1392 | UAUAGGCA CUGAUGAGGCCGUUAGGCCGAA ACAUUCAG | 10811 |
| 7623 | GUCUGCCUA UAUAUUCU | 1393 | AGAAUAUA CUGAUGAGGCCGUUAGGCCGAA AGGCAGAC | 10812 |
| 7625 | CUGCCUAUA UAUUCUCU | 1394 | AGAGAAUA CUGAUGAGGCCGUUAGGCCGAA AUAGGCAG | 10813 |
| 7627 | GCCUAUAUA UUCUCUGC | 1395 | GCAGAGAA CUGAUGAGGCCGUUAGGCCGAA AUAUAGGC | 10814 |
| 7629 | CUAUAUAUU CUCUGCUC | 1396 | GAGCAGAG CUGAUGAGGCCGUUAGGCCGAA AUAUAUAG | 10815 |
| 7630 | UAUAUAUUC UCUGCUCU | 1397 | AGAGCAGA CUGAUGAGGCCGUUAGGCCGAA AAUAUAUA | 10816 |
| 7632 | UAUAUUCUC UGCUCUUU | 1398 | AAAGAGCA CUGAUGAGGCCGUUAGGCCGAA AGAAUAUA | 10817 |
| 7637 | UCUCUGCUC UUUGUAUU | 1399 | AAUACAAA CUGAUGAGGCCGUUAGGCCGAA AGCAGAGA | 10818 |
| 7639 | UCUGCUCUU UGUAUUCU | 1400 | AGAAUACA CUGAUGAGGCCGUUAGGCCGAA AGAGCAGA | 10819 |
| 7640 | CUGCUCUUU GUAUUCUC | 1401 | GAGAAUAC CUGAUGAGGCCGUUAGGCCGAA AAGAGCAG | 10820 |
| 7643 | CUCUUUGUA UUCUCCUU | 1402 | AAGGAGAA CUGAUGAGGCCGUUAGGCCGAA ACAAAGAG | 10821 |
| 7645 | CUUUGUAUU CUCCUUUG | 1403 | CAAAGGAG CUGAUGAGGCCGUUAGGCCGAA AUACAAAG | 10822 |
| 7646 | UUUGUAUUC UCCUUUGA | 1404 | UCAAAGGA CUGAUGAGGCCGUUAGGCCGAA AAUACAAA | 10823 |
| 7648 | UGUAUUCUC CUUUGAAC | 1405 | GUUCAAAG CUGAUGAGGCCGUUAGGCCGAA AGAAUACA | 10824 |
| 7651 | AUUCUCCUU UGAACCCG | 1406 | CGGGUUCA CUGAUGAGGCCGUUAGGCCGAA AGGAGAAU | 10825 |
| 7652 | UUCUCCUUU GAACCCGU | 1407 | ACGGGUUC CUGAUGAGGCCGUUAGGCCGAA AAGGAGAA | 10826 |
| 7661 | GAACCCGUU AAAACAUC | 1408 | GAUGUUUU CUGAUGAGGCCGUUAGGCCGAA ACGGGUUC | 10827 |
| 7662 | AACCCGUUA AAACAUCC | 1409 | GGAUGUUU CUGAUGAGGCCGUUAGGCCGAA AACGGGUU | 10828 |
| 7669 | UAAAACAUC CUGUGGCA | 1410 | UGCCACAG CUGAUGAGGCCGUUAGGCCGAA AUGUUUUA | 10829 |

Where “X” represents stem II region of a HH ribozyme (Hertel et al., 1992 Nucleic Acids Res. 20 3252). The length of stem II may be 2 base-pairs.
Underlined region can be any X sequence or linker, as described herein.

[0342] TABLE III

Human fltl VEGF Receptor-Hairpin Ribozyme and Substrate sequence

| | | | | |
|---|---|---|---|---|
| | | Seq | | Seq |
| | | ID | | ID |
| Pos | Substrate | No | Hp Ribozyme Sequence | No |

| | | | | |
|---|---|---|---|---|
| 16 | CCUCUCG GCU CCUCCCCG | 1411 | CGGGGAGG AGAA GAGAGG ACCAGAGAAACACACGUUGUGGUACAUUACCUGGUA | 10830 |
| 39 | GGCGGCG GCU CGGAGCGC | 1412 | CCGCUCCG AGAA GCCGCC ACCAGAGAAACACACGUUGUGGUACAUUACCUGGUA | 10831 |
| 180 | GACGACG GAC UCUGGCGG | 1413 | CCCCCAGA AGAA GUCCUC ACCAGAGAAACACACGUUGUGGUACAUUACCUGGUA | 10832 |
| 190 | UCUGGCG GCC GGGUCGUU | 1414 | AACGACCC AGAA GCCAGA ACCAGAGAAACACACGUUGUGGUACAUUACCUGGUA | 10833 |
| 278 | GGGUCCU GCU GUGCGCGC | 1415 | GCGCGCAC AGAA GGACCC ACCAGAGAAACACACGUUGUGGUACAUUACCUGGUA | 10834 |
| 290 | GCGCGCU GCU CAGCUGUC | 1416 | GACAUCUG AGAA GCGCGC ACCAGAGAAACACACGUUGUGGUACAUUACCUGGUA | 10835 |
| 295 | CUCCUCA GCU GUCUGCUU | 1417 | AAGCAGAC AGAA GAGCAG ACCAGAGAAACACACGUUGUGGUACAUUACCUGGUA | 10836 |
| 298 | CUCAGCU GUC UGCUUCUC | 1418 | GAGAAGCA AGAA GCUGAG ACCAGAGAAACACACGUUGUGGUACAUUACCUGGUA | 10837 |
| 302 | GCUGUCU GCU UCUCACAG | 1419 | CUGUGAGA AGAA GACAGC ACCAGAGAAACACACGUUGUGGUACAUUACCUGGUA | 10838 |
| 420 | GGAAGCA GCC CAUAAAUG | 1420 | CAUUUAUG AGAA GCUUCC ACCAGAGAAACACACGUUGUGGUACAUUACCUGGUA | 10839 |
| 486 | UAAAUCU GCC UGUGGAAG | 1421 | CUUCCACA AGAA GAUUUA ACCAGAGAAACACACGUUGUGGUACAUUACCUGGUA | 10840 |
| 537 | GAACACA GCU CAAGCAAA | 1422 | UUUGCUUG AGAA GUGUUC ACCAGAGAAACACACGUUGUGGUACAUUACCUGGUA | 10841 |
| 565 | UUCUACA GCU GCAAAUAU | 1423 | AUAUUUGC AGAA GUAGAA ACCAGAGAAACACACGUUGUGGUACAUUACCUGGUA | 10842 |
| 721 | AUUCCCU CCC GGGUUACG | 1424 | CGUAACCC AGAA GGGAAU ACCAGAGAAACACACGUUGUGGUACAUUACCUGGUA | 10843 |
| 786 | GAUCCCU GAU GGAAAACG | 1425 | CGUUUUCC AGAA GGGAUC ACCAGAGAAACACACGUUGUGGUACAUUACCUGGUA | 10844 |
| 863 | GGCUUCU GAC CUGUGAAG | 1426 | CUUCACAG AGAA GAAGCC ACCAGAGAAACACACGUUGUGGUACAUUACCUGGUA | 10845 |
| 1056 | UUACCCU GAU GAAAAAAA | 1427 | UUUUUUUC AGAA GGGUAA ACCAGAGAAACACACGUUGUGGUACAUUACCUGGUA | 10846 |
| 1301 | GCAAGCG GUC UUACCGGC | 1428 | GCCGGUAA AGAA GCUUGC ACCAGAGAAACACACGUUGUGGUACAUUACCUGGUA | 10847 |
| 1310 | CUUACCG GCU CUCUAUGA | 1429 | UCAUAGAG AGAA GGUAAG ACCAGAGAAACACACGUUGUGGUACAUUACCUGGUA | 10848 |
| 1389 | GAAAUCU GCU CGCUAUUU | 1430 | AAAUAGCG AGAA GAUUUC ACCAGAGAAACACACGUUGUGGUACAUUACCUGGUA | 10849 |
| 1535 | AACCCCA GAU UUACGAAA | 1431 | UUUCGUAA AGAA GGGGUU ACCAGAGAAACACACGUUGUGGUACAUUACCUGGUA | 10850 |
| 1566 | GUUUCCA GAC CCGGCUCU | 1432 | AGAGCCGG AGAA GGAAAC ACCAGAGAAACACACGUUGUGGUACAUUACCUGGUA | 10851 |
| 1572 | AGACCCG GCU CUCUACCC | 1433 | GGGUAGAG AGAA GGGUCU ACCAGAGAAACACACGUUGUGGUACAUUACCUGGUA | 10852 |
| 1604 | AAAUCCU GAC UUGUACCG | 1434 | CGGUACAA AGAA GGAUUU ACCAGAGAAACACACGUUGUGGUACAUUACCUGGUA | 10853 |
| 1824 | UGUGGCU GAC UCUAGAAU | 1435 | AUUCUAGA AGAA GCCACA ACCAGAGAAACACACGUUGUGGUACAUUACCUGGUA | 10854 |
| 1908 | UAUCACA GAU GUGCCAAA | 1436 | UUUGGCAC AGAA GUGAUA ACCAGAGAAACACACGUUGUGGUACAUUACCUGGUA | 10855 |
| 1949 | AAAUGCC GAC GGAAGGAG | 1437 | CUCCUUCC AGAA GCAUUU ACCAGAGAAACACACGUUGUGGUACAUUACCUGGUA | 10856 |
| 1973 | UGAAACU GUC UUGCACAG | 1438 | CUGUGCAA AGAA GUUUCA ACCAGAGAAACACACGUUGUGGUACAUUACCUGGUA | 10857 |
| 2275 | AUCACCA GUU CCACCACU | 1439 | AGUGGUGG AGAA GCUGAU ACCAGAGAAACACACGUUGUGGUACAUUACCUGGUA | 10858 |
| 2321 | AGCCUCA GAU CACUUGGU | 1440 | ACCAAGUG AGAA GAGGCU ACCAGAGAAACACACGUUGUGGUACAUUACCUGGUA | 10859 |
| 2396 | GCACGCU GUU UAUUGAAA | 1441 | UUUCAAUA AGAA GCGUGC ACCAGAGAAACACACGUUGUGGUACAUUACCUGGUA | 10860 |
| 2490 | CCUCACU GUU CAAGGAAC | 1442 | GUUCCUUG AGAA GUGAGG ACCAGAGAAACACACGUUGUGGUACAUUACCUGGUA | 10861 |
| 2525 | UGGAGCU GAU CACUCUAA | 1443 | UUAGAGUG AGAA GCUCCA ACCAGAGAAACACACGUUGUGGUACAUUACCUGGUA | 10862 |
| 2625 | AAAGACU GAC UACCUAUC | 1444 | GAUAGGUA AGAA GUCUUU ACCAGAGAAACACACGUUGUGGUACAUUACCUGGUA | 10863 |
| 2652 | GGACCCA GAU GAAGUUCC | 1445 | GGAACUUC AGAA GGGUCC ACCAGAGAAACACACGUUGUGGUACAUUACCUGGUA | 10864 |
| 2684 | GUGAGCG GCU CCCUUAUG | 1446 | CAUAAGGG AGAA GCUCAC ACCAGAGAAACACACGUUGUGGUACAUUACCUGGUA | 10865 |
| 2816 | CGUGCCG GAC UGUGGCUG | 1447 | CAGCCACA AGAA GGCACG ACCAGAGAAACACACGUUGUGGUACAUUACCUGGUA | 10866 |
| 2873 | AAGCUCU GAU GACUGAGC | 1448 | GCUCAGUC AGAA GAGCUU ACCAGAGAAACACACGUUGUGGUACAUUACCUGGUA | 10867 |
| 2930 | UUAACCU GCU GGGAGCCU | 1449 | AGGCUCCC AGAA GGUUAA ACCAGAGAAACACACGUUGUGGUACAUUACCUGGUA | 10868 |
| 2963 | GGCCUCU GAU GGUGAUUG | 1450 | CAAUCACC AGAA GAGGCC ACCAGAGAAACACACGUUGUGGUACAUUACCUGGUA | 10869 |
| 3157 | AGCUCCG GCU UUCAGGAA | 1451 | UUCCUGAA AGAA GGAGCU ACCAGAGAAACACACGUUGUGGUACAUUACCUGGUA | 10870 |
| 3207 | GGAUUCU GAC GGUUUCUA | 1452 | UAGAAACC AGAA GAAUCC ACCAGAGAAACACACGUUGUGGUACAUUACCUGGUA | 10871 |
| 3211 | UCUGACG GUU UCUACAAG | 1453 | CUUGUAGA AGAA GUCAGA ACCAGAGAAACACACGUUGUGGUACAUUACCUGGUA | 10872 |
| 3245 | AAGAUCU GAU UUCUUACA | 1454 | UGUAAGAA AGAA GAUCUG ACCAGAGAAACACACGUUGUGGUACAUUACCUGGUA | 10873 |
| 3256 | UCUUACA GUU UUCAAGUG | 1455 | CACUUGAA AGAA GUAAGA ACCAGAGAAACACACGUUGUGGUACAUUACCUGGUA | 10874 |
| 3287 | AGUUCCU GUC UUCCAGAA | 1456 | UUCUGGAA AGAA GGAACU ACCAGAGAAACACACGUUGUGGUACAUUACCUGGUA | 10875 |
| 3402 | GAACCCC GAU UAUGUGAG | 1457 | CUCACAUA AGAA GGGUUC ACCAGAGAAACACACGUUGUGGUACAUUACCUGGUA | 10876 |
| 3580 | UUUUGCA GUC GCCUGAGG | 1458 | CCUCAGGC AGAA GCAAAA ACCAGAGAAACACACGUUGUGGUACAUUACCUGGUA | 10877 |
| 3641 | UCUAUCA GAU CAUGCUGG | 1459 | CCAGCAUG AGAA GAUAGA ACCAGAGAAACACACGUUGUGGUACAUUACCUGGUA | 10878 |
| 3655 | CUGGACU GCU GGCACAGA | 1460 | UCUGUGCC AGAA GUCCAG ACCAGAGAAACACACGUUGUGGUACAUUACCUGGUA | 10879 |
| 3810 | AACUCCU GCC UUCUCUGA | 1461 | UCAGAGAA AGAA GGAGUU ACCAGAGAAACACACGUUGUGGUACAUUACCUGGUA | 10880 |
| 3846 | UAUUUCA GCU CCGAAGUU | 1462 | AACUUCGG AGAA GAAAUA ACCAGAGAAACACACGUUGUGGUACAUUACCUGGUA | 10881 |
| 3873 | AAGCUCU GAU GAUGUCAG | 1463 | CUGACAUC AGAA GAGCUU ACCAGAGAAACACACGUUGUGGUACAUUACCUGGUA | 10882 |
| 3995 | GCACUCU GUU GGCCUCUC | 1464 | GAGAGGCC AGAA GAGUGC ACCAGAGAAACACACGUUGUGGUACAUUACCUGGUA | 10883 |
| 4100 | CGGGGCU GUC UGAUGUCA | 1465 | UGACAUCA AGAA GCCCCG ACCAGAGAAACACACGUUGUGGUACAUUACCUGGUA | 10884 |
| 4104 | GCUGUCU GAU GUCAGCAG | 1466 | CUGCUGAC AGAA GACAGC ACCAGAGAAACACACGUUGUGGUACAUUACCUGGUA | 10885 |
| 4120 | AGGCCCA GUU UCUGCCAU | 1467 | AUGGCAGA AGAA GGGCCU ACCAGAGAAACACACGUUGUGGUACAUUACCUGGUA | 10886 |
| 4135 | CAUUCCA GCU GUGGGCAC | 1468 | GUGCCCAC AGAA GGAAUG ACCAGAGAAACACACGUUGUGGUACAUUACCUGGUA | 10887 |
| 4210 | GCGUGCU GCU CCCCGCCC | 1469 | GGGCGGGG AGAA GCACGC ACCAGAGAAACACACGUUGUGGUACAUUACCUGGUA | 10888 |
| 4217 | GCUCCCC GCC CCCAGACU | 1470 | AGUCUGGG AGAA GGGAGC ACCAGAGAAACACACGUUGUGGUACAUUACCUGGUA | 10889 |
| 4224 | GCCCCCA GAC UACAACUC | 1471 | GAGUUGUA AGAA GGGGGC ACCAGAGAAACACACGUUGUGGUACAUUACCUGGUA | 10890 |
| 4382 | GGAGCCA GCU GCUUUUUG | 1472 | CAAAAAGC AGAA GGCUCC ACCAGAGAAACACACGUUGUGGUACAUUACCUGGUA | 10891 |
| 4385 | GCCAGCU GCU UUUUGUGA | 1473 | UCACAAAA AGAA GCUGGC ACCAGAGAAACACACGUUGUGGUACAUUACCUGGUA | 10892 |
| 4537 | CUUCCCU GCU CCAACCCC | 1474 | GGGGUUGG AGAA GGGAAG ACCAGAGAAACACACGUUGUGGUACAUUACCUGGUA | 10893 |
| 4573 | AGGACCA GUU UGAUUGAG | 1475 | CUCAAUCA AGAA GGUCCU ACCAGAGAAACACACGUUGUGGUACAUUACCUGGUA | 10894 |
| 4594 | CUGCACU GAU CACCCAAU | 1476 | AUUGGGUG AGAA GUGCAG ACCAGAGAAACACACGUUGUGGUACAUUACCUGGUA | 10895 |
| 4628 | UGGGCCA CCC CUGCAGCC | 1477 | GGCUGCAG AGAA GGCCCA ACCAGAGAAACACACGUUGUGGUACAUUACCUGGUA | 10896 |
| 4636 | CCCUGCA GCC CAAAACCC | 1478 | GGGUUUUG ACAA GCAGGG ACCAGACAAACACACGUUGUGGUACAUUACCUGGUA | 10897 |
| 4866 | CUUCCCA GCU CUGACCCU | 1479 | ACGGUCAG AGAA GGGAAG ACCACAGAAACACACQUUGUGGUACAUUACCUGGUA | 10898 |
| 4871 | CACCUCU CAC CCUUCUAC | 1480 | GUACAAGG AGAA GAGCUG ACCAGAGAAACACACGUUGUGGUACAUUACCUGGUA | 10899 |
| 4905 | AGGACCA GAU GGACAGCG | 1481 | CGCUGUCC AGAA GCUCCU ACCAGAGAAACACACGUUGUGGUACAUUACCUGGUA | 10900 |
| 5233 | UUAUUCU GUU UUCCACAG | 1482 | CUGUGCAA AGAA GAAUAA ACCAGAGAAACACACGUUGUGGUACAUUACCUGGUA | 10901 |
| 5281 | AAAUGCA GUC CUGAGGAG | 1483 | CUCCUCAG AGAA GCAUUU ACCAGAGAAACACACGUUGUGGUACAUUACCUGGUA | 10902 |
| 5319 | GAGGGCU GAU GGAGGAAA | 1484 | UUUCCUCC AGAA GCCCUC ACCAGAGAAACACACGUUGUGGUACAUUACCUGGUA | 10903 |
| 5358 | AGACCCC GUC UCUAUACC | 1485 | GGUAUAGA AGAA GGGUCU ACCAGAGAAACACACGUUGUGGUACAUUACCUGGUA | 10904 |
| 5392 | CAACACA GUU GGGACCCA | 1486 | UGGGUCCC AGAA GUGUUG ACCAGAGAAACACACGUUGUGGUACAUUACCUGGUA | 10905 |
| 5563 | UUCUCCA GUU GGGACUCA | 1487 | UGAGUCCC AGAA GGAGAA ACCAGAGAAACACACGUUGUGGUACAUUACCUGGUA | 10906 |
| 5622 | UUCAACU GCU UUGAAACU | 1488 | AGUUUCAA AGAA GUUGAA ACCAGAGAAACACACGUUGUGGUACAUUACCUGGUA | 10907 |
| 5738 | UGGCUCU GUU UGAUGCUA | 1489 | UAGCAUCA AGAA GAGCCA ACCAGAGAAACACACGUUGUGGUACAUUACCUGGUA | 10908 |
| 5838 | UGGCUCU GUU UGAUGCUA | 1489 | UAGCAUCA AGAA GAGCCA ACCAGAGAAACACACGUUGUGGUACAUUACCUGGUA | 10908 |
| 5933 | GAUUGCU GCU UCUUGGGG | 1490 | CCCCAAGA AGAA GCAAUC ACCAGAGAAACACACGUUGUGGUACAUUACCUGGUA | 10909 |
| 6022 | UGCCUCU GUU CUUAUGUG | 1491 | CACAUAAG AGAA GAGGCA ACCAGAGAAACACACGUUGUGGUACAUUACCUGGUA | 10910 |
| 6120 | GGCAGCG GCU UCUGUGGA | 1492 | UCCACAAA AGAA GCUGCC ACCAGAGAAACACACGUUGUGGUACAUUACCUGGUA | 10911 |
| 6163 | UGGGACA GUC CUCUCCAC | 1493 | GUGGAGAG AGAA GUCCCA ACCAGAGAAACACACGUUGUGGUACAUUACCUGGUA | 10912 |
| 6270 | UGUGACA GCU GGCAAUUU | 1494 | AAAUUGCC AGAA GUCACA ACCAGAGAAACACACGUUGUGGUACAUUACCUGGUA | 10913 |
| 6412 | CUUAGCU GUU CAUGUCUU | 1495 | AAGACAUG AGAA GCUAAG ACCAGAGAAACACACGUUGUGGUACAUUACCUGGUA | 10914 |
| 6511 | UUACUCA GCU CCUUCAAA | 1496 | UUUGAAGG AGAA GAGUAA ACCAGAGAAACACACGUUGUGGUACAUUACCUGGUA | 10915 |
| 6778 | UGGAACA GUC UGGGUGGA | 1497 | UCCACCCA AGAA GUUCCA ACCAGAGAAACACACGUUGUGGUACAUUACCUGGUA | 10916 |
| 6826 | CUUGUCA GUC CAAGAAGU | 1498 | ACUUCUUG AGAA GACAAG ACCAGAGAAACACACGUUGUGGUACAUUACCUGGUA | 10917 |
| 7245 | GGCAACU GCU UUUAUGUU | 1499 | AACAUAAA AGAA GUUGCC ACCAGAGAAACACACGUUGUGGUACAUUACCUGGUA | 10918 |
| 7258 | AUGUUCU GUC UCCUUCCA | 1500 | UGGAAGGA AGAA GAACAU ACCAGAGAAACACACGUUGUGGUACAUUACCUGGUA | 10919 |
| 7433 | UUUAGCU GAU UGUAUGGG | 1501 | CCCAUACA AGAA GCUAAA ACCAGAGAAACACACGUUGUGGUACAUUACCUGGUA | 10920 |
| 7512 | AAUUCCU GUC CAUGAAAA | 1502 | UUUUCAUG AGAA GGAAUU ACCAGAGAAACACACGUUGUGGUACAUUACCUGGUA | 10921 |
| 7606 | CAUUUCA CCC UGAAUGUC | 1503 | GACAUUCA AGAA GAAAUG ACCAGAGAAACACACGUUGUGGUACAUUACCUGGUA | 10922 |
| 7618 | AAUGUCU CCC UAUAUAUU | 1504 | AAUAUAUA AGAA GACAUU ACCAGAGAAACACACGUUGUGGUACAUUACCUGGUA | 10923 |
| 7633 | AUUCUCU GCU CUUUGUAU | 1505 | AUACAAAG AGAA GAGAAU ACCAGAGAAACACACGUUGUGGUACAUUACCUGGUA | 10924 |

[0343] TABLE IV

Human KDR VEGF Receptor-Hammerhead Ribozyme and Substrate Sequence

| | | | | |
|---|---|---|---|---|
| | | Seq ID | | Seq ID |
| Pos | Substrate | No | HH Ribozyme Sequence | No |

| | | | | |
|---|---|---|---|---|
| 21 | CUGGCCGUC GCCCUGUG | 1506 | CACAGGGC CUGAUGAGGCCGUUAGGCCGAA ACGGCCAG | 10925 |
| 33 | CUGUGGCUC UGCGUGGA | 1507 | UCCACGCA CUGAUGAGGCCGUUAGGCCGAA AGCCACAG | 10926 |
| 56 | GGCCGCCUC UGUGGGUU | 1508 | AACCCACA CUGAUGAGGCCGUUAGGCCGAA AGGCGGCC | 10927 |
| 64 | CUGUGGGUU UGCCUAGU | 1509 | ACUAGGCA CUGAUGAGGCCGUUAGGCCGAA ACCCACAG | 10928 |
| 65 | UGUGGGUUU GCCUAGUG | 1510 | CACUAGGC CUGAUGAGGCCGUUAGGCCGAA AACCCACA | 10929 |
| 70 | GUUUGCCUA GUGUUUCU | 1511 | AGAAACAC CUGAUGAGGCCGUUAGGCCGAA AGGCAAAC | 10930 |
| 75 | CCUAGUGUU UCUCUUGA | 1512 | UCAAGAGA CUGAUGAGGCCGUUAGGCCGAA ACACUAGG | 10931 |
| 76 | CUAGUGUUU CUCUUGAU | 1513 | AUCAAGAG CUGAUGAGGCCGUUAGGCCGAA AACACUAG | 10932 |
| 77 | UAGUGUUUC UCUUGAUC | 1514 | GAUCAAGA CUGAUGAGGCCGUUAGGCCGAA AAACACUA | 10933 |
| 79 | GUGUUUCUC UUGAUCUG | 1515 | CAGAUCAA CUGAUGAGGCCGUUAGGCCGAA AGAAACAC | 10934 |
| 81 | GUUUCUCUU GAUCUGCC | 1516 | GGCAGAUC CUGAUGAGGCCGUUAGGCCGAA AGAGAAAC | 10935 |
| 85 | CUCUUGAUC UGCCCAGG | 1517 | CCUGGGCA CUGAUGAGGCCGUUAGGCCGAA AUCAAGAG | 10936 |
| 96 | CCCAGGCUC AGCAUACA | 1518 | UGUAUGCU CUGAUGAGGCCGUUAGGCCGAA AGCCUGGG | 10937 |
| 102 | CUCAGCAUA CAAAAAGA | 1519 | UCUUUUUG CUGAUGAGGCCGUUAGGCCGAA AUGCUGAG | 10938 |
| 114 | AAAGACAUA CUUACAAU | 1520 | AUUGUAAG CUGAUGAGGCCGUUAGGCCGAA AUGUCUUU | 10939 |
| 117 | GACAUACUU ACAAUUAA | 1521 | UUAAUUGU CUGAUGAGGCCGUUAGGCCGAA AGUAUGUC | 10940 |
| 118 | ACAUACUUA CAAUUAAG | 1522 | CUUAAUUG CUGAUGAGGCCGUUAGGCCGAA AAGUAUGU | 10941 |
| 123 | CUUACAAUU AAGGCUAA | 1523 | UUAGCCUU CUGAUGAGGCCGUUAGGCCGAA AUUGUAAG | 10942 |
| 124 | UUACAAUUA AGGCUAAU | 1524 | AUUAGCCU CUGAUGAGGCCGUUAGGCCGAA AAUUGUAA | 10943 |
| 130 | UUAAGGCUA AUACAACU | 1525 | AGUUGUAU CUGAUGAGGCCGUUAGGCCGAA AGCCUUAA | 10944 |
| 133 | AGGCUAAUA CAACUCUU | 1526 | AAGAGUUG CUGAUGAGGCCGUUAGGCCGAA AUUAGCCU | 10945 |
| 139 | AUACAACUC UUCAAAUU | 1527 | AAUUUGAA CUGAUGAGGCCGUUAGGCCGAA AGUUGUAU | 10946 |
| 141 | ACAACUCUU CAAAUUAC | 1528 | GUAAUUUG CUGAUGAGGCCGUUAGGCCGAA AGAGUUGU | 10947 |
| 142 | CAACUCUUC AAAUUACU | 1529 | AGUAAUUU CUGAUGAGGCCGUUAGGCCGAA AAGAGUUG | 10948 |
| 147 | CUUCAAAUU ACUUGCAG | 1530 | CUGCAAGU CUGAUGAGGCCGUUAGGCCGAA AUUUGAAG | 10949 |
| 148 | UUCAAAUUA CUUGCAGG | 1531 | CCUGCAAG CUGAUGAGGCCGUUAGGCCGAA AAUUUGAA | 10950 |
| 151 | AAAUUACUU GCAGGGGA | 1532 | UCCCCUGC CUGAUGAGGCCGUUAGGCCGAA AGUAAUUU | 10951 |
| 170 | GAGGGACUU GGACUGGC | 1533 | GCCAGUCC CUGAUGAGGCCGUUAGGCCGAA AGUCCCUC | 10952 |
| 180 | GACUGGCUU UGGCCCAA | 1534 | UUGGGCCA CUGAUGAGGCCGUUAGGCCGAA AGCCAGUC | 10953 |
| 181 | ACUGGCUUU GGCCCAAU | 1535 | AUUGGGCC CUGAUGAGGCCGUUAGGCCGAA AAGCCAGU | 10954 |
| 190 | GGCCCAAUA AUCAGAGU | 1536 | ACUCUGAU CUGAUGAGGCCGUUAGGCCGAA AUUGGGCC | 10955 |
| 193 | CCAAUAAUC AGAGUGGC | 1537 | GCCACUCU CUGAUGAGGCCGUUAGGCCGAA AUUAUUGG | 10956 |
| 243 | GAUGGCCUC UUCUGUAA | 1538 | UUACAGAA CUGAUGAGGCCGUUAGGCCGAA AGGCCAUC | 10957 |
| 245 | UGGCCUCUU CUGUAAGA | 1539 | UCUUACAG CUGAUGAGGCCGUUAGGCCGAA AGAGGCCA | 10958 |
| 246 | GGCCUCUUC UGUAAGAC | 1540 | GUCUUACA CUGAUGAGGCCGUUAGGCCGAA AAGAGGCC | 10959 |
| 250 | UCUUCUGUA AGACACUC | 1541 | GAGUGUCU CUGAUGAGGCCGUUAGGCCGAA ACAGAAGA | 10960 |
| 258 | AAGACACUC ACAAUUCC | 1542 | GGAAUUGU CUGAUGAGGCCGUUAGGCCGAA AGUGUCUU | 10961 |
| 264 | CUCACAAUU CCAAAAGU | 1543 | ACUUUUGG CUGAUGAGGCCGUUAGGCCGAA AUUGUGAG | 10962 |
| 265 | UCACAAUUC CAAAAGUG | 1544 | CACUUUUG CUGAUGAGGCCGUUAGGCCGAA AAUUGUGA | 10963 |
| 276 | AAAGUGAUC GGAAAUGA | 1545 | UCAUUUCC CUGAUGAGGCCGUUAGGCCGAA AUCACUUG | 10964 |
| 296 | UGGAGCCUA CAAGUGCU | 1546 | AGCACUUG CUGAUGAGGCCGUUAGGCCGAA AGGCUCCA | 10965 |
| 305 | CAAGUGCUU CUACCGGG | 1547 | CCCGGUAG CUGAUGAGGCCGUUAGGCCGAA AGCACUUG | 10966 |
| 306 | AAGUGCUUC UACCGGGA | 1548 | UCCCGGUA CUGAUGAGGCCGUUAGGCCGAA AAGCACUU | 10967 |
| 308 | GUGCUUCUA CCGGGAAA | 1549 | UUUCCCGG CUGAUGAGGCCGUUAGGCCGAA AGAAGCAC | 10968 |
| 323 | AACUGACUU GGCCUCGG | 1550 | CCGAGGCC CUGAUGAGGCCGUUAGGCCGAA AGUCAGUU | 10969 |
| 329 | CUUGGCCUC GGUCAUUU | 1551 | AAAUGACC CUGAUGAGGCCGUUAGGCCGAA AGGCCAAG | 10970 |
| 333 | GCCUCGGUC AUUUAUGU | 1552 | ACAUAAAU CUGAUGAGGCCGUUAGGCCGAA ACCGAGGC | 10971 |
| 336 | UCGGUCAUU UAUGUCUA | 1553 | UAGACAUA CUGAUGAGGCCGUUAGGCCGAA AUGACCGA | 10972 |
| 337 | CGGUCAUUU AUGUCUAU | 1554 | AUAGACAU CUGAUGAGGCCGUUAGGCCGAA AAUGACCG | 10973 |
| 338 | GGUCAUUUA UGUCUAUG | 1555 | CAUAGACA CUGAUGAGGCCGUUAGGCCGAA AAAUGACC | 10974 |
| 342 | AUUUAUGUC UAUGUUCA | 1556 | UGAACAUA CUGAUGAGGCCGUUAGGCCGAA ACAUAAAU | 10975 |
| 344 | UUAUGUCUA UGUUCAAG | 1557 | CUUGAACA CUGAUGAGGCCGUUAGGCCGAA AGACAUAA | 10976 |
| 348 | GUCUAUGUU CAAGAUUA | 1558 | UAAUCUUG CUGAUGAGGCCGUUAGGCCGAA ACAUAGAC | 10977 |
| 349 | UCUAUGUUC AAGAUUAC | 1559 | GUAAUCUU CUGAUGAGGCCGUUAGGCCGAA AACAUAGA | 10978 |
| 355 | UUCAAGAUU ACAGAUCU | 1560 | AGAUCUGU CUGAUGAGGCCGUUAGGCCGAA AUCUUGAA | 10979 |
| 356 | UCAAGAUUA CAGAUCUC | 1561 | GAGAUCUG CUGAUGAGGCCGUUAGGCCGAA AAUCUUGA | 10980 |
| 362 | UUACAGAUC UCCAUUUA | 1562 | UAAAUGGA CUGAUGAGGCCGUUAGGCCGAA AUCUGUAA | 10981 |
| 364 | ACAGAUCUC CAUUUAUU | 1563 | AAUAAAUG CUGAUGAGGCCGUUAGGCCGAA AGAUCUGU | 10982 |
| 368 | AUCUCCAUU UAUUGCUU | 1564 | AAGCAAUA CUGAUGAGGCCGUUAGGCCGAA AUGGAGAU | 10983 |
| 369 | UCUCCAUUU AUUGCUUC | 1565 | GAAGCAAU CUGAUGAGGCCGUUAGGCCGAA AAUGGAGA | 10984 |
| 370 | CUCCAUUUA UUGCUUCU | 1566 | AGAAGCAA CUGAUGAGGCCGUUAGGCCGAA AAAUGGAG | 10985 |
| 372 | CCAUUUAUU GCUUCUGU | 1567 | ACAGAAGC CUGAUGAGGCCGUUAGGCCGAA AUAAAUGG | 10986 |
| 376 | UUAUUGCUU CUGUUAGU | 1568 | ACUAACAG CUGAUGAGGCCGUUAGGCCGAA AGCAAUAA | 10987 |
| 377 | UAUUGCUUC UGUUAGUG | 1569 | CACUAACA CUGAUGAGGCCGUUAGGCCGAA AAGCAAUA | 10988 |
| 381 | GCUUCUGUU AGUGACCA | 1570 | UGGUCACU CUGAUGAGGCCGUUAGGCCGAA ACAGAAGC | 10989 |
| 382 | CUUCUGUUA GUGACCAA | 1571 | UUGGUCAC CUGAUGAGGCCGUUAGGCCGAA AACAGAAG | 10990 |
| 399 | CAUGGAGUC GUGUACAU | 1572 | AUGUACAC CUGAUGAGGCCGUUAGGCCGAA ACUCCAUG | 10991 |
| 404 | AGUCGUGUA CAUUACUG | 1573 | CAGUAAUG CUGAUGAGGCCGUUAGGCCGAA ACACGACU | 10992 |
| 408 | GUGUACAUU ACUGAGAA | 1574 | UUCUCAGU CUGAUGAGGCCGUUAGGCCGAA AUGUACAC | 10993 |
| 409 | UGUACAUUA CUGAGAAC | 1575 | GUUCUCAG CUGAUGAGGCCGUUAGGCCGAA AAUGUACA | 10994 |
| 438 | GUGGUGAUU CCAUGUCU | 1576 | AGACAUGG CUGAUGAGGCCGUUAGGCCGAA AUCACCAC | 10995 |
| 439 | UGGUGAUUC CAUGUCUC | 1577 | GAGACAUG CUGAUGAGGCCGUUAGGCCGAA AAUCACCA | 10996 |
| 445 | UUCCAUGUC UCGGGUCC | 1578 | GGACCCGA CUGAUGAGGCCGUUAGGCCGAA ACAUGGAA | 10997 |
| 447 | CCAUGUCUC GGGUCCAU | 1579 | AUGGACCC CUGAUGAGGCCGUUAGGCCGAA AGACAUGG | 10998 |
| 452 | UCUCGGGUC CAUUUCAA | 1580 | UUGAAAUG CUGAUGAGGCCGUUAGGCCGAA ACCCGAGA | 10999 |
| 456 | GGGUCCAUU UCAAAUCU | 1581 | AGAUUUGA CUGAUGAGGCCGUUAGGCCGAA AUGGACCC | 11000 |
| 457 | GGUCCAUUU CAAAUCUC | 1582 | GAGAUUUG CUGAUGAGGCCGUUAGGCCGAA AAUGGACC | 11001 |
| 458 | GUCCAUUUC AAAUCUCA | 1583 | UGAGAUUU CUGAUGAGGCCGUUAGGCCGAA AAAUGGAC | 11002 |
| 463 | UUUCAAAUC UCAACGUG | 1584 | CACGUUGA CUGAUGAGGCCGUUAGGCCGAA AUUUGAAA | 11003 |
| 465 | UCAAAUCUC AACGUGUC | 1585 | GACACGUU CUGAUGAGGCCGUUAGGCCGAA AGAUUUGA | 11004 |
| 473 | CAACGUGUC ACUUUGUG | 1586 | CACAAAGU CUGAUGAGGCCGUUAGGCCGAA ACACGUUG | 11005 |
| 477 | GUGUCACUU UGUGCAAG | 1587 | CUUGCACA CUGAUGAGGCCGUUAGGCCGAA AGUGACAC | 11006 |
| 478 | UGUCACUUU GUGCAAGA | 1588 | UCUUGCAC CUGAUGAGGCCGUUAGGCCGAA AAGUGACA | 11007 |
| 488 | UGCAAGAUA CCCAGAAA | 1589 | UUUCUGGG CUGAUGAGGCCGUUAGGCCGAA AUCUUGCA | 11008 |
| 503 | AAAGAGAUU UGUUCCUG | 1590 | CAGGAACA CUGAUGAGGCCGUUAGGCCGAA AUCUCUUU | 11009 |
| 504 | AAGAGAUUU GUUCCUGA | 1591 | UCAGGAAC CUGAUGAGGCCGUUAGGCCGAA AAUCUCUU | 11010 |
| 507 | AGAUUUGUU CCUGAUGG | 1592 | CCAUCAGG CUGAUGAGGCCGUUAGGCCGAA ACAAAUCU | 11011 |
| 508 | GAUUUGUUC CUGAUGGU | 1593 | ACCAUCAG CUGAUGAGGCCGUUAGGCCGAA AACAAAUC | 11012 |
| 517 | CUGAUGGUA ACAGAAUU | 1594 | AAUUCUGU CUGAUGAGGCCGUUAGGCCGAA ACCAUCAG | 11013 |
| 525 | AACAGAAUU UCCUGGGA | 1595 | UCCCAGGA CUGAUGAGGCCGUUAGGCCGAA AUUCUGUU | 11014 |
| 526 | ACAGAAUUU CCUGGGAC | 1596 | GUCCCAGG CUGAUGAGGCCGUUAGGCCGAA AAUUCUGU | 11015 |
| 527 | CAGAAUUUC CUGGGACA | 1597 | UGUCCCAG CUGAUGAGGCCGUUAGGCCGAA AAAUUCUG | 11016 |
| 548 | GAAGGGCUU UACUAUUC | 1598 | GAAUAGUA CUGAUGAGGCCGUUAGGCCGAA AGCCCUUC | 11017 |
| 549 | AAGGGCUUU ACUAUUCC | 1599 | GGAAUAGU CUGAUGAGGCCGUUAGGCCGAA AAGCCCUU | 11018 |
| 550 | AGGGCUUUA CUAUUCCC | 1600 | GGGAAUAG CUGAUGAGGCCGUUAGGCCGAA AAAGCCCU | 11019 |
| 553 | GCUUUACUA UUCCCAGC | 1601 | GCUGGGAA CUGAUGAGGCCGUUAGGCCGAA AGUAAAGC | 11020 |
| 555 | UUUACUAUU CCCAGCUA | 1602 | UAGCUGGG CUGAUGAGGCCGUUAGGCCGAA AUAGUAAA | 11021 |
| 556 | UUACUAUUC CCAGCUAC | 1603 | GUAGCUGG CUGAUGAGGCCGUUAGGCCGAA AAUAGUAA | 11022 |
| 563 | UCCCAGCUA CAUGAUCA | 1604 | UGAUCAUG CUGAUGAGGCCGUUAGGCCGAA AGCUGGGA | 11023 |
| 570 | UACAUGAUC AGCUAUGC | 1605 | GCAUAGCU CUGAUGAGGCCGUUAGGCCGAA AUCAUGUA | 11024 |
| 575 | GAUCAGCUA UGCUGGCA | 1606 | UGCCAGCA CUGAUGAGGCCGUUAGGCCGAA AGCUGAUC | 11025 |
| 586 | GGCAUGGUC UUCUGUGA | 1607 | UCACAGAA CUGAUGAGGCCGUUAGGCCGAA ACCAUGCC | 11026 |
| 590 | CAUGGUCUU CUGUGAAG | 1608 | CUUCACAG CUGAUGAGGCCGUUAGGCCGAA AGACCAUG | 11027 |
| 591 | AUGGUCUUC UGUGAAGC | 1609 | GCUUCACA CUGAUGAGGCCGUUAGGCCGAA AAGACCAU | 11028 |
| 606 | GCAAAAAUU AAUGAUGA | 1610 | UCAUCAUU CUGAUGAGGCCGUUAGGCCGAA AUUUUUGC | 11029 |
| 607 | CAAAAAUUA AUGAUGAA | 1611 | UUCAUCAU CUGAUGAGGCCGUUAGGCCGAA AAUUUUUG | 11030 |
| 619 | AUGAAAGUU ACCAGUCU | 1612 | AGACUGGU CUGAUGAGGCCGUUAGGCCGAA ACUUUCAU | 11031 |
| 620 | UGAAAGUUA CCAGUCUA | 1613 | UAGACUGG CUGAUGAGGCCGUUAGGCCGAA AACUUUCA | 11032 |
| 626 | UUACCAGUC UAUUAUGU | 1614 | ACAUAAUA CUGAUGAGGCCGUUAGGCCGAA ACUGGUAA | 11033 |
| 628 | ACCAGUCUA UUAUGUAC | 1615 | GUACAUAA CUGAUGAGGCCGUUAGGCCGAA AGACUGGU | 11034 |
| 630 | CAGUCUAUU AUGUACAU | 1616 | AUGUACAU CUGAUGAGGCCGUUAGGCCGAA AUAGACUG | 11035 |
| 631 | AGUCUAUUA UGUACAUA | 1617 | UAUGUACA CUGAUGAGGCCGUUAGGCCGAA AAUAGACU | 11036 |
| 635 | UAUUAUGUA CAUAGUUG | 1618 | CAACUAUG CUGAUGAGGCCGUUAGGCCGAA ACAUAAUA | 11037 |
| 639 | AUGUACAUA GUUGUCGU | 1619 | ACGACAAC CUGAUGAGGCCGUUAGGCCGAA AUGUACAU | 11038 |
| 642 | UACAUAGUU GUCGUUGU | 1620 | ACAACGAC CUGAUGAGGCCGUUAGGCCGAA ACUAUGUA | 11039 |
| 645 | AUAGUUGUC GUUGUAGG | 1621 | CCUACAAC CUGAUGAGGCCGUUAGGCCGAA ACAACUAU | 11040 |
| 648 | GUUGUCGUU GUAGGGUA | 1622 | UACCCUAC CUGAUGAGGCCGUUAGGCCGAA ACGACAAC | 11041 |
| 651 | GUCGUUGUA GGGUAUAG | 1623 | CUAUACCC CUGAUGAGGCCGUUAGGCCGAA ACAACGAC | 11042 |
| 656 | UGUAGGGUA UAGGAUUU | 1624 | AAAUCCUA CUGAUGAGGCCGUUAGGCCGAA ACCCUACA | 11043 |
| 658 | UAGGGUAUA GGAUUUAU | 1625 | AUAAAUCC CUGAUGAGGCCGUUAGGCCGAA AUACCCUA | 11044 |
| 663 | UAUAGGAUU UAUGAUGU | 1626 | ACAUCAUA CUGAUGAGGCCGUUAGGCCGAA AUCCUAUA | 11045 |
| 664 | AUAGGAUUU AUGAUGUG | 1627 | CACAUCAU CUGAUGAGGCCGUUAGGCCGAA AAUCCUAU | 11046 |
| 665 | UAGGAUUUA UGAUGUGG | 1628 | CCACAUCA CUGAUGAGGCCGUUAGGCCGAA AAAUCCUA | 11047 |
| 675 | GAUGUGGUU CUGAGUCC | 1629 | GGACUCAG CUGAUGAGGCCGUUAGGCCGAA ACCACAUC | 11048 |
| 676 | AUGUGGUUC UGAGUCCG | 1630 | CGGACUCA CUGAUGAGGCCGUUAGGCCGAA AACCACAU | 11049 |
| 682 | UUCUGAGUC CGUCUCAU | 1631 | AUGAGACG CUGAUGAGGCCGUUAGGCCGAA ACUCAGAA | 11050 |
| 686 | GAGUCCGUC UCAUGGAA | 1632 | UUCCAUGA CUGAUGAGGCCGUUAGGCCGAA ACGGACUC | 11051 |
| 688 | GUCCGUCUC AUGGAAUU | 1633 | AAUUCCAU CUGAUGAGGCCGUUAGGCCGAA AGACGGAC | 11052 |
| 696 | CAUGGAAUU GAACUAUC | 1634 | GAUAGUUC CUGAUGAGGCCGUUAGGCCGAA AUUCCAUG | 11053 |
| 702 | AUUGAACUA UCUGUUGG | 1635 | CCAACAGA CUGAUGAGGCCGUUAGGCCGAA AGUUCAAU | 11054 |
| 704 | UGAACUAUC UGUUGGAG | 1636 | CUCCAACA CUGAUGAGGCCGUUAGGCCGAA AUAGUUCA | 11055 |
| 708 | CUAUCUGUU GGAGAAAA | 1637 | UUUUCUCC CUGAUGAGGCCGUUAGGCCGAA ACAGAUAG | 11056 |
| 720 | GAAAAGCUU GUCUUAAA | 1638 | UUUAAGAC CUGAUGAGGCCGUUAGGCCGAA AGCUUUUC | 11057 |
| 723 | AAGCUUGUC UUAAAUUG | 1639 | CAAUUUAA CUGAUGAGGCCGUUAGGCCGAA ACAAGCUU | 11058 |
| 725 | GCUUGUCUU AAAUUGUA | 1640 | UACAAUUU CUGAUGAGGCCGUUAGGCCGAA AGACAAGC | 11059 |
| 726 | CUUGUCUUA AAUUGUAC | 1641 | GUACAAUU CUGAUGAGGCCGUUAGGCCGAA AAGACAAG | 11060 |
| 730 | UCUUAAAUU GUACAGCA | 1642 | UGCUGUAC CUGAUGAGGCCGUUAGGCCGAA AUUUAAGA | 11061 |
| 733 | UAAAUUGUA CAGCAAGA | 1643 | UCUUGCUG CUGAUGAGGCCGUUAGGCCGAA ACAAUUUA | 11062 |
| 750 | ACUGAACUA AAUGUGGG | 1644 | CCCACAUU CUGAUGAGGCCGUUAGGCCGAA AGUUCAGU | 11063 |
| 762 | GUGGGGAUU GACUUCAA | 1645 | UUGAAGUC CUGAUGAGGCCGUUAGGCCGAA AUCCCCAC | 11064 |
| 767 | GAUUGACUU CAACUGGG | 1646 | CCCAGUUG CUGAUGAGGCCGUUAGGCCGAA AGUCAAUC | 11065 |
| 768 | AUUGACUUC AACUGGGA | 1647 | UCCCAGUU CUGAUGAGGCCGUUAGGCCGAA AAGUCAAU | 11066 |
| 779 | CUGGGAAUA CCCUUCUU | 1648 | AAGAAGGG CUGAUGAGGCCGUUAGGCCGAA AUUCCCAG | 11067 |
| 784 | AAUACCCUU CUUCGAAG | 1649 | CUUCGAAG CUGAUGAGGCCGUUAGGCCGAA AGGGUAUU | 11068 |
| 785 | AUACCCUUC UUCGAAGC | 1650 | GCUUCGAA CUGAUGAGGCCGUUAGGCCGAA AAGGGUAU | 11069 |
| 787 | ACCCUUCUU CGAAGCAU | 1651 | AUGCUUCG CUGAUGAGGCCGUUAGGCCGAA AGAAGGGU | 11070 |
| 788 | CCCUUCUUC GAAGCAUC | 1652 | GAUGCUUC CUGAUGAGGCCGUUAGGCCGAA AAGAAGGG | 11071 |
| 796 | CGAAGCAUC AGCAUAAG | 1653 | CUUAUGCU CUGAUGAGGCCGUUAGGCCGAA AUGCUUCG | 11072 |
| 802 | AUCAGCAUA AGAAACUU | 1654 | AAGUUUCU CUGAUGAGGCCGUUAGGCCGAA AUGCUGAU | 11073 |
| 810 | AAGAAACUU GUAAACCG | 1655 | CGGUUUAC CUGAUGAGGCCGUUAGGCCGAA AGUUUCUU | 11074 |
| 813 | AAACUUGUA AACCGAGA | 1656 | UCUCGGUU CUGAUGAGGCCGUUAGGCCGAA ACAAGUUU | 11075 |
| 825 | CGAGACCUA AAAACCCA | 1657 | UGGGUUUU CUGAUGAGGCCGUUAGGCCGAA AGGUCUCG | 11076 |
| 836 | AACCCAGUC UGGGAGUG | 1658 | CACUOCCA CUGAUGAGGCCGUUAGGCCGAA ACUGGGUU | 11077 |
| 857 | GAAGAAAUU UUUGAGCA | 1659 | UGCUCAAA CUGAUGAGGCCGUUAGGCCGAA AUUUCUUC | 11078 |
| 858 | AAGAAAUUU UUGAGCAC | 1660 | GUGCUCAA CUGAUGAGGCCGUUAGGCCGAA AAUUUCUU | 11079 |
| 859 | AGAAAUUUU UGAGCACC | 1661 | GGUGCUCA CUGAUGAGGCCGUUAGGCCGAA AAAUUUCU | 11080 |
| 860 | GAAAUUUUU GAGCACCU | 1662 | AGGUGCUC CUGAUGAGGCCGUUAGGCCGAA AAAAUUUC | 11081 |
| 869 | GAGCACCUU AACUAUAG | 1663 | CUAUAGUU CUGAUGAGGCCGUUAGGCCGAA AGGUGCUC | 11082 |
| 870 | AGCACCUUA ACUAUAGA | 1664 | UCUAUAGU CUGAUGAGGCCGUUAGGCCGAA AAGGUGCU | 11083 |
| 874 | CCUUAACUA UAGAUGGU | 1665 | ACCAUCUA CUGAUGAGGCCGUUAGGCCGAA AGUUAAGG | 11084 |
| 876 | UUAACUAUA GAUGGUGU | 1666 | ACACCAUC CUGAUGAGGCCGUUAGGCCGAA AUAGUUAA | 11085 |
| 885 | GAUGGUGUA ACCOGGAG | 1667 | CUCCGGGU CUGAUGAGGCCGUUAGGCCGAA ACACCAUC | 11086 |
| 905 | CCAAGGAUU GUACACCU | 1668 | AGGUGUAC CUGAUGAGGCCGUUAGGCCGAA AUCCUUGG | 11087 |
| 908 | AGGAUUGUA CACCUGUG | 1669 | CACAGGUG CUGAUGAGGCCGUUAGGCCGAA ACAAUCCU | 11088 |
| 923 | UGCAGCAUC CAGUGGGC | 1670 | GCCCACUG CUGAUGAGGCCGUUAGGCCGAA AUGCUGCA | 11089 |
| 956 | CAGCACAUU UGUCAGGG | 1671 | CCCUGACA CUGAUGAGGCCGUUAGGCCGAA AUGUGCUG | 11090 |
| 957 | AGCACAUUU GUCAGGGU | 1672 | ACCCUGAC CUGAUGAGGCCGUUAGGCCGAA AAUGUGCU | 11091 |
| 960 | ACAUUUGUC AGGGUCCA | 1673 | UGGACCCU CUGAUGAGGCCGUUAGGCCGAA ACAAAUGU | 11092 |
| 966 | GUCAGGGUC CAUGAAAA | 1674 | UUUUCAUG CUGAUGAGGCCGUUAGGCCGAA ACCCUGAC | 11093 |
| 979 | AAAAACCUU UUGUUGCU | 1675 | AGCAACAA CUGAUGAGGCCGUUAGGCCGAA AGGUUUUU | 11094 |
| 980 | AAAACCUUU UGUUGCUU | 1676 | AAGCAACA CUGAUGAGGCCGUUAGGCCGAA AAGGUUUU | 11095 |
| 981 | AAACCUUUU GUUGCUUU | 1677 | AAAGCAAC CUGAUGAGGCCGUUAGGCCGAA AAAGGUUU | 11096 |
| 984 | CCUUUUGUU GCUUUUGG | 1678 | CCAAAAGC CUGAUGAGGCCGUUAGGCCGAA ACAAAAGG | 11097 |
| 988 | UUGUUGCUU UUGGAAGU | 1679 | ACUUCCAA CUGAUGAGGCCGUUAGGCCGAA AGCAACAA | 11098 |
| 989 | UGUUGCUUU UGGAAGUG | 1680 | CACUUCCA CUGAUGAGGCCGUUAGGCCGAA AAGCAACA | 11099 |
| 990 | GUUGCUUUU GGAAGUGG | 1681 | CCACUUCC CUGAUGAGGCCGUUAGGCCGAA AAAGCAAC | 11100 |
| 1007 | CAUGGAAUC UCUGGUGG | 1682 | CCACCAGA CUGAUGAGGCCGUUAGGCCGAA AUUCCAUG | 11101 |
| 1009 | UGGAAUCUC UGGUGGAA | 1683 | UUCCACCA CUGAUGAGGCCGUUAGGCCGAA AGAUUCCA | 11102 |
| 1038 | GAGCGUGUC AGAAUCCC | 1684 | GGGAUUCU CUGAUGAGGCCGUUAGGCCGAA ACACGCUC | 11103 |
| 1044 | GUCAGAAUC CCUGCGAA | 1685 | UUCGCAGG CUGAUGAGGCCGUUAGGCCGAA AUUCUGAC | 11104 |
| 1055 | UGCGAAGUA CCUUGGUU | 1686 | AACCAAGG CUGAUGAGGCCGUUAGGCCGAA ACUUCGCA | 11105 |
| 1059 | AAGUACCUU GGUUACCC | 1687 | GGGUAACC CUGAUGAGGCCGUUAGGCCGAA AGGUACUU | 11106 |
| 1063 | ACCUUGGUU ACCCACCC | 1688 | GGGUGGGU CUGAUGAGGCCGUUAGGCCGAA ACCAAGGU | 11107 |
| 1064 | CCUUGGUUA CCCACCCC | 1689 | GGGGUGGG CUGAUGAGGCCGUUAGGCCGAA AACCAAGG | 11108 |
| 1080 | CCAGAAAUA AAAUGGUA | 1690 | UACCAUUU CUGAUGAGGCCGUUAGGCCGAA AUUUCUGG | 11109 |
| 1088 | AAAAUGGUA UAAAAAUG | 1691 | CAUUUUUA CUGAUGAGGCCGUUAGGCCGAA ACCAUUUU | 11110 |
| 1090 | AAUGGUAUA AAAAUGGA | 1692 | UCCAUUUU CUGAUGAGGCCGUUAGGCCGAA AUACCAUU | 11111 |
| 1101 | AAUGGAAUA CCCCUUGA | 1693 | UCAAGGGG CUGAUGAGGCCGUUAGGCCGAA AUUCCAUU | 11112 |
| 1107 | AUACCCCUU GAGUCCAA | 1694 | UUGGACUC CUGAUGAGGCCGUUAGGCCGAA AGGGGUAU | 11113 |
| 1112 | CCUUGAGUC CAAUCACA | 1695 | UGUGAUUG CUGAUGAGGCCGUUAGGCCGAA ACUCAAGG | 11114 |
| 1117 | AGUCCAAUC ACACAAUU | 1696 | AAUUGUGU CUGAUGAGGCCGUUAGGCCGAA AUUGGACU | 11115 |
| 1125 | CACACAAUU AAAGCGGG | 1697 | CCCGCUUU CUGAUGAGGCCGUUAGGCCGAA AUUGUGUG | 11116 |
| 1126 | ACACAAUUA AAGCGGGG | 1698 | CCCCGCUU CUGAUGAGGCCGUUAGGCCGAA AAUUGUGU | 11117 |
| 1140 | GGGCAUGUA CUGACGAU | 1699 | AUCGUCAG CUGAUGAGGCCGUUAGGCCGAA ACAUGCCC | 11118 |
| 1149 | CUGACGAUU AUGGAAGU | 1700 | ACUUCCAU CUGAUGAGGCCGUUAGGCCGAA AUCGUCAG | 11119 |
| 1150 | UGACGAUUA UGGAAGUG | 1701 | CACUUCCA CUGAUGAGGCCGUUAGGCCGAA AAUCGUCA | 11120 |
| 1180 | CAGGAAAUU ACACUGUC | 1702 | GACAGUGU CUGAUGAGGCCGUUAGGCCGAA AUUUCCUG | 11121 |
| 1181 | AGGAAAUUA CACUGUCA | 1703 | UGACAGUG CUGAUGAGGCCGUUAGGCCGAA AAUUUCCU | 11122 |
| 1188 | UACACUGUC AUCCUUAC | 1704 | GUAAGGAU CUGAUGAGGCCGUUAGGCCGAA ACAGUGUA | 11123 |
| 1191 | ACUGUCAUC CUUACCAA | 1705 | UUGGUAAG CUGAUGAGGCCGUUAGGCCGAA AUGACAGU | 11124 |
| 1194 | GUCAUCCUU ACCAAUCC | 1706 | GGAUUGGU CUGAUGAGGCCGUUAGGCCGAA AGGAUGAC | 11125 |
| 1195 | UCAUCCUUA CCAAUCCC | 1707 | GGGAUUGG CUGAUGAGGCCGUUAGGCCGAA AAGGAUGA | 11126 |
| 1201 | UUACCAAUC CCAUUUCA | 1708 | UGAAAUGG CUGAUGAGGCCGUUAGGCCGAA AUUGGUAA | 11127 |
| 1206 | AAUCCCAUU UCAAAGGA | 1709 | UCCUUUGA CUGAUGAGGCCGUUAGGCCGAA AUGGGAUU | 11128 |
| 1207 | AUCCCAUUU CAAAGGAG | 1710 | CUCCUUUG CUGAUGAGGCCGUUAGGCCGAA AAUGGGAU | 11129 |
| 1208 | UCCCAUUUC AAAGGAGA | 1711 | UCUCCUUU CUGAUGAGGCCGUUAGGCCGAA AAAUGGGA | 11130 |
| 1233 | CAUGUGGUC UCUCUGGU | 1712 | ACCAGAGA CUGAUGAGGCCGUUAGGCCGAA ACCACAUG | 11131 |
| 1235 | UGUGGUCUC UCUGGUUG | 1713 | CAACCAGA CUGAUGAGGCCGUUAGGCCGAA AGACCACA | 11132 |
| 1237 | UGGUCUCUC UGGUUGUG | 1714 | CACAACCA CUGAUGAGGCCGUUAGGCCGAA AGAGACCA | 11133 |
| 1242 | UCUCUGGUU GUGUAUGU | 1715 | ACAUACAC CUGAUGAGGCCGUUAGGCCGAA ACCAGAGA | 11134 |
| 1247 | GGUUGUGUA UGUCCCAC | 1716 | GUGGGACA CUGAUGAGGCCGUUAGGCCGAA ACACAACC | 11135 |
| 1251 | GUGUAUGUC CCACCCCA | 1717 | UGGGGUGG CUGAUGAGGCCGUUAGGCCGAA ACAUACAC | 11136 |
| 1263 | CCCCAGAUU GGUGAGAA | 1718 | UUCUCACC CUGAUGAGGCCGUUAGGCCGAA AUCUGGGG | 11137 |
| 1274 | UGAGAAAUC UCUAAUCU | 1719 | AGAUUAGA CUGAUGAGGCCGUUAGGCCGAA AUUUCUCA | 11138 |
| 1276 | AGAAAUCUC UAAUCUCU | 1720 | AGAGAUUA CUGAUGAGGCCGUUAGGCCGAA AGAUUUCU | 11139 |
| 1278 | AAAUCUCUA AUCUCUCC | 1721 | GGAGAGAU CUGAUGAGGCCGUUAGGCCGAA AGAGAUUU | 11140 |
| 1281 | UCUCUAAUC UCUCCUGU | 1722 | ACAGGAGA CUGAUGAGGCCGUUAGGCCGAA AUUAGAGA | 11141 |
| 1283 | UCUAAUCUC UCCUGUGG | 1723 | CCACAGGA CUGAUGAGGCCGUUAGGCCGAA AGAUUAGA | 11142 |
| 1285 | UAAUCUCUC CUGUGGAU | 1724 | AUCCACAG CUGAUGAGGCCGUUAGGCCGAA AGAGAUUA | 11143 |
| 1294 | CUGUGGAUU CCUACCAG | 1725 | CUGGUAGG CUGAUGAGGCCGUUAGGCCGAA AUCCACAG | 11144 |
| 1295 | UGUGGAUUC CUACCAGU | 1726 | ACUGGUAG CUGAUGAGGCCGUUAGGCCGAA AAUCCACA | 11145 |
| 1298 | GGAUUCCUA CCAGUACG | 1727 | CGUACUGG CUGAUGAGGCCGUUAGGCCGAA AGGAAUCC | 11146 |
| 1304 | CUACCAGUA CGGCACCA | 1728 | UGGUGCCG CUGAUGAGGCCGUUAGGCCGAA ACUGGUAG | 11147 |
| 1315 | GCACCACUC AAACGCUG | 1729 | CAGCGUUU CUGAUGAGGCCGUUAGGCCGAA AGUGGUGC | 11148 |
| 1330 | UGACAUGUA CGGUCUAU | 1730 | AUAGACCG CUGAUGAGGCCGUUAGGCCGAA ACAUGUCA | 11149 |
| 1335 | UGUACGGUC UAUGCCAU | 1731 | AUGGCAUA CUGAUGAGGCCGUUAGGCCGAA ACCGUACA | 11150 |
| 1337 | UACGGUCUA UGCCAUUC | 1732 | GAAUGGCA CUGAUGAGGCCGUUAGGCCGAA AGACCGUA | 11151 |
| 1344 | UAUGCCAUU CCUCCCCC | 1733 | GGGGGAGG CUGAUGAGGCCGUUAGGCCGAA AUGGCAUA | 11152 |
| 1345 | AUGCCAUUC CUCCCCCG | 1734 | CGGGGGAG CUGAUGAGGCCGUUAGGCCGAA AAUGGCAU | 11153 |
| 1348 | CCAUUCCUC CCCCGCAU | 1735 | AUGCGGGG CUGAUGAGGCCGUUAGGCCGAA AGGAAUGG | 11154 |
| 1357 | CCCCGCAUC ACAUCCAC | 1736 | GUGGAUGU CUGAUGAGGCCGUUAGGCCGAA AUGCGGGG | 11155 |
| 1362 | CAUCACAUC CACUGGUA | 1737 | UACCAGUG CUGAUGAGGCCGUUAGGCCGAA AUGUGAUG | 11156 |
| 1370 | CCACUGGUA UUGGCAGU | 1738 | ACUGCCAA CUGAUGAGGCCGUUAGGCCGAA ACCAGUGG | 11157 |
| 1372 | ACUGGUAUU GGCAGUUG | 1739 | CAACUGCC CUGAUGAGGCCGUUAGGCCGAA AUACCAGU | 11158 |
| 1379 | UUGGCAGUU GGAGGAAG | 1740 | CUUCCUCC CUGAUGAGGCCGUUAGGCCGAA ACUGCCAA | 11159 |
| 1416 | CAAGCUGUC UCAGUGAC | 1741 | GUCACUGA CUGAUGAGGCCGUUAGGCCGAA ACAGCUUG | 11160 |
| 1418 | AGCUGUCUC AGUGACAA | 1742 | UUGUCACU CUGAUGAGGCCGUUAGGCCGAA AGACAGCU | 11161 |
| 1433 | AAACCCAUA CCCUUGUG | 1743 | CACAAGGG CUGAUGAGGCCGUUAGGCCGAA AUGGGUUU | 11162 |
| 1438 | CAUACCCUU GUGAAGAA | 1744 | UUCUUCAC CUGAUGAGGCCGUUAGGCCGAA AGGGUAUG | 11163 |
| 1466 | GGAGGACUU CCAGGGAG | 1745 | CUCCCUGG CUGAUGAGGCCGUUAGGCCGAA AGUCCUCC | 11164 |
| 1467 | GAGGACUUC CAGGGAGG | 1746 | CCUCCCUG CUGAUGAGGCCGUUAGGCCGAA AAGUCCUC | 11165 |
| 1480 | GAGGAAAUA AAAUUGAA | 1747 | UUCAAUUU CUGAUGAGGCCGUUAGGCCGAA AUUUCCUC | 11166 |
| 1485 | AAUAAAAUU GAAGUUAA | 1748 | UUAACUUC CUGAUGAGGCCGUUAGGCCGAA AUUUUAUU | 11167 |
| 1491 | AUUGAAGUU AAUAAAAA | 1749 | UUUUUAUU CUGAUGAGGCCGUUAGGCCGAA ACUUCAAU | 11168 |
| 1492 | UUGAAGUUA AUAAAAAU | 1750 | AUUUUUAU CUGAUGAGGCCGUUAGGCCGAA AACUUCAA | 11169 |
| 1495 | AAGUUAAUA AAAAUCAA | 1751 | UUGAUUUU CUGAUGAGGCCGUUAGGCCGAA AUUAACUU | 11170 |
| 1501 | AUAAAAAUC AAUUUGCU | 1752 | AGCAAAUU CUGAUGAGGCCGUUAGGCCGAA AUUUUUAU | 11171 |
| 1505 | AAAUCAAUU UGCUCUAA | 1753 | UUAGAGCA CUGAUGAGGCCGUUAGGCCGAA AUUGAUUU | 11172 |
| 1506 | AAUCAAUUU GCUCUAAU | 1754 | AUUAGAGC CUGAUGAGGCCGUUAGGCCGAA AAUUGAUU | 11173 |
| 1510 | AAUUUGCUC UAAUUGAA | 1755 | UUCAAUUA CUGAUGAGGCCGUUAGGCCGAA AGCAAAUU | 11174 |
| 1512 | UUUGCUCUA AUUGAAGG | 1756 | CCUUCAAU CUGAUGAGGCCGUUAGGCCGAA AGAGCAAA | 11175 |
| 1515 | GCUCUAAUU GAAGGAAA | 1757 | UUUCCUUC CUGAUGAGGCCGUUAGGCCGAA AUUAGAGC | 11176 |
| 1536 | AAAACUGUA AGUACCCU | 1758 | AGGGUACU CUGAUGAGGCCGUUAGGCCGAA ACAGUUUU | 11177 |
| 1540 | CUGUAAGUA CCCUUGUU | 1759 | AACAAGGG CUGAUGAGGCCGUUAGGCCGAA ACUUACAG | 11178 |
| 1545 | AGUACCCUU GUUAUCCA | 1760 | UGGAUAAC CUGAUGAGGCCGUUAGGCCGAA AGGGUACU | 11179 |
| 1548 | ACCCUUGUU AUCCAAGC | 1761 | GCUUGGAU CUGAUGAGGCCGUUAGGCCGAA ACAAGGGU | 11180 |
| 1549 | CCCUUGUUA UCCAAGCG | 1762 | CGCUUGGA CUGAUGAGGCCGUUAGGCCGAA AACAAGGG | 11181 |
| 1551 | CUUGUUAUC CAAGCGGC | 1763 | GCCGCUUG CUGAUGAGGCCGUUAGGCCGAA AUAACAAG | 11182 |
| 1568 | AAAUGUGUC AGCUUUGU | 1764 | ACAAAGCU CUGAUGAGGCCGUUAGGCCGAA ACACAUUU | 11183 |
| 1573 | UGUCAGCUU UGUACAAA | 1765 | UUUGUACA CUGAUGAGGCCGUUAGGCCGAA AGCUGACA | 11184 |
| 1574 | GUCAGCUUU GUACAAAU | 1766 | AUUUGUAC CUGAUGAGGCCGUUAGGCCGAA AAGCUGAC | 11185 |
| 1577 | AGCUUUGUA CAAAUGUG | 1767 | CACAUUUG CUGAUGAGGCCGUUAGGCCGAA ACAAAGCU | 11186 |
| 1593 | GAAGCGGUC AACAAAGU | 1768 | ACUUUGUU CUGAUGAGGCCGUUAGGCCGAA ACCGCUUC | 11187 |
| 1602 | AACAAAGUC GGGAGAGG | 1769 | CCUCUCCC CUGAUGAGGCCGUUAGGCCGAA ACUUUGUU | 11188 |
| 1623 | AGGGUGAUC UCCUUCCA | 1770 | UGGAAGGA CUGAUGAGGCCGUUAGGCCGAA AUCACCCU | 11189 |
| 1625 | GGUGAUCUC CUUCCACG | 1771 | CGUGGAAG CUGAUGAGGCCGUUAGGCCGAA AGAUCACC | 11190 |
| 1628 | GAUCUCCUU CCACGUGA | 1772 | UCACGUGG CUGAUGAGGCCGUUAGGCCGAA AGGAGAUC | 11191 |
| 1629 | AUCUCCUUC CACGUGAC | 1773 | GUCACGUG CUGAUGAGGCCGUUAGGCCGAA AAGGAGAU | 11192 |
| 1645 | CCAGGGGUC CUGAAAUU | 1774 | AAUUUCAG CUGAUGAGGCCGUUAGGCCGAA ACCCCUGG | 11193 |
| 1653 | CCUGAAAUU ACUUUGCA | 1775 | UGCAAAGU CUGAUGAGGCCGUUAGGCCGAA AUUUCAGG | 11194 |
| 1654 | CUGAAAUUA CUUUGCAA | 1776 | UUGCAAAG CUGAUGAGGCCGUUAGGCCGAA AAUUUCAG | 11195 |
| 1657 | AAAUUACUU UGCAACCU | 1777 | AGGUUGCA CUGAUGAGGCCGUUAGGCCGAA AGUAAUUU | 11196 |
| 1658 | AAUUACUUU GCAACCUG | 1778 | CAGGUUGC CUGAUGAGGCCGUUAGGCCGAA AAGUAAUU | 11197 |
| 1697 | GAGCGUGUC UUUGUGGU | 1779 | ACCACAAA CUGAUGAGGCCGUUAGGCCGAA ACACGCUC | 11198 |
| 1699 | GCGUGUCUU UGUGGUGC | 1780 | GCACCACA CUGAUGAGGCCGUUAGGCCGAA AGACACGC | 11199 |
| 1700 | CGUGUCUUU GUGGUGCA | 1781 | UGCACCAC CUGAUGAGGCCGUUAGGCCGAA AAGACACG | 11200 |
| 1721 | AGACAGAUC UACGUUUG | 1782 | CAAACGUA CUGAUGAGGCCGUUAGGCCGAA AUCUGUCU | 11201 |
| 1723 | ACAGAUCUA CGUUUGAG | 1783 | CUCAAACG CUGAUGAGGCCGUUAGGCCGAA AGAUCUGU | 11202 |
| 1727 | AUCUACGUU UGAGAACC | 1784 | GGUUCUCA CUGAUGAGGCCGUUAGGCCGAA ACGUAGAU | 11203 |
| 1728 | UCUACGUUU GAGAACCU | 1785 | AGGUUCUC CUGAUGAGGCCGUUAGGCCGAA AACGUAGA | 11204 |
| 1737 | GAGAACCUC ACAUGGUA | 1786 | UACCAUGU CUGAUGAGGCCGUUAGGCCGAA AGGUUCUC | 11205 |
| 1745 | CACAUGGUA CAAGCUUG | 1787 | CAAGCUUG CUGAUGAGGCCGUUAGGCCGAA ACCAUGUG | 11206 |
| 1752 | UACAAGCUU GGCCCACA | 1788 | UGUGGGCC CUGAUGAGGCCGUUAGGCCGAA AGCUUGUA | 11207 |
| 1765 | CACAGCCUC UGCCAAUC | 1789 | GAUUGGCA CUGAUGAGGCCGUUAGGCCGAA AGGCUGUG | 11208 |
| 1773 | CUGCCAAUC CAUGUGGG | 1790 | CCCACAUG CUGAUGAGGCCGUUAGGCCGAA AUUGGCAG | 11209 |
| 1787 | GGGAGAGUU GCCCACAC | 1791 | GUGUGGGC CUGAUGAGGCCGUUAGGCCGAA ACUCUCCC | 11210 |
| 1800 | ACACCUGUG UGCAAGAA | 1792 | UUCUUGCA CUGAUGAGGCCGUUAGGCCGAA ACAGGUGU | 11211 |
| 1801 | CACCUGGUG GCAAGAAC | 1793 | GUUCUUGC CUGAUGAGGCCGUUAGGCCGAA AACAGGUG | 11212 |
| 1811 | CAAGAACUU GGAUACUC | 1794 | GAGUAUCC CUGAUGAGGCCGUUAGGCCGAA AGUUCUUG | 11213 |
| 1816 | ACUUGGAUA CUCUUUGG | 1795 | CCAAAGAG CUGAUGAGGCCGUUAGGCCGAA AUCCAAGU | 11214 |
| 1819 | UGGAUACUC UUUGGAAA | 1796 | UUUCCAAA CUGAUGAGGCCGUUAGGCCGAA AGUAUCCA | 11215 |
| 1821 | GAUACUCUU UGGAAAUU | 1797 | AAUUUCCA CUGAUGAGGCCGUUAGGCCGAA AGAGUAUC | 11216 |
| 1822 | AUACUCUUU GGAAAUUG | 1798 | CAAUUUCC CUGAUGAGGCCGUUAGGCCGAA AAGAGUAU | 11217 |
| 1829 | UUGGAAAUU GAAUGCCA | 1799 | UGGCAUUC CUGAUGAGGCCGUUAGGCCGAA AUUUCCAA | 11218 |
| 1844 | CACCAUGUU CUCUAAUA | 1800 | UAUUAGAG CUGAUGAGGCCGUUAGGCCGAA ACAUGGUG | 11219 |
| 1845 | ACCAUGUUC UCUAAUAG | 1801 | CUAUUAGA CUGAUGAGGCCGUUAGGCCGAA AACAUGGU | 11220 |
| 1847 | CAUGUUCUC UAAUAGCA | 1802 | UGCUAUUA CUGAUGAGGCCGUUAGGCCGAA AGAACAUG | 11221 |
| 1849 | UGUUCUCUA AUAGCACA | 1803 | UGUGCUAU CUGAUGAGGCCGUUAGGCCGAA AGAGAACA | 11222 |
| 1852 | UCUCUAAUA GCACAAAU | 1804 | AUUUGUGC CUGAUGAGGCCGUUAGGCCGAA AUUAGAGA | 11223 |
| 1866 | AAUGACAUU UUGAUCAU | 1805 | AUGAUCAA CUGAUGAGGCCGUUAGGCCGAA AUGUCAUU | 11224 |
| 1867 | AUGACAUUU UGAUCAUG | 1806 | CAUGAUCA CUGAUGAGGCCGUUAGGCCGAA AAUGUCAU | 11225 |
| 1868 | UGACAUUUC GAUCAUGG | 1807 | CCAUGAUC CUGAUGAGGCCGUUAGGCCGAA AAAUGUCA | 11226 |
| 1872 | AUUUUGAUC AUGGAGCU | 1808 | AGCUCCAU CUGAUGAGGCCGUUAGGCCGAA AUCAAAAU | 11227 |
| 1881 | AUGGAGCUU AAGAAUGC | 1809 | GCAUUCUU CUGAUGAGGCCGUUAGGCCGAA AGCUCCAU | 11228 |
| 1882 | UGGACCUUA AGAAUGCA | 1810 | UGCAUUCU CUGAUGAGGCCGUUAGGCCGAA AAGCUCCA | 11229 |
| 1892 | GAAUGCAUC CUUGCAGG | 1811 | CCUGCAAG CUGAUGAGGCCGUUAGGCCGAA AUGCAUUC | 11230 |
| 1895 | UGCAUCCUU GCAGGACC | 1812 | GGUCCUGC CUGAUGAGGCCGUUAGGCCGAA AGGAUCCA | 11231 |
| 1913 | AGGAGACUA UGUCUGCC | 1813 | GGCAGACA CUGAUGAGGCCGUUAGGCCGAA AGUCUCCU | 11232 |
| 1917 | GACUAUGUC UGCCUUGC | 1814 | GCAAGGCA CUGAUGAGGCCGUUAGGCCGAA ACAUAGUC | 11233 |
| 1923 | GUCUGCCUU GCUCAAGA | 1815 | UCUUGAGC CUGAUGAGGCCGUUAGGCCGAA AGGCAGAC | 11234 |
| 1927 | GCCUUGCUC AAGACAGG | 1816 | CCUGUCUU CUGAUGAGGCCGUUAGGCCGAA AGCAAGGC | 11235 |
| 1954 | AAAGACAUU GCGUGGUC | 1817 | GACCACGC CUGAUGAGGCCGUUAGGCCGAA AUGUCUUU | 11236 |
| 1962 | UGCGUGGUC AGGCAGCU | 1818 | AGCUGCCU CUGAUGAGGCCGUUAGGCCGAA ACCACGCA | 11237 |
| 1971 | AGGCAGCUC ACAGUCCU | 1819 | AGGACUGU CUGAUGAGGCCGUUAGGCCGAA AGCUGCCU | 11238 |
| 1977 | CUCACAGUC CUAGAGCG | 1820 | CGCUCUAG CUGAUGAGGCCGUUAGGCCGAA ACUGUGAG | 11239 |
| 1980 | ACAGUCCUA GAGCGUGU | 1821 | ACACGCUC CUGAUGAGGCCGUUAGGCCGAA AGGACUGU | 11240 |
| 2001 | CCCACGAUC ACAGGAAA | 1822 | UUUCCUGU CUGAUGAGGCCGUUAGGCCGAA AUCGUGGG | 11241 |
| 2020 | UGGAGAAUC AGACGACA | 1823 | UGUCGUCU CUGAUGAGGCCGUUAGGCCGAA AUUCUCCA | 11242 |
| 2032 | CGACAAGUA UUGGGGAA | 1824 | UUCCCCAA CUGAUGAGGCCGUUAGGCCGAA ACUUGUCG | 11243 |
| 2034 | ACAAGUAUU GGGGAAAG | 1825 | CUUUCCCC CUGAUGAGGCCGUUAGGCCGAA AUACUUGU | 11244 |
| 2046 | GAAAGCAUC GAAGUCUC | 1826 | GAGACUUC CUGAUGAGGCCGUUAGGCCGAA AUGCUUUC | 11245 |
| 2052 | AUCGAAGUC UCAUGCAC | 1827 | GUCCAUGA CUGAUGAGGCCGUUAGGCCGAA ACUUCGAU | 11246 |
| 2054 | CGAAGUCUC AUGCACGG | 1828 | CCGUGCAU CUGAUGAGGCCGUUAGGCCGAA AGACUUCG | 11247 |
| 2066 | CACGGCAUC UGGGAAUC | 1829 | GAUUCCCA CUGAUGAGGCCGUUAGGCCGAA AUGCCGUG | 11248 |
| 2074 | CUGGGAAUC CCCCUCCA | 1830 | UGGAGGGG CUGAUGAGGCCGUUAGGCCGAA AUUCCCAG | 11249 |
| 2080 | AUCCCCCUC CACAGAUC | 1831 | GAUCUGUG CUGAUGAGGCCGUUAGGCCGAA AGGGGGAU | 11250 |
| 2088 | CCACAGAUC AUGUGGUU | 1832 | AACCACAU CUGAUGAGGCCGUUAGGCCGAA AUCUGUGG | 11251 |
| 2096 | CAUGUGGUU UAAAGAUA | 1833 | UAUCUUUA CUGAUGAGGCCGUUAGGCCGAA ACCACAUG | 11252 |
| 2097 | AUGUGGUUU AAAGAUAA | 1834 | UUAUCUUU CUGAUGAGGCCGUUAGGCCGAA AACCACAU | 11253 |
| 2098 | UGUGGUUUA AAGAUAAU | 1835 | AUUAUCUU CUGAUGAGGCCGUUAGGCCGAA AAACCACA | 11254 |
| 2104 | UUAAAGAUA AUGAGACC | 1836 | GGUCUCAU CUGAUGAGGCCGUUAGGCCGAA AUCUUUAA | 11255 |
| 2115 | GAGACCCUU GUAGAAGA | 1837 | UCUUCUAC CUGAUGAGGCCGUUAGGCCGAA AGGGUCUC | 11256 |
| 2118 | ACCCUUGUA GAAGACUC | 1838 | GAGUCCUC CUGAUGAGGCCGUUAGGCCGAA ACAAGGGU | 11257 |
| 2126 | AGAAGACUC AGGCAUUG | 1839 | CAAUGCCU CUGAUGAGGCCGUUAGGCCGAA AGUCUUCU | 11258 |
| 2133 | UCAGGCAUU GUAUUGAA | 1840 | UUCAAUAC CUGAUGAGGCCGUUAGGCCGAA AUGCCUGA | 11259 |
| 2136 | GGCAUUGUA UUGAAGGA | 1841 | UCCUUCAA CUGAUGAGGCCGUUAGGCCGAA ACAAUGCC | 11260 |
| 2138 | CAUUGUAUU GAAGGAUG | 1842 | CAUCCUUC CUGAUGAGGCCGUUAGGCCGAA AUACAAUG | 11261 |
| 2160 | CGGAACCUC ACUAUCCG | 1843 | CGGAUAGU CUGAUGAGGCCGUUAGGCCGAA AGGUUCCG | 11262 |
| 2164 | ACCUCACUA UCCGCAGA | 1844 | UCUGCGGA CUGAUGAGGCCGUUAGGCCGAA AGUGAGGU | 11263 |
| 2166 | CUCACUAUC CGCAGAGU | 1845 | ACUCUGCG CUGAUGAGGCCGUUAGGCCGAA AUAGUGAG | 11264 |
| 2196 | GAAGGCCUC UACACCUG | 1846 | CAGGUGUA CUGAUGAGGCCGUUAGGCCGAA AGGCCUUC | 11265 |
| 2198 | AGGCCUCUA CACCUGCC | 1847 | GGCAGGUG CUGAUGAGGCCGUUAGGCCGAA AGAGGCCU | 11266 |
| 2220 | UGCAGUGUU CUUGGCUG | 1848 | CAGCCAAG CUGAUGAGGCCGUUAGGCCGAA ACACUCCA | 11267 |
| 2221 | GCAGUGUUC UUGGCUGU | 1849 | ACAGCCAA CUGAUGAGGCCGUUAGGCCGAA AACACUGC | 11268 |
| 2223 | AGUGUUCUU GGCUGUGC | 1850 | GCACAGCC CUGAUGAGGCCGUUAGGCCGAA AGAACACU | 11269 |
| 2246 | GGAGGCAUU UUUCAUAA | 1851 | UUAUGAAA CUGAUGAGGCCGUUAGGCCGAA AUGCCUCC | 11270 |
| 2247 | GAGGCAUUU UUCAUAAU | 1852 | AUUAUGAA CUGAUGAGGCCGUUAGGCCGAA AAUGCCUC | 11271 |
| 2248 | AGGCAUUUU UCAUAAUA | 1853 | UAUUAUGA CUGAUGAGGCCGUUAGGCCGAA AAAUGCCU | 11272 |
| 2249 | GGCAUUUUU CAUAAUAG | 1854 | CUAUUAUG CUGAUGAGGCCGUUAGGCCGAA AAAAUGCC | 11273 |
| 2250 | GCAUUUUUC AUAAUAGA | 1855 | UCUAUUAU CUGAUGAGGCCGUUAGGCCGAA AAAAAUGC | 11274 |
| 2253 | UUUUUCAUA AUAGAAGG | 1856 | CCUUCUAU CUGAUGAGGCCGUUAGGCCGAA AUGAAAAA | 11275 |
| 2256 | UUCAUAAUA GAAGGUGC | 1857 | GCACCUUC CUGAUGAGGCCGUUAGGCCGAA AUUAUGAA | 11276 |
| 2282 | GACGAACUU GGAAAUCA | 1858 | UGAUUUCC CUGAUGAGGCCGUUAGGCCGAA AGUUCGUC | 11277 |
| 2289 | UUGGAAAUC AUUAUUCU | 1859 | AGAAUAAU CUGAUGAGGCCGUUAGGCCGAA AUUUCCAA | 11278 |
| 2292 | GAAAUCAUU AUUCUAGU | 1860 | ACUAGAAU CUGAUGAGGCCGUUAGGCCGAA AUGAUUUC | 11279 |
| 2293 | AAAUCAUUA UUCUAGUA | 1861 | UACUAGAA CUGAUGAGGCCGUUAGGCCGAA AAUGAUUU | 11280 |
| 2295 | AUCAUUAUU CUAGUAGG | 1862 | CCUACUAG CUGAUGAGGCCGUUAGGCCGAA AUAAUGAU | 11281 |
| 2296 | UCAUUAUUC UAGUAGGC | 1863 | GCCUACUA CUGAUGAGGCCGUUAGGCCGAA AAUAAUGA | 11282 |
| 2298 | AUUAUUCUA GUAGGCAC | 1864 | GUGCCUAC CUGAUGAGGCCGUUAGGCCGAA AGAAUAAU | 11283 |
| 2301 | AUUCUAGUA GGCACGAC | 1865 | GUCGUGCC CUGAUGAGGCCGUUAGGCCGAA ACUAGAAU | 11284 |
| 2316 | ACGGUGAUU GCCAUGUU | 1866 | AACAUGGC CUGAUGAGGCCGUUAGGCCGAA AUCACCGU | 11285 |
| 2324 | UGCCAUGUU CUUCUGGC | 1867 | GCCAGAAG CUGAUGAGGCCGUUAGGCCGAA ACAUGGCA | 11286 |
| 2325 | GCCAUGUUC UUCUGGCU | 1868 | AGCCAGAA CUGAUGAGGCCGUUAGGCCGAA AACAUGGC | 11287 |
| 2327 | CAUGUUCUU CUGGCUAC | 1869 | GUAGCCAG CUGAUGAGGCCGUUAGGCCGAA AGAACAUG | 11288 |
| 2328 | AUGUUCUUC UGGCUACU | 1870 | AGUAGCCA CUGAUGAGGCCGUUAGGCCGAA AAGAACAU | 11289 |
| 2334 | UUCUGGCUA CUUCUUGU | 1871 | ACAAGAAG CUGAUGAGGCCGUUAGGCCGAA AGCCAGAA | 11290 |
| 2337 | UGGCUACUU CUUGUCAU | 1872 | AUGACAAG CUGAUGAGGCCGUUAGGCCGAA AGUAGCCA | 11291 |
| 2338 | GGCUACUUC UUGUCAUC | 1873 | GAUGACAA CUGAUGAGGCCGUUAGGCCGAA AAGUAGCC | 11292 |
| 2340 | CUACUUCUU GUCAUCAU | 1874 | AUGAUGAC CUGAUGAGGCCGUUAGGCCGAA AGAAGUAG | 11293 |
| 2343 | CUUCUUGUC AUCAUCCU | 1875 | AGGAUGAU CUGAUGAGGCCGUUAGGCCGAA ACAAGAAG | 11294 |
| 2346 | CUUGUCAUC AUCCUAGG | 1876 | CCUAGGAU CUGAUGAGGCCGUUAGGCCGAA AUGACAAG | 11295 |
| 2349 | GUCAUCAUC CUAGGGAC | 1877 | GUCCCUAG CUGAUGAGGCCGUUAGGCCGAA AUGAUGAC | 11296 |
| 2352 | AUCAUCCUA GGGACCGU | 1878 | ACGGUCCC CUGAUGAGGCCGUUAGGCCGAA AGGAUGAU | 11297 |
| 2361 | GGGACCGUU AAGCGGGC | 1879 | GCCCGCUU CUGAUGAGGCCGUUAGGCCGAA ACGGUCCC | 11298 |
| 2362 | GGACCGUUA AGCGGGCC | 1880 | GGCCCGCU CUGAUGAGGCCGUUAGGCCGAA AACGGUCC | 11299 |
| 2396 | GACAGGCUA CUUGUCCA | 1881 | UGGACAAG CUGAUGAGGCCGUUAGGCCGAA AGCCUGUC | 11300 |
| 2399 | AGGCUACUU GUCCAUCG | 1882 | CGAUGGAC CUGAUGAGGCCGUUAGGCCGAA AGUAGCCU | 11301 |
| 2402 | CUACUUGUC CAUCGUCA | 1883 | UGACGAUG CUGAUGAGGCCGUUAGGCCGAA ACAAGUAG | 11302 |
| 2406 | UUGUCCAUC GUCAUGGA | 1884 | UCCAUGAC CUGAUGAGGCCGUUAGGCCGAA AUGGACAA | 11303 |
| 2409 | UCCAUCGUC AUGGAUCC | 1885 | GGAUCCAU CUGAUGAGGCCGUUAGGCCGAA ACGAUGGA | 11304 |
| 2416 | UCAUGGAUC CAGAUGAA | 1886 | UUCAUCUG CUGAUGAGGCCGUUAGGCCGAA AUCCAUGA | 11305 |
| 2427 | GAUGAACUC CCAUUGGA | 1887 | UCCAAUGG CUGAUGAGGCCGUUAGGCCGAA AGUUCAUC | 11306 |
| 2432 | ACUCCCAUU GGAUGAAC | 1888 | GUUCAUCC CUGAUGAGGCCGUUAGGCCGAA AUGGGAGU | 11307 |
| 2443 | AUGAACAUU GUGAACGA | 1889 | UCGUUCAC CUGAUGAGGCCGUUAGGCCGAA AUGUUCAU | 11308 |
| 2458 | GACUGCCUU AUGAUGCC | 1890 | GGCAUCAU CUGAUGAGGCCGUUAGGCCGAA AGGCAGUC | 11309 |
| 2459 | ACUGCCUUA UGAUGCCA | 1891 | UGGCAUCA CUGAUGAGGCCGUUAGGCCGAA AAGGCAGU | 11310 |
| 2480 | AUGGGAAUU CCCCAGAG | 1892 | CUCUGGGG CUGAUGAGGCCGUUAGGCCGAA AUUCCCAU | 11311 |
| 2481 | UGGGAAUUC CCCAGAGA | 1893 | UCUCUGGG CUGAUGAGGCCGUUAGGCCGAA AAUUCCCA | 11312 |
| 2502 | CUGAACCUA GGUAAGCC | 1894 | GGCUUACC CUGAUGAGGCCGUUAGGCCGAA AGGUUCAG | 11313 |
| 2506 | ACCUAGGUA AGCCUCUU | 1895 | AAGAGGCU CUGAUGAGGCCGUUAGGCCGAA ACCUAGGU | 11314 |
| 2512 | GUAAGCCUC UUGGCCGU | 1896 | ACGGCCAA CUGAUGAGGCCGUUAGGCCGAA AGGCUUAC | 11315 |
| 2514 | AAGCCUCUU GGCCGUGG | 1897 | CCACGGCC CUGAUGAGGCCGUUAGGCCGAA AGAGGCUU | 11316 |
| 2528 | UGGUGCCUU UGGCCAAG | 1898 | CUUGGCCA CUGAUGAGGCCGUUAGGCCGAA AGGCACCA | 11317 |
| 2529 | GGUGCCUUU GGCCAAGA | 1899 | UCUUGGCC CUGAUGAGGCCGUUAGGCCGAA AAGGCACC | 11318 |
| 2541 | CAAGAGAUU GAAGCAGA | 1900 | UCUGCUUC CUGAUGAGGCCGUUAGGCCGAA AUCUCUUG | 11319 |
| 2555 | AGAUGCCUU UGGAAUUG | 1901 | CAAUUCCA CUGAUGAGGCCGUUAGGCCGAA AGGCAUCU | 11320 |
| 2556 | GAUGCCUUU GGAAUUGA | 1902 | UCAAUUCC CUGAUGAGGCCGUUAGGCCGAA AAGGCAUC | 11321 |
| 2562 | UUUGGAAUU GACAAGAC | 1903 | GUCUUGUC CUGAUGAGGCCGUUAGGCCGAA AUUCCAAA | 11322 |
| 2578 | CAGCAACUU GCAGGACA | 1904 | UGUCCUGC CUGAUGAGGCCGUUAGGCCGAA AGUUGCUG | 11323 |
| 2589 | AGGACAGUA GCAGUCAA | 1905 | UUGACUGC CUGAUGAGGCCGUUAGGCCGAA ACUGUCCU | 11324 |
| 2595 | GUAGCAGUC AAAAUGUU | 1906 | AACAUUUU CUGAUGAGGCCGUUAGGCCGAA ACUGCUAC | 11325 |
| 2603 | CAAAAUGUU GAAAGAAG | 1907 | CUUCUUUC CUGAUGAGGCCGUUAGGCCGAA ACAUUUUG | 11326 |
| 2632 | GUGAGCAUC GAGCUCUC | 1908 | GAGAGCUC CUGAUGAGGCCGUUAGGCCGAA AUGCUCAC | 11327 |
| 2638 | AUCGAGCUC UCAUGUCU | 1909 | AGACAUGA CUGAUGAGGCCGUUAGGCCGAA AGCUCGAU | 11328 |
| 2640 | CGAGCUCUC AUGUCUGA | 1910 | UCAGACAU CUGAUGAGGCCGUUAGGCCGAA AGAGCUCG | 11329 |
| 2645 | UCUCAUGUC UGAACUCA | 1911 | UGAGUUCA CUGAUGAGGCCGUUAGGCCGAA ACAUGAGA | 11330 |
| 2652 | UCUGAACUC AAGAUCCU | 1912 | AGGAUCUU CUGAUGAGGCCGUUAGGCCGAA AGUUCAGA | 11331 |
| 2658 | CUCAAGAUC CUCAUUCA | 1913 | UGAAUGAG CUGAUGAGGCCGUUAGGCCGAA AUCUUGAG | 11332 |
| 2661 | AAGAUCCUC AUUCAUAU | 1914 | AUAUGAAU CUGAUGAGGCCGUUAGGCCGAA AGGAUCUU | 11333 |
| 2664 | AUCCUCAUU CAUAUUGG | 1915 | CCAAUAUG CUGAUGAGGCCGUUAGGCCGAA AUGAGGAU | 11334 |
| 2665 | UCCUCAUUC AUAUUGGU | 1916 | ACCAAUAU CUGAUGAGGCCGUUAGGCCGAA AAUGAGGA | 11335 |
| 2668 | UCAUUCAUA UUGGUCAC | 1917 | GUGACCAA CUGAUGAGGCCGUUAGGCCGAA AUGAAUGA | 11336 |
| 2670 | AUUCAUAUU GGUCACCA | 1918 | UGGUGACC CUGAUGAGGCCGUUAGGCCGAA AUAUGAAU | 11337 |
| 2674 | AUAUUGGUC ACCAUCUC | 1919 | GAGAUGGU CUGAUGAGGCCGUUAGGCCGAA ACCAAUAU | 11338 |
| 2680 | GUCACCAUC UCAAUGUG | 1920 | CACAUUGA CUGAUGAGGCCGUUAGGCCGAA AUGGUGAC | 11339 |
| 2682 | CACCAUCUC AAUGUGGU | 1921 | ACCACAUU CUGAUGAGGCCGUUAGGCCGAA AGAUGGUG | 11340 |
| 2691 | AAUGUGGUC AACCUUCU | 1922 | AGAAGGUU CUGAUGAGGCCGUUAGGCCGAA ACCACAUU | 11341 |
| 2697 | GUCAACCUU CUAGGUGC | 1923 | GCACCUAG CUGAUGAGGCCGUUAGGCCGAA AGGUUUAC | 11342 |
| 2698 | UCAACCUUC UAGGUGCC | 1924 | GGCACCUA CUGAUGAGGCCGUUAGGCCGAA AAGGUUGA | 11343 |
| 2700 | AACCUUCUA GGUGCCUG | 1925 | CAGGCACC CUGAUGAGGCCGUUAGGCCGAA AGAAGGUU | 11344 |
| 2710 | GUGCCUGUA CCAAGCCA | 1926 | UGGCUUGG CUGAUGAGGCCGUUAGGCCGAA ACAGGCAC | 11345 |
| 2730 | GGGCCACUC AUGGUGAU | 1927 | AUCACCAU CUGAUGAGGCCGUUAGGCCGAA AGUGGCCC | 11346 |
| 2739 | AUGGUGAUU GUGGAAUU | 1928 | AAUUCCAC CUGAUGAGGCCGUUAGGCCGAA AUCACCAU | 11347 |
| 2747 | UGUGGAAUU CUGCAAAU | 1929 | AUUUGCAG CUGAUGAGGCCGUUAGGCCGAA AUUCCACA | 11348 |
| 2748 | GUGGAAUUC UGCAAAUU | 1930 | AAUUUGCA CUGAUGAGGCCGUUAGGCCGAA AAUUCCAC | 11349 |
| 2756 | CUGCAAAUU UGGAAACC | 1931 | GGUUUCCA CUGAUGAGGCCGUUAGGCCGAA AUUUGCAG | 11350 |
| 2757 | UGCAAAUUU GGAAACCU | 1932 | AGGUUUCC CUGAUGAGGCCGUUAGGCCGAA AAUUUGCA | 11351 |
| 2768 | AAACCUGUC CACUUACC | 1933 | GGUAAGUG CUGAUGAGGCCGUUAGGCCGAA ACAGGUUU | 11352 |
| 2773 | UGUCCACUU ACCUGAGG | 1934 | CCUCAGGU CUGAUGAGGCCGUUAGGCCGAA AGUGGACA | 11353 |
| 2774 | GUCCACUUA CCUGAGGA | 1935 | UCCUCAGG CUGAUGAGGCCGUUAGGCCGAA AAGUGGAC | 11354 |
| 2798 | AAAUGAAUU UGUCCCCU | 1936 | AGGGGACA CUGAUGAGGCCGUUAGGCCGAA AUUCAUUU | 11355 |
| 2799 | AAUGAAUUU GUCCCCUA | 1937 | UAGGGGAC CUGAUGAGGCCGUUAGGCCGAA AAUUCAUU | 11356 |
| 2802 | GAAUUUGUC CCCUACAA | 1938 | UUGUAGGG CUGAUGAGGCCGUUAGGCCGAA ACAAAUUC | 11357 |
| 2807 | UGUCCCCUA CAAGACCA | 1939 | UGGUCUUG CUGAUGAGGCCGUUAGGCCGAA AGGGGACA | 11358 |
| 2828 | GGCACGAUU CCGUCAAG | 1940 | CUUGACGG CUGAUGAGGCCGUUAGGCCGAA AUCGUGCC | 11359 |
| 2829 | GCACGAUUC CGUCAAGG | 1941 | CCUUGACG CUGAUGAGGCCGUUAGGCCGAA AAUCGUGC | 11360 |
| 2833 | GAUUCCGUC AAGGGAAA | 1942 | UUUCCCUU CUGAUGAGGCCGUUAGGCCGAA ACGGAAUC | 11361 |
| 2846 | GAAAGACUA CGUUGGAG | 1943 | CUCCAACG CUGAUGAGGCCGUUAGGCCGAA AGUCUUUC | 11362 |
| 2850 | GACUACGUU GGAGCAAU | 1944 | AUUGCUCC CUGAUGAGGCCGUUAGGCCGAA ACGUAGUC | 11363 |
| 2859 | GGAGCAAUC CCUGUGGA | 1945 | UCCACAGG CUGAUGAGGCCGUUAGGCCGAA AUUGCUCC | 11364 |
| 2869 | CUGUGGAUC UGAAACGG | 1946 | CCGUUUCA CUGAUGAGGCCGUUAGGCCGAA AUCCACAG | 11365 |
| 2882 | ACGGCGCUU GGACAGCA | 1947 | UGCUGUCC CUGAUGAGGCCGUUAGGCCGAA AGCGCCGU | 11366 |
| 2892 | GACAGCAUC ACCAGUAG | 1948 | CUACUGGU CUGAUGAGGCCGUUAGGCCGAA AUGCUGUC | 11367 |
| 2899 | UCACCAGUA GCCAGAGC | 1949 | GCUCUGGC CUGAUGAGGCCGUUAGGCCGAA ACUGGUGA | 11368 |
| 2909 | CCAGAGCUC AGCCAGCU | 1950 | AGCUGGCU CUGAUGAGGCCGUUAGGCCGAA AGCUCUGG | 11369 |
| 2918 | AGCCAGCUC UGGAUUUG | 1951 | CAAAUCCA CUGAUGAGGCCGUUAGGCCGAA AGCUGGCU | 11370 |
| 2924 | CUCUGGAUU UGUGGAGG | 1952 | COUCCACA CUGAUGAGGCCGUUAGGCCGAA AUCCAGAG | 11371 |
| 2925 | UCUGGAUUU GUGGAGGA | 1953 | UCCUCCAC CUGAUGAGGCCGUUAGGCCGAA AAUCCAGA | 11372 |
| 2939 | GGAGAAGUC CCUCAGUG | 1954 | CACUGAGG CUGAUGAGGCCGUUAGGCCGAA ACUUCUCC | 11373 |
| 2943 | AAGUCCCUC AGUGAUGU | 1955 | ACAUCACU CUGAUGAGGCCGUUAGGCCGAA AGGGACUU | 11374 |
| 2952 | AGUGAUGUA GAAGAAGA | 1956 | UCUUCUUC CUGAUGAGGCCGUUAGGCCGAA ACAUCACU | 11375 |
| 2968 | AGGAAGCUC CUGAAGAU | 1957 | AUCUUCAG CUGAUGAGGCCGUUAGGCCGAA AGCUUCCU | 11376 |
| 2977 | CUGAAGAUC UGUAUAAG | 1958 | CUUAUACA CUGAUGAGGCCGUUAGGCCGAA AUCUUCAG | 11377 |
| 2981 | AGAUCUGUA UAAGGACU | 1959 | AGUCCUUA CUGAUGAGGCCGUUAGGCCGAA ACAGAUCU | 11378 |
| 2983 | AUCUGUAUA AGGACUUC | 1960 | GAAGUCCU CUGAUGAGGCCGUUAGGCCGAA AUACAGAU | 11379 |
| 2990 | UAAGGACUU CCUGACCU | 1961 | AGGUCAGG CUGAUGAGGCCGUUAGGCCGAA AGUCCUUA | 11380 |
| 2991 | AAGGACUUC CUGACCUU | 1962 | AAGGUCAG CUGAUGAGGCCGUUAGGCCGAA AAGUCCUU | 11381 |
| 2999 | CCUGACCUU GGAGCAUC | 1963 | GAUGCUCC CUGAUGAGGCCGUUAGGCCGAA AGGUCAGG | 11382 |
| 3007 | UGGAGCAUC UCAUCUGU | 1964 | ACAGAUGA CUGAUGAGGCCGUUAGGCCGAA AUGCUCCA | 11383 |
| 3009 | GAGCAUCUC AUCUGUUA | 1965 | UAACAGAU CUGAUGAGGCCGUUAGGCCGAA AGAUGCUC | 11384 |
| 3012 | CAUCUCAUC UGUUACAG | 1966 | CUGUAACA CUGAUGAGGCCGUUAGGCCGAA AUGAGAUG | 11385 |
| 3016 | UCAUCUGUU ACAGCUUC | 1967 | GAAGCUGU CUGAUGAGGCCGUUAGGCCGAA ACAGAUGA | 11386 |
| 3017 | CAUCUGUUA CAGCUUCC | 1968 | GGAAGCUG CUGAUGAGGCCGUUAGGCCGAA AACAGAUG | 11387 |
| 3023 | UUACAGCUU CCAAGUGG | 1969 | CCACUUGG CUGAUGAGGCCGUUAGGCCGAA AGCUGUAA | 11388 |
| 3024 | UACAGCUUC CAAGUGGC | 1970 | GCCACUUG CUGAUGAGGCCGUUAGGCCGAA AAGCUGUA | 11389 |
| 3034 | AAGUGGCUA AGGGCAUG | 1971 | CAUGCCCU CUGAUGAGGCCGUUAGGCCGAA AGCCACUU | 11390 |
| 3047 | CAUGGAGUU CUUGGCAU | 1972 | AUGCCAAG CUGAUGAGGCCGUUAGGCCGAA ACUCCAUG | 11391 |
| 3048 | AUGGAGGUC UUGGCAUC | 1973 | GAUGCCAA CUGAUGAGGCCGUUAGGCCGAA AACUCCAU | 11392 |
| 3050 | GGAGUUCUU GGCAUCGC | 1974 | GCGAUGCC CUGAUGAGGCCGUUAGGCCGAA AGAACUCC | 11393 |
| 3056 | CUUGGCAUC GCGAAAGU | 1975 | ACUUUCGC CUGAUGAGGCCGUUAGGCCGAA AUGCCAAG | 11394 |
| 3067 | GAAAGUGUA UCCACAGG | 1976 | CCUGUGGA CUGAUGAGGCCGUUAGGCCGAA ACACUUUC | 11395 |
| 3069 | AAGUGUAUC CACAGGGA | 1977 | UCCCUGUG CUGAUGAGGCCGUUAGGCCGAA AUACACUU | 11396 |
| 3094 | CACGAAAUA UCCUCUUA | 1978 | UAAGAGGA CUGAUGAGGCCGUUAGGCCGAA AUUUCCUG | 11397 |
| 3096 | CGAAAUAUC CUCUGAUC | 1979 | GAUAAGAG CUGAUGAGGCCGUUAGGCCGAA AUAUUUCG | 11398 |
| 3099 | AAUAUCCUC UUAUCGGA | 1980 | UCCGAUAA CUGAUGAGGCCGUUAGGCCGAA AGGAUAUU | 11399 |
| 3101 | UAUCCUCUU AUCGGAGA | 1981 | UCUCCGAU CUGAUGAGGCCGUUAGGCCGAA AGAGGAUA | 11400 |
| 3102 | AUCCUOGGA UCGGAGAA | 1982 | UUCUCCGA CUGAUGAGGCCGUUAGGCCGAA AAGAGGAU | 11401 |
| 3104 | CCUCUUAUC GGAGAAGA | 1983 | UCUUCUCC CUGAUGAGGCCGUUAGGCCGAA AUAAGAGG | 11402 |
| 3120 | AACGUGGUU AAAAUCUG | 1984 | CAGAUUUU CUGAUGAGGCCGUUAGGCCGAA ACCACGUU | 11403 |
| 3121 | ACGUGGUUA AAAUCUGU | 1985 | ACAGAUUU CUGAUGAGGCCGUUAGGCCGAA AACCACGU | 11404 |
| 3126 | GUUAAAAUC UGUGACUU | 1986 | AAGUCACA CUGAUGAGGCCGUUAGGCCGAA AUUUUAAC | 11405 |
| 3134 | CUGUGACUU UGGCUUGG | 1987 | CCAAGCCA CUGAUGAGGCCGUUAGGCCGAA AGUCACAG | 11406 |
| 3135 | UGUGACUUU GGCUUGGC | 1988 | GCCAAGCC CUGAUGAGGCCGUUAGGCCGAA AAGUCACA | 11407 |
| 3140 | CUUUGGCUU GGCCCGGG | 1989 | CCCGGGCC CUGAUGAGGCCGUUAGGCCGAA AGCCAAAG | 11408 |
| 3151 | CCCGGGAUA UUUAUAAA | 1990 | UUUAUAAA CUGAUGAGGCCGUUAGGCCGAA AUCCCGGG | 11409 |
| 3153 | CGGGAUAUU UAUAAAGA | 1991 | UCUUUAUA CUGAUGAGGCCGUUAGGCCGAA AUAUCCCG | 11410 |
| 3154 | GGGAUAUUU AUAAAGAU | 1992 | AUCUUUAU CUGAUGAGGCCGUUAGGCCGAA AAUAUCCC | 11411 |
| 3155 | GGAUAUUUA UAAAGAUC | 1993 | GAUCUUUA CUGAUGAGGCCGUUAGGCCGAA AAAUAUCC | 11412 |
| 3157 | AUAUUUAUA AAGAUCCA | 1994 | UGGAUCUU CUGAUGAGGCCGUUAGGCCGAA AUAAAUAU | 11413 |
| 3163 | AUAAAGAUC CAGAUUAU | 1995 | AUAAUCUG CUGAUGAGGCCGUUAGGCCGAA AUCUUUAU | 11414 |
| 3169 | AUCCAGAUU AUGUCAGA | 1996 | UCUGACAU CUGAUGAGGCCGUUAGGCCGAA AUCUGGAU | 11415 |
| 3170 | UCCAGAUUA UGUCAGAA | 1997 | UUCUGACA CUGAUGAGGCCGUUAGGCCGAA AAUCUGGA | 11416 |
| 3174 | GAUUAUGUC AGAAAAGG | 1998 | CCUUUUCU CUGAUGAGGCCGUUAGGCCGAA ACAUAAUC | 11417 |
| 3190 | GAGAUGCUC GCCUCCCU | 1999 | AGGGAGGC CUGAUGAGGCCGUUAGGCCGAA AGCAUCUC | 11418 |
| 3195 | GCUCGCCUC CCUUUGAA | 2000 | UUCAAAGG CUGAUGAGGCCGUUAGGCCGAA AGGCGAGC | 11419 |
| 3199 | GCCUCCCUU UGAAAUGG | 2001 | CCAUUUCA CUGAUGAGGCCGUUAGGCCGAA AGGGAGGC | 11420 |
| 3200 | CCUCCCUUU GAAAUGGA | 2002 | UCCAUUUC CUGAUGAGGCCGUUAGGCCGAA AAGGGAGG | 11421 |
| 3225 | GAAACAAUU UUUGACAG | 2003 | CUGUCAAA CUGAUGAGGCCGUUAGGCCGAA AUUGUUEU | 11422 |
| 3226 | AAACAAUUU UUGACAGA | 2004 | UCUGUCAA CUGAUGAGGCCGUUAGGCCGAA AAUUGUUU | 11423 |
| 3227 | AACAAUUUU UGACAGAG | 2005 | CUCUGUCA CUGAUGAGGCCGUUAGGCCGAA AAAUUGUU | 11424 |
| 3228 | ACAAUUUUU GACAGAGU | 2006 | ACUCUGUC CUGAUGAGGCCGUUAGGCCGAA AAAAUUGU | 11425 |
| 3239 | CAGAGUGUA CACAAUCC | 2007 | GGAUUGUG CUGAUGAGGCCGUUAGGCCGAA ACACUCUG | 11426 |
| 3246 | UACACAAUC CAGAGUGA | 2008 | UCACUCUG CUGAUGAGGCCGUUAGGCCGAA AUUGUGUA | 11427 |
| 3258 | AGUGACGUC UGGUCUUU | 2009 | AAAGACCA CUGAUGAGGCCGUUAGGCCGAA ACGUCACU | 11428 |
| 3263 | CGUCUGGUC UUUUGGUG | 2010 | CACCAAAA CUGAUGAGGCCGUUAGGCCGAA ACCAGACG | 11429 |
| 3265 | UCUGGUCUU UUGGUGUU | 2011 | AACACCAA CUGAUGAGGCCGUUAGGCCGAA AGACCAGA | 11430 |
| 3266 | CUGGUCUUU UGGUGUUU | 2012 | AAACACCA CUGAUGAGGCCGUUAGGCCGAA AAGACCAG | 11431 |
| 3267 | UGGUCUUUU GGUGUUUU | 2013 | AAAACACC CUGAUGAGGCCGUUAGGCCGAA AAAGACCA | 11432 |
| 3273 | UUUGGUGUU UUGCUGUG | 2014 | CACAGCAA CUGAUGAGGCCGUUAGGCCGAA ACACCAAA | 11433 |
| 3274 | UUGGUGUUU UGCUGUGG | 2015 | CCACAGCA CUGAUGAGGCCGUUAGGCCGAA AACACCAA | 11434 |
| 3275 | UGGUGUUUU GCUGUGGG | 2016 | CCCACAGC CUGAUGAGGCCGUUAGGCCGAA AAACACCA | 11435 |
| 3288 | UGGGAAAUA UUUUCCUU | 2017 | AAGGAAAA CUGAUGAGGCCGUUAGGCCGAA AUUUCCCA | 11436 |
| 3290 | GGAAAUAUU UUCCUUAG | 2018 | CUAAGGAA CUGAUGAGGCCGUUAGGCCGAA AUAUUUCC | 11437 |
| 3291 | GAAAUAUUU UCCUUAGG | 2019 | CCUAAGGA CUGAUGAGGCCGUUAGGCCGAA AAUAUUUC | 11438 |
| 3292 | AAAUAUUUU CCUUAGGU | 2020 | ACCUAAGG CUGAUGAGGCCGUUAGGCCGAA AAAUAUUU | 11439 |
| 3293 | AAUAUUUUC CUUAGGUG | 2021 | CACCUAAG CUGAUGAGGCCGUUAGGCCGAA AAAAUAUU | 11440 |
| 3296 | AUUUUCCUU AGGUGCUU | 2022 | AAGCACCU CUGAUGAGGCCGUUAGGCCGAA AGGAAAAU | 11441 |
| 3297 | UUUUCCUUA GGUGCUUC | 2023 | GAAGCACC CUGAUGAGGCCGUUAGGCCGAA AAGGAAAA | 11442 |
| 3304 | UAGGUGCUU CUCCAUAU | 2024 | AUAUGGAG CUGAUGAGGCCGUUAGGCCGAA AGCACCUA | 11443 |
| 3305 | AGGUGCUUC UCCAUAUC | 2025 | GAUAUGGA CUGAUGAGGCCGUUAGGCCGAA AAGCACCU | 11444 |
| 3307 | GUGCUUCUC CAUAUCCU | 2026 | AGGAUAUG CUGAUGAGGCCGUUAGGCCGAA AGAAGCAC | 11445 |
| 3311 | UUCUCCAUA UCCUGGGG | 2027 | CCCCAGGA CUGAUGAGGCCGUUAGGCCGAA AUGGAGAA | 11446 |
| 3313 | CUCCAUAUC CUGGGGUA | 2028 | UACCCCAG CUGAUGAGGCCGUUAGGCCGAA AUAUGGAG | 11447 |
| 3321 | CCUGGGGUA AAGAUUGA | 2029 | UCAAUCUU CUGAUGAGGCCGUUAGGCCGAA ACCCCAGG | 11448 |
| 3327 | GUAAAGAUU GAUGAAGA | 2030 | UCUUCAUC CUGAUGAGGCCGUUAGGCCGAA AUCUUUAC | 11449 |
| 3338 | UGAAGAAUU UUGUAGGC | 2031 | GCCUACAA CUGAUGAGGCCGUUAGGCCGAA AUUCUUCA | 11450 |
| 3339 | GAAGAAUUU UGUAGGCG | 2032 | CGCCUACA CUGAUGAGGCCGUUAGGCCGAA AAUUCUUC | 11451 |
| 3340 | AAGAAUUUU GUAGGCGA | 2033 | UCGCCUAC CUGAUGAGGCCGUUAGGCCGAA AAAUUCUU | 11452 |
| 3343 | AAUUUUGUA GGCGAUUG | 2034 | CAAUCGCC CUGAUGAGGCCGUUAGGCCGAA ACAAAAUU | 11453 |
| 3350 | UAGGCGAUU GAAAGAAG | 2035 | CUUCUUUC CUGAUGAGGCCGUUAGGCCGAA AUCGCCUA | 11454 |
| 3364 | AAGGAACUA GAAUGAGG | 2036 | CCUCAUUC CUGAUGAGGCCGUUAGGCCGAA AGUUCCUU | 11455 |
| 3382 | CCCCUGAUU AUACUACA | 2037 | UGUAGUAU CUGAUGAGGCCGUUAGGCCGAA AUCAGGGG | 11456 |
| 3383 | CCCUGAUUA UACUACAC | 2038 | GUGUAGUA CUGAUGAGGCCGUUAGGCCGAA AAUCAGGG | 11457 |
| 3385 | CUGAUUAUA CUACACCA | 2039 | UGGUGUAG CUGAUGAGGCCGUUAGGCCGAA AUAAUCAG | 11458 |
| 3388 | AUUAUACUA CACCAGAA | 2040 | UUCUGGUG CUGAUGAGGCCGUUAGGCCGAA AGUAUAAU | 11459 |
| 3401 | AGAAAUGUA CCAGACCA | 2041 | UGGUCUGG CUGAUGAGGCCGUUAGGCCGAA ACAUUUCU | 11460 |
| 3439 | AGCCCAGUC AGAGACCC | 2042 | GGGUCUCU CUGAUGAGGCCGUUAGGCCGAA ACUGGGCU | 11461 |
| 3452 | ACCCACGUU UUCAGAGU | 2043 | ACUCUGAA CUGAUGAGGCCGUUAGGCCGAA ACGUGGGU | 11462 |
| 3453 | CCCACGUUU UCAGAGUU | 2044 | AACUCUGA CUGAUGAGGCCGUUAGGCCGAA AACGUGGG | 11463 |
| 3454 | CCACGUUUU CAGAGUUG | 2045 | CAACUCUG CUGAUGAGGCCGUUAGGCCGAA AAACGUGG | 11464 |
| 3455 | CACGUUUUC AGAGUUGG | 2046 | CCAACUCU CUGAUGAGGCCGUUAGGCCGAA AAAACGUG | 11465 |
| 3461 | UUCAGAGUU GGUGGAAC | 2047 | GUUCCACC CUGAUGAGGCCGUUAGGCCGAA ACUCUGAA | 11466 |
| 3472 | UGGAACAUU UGGGAAAU | 2048 | AUUUCCCA CUGAUGAGGCCGUUAGGCCGAA AUGUUCCA | 11467 |
| 3473 | GGAACAUUU GGGAAAUC | 2049 | GAUUUCCC CUGAUGAGGCCGUUAGGCCGAA AAUGUUCC | 11468 |
| 3481 | UGGGAAAUC UCUUGCAA | 2050 | UUGCAAGA CUGAUGAGGCCGUUAGGCCGAA AUUUCCCA | 11469 |
| 3483 | GGAAAUCUC UUGCAAGC | 2051 | GCUUGCAA CUGAUGAGGCCGUUAGGCCGAA AGAUUUCC | 11470 |
| 3485 | AAAUCUCUU GCAAGCUA | 2052 | UAGCUUGC CUGAUGAGGCCGUUAGGCCGAA AGAGAUUU | 11471 |
| 3493 | UGCAAGCUA AUGGUCAG | 2053 | CUGAGCAU CUGAUGAGGCCGUUAGGCCGAA AGCUUGCA | 11472 |
| 3499 | CUAAUGCUC AGCAGGAU | 2054 | AUCCUGCU CUGAUGAGGCCGUUAGGCCGAA AGCAUUAG | 11473 |
| 3518 | CAAAGACUA CAUUGUUC | 2055 | GAACAAUG CUGAUGAGGCCGUUAGGCCGAA AGUCUUUG | 11474 |
| 3522 | GACUACAUU GUUCUUCC | 2056 | GGAAGAAC CUGAUGAGGCCGUUAGGCCGAA AUGUAGUC | 11475 |
| 3525 | UACAUUGUU CUUCCGAU | 2057 | AUCGGAAG CUGAUGAGGCCGUUAGGCCGAA ACAAUGUA | 11476 |
| 3526 | ACAUUGUUC UUCCGAUA | 2058 | UAUCGGAA CUGAUGAGGCCGUUAGGCCGAA AACAAUGU | 11477 |
| 3528 | AUUGUUCUU CCGAUAUC | 2059 | GAUAUCGG CUGAUGAGGCCGUUAGGCCGAA AGAACAAU | 11478 |
| 3529 | UUGUUCUUC CGAUAUCA | 2060 | UGAUAUCG CUGAUGAGGCCGUUAGGCCGAA AAGAACAA | 11479 |
| 3534 | CUUCCGAUA UCAGAGAC | 2061 | GUCUCUGA CUGAUGAGGCCGUUAGGCCGAA AUCGGAAG | 11480 |
| 3536 | UCCGAUAUC AGAGACUU | 2062 | AAGUCUCU CUGAUGAGGCCGUUAGGCCGAA AUAUCGGA | 11481 |
| 3544 | CAGAGACUU UGAGCAUG | 2063 | CAUGOUCA CUGAUGAGGCCGUUAGGCCGAA AGUCUCUG | 11482 |
| 3545 | AGAGACUUU GAGCAUGG | 2064 | CCAUGCUC CUGAUGAGGCCGUUAGGCCGAA AAGUCUCU | 11483 |
| 3562 | AAGAGGAUU CUGGACUC | 2065 | GAGUCCAG CUGAUGAGGCCGUUAGGCCGAA AUCCUCUU | 11484 |
| 3563 | AGAGGAUUC UGGACUCU | 2066 | AGAGUCCA CUGAUGAGGCCGUUAGGCCGAA AAUCCUCU | 11485 |
| 3570 | UCUGGACUC UCUCUGCC | 2067 | GGCAGAGA CUGAUGAGGCCGUUAGGCCGAA AGUCCAGA | 11486 |
| 3572 | UGGACUCUC UCUGCCUA | 2068 | UAGGCAGA CUGAUGAGGCCGUUAGGCCGAA AGAGUCCA | 11487 |
| 3574 | GACUCUCUC UGCCUACC | 2069 | GGUAGGCA CUGAUGAGGCCGUUAGGCCGAA AGAGAGUC | 11488 |
| 3580 | CUCUGCCUA CCUCACCU | 2070 | AGGUGAGG CUGAUGAGGCCGUUAGGCCGAA AGGCAGAG | 11489 |
| 3584 | GCCUACCUC ACCUGUUU | 2071 | AAACAGGU CUGAUGAGGCCGUUAGGCCGAA AGGUAGGC | 11490 |
| 3591 | UCACCUGUU UCCUGUAU | 2072 | AUACAGGA CUGAUGAGGCCGUUAGGCCGAA ACAGGUGA | 11491 |
| 3592 | CACCUGUUU CCUGUAUG | 2073 | CAUACAGG CUGAUGAGGCCGUUAGGCCGAA AACAGGUG | 11492 |
| 3593 | ACCUGUUUC CUGUAUGG | 2074 | CCAUACAG CUGAUGAGGCCGUUAGGCCGAA AAACAGGU | 11493 |
| 3598 | UUUCCUGUA UGGAGGAG | 2075 | CUCCUCCA CUGAUGAGGCCGUUAGGCCGAA ACAGGAAA | 11494 |
| 3615 | GAGGAAGUA UGUGACCC | 2076 | GGGUCACA CUGAUGAGGCCGUUAGGCCGAA ACUUCCUC | 11495 |
| 3629 | CCCCAAAUU CCAUUAUG | 2077 | CAUAAUGG CUGAUGAGGCCGUUAGGCCGAA AUUUGGGG | 11496 |
| 3630 | CCCAAAUUC CAUUAUGA | 2078 | UCAUAAUG CUGAUGAGGCCGUUAGGCCGAA AAUUUGGG | 11497 |
| 3634 | AAUUCCAUU AUGACAAC | 2079 | GUUGUCAU CUGAUGAGGCCGUUAGGCCGAA AUGGAAUU | 11498 |
| 3635 | AUUCCAUUA UGACAACA | 2080 | UGUUGUCA CUGAUGAGGCCGUUAGGCCGAA AAUGGAAU | 11499 |
| 3654 | GCAGGAAUC AGUCAGUA | 2081 | UACUGACU CUGAUGAGGCCGUUAGGCCGAA AUUCCUGC | 11500 |
| 3658 | GAAUCAGUC AGUAUCUG | 2082 | CAGAUACU CUGAUGAGGCCGUUAGGCCGAA ACUGAUUC | 11501 |
| 3662 | CAGUCAGUA UCUGCAGA | 2083 | UCUGCAGA CUGAUGAGGCCGUUAGGCCGAA ACUGACUG | 11502 |
| 3664 | GUCAGUAUC UGCAGAAC | 2084 | GUUCUGCA CUGAUGAGGCCGUUAGGCCGAA AUACUGAC | 11503 |
| 3676 | AGAACAGUA AGCGAAAG | 2085 | CUUUCGCU CUGAUGAGGCCGUUAGGCCGAA ACUGUUCU | 11504 |
| 3702 | GUGAGUGUA AAAACAUU | 2086 | AAUGUUUU CUGAUGAGGCCGUUAGGCCGAA ACACUCAC | 11505 |
| 3710 | AAAPACAUU UGAAGAUA | 2087 | UAUCUUCA CUGAUGAGGCCGUUAGGCCGAA AUGUUUUU | 11506 |
| 3711 | AAAACAUUU GAAGAUAU | 2088 | AUAUCUUC CUGAUGAGGCCGUUAGGCCGAA AAUGUUUU | 11507 |
| 3718 | UUGAAGAUA UCCCGUUA | 2089 | UAACGGGA CUGAUGAGGCCGUUAGGCCGAA AUCUUCAA | 11508 |
| 3720 | GAAGAUAUC CCGUUAGA | 2090 | UCUAACGG CUGAUGAGGCCGUUAGGCCGAA AUAUCUUC | 11509 |
| 3725 | UAUCCCGUU AGAAGAAC | 2091 | GUUCUUCU CUGAUGAGGCCGUUAGGCCGAA ACGGGAUA | 11510 |
| 3726 | AUCCCGUUA GAAGAACC | 2092 | GGUUCUUC CUGAUGAGGCCGUUAGGCCGAA AACGGGAU | 11511 |
| 3741 | CCAGAAGUA AAAGUAAU | 2093 | AUUACUUU CUGAUGAGGCCGUUAGGCCGAA ACUUCUGG | 11512 |
| 3747 | GUAAAAGUA AUCCCAGA | 2094 | UCUGGGAU CUGAUGAGGCCGUUAGGCCGAA ACUUUUAC | 11513 |
| 3750 | AAAGUAAUC CCAGAUGA | 2095 | UCAUCUGG CUGAUGAGGCCGUUAGGCCGAA AUUACUUU | 11514 |
| 3778 | ACAGUGGUA UGGUUCUU | 2096 | AAGAACCA CUGAUGAGGCCGUUAGGCCGAA ACCACUGU | 11515 |
| 3783 | GGUAUGGUU CUUGCCUC | 2097 | GAGGCAAG CUGAUGAGGCCGUUAGGCCGAA ACCAUACC | 11516 |
| 3784 | GUAUGGUUC UUGCCUCA | 2098 | UGAGGCAA CUGAUGAGGCCGUUAGGCCGAA AACCAUAC | 11517 |
| 3786 | AUGGUUCUU GCCUCAGA | 2099 | UCUGAGGC CUGAUGAGGCCGUUAGGCCGAA AGAACCAU | 11518 |
| 3791 | UCUUGCCUC AGAAGAGC | 2100 | GCUCUUCU CUGAUGAGGCCGUUAGGCCGAA AGGCAAGA | 11519 |
| 3808 | UGAAAACUU UGGAAGAC | 2101 | GUCUUCCA CUGAUGAGGCCGUUAGGCCGAA AGUUUUCA | 11520 |
| 3809 | GAAAACUUU GGAAGACA | 2102 | UGUCUUCC CUGAUGAGGCCGUUAGGCCGAA AAGUUUUC | 11521 |
| 3827 | AACCAAAUU AUCUCCAU | 2103 | AUGGAGAU CUGAUGAGGCCGUUAGGCCGAA AUUUGGUU | 11522 |
| 3828 | ACCAAAUUA UCUCCAUC | 2104 | GAUGGAGA CUGAUGAGGCCGUUAGGCCGAA AAUUUGGU | 11523 |
| 3830 | CAAAUUAUC UCCAUCUU | 2105 | AAGAUGGA CUGAUGAGGCCGUUAGGCCGAA AUAAUUUG | 11524 |
| 3832 | AAUUAUCUC CAUCUTUU | 2106 | AAAAGAUG CUGAUGAGGCCGUUAGGCCGAA AGAUAAUU | 11525 |
| 3836 | AUCUCCAUC UUUUGGUG | 2107 | CACCAAAA CUGAUGAGGCCGUUAGGCCGAA AUGGAGAU | 11526 |
| 3838 | CUCCAUCUU UUGGUGGA | 2108 | UCCACCAA CUGAUGAGGCCGUUAGGCCGAA AGAUGGAG | 11527 |
| 3839 | UCCAUCUUU UGGUGGAA | 2109 | UUCCACCA CUGAUGAGGCCGUUAGGCCGAA AAGAUGGA | 11528 |
| 3840 | CCAUCUUUU GGUGGAAU | 2110 | AUUCCACC CUGAUGAGGCCGUUAGGCCGAA AAAGAUGG | 11529 |
| 3872 | CAGGGAGUC UGUGGCAU | 2111 | AUGCCACA CUGAUGAGGCCGUUAGGCCGAA ACUCCCUG | 11530 |
| 3881 | UGUGGCAUC UGAAGGCU | 2112 | AGCCUUCA CUGAUGAGGCCGUUAGGCCGAA AUGCCACA | 11531 |
| 3890 | UGAAGGCUC AAACCAGA | 2113 | UCUGGUUU CUGAUGAGGCCGUUAGGCCGAA AGCCUUCA | 11532 |
| 3908 | AAGCGGCUA CCAGUCCG | 2114 | CGGACUGG CUGAUGAGGCCGUUAGGCCGAA AGCCGCUU | 11533 |
| 3914 | CUACCAGUC CGGAUAUC | 2115 | GAUAUCCG CUGAUGAGGCCGUUAGGCCGAA ACUGGUAG | 11534 |
| 3920 | GUCCGGAUA UCACUCCO | 2116 | CGGAGUGA CUGAUGAGGCCGUUAGGCCGAA AUCCGGAC | 11535 |
| 3922 | CCGGAUAUC ACUCCGAU | 2117 | AUCGGAGU CUGAUGAGGCCGUUAGGCCGAA AUAUCCGG | 11536 |
| 3926 | AUAUCACUC CGAUGACA | 2118 | UGUCAUCG CUGAUGAGGCCGUUAGGCCGAA AGUGAUAU | 11537 |
| 3950 | CACCGUGUA CUCCAGUG | 2119 | CACUGGAG CUGAUGAGGCCGUUAGGCCGAA ACACGGUG | 11538 |
| 3953 | CGUGUACUC CAGUGAGG | 2120 | CCUCACUG CUGAUGAGGCCGUUAGGCCGAA AGUACACG | 11539 |
| 3972 | GCAGAACUU UUAAAGCU | 2121 | AGCUUUAA CUGAUGAGGCCGUUAGGCCGAA AGUUCUGC | 11540 |
| 3973 | CAGAACUUU UAAAGCUG | 2122 | CAGCUUUA CUGAUGAGGCCGUUAGGCCGAA AAGUUCUG | 11541 |
| 3974 | AGAACUUUU AAAGCUGA | 2123 | UCAGCUUU CUGAUGAGGCCGUUAGGCCGAA AAAGUUCU | 11542 |
| 3975 | GAACUUUUA AAGCUGAU | 2124 | AUCAGCUU CUGAUGAGGCCGUUAGGCCGAA AAAAGUUC | 11543 |
| 3984 | AAGCUGAUA GAGAUUGG | 2125 | CCAAUCUC CUGAUGAGGCCGUUAGGCCGAA AUCAGCUU | 11544 |
| 3990 | AUAGAGAUU GGAGUGCA | 2126 | UGCACUCC CUGAUGAGGCCGUUAGGCCGAA AUCUCUAU | 11545 |
| 4006 | AAACCGGUA GCACAGCC | 2127 | GGCUGUGC CUGAUGAGGCCGUUAGGCCGAA ACCGGUUU | 11546 |
| 4020 | GCCCAGAUU CUCCAGCC | 2128 | GGCUGGAG CUGAUGAGGCCGUUAGGCCGAA AUCUGGGC | 11547 |
| 4021 | CCCAGAUUC UCCAGCCU | 2129 | AGGCUGGA CUGAUGAGGCCGUUAGGCCGAA AAUCUGGG | 11548 |
| 4023 | CAGAUUCUC CAGCCUGA | 2130 | UCAGGCUG CUGAUGAGGCCGUUAGGCCGAA AGAAUCUG | 11549 |
| 4052 | ACUGAGCUC UCCUCCUG | 2131 | CAGGAGGA CUGAUGAGGCCGUUAGGCCGAA AGCUCAGU | 11550 |
| 4054 | UGAGCUCUC CUCCUGUU | 2132 | AACAGGAG CUGAUGAGGCCGUUAGGCCGAA AGAGCUCA | 11551 |
| 4057 | GCUCUCCUC CUGUUUAA | 2133 | UUAAACAG CUGAUGAGGCCGUUAGGCCGAA AGGAGAGC | 11552 |
| 4062 | CCUCCUGUU UAAAAGGA | 2134 | UCCUUUUA CUGAUGAGGCCGUUAGGCCGAA ACAGGAGG | 11553 |
| 4063 | CUCCUGUUU AAAAGGAA | 2135 | UUCCUUUU CUGAUGAGGCCGUUAGGCCGAA AACAGGAG | 11554 |
| 4064 | UCCUGUUUA AAAGGAAG | 2136 | CUUCCUUU CUGAUGAGGCCGUUAGGCCGAA AAACAGGA | 11555 |
| 4076 | GGAAGCAUC CACACCCC | 2137 | GGGGUGUG CUGAUGAGGCCGUUAGGCCGAA AUGCUUCC | 11556 |
| 4089 | CCCCAACUC CCGGACAU | 2138 | AUGUCCGG CUGAUGAGGCCGUUAGGCCGAA AGUUGGGG | 11557 |
| 4098 | CCGGACAUC ACAUGAGA | 2139 | UCUCAUGU CUGAUGAGGCCGUUAGGCCGAA AUGUCCGG | 11558 |
| 4110 | UGAGAGGUC UGCUCAGA | 2140 | UCUGAGCA CUGAUGAGGCCGUUAGGCCGAA ACCUCUCA | 11559 |
| 4115 | GGUCUGCUC AGAUUUUG | 2141 | CAAAAUCU CUGAUGAGGCCGUUAGGCCGAA AGCAGACC | 11560 |
| 4120 | GCUCAGAUU UUGAAGUG | 2142 | CACUUCAA CUGAUGAGGCCGUUAGGCCGAA AUCUGAGC | 11561 |
| 4121 | CUCAGAUUU UGAAGUGU | 2143 | ACACUUCA CUGAUGAGGCCGUUAGGCCGAA AAUCUGAG | 11562 |
| 4122 | UCAGAUUUU GAAGUGUU | 2144 | AACACUUC CUGAUGAGGCCGUUAGGCCGAA AAAUCUGA | 11563 |
| 4130 | UGAAGUGUU GUUCUUUC | 2145 | GAAAGAAC CUGAUGAGGCCGUUAGGCCGAA ACACUUCA | 11564 |
| 4133 | AGUGUUGUU CUUUCCAC | 2146 | GUGGAAAG CUGAUGAGGCCGUUAGGCCGAA ACAACACU | 11565 |
| 4134 | GUGUUGUUC UUUCCACC | 2147 | GGUGGAAA CUGAUGAGGCCGUUAGGCCGAA AACAACAC | 11566 |
| 4136 | GUUGUUCUU UCCACCAG | 2148 | CUGGUGGA CUGAUGAGGCCGUUAGGCCGAA AGAACAAC | 11567 |
| 4137 | UUGUUCUUU CCACCAGC | 2149 | GCUGGUGG CUGAUGAGGCCGUUAGGCCGAA AAGAACAA | 11568 |
| 4138 | UGUUCUUUC CACCAGCA | 2150 | UGCUGGUG CUGAUGAGGCCGUUAGGCCGAA AAAGAACA | 11569 |
| 4153 | CAGGAAGUA GCCGCAUU | 2151 | AAUGCGGC CUGAUGAGGCCGUUAGGCCGAA ACUUCCUG | 11570 |
| 4161 | AGCCGCAUU UGAUUUUU | 2152 | GAAAAUCA CUGAUGAGGCCGUUAGGCCGAA AUGCGGCU | 11571 |
| 4162 | GCCGCAUUU GAUUUUCA | 2153 | UGAAAAUC CUGAUGAGGCCGUUAGGCCGAA AAUGCGGC | 11572 |
| 4166 | CAUUUGAUU UUCAUUUC | 2154 | GAAAUGAA CUGAUGAGGCCGUUAGGCCGAA AUCAAAUG | 11573 |
| 4167 | AUUUGAUUU UCAUUUCG | 2155 | CGAAAUGA CUGAUGAGGCCGUUAGGCCGAA AAUCAAAU | 11574 |
| 4168 | UUUGAUUUU CAUUUCGA | 2156 | UCGAAAUG CUGAUGAGGCCGUUAGGCCGAA AAAUCAAA | 11575 |
| 4169 | UUGAUUUUU AUUUUGAC | 2157 | GUCGAAAU CUGAUGAGGCCGUUAGGCCGAA AAAAUCAA | 11576 |
| 4172 | AUUUUCAUU UCGACAAC | 2158 | GUUGUCGA CUGAUGAGGCCGUUAGGCCGAA AUGAAAAU | 11577 |
| 4173 | UUUUCAUUU CGACAACA | 2159 | UGUUGUCG CUGAUGAGGCCGUUAGGCCGAA AAUGAAAA | 11578 |
| 4174 | UUUCAUUUC GACAACAG | 2160 | CUGUUGUC CUGAUGAGGCCGUUAGGCCGAA AAAUGAAA | 11579 |
| 4194 | AAGGACCUC GGACUGCA | 2161 | UGCAGUCC CUGAUGAGGCCGUUAGGCCGAA AGGUCCUU | 11580 |
| 4214 | AGCCAGCUC UUCUAGGC | 2162 | GCCUAGAA CUGAUGAGGCCGUUAGGCCGAA AGCUGGCU | 11581 |
| 4216 | CCAGCUCUU CUAGGCUU | 2163 | AAGCCUAG CUGAUGAGGCCGUUAGGCCGAA AGAGCUGG | 11582 |
| 4217 | CAGCUCUUC UAGGCUUG | 2164 | CAAGCCUA CUGAUGAGGCCGUUAGGCCGAA AAGAGCUG | 11583 |
| 4219 | GCUCUUCUA GGCUUGUG | 2165 | CACAAGCC CUGAUGAGGCCGUUAGGCCGAA AGAAGAGC | 11584 |

Where “X” represents stem II region of a HH ribozyme (Hertel et al., 1992 Nucleic Acids Res. 20 3252).
The length of stem II maybe 2 base-pairs.
Underlined region can be any X sequence or linker, as described herein.

[0344] TABLE V

Human KDR VEGF Receptor-Hairpin Ribozyme and Substrate Sequences

| | | | | |
|---|---|---|---|---|
| | | Seq | | Seq |
| | | ID | | ID |
| Pos | Substrate | No | Hairpin Ribozyme Sequence | No |

| | | | | |
|---|---|---|---|---|
| 11 | AGGUGCU GCU GGCCGUCG | 2166 | CGACGGCC AGAA GCACCU ACCAGAGAAACACACGUUGUGGUACAUUACCUGGUA | 11585 |
| 18 | GCUGGCC GUC GCCCUGUG | 2167 | CACAGGGC AGAA GCCAGC ACCAGAGAAACACACGUUGUGGUACAUUACCUGGUA | 11586 |
| 51 | CCGGGCC GCC UCUGUGGG | 2168 | CCCACAGA AGAA GCCCGG ACCAGAGAAACACACGUUGUGGUACAUUACCUGGUA | 11587 |
| 86 | UUGAUCU CCC CAGGCUCA | 2169 | UGAGCCUG AGAA GAUCAA ACCAGAGAAACACACGUUGUGGUACAUUACCUGGUA | 11588 |
| 318 | GGAAACU GAC UUGGCCUC | 2170 | GAGGCCAA AGAA GUUUCC ACCAGAGAAACACACGUUGUGGUACAUUACCUGGUA | 11589 |
| 358 | GAUUACA GAU CUCCAUUU | 2171 | AAAUGGAG AGAA GUAAUC ACCAGAGAAACACACGUUGUGGUACAUUACCUGGUA | 11590 |
| 510 | UGUUCCU GAU GGUAACAG | 2172 | CUGUUACC AGAA GGAACA ACCAGAGAAACACACGUUGUGGUACAUUACCUGGUA | 11591 |
| 623 | GUUACCA GUC UAUUAUGU | 2173 | ACAUAAUA AGAA GGUAAC ACCAGAGAAACACACGUUGUGGUACAUUACCUGGUA | 11592 |
| 683 | UGAGUCC GUC UCAUGGAA | 2174 | UUCCAUGA AGAA CACUCA ACCAGAGAAACACACGUUGUGGUACAUUACCUGGUA | 11593 |
| 705 | ACUAUCU GUU GGAGAAAA | 2175 | UUUUCUCC AGAA GAUAGU ACCAGAGAAACACACGUUGUGGUACAUUACCUGGUA | 11594 |
| 833 | AAACCCA GUC UGGGAGUG | 2176 | CACUCCCA AGAA GGGUUU ACCAGAGAAACACACGUUGUGGUACAUUACCUGGUA | 11595 |
| 932 | GUGGGCU GAU GACCAACA | 2177 | UCUUGGUC AGAA GCCCAC ACCAGAGAAACACACGUUGUGGUACAUUACCUGGUA | 11596 |
| 1142 | AUGUACU GAC GAUUAUGG | 2178 | CCAUAAUC AGAA GUACAU ACCAGAGAAACACACGUUGUGGUACAUUACCUGGUA | 11597 |
| 1259 | CACCCCA GAU UGGUGAGA | 2179 | UCUCACCA AGAA GGGGUG ACCAGAGAAACACACGUUGUGGUACAUUACCUGGUA | 11598 |
| 1332 | AUGUACG GUC UAUGCCAU | 2180 | AUGGCAUA AGAA GUACAU ACCAGAGAAACACACGUUGUGGUACAUUACCUGGUA | 11599 |
| 1376 | AUUGGCA GUU GGAGGAAG | 2181 | CUUCCUCC AGAA GCCAAU ACCAGAGAAACACACGUUGUGGUACAUUACCUGGUA | 11600 |
| 1413 | CCAAGCU GUC UCAGUGAC | 2182 | GUCACUGA AGAA GCUUGG ACCAGAGAAACACACGUUGUGGUACAUUACCUGGUA | 11601 |
| 1569 | UGUGUCA GCU UUGUACAA | 2183 | UUGUACAA AGAA GACACA ACCAGAGAAACACACGUUGUGGUACAUUACCUGGUA | 11602 |
| 1673 | ACAUGCA GCC CACUGAGC | 2184 | GCUCAGUG AGAA GCAUGU ACCAGAGAAACACACGUUGUGGUACAUUACCUGGUA | 11603 |
| 1717 | GCAGACA GAU CUACGUUU | 2185 | AAACGUAG AGAA GUCUGC ACCAGAGAAACACACGUUGUGGUACAUUACCUGGUA | 11604 |
| 1760 | GCCCACA CCC UCUGCCAA | 2186 | UUGGCAGA AGAA GUGGGC ACCAGAGAAACACACGUUGUGGUACAUUACCUGGUA | 11605 |
| 1797 | CACACCU GUU UGCAAGAA | 2187 | UUCUUGCA AGAA GGUGUG ACCAGAGAAACACACGUUGUGGUACAUUACCUGGUA | 11606 |
| 1918 | UAUGUCU GCC UUGCUCAA | 2188 | UUGAGCAA AGAA GACAUA ACCAGAGAAACACACGUUGUGGUACAUUACCUGGUA | 11607 |
| 1967 | UCAGGCA GCU CACAGUCC | 2189 | GGACUGUG AGAA GCCUGA ACCAGAGAAACACACGUUGUGGUACAUUACCUGGUA | 11608 |
| 1974 | GCUCACA GUC CUAGAGCG | 2190 | CGCUCUAG AGAA GUGAGC ACCAGAGAAACACACGUUGUGGUACAUUACCUGGUA | 11609 |
| 2021 | AGAAUCA GAC GACAAGUA | 2191 | UACUUGUC AGAA GAUUCU ACCAGAGAAACACACGUUGUGGUACAUUACCUGGUA | 11610 |
| 2084 | CUCCACA GAU CAUGUGGU | 2192 | ACCACAUG AGAA GUGGAG ACCAGAGAAACACACGUUGUGGUACAUUACCUGGUA | 11611 |
| 2418 | GGAUCCA GAU GAACUCCC | 2193 | GGGAGUUC AGAA GGAUCC ACCAGAGAAACACACGUUGUGGUACAUUACCUGGUA | 11612 |
| 2453 | AACGACU GCC UUAUGAUG | 2194 | CAUCAUAA AGAA GUCGUU ACCAGAGAAACACACGUUGUGGUACAUUACCUGGUA | 11613 |
| 2492 | GAGACCG GCU GAACCUAG | 2195 | CUAGGUUC AGAA GGUCUC ACCAGAGAAACACACGUUGUGGUACAUUACCUGGUA | 11614 |
| 2547 | UGAAGCA GAU GCCUUUGG | 2196 | CCAAAGGC AGAA GCUUCA ACCAGAGAAACACACGUUGUGGUACAUUACCUGGUA | 11615 |
| 2765 | GAAACCU CUC CACUUACC | 2197 | GGUAAGUG AGAA GGUUUC ACCAGAGAAACACACGUUGUGGUACAUUACCUGGUA | 11616 |
| 2914 | UCAGCCA GCU CUGGAUUU | 2198 | AAAUCCAG AGAA GGCUGA ACCAGAGAAACACACGUUGUGGUACAUUACCUGGUA | 11617 |
| 2993 | ACUUCCU GAC CUUGGAGC | 2199 | GCUCCAAG AGAA GGAAGU ACCAGAGAAACACACGUUGUGGUACAUUACCUGGUA | 11618 |
| 3019 | UGUUACA GCU UCCAAGUG | 2200 | CACUUGGA AGAA GUAACA ACCAGAGAAACACACGUUGUGGUACAUUACCUGGUA | 11619 |
| 3165 | AGAUCCA GAU UAUGUCAG | 2201 | CUGACAUA AGAA GGAUCU ACCAGAGAAACACACGUUGUGGUACAUUACCUGGUA | 11620 |
| 3378 | GGCCCCU GAU UAUACUAC | 2202 | GUAGUAUA AGAA GGGGCC ACCAGAGAAACACACGUUGUGGUACAUUACCUGGUA | 11621 |
| 3404 | UGUACCA GAC CAUGCUGG | 2203 | CCAGCAUG AGAA GGUACA ACCAGAGAAACACACGUUGUGGUACAUUACCUGGUA | 11622 |
| 3418 | CUGGACU GCU GGCACGGG | 2204 | CCCGUGCC AGAA GUCCAG ACCAGAGAAACACACGUUGUGGUACAUUACCUGGUA | 11623 |
| 3575 | UCUCUCU GCC UACCUCAC | 2205 | GUGAGGUA AGAA GAGAGA ACCAGAGAAACACACGUUGUGGUACAUUACCUGGUA | 11624 |
| 3588 | CUCACCU GUU UCCUGUAU | 2206 | AUACAGGA AGAA GGUGAG ACCAGAGAAACACACGUUGUGGUACAUUACCUGGUA | 11625 |
| 3689 | AGAGCCG GCC UGUGAGUG | 2207 | CACUCACA AGAA GGCUCU ACCAGAGAAACACACGUUGUGGUACAUUACCUGGUA | 11626 |
| 3753 | AAUCCCA GAU GACAACCA | 2208 | UGGUUGUC AGAA GGGAUU ACCAGAGAAACACACGUUGUGGUACAUUACCUGGUA | 11627 |
| 3764 | ACAACCA GAC GGACAGUG | 2209 | CACUGUCC AGAA GGUUGU ACCAGAGAAACACACGUUGUGGUACAUUACCUGGUA | 11628 |
| 3911 | GCUACCA GUC CGGAUAUC | 2210 | GAUAUCCG AGAA GGUAGC ACCAGAGAAACACACGUUGUGGUACAUUACCUGGUA | 11629 |
| 3927 | UCACUCC GAU GACACAGA | 2211 | UCUGUGUC AGAA GAGUGA ACCAGAGAAACACACGUUGUGGUACAUUACCUGGUA | 11630 |
| 4011 | UAGCACA GCC CAGAUUCU | 2212 | AGAAUCUG AGAA GUGCUA ACCAGAGAAACACACGUUGUGGUACAUUACCUGGUA | 11631 |
| 4016 | CAGCCCA GAU UCUCCAGC | 2213 | GCUGGAGA AGAA GGGCUG ACCAGAGAAACACACGUUGUGGUACAUUACCUGGUA | 11632 |
| 4025 | UUCUCCA GCC UGACACGG | 2214 | CCGUGUCA AGAA GGAGAA ACCAGAGAAACACACGUUGUGGUACAUUACCUGGUA | 11633 |
| 4059 | UCCUCCU GUU UAAAAGGA | 2215 | UCCUUUUA AGAA GGAGGA ACCAGAGAAACACACGUUGUGGUACAUUACCUGGUA | 11634 |
| 4111 | GAGGUCU GCU CAGAUUUU | 2216 | AAAAUCUG AGAA GACCUC ACCAGAGAAACACACGUUGUGGUACAUUACCUGGUA | 11635 |
| 4116 | CUGCUCA GAU UUUGAAGU | 2217 | ACUUCAAA AGAA GAGCAG ACCAGAGAAACACACGUUGUGGUACAUUACCUGGUA | 11636 |
| 4195 | GACCUCG GAC UGCAGGGA | 2218 | UCCCUGCA AGAA GAGGUC ACCAGAGAAACACACGUUGUGGUACAUUACCUGGUA | 11637 |
| 4210 | GGAGCCA GCU CUUCUAGG | 2219 | CCUAGAAG AGAA GGCUCC ACCAGAGAAACACACGUUGUGGUACAUUACCUGGUA | 11638 |

[0345] TABLE VI

+HZ,1 Mouse flk-1 VEGF Receptor-Hammerhead Ribozyme and Substrate Sequence

| | | | | |
|---|---|---|---|---|
| | | Seq | | Seq |
| | | ID | | ID |
| Pos | Substrate | No | HH Ribozyme Sequence | No |

| | | | | |
|---|---|---|---|---|
| 13 | GGGCGAAUU GGGUACGG | 2220 | CCGUACCC CUGAUGAGGCCGUUAGGCCGAA AUUCGCCC | 11639 |
| 18 | AAUUGGGUA CGGGACCC | 2221 | GGGUCCCG CUGAUGAGGCCGUUAGGCCGAA ACCCAAUU | 11640 |
| 31 | ACCCCCCUC GAGGUCGA | 2222 | UCGACCUC CUGAUGAGGCCGUUAGGCCGAA AGGGGGGU | 11641 |
| 37 | CUCGAGGUC GACGGUAU | 2223 | AUACCGUC CUGAUGAGGCCGUUAGGCCGAA ACCUCGAG | 11642 |
| 44 | UCGACGGUA UCGAUAAG | 2224 | CUUAUCGA CUGAUGAGGCCGUUAGGCCGAA ACCGUCGA | 11643 |
| 46 | GACGGUAUC GAUAAGCU | 2225 | AGCUUAUC CUGAUGAGGCCGUUAGGCCGAA AUACCGUC | 11644 |
| 50 | GUAUCGAUA AGCUUGAU | 2226 | AUCAAGCU CUGAUGAGGCCGUUAGGCCGAA AUCGAUAC | 11645 |
| 55 | GAUAAGCUU GAUAUCGA | 2227 | UCGAUAUC CUGAUGAGGCCGUUAGGCCGAA AGCUUAUC | 11646 |
| 59 | AGCUUGAUA UCGAAUUC | 2228 | GAAUUCGA CUGAUGAGGCCGUUAGGCCGAA AUCAAGCU | 11647 |
| 61 | CUUGAUAUC GAAUUCGG | 2229 | CCGAAUUC CUGAUGAGGCCGUUAGGCCGAA AUAUCAAG | 11648 |
| 66 | UAUCGAAUU CGGGCCCA | 2230 | UGGGCCCG CUGAUGAGGCCGUUAGGCCGAA AUUCGAUA | 11649 |
| 67 | AUCGAAUUC GGGCCCAG | 2231 | CUGGGCCC CUGAUGAGGCCGUUAGGCCGAA AAUUCGAU | 11650 |
| 83 | GACUGUGUC CCGCAGCC | 2232 | GGCUGCGG CUGAUGAGGCCGUUAGGCCGAA ACACAGUC | 11651 |
| 97 | GCCGGGAUA ACCUGGCU | 2233 | AGCCAGGU CUGAUGAGGCCGUUAGGCCGAA AUCCCGGC | 11652 |
| 114 | GACCCGAUU CCGCGGAC | 2234 | GUCCGCGG CUGAUGAGGCCGUUAGGCCGAA AUCGGGUC | 11653 |
| 115 | ACCCGAUUC CGCGGACA | 2235 | UGUCCGCG CUGAUGAGGCCGUUAGGCCGAA AAUCGGGU | 11654 |
| 169 | CCCGCGCUC UCCCCGGU | 2236 | ACCGGGGA CUGAUGAGGCCGUUAGGCCGAA AGCGCGGG | 11655 |
| 171 | CGCGCUCUC CCCGGUCU | 2237 | AGACCGGG CUGAUGAGGCCGUUAGGCCGAA AGAGCGCG | 11656 |
| 178 | UCCCCGGUC UUGCGCUG | 2238 | CAGCGCAA CUGAUGAGGCCGUUAGGCCGAA ACCGGGGA | 11657 |
| 180 | CCCGGUCUU GCGCUGCG | 2239 | CGCAGCGC CUGAUGAGGCCGUUAGGCCGAA AGACCGGG | 11658 |
| 197 | GGGGCCAUA CCGCCUCU | 2240 | AGAGGCGG CUGAUGAGGCCGUUAGGCCGAA AUGGCCCC | 11659 |
| 204 | UACCGCCUC UGUGACUU | 2241 | AAGUCACA CUGAUGAGGCCGUUAGGCCGAA AGGCGGUA | 11660 |
| 212 | CUGUGACUU CUUUGCGG | 2242 | CCGCAAAG CUGAUGAGGCCGUUAGGCCGAA AGUCACAG | 11661 |
| 213 | UGUGACUUC UUUGCGGG | 2243 | CCCGCAAA CUGAUGAGGCCGUUAGGCCGAA AAGUCACA | 11662 |
| 215 | UGACUUCUU UGCGGGCC | 2244 | GGCCCGCA CUGAUGAGGCCGUUAGGCCGAA AGAAGUCA | 11663 |
| 216 | GACUUCUUU GCGGGCCA | 2245 | UGGCCCGC CUGAUGAGGCCGUUAGGCCGAA AAGAAGUC | 11664 |
| 241 | GAAGGAGUC UGUGCCUG | 2246 | CAGGCACA CUGAUGAGGCCGUUAGGCCGAA ACUCCUUC | 11665 |
| 262 | ACUGGGCUC UGUGCCCA | 2247 | UGGGCACA CUGAUGAGGCCGUUAGGCCGAA AGCCCAGU | 11666 |
| 306 | GCGCUGCUA GCUGUCGC | 2248 | GCGACAGC CUGAUGAGGCCGUUAGGCCGAA AGCAGCGC | 11667 |
| 312 | CUAGCUGUC GCUCUGUG | 2249 | CACAGAGC CUGAUGAGGCCGUUAGGCCGAA ACAGCUAG | 11668 |
| 316 | CUGUCGCUC UGUGGUUC | 2250 | GAACCACA CUGAUGAGGCCGUUAGGCCGAA AGCGACAG | 11669 |
| 323 | UCUGUGGUU CUGCGUGG | 2251 | CCACGCAG CUGAUGAGGCCGUUAGGCCGAA ACCACAGA | 11670 |
| 324 | CUGUGGUUC UGCGUGGA | 2252 | UCCACGCA CUGAUGAGGCCGUUAGGCCGAA AACCACAG | 11671 |
| 347 | AGCCGCCUC UGUGGGUU | 2253 | AACCCACA CUGAUGAGGCCGUUAGGCCGAA AGGCGGCU | 11672 |
| 355 | CUGUGGGUU UGACUGGC | 2254 | GCCAGUCA CUGAUGAGGCCGUUAGGCCGAA ACCCACAG | 11673 |
| 356 | UGUGGGUUU GACUGGCG | 2255 | CGCCAGUC CUGAUGAGGCCGUUAGGCCGAA AACCCACA | 11674 |
| 367 | CUGGCGAUU UUCUCCAU | 2256 | AUGGAGAA CUGAUGAGGCCGUUAGGCCGAA AUCGCCAG | 11675 |
| 368 | UGGCGAUUU UCUCCAUC | 2257 | GAUGGAGA CUGAUGAGGCCGUUAGGCCGAA AAUCGCCA | 11676 |
| 369 | GGCGAUUUU CUCCAUCC | 2258 | GGAUGGAG CUGAUGAGGCCGUUAGGCCGAA AAAUCGCC | 11677 |
| 370 | GCGAUUUUC UCCAUCCC | 2259 | GGGAUGGA CUGAUGAGGCCGUUAGGCCGAA AAAAUCGC | 11678 |
| 372 | GAUUUUCUC CAUCCCCC | 2260 | GGGGGAUG CUGAUGAGGCCGUUAGGCCGAA AGAAAAUC | 11679 |
| 376 | UUCUCCAUC CCCCCAAG | 2261 | CUUGGGGG CUGAUGAGGCCGUUAGGCCGAA AUGGAGAA | 11680 |
| 387 | CCCAAGCUC AGCACACA | 2262 | UGUGUGCU CUGAUGAGGCCGUUAGGCCGAA AGCUUGGG | 11681 |
| 405 | AAAGACAUA CUGACAAU | 2263 | AUUGUCAG CUGAUGAGGCCGUUAGGCCGAA AUGUCUUU | 11682 |
| 414 | CUGACAAUU UUGGCAAA | 2264 | UUUGCCAA CUGAUGAGGCCGUUAGGCCGAA AUUGUCAG | 11683 |
| 415 | UGACAAUUU UGGCAAAU | 2265 | AUCUGCCA CUGAUGAGGCCGUUAGGCCGAA AAUUGUCA | 11684 |
| 416 | GACAAUUUU GGCAAAUA | 2266 | UAUUUGCC CUGAUGAGGCCGUUAGGCCGAA AAAUUGUC | 11685 |
| 424 | UGGCAAAUA CAACCCUU | 2267 | AAGGGUUG CUGAUGAGGCCGUUAGGCCGAA AUUUGCCA | 11686 |
| 432 | ACAACCCUU CAGAUUAC | 2268 | GUAAUCUG CUGAUGAGGCCGUUAGGCCGAA AGGGUUGU | 11687 |
| 433 | CAACCCUUC AGAUUACU | 2269 | AGUAAUCU CUGAUGAGGCCGUUAGGCCGAA AAGGGUUG | 11688 |
| 438 | CUUCAGAUU ACUUGCAG | 2270 | CUGCAAGU CUGAUGAGGCCGUUAGGCCGAA AUCUGAAG | 11689 |
| 439 | UUCAGAUUA CUUGCAGG | 2271 | CCUGCAAG CUGAUGAGGCCGUUAGGCCGAA AAUCUGAA | 11690 |
| 442 | AGAUUACUU GCAGGGGA | 2272 | UCCCCUGC CUGAUGAGGCCGUUAGGCCGAA AGUAAUCU | 11691 |
| 471 | GACUGGCUU UGGCCCAA | 1534 | UUGGGCCA CUGAUGAGGCCGUUAGGCCGAA AGCCAGUC | 10953 |
| 472 | ACUGGCUUU GGCCCAAU | 1535 | AUUGGGCC CUGAUGAGGCCGUUAGGCCGAA AAGCCAGU | 10954 |
| 484 | CCAAUGCUC AGCGUGAU | 2273 | AUCACGCU CUGAUGAGGCCGUUAGGCCGAA AGCAUUGG | 11692 |
| 493 | AGCGUGAUU CUGAGGAA | 2274 | DUCCUCAG CUGAUGAGGCCGUUAGGCCGAA AUCACGCU | 11693 |
| 494 | GCGUGAUUC UGAGGAAA | 2275 | UUUCCUCA CUGAUGAGGCCGUUAGGCCGAA AAUCACGC | 11694 |
| 507 | GAAAGGGUA UUGGUGAC | 2276 | GUCACCAA CUGAUGAGGCCGUUAGGCCGAA ACCCUUUC | 11695 |
| 509 | AAGGGUAUU GGUGACUG | 2277 | CAGUCACC CUGAUGAGGCCGUUAGGCCGAA AUACCCUU | 11696 |
| 538 | GUGACAGUA UCUUCUGC | 2278 | GCAGAAGA CUGAUGAGGCCGUUAGGCCGAA ACUGUCAC | 11697 |
| 540 | GACAGUAUC UUCUGCAA | 2279 | UUGCAGAA CUGAUGAGGCCGUUAGGCCGAA AUACUGUC | 11698 |
| 542 | CAGUAUCUU CUGCAAAA | 2280 | UUUUGCAG CUGAUGAGGCCGUUAGGCCGAA AGAUACUG | 11699 |
| 543 | AGUAUCUUC UGCAAAAC | 2281 | GUUUUGCA CUGAUGAGGCCGUUAGGCCGAA AAGAUACU | 11700 |
| 555 | AAAACACUC ACCAUUCC | 2282 | GGAAUGGU CUGAUGAGGCCGUUAGGCCGAA AGUGUUUU | 11701 |
| 561 | CUCACCAUU CCCAGGGU | 2283 | ACCCUGGG CUGAUGAGGCCGUUAGGCCGAA AUGGUGAG | 11702 |
| 562 | UCACCAUUC CCAGGGUG | 2284 | CACCCUGG CUGAUGAGGCCGUUAGGCCGAA AAUGGUGA | 11703 |
| 573 | AGGGUGGUU GGAAAUGA | 2285 | UCAUUUCC CUGAUGAGGCCGUUAGGCCGAA ACCACCCU | 11704 |
| 583 | GAAAUGAUA CUGGAGCC | 2286 | GGCUCCAG CUGAUGAGGCCGUUAGGCCGAA AUCAUUUC | 11705 |
| 593 | UGGAGCCUA CAAGUGCU | 1546 | AGCACUUG CUGAUGAGGCCGUUAGGCCGAA AGGCUCCA | 10965 |
| 602 | CAAGUGCUC GUACCGGG | 2287 | CCCGGUAC CUGAUGAGGCCGUUAGGCCGAA AGCACUUG | 11706 |
| 605 | GUGCUCGUA CCGGGACG | 2288 | CGUCCCGG CUGAUGAGGCCGUUAGGCCGAA ACGAGCAC | 11707 |
| 615 | CGGGACGUC GACAUAGC | 2289 | GCUAUGUC CUGAUGAGGCCGUUAGGCCGAA ACGUCCCG | 11708 |
| 621 | GUCGACAUA GCCUCCAC | 2290 | GUGGAGGC CUGAUGAGGCCGUUAGGCCGAA AUGUCGAC | 11709 |
| 626 | CAUAGCCUC CACUGUUU | 2291 | AAACAGUG CUGAUGAGGCCGUUAGGCCGAA AGGCUAUG | 11710 |
| 633 | UCCACUGUU UAUGUCUA | 2292 | UAGACAUA CUGAUGAGGCCGUUAGGCCGAA ACAGUGGA | 11711 |
| 634 | CCACUGUUU AUGUCUAU | 2293 | AUAGACAU CUGAUGAGGCCGUUAGGCCGAA AACAGUGG | 11712 |
| 635 | CACUGUUUA UGUCUAUG | 2294 | CAUAGACA CUGAUGAGGCCGUUAGGCCGAA AAACAGUG | 11713 |
| 639 | GUUUAUGUC UAUGUUCG | 2295 | CGAACAUA CUGAUGAGGCCGUUAGGCCGAA ACAUAAAC | 11714 |
| 641 | UUAUGUCUA UGUUCGAG | 2296 | CUCGAACA CUGAUGAGGCCGUUAGGCCGAA AGACAUAA | 11715 |
| 645 | GUCUAUGUU CGAGAUUA | 2297 | UAAUCUCG CUGAUGAGGCCGUUAGGCCGAA ACAUAGAC | 11716 |
| 646 | UCUAUGUUC GAGAUUAC | 2298 | GUAAUCUC CUGAUGAGGCCGUUAGGCCGAA AACAUAGA | 11717 |
| 652 | UUCGAGAUU ACAGAUCA | 2299 | UGAUCUGU CUGAUGAGGCCGUUAGGCCGAA AUCUCGAA | 11718 |
| 653 | UCGAGAUUA CAGAUCAC | 2300 | GUGAUCUG CUGAUGAGGCCGUUAGGCCGAA AAUCUCGA | 11719 |
| 659 | UUACAGAUC ACCAUUCA | 2301 | UGAAUGGU CUGAUGAGGCCGUUAGGCCGAA AUCUGUAA | 11720 |
| 665 | AUCACCAUU CAUCGCCU | 2302 | AGGCGAUG CUGAUGAGGCCGUUAGGCCGAA AUGGUGAU | 11721 |
| 666 | UCACCAUUC AUCGCCUC | 2303 | GAGGCGAU CUGAUGAGGCCGUUAGGCCGAA AAUGGUGA | 11722 |
| 669 | CCAUUCAUC GCCUCUGU | 2304 | ACAGAGGC CUGAUGAGGCCGUUAGGCCGAA AUGAAUGG | 11723 |
| 674 | CAUCGCCUC UGUCAGUG | 2305 | CACUGACA CUGAUGAGGCCGUUAGGCCGAA AGGCGAUG | 11724 |
| 678 | GCCUCUGUC AGUGACCA | 2306 | UGGUCACU CUGAUGAGGCCGUUAGGCCGAA ACAGAGGC | 11725 |
| 696 | CAUGGCAUC GUGUACAU | 2307 | AUGUACAC CUGAUGAGGCCGUUAGGCCGAA AUGCCAUG | 11726 |
| 701 | CAUCGUGUA CAUCACCG | 2308 | CGGUGAUG CUGAUGAGGCCGUUAGGCCGAA ACACGAUG | 11727 |
| 705 | GUGUACAUC ACCGAGAA | 2309 | UUCUCGGU CUGAUGAGGCCGUUAGGCCGAA AUGUACAC | 11728 |
| 735 | GUGGUGAUC CCCUGCCG | 2310 | CGGCAGGG CUGAUGAGGCCGUUAGGCCGAA AUCACCAC | 11729 |
| 749 | CCGAGGGUC GAUUUCAA | 2311 | UUGAAAUC CUGAUGAGGCCGUUAGGCCGAA ACCCUCGG | 11730 |
| 753 | GGGUCGAUU UCAAACCU | 2312 | AGGUUUGA CUGAUGAGGCCGUUAGGCCGAA AUCGACCC | 11731 |
| 754 | GGUCGAUUU CAAACCUC | 2313 | GAGGUUUG CUGAUGAGGCCGUUAGGCCGAA AAUCGACC | 11732 |
| 755 | GUCGAUUUC AAACCUCA | 2314 | UGAGGUUU CUGAUGAGGCCGUUAGGCCGAA AAAUCGAC | 11733 |
| 762 | UCAAACCUC AAUGUGUC | 2315 | GACACAUU CUGAUGAGGCCGUUAGGCCGAA AGGUUUGA | 11734 |
| 770 | CAAUGUGUC UCUUUGCG | 2316 | CGCAAAGA CUGAUGAGGCCGUUAGGCCGAA ACACAUUG | 11735 |
| 772 | AUGUGUCUC UUUGCGCU | 2317 | AGCGCAAA CUGAUGAGGCCGUUAGGCCGAA AGACACAU | 11736 |
| 774 | GUGUCUCUU UGCGCUAG | 2318 | CUAGCGCA CUGAUGAGGCCGUUAGGCCGAA AGAGACAC | 11737 |
| 775 | UGUCUCUUU GCGCUAGG | 2319 | CCUAGCGC CUGAUGAGGCCGUUAGGCCGAA AAGAGACA | 11738 |
| 782 | UUUGCGCUA GGUAUCCA | 2320 | UGGAUACC CUGAUGAGGCCGUUAGGCCGAA AGCGCAAA | 11739 |
| 785 | CGCUAGGUA UCCAGAAA | 2321 | UUUCUGGA CUGAUGAGGCCGUUAGGCCGAA ACCUAGCG | 11740 |
| 787 | CUAGGUAUC CAGAAAAG | 2322 | CUUUUCUG CUGAUGAGGCCGUUAGGCCGAA AWACCUAG | 11741 |
| 800 | AAAGAGAUU UGUUCCGG | 2323 | CCGGAACA CUGAUGAGGCCGUUAGGCCGAA AUCUCUUU | 11742 |
| 801 | AAGAGAUUU GUUCCGGA | 2324 | UCCGGAAC CUGAUGAGGCCGUUAGGCCGAA AAUCUCUU | 11743 |
| 804 | AGAUUUGUU CCGGAUGG | 2325 | CCAUCCGG CUGAUGAGGCCGUUAGGCCGAA ACAAAUCU | 11744 |
| 805 | GAUUUGUUC CGGAUGGA | 2326 | UCCAUCCG CUGAUGAGGCCGUUAGGCCGAA AACAAAUC | 11745 |
| 822 | AACAGAAUU UCCUGGGA | 1595 | UCCCAGGA CUGAUGAGGCCGUUAGGCCGAA AUUCUGUU | 11014 |
| 823 | ACAGAAUUU CCUGGGAC | 1596 | GUCCCAGG CUGAUGAGGCCGUUAGGCCGAA AAUUCUGU | 11015 |
| 824 | CAGAAUUUC CUOGGACA | 1597 | UGUCCCAG CUGAUGAGGCCGUUAGGCCGAA AAAUUCUG | 11016 |
| 840 | AGCGAGAUA GGCUUUAC | 2327 | GUAAAGCC CUGAUGAGGCCGUUAGGCCGAA AUCUCGCU | 11746 |
| 845 | GAUAGGCUU UACUCUCC | 2328 | GGAGAGUA CUGAUGAGGCCGUUAGGCCGAA AGCCUAUC | 11747 |
| 846 | AUAGGCUUU ACUCUCCC | 2329 | GGGAGAGU CUGAUGAGGCCGUUAGGCCGAA AAGCCUAU | 11748 |
| 847 | UAGGCUUUA CUCUCCCC | 2330 | GGGGAGAG CUGAUGAGGCCGUUAGGCCGAA AAAGCCUA | 11749 |
| 850 | GCUUUACUC UCCCCAGU | 2331 | ACUGGGGA CUGAUGAGGCCGUUAGGCCGAA AGUAAAGC | 11750 |
| 852 | UUUACUCUC CCCAGUUA | 2332 | UAACUGGG CUGAUGAGGCCGUUAGGCCGAA AGAGUAAA | 11751 |
| 859 | UCCCCAGUU ACAUGAUC | 2333 | GAUCAUGU CUGAUGAGGCCGUUAGGCCGAA ACUGGGGA | 11752 |
| 860 | CCCCAGUUA CAUGAUCA | 2334 | UGAUCAUG CUGAUGAGGCCGUUAGGCCGAA AACUGGGG | 11753 |
| 867 | UACAUGAUC AGCUAUGC | 1605 | GCAUAGCU CUGAUGAGGCCGUUAGGCCGAA AUCAUGUA | 11024 |
| 872 | GAUCAGCUA UGCCGGCA | 2335 | UGCCGGCA CUGAUGAGGCCGUUAGGCCGAA AGCUGAUC | 11754 |
| 885 | GGCAUGGUC UUCUGUGA | 1607 | UCACAGAA CUGAUGAGGCCGUUAGGCCGAA ACCAUGCC | 11026 |
| 887 | CAUGGUCUU CUGUGAGG | 2336 | CCUCACAG CUGAUGAGGCCGUUAGGCCGAA AGACCAUG | 11755 |
| 888 | AUGGUCUUC UGUGAGGC | 2337 | GCCUCACA CUGAUGAGGCCGUUAGGCCGAA AAGACCAU | 11756 |
| 903 | GCAAAGAUC AAUGAUGA | 2338 | UCAUCAUU CUGAUGAGGCCGUUAGGCCGAA AUCUUUGC | 11757 |
| 917 | UGAAACCUA UCAGUCUA | 2339 | UAGACUGA CUGAUGAGGCCGUUAGGCCGAA AGGUUUCA | 11758 |
| 919 | AAACCUAUC AGUCUAUC | 2340 | GAUAGACU CUGAUGAGGCCGUUAGGCCGAA AUAGGUUU | 11759 |
| 923 | CUAUCAGUC UAUCAUGU | 2341 | ACAUGAUA CUGAUGAGGCCGUUAGGCCGAA ACUGAUAG | 11760 |
| 925 | AUCAGUCUA UCAUGUAC | 2342 | GUACAUGA CUGAUGAGGCCGUUAGGCCGAA AGACUGAU | 11761 |
| 927 | CAGUCUAUC AUGUACAU | 2343 | AUGUACAU CUGAUGAGGCCGUUAGGCCGAA AUAGACUG | 11035 |
| 932 | UAUCAUGUA CAUAGUUG | 2344 | CAACUAUG CUGAUGAGGCCGUUAGGCCGAA ACAUGAUA | 11762 |
| 936 | AUGUACAUA GUUGUGGU | 2345 | ACCACAAC CUGAUGAGGCCGUUAGGCCGAA AUGUACAU | 11763 |
| 939 | UACAUAGUU GUGGUUGU | 2346 | ACAACCAC CUGAUGAGGCCGUUAGGCCGAA ACUAUGUA | 11764 |
| 945 | GUUGUGGUU GUAGGAUA | 2347 | UAUCCUAC CUGAUGAGGCCGUUAGGCCGAA ACCACAAC | 11765 |
| 948 | GUGGUUGUA GGAUAUAG | 2348 | CUAUAUCC CUGAUGAGGCCGUUAGGCCGAA ACAACCAC | 11766 |
| 953 | UGUAGGAUA UAGGAUUU | 2349 | AAAUCCUA CUGAUGAGGCCGUUAGGCCGAA AUCCUACA | 11767 |
| 955 | UAGGAUAUA GGAUUUAU | 2350 | AUAAAUCC CUGAUGAGGCCGUUAGGCCGAA AUAUCCUA | 11768 |
| 960 | UAUAGGAUU UAUGAUGU | 1626 | ACAUCAUA CUGAUGAGGCCGUUAGGCCGAA AUCCUAUA | 11045 |
| 961 | AUAGGAUUU AUGAUGUG | 1627 | CACAUCAU CUGAUGAGGCCGUUAGGCCGAA AAUCCUAU | 11046 |
| 962 | UAGGAUUUA UGAUGUGA | 2351 | UCACAUCA CUGAUGAGGCCGUUAGGCCGAA AAAUCCUA | 11769 |
| 972 | GAUGUGAUU CUGAGCCC | 2352 | GGGCUCAG CUGAUGAGGCCGUUAGGCCGAA AUCACAUC | 11770 |
| 973 | AUGUGAUUC UGAGCCCC | 2353 | GGGGCUCA CUGAUGAGGCCGUUAGGCCGAA AAUCACAU | 11771 |
| 993 | CAUGAAAUU GAGCUAUC | 2354 | GAUAGCUC CUGAUGAGGCCGUUAGGCCGAA AUUUCAUG | 11772 |
| 999 | AUUGAGCUA UCUGCCGG | 2355 | CCGGCAGA CUGAUGAGGCCGUUAGGCCGAA AGCUCAAU | 11773 |
| 1001 | UGAGCUAUC UGCCGGAG | 2356 | CUCCGGCA CUGAUGAGGCCGUUAGGCCGAA AUAGCUCA | 11774 |
| 1017 | GAAAAACUU GUCUUAAA | 2357 | UUUAAGAC CUGAUGAGGCCGUUAGGCCGAA AGUUUUUC | 11775 |
| 1020 | AAACUUGUC UUAAAUUG | 2358 | CAAUUUAA CUGAUGAGGCCGUUAGGCCGAA ACAAGUUU | 11776 |
| 1022 | ACUUGUCUU AAAUUGUA | 2359 | UACAAUUU CUGAUGAGGCCGUUAGGCCGAA AGACAAGU | 11777 |
| 1023 | CUUGUCUUA AAUUGUAC | 1641 | GUACAAUU CUGAUGAGGCCGUUAGGCCGAA AAGACAAG | 11060 |
| 1027 | UCUUAAAUU GUACAGCG | 2360 | OGOUGUAC CUGAUGAGGCCGUUAGGCCGAA AUUUAAGA | 11778 |
| 1030 | UAAAUUGUA CAGCGAGA | 2361 | UCUCGCUG CUGAUGAGGCCGUUAGGCCGAA ACAAUUUA | 11779 |
| 1047 | ACAGAGCUC AAUGUGGG | 2362 | CCCACAUU CUGAUGAGGCCGUUAGGCCGAA AGCUCUGU | 11780 |
| 1059 | GUGGGGCUU GAUCUCAC | 2363 | GUGAAAUC CUGAUGAGGCCGUUAGGCCGAA AGCCCCAC | 11781 |
| 1063 | GGCUUGAUU UCACCUGG | 2364 | CCAGGUGA CUGAUGAGGCCGUUAGGCCGAA AUCAAGCC | 11782 |
| 1064 | GCUUGAUUU CACCUGGC | 2365 | GCCAGGUG CUGAUGAGGCCGUUAGGCCGAA AAUCAAGC | 11783 |
| 1065 | CUUGAUUUC ACCUGGCA | 2366 | UGCCAGGU CUGAUGAGGCCGUUAGGCCGAA AAAUCAAG | 11784 |
| 1076 | CUGGCACUC UCCACCUU | 2367 | AAGGUGGA CUGAUGAGGCCGUUAGGCCGAA AGUGCCAG | 11785 |
| 1078 | GGCACUCUC CACCUUCA | 2368 | UGAAGGUG CUGAUGAGGCCGUUAGGCCGAA AGAGUGCC | 11786 |
| 1084 | CUCCACCUU CAAAGUCU | 2369 | AGACUUUG CUGAUGAGGCCGUUAGGCCGAA AGGUGGAG | 11787 |
| 1085 | UCCACCUUC AAAGUCUC | 2370 | GAGACUUU CUGAUGAGGCCGUUAGGCCGAA AAGGUGGA | 11788 |
| 1091 | UUCAAAGUC UCAUCAUA | 2371 | UAUGAUGA CUGAUGAGGCCGUUAGGCCGAA ACUUUGAA | 11789 |
| 1093 | CAAAGUCUC AUCAUAAG | 2372 | CUUAUGAU CUGAUGAGGCCGUUAGGCCGAA AGACUUUG | 11790 |
| 1096 | AGUCUCAUC AUAAGAAG | 2373 | CUUCUUAU CUGAUGAGGCCGUUAGGCCGAA AUGAGACU | 11791 |
| 1099 | CUCAUCAUA AGAAGAUU | 2374 | AAUCUUCU CUGAUGAGGCCGUUAGGCCGAA AUGAUGAG | 11792 |
| 1107 | AAGAAGAUU GUAAACCG | 2375 | CGGUUUAC CUGAUGAGGCCGUUAGGCCGAA AUCUUCUU | 11793 |
| 1110 | AAGAUUGUA AACCGGGA | 2376 | UCCCGGUU CUGAUGAGGCCGUUAGGCCGAA ACAAUCUU | 11794 |
| 1130 | GAAACCCUU UCCUGGGA | 2377 | UCCCAGGA CUGAUGAGGCCGUUAGGCCGAA AGGGUUUC | 11795 |
| 1131 | AAACCCUUU CCUGGGAC | 2378 | GUCCCAGG CUGAUGAGGCCGUUAGGCCGAA AAGGGUUU | 11796 |
| 1132 | AACCCUUUC CUGGGACU | 2379 | AGUCCCAG CUGAUGAGGCCGUUAGGCCGAA AAAGGGUU | 11797 |
| 1154 | GAAGAUGUU UUUGAGCA | 2380 | UGCUCAAA CUGAUGAGGCCGUUAGGCCGAA ACAUCUUC | 11798 |
| 1155 | AAGAUGUUU UUGAGCAC | 2381 | GUGCUCAA CUGAUGAGGCCGUUAGGCCGAA AACAUCUU | 11799 |
| 1156 | AGAUGUUUU UGAGCACC | 2382 | GGUGCUCA CUGAUGAGGCCGUUAGGCCGAA AAACAUCU | 11800 |
| 1157 | GAUGUUUUU GAGCACCU | 2383 | AGGUGCUC CUGAUGAGGCCGUUAGGCCGAA AAAACAUC | 11801 |
| 1166 | GAGCACCUU GACAAUAG | 2384 | CUAUUGUC CUGAUGAGGCCGUUAGGCCGAA AGGUGCUC | 11802 |
| 1173 | UUGACAAUA GAAAGUGU | 2385 | ACACUUUC CUGAUGAGGCCGUUAGGCCGAA AUUGUCAA | 11803 |
| 1205 | AGGGGAAUA CACCUGUG | 2386 | CACAGGUG CUGAUGAGGCCGUUAGGCCGAA AUUCCCCU | 11804 |
| 1215 | ACCUGUGUA GCGUCCAG | 2387 | CUGGACGC CUGAUGAGGCCGUUAGGCCGAA ACACAGGU | 11805 |
| 1220 | UGUAGCGUC CAGUGGAC | 2388 | GUCCACUG CUGAUGAGGCCGUUAGGCCGAA ACGCUACA | 11806 |
| 1236 | CGGAUGAUC AAGAGAAA | 2389 | UUUCUCUU CUGAUGAGGCCGUUAGGCCGAA AUCAUCCG | 11807 |
| 1246 | AGAGAAAUA GAACAUUU | 2390 | AAAUGUUC CUGAUGAGGCCGUUAGGCCGAA AUUUCUCU | 11808 |
| 1253 | UAGAACAUU UGUCCGAG | 2391 | CUCGGACA CUGAUGAGGCCGUUAGGCCGAA AUGUUCUA | 11809 |
| 1254 | AGAACAUUU GUCCGAGU | 2392 | ACUCGGAC CUGAUGAGGCCGUUAGGCCGAA AAUGUUCU | 11810 |
| 1257 | ACAUUUGUC CGAGUUCA | 2393 | UGAACUCG CUGAUGAGGCCGUUAGGCCGAA ACAAAUGU | 11811 |
| 1263 | GUCCGAGUU CACACAAA | 2394 | UUUGUGUG CUGAUGAGGCCGUUAGGCCGAA ACUCGGAC | 11812 |
| 1264 | UCCGAGUUC ACACAAAG | 2395 | CUUUGUGU CUGAUGAGGCCGUUAGGCCGAA AACUCGGA | 11813 |
| 1276 | CAAAGCCUU UUAUUGCU | 2396 | AGCAAUAA CUGAUGAGGCCGUUAGGCCGAA AGGCUUUG | 11814 |
| 1277 | AAAGCCUUU UAUUGCUU | 2397 | AAGCAAUA CUGAUGAGGCCGUUAGGCCGAA AAGGCUUU | 11815 |
| 1278 | AAGCCUUUU AUUGCUUU | 2398 | AAAGCAAU CUGAUGAGGCCGUUAGGCCGAA AAAGGCUU | 11816 |
| 1279 | AGCCUUUUA UUGCUUUC | 2399 | GAAAGCAA CUGAUGAGGCCGUUAGGCCGAA AAAAGGCU | 11817 |
| 1281 | CCUUUUAUU GCUUUCGG | 2400 | CCGAAAGC CUGAUGAGGCCGUUAGGCCGAA AUAAAAGG | 11818 |
| 1285 | UUAUUGCUU UCGGUAGU | 2401 | ACUACCGA CUGAUGAGGCCGUUAGGCCGAA AGCAAUAA | 11819 |
| 1286 | UAUUGCUUU CGGUAGUG | 2402 | CACUACCG CUGAUGAGGCCGUUAGGCCGAA AAGCAAUA | 11820 |
| 1287 | AUUGCUUUC GGUAGUGG | 2403 | CCACUACC CUGAUGAGGCCGUUAGGCCGAA AAAGCAAU | 11821 |
| 1291 | CUUUCGGUA GUGGGAUG | 2404 | CAUCCCAC CUGAUGAGGCCGUUAGGCCGAA ACCGAAAG | 11822 |
| 1304 | GAUGAAAUC UUUGGUGG | 2405 | CCACCAAA CUGAUGAGGCCGUUAGGCCGAA AUUUCAUC | 11823 |
| 1306 | UGAAAUCUU UGGUGGAA | 2406 | UUCCACCA CUGAUGAGGCCGUUAGGCCGAA AGAUUUCA | 11824 |
| 1307 | GAAAUCUUU GGUGGAAG | 2407 | CUUCCACC CUGAUGAGGCCGUUAGGCCGAA AAGAUUUC | 11825 |
| 1330 | UGGGCAGUC AAGUCCGA | 2408 | UCGGACUU CUGAUGAGGCCGUUAGGCCGAA ACUGCCCA | 11826 |
| 1335 | AGUCAAGUC CGAAUCCC | 2409 | GGGAUUCG CUGAUGAGGCCGUUAGGCCGAA ACUUGACU | 11827 |
| 1341 | GUCCGAAUC CCUGUGAA | 2410 | UUCACAGG CUGAUGAGGCCGUUAGGCCGAA AUUCGGAC | 11828 |
| 1352 | UGUGAAGUA UCUCAGUU | 2411 | AACUGAGA CUGAUGAGGCCGUUAGGCCGAA ACUUCACA | 11829 |
| 1354 | UGAAGUAUC UCAGUUAC | 2412 | GUAACUGA CUGAUGAGGCCGUUAGGCCGAA AUACUUCA | 11830 |
| 1356 | AAGUAUCUC AGUUACCC | 2413 | GGGUAACU CUGAUGAGGCCGUUAGGCCGAA AGAUACUU | 11831 |
| 1360 | AUCUCAGUU ACCCAGCU | 2414 | AGCUGGGU CUGAUGAGGCCGUUAGGCCGAA ACUGAGAU | 11832 |
| 1361 | UCUCAGUUA CCCAGCUC | 2415 | GAGCUGGG CUGAUGAGGCCGUUAGGCCGAA AACUGAGA | 11833 |
| 1369 | ACCCAGCUC CUGAUAUC | 2416 | GAUAUCAG CUGAUGAGGCCGUUAGGCCGAA AGCUGGGU | 11834 |
| 1375 | CUCCUGAUA UCAAAUGG | 2417 | CCAUUUGA CUGAUGAGGCCGUUAGGCCGAA AUCAGGAG | 11835 |
| 1377 | CCUGAUAUC AAAUGGUA | 2418 | UACCAUUU CUGAUGAGGCCGUUAGGCCGAA AUAUCAGG | 11836 |
| 1385 | CAAAUGGUA CAGAAAUG | 2419 | CAUUUCUG CUGAUGAGGCCGUUAGGCCGAA ACCAUUUG | 11837 |
| 1404 | AGGCCCAUU GAGUCCAA | 2420 | UUGGACUC CUGAUGAGGCCGUUAGGCCGAA AUGGGCCU | 11838 |
| 1409 | CAUUGAGUC CAACUACA | 2421 | UGUAGGUG CUGAUGAGGCCGUUAGGCCGAA ACUCAAUG | 11839 |
| 1415 | GUCCAACUA CACAAUGA | 2422 | UCAUUGUG CUGAUGAGGCCGUUAGGCCGAA AGUUGGAC | 11840 |
| 1425 | ACAAUGAUU GUUGGCGA | 2423 | UCGCCAAC CUGAUGAGGCCGUUAGGCCGAA AUCAUUGU | 11841 |
| 1428 | AUGAUUGUU GGCGAUGA | 2424 | UCAUCGCC CUGAUGAGGCCGUUAGGCCGAA ACAAUCAU | 11842 |
| 1440 | GAUGAACUC ACCAUCAU | 2425 | AUGAUGGU CUGAUGAGGCCGUUAGGCCGAA AGUUCAUC | 11843 |
| 1446 | CUCACCAUC AUGGAAGU | 2426 | ACUUCCAU CUGAUGAGGCCGUUAGGCCGAA AUGGUGAG | 11844 |
| 1478 | AGGAAACUA CACGGUCA | 2427 | UGACCGUG CUGAUGAGGCCGUUAGGCCGAA AGUUUCCU | 11845 |
| 1485 | UACACGGUC AUCCUCAC | 2428 | GUGAGGAU CUGAUGAGGCCGUUAGGCCGAA ACCGUGUA | 11846 |
| 1488 | ACGGUCAUC CUCACCAA | 2429 | UUGGUGAG CUGAUGAGGCCGUUAGGCCGAA AUGACCGU | 11847 |
| 1491 | GUCAUCCUC ACCAACCC | 2430 | GGGUUGGU CUGAUGAGGCCGUUAGGCCGAA AGGAUGAC | 11848 |
| 1503 | AACCCCAUU UCAAUGGA | 2431 | UCCAUUGA CUGAUGAGGCCGUUAGGCCGAA AUGGGGUU | 11849 |
| 1504 | ACCCCAUUU CAAUGGAG | 2432 | CUCCAUUG CUGAUGAGGCCGUUAGGCCGAA AAUGGGGU | 11850 |
| 1505 | CCCCAUUUC AAUGGAGA | 2433 | UCUCCAUU CUGAUGAGGCCGUUAGGCCGAA AAAUGGGG | 11851 |
| 1530 | CACAUGGUC UCUCUGGU | 2434 | ACCAGAGA CUGAUGAGGCCGUUAGGCCGAA ACCAUGUG | 11852 |
| 1532 | CAUGGUCUC UCUGGUUG | 2435 | CAACCAGA CUGAUGAGGCCGUUAGGCCGAA AGACCAUG | 11853 |
| 1534 | UGGUCUCUC UGGUUGUG | 1714 | CACAACCA CUGAUGAGGCCGUUAGGCCGAA AGAGACCA | 11133 |
| 1539 | UCUCUGGUU GUGAAUGU | 2436 | ACAUUCAC CUGAUGAGGCCGUUAGGCCGAA ACCAGAGA | 11854 |
| 1548 | GUGAAUGUC CCACCCCA | 2437 | UGGGGUGG CUGAUGAGGCCGUUAGGCCGAA ACAUUCAC | 11855 |
| 1560 | CCCCAGAUC GGUGAGAA | 2438 | UUCUCACC CUGAUGAGGCCGUUAGGCCGAA AUCUGGGG | 11137 |
| 1574 | GAAAGCCUU GAUCUCGC | 2439 | GCGAGAUC CUGAUGAGGCCGUUAGGCCGAA AGGCUUUC | 11856 |
| 1578 | GCCUUGAUC UCGCCUAU | 2440 | AUAGGCGA CUGAUGAGGCCGUUAGGCCGAA AUCAAGGC | 11857 |
| 1580 | CUUGAUCUC GCCUAUGG | 2441 | CCAUAGGC CUGAUGAGGCCGUUAGGCCGAA AGAUCAAG | 11858 |
| 1585 | UCUCGCCUA UGGAUUCC | 2442 | GGAAUCCA CUGAUGAGGCCGUUAGGCCGAA AGGCGAGA | 11859 |
| 1591 | CUAUGGAUU CCUACCAG | 2443 | CUGGUAGG CUGAUGAGGCCGUUAGGCCGAA AUCCAUAG | 11860 |
| 1592 | UAUGGAUUC CUACCAGU | 2444 | ACUGGUAG CUGAUGAGGCCGUUAGGCCGAA AAUCCAUA | 11861 |
| 1595 | GGAUUCCUA CCAGUAUG | 2445 | CAUACUGG CUGAUGAGGCCGUUAGGCCGAA AGGAAUCC | 11862 |
| 1601 | CUACCAGUA UGGOACCA | 2446 | UGGUCCCA CUGAUGAGGCCGUUAGGCCGAA ACUGGUAG | 11863 |
| 1619 | GCAGACAUU GACAUGCA | 2447 | UGCAUGUC CUGAUGAGGCCGUUAGGCCGAA AUGUCUGC | 11864 |
| 1632 | UCCACAGUC UACGCCAA | 2448 | UUGGCGUA CUGAUGAGGCCGUUAGGCCGAA ACUGUGCA | 11865 |
| 1634 | CACAGUCUA CGCCAACC | 2449 | GGUUGGCG CUGAUGAGGCCGUUAGGCCGAA AGACUGUG | 11866 |
| 1645 | CCAACCCUC CCCUGCAC | 2450 | GUGCAGGG CUGAUGAGGCCGUUAGGCCGAA AGGGUUGG | 11867 |
| 1659 | CACCACAUC CAGUGGUA | 2451 | UACCACUG CUGAUGAGGCCGUUAGGCCGAA AUGUGGUG | 11868 |
| 1667 | CCAGUGGUA CUGGCAGC | 2452 | GCUGCCAG CUGAUGAGGCCGUUAGGCCGAA ACCACUGG | 11869 |
| 1677 | UGGCAGCUA GAAGAAGC | 2453 | GCUUCUUC CUGAUGAGGCCGUUAGGCCGAA AGCUGCCA | 11870 |
| 1691 | AGCCUGCUC CUACAGAC | 2454 | GUCUGUAG CUGAUGAGGCCGUUAGGCCGAA AGCAGGCU | 11871 |
| 1694 | CUGCUCCUA CAGACCCG | 2455 | CGGGUCUG CUGAUGAGGCCGUUAGGCCGAA AGGAGCAG | 11872 |
| 1718 | AAGCCCGUA UGCUUGUA | 2456 | UACAAGCA CUGAUGAGGCCGUUAGGCCGAA ACGGGCUU | 11873 |
| 1723 | CGUAUGCUU GUAAAGAA | 2457 | UUCUUUAC CUGAUGAGGCCGUUAGGCCGAA AGCAUACG | 11874 |
| 1726 | AUGCUUGUA AAGAAUGG | 2458 | CCAUUCUU CUGAUGAGGCCGUUAGGCCGAA ACAAGCAU | 11875 |
| 1750 | UGGAGGAUU UCCAGGGG | 2459 | CCCCUGGA CUGAUGAGGCCGUUAGGCCGAA AUCCUCCA | 11876 |
| 1751 | GGAGGAUUU CCAGGGGG | 2460 | CCCCCUGG CUGAUGAGGCCGUUAGGCCGAA AAUCCUCC | 11877 |
| 1752 | GAGGAUUUC CAGGGGGG | 2461 | CCCCCCUG CUGAUGAGGCCGUUAGGCCGAA AAAUCCUC | 11878 |
| 1770 | AACAAGAUC GAAGUCAC | 2462 | GUGACUUC CUGAUGAGGCCGUUAGGCCGAA AUCUUGUU | 11879 |
| 1776 | AUCGAAGUC ACCAAAAA | 2463 | UUUUUGGU CUGAUGAGGCCGUUAGGCCGAA ACUUCGAU | 11880 |
| 1790 | AAACCAAUA UGCCCUGA | 2464 | UCAGGGCA CUGAUGAGGCCGUUAGGCCGAA AUUGGUUU | 11881 |
| 1800 | GCCCUGAUU GAAGGAAA | 2465 | UUUCCUUC CUGAUGAGGCCGUUAGGCCGAA AUCAGGGC | 11882 |
| 1821 | AAAACUGUA AGUACGCU | 2466 | AGCGUACU CUGAUGAGGCCGUUAGGCCGAA ACAGUUUU | 11883 |
| 1825 | CUGUAAGUA CGCUGGUC | 2467 | GACCAGCG CUGAUGAGGCCGUUAGGCCGAA ACUUACAG | 11884 |
| 1833 | ACGCUGGUC AUCCAAGC | 2468 | GCUUGGAU CUGAUGAGGCCGUUAGGCCGAA ACCAGCGU | 11885 |
| 1836 | CUGGUCAUC CAAGCUGC | 2469 | GCAGCUUG CUGAUGAGGCCGUUAGGCCGAA AUGACCAG | 11886 |
| 1853 | CAACGUGUC AGCGUUGU | 2470 | ACAACGCU CUGAUGAGGCCGUUAGGCCGAA ACACGUUG | 11887 |
| 1859 | GUCAGCGUU GUACAAAU | 2471 | AUUUGUAC CUGAUGAGGCCGUUAGGCCGAA ACGCUGAC | 11888 |
| 1862 | AGCGUUGUA CAAAUGUG | 2472 | CACAUUTU CUGAUGAGGCCGUUAGGCCGAA ACAACGCU | 11889 |
| 1878 | GAAGCCAUC AACAAAGC | 2473 | GCUUUGUU CUGAUGAGGCCGUUAGGCCGAA AUGGCUUC | 11890 |
| 1905 | GAGAGGGUC AUCUCCUU | 2474 | AAGGAGAU CUGAUGAGGCCGUUAGGCCGAA ACCCUCUC | 11891 |
| 1908 | AGGGUCAUC UCCUUCCA | 2475 | UGGAAGGA CUGAUGAGGCCGUUAGGCCGAA AUGACCCU | 11892 |
| 1910 | GOUCAUCUC CUUCCAUG | 2476 | CAUGGAAG CUGAUGAGGCCGUUAGGCCGAA AGAUGACC | 11893 |
| 1913 | CAUCUCCUU CCAUGUGA | 2477 | UCACAUGG CUGAUGAGGCCGUUAGGCCGAA AGGAGAUG | 11894 |
| 1914 | AUCUCCUUC CAUGUGAU | 2478 | AUCACAUG CUGAUGAGGCCGUUAGGCCGAA AAGGAGAU | 11895 |
| 1923 | CAUGUGAUC AGGGGUCC | 2479 | GGACCCCU CUGAUGAGGCCGUUAGGCCGAA AUCACAUG | 11896 |
| 1930 | UCAGGGGUC CUGAAAUU | 2480 | AAUUUCAG CUGAUGAGGCCGUUAGGCCGAA ACCCCUGA | 11897 |
| 1938 | CCUGAAAUU ACUGUGCA | 2481 | UGCACAGU CUGAUGAGGCCGUUAGGCCGAA AUUUCAGG | 11898 |
| 1939 | CUGAAAUUA CUGUGCAA | 2482 | UUGCACAG CUGAUGAGGCCGUUAGGCCGAA AAUUUCAG | 11899 |
| 1982 | GAGUGUGUC CCUGUUGU | 2483 | ACAACAGG CUGAUGAGGCCGUUAGGCCGAA ACACACUC | 11900 |
| 1988 | GUCCCUGUU GUGCACUG | 2484 | CAGUGCAC CUGAUGAGGCCGUUAGGCCGAA ACAGGGAC | 11901 |
| 2008 | ACAGAAAUA CGUUUGAG | 2485 | CUCAAACG CUGAUGAGGCCGUUAGGCCGAA AUUUCUGU | 11902 |
| 2012 | AAAUACGUU UGAGAACC | 2486 | GGUUCUCA CUGAUGAGGCCGUUAGGCCGAA ACGUAUUU | 11903 |
| 2013 | AAUACGUUU GAGAACCU | 2487 | AGGUUCUC CUGAUGAGGCCGUUAGGCCGAA AACGUAUU | 11904 |
| 2022 | GAGAACCUC ACGUGGUA | 2488 | UACCACGU CUGAUGAGGCCGUUAGGCCGAA AGGUUCUC | 11905 |
| 2030 | CACGUGGUA CAAGCUUG | 2489 | CAAGCUUG CUGAUGAGGCCGUUAGGCCGAA ACCACGUG | 11906 |
| 2037 | UACAAGCUU GGCUCACA | 2490 | UGUGAGCC CUGAUGAGGCCGUUAGGCCGAA AGCUUGUA | 11907 |
| 2042 | GCUUGGCUC ACAGGCAA | 2491 | UUGCCUGU CUGAUGAGGCCGUUAGGCCGAA AGCCAAGC | 11908 |
| 2054 | GGCAACAUC GGUCCACA | 2492 | UGUGGACC CUGAUGAGGCCGUUAGGCCGAA AUGUUGCC | 11909 |
| 2058 | ACAUCGGUC CACAUGGG | 2493 | CCCAUGUG CUGAUGAGGCCGUUAGGCCGAA ACCGAUGU | 11910 |
| 2072 | GGGCGAAUC ACUCACAC | 2494 | GUGUGAGU CUGAUGAGGCCGUUAGGCCGAA AUUCGCCC | 11911 |
| 2076 | GAAUCACUC ACACCAGU | 2495 | ACUGGUGU CUGAUGAGGCCGUUAGGCCGAA AGUGAUUC | 11912 |
| 2085 | ACACCAGUU UGCAAGAA | 2496 | UUCUUGCA CUGAUGAGGCCGUUAGGCCGAA ACUGGUGU | 11913 |
| 2086 | CACCAGUUU GCAAGAAC | 2497 | GUUCUUGC CUGAUGAGGCCGUUAGGCCGAA AACUGGUG | 11914 |
| 2096 | CAAGAACUU GGAUGCUC | 2498 | GAGCAUCC CUGAUGAGGCCGUUAGGCCGAA AGUUCUUG | 11915 |
| 2104 | UGGAUGCUC UUUGGAAA | 2499 | UUUCCAAA CUGAUGAGGCCGUUAGGCCGAA AGCAUCCA | 11916 |
| 2106 | GAUGCUCUU UGGAAACU | 2500 | AGUUUCCA CUGAUGAGGCCGUUAGGCCGAA AGACCAUC | 11917 |
| 2107 | AUGCUCUUU GGAAACUG | 2501 | CAGUUUCC CUGAUGAGGCCGUUAGGCCGAA AAGAGCAU | 11918 |
| 2129 | CACCAUGUU UUCUAACA | 2502 | UGUUAGAA CUGAUGAGGCCGUUAGGCCGAA ACAUGGUG | 11919 |
| 2130 | ACCAUGUUU UCUAACAG | 2503 | CUGUUAGA CUGAUGAGGCCGUUAGGCCGAA AACAUGGU | 11920 |
| 2131 | CCAUGUUUU CUAACAGC | 2504 | GCUGUUAG CUGAUGAGGCCGUUAGGCCGAA AAACAUGG | 11921 |
| 2132 | CAUGUUUUC UAACAGCA | 2505 | UGCUGUUA CUGAUGAGGCCGUUAGGCCGAA AAAACAUG | 11922 |
| 2134 | UGUUUUCUA ACACCACA | 2506 | UGUGCUGU CUGAUGAGGCCGUUAGGCCGAA AGAAAACA | 11923 |
| 2151 | AAUGACAUC UUGAUUGU | 2507 | ACAAUCAA CUGAUGAGGCCGUUAGGCCGAA AUGUCAUU | 11924 |
| 2153 | UGACAUCUU GAUUGUGG | 2508 | CCACAAUC CUGAUGAGGCCGUUAGGCCGAA AGAUGUCA | 11925 |
| 2157 | AUCUUGAUU GUGGCAUU | 2509 | AAUGCCAC CUGAUGAGGCCGUUAGGCCGAA AUCAAGAU | 11926 |
| 2165 | UGUGGCAUU UCAGAAUG | 2510 | CAUUCUGA CUGAUGAGGCCGUUAGGCCGAA AUGCCACA | 11927 |
| 2166 | GUGGCAUUU CAGAAUGC | 2511 | GCAUUCUG CUGAUGAGGCCGUUAGGCCGAA AAUGCCAC | 11928 |
| 2167 | UGGCAUUUC AGAAUGCC | 2512 | GGCAUUCU CUGAUGAGGCCGUUAGGCCGAA AAAUGCCA | 11929 |
| 2177 | GAAUGCCUC UCUGCAGG | 2513 | CCUGCAGA CUGAUGAGGCCGUUAGGCCGAA AGGCAUUC | 11930 |
| 2179 | AUGCCUCUC UGCAGGAC | 2514 | GUCCUGCA CUGAUGAGGCCGUUAGGCCGAA AGAGGCAU | 11921 |
| 2198 | AGGCGACUA UGUUUGCU | 2515 | AGCAAACA CUGAUGAGGCCGUUAGGCCGAA AGUCGCCU | 11932 |
| 2202 | GACUAUGUU UGCUCUGC | 2516 | GCAGAGCA CUGAUGAGGCCGUUAGGCCGAA ACAUAGUC | 11933 |
| 2203 | ACUAUGUUU GCUCUGCU | 2517 | AGCAGAGC CUGAUGAGGCCGUUAGGCCGAA AACAUAGU | 11934 |
| 2207 | UGUUUGCUC UGCUCAAG | 2518 | CUUGAGCA CUGAUGAGGCCGUUAGGCCGAA AGCAAACA | 11935 |
| 2212 | GCUCUGCUC AAGAUAAG | 2519 | CUUAUCUU CUGAUGAGGCCGUUAGGCCGAA AGCAGAGC | 11936 |
| 2218 | CUCAAGAUA AGAAGACC | 2520 | GGUCUUCU CUGAUGAGGCCGUUAGGCCGAA AUCUUGAG | 11937 |
| 2239 | AAAGACAUU GCCUGGUC | 2521 | GACCAGGC CUGAUGAGGCCGUUAGGCCGAA AUGUCUUU | 11938 |
| 2247 | UGCCUGGUC AAACAGCU | 2522 | AGCUGUUU CUGAUGAGGCCGUUAGGCCGAA ACCAGGCA | 11939 |
| 2256 | AAACAGCUC AUCAUCCU | 2523 | AGGAUGAU CUGAUGAGGCCGUUAGGCCGAA AGCUGUUU | 11940 |
| 2259 | CAGCUCAUC AUCCUAGA | 2524 | UCUAGGAU CUGAUGAGGCCGUUAGGCCGAA AUGAGCUG | 11941 |
| 2262 | CUCAUCAUC CUAGAGCG | 2525 | CGCUCUAG CUGAUGAGGCCGUUAGGCCGAA AUGAUGAG | 11942 |
| 2265 | AUCAUCCUA GAGCGCAU | 2526 | AUGCGCUC CUGAUGAGGCCGUUAGGCCGAA AGGAUGAU | 11943 |
| 2286 | CCCAUGAUC ACCGGAAA | 2527 | UUUCCGGU CUGAUGAGGCCGUUAGGCCGAA AUCAUGGG | 11944 |
| 2296 | CCGGAAAUC UGGAGAAU | 2528 | AUUCUCCA CUGAUGAGGCCGUUAGGCCGAA AUUUCCGG | 11945 |
| 2305 | UGGAGAAUC AGACAACA | 2529 | UGUUGUCU CUGAUGAGGCCGUUAGGCCGAA AUUCUCCA | 11946 |
| 2319 | ACAACCAUU GGCGAGAC | 2530 | GUCUCGCC CUGAUGAGGCCGUUAGGCCGAA AUGGUUGU | 11947 |
| 2331 | GAGACCAUU GAAGUGAC | 2531 | GUCACUUC CUGAUGAGGCCGUUAGGCCGAA AUGGUCUC | 11948 |
| 2341 | AAGUGACUU GCCCAGCA | 2532 | UGCUGGGC CUGAUGAGGCCGUUAGGCCGAA AGUCACUC | 11949 |
| 2351 | CCCAGCAUC UGGAAAUC | 2533 | GAUUUCCA CUGAUGAGGCCGUUAGGCCGAA AUGCUGGG | 11950 |
| 2359 | CUGGAAAUC CUACCCCA | 2534 | UGGGGUAG CUGAUGAGGCCGUUAGGCCGAA AUUUCCAG | 11951 |
| 2362 | GAAAUCCUA CCCCACAC | 2535 | GUGUGGGG CUGAUGAGGCCGUUAGGCCGAA AGGAUUUC | 11952 |
| 2373 | CCACACAUU ACAUGGUU | 2536 | AACCAUGU CUGAUGAGGCCGUUAGGCCGAA AUGUGUGG | 11953 |
| 2374 | CACACAUUA CAUGGUUC | 2537 | GAACCAUG CUGAUGAGGCCGUUAGGCCGAA AAUGUGUG | 11954 |
| 2381 | UACAUGGUU CAAAGACA | 2538 | UGUCUUUG CUGAUGAGGCCGUUAGGCCGAA ACCAUGUA | 11955 |
| 2382 | ACAUGGUUC AAAGACAA | 2539 | UUGUCUUU CUGAUGAGGCCGUUAGGCCGAA AACCAUGU | 11956 |
| 2403 | ACCCUGGUA GAAGAUUC | 2540 | GAAUCUUC CUGAUGAGGCCGUUAGGCCGAA ACCAGGGU | 11957 |
| 2410 | UAGAAGAUU CAGGCAUU | 2541 | AAUGCCUG CUGAUGAGGCCGUUAGGCCGAA AUCUUCUA | 11958 |
| 2411 | AGAAGAUUC AGGCAUUG | 2542 | CAAUGCCU CUGAUGAGGCCGUUAGGCCGAA AAUCUUCU | 11959 |
| 2418 | UCAGGCAUU GUACUGAG | 2543 | CUCAGUAC CUGAUGAGGCCGUUAGGCCGAA AUGCCUGA | 11960 |
| 2421 | GGCAUUGUA CUGAGAGA | 2544 | UCUCUCAG CUGAUGAGGCCGUUAGGCCGAA ACAAUGCC | 11961 |
| 2449 | ACCUGACUA UCCGCAGG | 2545 | CCUGCGGA CUGAUGAGGCCGUUAGGCCGAA AGUCAGGU | 11962 |
| 2451 | CUGACUAUC CGCAGGGU | 2546 | ACCCUGCG CUGAUGAGGCCGUUAGGCCGAA AUAGUCAG | 11963 |
| 2481 | GGAGGCCUC UACACCUG | 2547 | CAGGUGUA CUGAUGAGGCCGUUAGGCCGAA AGGCCUCC | 11964 |
| 2483 | AGGCCUCUA CACCUGCC | 1847 | GGCAGGUG CUGAUGAGGCCGUUAGGCCGAA AGAGGCCU | 11266 |
| 2505 | UGCAAUGUC CUUGGCUG | 2548 | CAGCCAAG CUGAUGAGGCCGUUAGGCCGAA ACAUUGCA | 11965 |
| 2508 | AAUGUCCUU GGCUGUGC | 2549 | GCACAGCC CUGAUGAGGCCGUUAGGCCGAA AGGACAUU | 11966 |
| 2532 | GAGACGCUC UUCAUAAU | 2550 | AUUAUGAA CUGAUGAGGCCGUUAGGCCGAA AGCGUCUC | 11967 |
| 2534 | GACGCUCUU CAUAAUAG | 2551 | CUAUUAUG CUGAUGAGGCCGUUAGGCCGAA AGAGCGUC | 11968 |
| 2535 | ACGCUCUUC AUAAUAGA | 2552 | UCUAUUAU CUGAUGAGGCCGUUAGGCCGAA AAGAGCGU | 11969 |
| 2538 | CUCUUCAUA AUAGAAGG | 2553 | CCUUCUAU CUGAUGAGGCCGUUAGGCCGAA AUGAAGAG | 11970 |
| 2541 | UUCAUAAUA GAAGGUGC | 1857 | GCACCUUC CUGAUGAGGCCGUUAGGCCGAA AUUAUGAA | 11276 |
| 2567 | GACCAACUU GGAAGUCA | 2554 | UGACUUCC CUGAUGAGGCCGUUAGGCCGAA AGUUGGUC | 11971 |
| 2574 | UUGGAAGUC AUUAUCCU | 2555 | AGGAUAAU CUGAUGAGGCCGUUAGGCCGAA ACUCCCAA | 11972 |
| 2577 | GAAGUCAUU AUCCUCGU | 2556 | ACGAGGAU CUGAUGAGGCCGUUAGGCCGAA AUGACCUC | 11973 |
| 2578 | AAGUCAUUA UCCUCGUC | 2557 | GACGAGGA CUGAUGAGGCCGUUAGGCCGAA AAUGACUU | 11974 |
| 2580 | GUCAUUAUC CUCGUCGG | 2558 | CCGACGAG CUGAUGAGGCCGUUAGGCCGAA AUAAUGAC | 11975 |
| 2583 | AUUAUCCUC GUCGGCAC | 2559 | GUGCCGAC CUGAUGAGGCCGUUAGGCCGAA AGGAUAAU | 11976 |
| 2586 | AUCCUCGUC GGCACUGC | 2560 | GCAGUGCC CUGAUGAGGCCGUCAGGCCGAA ACGAGGAU | 11977 |
| 2601 | GCAGUGAUU GCCAUGUU | 2561 | AACAUGGC CUGAUGAGGCCGUUAGGCCGAA AUCACUGC | 11978 |
| 2609 | UGCCAUGUU CUUCUGGC | 1867 | GCCAGAAG CUGAUGAGGCCGUUAGGCCGAA ACAUGGCA | 11286 |
| 2610 | GCCAUGUUC UUCUGGCU | 1868 | AGCCAGAA CUGAUGAGGCCGUUAGGCCGAA AACAUGGC | 11287 |
| 2612 | CAUGUUCUU CUCGCUCC | 2562 | GGAGCCAG CUGAUGAGGCCGUUAGGCCGAA AGAACAUG | 11979 |
| 2613 | AUGUUCUUC UGGCUCCU | 2563 | AGGAGCCA CUGAUGAGGCCGUUAGGCCGAA AAGAACAU | 11980 |
| 2619 | UUCUGGCUC CUUCUUGU | 2564 | ACAAGAAG CUGAUGAGGCCGUUAGGCCGAA AGCCAGAA | 11290 |
| 2622 | UGGCUCCUU CUUGUCAU | 2565 | AUGACAAG CUGAUGAGGCCGUUAGGCCGAA AGGAGCCA | 11981 |
| 2623 | GGCUCCUUC UUGUCAUU | 2566 | AAUGACAA CUGAUGAGGCCGUUAGGCCGAA AAGGAGCC | 11982 |
| 2625 | CUCCUUCUU GUCAUUGU | 2567 | ACAAUGAC CUGAUGAGGCCGUUAGGCCGAA AGAAGGAG | 11983 |
| 2628 | CUUCUUGUC AUUGUCCU | 2568 | AGGACAAU CUGAUGAGGCCGUUAGGCCGAA ACAAGAAG | 11984 |
| 2631 | CUUGUCAUU GUCCUACG | 2569 | OGUAGGAC CUGAUGAGGCCGUUAGGCCGAA AUGACAAG | 11985 |
| 2634 | GUCAUUGUC CUACOGAC | 2570 | GUCCGUAG CUGAUGAGGCCGUUAGGCCGAA ACAAUGAC | 11986 |
| 2637 | AUUGUCCUA CGGACCGU | 2571 | ACGGUCCG CUGAUGAGGCCGUUAGGCCGAA AGGACAAU | 11987 |
| 2646 | CGGACCGUU AAGCGGGC | 2572 | GCCCGCUU CUGAUGAGGCCGUUAGGCCGAA ACGGUCCG | 11988 |
| 2647 | GGACCGUUA AGCGGGCC | 1880 | GGCCCGCU CUGAUGAGGCCGUUAGGCCGAA AACGGUCC | 11299 |
| 2681 | GACAGGCUA CUUGUCUA | 2573 | UAGACAAG CUGAUGAGGCCGUUAGGCCGAA AGCCUGUC | 11989 |
| 2684 | AGGCUACUU GUCUAUUG | 2574 | CAAUAGAC CUGAUGAGGCCGUUAGGCCGAA AGUAGCCU | 11990 |
| 2687 | CUACUUGUC UAUUGUCA | 2575 | UGACAAUA CUGAUGAGGCCGUUAGGCCGAA ACAAGUAG | 11991 |
| 2689 | ACUUGUCUA UUGUCAUG | 2576 | CAUGACAA CUGAUGAGGCCGUUAGGCCGAA AGACAAGU | 11992 |
| 2691 | UUGUCUAUU GUCAUGGA | 2577 | UCCAUGAC CUGAUGAGGCCGUUAGGCCGAA AUAGACAA | 11993 |
| 2694 | UCUAUUGUC AUGGAUCC | 2578 | GGAUCCAU CUGAUGAGGCCGUUAGGCCGAA ACAAUAGA | 11994 |
| 2701 | UCAUGGAUC CAGAUGAA | 1886 | UUCAUCUG CUGAUGAGGCCGUUAGGCCGAA AUCCAUGA | 11305 |
| 2711 | AGAUGAAUU GCCCUUGG | 2579 | CCAAGGGC CUGAUGAGGCCGUUAGGCCGAA AUUCAUCU | 11995 |
| 2717 | AUUGCCCUU GGAUGAGC | 2580 | GCUCAUCC CUGAUGAGGCCGUUAGGCCGAA AGGGCAAU | 11996 |
| 2738 | UGAACGCUU GCCUUAUG | 2581 | CAUAAGGC CUGAUGAGGCCGUUAGGCCGAA AGCGUUCA | 11997 |
| 2743 | GCUUGCCUU AUGAUGCC | 2582 | GGCAUCAU CUGAUGAGGCCGUUAGGCCGAA AGGCAAGC | 11998 |
| 2744 | CUUGCCUUA UGAUGCCA | 2583 | UGGCAUCA CUGAUGAGGCCGUUAGGCCGAA AAGGCAAG | 11999 |
| 2765 | GUGGGAAUU CCCCAGGG | 2584 | CCCUGGGG CUGAUGAGGCCGUUAGGCCGAA AUUCCCAC | 12000 |
| 2766 | UGGGAAUUC CCCAGGGA | 2585 | UCCCUGGG CUGAUGAGGCCGUUAGGCCGAA AAUUCCCA | 12001 |
| 2787 | CUGAAACUA GGAAAACC | 2586 | GGUUUUCC CUGAUGAGGCCGUUAGGCCGAA AGUUUCAG | 12002 |
| 2797 | GAAAACCUC UUGGCCGC | 2587 | GCGGCCAA CUGAUGAGGCCGUUAGGCCGAA AGGUUUUC | 12003 |
| 2799 | AAACCUCUU GGCCGCGG | 2588 | CCGCGGCC CUGAUGAGGCCGUUAGGCCGAA AGAGGUUU | 12004 |
| 2813 | CGGUGCCUU CGGCCAAG | 2589 | CUUGGCCG CUGAUGAGGCCGUUAGGCCGAA AGGCACCG | 12005 |
| 2814 | GGUGCCUUC GGCCAAGU | 2590 | ACUUGGCC CUGAUGAGGCCGUUAGGCCGAA AAGGCACC | 12006 |
| 2826 | CAAGUGAUU GAGGCAGA | 2591 | UCUGCCUC CUGAUGAGGCCGUUAGGCCGAA AUCACUUG | 12007 |
| 2839 | CAGACGCUU UUGGAAUU | 2592 | AAUUCCAA CUGAUGAGGCCGUUAGGCCGAA AGCGUCUG | 12008 |
| 2840 | AGACGCUUU UGGAAUUG | 2593 | CAAUUCCA CUGAUGAGGCCGUUAGGCCGAA AAGCGUCU | 12009 |
| 2841 | GACGCUUUU GGAAUUGA | 2594 | UCAAUUCC CUGAUGAGGCCGUUAGGCCGAA AAAGCGUC | 12010 |
| 2847 | UUUGGAAUU GACAAGAC | 1903 | GUCUUGUC CUGAUGAGGCCGUUAGGCCGAA AUUCCAAA | 11322 |
| 2863 | CAGCGACUU GCAAAACA | 2595 | UGUUUUGC CUGAUGAGGCCGUUAGGCCGAA AGUCGCUG | 12011 |
| 2874 | AAAACAGUA GCCGUCAA | 2596 | UUGACGGC CUGAUGAGGCCGUUAGGCCGAA ACUGUUUU | 12012 |
| 2880 | GUAGCCGUC AAGAUGUU | 2597 | AACAUCUU CUGAUGAGGCCGUUAGGCCGAA ACGGCUAC | 12013 |
| 2888 | CAAGAUGUU GAAAGAAG | 2598 | CUUCUUUC CUGAUGAGGCCGUUAGGCCGAA ACAUCUUG | 12014 |
| 2917 | GCGAGCAUC GAGCCCUC | 2599 | GAGGGCUC CUGAUGAGGCCGUUAGGCCGAA AUGCUCGC | 12015 |
| 2925 | CGAGCCCUC AUGUCUGA | 2600 | UCAGACAU CUGAUGAGGCCGUUAGGCCGAA AGGGCUCG | 12016 |
| 2930 | CCUCAUGUC UGAACUCA | 2601 | UGAGUUCA CUGAUGAGGCCGUUAGGCCGAA ACAUGAGG | 12017 |
| 2937 | UCUGAACUC AAGAUCCU | 1912 | AGGAUCUU CUGAUGAGGCCGUUAGGCCGAA AGUUCAGA | 11331 |
| 2943 | CUCAAGAUC CUCAUCCA | 2602 | UGGAUGAG CUGAUGAGGCCGUUAGGCCGAA AUCUUGAG | 12018 |
| 2946 | AAGAUCCUC AUCCACAU | 2603 | AUGUGGAU CUGAUGAGGCCGUUAGGCCGAA AGGAUCUU | 12019 |
| 2949 | AUCCUCAUC CACAUUGG | 2604 | CCAAUGUG CUGAUGAGGCCGUUAGGCCGAA AUGAGGAU | 12020 |
| 2955 | AUCCACAUU GGUCACCA | 2605 | UGGUGACC CUGAUGAGGCCGUUAGGCCGAA AUGUGGAU | 12021 |
| 2959 | ACAUUGGUC ACCAUCUC | 2606 | GAGAUGGU CUGAUGAGGCCGUUAGGCCGAA ACCAAUGU | 12022 |
| 2965 | GUCACCAUC UCAAUGUG | 1920 | CACAUUGA CUGAUGAGGCCGUUAGGCCGAA AUGGUGAC | 11339 |
| 2967 | CACCAUCUC AAUGUGGU | 1921 | ACCACAUU CUGAUGAGGCCGUUAGGCCGAA AGAUGGUG | 11340 |
| 2982 | GUGAACCUC CUAGGCGC | 2607 | GCGCCUAG CUGAUGAGGCCGUUAGGCCGAA AGGUUCAC | 12023 |
| 2985 | AACCUCCUA GGCGCCUG | 2808 | CAGGCGCC CUGAUGAGGCCGUUAGGCCGAA AGGAGGUU | 12024 |
| 3013 | GAGGGCCUC UCAUGGUG | 2609 | CACCAUGA CUGAUGAGGCCGUUAGGCCGAA AGGCCCUC | 12025 |
| 3015 | GGGCCUCUC AUGGUGAU | 2610 | AUCACCAU CUGAUGAGGCCGUUAGGCCGAA AGAGGCCC | 12026 |
| 3024 | AUGGUGAUU GUGGAAUU | 1928 | AAUUCCAC CUGAUGAGGCCGUUAGGCCGAA AUCACCAU | 11347 |
| 3032 | UGUGGAAUU CUGCAAGU | 2611 | ACUUGCAG CUGAUGAGGCCGUUAGGCCGAA AUUCCACA | 12027 |
| 3033 | GUGGAAUUC UGCAAGUU | 2612 | AACUUGCA CUGAUGAGGCCGUUAGGCCGAA AAUUCCAC | 12028 |
| 3041 | CUGCAAGUU UGGAAACC | 2613 | GGUUUCCA CUGAUGAGGCCGUUAGGCCGAA ACUUGCAG | 12029 |
| 3042 | UGCAAGUUU GGAAACCU | 2614 | AGGUUUCC CUGAUGAGGCCGUUAGGCCGAA AACUUGCA | 12030 |
| 3051 | GGAAACCUA UCAACUUA | 2615 | UAAGUUGA CUGAUGAGGCCGUUAGGCCGAA AGGUUUCC | 12031 |
| 3053 | AAACCUAUC AACUUACU | 2616 | AGUAAGUU CUGAUGAGGCCGUUAGGCCGAA AUAGGUUU | 12032 |
| 3058 | UAUCAACUU ACUUACGG | 2617 | CCGUAAGU CUGAUGAGGCCGUUAGGCCGAA AGUUGAUA | 12033 |
| 3059 | AUCAACUUA CUUACGGG | 2618 | CCCGUAAG CUGAUGAGGCCGUUAGGCCGAA AAGUUGAU | 12034 |
| 3062 | AACUUACUU ACGGGGCA | 2619 | UGCCCCGU CUGAUGAGGCCGUUAGGCCGAA AGUAAGUU | 12035 |
| 3063 | ACUUACUUA CGGGGCAA | 2620 | UUGCCCCG CUGAUGAGGCCGUUAGGCCGAA AAGUAAGU | 12036 |
| 3083 | AAAUGAAUU UGUUCCCU | 2621 | AGGGAACA CUGAUGAGGCCGUUAGGCCGAA AUUCAUUU | 12037 |
| 3084 | AAUGAAUUU GUUCCCUA | 2622 | UAGGGAAC CUGAUGAGGCCGUUAGGCCGAA AAUUCAUU | 12038 |
| 3087 | GAAUUUGUU CCCUAUAA | 2623 | UUAUAGGG CUGAUGAGGCCGUUAGGCCGAA ACAAAUUC | 12039 |
| 3088 | AAUUUGUUC CCUAUAAG | 2624 | CUUAUAGG CUGAUGAGGCCGUUAGGCCGAA AACAAAUU | 12040 |
| 3092 | UGUUCCCUA UAAGAGCA | 2625 | UGCUCUUA CUGAUGAGGCCGUUAGGCCGAA AGGGAACA | 12041 |
| 3094 | UUCCCUAUA AGAGCAAA | 2626 | UUUGCUCU CUGAUGAGGCCGUUAGGCCGAA AUAGGGAA | 12042 |
| 3113 | GGCACGCUU CCGCCAGG | 2627 | CCUGGCGG CUGAUGAGGCCGUUAGGCCGAA AGCGUGCC | 12043 |
| 3114 | GCACGCUUC CGCCAGGG | 2628 | CCCUGGCG CUGAUGAGGCCGUUAGGCCGAA AAGCGUGC | 12044 |
| 3131 | CAAGGACUA CGUUGGGG | 2629 | CCCCAACG CUGAUGAGGCCGUUAGGCCGAA AGUCCUUG | 12045 |
| 3135 | GACUACGUU GGGGAGCU | 2630 | AGCUCCCC CUGAUGAGGCCGUUAGGCCGAA ACGUAGUC | 12046 |
| 3144 | GGGGAGCUC UCCGUGGA | 2631 | UCCACGGA CUGAUGAGGCCGUUAGGCCGAA AGCUCCCC | 12047 |
| 3146 | GGAGCUCUC CGUGGAUC | 2632 | GAUCCACG CUGAUGAGGCCGUUAGGCCGAA AGAGCUCC | 12048 |
| 3154 | CCGUGGAUC UGAAAAGA | 2633 | UCUUUUCA CUGAUGAGGCCGUUAGGCCGAA AUCCACGG | 12049 |
| 3167 | AAGACGCUU GGACAGCA | 2634 | UGCUGUCC CUGAUGAGGCCGUUAGGCCGAA AGCGUCUU | 12050 |
| 3177 | GACAGCAUC ACCAGCAG | 2635 | CUGCUGGU CUGAUGAGGCCGUUAGGCCGAA AUGCUGUC | 12051 |
| 3194 | CCAGAGCUC UGCCAGCU | 2636 | AGCUGGCA CUGAUGAGGCCGUUAGGCCGAA AGCUCUGG | 12052 |
| 3203 | UGCCAGCUC AGGCUUUG | 2637 | CAAAGCCU CUGAUGAGGCCGUUAGGCCGAA AGCUGGCA | 12053 |
| 3209 | CUCAGGCUU UGUUGAGG | 2638 | CCUCAACA CUGAUGAGGCCGUUAGGCCGAA AGCCUGAG | 12054 |
| 3220 | UCAGGCUUU GUUGAGGA | 2639 | UCCUCAAC CUGAUGAGGCCGUUAGGCCGAA AAGCCUGA | 12055 |
| 3223 | GGCUUUGUU GAGGAGAA | 2640 | UUCUCCUC CUGAUGAGGCCGUUAGGCCGAA ACAAAGCC | 12056 |
| 3224 | GGAGAAAUC GCUCAGUG | 2641 | CACUGAGC CUGAUGAGGCCGUUAGGCCGAA AUUUCUCC | 12057 |
| 3228 | AAAUCGCUC AGUGAUGU | 2642 | ACAUCACU CUGAUGAGGCCGUUAGGCCGAA AGCGAUUU | 12058 |
| 3237 | AGUGAUGUA GAGGAAGA | 2643 | UCUUCCUC CUGAUGAGGCCGUUAGGCCGAA ACAUCACU | 9921 |
| 3253 | AAGAAGCUU CUGAAGAA | 2644 | UUCUUCAG CUGAUGAGGCCGUUAGGCCGAA AGCUUCUU | 12059 |
| 3254 | AGAAGCUUC UGAAGAAC | 2645 | GUUCUUCA CUGAUGAGGCCGUUAGGCCGAA AAGCUUCU | 12060 |
| 3266 | AGAACUGUA CAAGGACU | 2646 | AGUCCUUG CUGAUGAGGCCGUUAGGCCGAA ACAGUUCU | 12061 |
| 3275 | CAAGGACUU CCUGACCU | 2647 | AGGUCAGG CUGAUGAGGCCGUUAGGCCGAA AGUCCUUG | 12062 |
| 3276 | AAGGACUUC CUGACCUU | 1962 | AAGGUCAG CUGAUGAGGCCGUUAGGCCGAA AAGUCCUU | 11381 |
| 3284 | CCUGACCUU GGAGCAUC | 1963 | GAUGCUCC CUGAUGAGGCCGUUAGGCCGAA AGGUCAGG | 11382 |
| 3292 | UGGAGCAUC UCAUCUGU | 1964 | ACAGAUGA CUGAUGAGGCCGUUAGGCCGAA AUGCUCCA | 11383 |
| 3294 | GACCAUCUC AUCUGUUA | 1965 | UAACAGAU CUGAUGAGGCCGUUAGGCCGAA AGAUGCUC | 11384 |
| 3297 | CAUCUCAUC UGUUACAG | 1966 | CUGUAACA CUGAUGAGGCCGUUAGGCCGAA AUGAGAUG | 11385 |
| 3301 | UCAUCUGUU ACAGCUUC | 1967 | GAAGCUGU CUGAUGAGGCCGUUAGGCCGAA ACAGAUGA | 11386 |
| 3302 | CAUCUGUUA CAGCUUCC | 1968 | GGAAGCUG CUGAUGAGGCCGUUAGGCCGAA AACAGAUG | 11387 |
| 3308 | UUACAGCUU CCAAGUGG | 1969 | CCACUUGG CUGAUGAGGCCGUUAGGCCGAA AGCUGUAA | 11388 |
| 3309 | UACAGCUUC CAAGUGGC | 1970 | GCCACUUG CUGAUGAGGCCGUUAGGCCGAA AAGCUGUA | 11389 |
| 3319 | AAGUGGCUA AGGGCAUG | 1971 | CAUGCCCU CUGAUGAGGCCGUUAGGCCGAA AGCCACUU | 11390 |
| 3332 | CAUGGAGUU CUUGGCAU | 1972 | AUGCCAAG CUGAUGAGGCCGUUAGGCCGAA ACUCCAUG | 11391 |
| 3333 | AUGGAGUUC UUGGCAUC | 1973 | GAUGCCAA CUGAUGAGGCCGUUAGGCCGAA AACUCCAU | 11392 |
| 3335 | GGAGUUCUU GGCAUCAA | 2643 | UUGAUGCC CUGAUGAGGCCGUUAGGCCGAA AGAACUCC | 12063 |
| 3341 | CUUGGCAUC AAGGAAGU | 2649 | ACUUCCUU CUGAUGAGGCCGUUAGGCCGAA AUGCCAAG | 12064 |
| 3352 | GGAAGUGUA UCCACAGG | 2650 | CCUGUGGA CUGAUGAGGCCGUUAGGCCGAA ACACUUCC | 12065 |
| 3354 | AAGUGUAUC CACAGGGA | 1977 | UCCCUGUG CUGAUGAGGCCGUUAGGCCGAA AUACACUU | 11396 |
| 3381 | CGAAACAUU CUCCUAUC | 2651 | GAUAGGAG CUGAUGAGGCCGUUAGGCCGAA AUGUUUCG | 12066 |
| 3382 | GAAACAUUC UCCUAUCG | 2652 | CGAUAGGA CUGAUGAGGCCGUUAGGCCGAA AAUGUUUC | 12067 |
| 3384 | AACAUUCUC CUAUCGGA | 2653 | UCCGAUAG CUGAUGAGGCCGUUAGGCCGAA AGAAUGUU | 12068 |
| 3387 | AUUCUCCUA UCGGAGAA | 2654 | UUCUCCGA CUGAUGAGGCCGUUAGGCCGAA AGGAGAAU | 12069 |
| 3389 | UCUCCUAUC GGAGAAGA | 2655 | UCUUCUCC CUGAUGAGGCCGUUAGGCCGAA AUAGGAGA | 12070 |
| 3405 | AAUGUGGUU AAGAUCUG | 2656 | CAGAUCUU CUGAUGAGGCCGUUAGGCCGAA ACCACAUU | 12071 |
| 3406 | AUGUGGUUA AGAUCUGU | 2657 | ACAGAUCU CUGAUGAGGCCGUUAGGCCGAA AACCACAU | 12072 |
| 3411 | GUUAAGAUC UGUGACUU | 2658 | AAGUCACA CUGAUGAGGCCGUUAGGCCGAA AUCUUAAC | 12073 |
| 3419 | CUGUGACUU CGGCUUGG | 2659 | CCAAGCCG CUGAUGAGGCCGUUAGGCCGAA AGUCACAG | 12074 |
| 3420 | UGUGACUUC GGCUUGGC | 2660 | GCCAAGCC CUGAUGAGGCCGUUAGGCCGAA AAGUCACA | 11407 |
| 3425 | CUUCGGCUU GGCCCGGG | 2661 | CCCGGGCC CUGAUGAGGCCGUUAGGCCGAA AGCCGAAG | 12075 |
| 3438 | CGGGACAUU UAUAAAGA | 2662 | UCUUUAUA CUGAUGAGGCCGUUAGGCCGAA AUGUCCCG | 12076 |
| 3439 | GGGACAUUU AUAAAGAC | 2663 | GUCUUUAU CUGAUGAGGCCGUUAGGCCGAA AAUGUCCC | 12077 |
| 3440 | GGACAUUUA UAAAGACC | 2664 | GGUCUUUA CUGAUGAGGCCGUUAGGCCGAA AAAUGUCC | 12078 |
| 3442 | ACAUUUAUA AAGACCCG | 2665 | CGGGUCUU CUGAUGAGGCCGUUAGGCCGAA AUAAAUGU | 12079 |
| 3454 | ACCCGGAUU AUGUCAGA | 2666 | UCUGACAU CUGAUGAGGCCGUUAGGCCGAA AUCCGGGU | 12080 |
| 3455 | CCCGGAUUA UGUCAGAA | 2667 | UUCUGACA CUGAUGAGGCCGUUAGGCCGAA AAUCCGGG | 12081 |
| 3459 | GAUUAUGUC AGAAAAGG | 1998 | CCUUUUCU CUGAUGAGGCCGUUAGGCCGAA ACAUAAUC | 11417 |
| 3480 | GCCCGACUC CCUUUGAA | 2668 | UUCAAAGG CUGAUGAGGCCGUUAGGCCGAA AGUCGGGC | 12082 |
| 3484 | GACUCCCUU UGAAGUGG | 2669 | CCACUUCA CUGAUGAGGCCGUUAGGCCGAA AGGGAGUC | 12083 |
| 3485 | ACUCCCUUU GAAGUGGA | 2670 | UCCACUUC CUGAUGAGGCCGUUAGGCCGAA AAGGGAGU | 12084 |
| 3510 | GAAACCAUU UUUGACAG | 2671 | CUGUCAAA CUGAUGAGGCCGUUAGGCCGAA AUGGUUUC | 12085 |
| 3511 | AAACCAUUU UUGACAGA | 2672 | UCUGUCAA CUGAUGAGGCCGUUAGGCCGAA AAUGGUUU | 12086 |
| 3512 | AACCAUUUU UGACAGAG | 2673 | CUCUGUCA CUGAUGAGGCCGUUAGGCCGAA AAAUGGUU | 12087 |
| 3513 | ACCAUUUUU GACAGAGU | 2674 | ACUCUGUC CUGAUGAGGCCGUUAGGCCGAA AAAAUGGU | 12088 |
| 3522 | GACAGAGUA UACACAAU | 2675 | AUUGUGUA CUGAUGAGGCCGUUAGGCCGAA ACUCUGUC | 12089 |
| 3524 | CAGAGUAUA CACAAUUC | 2676 | GAAUUGUG CUGAUGAGGCCGUUAGGCCGAA AUACUCUG | 12090 |
| 3531 | UACACAAUU CAGAGCGA | 2677 | UCGCUCUG CUGAUGAGGCCGUUAGGCCGAA AUUGUGUA | 12091 |
| 3532 | ACACAAUUC AGAGCGAU | 2678 | AUCGCUCU CUGAUGAGGCCGUUAGGCCGAA AAUUGUGU | 12092 |
| 3548 | UGUGUGGUC UUUCGGUG | 2679 | CACCGAAA CUGAUGAGGCCGUUAGGCCGAA ACCACACA | 12093 |
| 3550 | UGUGGUCUU UCGGUGUG | 2680 | CACACCGA CUGAUGAGGCCGUUAGGCCGAA AGACCACA | 12094 |
| 3551 | GUGGUCUUU CGGUGUGU | 2681 | ACACACCG CUGAUGAGGCCGUUAGGCCGAA AAGACCAC | 12095 |
| 3552 | UGGUCUUUC GGUGUGUU | 2682 | AACACACC CUGAUGAGGCCGUUAGGCCGAA AAAGACCA | 12096 |
| 3560 | CGGUGUGUU GCUCUGGG | 2683 | CCCAGAGC CUGAUGAGGCCGUUAGGCCGAA ACACACCG | 12097 |
| 3564 | GUGUUGCUC UGGGAAAU | 2684 | AUUUCCCA CUGAUGAGGCCGUUAGGCCGAA AGCAACAC | 12098 |
| 3573 | UGGGAAAUA UUUUCCUU | 2017 | AAGGAAAA CUGAUGAGGCCGUUAGGCCGAA AUUUCCCA | 11436 |
| 3575 | GGAAAUAUU UUCCUUAG | 2018 | CUAAGGAA CUGAUGAGGCCGUUAGGCCGAA AUAUUUCC | 11437 |
| 3576 | GAAAUAUUU UCCUUAGG | 2019 | CCUAAGGA CUGAUGAGGCCGUUAGGCCGAA AAUAUUUC | 11438 |
| 3577 | AAAUAUUUU CCUUAGGU | 2020 | ACCUAAGG CUGAUGAGGCCGUUAGGCCGAA AAAUAUUU | 11439 |
| 3578 | AAUAUUUUC CUUAGGUG | 2021 | CACCUAAG CUGAUGAGGCCGUUAGGCCGAA AAAAUAUU | 11440 |
| 3581 | AUUUUCCUU AGGUGCCU | 2685 | AGGCACCU CUGAUGAGGCCGUUAGGCCGAA AGGAAAAU | 12099 |
| 3582 | UUUUCCUUA GGUGCCUC | 2686 | GAGGCACC CUGAUGAGGCCGUUAGGCCGAA AAGGAAAA | 12100 |
| 3590 | AGGUGCCUC CCCAUACC | 2687 | GGUAUGGG CUGAUGAGGCCGUUAGGCCGAA AGGCACCU | 12101 |
| 3596 | CUCCCCAUA CCCUGGGG | 2688 | CCCCAGGG CUGAUGAGGCCGUUAGGCCGAA AUGGGGAG | 12102 |
| 3606 | CCUGGGGUC AAGAUUGA | 2689 | UCAAUCUU CUGAUGAGGCCGUUAGGCCGAA ACCCCAGG | 11448 |
| 3612 | GUCAAGAUU GAUGAAGA | 2690 | UCUUCAUC CUGAUGAGGCCGUUAGGCCGAA AUCUUGAC | 12103 |
| 3623 | UGAAGAAUU UUGUAGGA | 2691 | UCCUACAA CUGAUGAGGCCGUUAGGCCGAA AUUCUUCA | 12104 |
| 3624 | GAAGAAUUU UGUAGGAG | 2692 | CUCCUACA CUGAUGAGGCCGUUAGGCCGAA AAUUCUUC | 12105 |
| 3625 | AAGAAUUUU GUAGGAGA | 2693 | UCUCCUAC CUGAUGAGGCCGUUAGGCCGAA AAAUUCUU | 12106 |
| 3628 | AAUUUUGUA GGAGAUUG | 2694 | CAAUCUCC CUGAUGAGGCCGUUAGGCCGAA ACAAAAUU | 12107 |
| 3635 | UAGGAGAUU GAAAGAAG | 2695 | CUUCUUUC CUGAUGAGGCCGUUAGGCCGAA AUCUCCUA | 12108 |
| 3649 | AAGGAACUA GAAUGCGG | 2696 | CCGCAUUC CUGAUGAGGCCGUUAGGCCGAA AGUUCCUU | 12109 |
| 3661 | UGCGGGCUC CUGACUAC | 2697 | GUAGUCAG CUGAUGAGGCCGUUAGGCCGAA AGCCCGCA | 12110 |
| 3668 | UCCUGACUA CACUACCC | 2698 | GGGUAGUG CUGAUGAGGCCGUUAGGCCGAA AGUCAGGA | 12111 |
| 3673 | ACUACACUA CCCCAGAA | 2699 | UUCUGGGG CUGAUGAGGCCGUUAGGCCGAA AGUGUAGU | 12112 |
| 3686 | AGAAAUGUA CCAGACCA | 2041 | UGGUCUGG CUGAUGAGGCCGUUAGGCCGAA ACAUUUCU | 11460 |
| 3734 | GAGACCCUC GUUUUCAG | 2700 | CUGAAAAC CUGAUGAGGCCGUUAGGCCGAA AGGGUCUC | 12113 |
| 3737 | ACCCUCGUU UUCAGAGU | 2701 | ACUCUGAA CUGAUGAGGCCGUUAGGCCGAA ACGAGGGU | 12114 |
| 3738 | CCCUCGUUU UCAGAGUU | 2702 | AACUCUGA CUGAUGAGGCCGUUAGGCCGAA AACGAGGG | 12115 |
| 3739 | CCUCGUUUU CAGAGUUG | 2703 | CAACUCUG CUGAUGAGGCCGUUAGGCCGAA AAACGAGG | 12116 |
| 3740 | CUCGUUUUC AGAGUUGG | 2704 | CCAACUCU CUGAUGAGGCCGUUAGGCCGAA AAAACGAG | 12117 |
| 3746 | UUCAGAGUU GGUGGAGC | 2705 | GCUCCACC CUGAUGAGGCCGUUAGGCCGAA ACUCUGAA | 12118 |
| 3757 | UGGAGCAUU UGGGAAAC | 2706 | GUUUCCCA CUGAUGAGGCCGUUAGGCCGAA AUGCUCCA | 12119 |
| 3758 | GGAGCAUUU GGGAAACC | 2707 | GGUUUCCC CUGAUGAGGCCGUUAGGCCGAA AAUGCUCC | 12120 |
| 3768 | GGAAACCUC CUGCAAGC | 2708 | GCUUGCAG CUGAUGAGGCCGUUAGGCCGAA AGGUUUCC | 12121 |
| 3803 | CAAAGACUA UAUUGUUC | 2709 | GAACAAUA CUGAUGAGGCCGUUAGGCCGAA AGUCUUUG | 12122 |
| 3805 | AAGACUAUA UUGUUCUU | 2710 | AAGAACAA CUGAUGAGGCCGUUAGGCCGAA AUAGUCUU | 12123 |
| 3807 | GACUAUAUU GUUCUUCC | 2711 | GGAAGAAC CUGAUGAGGCCGUUAGGCCGAA AUAUAGUC | 12124 |
| 3810 | UAUAUUGUU CUUCCAAU | 2712 | AUUGGAAG CUGAUGAGGCCGUUAGGCCGAA ACAAUAUA | 12125 |
| 3811 | AUAUUGUUC UUCCAAUG | 2713 | CAUUGGAA CUGAUGAGGCCGUUAGGCCGAA AACAAUAU | 12126 |
| 3813 | AUUGUUCUU CCAAUGUC | 2714 | GACAUUGG CUGAUGAGGCCGUUAGGCCGAA AGAACAAU | 12127 |
| 3814 | UUGUUCUUC CAAUGUCA | 2715 | UGACAUUG CUGAUGAGGCCGUUAGGCCGAA AAGAACAA | 12128 |
| 3821 | UCCAAUGUC AGAGACAC | 2716 | GUGUCUCU CUGAUGAGGCCGUUAGGCCGAA ACAGUGGA | 12129 |
| 3847 | AAGAGGAUU CUGGACUC | 2065 | GAGUCCAG CUGAUGAGGCCGUUAGGCCGAA AUCCUCUU | 11484 |
| 3848 | AGAGGAUUC UGGACUCU | 2066 | AGAGUCCA CUGAUGAGGCCGUUAGGCCGAA AAUCCUCU | 11485 |
| 3855 | UCUGGACUC UCCCUGCC | 2717 | GGCAGGGA CUGAUGAGGCCGUUAGGCCGAA AGUCCAGA | 12130 |
| 3857 | UGGACUCUC CCUGCCUA | 2718 | UAGGCAGG CUGAUGAGGCCGUUAGGCCGAA AGAGUCCA | 12131 |
| 3865 | CCCUGCCUA CCUCACCU | 2719 | AGGUGAGG CUGAUGAGGCCGUUAGGCCGAA AGGCAGGG | 12132 |
| 3869 | GCCUACCUC ACCUGUUU | 2071 | AAACAGGU CUGAUGAGGCCGUUAGGCCGAA AGGUAGGC | 11490 |
| 3876 | UCACCUGUU UCCUGUAU | 2072 | AUACAGGA CUGAUGAGGCCGUUAGGCCGAA ACAGGUGA | 11491 |
| 3877 | CACCUGUUU CCUGUAUG | 2073 | CAUACAGG CUGAUGAGGCCGUUAGGCCGAA AACAGGUG | 11492 |
| 3878 | ACCUGUUUC CUGUAUGG | 2074 | CCAUACAG CUGAUGAGGCCGUUAGGCCGAA AAACAGGU | 11493 |
| 3883 | UUUCCUGUA UGGAGGAA | 2720 | UUCCUCCA CUGAUGAGGCCGUUAGGCCGAA ACAGGAAA | 12133 |
| 3914 | CCCCAAAUU CCAUUAUG | 2077 | CAUAAUGG CUGAUGAGGCCGUUAGGCCGAA AUUUGGGG | 11496 |
| 3915 | CCCAAAUUC CAUUAUGA | 2078 | UCAUAAUG CUGAUGAGGCCGUUAGGCCGAA AAUUUGGG | 11497 |
| 3919 | AAUUCCAUU AUGACAAC | 2079 | GUUGUCAU CUGAUGAGGCCGUUAGGCCGAA AUGGAAUU | 11498 |
| 3920 | AUUCCAUUA UGACAACA | 2080 | UGUUGUCA CUGAUGAGGCCGUUAGGCCGAA AAUGGAAU | 11499 |
| 3939 | GCAGGAAUC AGUCAUUA | 2721 | UAAUGACU CUGAUGAGGCCGUUAGGCCGAA AUUCCUGC | 12134 |
| 3943 | GAAUCAGUC AUUAUCUC | 2722 | GAGAUAAU CUGAUGAGGCCGUUAGGCCGAA ACUGACUC | 12135 |
| 3946 | UCAGUCAUU AUCUCCAG | 2723 | CUGGAGAU CUGAUGAGGCCGUUAGGCCGAA AUGACUGA | 12136 |
| 3947 | CAGUCAUUA UCUCCAGA | 2724 | UCUGGAGA CUGAUGAGGCCGUUAGGCCGAA AAUGACUG | 12137 |
| 3949 | GUCAUUAUC UCCAGAAC | 2725 | GUUCUGGA CUGAUGAGGCCGUUAGGCCGAA AUAAUGAC | 12138 |
| 3951 | CAUUAUCUC CAGAACAG | 2726 | CUGUUCUG CUGAUGAGGCCGUUAGGCCGAA AGAUAAUG | 12139 |
| 3961 | AGAACAGUA AGCGAAAG | 2085 | CUUUCGCU CUGAUGAGGCCGUUAGGCCGAA ACUGUUCU | 11504 |
| 3987 | GUGAGUGUA AAAACAUU | 2086 | AAUGUUUU CUGAUGAGGCCGUUAGGCCGAA ACACUCAC | 11505 |
| 3995 | AAAAACAUU UGAAGAUA | 2087 | UAUCUUCA CUGAUGAGGCCGUUAGGCCGAA AUGUUUUU | 11506 |
| 3996 | AAAACAUUU GAAGAUAU | 2088 | AUAUCUUC CUGAUGAGGCCGUUAGGCCGAA AAUGUUUU | 11507 |
| 4003 | UUGAAGAUA UCCCAUUG | 2727 | CAAUGGGA CUGAUGAGGCCGUUAGGCCGAA AUCUUCAA | 12140 |
| 4005 | GAAGAUAUC CCAUUGGA | 2728 | UCCAAUGG CUGAUGAGGCCGUUAGGCCGAA AUAUCUUC | 12141 |
| 4010 | UAUCCCAUU GGAGGAAC | 2729 | GUUCCUCC CUGAUGAGGCCGUUAGGCCGAA AUGGGAUA | 12142 |
| 4026 | CCAGAAGUA AAAGUGAU | 2730 | AUCACUUU CUGAUGAGGCCGUUAGGCCGAA ACUUCUGG | 12143 |
| 4039 | AAAGUGAUC CCAGAUGA | 2731 | UCAUCUGG CUGAUGAGGCCGUUAGGCCGAA AUCACUUU | 12144 |
| 4068 | GGGAUGGUC CUUGCAUC | 2732 | GAUGCAAG CUGAUGAGGCCGUUAGGCCGAA ACCAUCCC | 12145 |
| 4071 | AUGGUCCUU GCAUCAGA | 2733 | UCUGAUGC CUGAUGAGGCCGUUAGGCCGAA AGGACCAU | 12146 |
| 4076 | CCUUGCAUC AGAAGAGC | 2734 | GCUCUUCU CUGAUGAGGCCGUUAGGCCGAA AUGCAAGG | 12147 |
| 4093 | UGAAAACUC UGGAAGAC | 2735 | GUCUUCCA CUGAUGAGGCCGUUAGGCCGAA AGUUUUCA | 11520 |
| 4112 | GAACAAAUU AUCUCCAU | 2736 | AUGGAGAU CUGAUGAGGCCGUUAGGCCGAA AUUUGUUC | 12148 |
| 4113 | AACAAAUUA UCUCCAUC | 2737 | GAUGGAGA CUGAUGAGGCCGUUAGGCCGAA AAUUUGUU | 12149 |
| 4115 | CAAAUUAUC UCCAUCUG | 2105 | AAGAUGGA CUGAUGAGGCCGUUAGGCCGAA AUAAUUEU | 11524 |
| 4117 | AAUUAUCUC CAUCUUUU | 2106 | AAAAGAUG CUGAUGAGGCCGUUAGGCCGAA AGAUAAUU | 11525 |
| 4121 | AUCUCCAUC UUUUGGUG | 2107 | CACCAAAA CUGAUGAGGCCGUUAGGCCGAA AUGGAGAW | 11526 |
| 4123 | CUCCAUCUU UUGGUGGA | 2108 | UCCACCAA CUGAUGAGGCCGUUAGGCCGAA AGAUGGAG | 11527 |
| 4124 | UCCAUCUUU UGGUGGAA | 2109 | UUCCACCA CUGAUGAGGCCGUUAGGCCGAA AAGAUGGA | 11528 |
| 4125 | CCAUCUUUU GGUGGAAU | 2110 | AUUCCACC CUGAUGAGGCCGUUAGGCCGAA AAAGAUGG | 11529 |
| 4144 | UGCCCAGUA AAAGCAGG | 2738 | CCUGCUUU CUGAUGAGGCCGUUAGGCCGAA ACUGGGCA | 12150 |
| 4157 | CAGGGAGUC UGUGGCCU | 2739 | AGGOCACA CUGAUGAGGCCGUUAGGCCGAA ACUCCCUG | 12151 |
| 4166 | UGUGGCCUC GGAAGGCU | 2740 | AGCCUUCC CUGAUGAGGCCGUUAGGCCGAA AGGCCACA | 12152 |
| 4175 | GGAAGGCUC CAACCAGA | 2741 | UCUGGUUG CUGAUGAGGCCGUUAGGCCGAA AGCCUUCC | 12153 |
| 4193 | CAGUGGCUA CCAGUCUG | 2742 | CAGACUGG CUGAUGAGGCCGUUAGGCCGAA AGCCACUG | 12154 |
| 4199 | CUACCAGUC UGGGUAUC | 2743 | GAUACCCA CUGAUGAGGCCGUUAGGCCGAA ACUGGUAG | 12155 |
| 4205 | GUCUGGGUA UCACUCAG | 2744 | CUGAGUGA CUGAUGAGGCCGUUAGGCCGAA ACCCAGAC | 12156 |
| 4207 | CUGGGUAUC ACUCAGAU | 2745 | AUCUGAGU CUGAUGAGGCCGUUAGGCCGAA AUACCCAG | 12157 |
| 4211 | GUAUCACUC AGAUGACA | 2746 | UGUCAUCU CUGAUGAGGCCGUUAGGCCGAA AGUGAUAC | 12158 |
| 4235 | CACCGUGUA CUCCAGCG | 2747 | CGCUGGAG CUGAUGAGGCCGUUAGGCCGAA ACACGGUG | 12159 |
| 4238 | CGUGUACUC CAGCGACG | 2748 | CGUCGCUG CUGAUGAGGCCGUUAGGCCGAA AGUACACG | 12160 |
| 4257 | GCAGGACUU UUAAAGAU | 2749 | AUCUUUAA CUGAUGAGGCCGUUAGGCCGAA AGUCCUGC | 12161 |
| 4258 | CAGGACUUU UAAAGAUG | 2750 | CAUCUUUA CUGAUGAGGCCGUUAGGCCGAA AAGUCCUG | 12162 |
| 4259 | AGGACUUUU AAAGAUGG | 2751 | CCAUCUUU CUGAUGAGGCCGUUAGGCCGAA AAAGUCCU | 12163 |
| 4260 | GGACUUUUA AAGAUGGU | 2752 | ACCAUCUG CUGAUGAGGCCGUUAGGCCGAA AAAAGUCC | 12164 |
| 4281 | GCUGCAGUU CACGCUGA | 2753 | UCAGCGUG CUGAUGAGGCCGUUAGGCCGAA ACUGCAGC | 12165 |
| 4282 | CUGCAGUUC ACGCUGAC | 2754 | GUCAGCGU CUGAUGAGGCCGUUAGGCCGAA AACUGCAG | 12166 |
| 4292 | CGCUGACUC AGGGACCA | 2755 | UGGUCCCU CUGAUGAGGCCGUUAGGCCGAA AGUCAGCG | 12167 |
| 4311 | CUGCAGCUC ACCUCCUG | 2756 | CAGGAGGU CUGAUGAGGCCGUUAGGCCGAA AGCUGCAG | 12168 |
| 4316 | GCUCACCUC CUGUUUAA | 2757 | UUAAACAG CUGAUGAGGCCGUUAGGCCGAA AGGUGAGC | 12169 |
| 4321 | CCUCCUGUU UAAAUGGA | 2758 | UCCAUUUA CUGAUGAGGCCGUUAGGCCGAA ACAGGAGG | 12170 |
| 4322 | CUCCUGUUU AAAUGGAA | 2759 | UUCCAUUU CUGAUGAGGCCGUUAGGCCGAA AACAGGAG | 12171 |
| 4323 | UCCUGUUUA AAUGGAAG | 2760 | CUUCCAUU CUGAUGAGGCCGUUAGGCCGAA AAACAGGA | 12172 |
| 4336 | GAAGUGGUC CUGUCCCG | 2761 | CGGGACAG CUGAUGAGGCCGUUAGGCCGAA ACCACUUC | 12173 |
| 4341 | GGUCCUGUC CCGGCUCC | 2762 | GGAGCCGG CUGAUGAGGCCGUUAGGCCGAA ACAGGACC | 12174 |
| 4348 | UCCCGGCUC CGCCCCCA | 2763 | UGGGGGCG CUGAUGAGGCCGUUAGGCCGAA AGCCGGGA | 12175 |
| 4360 | CCCCAACUC CUGGAAAU | 2764 | AUUUCCAG CUGAUGAGGCCGUUAGGCCGAA AGUUGGGG | 12176 |
| 4369 | CUGGAAAUC ACGAGAGA | 2765 | UCUCUCGU CUGAUGAGGCCGUUAGGCCGAA AUUUCCAG | 12177 |
| 4387 | GUGCUGCUU AGAUUUUC | 2766 | GAAAAUCU CUGAUGAGGCCGUUAGGCCGAA AGCAGCAC | 12178 |
| 4388 | UGCUGCUUA GAUUUUCA | 2767 | UGAAAAUC CUGAUGAGGCCGUUAGGCCGAA AAGCAGCA | 12179 |
| 4392 | GCUUAGAUU UUCAAGUG | 2768 | CACUUGAA CUGAUGAGGCCGUUAGGCCGAA AUCUAAGC | 12180 |
| 4393 | CUUAGAUUU UCAAGUGU | 2769 | ACACUUGA CUGAUGAGGCCGUUAGGCCGAA AAUCUAAG | 12181 |
| 4394 | UUAGAUUUU CAAGUGUU | 2770 | AACACUUG CUGAUGAGGCCGUUAGGCCGAA AAAUCUAA | 12182 |
| 4395 | UAGAUUTUU AAGUGUUG | 2771 | CAACACUG CUGAUGAGGCCGUUAGGCCGAA AAAAUCUA | 12183 |
| 4402 | UCAAGUGUU GUUCUUUC | 2772 | GAAAGAAC CUGAUGAGGCCGUUAGGCCGAA ACACUUGA | 12184 |
| 4405 | AGUGUUGUU CUUUCCAC | 2146 | GUGGAAAG CUGAUGAGGCCGUUAGGCCGAA ACAACACU | 11565 |
| 4406 | GUGUUGUUC UUUCCACC | 2147 | GGUGGAAA CUGAUGAGGCCGUUAGGCCGAA AACAACAC | 11566 |
| 4408 | GUUGUUCUU UCCACCAC | 2773 | GUGGUGGA CUGAUGAGGCCGUUAGGCCGAA AGAACAAC | 12185 |
| 4409 | UUGUUCUUU CCACCACC | 2774 | GGUGGUGG CUGAUGAGGCCGUUAGGCCGAA AAGAACAA | 12186 |
| 4410 | UGUUCUUUC CACCACCC | 2775 | GGGUGGUG CUGAUGAGGCCGUUAGGCCGAA AAAGAACA | 12187 |
| 4425 | CCGGAAGUA GCCACAUU | 2776 | AAUGUGGC CUGAUGAGGCCGUUAGGCCGAA ACUUCCGG | 12188 |
| 4433 | AGCCACAUU UGAUUCUC | 2777 | GAAAAUCA CUGAUGAGGCCGUUAGGCCGAA AUGUGGCU | 12189 |
| 4434 | GCCACAUUU GAUUUUCA | 2778 | UGAAAAUC CUGAUGAGGCCGUUAGGCCGAA AAUGUGGC | 12190 |
| 4438 | CAUUUGAUU UUCAUUUU | 2779 | AAAAUGAA CUGAUGAGGCCGUUAGGCCGAA AUCAAAUG | 12191 |
| 4439 | AUUUGAUUU UCAUUUUU | 2780 | AAAAAUGA CUGAUGAGGCCGUUAGGCCGAA AAUCAAAU | 12192 |
| 4440 | UUUGAUUUU CAUUUUUG | 2781 | CAAAAAUG CUGAUGAGGCCGUUAGGCCGAA AAAUCAAA | 12193 |
| 4441 | UUGAUUUUC AUUUUUGG | 2782 | CCAAAAAU CUGAUGAGGCCGUUAGGCCGAA AAAAUCAA | 12194 |
| 4444 | AUUUUCAUU UUUGGAGG | 2783 | CCUCCAAA CUGAUGAGGCCGUUAGGCCGAA AUGAAAAU | 12195 |
| 4445 | UUUUCAUUU UUGGAGGA | 2784 | UCCUCCAA CUGAUGAGGCCGUUAGGCCGAA AAUGAAAA | 12196 |
| 4446 | UUUCAUUUU UGGAGGAG | 2785 | CUCCUCCA CUGAUGAGGCCGUUAGGCCGAA AAAUGAAA | 12197 |
| 4447 | UUCAUUUUU GGAGGAGG | 2786 | CCUCCUCC CUGAUGAGGCCGUUAGGCCGAA AAAAUGAA | 12198 |
| 4461 | AGGGACCUC AGACUGCA | 2787 | UCCAGUCU CUGAUGAGGCCGUUAGGCCGAA AGGUCCCU | 12199 |
| 4477 | AAGGAGCUU GUCCUCAG | 2788 | CUGAGGAC CUGAUGAGGCCGUUAGGCCGAA AGCUCCUU | 12200 |
| 4480 | GAGCUUGUC CUCAGGGC | 2789 | GCCCUGAG CUGAUGAGGCCGUUAGGCCGAA ACAAGCUC | 12201 |
| 4483 | CUUGUCCUC AGGGCAUU | 2790 | AAUGCCCU CUGAUGAGGCCGUUAGGCCGAA AGGACAAG | 12202 |
| 4491 | CAGGGCAUU UCCAGAGA | 2791 | UCUCUGGA CUGAUGAGGCCGUUAGGCCGAA AUGCCCUG | 12203 |
| 4492 | AGGGCAUUU CCAGAGAA | 2792 | UUCUCUGG CUGAUGAGGCCGUUAGGCCGAA AAUGCCCU | 12204 |
| 4493 | GGGCAUUUC CAGAGAAG | 2793 | CUUCUCUG CUGAUGAGGCCGUUAGGCCGAA AAAUGCCC | 12205 |
| 4525 | GAAUGUGUU GACUCUAC | 2794 | GUAGAGUC CUGAUGAGGCCGUUAGGCCGAA ACACAUUC | 12206 |
| 4530 | UGUUGACUC UACUCUCU | 2795 | AGAGAGUA CUGAUGAGGCCGUUAGGCCGAA AGUCAACA | 12207 |
| 4532 | UUGACUCUA CUCUCUUU | 2796 | AAAGAGAG CUGAUGAGGCCGUUAGGCCGAA AGAGUCAA | 12208 |
| 4535 | ACUCUACUC UCUUUUCC | 2797 | GGAAAAGA CUGAUGAGGCCGUUAGGCCGAA AGUAGAGU | 12209 |
| 4537 | UCUACUCUC UUUUCCAU | 2798 | AUGGAAAA CUGAUGAGGCCGUUAGGCCGAA AGAGUAGA | 12210 |
| 4539 | UACUCUCUU UUCCAUUC | 2799 | GAAUGGAA CUGAUGAGGCCGUUAGGCCGAA AGAGAGUA | 12211 |
| 4540 | ACUCUCUUU UCCAUUCA | 2800 | UGAAUGGA CUGAUGAGGCCGUUAGGCCGAA AAGAGAGU | 12212 |
| 4541 | CUCUCUUUU CCAUUCAU | 2801 | AUGAAUGG CUGAUGAGGCCGUUAGGCCGAA AAAGAGAG | 12213 |
| 4542 | UCUCUUUUC CAUUCAUU | 2802 | AAUGAAUG CUGAUGAGGCCGUUAGGCCGAA AAAAGAGA | 12214 |
| 4546 | UUUUCCAUU CAUUUAAA | 2803 | UUUAAAUG CUGAUGAGGCCGUUAGGCCGAA AUGGAAAA | 12215 |
| 4547 | UUUCCAUUC AUUUAAAA | 2804 | UUUUAAAU CUGAUGAGGCCGUUAGGCCGAA AAUGGAAA | 12216 |
| 4550 | CCAUUCAUU UAAAAGUC | 2805 | GACUUUUA CUGAUGAGGCCGUUAGGCCGAA AUGAAUGG | 12217 |
| 4551 | CAUUCAUUU AAAAGUCC | 2806 | GGACUUUU CUGAUGAGGCCGUUAGGCCGAA AAUGAAUG | 12218 |
| 4552 | AUUCAUUUA AAAGUCCU | 2807 | AGGACUUU CUGAUGAGGCCGUUAGGCCGAA AAAUGAAU | 12219 |
| 4558 | UUAAAAGUC CUAUAUAA | 2808 | UUAUAUAG CUGAUGAGGCCGUUAGGCCGAA ACUUUUAA | 12220 |
| 4561 | AAAGUCCUA UAUAAUGU | 2809 | ACAUUAUA CUGAUGAGGCCGUUAGGCCGAA AGGACUUU | 12221 |
| 4563 | AGUCCUAUA UAAUGUGC | 2810 | GCACAUUA CUGAUGAGGCCGUUAGGCCGAA AUAGGACU | 12222 |
| 4565 | UCCUAUAUA AUGUGCCC | 2811 | GGGCACAU CUGAUGAGGCCGUUAGGCCGAA AUAUAGGA | 12223 |
| 4583 | GCUGUGGUC UCACUACC | 2812 | GGUAGUGA CUGAUGAGGCCGUUAGGCCGAA ACCACAGC | 12224 |
| 4585 | UGUGGUCUC ACUACCAG | 2813 | CUGGUAGU CUGAUGAGGCCGUUAGGCCGAA AGACCACA | 12225 |
| 4589 | GUCUCACUA CCAGUUAA | 2814 | UUAACUGG CUGAUGAGGCCGUUAGGCCGAA AGUGAGAC | 12226 |
| 4595 | CUACCAGUU AAAGCAAA | 2815 | UUUGCUUU CUGAUGAGGCCGUUAGGCCGAA ACUGGUAG | 12227 |
| 4596 | UACCAGUUA AAGCAAAA | 2816 | UUUUGCUU CUGAUGAGGCCGUUAGGCCGAA AACUGGUA | 12228 |
| 4609 | AAAAGACUU UCAAACAC | 2817 | GUGUUUGA CUGAUGAGGCCGUUAGGCCGAA AGUCUUUU | 12229 |
| 4610 | AAAGACUUU CAAACACG | 2818 | CGUGUUUG CUGAUGAGGCCGUUAGGCCGAA AAGUCUUU | 12230 |
| 4611 | AAGACUUUC AAACACGU | 2819 | ACGUGUUU CUGAUGAGGCCGUUAGGCCGAA AAAGUCUU | 12231 |
| 4625 | CGUGGACUC UGUCCUCC | 2820 | GGAGGACA CUGAUGAGGCCGUUAGGCCGAA AGUCCACG | 12232 |
| 4629 | GACUCUGUC CUCCAAGA | 2821 | UCUUGGAG CUGAUGAGGCCGUUAGGCCGAA ACAGAGUC | 12233 |
| 4632 | UCUGUCCUC CAAGAAGU | 2822 | ACUUCUUG CUGAUGAGGCCGUUAGGCCGAA AGGACAGA | 12234 |
| 4654 | CGGCACCUC UGUGAAAC | 2823 | GUUUCACA CUGAUGAGGCCGUUAGGCCGAA AGGUGCCG | 12235 |
| 4668 | AACUGGAUC GAAUGGGC | 2824 | GCCCAUUC CUGAUGAGGCCGUUAGGCCGAA AUCCAGUU | 12236 |
| 4683 | GCAAUGCUU UGUGUGUU | 2825 | AACACACA CUGAUGAGGCCGUUAGGCCGAA AGCAUUGC | 12237 |
| 4684 | CAAUGCUUU GUGUGUUG | 2826 | CAACACAC CUGAUGAGGCCGUUAGGCCGAA AAGCAUUG | 12238 |
| 4691 | UUGUGUGUU GAGGAUGG | 2827 | CCAUCCUC CUGAUGAGGCCGUUAGGCCGAA ACACACAA | 12239 |
| 4709 | UGAGAUGUC CCAGGGCC | 2828 | GGCCCUGG CUGAUGAGGCCGUUAGGCCGAA ACAUCUCA | 12240 |
| 4722 | GGCCGAGUC UGUCUACC | 2829 | GGUAGACA CUGAUGAGGCCGUUAGGCCGAA ACUCGGCC | 12241 |
| 4726 | GAGUCUGUC UACCUUGG | 2830 | CCAAGGUA CUGAUGAGGCCGUUAGGCCGAA ACAGACUC | 12242 |
| 4728 | GUCUGUCUA CCUUGGAG | 2831 | CUCCAAGG CUGAUGAGGCCGUUAGGCCGAA AGACAGAC | 12243 |
| 4732 | GUCUACCUU GGAGGCUU | 2832 | AAGCCUCC CUGAUGAGGCCGUUAGGCCGAA AGGUAGAC | 12244 |
| 4740 | UGGAGGCUU UGUGGAGG | 2833 | CCUCCACA CUGAUGAGGCCGUUAGGCCGAA AGCCUCCA | 12245 |
| 4741 | GGAGGCUUU GUGGAGGA | 2834 | UCCUCCAC CUGAUGAGGCCGUUAGGCCGAA AAGCCUCC | 12246 |
| 4758 | UGCGGGCUA UGAGCCAA | 2835 | UUGGCUCA CUGAUGAGGCCGUUAGGCCGAA AGCCCGCA | 12247 |
| 4771 | CCAAGUGUU AAGUGUGG | 2836 | CCACACUU CUGAUGAGGCCGUUAGGCCGAA ACACUUGG | 12248 |
| 4772 | CAAGUGUUA AGUGUGGG | 2837 | CCCACACU CUGAUGAGGCCGUUAGGCCGAA AACACUUG | 12249 |
| 4811 | GCGCAAGUC GCUCGGAG | 2838 | CUCCGAGC CUGAUGAGGCCGUUAGGCCGAA ACUUGCGC | 12250 |
| 4815 | AAGUCGCUC GGAGAGCG | 2839 | CGCUCUCC CUGAUGAGGCCGUUAGGCCGAA AGCGACUU | 12251 |
| 4826 | AGAGCGGUU GGAGCCUG | 2840 | CAGGCUCC CUGAUGAGGCCGUUAGGCCGAA ACCGCUCU | 12252 |
| 4844 | AGAUGCAUU GUGCUGGC | 2841 | GCCAGCAC CUGAUGAGGCCGUUAGGCCGAA AUGCAUCU | 12253 |
| 4854 | UGCUGGCUC UGGUGGAG | 2842 | CUCCACCA CUGAUGAGGCCGUUAGGCCGAA AGCCAGCA | 12254 |
| 4870 | GGUGGGCUU GUGGCCUG | 2843 | CAGGCCAC CUGAUGAGGCCGUUAGGCCGAA AGCCCACC | 12255 |
| 4880 | UGGCCUGUC AGGAAACG | 2844 | CGUUUCCU CUGAUGAGGCCGUUAGGCCGAA ACAGGCCA | 12256 |
| 4908 | GGCAGGGUU UGGUUUUG | 2845 | CAAAACCA CUGAUGAGGCCGUUAGGCCGAA ACCCUGCC | 12257 |
| 4909 | GCAGGGUUU GGUUUUGG | 2846 | CCAAAACC CUGAUGAGGCCGUUAGGCCGAA AACCCUGC | 12258 |
| 4913 | GGUUUGGUU UUGGAAGG | 2847 | CCUUCCAA CUGAUGAGGCCGUUAGGCCGAA ACCAAACC | 12259 |
| 4914 | GUUUGGUUU UGGAAGGU | 2848 | ACCUUCCA CUGAUGAGGCCGUUAGGCCGAA AACCAAAC | 12260 |
| 4915 | UUUGGUUUU GGAAGGUU | 2849 | AACCUUCC CUGAUGAGGCCGUUAGGCCGAA AAACCAAA | 12261 |
| 4923 | UGGAAGGUU UGCGUGCU | 2850 | AGCACGCA CUGAUGAGGCCGUUAGGCCGAA ACCUUCCA | 12262 |
| 4924 | GGAAGGUUU GCGUGCUC | 2851 | GAGCACGC CUGAUGAGGCCGUUAGGCCGAA AACCUUCC | 12263 |
| 4932 | UGCGUGCUC UUCACAGU | 2852 | ACUGUGAA CUGAUGAGGCCGUUAGGCCGAA AGCACGCA | 12264 |
| 4934 | CGUGCUCUU CACAGUCG | 2853 | CGACUGUG CUGAUGAGGCCGUUAGGCCGAA AGAGCACG | 12265 |
| 4935 | GUGCUCUUC ACAGUCGG | 2854 | CCGACUGU CUGAUGAGGCCGUUAGGCCGAA AAGAGCAC | 12266 |
| 4941 | UUCACAGUC GGGUUACA | 2855 | UGUAACCC CUGAUGAGGCCGUUAGGCCGAA ACUGUGAA | 12267 |
| 4946 | AGUCGGGUU ACAGGCGA | 2856 | UCGCCUGU CUGAUGAGGCCGUUAGGCCGAA ACCCGACU | 12268 |
| 4947 | GUCGGGUUA CAGGCGAG | 2857 | CUCGCCUG CUGAUGAGGCCGUUAGGCCGAA AACCCGAC | 12269 |
| 4957 | AGGCGAGUU CCCUGUGG | 2858 | CCACAGGG CUGAUGAGGCCGUUAGGCCGAA ACUCGCCU | 12270 |
| 4958 | GGCGAGUUC CCUGUGGC | 2859 | GCCACAGG CUGAUGAGGCCGUUAGGCCGAA AACUCGCC | 12271 |
| 4969 | UGUGGCGUU UCCUACUC | 2860 | GAGUAGGA CUGAUGAGGCCGUUAGGCCGAA ACGCCACA | 12272 |
| 4970 | GUGGCGUUU CCUACUCC | 2861 | GGAGUAGG CUGAUGAGGCCGUUAGGCCGAA AACGCCAC | 12273 |
| 4971 | UGGCGUUUC CUACUCCU | 2862 | AGGAGUAG CUGAUGAGGCCGUUAGGCCGAA AAACGCCA | 12274 |
| 4974 | CGUUUCCUA CUCCUAAU | 2863 | AUUAGGAG CUGAUGAGGCCGUUAGGCCGAA AGGAAACG | 12275 |
| 4977 | UUCCUACUC CUAAUGAG | 2864 | CUCAUUAG CUGAUGAGGCCGUUAGGCCGAA AGUAGGAA | 12276 |
| 4980 | CUACUCCUA AUGAGAGU | 2865 | ACUCUCAU CUGAUGAGGCCGUUAGGCCGAA AGGAGUAG | 12277 |
| 4989 | AUGAGAGUU CCUUCCGG | 2866 | CCGGAAGG CUGAUGAGGCCGUUAGGCCGAA ACUCUCAU | 12278 |
| 4990 | UGAGAGUUC CUUCCGGA | 2867 | UCCGGAAG CUGAUGAGGCCGUUAGGCCGAA AACUCUCA | 12279 |
| 4993 | GAGUUCCUU CCGGACUC | 2868 | GAGUCCGG CUGAUGAGGCCGUUAGGCCGAA AGGAACUC | 12280 |
| 4994 | AGUUCCUUC CGGACUCU | 2869 | AGAGUCCG CUGAUGAGGCCGUUAGGCCGAA AAGGAACU | 12281 |
| 5001 | UCCGGACUC UUACGUGU | 2870 | ACACGUAA CUGAUGAGGCCGUUAGGCCGAA AGUCCOGA | 12282 |
| 5003 | CGGACUCUU ACGUGUCU | 2871 | AGACACGU CUGAUGAGGCCGUUAGGCCGAA AGAGUCCG | 12283 |
| 5004 | GGACUCUUA CGUGUCUC | 2872 | GAGACACG CUGAUGAGGCCGUUAGGCCGAA AAGAGUCC | 12284 |
| 5010 | UUACGUGUC UCCUGGCC | 2873 | GGCCAGGA CUGAUGAGGCCGUUAGGCCGAA ACACGUAA | 12285 |
| 5012 | ACGUGUCUC CUGGCCUG | 2874 | CAGGCCAG CUGAUGAGGCCGUUAGGCCGAA AGACACGU | 12286 |
| 5046 | AUGCAGCUU GCUCCUUC | 2875 | GAAGGAGC CUGAUGAGGCCGUUAGGCCGAA AGCUGCAU | 12287 |
| 5050 | AGCUUGCUC CUUCCUCA | 2876 | UGAGGAAG CUGAUGAGGCCGUUAGGCCGAA AGCAAGCU | 12288 |
| 5053 | UUGCUCCUU CCUCAUCU | 2877 | AGAUGAGG CUGAUGAGGCCGUUAGGCCGAA AGGAGCAA | 12289 |
| 5054 | UGCUCCUUC CUCAUCUC | 2878 | GAGAUGAG CUGAUGAGGCCGUUAGGCCGAA AAGGAGCA | 12290 |
| 5057 | UCCUUCCUC AUCUCUCA | 2879 | UGAGAGAU CUGAUGAGGCCGUUAGGCCGAA AGGAAGGA | 12291 |
| 5b60 | UUCCUCAUC UCUCAGGC | 2880 | GCCUGAGA CUGAUGAGGCCGUUAGGCCGAA AUGAGGAA | 12292 |
| 5062 | CCUCAUCUC UCAGGCUG | 2881 | CAGCCUGA CUGAUGAGGCCGUUAGGCCGAA AGAUGAGG | 12293 |
| 5064 | UCAUCUCUC AGGCUGUG | 2882 | CACAGCCU CUGAUGAGGCCGUUAGGCCGAA AGAGAUGA | 12294 |
| 5076 | CUGUGCCUU AAUUCAGA | 2883 | UCUGAAUU CUGAUGAGGCCGUUAGGCCGAA AGGCACAG | 12295 |
| 5077 | UGUGCCUUA AUUCAGAA | 2884 | UUCUGAAU CUGAUGAGGCCGUUAGGCCGAA AAGGCACA | 12296 |
| 5080 | GCCUUAAUU CAGAACAC | 2885 | GUGUUCUG CUGAUGAGGCCGUUAGGCCGAA AUUAAGGC | 12297 |
| 5081 | CCUUAAUUC AGAACACC | 2886 | GGUGUUCU CUGAUGAGGCCGUUAGGCCGAA AAUUAAGG | 12298 |
| 5105 | AGGAACGUC GGCAGAGG | 2887 | CCUCUGCC CUGAUGAGGCCGUUAGGCCGAA ACGUUCCU | 12299 |
| 5116 | CAGAGGCUC CUGACGGG | 2888 | CCCGUCAG CUGAUGAGGCCGUUAGGCCGAA AGCCUCUG | 12300 |
| 5135 | CGAAGAAUU GUGAGAAC | 2889 | GUUCUCAC CUGAUGAGGCCGUUAGGCCGAA AUUCUUCG | 12301 |
| 5156 | CAGAAACUC AGGGUUUC | 2890 | GAAACCCU CUGAUGAGGCCGUUAGGCCGAA AGUUUCUG | 12302 |
| 5162 | CUCAGGGUU UCUGCUGG | 2891 | CCAGCAGA CUGAUGAGGCCGUUAGGCCGAA ACCCUGAG | 12303 |
| 5163 | UCAGGGUUU CUGCUGGG | 2892 | CCCAGCAG CUGAUGAGGCCGUUAGGCCGAA AACCCUGA | 12304 |
| 5164 | CAGGGUUUC UGCUGGGU | 2893 | ACCCAGCA CUGAUGAGGCCGUUAGGCCGAA AAACCCUG | 12305 |
| 5203 | UGGCAGGUC UGAGGGUU | 2894 | AACCCUCA CUGAUGAGGCCGUUAGGCCGAA ACCUGCCA | 12306 |
| 5211 | CUGAGGGUU CUCUGUCA | 2895 | UGACAGAG CUGAUGAGGCCGUUAGGCCGAA ACCCUCAG | 12307 |
| 5212 | UGAGGGUUC UCUGUCAA | 2896 | UUGACAGA CUGAUGAGGCCGUUAGGCCGAA AACCCUCA | 12308 |
| 5214 | AGGGUUCUC UGUCAAGU | 2897 | ACUUGACA CUGAUGAGGCCGUUAGGCCGAA AGAACCCU | 12309 |
| 5218 | UUCUCUGUC AAGUGGCG | 2898 | CGCCACUU CUGAUGAGGCCGUUAGGCCGAA ACAGAGAA | 12310 |
| 5229 | GUGGCGGUA AAGGCUCA | 2899 | UGAGCCUU CUGAUGAGGCCGUUAGGCCGAA ACCGCCAC | 12311 |
| 5236 | UAAAGGCUC AGGCUGGU | 2900 | ACCAGCCU CUGAUGAGGCCGUUAGGCCGAA AGCCUUUA | 12312 |
| 5247 | GCUGGUGUU CUUCCUCU | 2901 | AGAGGAAG CUGAUGAGGCCGUUAGGCCGAA ACACCAGC | 12313 |
| 5248 | CUGGUGUUC UUCCUCUA | 2902 | UAGAGGAA CUGAUGAGGCCGUUAGGCCGAA AACACCAG | 12314 |
| 5250 | GGUGUUCUU CCUCUAUC | 2903 | GAUAGAGG CUGAUGAGGCCGUUAGGCCGAA AGAACACC | 12315 |
| 5251 | GUGUUCUUC CUCUAUCU | 2904 | AGAUAGAG CUGAUGAGGCCGUUAGGCCGAA AAGAACAC | 12316 |
| 5254 | UUCUUCCUC UAUCUCCA | 2905 | UGGAGAUA CUGAUGAGGCCGUUAGGCCGAA AGGAAGAA | 12317 |
| 5256 | CUUCCUCUA UCUCCACU | 2906 | AGUGGAGA CUGAUGAGGCCGUUAGGCCGAA AGAGGAAG | 12318 |
| 5258 | UCCUCUAUC UCCACUCC | 2907 | GGAGUGGA CUGAUGAGGCCGUUAGGCCGAA AUAGAGGA | 12319 |
| 5260 | CUCUAUCUC CACUCCUG | 2908 | CAGGAGUG CUGAUGAGGCCGUUAGGCCGAA AGAUAGAG | 12320 |
| 5265 | UCUCCACUC CUGUCAGG | 2909 | CCUGACAG CUGAUGAGGCCGUUAGGCCGAA AGUGGAGA | 12321 |
| 5270 | ACUCCUGUC AGGCCCCC | 2910 | GGGGGCCU CUGAUGAGGCCGUUAGGCCGAA ACAGGAGU | 12322 |
| 5283 | CCCCAAGUC CUCAGUAU | 2911 | AUACUGAG CUGAUGAGGCCGUUAGGCCGAA ACUUGGGG | 12323 |
| 5286 | CAAGUCCUC AGUAUUUU | 2912 | AAAAUACU CUGAUGAGGCCGUUAGGCCGAA AGGACUUG | 12324 |
| 5290 | UCCUCAGUA UUUUAGCU | 2913 | AGCUAAAA CUGAUGAGGCCGUUAGGCCGAA ACUGAGGA | 12325 |
| 5292 | CUCAGUAUU UUAGCUUU | 2914 | AAAGCUAA CUGAUGAGGCCGUUAGGCCGAA AUACUGAG | 12326 |
| 5293 | UCAGUAUUU UAGCUUUG | 2915 | CAAAGCUA CUGAUGAGGCCGUUAGGCCGAA AAUACUGA | 12327 |
| 5294 | CAGUAUUUU AGCUUUGU | 2916 | ACAAAGCU CUGAUGAGGCCGUUAGGCCGAA AAAUACUG | 12328 |
| 5295 | AGUAUUUUA GCUUUGUG | 2917 | CACAAAGC CUGAUGAGGCCGUUAGGCCGAA AAAAUACU | 12329 |
| 5299 | UUUUAGCUU UGUGGCUU | 2918 | AAGCCACA CUGAUGAGGCCGUUAGGCCGAA AGCUAAAA | 12330 |
| 5300 | UUUAGCUUU GUGGCUUC | 2919 | GAAGCCAC CUGAUGAGGCCGUUAGGCCGAA AAGCUAAA | 12331 |
| 5307 | UUGUGGCUU CCUGAUGG | 2920 | CCAUCAGG CUGAUGAGGCCGUUAGGCCGAA AGCCACAA | 12332 |
| 5308 | UGUGGCUUC CUGAUGGC | 2921 | GCCAUCAG CUGAUGAGGCCGUUAGGCCGAA AAGCCACA | 12333 |
| 5325 | AGAAAAAUC UUAAUUGG | 2922 | CCAAUUAA CUGAUGAGGCCGUUAGGCCGAA AUUUUUCU | 12334 |
| 5327 | AAAAAUCUU AAUUGGUU | 2923 | AACCAAUU CUGAUGAGGCCGUUAGGCCGAA AGAUUUUU | 12335 |
| 5328 | AAAAUCUUA AUUGGUUG | 2924 | CAACCAAU CUGAUGAGGCCGUUAGGCCGAA AAGAUUUU | 12336 |
| 5331 | AUCUUAAUU GGUUGGUU | 2925 | AACCAACC CUGAUGAGGCCGUUAGGCCGAA AUUAAGAU | 12337 |
| 5335 | UAAUUGGUU GGUUUGCU | 2926 | AGCAAACC CUGAUGAGGCCGUUAGGCCGAA ACCAAUUA | 12338 |
| 5339 | UGGUUGGUU UGCUCUCC | 2927 | GGAGAGCA CUGAUGAGGCCGUUAGGCCGAA ACCAACCA | 12339 |
| 5340 | GGUUGGUUU GCUCUCCA | 2928 | UGGAGAGC CUGAUGAGGCCGUUAGGCCGAA AACCAACC | 12340 |
| 5344 | GGUUUGCUC UCCAGAUA | 2929 | UAUCUGGA CUGAUGAGGCCGUUAGGCCGAA AGCAAACC | 12341 |
| 5346 | UUUGCUCUC CAGAUAAU | 2930 | AUUAUCUG CUGAUGAGGCCGUUAGGCCGAA AGAGCAAA | 12342 |
| 5352 | CUCCAGAUA AUCACUAG | 2931 | CUAGUGAU CUGAUGAGGCCGUUAGGCCGAA AUCUGGAG | 12343 |
| 5355 | CAGAUAAUC ACUAGCCA | 2932 | UGGCUAGU CUGAUGAGGCCGUUAGGCCGAA AUUAUCUG | 12344 |
| 5359 | UAAUCACUA GCCAGAUU | 2933 | AAUCUGGC CUGAUGAGGCCGUUAGGCCGAA AGUGAUUA | 12345 |
| 5367 | AGCCAGAUU UCGAAAUU | 2934 | AAUUUCGA CUGAUGAGGCCGUUAGGCCGAA AUCUGGCU | 12346 |
| 5368 | GCCAGAUUU CGAAAUUA | 2935 | UAAUUUCG CUGAUGAGGCCGUUAGGCCGAA AAUCUGGC | 12347 |
| 5369 | CCAGAUUUC GAAAUUAC | 2936 | GUAAUUUC CUGAUGAGGCCGUUAGGCCGAA AAAUCUGG | 12348 |
| 5375 | UUCGAAAUU ACUUUUUA | 2937 | UAAAAAGU CUGAUGAGGCCGUUAGGCCGAA AUUUCGAA | 12349 |
| 5376 | UCGAAAUUA CUUUUUAG | 2938 | CUAAAAAG CUGAUGAGGCCGUUAGGCCGAA AAUUUCGA | 12350 |
| 5379 | AAAUUACUU UUUAGCCG | 2939 | CGGCUAAA CUGAUGAGGCCGUUAGGCCGAA AGUAAUUU | 12351 |
| 5380 | AAUUACUUU UUAGCCGA | 2940 | UCGGCUAA CUGAUGAGGCCGUUAGGCCGAA AAGUAAUU | 12352 |
| 5381 | AUUACUUUU UAGCCGAG | 2941 | CUCGGCUA CUGAUGAGGCCGUUAGGCCGAA AAAGUAAU | 12353 |
| 5382 | UUACUUUUU AGCCGAGG | 2942 | CCUCGGCU CUGAUGAGGCCGUUAGGCCGAA AAAAGUAA | 12354 |
| 5383 | UACUUUUUA GCCGAGGU | 2943 | ACCUCGGC CUGAUGAGGCCGUUAGGCCGAA AAAAAGUA | 12355 |
| 5392 | GCCGAGGUU AUGAUAAC | 2944 | GUUAUCAU CUGAUGAGGCCGUUAGGCCGAA ACCUCGGC | 12356 |
| 5393 | CCGAGGUUA UGAUAACA | 2945 | UGUUAUCA CUGAUGAGGCCGUUAGGCCGAA AACCUCGG | 12357 |
| 5398 | GUUAUGAUA ACAUCUAC | 2946 | GUAGAUGU CUGAUGAGGCCGUUAGGCCGAA AUCAUAAC | 12358 |
| 5403 | GAUAACAUC UACUGUAU | 2947 | AUACAGUA CUGAUGAGGCCGUUAGGCCGAA AUGUUAUC | 12359 |
| 5405 | UAACAUCUA CUGUAUCC | 2948 | GGAUACAG CUGAUGAGGCCGUUAGGCCGAA AGAUGUUA | 12360 |
| 5410 | UCUACUGUA UCCUUUAG | 2949 | CUAAAGGA CUGAUGAGGCCGUUAGGCCGAA ACAGUAGA | 12361 |
| 5412 | UACUGUAUC CUUUAGAA | 2950 | UUCUAAAG CUGAUGAGGCCGUUAGGCCGAA AUACAGUA | 12362 |
| 5415 | UGUAUCCUU UAGAAUUU | 2951 | AAAUUCUA CUGAUGAGGCCGUUAGGCCGAA AGGAUACA | 12363 |
| 5416 | GUAUCCUUU AGAAUUUU | 2952 | AAAAUUCU CUGAUGAGGCCGUUAGGCCGAA AAGGAUAC | 12364 |
| 5417 | UAUCCUUUA GAAUUUUA | 2953 | UAAAAUUC CUGAUGAGGCCGUUAGGCCGAA AAAGGAUA | 12365 |
| 5422 | UUUAGAAUU UUAACCUA | 2954 | UAGGUUAA CUGAUGAGGCCGUUAGGCCGAA AUUCUAAA | 12366 |
| 5423 | UUAGAAUUU UAACCUAU | 2955 | AUAGGUUA CUGAUGAGGCCGUUAGGCCGAA AAUUCUAA | 12367 |
| 5424 | UAGAAUUUU AACCUAUA | 2956 | UAUAGGUU CUGAUGAGGCCGUUAGGCCGAA AAAUUCUA | 12368 |
| 5425 | AGAAUUUUA ACCUAUAA | 2957 | UUAUAGGU CUGAUGAGGCCGUUAGGCCGAA AAAAUUCU | 12369 |
| 5430 | UUUAACCUA UAAAACUA | 2958 | UAGUUUUA CUGAUGAGGCCGUUAGGCCGAA AGGUUAAA | 12370 |
| 5432 | UAACCUAUA AAACUAUG | 2959 | CAUAGUUU CUGAUGAGGCCGUUAGGCCGAA AUAGGUUA | 12371 |
| 5438 | AUAAAACUA UGUCUACU | 2960 | AGUAGACA CUGAUGAGGCCGUUAGGCCGAA AGUUUUAU | 12372 |
| 5442 | AACUAUGUC UACUGGUU | 2961 | AACCAGUA CUGAUGAGGCCGUUAGGCCGAA ACAUAGUU | 12373 |
| 5444 | CUAUGUCUA CUGGUUUC | 2962 | GAAACCAG CUGAUGACGCCGUUAGGCCGAA AGACAUAG | 12374 |
| 5450 | CUACUGGUU UCUGCCUG | 2963 | CAGGCAGA CUGAUGAGGCCGUUAGGCCGAA ACCAGUAG | 12375 |
| 5451 | UACUGGUUU CUGCCUGU | 2964 | ACAGGCAG CUGAUGAGGCCGUUAGGCCGAA AACCAGUA | 12376 |
| 5452 | ACUGGUUUC UGCCUGUG | 2965 | CACAGGCA CUGAUGAGGCCGUUAGGCCGAA AAACCAGU | 12377 |

Where “X” represents stem II region of a HH ribozyme (Hertel et al., 1992 Nucleic Acids Res. 20 3252).
The length of stem II may be 2 base-pairs.
Underlined region can be any X sequence or linker, as described herein.

[0346] TABLE VII

Mouseflk-1 VEGF Receptor-Hairpin Ribozyme and Substrate Sequences

| | | | | |
|---|---|---|---|---|
| | | Seq | | Seq |
| | | ID | | ID |
| Pos | Substrate | No | HP Ribozyme Sequences | No |

| | | | | |
|---|---|---|---|---|
| 74 | GGGCCCA GAC UGUGUCCC | 2966 | GGGACACA AGAA GGGCCC ACCAGAGAAACACACGUUGUGGUACAUUACCUGGUA | 12378 |
| 88 | UCCCGCA GCC GGGAUAAC | 2967 | GUUAUCCC AGAA GCGGGA ACCAGAGAAACACACGUUGUGGUACAUUACCUGGUA | 12379 |
| 105 | CCUGGCU GAC CCGAUUCC | 2968 | GGAAUCGG AGAA GCCAGG ACCAGAGAAACACACGUUGUGGUACAUUACCUGGUA | 12380 |
| 110 | GUGACCC GAU UCCGCGGA | 2969 | UCCGCGGA AGAA GGUCAG ACCAGAGAAACACACGUUGUGGUACAUUACCUGGUA | 12381 |
| 125 | GGACACC GCU GACAGCCG | 2970 | GGGCUGUC AGAA GUGUGC ACCAGAGAAACACACGUUGUGGUACAUUACCUGGUA | 12382 |
| 132 | GCUGACA GCC GCGGCUGG | 2971 | CCAGCCGC AGAA GUCAGC ACCAGAGAAACACACGUUGUGGUACAUUACCUGGUA | 12383 |
| 138 | AGCCGCG GCU GGAGCCAG | 2972 | CUGGCUCC AGAA GCGGCU ACCAGAGAAACACACGUUGUGGUACAUUACCUGGUA | 12384 |
| 175 | CUCCCCG GUC UUGCGCUG | 2973 | CAGCGCAA AGAA GGGGAG ACCAGAGAAACACACGUUGUGGUACAUUACCUGGUA | 12385 |
| 199 | CCAUACC GCC UCUGUGAC | 2974 | GUCACAGA AGAA GUAUGG ACCAGAGAAACACACGUUGUGGUACAUUACCUGGUA | 12386 |
| 309 | GCUAGCU GUC GCUCUGUG | 2975 | CACAGAGC AGAA GCUAGC ACCAGAGAAACACACGUUGUGGUACAUUACCUGGUA | 12387 |
| 342 | CCGAGCC CCC UCUGUGGG | 2976 | CCCACAGA AGAA GCUCGG ACCAGAGAAACACACGUUGUGGUACAUUACCUGGUA | 12388 |
| 434 | CCCUUCA GAU UACUUGCA | 2977 | UGCAAGUA AGAA GAAGGG ACCAGAGAAACACACGUUGUGGUACAUUACCUGGUA | 12389 |
| 630 | GUCCACU GUU UAUGUCUA | 2978 | UAGACAUA AGAA GUGGAG ACCAGAGAAACACACGUUGUGGUACAUUACCUGGUA | 12390 |
| 655 | GAUUACA GAU CACCAUUC | 2979 | GAAUGGUG AGAA GUAAUC ACCAGAGAAACACACGUUGUGGUACAUUACCUGGUA | 12391 |
| 739 | AUCCCCU GCC GAGGGUCG | 2980 | GGACCCUC AGAA GGGGAU ACCAGAGAAACACACGUUGUGGUACAUUACCUGGUA | 12392 |
| 807 | UGUUCCG GAU GGAAACAG | 2981 | CUGUUUCC AGAA GGAACA ACCAGAGAAACACACGUUGUGGUACAUUACCUGGUA | 12393 |
| 920 | GCUAUCA GUC UAUCAUGU | 2982 | ACAUGAUA AGAA GAUAGG ACCAGAGAAACACACGUUGUGGUACAUUACCUGGUA | 12394 |
| 1002 | GCUAUCU GCC GGAGAAAA | 2983 | UUUUCUCC AGAA GAUAGC ACCAGAGAAACACACGUUGUGGUACAUUACCUGGUA | 12395 |
| 1229 | GUGGACG GAU GAUCAAGA | 2984 | UCUUGAUC AGAA GUCCAC ACCAGAGAAACACACGUUGUGGUACAUUACCUGGUA | 12396 |
| 1365 | UUACCCA GCU CCUGAUAU | 2985 | AUAUCAGG AGAA GGGUAA ACCAGAGAAACACACGUUGUGGUACAUUACCUGGUA | 12397 |
| 1556 | CACCCCA GAU COGUGAGA | 2986 | UCUCACCG AGAA GGGGUG ACCAGAGAAACACACGUUGUGGUACAUUACCUGGUA | 12398 |
| 1629 | AUCCACA GUC UACGCCAA | 2987 | UUGGCGUA AGAA GUGCAU ACCAGAGAAACACACGUUGUGGUACAUUACCUGGUA | 12399 |
| 1687 | GAAGCCU GCU CCUACAGA | 2988 | UCUGUAGG AGAA GGCUUC ACCAGAGAAACACACGUUGUGGUACAUUACCUGGUA | 12400 |
| 1696 | UCCUACA GAC CCGGCCAA | 2989 | UUGGCCGG AGAA GUAGGA ACCAGAGAAACACACGUUGUGGUACAUUACCUGGUA | 12401 |
| 1795 | AUGCCCU GAU UGAAGGAA | 2990 | UUCCUUCA AGAA GGGCAU ACCAGAGAAACACACGUUGUGGUACAUUACCUGGUA | 12402 |
| 1950 | GCAACCU GCU GCCCAGCC | 2991 | GGCUGGGC AGAA GGUUGC ACCAGAGAAACACACGUUGUGGUACAUUACCUGGUA | 12403 |
| 1953 | ACCUGCU GCC CAGCCAAC | 2992 | GUUGGCUG AGAA GCAGGU ACCAGAGAAACACACGUUGUGGUACAUUACCUGGUA | 12404 |
| 1985 | UGUCCCU GUU GUCCACUG | 2993 | CAGUCCAC AGAA GGGACA ACCAGAGAAACACACGUUGUGGUACAUUACCUGGUA | 12405 |
| 2055 | AACAUCG GUC CACAUGGG | 2994 | CCCAUGUG AGAA GAUGUU ACCAGAGAAACACACGUUGUGGUACAUUACCUGGUA | 12406 |
| 2082 | CACACCA GUU UGCAAGAA | 2995 | UUCUUGCA AGAA GGUGUG ACCAGAGAAACACACGUUGUGGUACAUUACCUGGUA | 11606 |
| 2208 | UUGCUCU GCU CAAGAUAA | 2996 | UUAUCUUG AGAA GAGCAA ACCAGAGAAACACACGUUGUGGUACAUUACCUGGUA | 12407 |
| 2252 | UCAAACA GCU CAUCAUCC | 2997 | GGAUGAUG AGAA GUUUGA ACCAGAGAAACACACGUUGUGGUACAUUACCUGGUA | 12408 |
| 2444 | GGAACCU GAC UAUCCGCA | 2998 | UGCGGAUA AGAA GGUUCC ACCAGAGAAACACACGUUGUGGUACAUUACCUGGUA | 12409 |
| 2639 | UCCUACG GAC CGUUAAGC | 2999 | GCUUAACG AGAA GUAGGA ACCAGAGAAACACACGUUGUGGUACAUUACCUGGUA | 12410 |
| 2703 | GGAUCCA GAU GAAUUGCC | 3000 | GGCAAUUC AGAA GGAUCC ACCAGAGAAACACACGUUGUGGUACAUUACCUGGUA | 12411 |
| 2777 | GGGACCG GCU GAAACUAG | 3001 | CUAGUUUC AGAA GGUCCC ACCAGAGAAACACACGUUGUGGUACAUUACCUGGUA | 12412 |
| 2832 | UGAGGCA GAC GCUUUUGG | 3002 | CCAAAAGC AGAA GCCUCA ACCAGAGAAACACACGUUGUGGUACAUUACCUGGUA | 12413 |
| 3199 | UCUGOCA GCU CAGGCUUU | 3003 | AAAGCCUG AGAA GGCAGA ACCAGAGAAACACACGUUGUGGUACAUUACCUGGUA | 12414 |
| 3278 | ACUUCCU GAC CUUGGAGC | 2199 | GCUCCAAG AGAA GGAAGU ACCAGAGAAACACACGUUGUGGUACAUUACCUGGUA | 11618 |
| 3304 | UGUUACA GCU UCCAAGUG | 2200 | GACUUGGA AGAA GUAACA ACCAGAGAAACACACGUUGUGGUACAUUACCUGGUA | 11619 |
| 3421 | GACUUCG GCU UGGCCCGG | 3004 | CCGGGCCA AGAA GAAGUC ACCAGAGAAACACACGUUGUGGUACAUUACCUGGUA | 12415 |
| 3450 | AGACCCG GAU UAUGUCAG | 3005 | CUGACAUA AGAA GGGUCU ACCAGAGAAACACACGUUGUGGUACAUUACCUGGUA | 12416 |
| 3475 | GAUGCCC GAC UCCCUUUG | 3006 | CAAAGGGA AGAA GGCAUC ACCAGAGAAACACACGUUGUGGUACAUUACCUGGUA | 12417 |
| 3663 | GGCUCCU GAC UACACUAC | 3007 | GUAGUGUA AGAA GGAGCC ACCAGAGAAACACACGUUGUGGUACAUUACCUGGUA | 12418 |
| 3689 | UGUACCA GAC CAUGCUGG | 2203 | CCAGCAUG AGAA GGUACA ACCAGAGAAACACACGUUGUGGUACAUUACCUGGUA | 11622 |
| 3703 | CUGGACU GCU GGCAUGAG | 3008 | CUCAUGCC AGAA GUCCAG ACCAGAGAAACACACGUUGUGGUACAUUACCUGGUA | 12419 |
| 3860 | UCUCCCU GCC UACCUCAC | 3009 | GUGAGGUA AGAA GGGAGA ACCAGAGAAACACACGUUGUGGUACAUUACCUGGUA | 12420 |
| 3873 | CUCACCU GUU UCCUGUAU | 2205 | AUACAGGA AGAA GGUGAG ACCAGAGAAACACACGUUGUGGUACAUUACCUGGUA | 11625 |
| 4038 | GAUCCCA GAU GACAGCCA | 3010 | UGGCUGUC AGAA GGGAUC ACCAGAGAAACACACGUUGUGGUACAUUACCUGGUA | 12421 |
| 4181 | CCAACCA GAC CAGUGGCU | 3011 | AGCCACUG AGAA GGUUGG ACCAGAGAAACACACGUUGUGGUACAUUACCUGGUA | 12422 |
| 4196 | GCUACCA GUC UGGGUAUC | 3012 | GAUACCCA AGAA GGUAGC ACCAGAGAAACACACGUUGUGGUACAUUACCUGGUA | 12423 |
| 4212 | UCACUCA GAU GACACAGA | 3013 | UCUGUGUC AGAA GAGUGA ACCAGAGAAACACACGUUGUGGUACAUUACCUGGUA | 11630 |
| 4278 | UGCUGCA GUC CACGCUGA | 3014 | UCAGCGUG AGAA GCAGCA ACCAGAGAAACACACGUUGUGGUACAUUACCUGGUA | 12424 |
| 4287 | UCACGCU GAC UCAGGGAC | 3015 | GUCCCUGA AGAA GCGUGA ACCAGAGAAACACACGUUGUGGUACAUUACCUGGUA | 12425 |
| 4307 | CACUGCA GCU CACCUCCU | 3015 | AGGAGGUG AGAA GCAGUG ACCAGAGAAACACACGUUGUGGUACAUUACCUGGUA | 12426 |
| 4318 | ACCUCCU GUU UAAAUGGA | 3017 | UCCAUUUA AGAA GGAGGU ACCAGAGAAACACACGUUGUGGUACAUUACCUGGUA | 12427 |
| 4338 | UGGUCCU GUC CCGGCUCC | 3018 | GGAGCCGG AGAA GGACCA ACCAGAGAAACACACGUUGUGGUACAUUACCUGGUA | 12428 |
| 4344 | UGUCCCG GCU CCGCCCCC | 3019 | GGGGGCGG AGAA GGGACA ACCAGAGAAACACACGUUGUGGUACAUUACCUGGUA | 12429 |
| 4349 | CGGCUCC GCC CCCAACUC | 3020 | GAGUUGGG AGAA GAGCCG ACCAGAGAAACACACGUUGUGGUACAUUACCUGGUA | 12430 |
| 4383 | AGGUGCU GCU UAGAUUUU | 3021 | AAAAUCUA AGAA GCACCU ACCAGAGAAACACACGUUGUGGUACAUUACCUGGUA | 12431 |
| 4462 | GACCUCA GAC UGCAAGGA | 3022 | UCCUUGCA AGAA GAGGUC ACCAGAGAAACACACGUUGUGGUACAUUACCUGGUA | 12432 |
| 4574 | GUGCCCU GCU GUGGUCUC | 3023 | GAGACCAC AGAA GGGCAC ACCAGAGAAACACACGUUGUGGUACAUUACCUGGUA | 12433 |
| 4626 | GGACUCU GUC CUCCAAGA | 3024 | UCUUGGAG AGAA GAGUCC ACCAGAGAAACACACGUUGUGGUACAUUACCUGGUA | 12434 |
| 4723 | CGAGUCU GUC UACCUUGG | 3025 | CCAAGGUA AGAA GACUCG ACCAGAGAAACACACGUUGUGGUACAUUACCUGGUA | 12435 |
| 4823 | GAGAGCG GUU GGAGCCUG | 3026 | CAGGCUCC AGAA GCUCUC ACCAGAGAAACACACGUUGUGGUACAUUACCUGGUA | 12436 |
| 4836 | GCCUGCA GAU GCAUUGUG | 3027 | CACAAUGC AGAA GCAGGC ACCAGAGAAACACACGUUGUGGUACAUUACCUGGUA | 12437 |
| 4895 | AAAGGCG CCC GGCAGGGU | 3028 | ACCCUGCC AGAA CCCUUU ACCAGAGAAACACACGUUGUGGUACAUUACCUGGUA | 12438 |
| 4938 | CUUCACA GUC GGGUUACA | 3029 | UGUAACCC AGAA GUGAAG ACCAGAGAAACACACGUUGUGGUACAUUACCUGGUA | 12439 |
| 4996 | CCUUCCG GAC UCUUACGU | 3030 | ACGUAAGA AGAA GGAAGG ACCAGAGAAACACACGUUCUGGUACAUUACCUGGUA | 12440 |
| 5042 | UGAUCCA GCU UGCUCCUU | 3031 | AAGGAGCA AGAA GCAUCA ACCAGAGAAACACACGUUGUGGUACAUUACCUGGUA | 12441 |
| 5118 | GGCUCCU GAC GGGGCCGA | 3032 | UCGGCCCC AGAA GGAGCC ACCAGAGAAACACACGUUGUGGUACAUUACCUGGUA | 12442 |
| 5165 | GGUUUCU GCU GUGUGGAG | 3033 | CUCCACCC AGAA GAAACC ACCAGAGAAACACACGUUGUGGUACAUUACCUGGUA | 12443 |
| 5310 | GCUUCCU GAU GGCAGAAA | 3034 | UUUCUGCC AGAA GGAAGC ACCAGAGAAACACACGUUGUGGUACAUUACCUGGUA | 12444 |
| 5363 | CUAGCCA GAU UUCGAAAU | 3035 | AUUUCGAA AGAA GGCUAG ACCAGAGAAACACACGUUGUGGUACAUUACCUGGUA | 12445 |
| 5453 | GGUUUCU CCC UGUGUGCU | 3035 | AGCACACA AGAA GAAACC ACCAGAGAAACACACGUUGUGGUACAUUACCUGGUA | 12446 |

[0347] TABLE VIII

Mouse flt-1 VEGF Receptor-Hammerhead Ribozyme and Substrate Sequence

| | | | | |
|---|---|---|---|---|
| | | Seq | | Seq |
| | | ID | | ID |
| Pos | Substrate | No | HH Ribozyme Sequence | No |

| | | | | |
|---|---|---|---|---|
| 17 | GGCCGCGUC UUGCUCAC | 3037 | GUGAGCAA CUGAUGAGGCCGUUAGGCCGAA ACGCGGCC | 12447 |
| 19 | CCGCGUCUU GCUCACCA | 3038 | UGGUGAGC CUGAUGAGGCCGUUAGGCCGAA AGACGCGG | 12448 |
| 23 | GUCUUGCUC ACCAUGGU | 3039 | ACCAUGGU CUGAUGAGGCCGUUAGGCCGAA AGCAAGAC | 12449 |
| 32 | ACCAUGGUC AGCUGCUG | 3040 | CAGCAGCU CUGAUGAGGCCGUUAGGCCGAA ACCAUGGU | 12450 |
| 53 | ACCGCGGUC UUGCCUUA | 3041 | UAAGGCAA CUGAUGAGGCCGUUAGGCCGAA ACCGCGGU | 12451 |
| 55 | CGCGGUCUU GCCUUACG | 3042 | CGUAAGGC CUGAUGAGGCCGUUAGGCCGAA AGACCGCG | 12452 |
| 60 | UCUUGCCUU ACGCGCUG | 3043 | CAGCGCGU CUGAUGAGGCCGUUAGGCCGAA AGGCAAGA | 12453 |
| 61 | CUUGCCUUA CGCGCUGC | 3044 | GCAGCGCG CUGAUGAGGCCGUUAGGCCGAA AAGGCAAG | 12454 |
| 71 | GCGCUGCUC GGGUGUCU | 3045 | AGACACCC CUGAUGAGGCCGUUAGGCCGAA AGCAGCGC | 12455 |
| 78 | UCGGGUGUC UGCUUCUC | 3048 | GAGAAGCA CUGAUGAGGCCGUUAGGCCGAA ACACCCGA | 12456 |
| 83 | UGUCUGCUU CUCACAGG | 25 | CCUGUGAG CUGAUGAGGCCGUUAGGCCGAA AGCAGACA | 9444 |
| 84 | GUCUGCUUC UCACAGGA | 26 | UCCUGUGA CUGAUGAGGCCGUUAGGCCGAA AAGCAGAC | 9445 |
| 86 | CUGCUUCUC ACAGGAUA | 3047 | UAUCCUGU CUGAUGAGGCCGUUAGGCCGAA AGAAGCAG | 12457 |
| 94 | CACAGGAUA UGGCUCAG | 3048 | CUGAGCCA CUGAUGAGGCCGUUAGGCCGAA AUCCUGUG | 12458 |
| 100 | AUAUGGCUC AGGGUCGA | 3049 | UCGACCCU CUGAUGAGGCCGUUAGGCCGAA AGCCAUAU | 12459 |
| 106 | CUCAGGGUC GAAGUUAA | 3050 | UUAACUUC CUGAUGAGGCCGUUAGGCCGAA ACCCUGAG | 12460 |
| 112 | GUCGAAGUU AAAAGUGC | 3051 | GCACUUUU CUGAUGAGGCCGUUAGGCCGAA ACUUCGAC | 12461 |
| 113 | UCGAAGUUA AAAGUGCC | 3052 | GGCACUUU CUGAUGAGGCCGUUAGGCCGAA AACUUCGA | 12462 |
| 132 | AACUGAGUU UAAAAGGC | 37 | GCCUUUUA CUGAUGAGGCCGUUAGGCCGAA ACUCAGUU | 9456 |
| 133 | ACUGAGUUU AAAAGGCA | 38 | UGCCUUUU CUGAUGAGGCCGUUAGGCCGAA AACUCAGU | 9457 |
| 134 | CUGAGUUUA AAAGGCAC | 39 | GUGCCUUU CUGAUGAGGCCGUUAGGCCGAA AAACUCAG | 9458 |
| 152 | CAGCAUGUC AUGCAAGC | 3053 | GCUUGCAU CUGAUGAGGCCGUUAGGCCGAA ACAUGCUG | 12463 |
| 171 | GCCAGACUC UCUUUCUC | 3054 | GAGAAAGA CUGAUGAGGCCGUUAGGCCGAA AGUCUGGC | 12464 |
| 173 | CAGACUCUC UUUCUCAA | 3055 | UUGAGAAA CUGAUGAGGCCGUUAGGCCGAA AGAGUCUG | 12465 |
| 175 | GACUCUCUU UCUCAAGU | 3056 | ACUUGAGA CUGAUGAGGCCGUUAGGCCGAA AGAGAGUC | 12466 |
| 176 | ACUCUCUUU CUCAAGUG | 3057 | CACUUGAG CUGAUGAGGCCGUUAGGCCGAA AAGAGAGU | 12467 |
| 177 | CUCUCUUUC UCAAGUGC | 3058 | GCACUUGA CUGAUGAGGCCGUUAGGCCGAA AAAGAGAG | 12468 |
| 179 | CUCUUUCUC AAGUGCAG | 3059 | CUGCACUU CUGAUGAGGCCGUUAGGCCGAA AGAAAGAG | 12469 |
| 205 | AGCCCACUC AUGGUCUC | 3060 | GAGACCAU CUGAUGAGGCCGUUAGGCCGAA AGUGGGCU | 12470 |
| 211 | CUCAUGGUC UCUGCCCA | 3061 | UGGGCAGA CUGAUGAGGCCGUUAGGCCGAA ACCAUGAG | 12471 |
| 213 | CAUGGUCUC UGCCCACG | 3062 | CGUGGGCA CUGAUGAGGCCGUUAGGCCGAA AGACCAUG | 12472 |
| 254 | CUGAGCAUC ACUCCCCC | 3063 | GGGGGAGU CUGAUGAGGCCGUUAGGCCGAA AUGCUCAG | 12473 |
| 258 | GCAUCACUC CCCCAUCG | 3064 | CGAUGGGG CUGAUGAGGCCGUUAGGCCGAA AGUGAUGC | 12474 |
| 265 | UCCCCCAUC GGCCUGUG | 3065 | CACAGGCC CUGAUGAGGCCGUUAGGCCGAA AUGGGGGA | 12475 |
| 282 | GGAGGGAUA ACAGGCAA | 3066 | UUGCCUGU CUGAUGAGGCCGUUAGGCCGAA AUCCCUCC | 12476 |
| 292 | CAGGCAAUU CUGCAGCA | 3067 | UGCUGCAG CUGAUGAGGCCGUUAGGCCGAA AUUGCCUG | 12477 |
| 293 | AGGCAAUUC UGCAGCAC | 3068 | GUGCUGCA CUGAUGAGGCCGUUAGGCCGAA AAUUGCCU | 12478 |
| 304 | CAGCACCUU GACCUUGG | 3069 | CCAAGGUC CUGAUGAGGCCGUUAGGCCGAA AGGUGCUG | 12479 |
| 310 | CUUGACCUU GGACACGG | 3070 | CCGUGUCC CUGAUGAGGCCGUUAGGCCGAA AGGUCAAG | 12480 |
| 341 | ACGGGCCUC UACACCUG | 3071 | CAGGUGUA CUGAUGAGGCCGUUAGGCCGAA AGGCCCGU | 12481 |
| 343 | GGGCCUCUA CACCUGUA | 3072 | UACAGGUG CUGAUGAGGCCGUUAGGCCGAA AGAGGCCC | 12482 |
| 351 | ACACCUGUA GAUACCUC | 3073 | GAGGUAUC CUGAUGAGGCCGUUAGGCCGAA ACAGGUGU | 12483 |
| 355 | CUGUAGAUA CCUCCCUA | 3074 | UAGGGAGG CUGAUGAGGCCGUUAGGCCGAA AUCUACAG | 12484 |
| 359 | AGAUACCUC CCUACAUC | 3075 | GAUGUAGG CUGAUGAGGCCGUUAGGCCGAA AGGUAUCU | 12485 |
| 363 | ACCUCCCUA CAUCUACU | 3076 | AGUAGAUG CUGAUGAGGCCGUUAGGCCGAA AGGGAGGU | 12486 |
| 367 | CCCUACAUC UACUUCGA | 3077 | UCGAAGUA CUGAUGAGGCCGUUAGGCCGAA AUGUAGGG | 12487 |
| 369 | CUACAUCUA CUUCGAAG | 3078 | CUUCGAAG CUGAUGAGGCCGUUAGGCCGAA AGAUGUAG | 12488 |
| 372 | CAUCUACUU CGAAGAAA | 3079 | UUUCUUCG CUGAUGAGGCCGUUAGGCCGAA AGUAGAUG | 12489 |
| 373 | AUCUACUUC GAAGAAAA | 3080 | UUUUCUUC CUGAUGAGGCCGUUAGGCCGAA AAGUAGAU | 12490 |
| 394 | AGCGGAAUC UUCAAUCU | 3081 | AGAUUGAA CUGAUGAGGCCGUUAGGCCGAA AUUCCGCU | 12491 |
| 396 | CGGAAUCUU CAAUCUAC | 3082 | GUAGAUUG CUGAUGAGGCCGUUAGGCCGAA AGAUUCCG | 12492 |
| 397 | GGAAUCUUC AAUCUACA | 3083 | UGUAGAUU CUGAUGAGGCCGUUAGGCCGAA AAGAUUCC | 12493 |
| 401 | UCUUCAAUC UACAUAUU | 3084 | AAUAUGUA CUGAUGAGGCCGUUAGGCCGAA AUUGAAGA | 12494 |
| 403 | AUCAAUCUA CAUAUUUG | 3085 | CAAAUAUG CUGAUGAGGCCGUUAGGCCGAA AGAUUGAA | 12495 |
| 407 | AUCUACAUA UUUGUUAG | 3086 | CUAACAAA CUGAUGAGGCCGUUAGGCCGAA AUGUAGAU | 12496 |
| 409 | CUACAUAUU UGUUAGUG | 3087 | CACUAACA CUGAUGAGGCCGUUAGGCCGAA AUAUGUAG | 12497 |
| 410 | UACAUAUUU GUUAGUGA | 3088 | UCACUAAC CUGAUGAGGCCGUUAGGCCGAA AAUAUGUA | 12498 |
| 413 | AUAUUUGUU AGUGAUGC | 3089 | GCAUCACU CUGAUGAGGCCGUUAGGCCGAA ACAAAUAU | 12499 |
| 414 | UAUUUGUUA GUGAUGCA | 3090 | UGCAUCAC CUGAUGAGGCCGUUAGGCCGAA AACAAAUA | 12500 |
| 429 | CAGGGAGUC CUUUCAUA | 3091 | UAUGAAAG CUGAUGAGGCCGUUAGGCCGAA ACUCCCUG | 12501 |
| 432 | GGAGUCCUU UCAUAGAG | 3092 | CUCUAUGA CUGAUGAGGCCGUUAGGCCGAA AGGACUCC | 12502 |
| 433 | GAGUCCUUU CAUAGAGA | 3093 | UCUCUAUG CUGAUGAGGCCGUUAGGCCGAA AAGGACUC | 12503 |
| 434 | AGUCCUUUC AUAGAGAU | 3094 | AUCUCUAU CUGAUGAGGCCGUUAGGCCGAA AAAGGACU | 12504 |
| 437 | CCUUUCAUA GAGAUGCA | 3095 | UGCAUCUC CUGAUGAGGCCGUUAGGCCGAA AUGAAAGG | 12505 |
| 455 | ACUGACAUA CCCAAACU | 3096 | AGUUUGGG CUGAUGAGGCCGUUAGGCCGAA AUGUCAGU | 12506 |
| 464 | CCCAAACUU GUGCACAU | 3097 | AUGUGCAC CUGAUGAGGCCGUUAGGCCGAA AGUUUGGG | 12507 |
| 491 | AGACAGCUC AUCAUCCC | 3098 | GGGAUGAU CUGAUGAGGCCGUUAGGCCGAA AGCUGUCU | 12508 |
| 494 | CAGCUCAUC AUCCCCUG | 3099 | CAGGGGAU CUGAUGAGGCCGUUAGGCCGAA AUGAGCUG | 12509 |
| 497 | CUCAUCAUC CCCUGCCG | 3100 | CGGCAGGG CUGAUGAGGCCGUUAGGCCGAA AUGAUGAG | 12510 |
| 514 | GGUGACGUC ACCCAACG | 3101 | CGUUGGGU CUGAUGAGGCCGUUAGGCCGAA ACGUCACC | 12511 |
| 524 | CCCAACGUC ACAGUCAC | 3102 | GUGACUGU CUGAUGAGGCCGUUAGGCCGAA ACGUUGGG | 12512 |
| 530 | GUCACAGUC ACCCUAAA | 3103 | UUUAGGGU CUGAUGAGGCCGUUAGGCCGAA ACUGUGAC | 12513 |
| 536 | GUCACCCUA AAAAAGUU | 3104 | AACUUUUU CUGAUGAGGCCGUUAGGCCGAA AGGGUGAC | 12514 |
| 544 | AAAAAAGUU UCCAUUUG | 3105 | CAAAUGGA CUGAUGAGGCCGUUAGGCCGAA ACUUUUUU | 12515 |
| 545 | AAAAAGUUU CCAUUUGA | 3106 | UCAAAUGG CUGAUGAGGCCGUUAGGCCGAA AACUUUUU | 12516 |
| 546 | AAAAGUUUC CAUUUGAU | 3107 | AUCAAAUG CUGAUGAGGCCGUUAGGCCGAA AAACUUUU | 12517 |
| 550 | GUUUCCAUU UGAUACUC | 3108 | GAGUAUCA CUGAUGAGGCCGUUAGGCCGAA AUGGAAAC | 12518 |
| 551 | UUUCCAUUU GAUACUCU | 3109 | AGAGUAUC CUGAUGAGGCCGUUAGGCCGAA AAUGGAAA | 12519 |
| 555 | CAUUUGAUA CUCUUACC | 3110 | GGUAAGAG CUGAUGAGGCCGUUAGGCCGAA AUCAAAUG | 12520 |
| 558 | UUGAUACUC UUACCCCU | 3111 | AGGGGUAA CUGAUGAGGCCGUUAGGCCGAA AGUAUCAA | 12521 |
| 560 | GAUACUCUU ACCCCUGA | 3112 | UCAGGGGU CUGAUGAGGCCGUUAGGCCGAA AGAGUAUC | 12522 |
| 561 | AUACUCUUA CCCCUGAU | 3113 | AUCAGGGG CUGAUGAGGCCGUUAGGCCGAA AAGAGUAU | 12523 |
| 581 | CAAAGAAUA ACAUGGGA | 3114 | UCCCAUGU CUGAUGAGGCCGUUAGGCCGAA AUUCUUUG | 12524 |
| 594 | GGGACAGUA GGAGAGGC | 3115 | GCCUCUCC CUGAUGAGGCCGUUAGGCCGAA ACUGUCCC | 12525 |
| 604 | GAGAGGCUU UAUAAUAG | 3116 | CUAUUAUA CUGAUGAGGCCGUUAGGCCGAA AGCCUCUC | 12526 |
| 605 | AGAGGCUUU AUAAUAGC | 3117 | GCUAUUAU CUGAUGAGGCCGUUAGGCCGAA AAGCCUCU | 12527 |
| 606 | GAGGCUUUA UAAUAGCA | 3118 | UGCUAUUA CUGAUGAGGCCGUUAGGCCGAA AAAGCCUC | 12528 |
| 608 | GGCUUUAUA AUAGCAAA | 3119 | UUUGCUAU CUGAUGAGGCCGUUAGGCCGAA AUAAAGCC | 12529 |
| 611 | UUUAUAAUA GCAAAUGC | 3120 | GCAUUUGC CUGAUGAGGCCGUUAGGCCGAA AUUAUAAA | 12530 |
| 625 | UGCAACGUA CAAAGAGA | 3121 | UCUCUUUG CUGAUGAGGCCGUUAGGCCGAA ACGUUGCA | 12531 |
| 635 | AAAGAGAUA GGACUGCU | 3122 | AGCAGUCC CUGAUGAGGCCGUUAGGCCGAA AUCUCUUU | 12532 |
| 662 | GCCACCGUC AACGGGCA | 3123 | UGCCCGUU CUGAUGAGGCCGUUAGGCCGAA ACGCUGGC | 12533 |
| 676 | GCACCUGUA CCAGACAA | 3124 | UUGUCUGG CUGAUGAGGCCGUUAGGCCGAA ACAGGUGC | 12534 |
| 688 | GACAAACUA UCUGACCC | 3125 | GGGUCAGA CUGAUGAGGCCGUUAGGCCGAA AGUUUGUC | 12535 |
| 690 | CAAACUAUC UGACCCAU | 3126 | AUGGGUCA CUGAUGAGGCCGUUAGGCCGAA AUAGUUUG | 12536 |
| 699 | UGACCCAUC GGCAGACC | 3127 | GGUCUGCC CUGAUGAGGCCGUUAGGCCGAA AUGGGUCA | 12537 |
| 711 | AGACCAAUA CAAUCCUA | 3128 | UAGGAUUG CUGAUGAGGCCGUUAGGCCGAA AUUGGUCU | 12538 |
| 716 | AAUACAAUC CUAGAUGU | 3129 | ACAUCUAG CUGAUGAGGCCGUUAGGCCGAA AUUGUAUU | 12539 |
| 719 | ACAAUCCUA GAUGUCCA | 3130 | UGGACAUC CUGAUGAGGCCGUUAGGCCGAA AGGAUUGU | 12540 |
| 725 | CUAGAUGUC CAAAUACG | 3131 | CGUAUUUG CUGAUGAGGCCGUUAGGCCGAA ACAUCUAG | 12541 |
| 731 | GUCCAAAUA CGCCCGCC | 3132 | GGCGGGCG CUGAUGAGGCCGUUAGGCCGAA AUUUGGAC | 12542 |
| 758 | AGACUGCUC CACGGGCA | 3133 | UGCCCGUG CUGAUGAGGCCGUUAGGCCGAA AGCAGUCU | 12543 |
| 771 | GGCAGACUC UUGUCCUC | 3134 | GAGGACAA CUGAUGAGGCCGUUAGGCCGAA AGUCUGCC | 12544 |
| 773 | CAGACUCUU GUCCUCAA | 3135 | UUGAGGAC CUGAUGAGGCCGUUAGGCCGAA AGAGUCUG | 12545 |
| 776 | ACUCUUGUC CUCAACUG | 3136 | CAGUUGAG CUGAUGAGGCCGUUAGGCCGAA ACAAGAGU | 12546 |
| 779 | CUUGUCCUC AACUGCAC | 3137 | GUGCAGUU CUGAUGAGGCCGUUAGGCCGAA AGGACAAG | 12547 |
| 803 | ACGGAGCUC AAUACGAG | 3138 | CUCGUAUU CUGAUGAGGCCGUUAGGCCGAA AGCUCCGU | 12548 |
| 807 | AGCUCAAUA CGAGGGUG | 3139 | CACCCUCG CUGAUGAGGCCGUUAGGCCGAA AUUGAGCU | 12549 |
| 831 | GCUGGAAUU ACCCUGGU | 3140 | ACCAGGGU CUGAUGAGGCCGUUAGGCCGAA AUUCCAGC | 12550 |
| 832 | CUGGAAUUA CCCUGGUA | 3141 | UACCAGGG CUGAUGAGGCCGUUAGGCCGAA AAUUCCAG | 12551 |
| 840 | ACCCUGGUA AAGCAACU | 3142 | AGUUGCUU CUGAUGAGGCCGUUAGGCCGAA ACCAGGGU | 12552 |
| 849 | AAGCAACUA AGAGAUCA | 3143 | UGCUCUCU CUGAUGAGGCCGUUAGGCCGAA AGUUGCUU | 12553 |
| 859 | GAGAGCAUC UAUAAGGC | 3144 | GCCUUAUA CUGAUGAGGCCGUUAGGCCGAA AUGCUCUC | 12554 |
| 861 | GAGCAUCUA UAAGGCAG | 3145 | CUGCCUUA CUGAUGAGGCCGUUAGGCCGAA AGAUGCUC | 12555 |
| 863 | GCAUCUAUA AGGCAGCG | 3146 | CGCUGCCU CUGAUGAGGCCGUUAGGCCGAA AUAGAUGC | 12556 |
| 875 | CAGCGGAUU GACCGGAG | 3147 | CUCCGGUC CUGAUGAGGCCGUUAGGCCGAA AUCCGCUG | 12557 |
| 888 | GGAGCCAUU CCCACAAC | 3148 | GUUGUGGG CUGAUGAGGCCGUUAGGCCGAA AUGGCUCC | 12558 |
| 889 | GAGCCAUUC CCACAACA | 3149 | UGUUGUGG CUGAUGAGGCCGUUAGGCCGAA AAUGGCUC | 12559 |
| 904 | CAAUGUGUU CCACAGUG | 3150 | CACUGUGG CUGAUGAGGCCGUUAGGCCGAA ACACAUUG | 12560 |
| 905 | AAUGUGUUC CACAGUGU | 3151 | ACACUGUG CUGAUGAGGCCGUUAGGCCGAA AACACAUU | 12561 |
| 914 | CACAGUGUU CUUAAGAU | 3152 | AUCUUAAG CUGAUGAGGCCGUUAGGCCGAA ACACUGUG | 12562 |
| 915 | ACAGUGUUC UUAAGAUC | 3153 | GAUCUUAA CUGAUGAGGCCGUUAGGCCGAA AACACUGU | 12563 |
| 917 | AGUGUUCUU AAGAUCAA | 3154 | UUGAUCUU CUGAUGAGGCCGUUAGGCCGAA AGAACACU | 12564 |
| 918 | GUGUUCUUA AGAUCAAC | 3155 | GUUGAUCU CUGAUGAGGCCGUUAGGCCGAA AAGAACAC | 12565 |
| 923 | CUUAAGAUC AACAAUGU | 3156 | ACAUUGUU CUGAUGAGGCCGUUAGGCCGAA AUCUUAAG | 12566 |
| 953 | AAGGGGCUC UACACCUG | 3157 | CAGGUGUA CUGAUGAGGCCGUUAGGCCGAA AGCCCCUU | 12567 |
| 955 | GGGGCUCUA CACCUGUC | 3158 | GACAGGUG CUGAUGAGGCCGUUAGGCCGAA AGAGCCCC | 12568 |
| 963 | ACACCUGUC GCGUGAAG | 3159 | CUUCACGC CUGAUGAGGCCGUUAGGCCGAA ACAGGUGU | 12569 |
| 979 | GAGUGGGUC CUCGUUCC | 3160 | GGAACGAG CUGAUGAGGCCGUUAGGCCGAA ACCCACUC | 12570 |
| 982 | UGGGUCCUC GUUCCAGU | 3161 | ACUGGAAC CUGAUGAGGCCGUUAGGCCGAA AGGACCCA | 12571 |
| 985 | GUCCUCGUU CCAGUCUU | 3162 | AAGACUGG CUGAUGAGGCCGUUAGGCCGAA ACGAGGAC | 12572 |
| 986 | UCCUCGUUC CAGUCUUU | 3163 | AAAGACUG CUGAUGAGGCCGUUAGGCCGAA AACGAGGA | 12573 |
| 991 | GUUCCAGUC UUUCAACA | 3164 | UGUUGAAA CUGAUGAGGCCGUUAGGCCGAA ACUGGAAC | 12574 |
| 993 | UCCAGUCUU UCAACACC | 3165 | GGUGUUGA CUGAUGAGGCCGUUAGGCCGAA AGACUGGA | 12575 |
| 994 | CCAGUCUUU CAACACCU | 3166 | AGGUGUUG CUGAUGAGGCCGUUAGGCCGAA AAGACUGG | 12576 |
| 995 | CAGUCUUUC AACACCUC | 3167 | GAGGUGUU CUGAUGAGGCCGUUAGGCCGAA AAAGACUG | 12577 |
| 1003 | CAACACCUC CGUGCAUG | 3168 | CAUGCACG CUGAUGAGGCCGUUAGGCCGAA AGGUGUUG | 12578 |
| 1015 | GCAUGUGUA UGAAAAAG | 3169 | CUUUUUCA CUGAUGAGGCCGUUAGGCCGAA ACACAUGC | 12579 |
| 1027 | AAAAGGAUU CAUCAGUG | 3170 | CACUGAUG CUGAUGAGGCCGUUAGGCCGAA AUCCUUUU | 12580 |
| 1028 | AAAGGAUUC AUCAGUGU | 3171 | ACACUGAU CUGAUGAGGCCGUUAGGCCGAA AAUCCUUU | 12581 |
| 1031 | GGAUUCAUC AGUGUGAA | 3172 | UUCACACU CUGAUGAGGCCGUUAGGCCGAA AUGAAUCC | 12582 |
| 1044 | UGAAACAUC GGAAGCAG | 3173 | CUGCUUCC CUGAUGAGGCCGUUAGGCCGAA AUGUUUCA | 12583 |
| 1084 | AAGACGGUC CUAUCGGC | 3174 | GCCGAUAG CUGAUGAGGCCGUUAGGCCGAA ACCGUCUU | 12584 |
| 1087 | ACGGUCCUA UCGGCUGU | 3175 | ACAGCCGA CUGAUGAGGCCGUUAGGCCGAA AGGACCGU | 12585 |
| 1089 | GGUCCUAUC GGCUGUCC | 3176 | GGACAGCC CUGAUGAGGCCGUUAGGCCGAA AUAGGACC | 12586 |
| 1096 | UCGGCUGUC CAUGAAAG | 3177 | CUUUCAUG CUGAUGAGGCCGUUAGGCCGAA ACAGCCGA | 12587 |
| 1114 | GAAGGCCUU CCCCUCCC | 3178 | GGGAGGGG CUGAUGAGGCCGUUAGGCCGAA AGGCCUUC | 12588 |
| 1115 | AAGGCCUUC CCCUCCCC | 3179 | GGGGAGGG CUGAUGAGGCCGUUAGGCCGAA AAGGCCUU | 12589 |
| 1120 | CUUCCCCUC CCCAGAAA | 3180 | UUUCUGGG CUGAUGAGGCCGUUAGGCCGAA AGGGGAAG | 12590 |
| 1130 | CCAGAAAUC GUAUGGUU | 3181 | AACCAUAC CUGAUGAGGCCGUUAGGCCGAA AUUUCUGG | 12591 |
| 1133 | GAAAUCGUA UGGUUAAA | 3182 | UUUAACCA CUGAUGAGGCCGUUAGGCCGAA ACGAUUUC | 12592 |
| 1138 | CGUAUGGUU AAAAGAUG | 3183 | CAUCUUUU CUGAUGAGGCCGUUAGGCCGAA ACCAUACG | 12593 |
| 1139 | GUAUGGUUA AAAGAUGG | 210 | CCAUCUUU CUGAUGAGGCCGUUAGGCCGAA AACCAUAC | 9629 |
| 1150 | AGAUGGCUC GCCUGCAA | 3184 | UUGCAGGC CUGAUGAGGCCGUUAGGCCGAA AGCCAUCU | 12594 |
| 1162 | UGCAACAUU GAAGUCUG | 3185 | CAGACUUC CUGAUGAGGCCGUUAGGCCGAA AUGUUGCA | 12595 |
| 1168 | AUUGAAGUC UGCUCGCU | 3186 | AGCGAGCA CUGAUGAGGCCGUUAGGCCGAA ACUUCAAU | 12596 |
| 1173 | AGUCUGCUC GCUAUUUG | 3187 | CAAAUAGC CUGAUGAGGCCGUUAGGCCGAA AGCAGACU | 12597 |
| 1177 | UGCUCGCUA UUUGGUAC | 3188 | GUACCAAA CUGAUGAGGCCGUUAGGCCGAA AGCGAGCA | 12598 |
| 1179 | CUCGCUAUU UGGUACAU | 3189 | AUGUACCA CUGAUGAGGCCGUUAGGCCGAA AUAGCGAG | 12599 |
| 1180 | UCGCUAUUU GGUACAUG | 3190 | CAUGUACC CUGAUGAGGCCGUUAGGCCGAA AAUAGCGA | 12600 |
| 1184 | UAUUUGGUA CAUGGCUA | 3191 | UAGCCAUG CUGAUGAGGCCGUUAGGCCGAA ACCAAAUA | 12601 |
| 1192 | ACAUGGCUA CUCAUUAA | 3192 | UUAAUGAG CUGAUGAGGCCGUUAGGCCGAA AGCCAUGU | 12602 |
| 1195 | UGGCUACUC AUUAAUUA | 3193 | UAAUUAAU CUGAUGAGGCCGUUAGGCCGAA AGUAGCCA | 12603 |
| 1198 | CUACUCAUU AAUUAUCA | 3194 | UGAUAAUU CUGAUGAGGCCGUUAGGCCGAA AUGAGUAG | 12604 |
| 1199 | UACUCAUUA AUUAUCAA | 3195 | UUGAUAAU CUGAUGAGGCCGUUAGGCCGAA AAUGAGUA | 12605 |
| 1202 | UCAUUAAUU AUCAAAGA | 3196 | UCUUUGAU CUGAUGAGGCCGUUAGGCCGAA AUUAAUGA | 12606 |
| 1203 | CAUUAAUUA UCAAAGAU | 3197 | AUCUUUGA CUGAUGAGGCCGUUAGGCCGAA AAUUAAUG | 12607 |
| 1205 | UUAAUUAUC AAAGAUGU | 3198 | ACAUCUUU CUGAUGAGGCCGUUAGGCCGAA AUAAUUAA | 12608 |
| 1237 | AGGGGACUA UACGAUCU | 3199 | AGAUCGUA CUGAUGAGGCCGUUAGGCCGAA AGUCCCCU | 12609 |
| 1239 | GGGACUAUA CGAUCUUG | 3200 | CAAGAUCG CUGAUGAGGCCGUUAGGCCGAA AUAGUCCC | 12610 |
| 1244 | UAUACGAUC UUGCUGGG | 3201 | CCCAGCAA CUGAUGAGGCCGUUAGGCCGAA AUCGUAUA | 12611 |
| 1246 | UACGAUCUU GCUGGGCA | 3202 | UGCCCAGC CUGAUGAGGCCGUUAGGCCGAA AGAUCGUA | 12612 |
| 1256 | CUGGGCAUA AAGCAGUC | 3203 | GACUGCUU CUGAUGAGGCCGUUAGGCCGAA AUGCCCAG | 12613 |
| 1264 | AAAGCAGUC AAGGCUAU | 3204 | AUAGCCUU CUGAUGAGGCCGUUAGGCCGAA ACUGCUUU | 12614 |
| 1271 | UCAAGGCUA UUUAAAAA | 3205 | UUUUUAAA CUGAUGAGGCCGUUAGGCCGAA AGCCUUGA | 12615 |
| 1273 | AAGGCUAUU UAAAAACC | 3206 | GGUUUUUA CUGAUGAGGCCGUUAGGCCGAA AUAGCCUU | 12616 |
| 1274 | AGGCUAUUU AAAAACCU | 3207 | AGGUUUUU CUGAUGAGGCCGUUAGGCCGAA AAUAGCCU | 12617 |
| 1275 | GGCUAUUUA AAAACCUC | 3208 | GAGGUUUU CUGAUGAGGCCGUUAGGCCGAA AAAUAGCC | 12618 |
| 1283 | AAAAACCUC ACUGCCAC | 237 | GUGGCAGU CUGAUGAGGCCGUUAGGCCGAA AGGUUUUU | 9656 |
| 1293 | CUGCCACUC UCAUUGUA | 3209 | UACAAUGA CUGAUGAGGCCGUUAGGCCGAA AGUGGCAG | 12619 |
| 1295 | GCCACUCUC AUUGUAAA | 3210 | UUUACAAU CUGAUGAGGCCGUUAGGCCGAA AGAGUGGC | 12620 |
| 1298 | ACUCUCAUU GUAAACGU | 3211 | ACGUUUAC CUGAUGAGGCCGUUAGGCCGAA AUGAGAGU | 12621 |
| 1301 | CUCAUUGUA AACGUGAA | 3212 | UUCACGUU CUGAUGAGGCCGUUAGGCCGAA ACAAUGAG | 12622 |
| 1314 | UGAAACCUC AGAUCUAC | 3213 | GUAGAUCU CUGAUGAGGCCGUUAGGCCGAA AGGUUUCA | 12623 |
| 1319 | CCUCAGAUC UACGAAAA | 3214 | UUUUCGUA CUGAUGAGGCCGUUAGGCCGAA AUCUGAGG | 12624 |
| 1321 | UCAGAUCUA CGAAAAGU | 3215 | ACUUUUCG CUGAUGAGGCCGUUAGGCCGAA AGAUCUGA | 12625 |
| 1330 | CGAAAAGUC CGUGUCCU | 3216 | AGGACACG CUGAUGAGGCCGUUAGGCCGAA ACUUUUCG | 12626 |
| 1336 | GUCCGUGUC CUCGCUUC | 3217 | GAAGCGAG CUGAUGAGGCCGUUAGGCCGAA ACACGGAC | 12627 |
| 1339 | CGUGUCCUC GCUUCCAA | 3218 | UUGGAAGC CUGAUGAGGCCGUUAGGCCGAA AGGACACG | 12628 |
| 1343 | UCCUCGCUU CCAAGCCC | 3219 | GGGCUUGG CUGAUGAGGCCGUUAGGCCGAA AGCGAGGA | 12629 |
| 1344 | CCUCGCUUC CAAGCCCA | 3220 | UGGGCUUG CUGAUGAGGCCGUUAGGCCGAA AAGCGAGG | 12630 |
| 1356 | GCCCACCUC UCUAUCCG | 3221 | CGGAUAGA CUGAUGAGGCCGUUAGGCCGAA AGGUGGGC | 12631 |
| 1358 | CCACCUCUC UAUCCGCU | 3222 | AGCGGAUA CUGAUGAGGCCGUUAGGCCGAA AGAGGUGG | 12632 |
| 1360 | ACCUCUCUA UCCGCUGG | 3223 | CCAGCGGA CUGAUGAGGCCGUUAGGCCGAA AGAGAGGU | 12633 |
| 1362 | CUCUCUAUC CGCUGGGC | 3224 | GCCCAGCG CUGAUGAGGCCGUUAGGCCGAA AUAGAGAG | 12634 |
| 1382 | AGACAAGUC CUCACUUG | 3225 | CAAGUGAG CUGAUGAGGCCGUUAGGCCGAA ACUUGUCU | 12635 |
| 1385 | CAAGUCCUC ACUUGCAC | 3226 | GUGCAAGU CUGAUGAGGCCGUUAGGCCGAA AGGACUUG | 12636 |
| 1389 | UCCUCACUU GCACCGUG | 3227 | CACGGUGC CUGAUGAGGCCGUUAGGCCGAA AGUGAGGA | 12637 |
| 1399 | CACCGUGUA UGGCAUCC | 3228 | GGAUGCCA CUGAUGAGGCCGUUAGGCCGAA ACACGGUG | 12638 |
| 1406 | UAUGGCAUC CCUCGGCC | 3229 | GGCCGAGG CUGAUGAGGCCGUUAGGCCGAA AUGCCAUA | 12639 |
| 1410 | GCAUCCCUC GGCCAACA | 3230 | UGUUGGCC CUGAUGAGGCCGUUAGGCCGAA AGGGAUGC | 12640 |
| 1421 | CCAACAAUC ACGUGGCU | 3231 | AGCCACGU CUGAUGAGGCCGUUAGGCCGAA AUUGUUGG | 12641 |
| 1430 | ACGUGGCUC UGGCACCC | 3232 | GGGUGCCA CUGAUGAGGCCGUUAGGCCGAA AGCCACGU | 12642 |
| 1443 | ACCCCUGUC ACCACAAU | 3233 | AUUGUGGU CUGAUGAGGCCGUUAGGCCGAA ACAGGGGU | 12643 |
| 1452 | ACCACAAUC ACUCCAAA | 3234 | UUUGGAGU CUGAUGAGGCCGUUAGGCCGAA AUUGUGGU | 12644 |
| 1456 | CAAUCACUC CAAAGAAA | 3235 | UUUCUUUG CUGAUGAGGCCGUUAGGCCGAA AGUGAUUG | 12645 |
| 1468 | AGAAAGGUA UGACUUCU | 3236 | AGAAGUCA CUGAUGAGGCCGUUAGGCCGAA ACCUUUCU | 12646 |
| 1474 | GUAUGACUU CUGCACUG | 3237 | CAGUGCAG CUGAUGAGGCCGUUAGGCCGAA AGUCAUAC | 12647 |
| 1475 | UAUGACUUC UGCACUGA | 3238 | UCAGUGCA CUGAUGAGGCCGUUAGGCCGAA AAGUCAUA | 12648 |
| 1495 | UGAAGAAUC CUUUAUCC | 3239 | GGAUAAAG CUGAUGAGGCCGUUAGGCCGAA AUUCUUCA | 12649 |
| 1498 | AGAAUCCUU UAUCCUGG | 3240 | CCAGGAUA CUGAUGAGGCCGUUAGGCCGAA AGGAUUCU | 12650 |
| 1499 | GAAUCCUUU AUCCUGGA | 3241 | UCCAGGAU CUGAUGAGGCCGUUAGGCCGAA AAGGAUUC | 12651 |
| 1500 | AAUCCUUUA UCCUGGAU | 3242 | AUCCAGGA CUGAUGAGGCCGUUAGGCCGAA AAAGGAUU | 12652 |
| 1502 | UCCUUUAUC CUGGAUCC | 3243 | GGAUCCAG CUGAUGAGGCCGUUAGGCCGAA AUAAAGGA | 12653 |
| 1509 | UCCUGGAUC CCAGCAGC | 3244 | GCUGCUGG CUGAUGAGGCCGUUAGGCCGAA AUCCAGGA | 12654 |
| 1522 | CAGCAACUU AGGAAACA | 3245 | UGUUUCCU CUGAUGAGGCCGUUAGGCCGAA AGUUGCUG | 12655 |
| 1523 | AGCAACUUA GGAAACAG | 3246 | CUGUUUCC CUGAUGAGGCCGUUAGGCCGAA AAGUUGCU | 12656 |
| 1535 | AACAGAAUU GAGAGCAU | 280 | AUGCUCUC CUGAUGAGGCCGUUAGGCCGAA AUUCUGUU | 9699 |
| 1544 | GAGAGCAUC UCUCAGCG | 3247 | CGCUGAGA CUGAUGAGGCCGUUAGGCCGAA AUGCUCUC | 12657 |
| 1546 | GAGCAUCUC UCAGCGCA | 3248 | UGCGCUGA CUGAUGAGGCCGUUAGGCCGAA AGAUGCUC | 12658 |
| 1548 | GCAUCUCUC AGCGCAUG | 3249 | CAUGCGCU CUGAUGAGGCCGUUAGGCCGAA AGAGAUGC | 12659 |
| 1562 | AUGACGGUC AUAGAAGG | 3250 | CCUUCUAU CUGAUGAGGCCGUUAGGCCGAA ACCGUCAU | 12660 |
| 1565 | ACGGUCAUA GAAGGAAC | 3251 | GUUCCUUC CUGAUGAGGCCGUUAGGCCGAA AUGACCGU | 12661 |
| 1578 | GAACAAAUA AGACGGUU | 3252 | AACCGUCU CUGAUGAGGCCGUUAGGCCGAA AUUUGUUC | 12662 |
| 1586 | AAGACGGUU AGCACAUU | 3253 | AAUGUGCU CUGAUGAGGCCGUUAGGCCGAA ACCGUCUU | 12663 |
| 1587 | AGACGGUUA GCACAUUG | 3254 | CAAUGUGC CUGAUGAGGCCGUUAGGCCGAA AACCGUCU | 12664 |
| 1594 | UAGCACAUU GGUGGUGG | 3255 | CCACCACC CUGAUGAGGCCGUUAGGCCGAA AUGUGCUA | 12665 |
| 1609 | GGCUGACUC UCAGACCC | 3256 | GGGUCUGA CUGAUGAGGCCGUUAGGCCGAA AGUCAGCC | 12666 |
| 1611 | CUGACUCUC AGACCCCU | 3257 | AGGGGUCU CUGAUGAGGCCGUUAGGCCGAA AGAGUCAG | 12667 |
| 1625 | CCUGGAAUC UACAGCUG | 3258 | CAGCUGUA CUGAUGAGGCCGUUAGGCCGAA AUUCCAGG | 12668 |
| 1627 | UGGAAUCUA CAGCUGCC | 3259 | GGCAGCUG CUGAUGAGGCCGUUAGGCCGAA AGAUUCCA | 12669 |
| 1642 | CCGGGCCUU CAAUAAAA | 3260 | UUUUAUUG CUGAUGAGGCCGUUAGGCCGAA AGGCCCGG | 12670 |
| 1643 | CGGGCCUUC AAUAAAAU | 3261 | AUUUUAUU CUGAUGAGGCCGUUAGGCCGAA AAGGCCCG | 12671 |
| 1647 | CCUUCAAUA AAAUAGGG | 3262 | CCCUAUUU CUGAUGAGGCCGUUAGGCCGAA AUUGAAGG | 12672 |
| 1652 | AAUAAAAUA GGGACUGU | 3263 | ACAGUCCC CUGAUGAGGCCGUUAGGCCGAA AUUUUAUU | 12673 |
| 1673 | AGAAACAUA AAAUUUUA | 3264 | UAAAAUUU CUGAUGAGGCCGUUAGGCCGAA AUGUUUCU | 12674 |
| 1678 | CAUAAAAUU UUAUGUCA | 3265 | UGACAUAA CUGAUGAGGCCGUUAGGCCGAA AUUUUAUG | 12675 |
| 1679 | AUAAAAUUU UAUGUCAC | 3266 | GUGACAUA CUGAUGAGGCCGUUAGGCCGAA AAUUUUAU | 12676 |
| 1680 | UAAAAUUUU AUGUCACA | 3267 | UGUGACAU CUGAUGAGGCCGUUAGGCCGAA AAAUUUUA | 12677 |
| 1681 | AAAAUUUUA UGUCACAG | 3268 | CUGUGACA CUGAUGAGGCCGUUAGGCCGAA AAAAUUUU | 12678 |
| 1685 | UUUUAUGUC ACAGAUGU | 3269 | ACAUCUGU CUGAUGAGGCCGUUAGGCCGAA ACAUAAAA | 12679 |
| 1705 | GAAUGGCUU UCACGUUU | 3270 | AAACGUGA CUGAUGAGGCCGUUAGGCCGAA AGCCAUUC | 12680 |
| 1706 | AAUGGCUUU CACGUUUC | 3271 | GAAACGUG CUGAUGAGGCCGUUAGGCCGAA AAGCCAUU | 12681 |
| 1707 | AUGGCUUUC ACGUUUCC | 3272 | GGAAACGU CUGAUGAGGCCGUUAGGCCGAA AAAGCCAU | 12682 |
| 1712 | UUUCACGUU UCCUUGGA | 3273 | UCCAAGGA CUGAUGAGGCCGUUAGGCCGAA ACGUGAAA | 12683 |
| 1713 | UUCACGUUU CCUUGGAA | 3274 | UUCCAAGG CUGAUGAGGCCGUUAGGCCGAA AACGUGAA | 12684 |
| 1714 | UCACGUUUC CUUGGAAA | 3275 | UUUCCAAG CUGAUGAGGCCGUUAGGCCGAA AAACGUGA | 12685 |
| 1717 | CGUUUCCUU GGAAAAGA | 3276 | UCUUUUCC CUGAUGAGGCCGUUAGGCCGAA AGGAAACG | 12686 |
| 1756 | GAAACUGUC CUGUGUGG | 3277 | CCACACAG CUGAUGAGGCCGUUAGGCCGAA ACAGUUUC | 12687 |
| 1766 | UGUGUGGUC AAUAAAUU | 3278 | AAUUUAUU CUGAUGAGGCCGUUAGGCCGAA ACCACACA | 12688 |
| 1770 | UGGUCAAUA AAUUCCUG | 3279 | CAGGAAUU CUGAUGAGGCCGUUAGGCCGAA AUUGACCA | 12689 |
| 1774 | CAAUAAAUU CCUGUACA | 3280 | UGUACAGG CUGAUGAGGCCGUUAGGCCGAA AUUUAUUG | 12690 |
| 1775 | AAUAAAUUC CUGUACAG | 3281 | CUGUACAG CUGAUGAGGCCGUUAGGCCGAA AAUUUAUU | 12691 |
| 1780 | AUUCCUGUA CAGAGACA | 3282 | UGUCUCUG CUGAUGAGGCCGUUAGGCCGAA ACAGGAAU | 12692 |
| 1790 | AGAGACAUG ACCUGGAU | 3283 | AUCCAGGU CUGAUGAGGCCGUUAGGCCGAA AUGUCUCU | 12693 |
| 1791 | GAGACAUUA CCUGGAUU | 3284 | AAUCCAGG CUGAUGAGGCCGUUAGGCCGAA AAUGUCUC | 12694 |
| 1799 | ACCUGGAUU CUGCUACG | 3285 | CGUAGCAG CUGAUGAGGCCGUUAGGCCGAA AUCCAGGU | 12695 |
| 1800 | CCUGGAUUC UGCUACGG | 3286 | CCGUAGCA CUGAUGAGGCCGUUAGGCCGAA AAUCCAGG | 12696 |
| 1805 | AUUCUGCUA CGGACAGU | 3287 | ACUGUCCG CUGAUGAGGCCGUUAGGCCGAA AGCAGAAU | 12697 |
| 1814 | CGGACAGUU AACAACAG | 3288 | CUGUUGUU CUGAUGAGGCCGUUAGGCCGAA ACUGUCCG | 12698 |
| 1815 | GGACAGUUA ACAACAGA | 3289 | UCUGUUGU CUGAUGAGGCCGUUAGGCCGAA AACUGUCC | 12699 |
| 1836 | UGCACCAUA GUAUCAGC | 3290 | GCUGAUAC CUGAUGAGGCCGUUAGGCCGAA AUGGUGCA | 12700 |
| 1839 | ACCAUAGUA UCAGCAAG | 3291 | CUUGCUGA CUGAUGAGGCCGUUAGGCCGAA ACUAUGGU | 12701 |
| 1841 | CAUAGUAUC AGCAAGCA | 3292 | UGCUUGCU CUGAUGAGGCCGUUAGGCCGAA AUACUAUG | 12702 |
| 1866 | CCACCACUC AAGAUUAC | 3293 | GUAAUCUU CUGAUGAGGCCGUUAGGCCGAA AGUGGUGG | 12703 |
| 1872 | CUCAAGAUU ACUCCAUC | 3294 | GAUGGAGU CUGAUGAGGCCGUUAGGCCGAA AUCUUGAG | 12704 |
| 1873 | UCAAGAUUA CUCCAUCA | 3295 | UGAUGGAG CUGAUGAGGCCGUUAGGCCGAA AAUCUUGA | 12705 |
| 1876 | AGAUUACUC CAUCACUC | 3296 | GAGUGAUG CUGAUGAGGCCGUUAGGCCGAA AGUAAUCU | 12706 |
| 1880 | UACUCCAUC ACUCUGAA | 3297 | UUCAGAGU CUGAUGAGGCCGUUAGGCCGAA AUGGAGUA | 12707 |
| 1884 | CCAUCACUC UGAACCUU | 3298 | AAGGUUCA CUGAUGAGGCCGUUAGGCCGAA AGUGAUGG | 12708 |
| 1892 | CUGAACCUU GUCAUCAA | 3299 | UUGAUGAC CUGAUGAGGCCGUUAGGCCGAA AGGUUCAG | 12709 |
| 1895 | AACCUUGUC AUCAAGAA | 3300 | UUCUUGAU CUGAUGAGGCCGUUAGGCCGAA ACAAGGUU | 12710 |
| 1898 | CUUGUCAUC AAGAACGU | 3301 | ACGUGCUU CUGAUGAGGCCGUUAGGCCGAA AUGACAAG | 12711 |
| 1909 | GAACGUGUC UCUAGAAG | 3302 | CUUCUAGA CUGAUGAGGCCGUUAGGCCGAA ACACGUUC | 12712 |
| 1911 | ACGUGUCUC UAGAAGAC | 3303 | GUCUUCUA CUGAUGAGGCCGUUAGGCCGAA AGACACGU | 12713 |
| 1913 | GUGUCUCUA GAAGACUC | 3304 | GAGUCUUC CUGAUGAGGCCGUUAGGCCGAA AGAGACAC | 12714 |
| 1921 | AGAAGACUC GGGCACCU | 3305 | AGGUGCCC CUGAUGAGGCCGUUAGGCCGAA AGUCUUCU | 12715 |
| 1930 | GGGCACCUA UGCGUGCA | 3306 | UGCACGCA CUGAUGAGGCCGUUAGGCCGAA AGGUGCCC | 12716 |
| 1952 | AGGAACAUA UACACAGG | 3307 | CCUGUGUA CUGAUGAGGCCGUUAGGCCGAA AUGUUCCU | 12717 |
| 1954 | GAACAUAUA CACAGGGG | 3308 | CCCCUGUG CUGAUGAGGCCGUUAGGCCGAA AUAUGUUC | 12718 |
| 1970 | GAAGACAUC CUUCGGAA | 3309 | UUCCGAAG CUGAUGAGGCCGUUAGGCCGAA AUGUCUUC | 12719 |
| 1973 | GACAUCCUU CGGAAGAC | 3310 | GUCUUCCG CUGAUGAGGCCGUUAGGCCGAA AGGAUGUC | 12720 |
| 1974 | ACAUCCUUC GGAAGACA | 3311 | UGUCUUCC CUGAUGAGGCCGUUAGGCCGAA AAGGAUGU | 12721 |
| 1988 | ACAGAAGUU CUCGUUAG | 3312 | CUAACGAG CUGAUGAGGCCGUUAGGCCGAA ACUUCUGU | 12722 |
| 1989 | CAGAAGUUC UCGUUAGA | 3313 | UCUAACGA CUGAUGAGGCCGUUAGGCCGAA AACUUCUG | 12723 |
| 1991 | GAAGUUCUC GUUAGAGA | 3314 | UCUCUAAC CUGAUGAGGCCGUUAGGCCGAA AGAACUUC | 12724 |
| 1994 | GUUCUCGUU AGAGAUUC | 3315 | GAAUCUCU CUGAUGAGGCCGUUAGGCCGAA ACGAGAAC | 12725 |
| 1995 | UUCUCGUUA GAGAUUCG | 3316 | CGAAUCUC CUGAUGAGGCCGUUAGGCCGAA AACGAGAA | 12726 |
| 2001 | UUAGAGAUU CGGAAGCG | 3317 | CGCUUCCG CUGAUGAGGCCGUUAGGCCGAA AUCUCUAA | 12727 |
| 2002 | UAGAGAUUC GGAAGCGC | 3318 | GCGCUUCC CUGAUGAGGCCGUUAGGCCGAA AAUCUCUA | 12728 |
| 2021 | CACCUGCUU CAAAACCU | 3319 | AGGUUUUG CUGAUGAGGCCGUUAGGCCGAA AGCAGGUG | 12729 |
| 2022 | ACCUGCUUC AAAACCUC | 3320 | GAGGUUUU CUGAUGAGGCCGUUAGGCCGAA AAGCAGGU | 12730 |
| 2030 | CAAAACCUC AGUGACUA | 3321 | UAGUCACU CUGAUGAGGCCGUUAGGCCGAA AGGUUUUG | 12731 |
| 2038 | CAGUGACUA CGAGGUCU | 3322 | AGACCUCG CUGAUGAGGCCGUUAGGCCGAA AGUCACUG | 12732 |
| 2045 | UACGAGGUC UCCAUCAG | 3323 | CUGAUGGA CUGAUGAGGCCGUUAGGCCGAA ACCUCGUA | 12733 |
| 2047 | CGAGGUCUC CAUCAGUG | 3324 | CACUGAUG CUGAUGAGGCCGUUAGGCCGAA AGACCUCG | 12734 |
| 2051 | GUCUCCAUC AGUGGCUC | 3325 | GAGCCACU CUGAUGAGGCCGUUAGGCCGAA AUGGAGAC | 12735 |
| 2059 | CAGUGGCUC UACGACCU | 3326 | AGGUCGUA CUGAUGAGGCCGUUAGGCCGAA AGCCACUG | 12736 |
| 2061 | GUGGCUCUA CGACCUUA | 3327 | UAAGGUCG CUGAUGAGGCCGUUAGGCCGAA AGAGCCAC | 12737 |
| 2068 | UACGACCUU AGACUGUC | 3328 | GACAGUCU CUGAUGAGGCCGUUAGGCCGAA AGGUCGUA | 12738 |
| 2069 | ACGACCUUA GACUGUCA | 3329 | UGACAGUC CUGAUGAGGCCGUUAGGCCGAA AAGGUCGU | 12739 |
| 2076 | UAGACUGUC AAGCUAGA | 3330 | UCUAGCUU CUGAUGAGGCCGUUAGGCCGAA ACAGUCUA | 12740 |
| 2082 | GUCAAGCUA GAGGUGUC | 3331 | GACACCUC CUGAUGAGGCCGUUAGGCCGAA AGCUUGAC | 12741 |
| 2090 | AGAGGUGUC CCCGCGCC | 3332 | GGCGCGGG CUGAUGAGGCCGUUAGGCCGAA ACACCUCU | 12742 |
| 2100 | CCGCGCCUC AGAUCACU | 3333 | AGUGAUCU CUGAUGAGGCCGUUAGGCCGAA AGGCGCGG | 12743 |
| 2105 | CCUCAGAUC ACUUGGUU | 378 | AACCAAGU CUGAUGAGGCCGUUAGGCCGAA AUCUGAGG | 9797 |
| 2109 | AGAUCACUU GGUUCAAA | 3334 | UUUGAACC CUGAUGAGGCCGUUAGGCCGAA AGUGAUCU | 12744 |
| 2113 | CACUUGGUU CAAAAACA | 3335 | UGUUUUUG CUGAUGAGGCCGUUAGGCCGAA ACCAAGUG | 12745 |
| 2114 | ACUUGGUUC AAAAACAA | 3336 | UUGUUUUU CUGAUGAGGCCGUUAGGCCGAA AACCAAGU | 9800 |
| 2132 | CACAAAAUA CAACAAGA | 383 | UCUUGUUG CUGAUGAGGCCGUUAGGCCGAA AUUUUGUG | 9802 |
| 2150 | CCGGGAAUU AUUUUAGG | 3337 | CCUAAAAU CUGAUGAGGCCGUUAGGCCGAA AUUCCCGG | 12746 |
| 2151 | CGGGAAUUA UUUUAGGA | 3338 | UCCUAAAA CUGAUGAGGCCGUUAGGCCGAA AAUUCCCG | 12747 |
| 2153 | GGAAUUAUU UUAGGACC | 386 | GGUCCUAA CUGAUGAGGCCGUUAGGCCGAA AUAAUUCC | 9805 |
| 2154 | GAAUUAUUU UAGGACCA | 387 | UGGUCCUA CUGAUGAGGCCGUUAGGCCGAA AAUAAUUC | 9806 |
| 2155 | AAUUAUUUU AGGACCAG | 388 | CUGGUCCU CUGAUGAGGCCGUUAGGCCGAA AAAUAAUU | 9807 |
| 2156 | AUUAUUUUA GGACCAGG | 389 | CCUGGUCC CUGAUGAGGCCGUUAGGCCGAA AAAAUAAU | 9808 |
| 2179 | CACGCUGUU UAUUGAAA | 390 | UUUCAAUA CUGAUGAGGCCGUUAGGCCGAA ACAGCGUG | 9809 |
| 2180 | ACGCUGUUU AUUGAAAG | 391 | CUUUCAAU CUGAUGAGGCCGUUAGGCCGAA AACAGCGU | 9810 |
| 2181 | CGCUGUUUA UUGAAAGA | 392 | UCUUUCAA CUGAUGAGGCCGUUAGGCCGAA AAACAGCG | 9811 |
| 2183 | CUGUUUAUU GAAAGAGU | 393 | ACUCUUUC CUGAUGAGGCCGUUAGGCCGAA AUAAACAG | 9812 |
| 2192 | GAAAGAGUC ACAGAGGA | 3339 | UCCUCUGU CUGAUGAGGCCGUUAGGCCGAA ACUCUUUC | 12748 |
| 2213 | GAGGGUGUC UAUAGGUG | 3340 | CACCUAUA CUGAUGAGGCCGUUAGGCCGAA ACACCCUC | 12749 |
| 2215 | GGGUGUCUA UAGGUGCC | 3341 | GGCACCUA CUGAUGAGGCCGUUAGGCCGAA AGACACCC | 12750 |
| 2217 | GUGUCUAUA GGUGCCGA | 3342 | UCGGCACC CUGAUGAGGCCGUUAGGCCGAA AUAGACAC | 12751 |
| 2263 | CGCAGCCUA CCUCACCG | 3343 | CGGUGAGG CUGAUGAGGCCGUUAGGCCGAA AGGCUGCG | 12752 |
| 2267 | GCCUACCUC ACCGUGCA | 3344 | UGCACGGU CUGAUGAGGCCGUUAGGCCGAA AGGUAGGC | 12753 |
| 2284 | AGGAACCUC AGACAAGU | 3345 | ACUUGUCU CUGAUGAGGCCGUUAGGCCGAA AGGUUCCU | 12754 |
| 2293 | AGACAAGUC AAACCUGG | 3346 | CCAGGUUU CUGAUGAGGCCGUUAGGCCGAA ACUUGUCU | 12755 |
| 2309 | GAGCUGAUC ACGCUCAC | 3347 | GUGAGCGU CUGAUGAGGCCGUUAGGCCGAA AUCAGCUC | 12756 |
| 2315 | AUCACGCUC ACGUGCAC | 3348 | GUGCACGU CUGAUGAGGCCGUUAGGCCGAA AGCGUGAU | 12757 |
| 2342 | GCGACCCUC UUUUGGCU | 3349 | AGCCAAAA CUGAUGAGGCCGUUAGGCCGAA AGGGUCGC | 12758 |
| 2344 | GACCCUCUU UUGGCUCC | 3350 | GGAGCCAA CUGAUGAGGCCGUUAGGCCGAA AGAGGGUC | 12759 |
| 2345 | ACCCUCUUU UGGCUCCU | 3351 | AGGAGCCA CUGAUGAGGCCGUUAGGCCGAA AAGAGGGU | 12760 |
| 2346 | CCCUCUUUU GGCUCCUU | 3352 | AAGGAGCC CUGAUGAGGCCGUUAGGCCGAA AAAGAGGG | 12761 |
| 2351 | UUUUGGCUC CUUCUAAC | 3353 | GUUAGAAG CUGAUGAGGCCGUUAGGCCGAA AGCCAAAA | 12762 |
| 2354 | UGGCUCCUU CUAACUCU | 3354 | AGAGUUAG CUGAUGAGGCCGUUAGGCCGAA AGGAGCCA | 12763 |
| 2355 | GGCUCCUUC UAACUCUC | 3355 | GAGAGUUA CUGAUGAGGCCGUUAGGCCGAA AAGGAGCC | 12764 |
| 2357 | CUCCUUCUA ACUCUCUU | 3356 | AAGAGAGU CUGAUGAGGCCGUUAGGCCGAA AGAAGGAG | 12765 |
| 2361 | UUCUAACUC UCUUCAUC | 3357 | GAUGAAGA CUGAUGAGGCCGUUAGGCCGAA AGUUAGAA | 12766 |
| 2363 | CUAACUCUC UUCAUCAG | 3358 | CUGAUGAA CUGAUGAGGCCGUUAGGCCGAA AGAGGUAG | 12767 |
| 2365 | AACUCUCUU CAUCAGAA | 3359 | UUCUGAUG CUGAUGAGGCCGUUAGGCCGAA AGAGAGUU | 12768 |
| 2366 | ACUCUCUUC AUCAGAAA | 3360 | UUUCUGAU CUGAUGAGGCCGUUAGGCCGAA AAGAGAGU | 12769 |
| 2369 | CUCUUCAUC AGAAAACU | 3361 | AGUUUUCU CUGAUGAGGCCGUUAGGCCGAA AUGAAGAG | 12770 |
| 2386 | GAAGCGGUC UUCUUCCG | 3362 | CGGAAGAA CUGAUGAGGCCGUUAGGCCGAA ACCGCUUC | 12771 |
| 2388 | AGCGGUCUU CUUCCGAA | 3363 | UUCGGAAG CUGAUGAGGCCGUUAGGCCGAA AGACCGCU | 12772 |
| 2389 | GCGGUCUUC UUCCGAAG | 3364 | CUUCGGAA CUGAUGAGGCCGUUAGGCCGAA AAGACCGC | 12773 |
| 2391 | GGUCUUCUU CCGAAGUA | 3365 | UACUUCGG CUGAUGAGGCCGUUAGGCCGAA AGAAGACC | 12774 |
| 2392 | GUCUUCUUC CGAAGUAA | 3366 | UUACUUCG CUGAUGAGGCCGUUAGGCCGAA AAGAAGAC | 12775 |
| 2399 | UCCGAAGUA AAGACAGA | 3367 | UCUGUCUU CUGAUGAGGCCGUUAGGCCGAA ACUUCGGA | 12776 |
| 2410 | GACAGACUA CCUGUCAA | 3368 | UUGACAGG CUGAUGAGGCCGUUAGGCCGAA AGUCUGUC | 12777 |
| 2416 | CUACCUGUC AAUCAUUA | 3369 | UAAUGAUU CUGAUGAGGCCGUUAGGCCGAA ACAGGUAG | 12778 |
| 2420 | CUGUCAAUC AUUAUGGA | 3370 | UCCAUAAU CUGAUGAGGCCGUUAGGCCGAA AUUGACAG | 12779 |
| 2423 | UCAAUCAUU AUGGACCC | 3371 | GGGUCCAU CUGAUGAGGCCGUUAGGCCGAA AUGAUUGA | 12780 |
| 2424 | CAAUCAUUA UGGACCCA | 3372 | UGGGUCCA CUGAUGAGGCCGUUAGGCCGAA AAUGAUUG | 12781 |
| 2441 | GAUGAAGUU CCCCUGGA | 3373 | UCCAGGGG CUGAUGAGGCCGUUAGGCCGAA ACUUCAUC | 12782 |
| 2442 | AUGAAGUUC CCCUGGAU | 3374 | AUCCAGGG CUGAUGAGGCCGUUAGGCCGAA AACUUCAU | 12783 |
| 2473 | GCUGCCCUA UGAUGCCA | 3375 | UGGCAUCA CUGAUGAGGCCGUUAGGCCGAA AGGGCAGC | 12784 |
| 2494 | GUGGGAGUU UGCACGGG | 3376 | CCCGUGCA CUGAUGAGGCCGUUAGGCCGAA ACUCCCAC | 12785 |
| 2495 | UGGGAGUUU GCACGGGA | 3377 | UCCCGUGC CUGAUGAGGCCGUUAGGCCGAA AACUCCCA | 12786 |
| 2916 | CUGAAACUA GGCAAAUC | 3378 | GAUUUGCC CUGAUGAGGCCGUUAGGCCGAA AGUUUCAG | 12787 |
| 2524 | AGGCAAAUC GCUCGGAA | 3379 | UUCCGAGC CUGAUGAGGCCGUUAGGCCGAA AUUUGCCU | 12788 |
| 2528 | AAAUCGCUC GGAAGAGG | 3380 | CCUCUUCC CUGAUGAGGCCGUUAGGCCGAA AGCGAUUU | 12789 |
| 2541 | GAGGGGCUU UUGGGAAA | 3381 | UUUCCCAA CUGAUGAGGCCGUUAGGCCGAA AGCCCCUC | 12790 |
| 2542 | AGGGGCUUU UGGGAAAG | 3382 | CUUUCCCA CUGAUGAGGCCGUUAGGCCGAA AAGCCCCU | 12791 |
| 2543 | GGGGCUUUU GGGAAAGU | 3383 | ACUUUCCC CUGAUGAGGCCGUUAGGCCGAA AAAGCCCC | 12792 |
| 2552 | GGGAAAGUC GUUCAAGC | 3384 | GCUUGAAC CUGAUGAGGCCGUUAGGCCGAA ACUUUCCC | 12793 |
| 2555 | AAAGUCGUU CAAGCCUC | 3385 | GAGGCUUG CUGAUGAGGCCGUUAGGCCGAA ACGACUUU | 12794 |
| 2556 | AAGUCGUUC AAGCCUCU | 3386 | AGAGGCUU CUGAUGAGGCCGUUAGGCCGAA AACGACUU | 12795 |
| 2563 | UCAAGCCUC UGCAUUUG | 3387 | CAAAUGCA CUGAUGAGGCCGUUAGGCCGAA AGGCUUGA | 12796 |
| 2569 | CUCUGCAUU UGGCAUUA | 3388 | UAAUGCCA CUGAUGAGGCCGUUAGGCCGAA AUGCAGAG | 12797 |
| 2570 | UCUGCAUUU GGCAUUAA | 3389 | UUAAUGCC CUGAUGAGGCCGUUAGGCCGAA AAUGCAGA | 12798 |
| 2576 | UUUGGCAUU AAGAAAUC | 457 | GAUUUCUU CUGAUGAGGCCGUUAGGCCGAA AUGCCAAA | 9876 |
| 2577 | UUGGCAUUA AGAAAUCA | 458 | UGAUUUCU CUGAUGAGGCCGUUAGGCCGAA AAUGCCAA | 9877 |
| 2584 | UAAGAAAUC ACCCACCU | 3390 | AGGUGGGU CUGAUGAGGCCGUUAGGCCGAA AUUUCUUA | 12799 |
| 2617 | GAAGAUGUU GAAAGAGG | 3391 | CCUCUUUC CUGAUGAGGCCGUUAGGCCGAA ACAUCUUC | 12800 |
| 2644 | CAGUGAGUA CAAAGCUC | 3392 | GAGCUUUG CUGAUGAGGCCGUUAGGCCGAA ACUCACUG | 12801 |
| 2652 | ACAAAGCUC UGAUGACC | 3393 | GGUCAUCA CUGAUGAGGCCGUUAGGCCGAA AGCUUUGU | 12802 |
| 2666 | ACCGAACUC AAGAUCUU | 3394 | AAGAUCUU CUGAUGAGGCCGUUAGGCCGAA AGUUCGGU | 12803 |
| 2672 | CUCAAGAUC UUGACCCA | 3395 | UGGGUCAA CUGAUGAGGCCGUUAGGCCGAA AUCUUGAG | 12804 |
| 2674 | CAAGAUCUU GACCCACA | 3396 | UGUGGGUC CUGAUGAGGCCGUUAGGCCGAA AGAUCUUG | 12805 |
| 2684 | ACCCACAUC GGCCAUCA | 3397 | UGAUGGCC CUGAUGAGGCCGUUAGGCCGAA AUGUGGGU | 12806 |
| 2691 | UCGGCCAUC AUCUGAAU | 3398 | AUUCAGAU CUGAUGAGGCCGUUAGGCCGAA AUGGCCGA | 12807 |
| 2694 | GCCAUCAUC UGAAUGUG | 3399 | CACAUUCA CUGAUGAGGCCGUUAGGCCGAA AUGAUGGC | 12808 |
| 2705 | AAUGUGGUU AACCUCCU | 3400 | AGGAGGUU CUGAUGAGGCCGUUAGGCCGAA ACCACAUU | 12809 |
| 2706 | AUGUGGUUA ACCUCCUG | 3401 | CAGGAGGU CUGAUGAGGCCGUUAGGCCGAA AACCACAU | 12810 |
| 2711 | GUUAACCUC CUGGGAGC | 3402 | GCUCCCAG CUGAUGAGGCCGUUAGGCCGAA AGGUUAAC | 12811 |
| 2742 | GAGGGCCUC UGAUGGUG | 470 | CACCAUCA CUGAUGAGGCCGUUAGGCCGAA AGGCCCUC | 9889 |
| 2753 | AUGGUGAUC GUGGAAUA | 3403 | UAUUCCAC CUGAUGAGGCCGUUAGGCCGAA AUCACCAU | 12812 |
| 2761 | CGUGGAAUA CUGCAAAU | 3404 | AUUUGCAG CUGAUGAGGCCGUUAGGCCGAA AUUCCACG | 12813 |
| 2770 | CUGCAAAUA CGGAAACC | 3405 | GGUUUCCG CUGAUGAGGCCGUUAGGCCGAA AUUUGCAG | 12814 |
| 2782 | AAACCUGUC CAACUACC | 3406 | GGUAGUUG CUGAUGAGGCCGUUAGGCCGAA ACAGGUUU | 12815 |
| 2788 | GUCCAACUA CCUCAAGA | 3407 | UCUUGAGG CUGAUGAGGCCGUUAGGCCGAA AGUUGGAC | 12816 |
| 2792 | AACUACCUC AAGAGCAA | 479 | UUGCUCUU CUGAUGAGGCCGUUAGGCCGAA AGGUAGUU | 9898 |
| 2809 | ACGUGACUU AUUCUGUC | 3408 | GACAGAAU CUGAUGAGGCCGUUAGGCCGAA AGUCACGU | 12817 |
| 2810 | CGUGACUUA UUCUGUCU | 3409 | AGACAGAA CUGAUGAGGCCGUUAGGCCGAA AAGUCACG | 12818 |
| 2812 | UGACUUAUU CUGUCUCA | 3410 | UGAGACAG CUGAUGAGGCCGUUAGGCCGAA AUAAGUCA | 12819 |
| 2813 | GACUUAUUC UGUCUCAA | 3411 | UUGAGACA CUGAUGAGGCCGUUAGGCCGAA AAUAAGUC | 12820 |
| 2817 | UAUUCUGUC UCAACAAG | 3412 | CUUGUUGA CUGAUGAGGCCGUUAGGCCGAA ACAGAAUA | 12821 |
| 2819 | UUCUGUCUC AACAAGGA | 3413 | UCCUUGUU CUGAUGAGGCCGUUAGGCCGAA AGACAGAA | 12822 |
| 2836 | CGCAGCCUU GCAUAUGG | 3414 | CCAUAUGC CUGAUGAGGCCGUUAGGCCGAA AGGCUGCG | 12823 |
| 2841 | CCUUGCAUA UGGAGCUC | 3415 | GAGCUCCA CUGAUGAGGCCGUUAGGCCGAA AUGCAAGG | 12824 |
| 2849 | AUGGAGCUC AAGAAAGA | 3416 | UCUUUCUU CUGAUGAGGCCGUUAGGCCGAA AGCUCCAU | 12825 |
| 2900 | CCCCGCCUA GACAGUGU | 3417 | ACACUGUC CUGAUGAGGCCGUUAGGCCGAA AGGCGGGG | 12826 |
| 2909 | GACAGUGUC AGCAGCUC | 3418 | GAGCUGCU CUGAUGAGGCCGUUAGGCCGAA ACACUGUC | 12827 |
| 2917 | CAGCAGCUC AAGUGUCA | 3419 | UGACACUU CUGAUGAGGCCGUUAGGCCGAA AGCUGCUG | 12828 |
| 2924 | UCAAGUGUC ACCAGCUC | 3420 | GAGCUGGU CUGAUGAGGCCGUUAGGCCGAA ACACUUGA | 12829 |
| 2932 | CACCAGCUC CAGCUUCC | 3421 | GGAAGCUG CUGAUGAGGCCGUUAGGCCGAA AGCUGGUG | 12830 |
| 2938 | CUCCAGCUU CCCUGAAG | 3422 | CUUCAGGG CUGAUGAGGCCGUUAGGCCGAA AGCUGGAG | 12831 |
| 2939 | UCCAGCUUC CCUGAAGA | 3423 | UCUUCAGG CUGAUGAGGCCGUUAGGCCGAA AAGCUGGA | 12832 |
| 2982 | ACGAGGAUU ACAGUGAG | 3424 | CUCACUGU CUGAUGAGGCCGUUAGGCCGAA AUCCUCGU | 12833 |
| 2983 | CGAGGAUUA CAGUGAGA | 3425 | UCUCACUG CUGAUGAGGCCGUUAGGCCGAA AAUCCUCG | 12834 |
| 2993 | AGUGAGAUC UCCAAGCA | 3428 | UGCUUGGA CUGAUGAGGCCGUUAGGCCGAA AUCUCACU | 12835 |
| 2995 | UGAGAUCUC CAAGCAGC | 3427 | GCUGCUUG CUGAUGAGGCCGUUAGGCCGAA AGAUCUCA | 12836 |
| 3008 | CAGCCCCUC ACCAUGGA | 3428 | UCCAUGGU CUGAUGAGGCCGUUAGGCCGAA AGGGGCUG | 12837 |
| 3026 | GACCUGAUU UCCUACAG | 3429 | CUGUAGGA CUGAUGAGGCCGUUAGGCCGAA AUCAGGUC | 12838 |
| 3027 | ACCUGAUUU CCUACAGU | 3430 | ACUGUAGG CUGAUGAGGCCGUUAGGCCGAA AAUCAGGU | 12839 |
| 3028 | CCUGAUUUC CUACAGUU | 3431 | AACUGUAG CUGAUGAGGCCGUUAGGCCGAA AAAUCAGG | 12840 |
| 3031 | GAUUUCCUA CAGUUUCC | 3432 | GGAAACUG CUGAUGAGGCCGUUAGGCCGAA AGGAAAUC | 12841 |
| 3036 | CCUACAGUU UCCAAGUG | 3433 | CACUUGGA CUGAUGAGGCCGUUAGGCCGAA ACUGUAGG | 12842 |
| 3037 | CUACAGUUU CCAAGUGG | 3434 | CCACUUGG CUGAUGAGGCCGUUAGGCCGAA AACUGUAG | 12843 |
| 3038 | UACAGUUUC CAAGUGGC | 3435 | GCCACUUG CUGAUGAGGCCGUUAGGCCGAA AAACUGUA | 9938 |
| 3061 | CAUGGAGUU UCUGUCCU | 3436 | AGGACAGA CUGAUGAGGCCGUUAGGCCGAA ACUCCAUG | 12844 |
| 3062 | AUGGAGUUU CUGUCCUC | 3437 | GAGGACAG CUGAUGAGGCCGUUAGGCCGAA AACUCCAU | 12845 |
| 3063 | UGGAGUUUC UGUCCUCC | 3438 | GGAGGACA CUGAUGAGGCCGUUAGGCCGAA AAACUCCA | 12846 |
| 3067 | GUUUCUGUC CUCCAGAA | 3439 | UUCUGGAG CUGAUGAGGCCGUUAGGCCGAA ACAGAAAC | 12847 |
| 3070 | UCUGUCCUC CAGAAAGU | 3440 | ACUUUCUG CUGAUGAGGCCGUUAGGCCGAA AGGACAGA | 12848 |
| 3083 | AAGUGCAUU CAUCGGGA | 526 | UCCCGAUG CUGAUGAGGCCGUUAGGCCGAA AUGCACUU | 9945 |
| 3084 | AGUGCAUUC AUCGGGAC | 527 | GUCCCGAU CUGAUGAGGCCGUUAGGCCGAA AAUGCACU | 9946 |
| 3087 | GCAUUCAUC GGGACCUG | 528 | CAGGUCCC CUGAUGAGGCCGUUAGGCCGAA AUGAAUGC | 9947 |
| 3110 | AGAAACAUC CUUUUAUC | 3441 | GAUAAAAG CUGAUGAGGCCGUUAGGCCGAA AUGUUUCU | 9948 |
| 3113 | AACAUCCUU UUAUCUGA | 3442 | UCAGAUAA CUGAUGAGGCCGUUAGGCCGAA AGGAUGUU | 12849 |
| 3114 | ACAUCCUUU UAUCUGAG | 3443 | CUCAGAUA CUGAUGAGGCCGUUAGGCCGAA AAGGAUGU | 12850 |
| 3115 | CAUCCUUUU AUCUGAGA | 3444 | UCUCAGAU CUGAUGAGGCCGUUAGGCCGAA AAAGGAUG | 12851 |
| 3116 | AUCCUUUUA UCUGAGAA | 3445 | UUCUCAGA CUGAUGAGGCCGUUAGGCCGAA AAAAGGAU | 12852 |
| 3118 | CCUUUUAUC UGAGAACA | 3446 | UGUUCUCA CUGAUGAGGCCGUUAGGCCGAA AUAAAAGG | 12853 |
| 3140 | GUGAAGAUU UGCGACUU | 3447 | AAGUCGCA CUGAUGAGGCCGUUAGGCCGAA AUCUUCAC | 12854 |
| 3141 | UGAAGAUUU GCGACUUU | 3448 | AAAGUCGC CUGAUGAGGCCGUUAGGCCGAA AAUCUUCA | 12855 |
| 3148 | UUGCGACUU UGGCCUGG | 3449 | CCAGGCCA CUGAUGAGGCCGUUAGGCCGAA AGUCGCAA | 12856 |
| 3149 | UGCGACUUU GGCCUGGC | 3450 | GCCAGGCC CUGAUGAGGCCGUUAGGCCGAA AAGUCGCA | 12857 |
| 3165 | CCCGGGAUA UUUAUAAG | 542 | CUUAUAAA CUGAUGAGGCCGUUAGGCCGAA AUCCCGGG | 9961 |
| 3167 | CGGGAUAUU UAUAAGAA | 543 | UUCUUAUA CUGAUGAGGCCGUUAGGCCGAA AUAUCCCG | 9962 |
| 3168 | GGGAUAUUU AUAAGAAC | 544 | GUUCUUAU CUGAUGAGGCCGUUAGGCCGAA AAUAUCCC | 9963 |
| 3169 | GGAUAUUUA UAAGAACC | 545 | GGUUCUUA CUGAUGAGGCCGUUAGGCCGAA AAAUAUCC | 9964 |
| 3171 | AUAUUUAUA AGAACCCU | 3451 | AGGGUUCU CUGAUGAGGCCGUUAGGCCGAA AUAAAUAU | 12858 |
| 3183 | ACCCUGAUU AUGUGAGG | 3452 | CCUCACAU CUGAUGAGGCCGUUAGGCCGAA AUCAGGGU | 12859 |
| 3184 | CCCUGAUUA UGUGAGGA | 3453 | UCCUCACA CUGAUGAGGCCGUUAGGCCGAA AAUCAGGG | 12860 |
| 3201 | GAGGAGAUA CUCGACUU | 3454 | AAGUCGAG CUGAUGAGGCCGUUAGGCCGAA AUCUCCUC | 12861 |
| 3204 | GAGAUACUC GACUUCCC | 3455 | GGGAAGUC CUGAUGAGGCCGUUAGGCCGAA AGUAUCUC | 12862 |
| 3209 | ACUCGACUU CCCCUAAA | 3456 | UUUAGGGG CUGAUGAGGCCGUUAGGCCGAA AGUCGAGU | 12863 |
| 3210 | CUCGACUUC CCCUAAAA | 3457 | UUUUAGGG CUGAUGAGGCCGUUAGGCCGAA AAGUCGAG | 12864 |
| 3215 | CUUCCCCUA AAAUGGAU | 3458 | AUCCAUUU CUGAUGAGGCCGUUAGGCCGAA AGGGGAAG | 12865 |
| 3228 | GGAUGGCUC CUGAAUCC | 3459 | GGAUUCAG CUGAUGAGGCCGUUAGGCCGAA AGCCAUCC | 12866 |
| 3235 | UCCUGAAUC CAUCUUUG | 3460 | CAAAGAUG CUGAUGAGGCCGUUAGGCCGAA AUUCAGGA | 12867 |
| 3239 | GAAUCCAUC UUUGACAA | 3461 | UUGUCAAA CUGAUGAGGCCGUUAGGCCGAA AUGGAUUC | 12868 |
| 3241 | AUCCAUCUU UGACAAGG | 3462 | CCUUGUCA CUGAUGAGGCCGUUAGGCCGAA AGAUGGAU | 12869 |
| 3242 | UCCAUCUUU GACAAGGU | 3463 | ACCUUGUC CUGAUGAGGCCGUUAGGCCGAA AAGAUGGA | 12870 |
| 3251 | GACAAGGUC UACAGCAC | 3464 | GUGCUGUA CUGAUGAGGCCGUUAGGCCGAA ACCUUGUC | 12871 |
| 3253 | CAAGGUCUA CAGCACCA | 3465 | UGGUGCUG CUGAUGAGGCCGUUAGGCCGAA AGACCUUG | 12872 |
| 3277 | UGUGUGGUC CUAUGGCG | 3466 | CGCCAUAG CUGAUGAGGCCGUUAGGCCGAA ACCACACA | 12873 |
| 3280 | GUGGUCCUA UGGCGUGU | 3467 | ACACGCCA CUGAUGAGGCCGUUAGGCCGAA AGGACCAC | 12874 |
| 3289 | UGGCGUGUU GCUGUGGG | 3468 | CCCACAGC CUGAUGAGGCCGUUAGGCCGAA ACACGCCA | 12875 |
| 3302 | UGGGAGAUC UUCUCCUU | 3469 | AAGGAGAA CUGAUGAGGCCGUUAGGCCGAA AUCUCCCA | 12876 |
| 3304 | GGAGAUCUU CUCCUUAG | 3470 | CUAAGGAG CUGAUGAGGCCGUUAGGCCGAA AGAUCUCC | 12877 |
| 3305 | GAGAUCUUC UCCUUAGG | 3471 | CCUAAGGA CUGAUGAGGCCGUUAGGCCGAA AAGAUCUC | 12878 |
| 3307 | GAUCUUCUC CUUAGGGG | 3472 | CCCCUAAG CUGAUGAGGCCGUUAGGCCGAA AGAAGAUC | 12879 |
| 3310 | CUUCUCCUU AGGGGGUU | 3473 | AACCCCCU CUGAUGAGGCCGUUAGGCCGAA AGGAGAAG | 12880 |
| 3311 | UUCUCCUUA GGGGGUUC | 3474 | GAACCCCC CUGAUGAGGCCGUUAGGCCGAA AAGGAGAA | 12881 |
| 3328 | UAGGGGGUU CUCCAUAC | 3475 | GUAUGGAG CUGAUGAGGCCGUUAGGCCGAA ACCCCCUA | 12882 |
| 3319 | AGGGGGUUC UCCAUACC | 3476 | GGUAUGGA CUGAUGAGGCCGUUAGGCCGAA AACCCCCU | 12883 |
| 3321 | GGGGUUCUC CAUACCCA | 3477 | UGGGUAUG CUGAUGAGGCCGUUAGGCCGAA AGAACCCC | 12884 |
| 3325 | UUCUCCAUA CCCAGGAG | 3478 | CUCCUGGG CUGAUGAGGCCGUUAGGCCGAA AUGGAGAA | 12885 |
| 3352 | UGAAGACUU CUGCAGCC | 3479 | GGCUGCAG CUGAUGAGGCCGUUAGGCCGAA AGUCUUCA | 12886 |
| 3353 | GAAGACUUC UGCAGCCG | 3480 | CGGCUGCA CUGAUGAGGCCGUUAGGCCGAA AAGUCUUC | 12887 |
| 3397 | CCCGGAGUA UGCCACAC | 3481 | GUGUGGCA CUGAUGAGGCCGUUAGGCCGAA ACUCCGGG | 12888 |
| 3413 | CCUGAAAUC UACCAAAU | 3482 | AUUUGGUA CUGAUGAGGCCGUUAGGCCGAA AUUUCAGG | 12889 |
| 3415 | UGAAAUCUA CCAAAUCA | 3483 | UGAUUUGG CUGAUGAGGCCGUUAGGCCGAA AGAUUUCA | 12890 |
| 3422 | UACCAAAUC AUGGUGGA | 3484 | UCCAACAU CUGAUGAGGCCGUUAGGCCGAA AUUUGGUA | 12891 |
| 3427 | AAUCAUGUU GGAUUGCU | 3485 | AGCAAUCC CUGAUGAGGCCGUUAGGCCGAA ACAUGAUU | 12892 |
| 3432 | UGUUGGAUU GCUGGCAC | 3486 | GUGCCAGC CUGAUGAGGCCGUUAGGCCGAA AUCCAACA | 12893 |
| 3466 | GCCCCGGUU UGCUGAAC | 3487 | GUUCAGCA CUGAUGAGGCCGUUAGGCCGAA ACCGGGGC | 12894 |
| 3467 | CCCCGGUUU GCUGAACU | 3488 | AGUUCAGC CUGAUGAGGCCGUUAGGCCGAA AACCGGGG | 12895 |
| 3476 | GCUGAACUU GUGGAGAA | 3489 | UUCUCCAC CUGAUGAGGCCGUUAGGCCGAA AGUUCAGC | 12896 |
| 3488 | GAGAAACUU GGUGACCU | 3490 | AGGUCACC CUGAUGAGGCCGUUAGGCCGAA AGUUUCUC | 12897 |
| 3500 | GACCUGCUU CAAGCCAA | 3491 | UUGGCUUG CUGAUGAGGCCGUUAGGCCGAA AGCAGGUC | 12898 |
| 3501 | ACCUGCUUC AAGCCAAC | 3492 | GUUGGCUU CUGAUGAGGCCGUUAGGCCGAA AAGCAGGU | 12899 |
| 3512 | GCCAACGUC CAACAGGA | 3493 | UCCUGUUG CUGAUGAGGCCGUUAGGCCGAA ACGUUGGC | 12900 |
| 3531 | GGAAAGAUU ACAUCCCC | 3494 | GGGGAUGU CUGAUGAGGCCGUUAGGCCGAA AUCUUUCC | 12901 |
| 3532 | GAAAGAUUA CAUCCCCC | 3495 | GGGGGAUG CUGAUGAGGCCGUUAGGCCGAA AAUCUUUC | 12902 |
| 3536 | GAUUACAUC CCCCUCAA | 3496 | UUGAGGGG CUGAUGAGGCCGUUAGGCCGAA AUGUAAUC | 12903 |
| 3542 | AUCCCCCUC AAUGCCAU | 3497 | AUGGCAUU CUGAUGAGGCCGUUAGGCCGAA AGGGGGAU | 12904 |
| 3551 | AAUGCCAUA CUGACUAG | 3498 | CUAGUCAG CUGAUGAGGCCGUUAGGCCGAA AUGGCAUU | 12905 |
| 3558 | UACUGACUA GAAACAGU | 3499 | ACUGUUUC CUGAUGAGGCCGUUAGGCCGAA AGUCAGUA | 12906 |
| 3567 | GAAACAGUA GCUUCACA | 3500 | UGUGAAGC CUGAUGAGGCCGUUAGGCCGAA ACUGUUUC | 12907 |
| 3571 | CAGUAGCUU CACAUACU | 3501 | AGUAUGUG CUGAUGAGGCCGUUAGGCCGAA AGCUACUG | 12908 |
| 3572 | AGUAGCUUC ACAUACUC | 3502 | GAGUAUGU CUGAUGAGGCCGUUAGGCCGAA AAGCUACU | 12909 |
| 3577 | CUUCACAUA CUCGACCC | 3503 | GGGUCGAG CUGAUGAGGCCGUUAGGCCGAA AUGUGAAG | 12910 |
| 3580 | CACAUACUC GACCCCCA | 3504 | UGGGGGUC CUGAUGAGGCCGUUAGGCCGAA AGUAUGUG | 12911 |
| 3592 | CCCCACCUU CUCUGAGG | 3505 | CCUCAGAG CUGAUGAGGCCGUUAGGCCGAA AGGUGGGG | 12912 |
| 3593 | CCCACCUUC UCUGAGGA | 3506 | UCCUCAGA CUGAUGAGGCCGUUAGGCCGAA AAGGUGGG | 12913 |
| 3595 | CACCUUCUC UGAGGACC | 3507 | GGUCCUCA CUGAUGAGGCCGUUAGGCCGAA AGAAGGUG | 12914 |
| 3605 | GAGGACCUU UUCAAGGA | 3508 | UCCUUGAA CUGAUGAGGCCGUUAGGCCGAA AGGUCCUC | 12915 |
| 3606 | AGGACCUUU UCAAGGAC | 3509 | GUCCUUGA CUGAUGAGGCCGUUAGGCCGAA AAGGUCCU | 12916 |
| 3607 | GGACCUUUU CAAGGACG | 3510 | CGUCCUUG CUGAUGAGGCCGUUAGGCCGAA AAAGGUCC | 12917 |
| 3608 | GACCUUUUC AAGGACGG | 3511 | CCGUCCUU CUGAUGAGGCCGUUAGGCCGAA AAAAGGUC | 12918 |
| 3619 | GGACGGCUU UGCAGAUC | 3512 | GAUCUCCA CUGAUGAGGCCGUUAGGCCGAA AGCCGUCC | 12919 |
| 3620 | GACGGCUUU GCAGAUCC | 3513 | GGAUCUGC CUGAUGAGGCCGUUAGGCCGAA AAGCCGUC | 12920 |
| 3627 | UUGCAGAUC CACAUUUU | 3514 | AAAAUGUG CUGAUGAGGCCGUUAGGCCGAA AUCUGCAA | 12921 |
| 3633 | AUCCACAUU UUCAUUCC | 3515 | GGAAUGAA CUGAUGAGGCCGUUAGGCCGAA AUGUGGAU | 12922 |
| 3634 | UCCACAUUU UCAUUCCG | 3516 | CGGAAUGA CUGAUGAGGCCGUUAGGCCGAA AAUGUGGA | 12923 |
| 3635 | CCACAUUUU CAUUCCGG | 3517 | CCGGAAUG CUGAUGAGGCCGUUAGGCCGAA AAAUGUGG | 12924 |
| 3636 | CACAUUUUC AUUCCGGA | 3518 | UCCGGAAU CUGAUGAGGCCGUUAGGCCGAA AAAAUGUG | 12925 |
| 3639 | AUUUUCAUU CCGGAAGC | 3519 | GCUUCCGG CUGAUGAGGCCGUUAGGCCGAA AUGAAAAU | 12926 |
| 3640 | UUUUCAUUC CGGAAGCU | 3520 | AGCUUCCG CUGAUGAGGCCGUUAGGCCGAA AAUGAAAA | 12927 |
| 3649 | CGGAAGCUC UGAUGAUG | 3521 | CAUCAUCA CUGAUGAGGCCGUUAGGCCGAA AGCUUCCG | 12928 |
| 3664 | UGUGAGAUA UGUAAACG | 3522 | CGUUUACA CUGAUGAGGCCGUUAGGCCGAA AUCUCACA | 12929 |
| 3668 | AGAUAUGUA AACGCUUU | 3523 | AAAGCGUU CUGAUGAGGCCGUUAGGCCGAA ACAUAUCU | 12930 |
| 3675 | UAAACGCUU UCAAAUUC | 3524 | GAAUUUGA CUGAUGAGGCCGUUAGGCCGAA AGCGUUUA | 12931 |
| 3676 | AAACGCUUU CAAAUUCA | 3525 | UGAAUUUG CUGAUGAGGCCGUUAGGCCGAA AAGCGUUU | 12932 |
| 3677 | AACGCUUUC AAAUUCAU | 3526 | AUGAAUUU CUGAUGAGGCCGUUAGGCCGAA AAAGCGUU | 12933 |
| 3682 | UUUCAAAUU CAUGAGCC | 3527 | GGCUCAUG CUGAUGAGGCCGUUAGGCCGAA AUUUGAAA | 12934 |
| 3683 | UUCAAAUUC AUGAGCCU | 3528 | AGGCUCAU CUGAUGAGGCCGUUAGGCCGAA AAUUUGAA | 12935 |
| 3701 | GAAAGAAUC AAAACCUU | 637 | AAGGUUUU CUGAUGAGGCCGUUAGGCCGAA AUUCUUUC | 10056 |
| 3709 | CAAAACCUU UGAGGAGC | 3529 | GCUCCUCA CUGAUGAGGCCGUUAGGCCGAA AGGUUUUG | 12936 |
| 3710 | AAAACCUUU GAGGAGCU | 3530 | AGCUCCUC CUGAUGAGGCCGUUAGGCCGAA AAGGUUUU | 12937 |
| 3719 | GAGGAGCUU UCACCGAA | 3531 | UUCGGUGA CUGAUGAGGCCGUUAGGCCGAA AGCUCCUC | 12938 |
| 3720 | AGGAGCUUU CACCGAAC | 3532 | GUUCGGUG CUGAUGAGGCCGUUAGGCCGAA AAGCUCCU | 12939 |
| 3721 | GGAGCUUUC ACCGAACU | 3533 | AGUUCGGU CUGAUGAGGCCGUUAGGCCGAA AAAGCUCC | 12940 |
| 3730 | ACCGAACUC CACCUCCA | 3534 | UGGAGGUG CUGAUGAGGCCGUUAGGCCGAA AGUUCGGU | 12941 |
| 3736 | CUCCACCUC CAUGUUUG | 3535 | CAAACAUG CUGAUGAGGCCGUUAGGCCGAA AGGUGGAG | 12942 |
| 3742 | CUCCAUGUU UGAGGACU | 3536 | AGUCCUCA CUGAUGAGGCCGUUAGGCCGAA ACAUGGAG | 12943 |
| 3743 | UCCAUGUUU GAGGACUA | 3537 | UAGUCCUC CUGAUGAGGCCGUUAGGCCGAA AACAUGGA | 12944 |
| 3751 | UGAGGACUA UCAGCUGG | 3538 | CCAGCUGA CUGAUGAGGCCGUUAGGCCGAA AGUCCUCA | 12945 |
| 3753 | AGGACUAUC AGCUGGAC | 3539 | GUCCAGCU CUGAUGAGGCCGUUAGGCCGAA AUAGUCCU | 12946 |
| 3765 | UGGACACUA GCACUCUG | 3540 | CAGAGUGC CUGAUGAGGCCGUUAGGCCGAA AGUGUCCA | 12947 |
| 3771 | CUAGCACUC UGCUGGGC | 3541 | GCCCAGCA CUGAUGAGGCCGUUAGGCCGAA AGUGCUAG | 12948 |
| 3781 | GCUGGGCUC CCCCUUGC | 3542 | GCAAGGGG CUGAUGAGGCCGUUAGGCCGAA AGCCCAGC | 12949 |
| 3787 | CUCCCCCUU GCUGAAGC | 3543 | GCUUCAGC CUGAUGAGGCCGUUAGGCCGAA AGGGGGAG | 12950 |
| 3799 | GAAGCGGUU CACCUGGA | 3544 | UCCAGGUG CUGAUGAGGCCGUUAGGCCGAA ACCGCUUC | 12951 |
| 3800 | AAGCGGUUC ACCUGGAC | 3545 | GUCCAGGU CUGAUGAGGCCGUUAGGCCGAA AACCGCUU | 12952 |
| 3829 | CAAGGCCUC CAUGAAGA | 3546 | UCUUCAUG CUGAUGAGGCCGUUAGGCCGAA AGGCCUUG | 12953 |
| 3839 | AUGAAGAUA GACUUGAG | 3547 | CUCAAGUC CUGAUGAGGCCGUUAGGCCGAA AUCUUCAU | 12954 |
| 3844 | GAUAGACUU GAGAAUAG | 3548 | CUAUUCUC CUGAUGAGGCCGUUAGGCCGAA AGUCUAUC | 12955 |
| 3851 | UUGAGAAUA GCGAGUAA | 3549 | UUACUCGC CUGAUGAGGCCGUUAGGCCGAA AUUCUCAA | 12956 |
| 3858 | UAGCGAGUA AAAGCAAG | 3550 | CUUGCUUU CUGAUGAGGCCGUUAGGCCGAA ACUCGCUA | 12957 |
| 3878 | GCGGGACUU UCCGAUCU | 3551 | AGAUCGGA CUGAUGAGGCCGUUAGGCCGAA AGUCCCGC | 12958 |
| 3879 | CGGGACUUU CCGAUCUG | 3552 | CAGAUCGG CUGAUGAGGCCGUUAGGCCGAA AAGUCCCG | 12959 |
| 3880 | GGGACUUUC CGAUCUGC | 3553 | GCAGAUCG CUGAUGAGGCCGUUAGGCCGAA AAAGUCCC | 12960 |
| 3885 | UUUCCGAUC UGCCGAGG | 3554 | CCUCGGCA CUGAUGAGGCCGUUAGGCCGAA AUCGGAAA | 12961 |
| 3901 | GCCCAGCUU CUGCUUCU | 3555 | AGAAGCAG CUGAUGAGGCCGUUAGGCCGAA AGCUGGGC | 12962 |
| 3902 | CCCAGCUUC UGCUUCUC | 3556 | GAGAAGCA CUGAUGAGGCCGUUAGGCCGAA AAGCUGGG | 12963 |
| 3907 | CUUCUGCUU CUCCAGCU | 3557 | AGCUGGAG CUGAUGAGGCCGUUAGGCCGAA AGCAGAAG | 12964 |
| 3908 | UUCUGCUUC UCCAGCUG | 3558 | CAGCUGGA CUGAUGAGGCCGUUAGGCCGAA AAGCAGAA | 12965 |
| 3910 | CUGCUUCUC CAGCUGUG | 3559 | CACAGCUG CUGAUGAGGCCGUUAGGCCGAA AGAAGCAG | 12966 |
| 3926 | GGCCACAUC AGGCCCGU | 3560 | ACGGGCCU CUGAUGAGGCCGUUAGGCCGAA AUGUGGCC | 12967 |
| 3949 | CGAUGAAUC UGAGCUGG | 3561 | CCAGCUCA CUGAUGAGGCCGUUAGGCCGAA AUUCAUCG | 12968 |
| 3967 | AAAGGAGUC CUGCUGUU | 3562 | AACAGCAG CUGAUGAGGCCGUUAGGCCGAA ACUCCUUU | 12969 |
| 3975 | CCUGCUGUU CUCCACCC | 3563 | GGGUGGAG CUGAUGAGGCCGUUAGGCCGAA ACAGCAGG | 12970 |
| 3976 | CUGCUGUUC UCCACCCC | 3564 | GGGGUGGA CUGAUGAGGCCGUUAGGCCGAA AACAGCAG | 12971 |
| 3978 | GCUGUUCUC CACCCCCA | 3565 | UGGGGGUG CUGAUGAGGCCGUUAGGCCGAA AGAACAGC | 12972 |
| 3991 | CCCAGACUA CAACUCCG | 3566 | CGGAGUUG CUGAUGAGGCCGUUAGGCCGAA AGUCUGGG | 12973 |
| 3997 | CUACAACUC CGUGGUGU | 3567 | ACACCACG CUGAUGAGGCCGUUAGGCCGAA AGUUGUAG | 12974 |
| 4006 | CGUGGUGUU GUACUCCU | 3568 | AGGAGUAC CUGAUGAGGCCGUUAGGCCGAA ACACCACG | 12975 |
| 4009 | GGUGUUGUA CUCCUCCC | 3569 | GGGAGGAG CUGAUGAGGCCGUUAGGCCGAA ACAACACC | 12976 |
| 4012 | GUUGUACUC CUCCCCGC | 3570 | GCGGGGAG CUGAUGAGGCCGUUAGGCCGAA AGUACAAC | 12977 |
| 4015 | GUACUCCUC CCCGCCCG | 3571 | CGGGCGGG CUGAUGAGGCCGUUAGGCCGAA AGGAGUAC | 12978 |
| 4027 | GCCCGCCUA AAGCUUCU | 3572 | AGAAGCUU CUGAUGAGGCCGUUAGGCCGAA AGGCGGGC | 12979 |
| 4033 | CUAAAGCUU CUCACCAG | 3573 | CUGGUGAG CUGAUGAGGCCGUUAGGCCGAA AGCUUUAG | 12980 |
| 4034 | UAAAGCUUC UCACCAGC | 3574 | GCUGGUGA CUGAUGAGGCCGUUAGGCCGAA AAGCUUUA | 12981 |
| 4036 | AAGCUUCUC ACCAGCCC | 3575 | GGGCUGGU CUGAUGAGGCCGUUAGGCCGAA AGAAGCUU | 12982 |
| 4066 | CUGACAGUA UUAUACAU | 3576 | AUGUAUAA CUGAUGAGGCCGUUAGGCCGAA ACUGUCAG | 12983 |
| 4068 | GACAGUAUU AUACAUCU | 3577 | AGAUGUAU CUGAUGAGGCCGUUAGGCCGAA AUACUGUC | 12984 |
| 4069 | ACAGUAUUA UACAUCUA | 3578 | UAGAUGUA CUGAUGAGGCCGUUAGGCCGAA AAUACUGU | 12985 |
| 4071 | AGUAUUAUA CAUCUAUG | 3579 | CAUAGAUG CUGAUGAGGCCGUUAGGCCGAA AUAAUACU | 12986 |
| 4075 | UUAUACAUC UAUGAGUU | 3580 | AACUCAUA CUGAUGAGGCCGUUAGGCCGAA AUGUAUAA | 12987 |
| 4077 | AUACAUCUA UGAGUUUA | 3581 | UAAACUCA CUGAUGAGGCCGUUAGGCCGAA AGAUGUAU | 12988 |
| 4083 | CUAUGAGUU UACACCUA | 3582 | UAGGUGUA CUGAUGAGGCCGUUAGGCCGAA ACUCAUAG | 12989 |
| 4084 | UAUGAGUUU ACACCUAU | 3583 | AUAGGUGU CUGAUGAGGCCGUUAGGCCGAA AACUCAUA | 12990 |
| 4085 | AUGAGUUUA CACCUAUU | 3584 | AAUAGGUG CUGAUGAGGCCGUUAGGCCGAA AAACUCAU | 12991 |
| 4091 | UUACACCUA UUCCGCUC | 3585 | GAGCGGAA CUGAUGAGGCCGUUAGGCCGAA AGGUGUAA | 12992 |
| 4093 | ACACCUAUU CCGCUCCA | 3586 | UGGAGCGG CUGAUGAGGCCGUUAGGCCGAA AUAGGUGU | 12993 |
| 4094 | CACCUAUUC CGCUCCAC | 3587 | GUGGAGCG CUGAUGAGGCCGUUAGGCCGAA AAUAGGUG | 12994 |
| 4099 | AUUCCGCUC CACAGGAG | 3588 | CUCCUGUG CUGAUGAGGCCGUUAGGCCGAA AGCGGAAU | 12995 |
| 4117 | CAGCUGCUU UUCGUGAC | 3589 | GUCACGAA CUGAUGAGGCCGUUAGGCCGAA AGCAGCUG | 12996 |
| 4118 | AGCUGCUUU UCGUGACC | 3590 | GGUCACGA CUGAUGAGGCCGUUAGGCCGAA AAGCAGCU | 12997 |
| 4119 | GCUGCUUUU CGUGACCU | 3591 | AGGUCACG CUGAUGAGGCCGUUAGGCCGAA AAAGCAGC | 12998 |
| 4120 | CUGCUUUUC GUGACCUU | 3592 | AAGGUCAC CUGAUGAGGCCGUUAGGCCGAA AAAAGCAG | 12999 |
| 4128 | CGUGACCUU UAAUCGUG | 3593 | CACGAUUA CUGAUGAGGCCGUUAGGCCGAA AGGUCACG | 13000 |
| 4129 | GUGACCUUU AAUCGUGC | 3594 | GCACGAUU CUGAUGAGGCCGUUAGGCCGAA AAGGUCAC | 13001 |
| 4130 | UGACCUUUA AUCGUGCU | 3595 | AGCACGAU CUGAUGAGGCCGUUAGGCCGAA AAAGGUCA | 13002 |
| 4133 | CCUUUAAUC GUGCUUUU | 3596 | AAAAGCAC CUGAUGAGGCCGUUAGGCCGAA AUUAAAGG | 13003 |
| 4139 | AUCGUGCUU UUUEGUUU | 3597 | AAACAAAA CUGAUGAGGCCGUUAGGCCGAA AGCACGAU | 13004 |
| 4140 | UCGUGCUUU UUUGUUUU | 3598 | AAAACAAA CUGAUGAGGCCGUUAGGCCGAA AAGCACGA | 13005 |
| 4141 | CGUGCUUUU UUGUUUUU | 3599 | AAAAACAA CUGAUGAGGCCGUUAGGCCGAA AAAGCACG | 13006 |
| 4142 | GUGCUUUUU UGUUUUUU | 3600 | AAAAAACA CUGAUGAGGCCGUUAGGCCGAA AAAAGCAC | 13007 |
| 4143 | UGCUUUUUU GUUUUUUG | 3601 | CAAAAAAC CUGAUGAGGCCGUUAGGCCGAA AAAAAGCA | 13008 |
| 4146 | UUUUUUGUU UUUUGUUU | 3602 | AAACAAAA CUGAUGAGGCCGUUAGGCCGAA ACAAAAAA | 13009 |
| 4147 | UUUUUGUUU UUUGUUJU | 3603 | AAAACAAA CUGAUGAGGCCGUUAGGCCGAA AACAAAAA | 13010 |
| 4148 | UUUUGUUUU UUGUUUUG | 3604 | CAAAACAA CUGAUGAGGCCGUUAGGCCGAA AAACAAAA | 13011 |
| 4149 | UUUGUUUUU UGUUUUGU | 3605 | ACAAAACA CUGAUGAGGCCGUUAGGCCGAA AAAACAAA | 13012 |
| 4150 | UUGUUUUUU GUUUUGUU | 3606 | AACAAAAC CUGAUGAGGCCGUUAGGCCGAA AAAAACAA | 13013 |
| 4153 | UUUUUUGUU UUGUUUGU | 3607 | ACAAACAA CUGAUGAGGCCGUUAGGCCGAA ACAAAAAA | 13014 |
| 4154 | UUUUUGUUU UGUUUGUU | 3608 | AACAAACA CUGAUGAGGCCGUUAGGCCGAA AACAAAAA | 13015 |
| 4255 | UUUUGUUUU GUUUGUUG | 3609 | CAACAAAC CUGAUGAGGCCGUUAGGCCGAA AAACAAAA | 13016 |
| 4258 | UGUUUUGUU UGUUGUUG | 3610 | CAACAACA CUGAUGAGGCCGUUAGGCCGAA ACAAAACA | 13017 |
| 4259 | GUUUUGUUU GUUGUUGC | 3611 | GCAACAAC CUGAUGAGGCCGUUAGGCCGAA AACAAAAC | 13018 |
| 4162 | UUGUUUGUU GUUGCUGU | 3612 | ACAGCAAC CUGAUGAGGCCGUUAGGCCGAA ACAAACAA | 13019 |
| 4165 | UUUGUUGUU GCUGUUUU | 3613 | AAAACAGC CUGAUGAGGCCGUUAGGCCGAA ACAACAAA | 13020 |
| 4171 | GUUGCUGUU UUGACUAA | 3614 | UUAGUCAA CUGAUGAGGCCGUUAGGCCGAA ACAGCAAC | 13021 |
| 4172 | UUGCUGUUU UGACUAAC | 3615 | GUUAGUCA CUGAUGAGGCCGUUAGGCCGAA AACAGCAA | 13022 |
| 4173 | UGCUGUUUU GACUAACA | 3616 | UGUUAGUC CUGAUGAGGCCGUUAGGCCGAA AAACAGCA | 13023 |
| 4178 | UUUUGACUA ACAAGAAU | 737 | AUUCUUGU CUGAUGAGGCCGUUAGGCCGAA AGUCAAAA | 10156 |
| 4189 | AAGAAUGUA ACCCCAGU | 3617 | ACUGGGGU CUGAUGAGGCCGUUAGGCCGAA ACAUUCUU | 13024 |
| 4198 | ACCCCAGUU AGUGACGU | 3618 | ACGUCACU CUGAUGAGGCCGUUAGGCCGAA ACUGGGGU | 13025 |
| 4199 | CCCCAGUUA GUGACGUG | 3619 | CACGUCAC CUGAUGAGGCCGUUAGGCCGAA AACUGGGG | 13026 |
| 4216 | UGAAGAAUA CUAUUGUU | 3620 | AACAAUAG CUGAUGAGGCCGUUAGGCCGAA AUUCUUCA | 13027 |
| 4219 | AGAAUACUA UUGUUAGA | 3621 | UCUAACAA CUGAUGAGGCCGUUAGGCCGAA AGUAUUCU | 13028 |
| 4221 | AAUACUAUU GUUAGAGA | 3622 | UCUCUAAC CUGAUGAGGCCGUUAGGCCGAA AUAGUAUU | 13029 |
| 4224 | ACUAUUGUU AGAGAAAU | 3623 | AUUUCUCU CUGAUGAGGCCGUUAGGCCGAA ACAAUAGU | 13030 |
| 4225 | CUAUUGUUA GAGAAAUC | 3624 | GAUUUCUC CUGAUGAGGCCGUUAGGCCGAA AACAAUAG | 13031 |
| 4233 | AGAGAAAUC CCCCCCGC | 3625 | GCGGGGGG CUGAUGAGGCCGUUAGGCCGAA AUUUCUCU | 13032 |
| 4249 | CAAAGCCUC AGGGUAAC | 3626 | GUUACCCU CUGAUGAGGCCGUUAGGCCGAA AGGCUUUG | 13033 |
| 4255 | CUCAGGGUA ACCUGGAC | 3627 | GUCCAGGU CUGAUGAGGCCGUUAGGCCGAA ACCCUGAG | 13034 |
| 4282 | AGGUGCCUC UGGCGACC | 3628 | GGUCGCCA CUGAUGAGGCCGUUAGGCCGAA AGGCACCU | 13035 |
| 4323 | CCCACCCUC CCUGCAGC | 3629 | GCUGCAGG CUGAUGAGGCCGUUAGGCCGAA AGGGUGGG | 13036 |
| 4341 | GUGGGACUA GAGGCAGU | 3630 | ACUGCCUC CUGAUGAGGCCGUUAGGCCGAA AGUCCCAC | 13037 |
| 4350 | GAGGCAGUA AGCCCAUU | 3631 | AAUGGGCU CUGAUGAGGCCGUUAGGCCGAA ACUGCCUC | 13038 |
| 4358 | AAGCCCAUU AGCUCAUG | 3632 | CAUGAGCU CUGAUGAGGCCGUUAGGCCGAA AUGGGCUU | 13039 |
| 4359 | AGCCCAUUA GCUCAUGG | 3633 | CCAUGAGC CUGAUGAGGCCGUUAGGCCGAA AAUGGGCU | 13040 |
| 4363 | CAUUAGCUC AUGGCUGC | 3634 | GCAGCCAU CUGAUGAGGCCGUUAGGCCGAA AGCUAAUG | 13041 |
| 4387 | GACCUGCUC UGUCUCUC | 3635 | GAGAGACA CUGAUGAGGCCGUUAGGCCGAA AGCAGGUC | 13042 |
| 4391 | UGCUCUGUC UCUCUUAU | 3636 | AUAAGAGA CUGAUGAGGCCGUUAGGCCGAA ACAGAGCA | 13043 |
| 4393 | CUCUGUCUC UCUUAUGG | 3637 | CCAUAAGA CUGAUGAGGCCGUUAGGCCGAA AGACAGAG | 13044 |
| 4395 | CUGUCUCUC UUAUGGAG | 3638 | CUCCAUAA CUGAUGAGGCCGUUAGGCCGAA AGAGACAG | 13045 |
| 4397 | GUCUCUCUU AUGGAGGA | 3639 | UCCUCCAU CUGAUGAGGCCGUUAGGCCGAA AGAGAGAC | 13046 |
| 4398 | UCUCUCUUA UGGAGGAA | 3640 | UUCCUCCA CUGAUGAGGCCGUUAGGCCGAA AAGAGAGA | 13047 |
| 4445 | AAAAGGCUU UGGGAUGC | 3641 | GCAUCCCA CUGAUGAGGCCGUUAGGCCGAA AGCCUUUU | 13048 |
| 4446 | AAAGGCUUU GGGAUGCG | 3642 | CGCAUCCC CUGAUGAGGCCGUUAGGCCGAA AAGCCUUU | 13049 |
| 4456 | GGAUGCGUC CGUCCUGU | 3643 | ACAGGACG CUGAUGAGGCCGUUAGGCCGAA ACGCAUCC | 13050 |
| 4460 | GCGUCCGUC CUGUGGAG | 3644 | CUCCACAG CUGAUGAGGCCGUUAGGCCGAA ACGGACGC | 13051 |
| 4487 | AGGGGGCUC CGCUAUGC | 3645 | GCAUAGCG CUGAUGAGGCCGUUAGGCCGAA AGCCCCCU | 13052 |
| 4492 | GCUCCGCUA UGCCACUU | 3646 | AAGUGGCA CUGAUGAGGCCGUUAGGCCGAA AGCGGAGC | 13053 |
| 4500 | AUGCCACUU CAGUGACU | 3647 | AGUCACUG CUGAUGAGGCCGUUAGGCCGAA AGUGGCAU | 13054 |
| 4501 | UGCCACUUC AGUGACUU | 3648 | AAGUCACU CUGAUGAGGCCGUUAGGCCGAA AAGUGGCA | 13055 |
| 4509 | CAGUGACUU CUCACUCC | 3649 | GGAGUGAG CUGAUGAGGCCGUUAGGCCGAA AGUCACUG | 13056 |
| 4510 | AGUGACUUC UCACUCCU | 3650 | AGGAGUGA CUGAUGAGGCCGUUAGGCCGAA AAGUCACU | 13057 |
| 4512 | UGACUUCUC ACUCCUGG | 3651 | CCAGGAGU CUGAUGAGGCCGUUAGGCCGAA AGAAGUCA | 13058 |
| 4516 | UUCUCACUC CUGGCCUC | 3652 | GAGGCCAG CUGAUGAGGCCGUUAGGCCGAA AGUGAGAA | 13059 |
| 4524 | CCUGGCCUC CGCUGUUU | 3653 | AAACAGCG CUGAUGAGGCCGUUAGGCCGAA AGGCCAGG | 13060 |
| 4531 | UCCGCUGUU UCGGGCCC | 3654 | GGGCCCGA CUGAUGAGGCCGUUAGGCCGAA ACAGCGGA | 13061 |
| 4532 | CCGCUGUUU CGGGCCCC | 3655 | GGGGCCCG CUGAUGAGGCCGUUAGGCCGAA AACAGCGG | 13062 |
| 4533 | CGCUGUUUC GGGCCCCC | 3656 | GGGGGCCC CUGAUGAGGCCGUUAGGCCGAA AAACAGCG | 13063 |
| 4543 | GGCCCCCUU CCAAGAGG | 3657 | CCUCUUGG CUGAUGAGGCCGUUAGGCCGAA AGGGGGCC | 13064 |
| 4544 | GCCCCCUUC CAAGAGGU | 3658 | ACCUCUUG CUGAUGAGGCCGUUAGGCCGAA AAGGGGGC | 13065 |
| 4553 | CAAGAGGUA UCAGAGCA | 3659 | UGCUCUGA CUGAUGAGGCCGUUAGGCCGAA ACCUCUUG | 13066 |
| 4555 | AGAGGUAUC AGAGCAGA | 3660 | UCUGCUCU CUGAUGAGGCCGUUAGGCCGAA AUACCUCU | 13067 |
| 4577 | AGGGACGUU UCCUAGAC | 3661 | GUCUAGGA CUGAUGAGGCCGUUAGGCCGAA ACGUCCCU | 13068 |
| 4578 | GGGACGUUU CCUAGACC | 3662 | GGUCUAGG CUGAUGAGGCCGUUAGGCCGAA AACGUCCC | 13069 |
| 4579 | GGACGUUUC CUAGACCA | 3663 | UGGUCUAG CUGAUGAGGCCGUUAGGCCGAA AAACGUCC | 13070 |
| 4582 | CGUUUCCUA GACCAGGG | 3664 | CCCUGGUC CUGAUGAGGCCGUUAGGCCGAA AGGAAACG | 13071 |
| 4598 | GCACAUGUU CUCGGGAA | 3665 | UUCCCGAG CUGAUGAGGCCGUUAGGCCGAA ACAUGUGC | 13072 |
| 4599 | CACAUGUUC UCGGGAAC | 3666 | GUUCCCGA CUGAUGAGGCCGUUAGGCCGAA AACAUGUG | 13073 |
| 4601 | CAUGUUCUC GGGAACCA | 3667 | UGGUUCCC CUGAUGAGGCCGUUAGGCCGAA AGAACAUG | 13074 |
| 4614 | ACCACAGUU AAUCUUAA | 3668 | UUAAGAUU CUGAUGAGGCCGUUAGGCCGAA ACUGUGGU | 13075 |
| 4615 | CCACAGUUA AUCUUAAA | 3669 | UUUAAGAU CUGAUGAGGCCGUUAGGCCGAA AACUGUGG | 13076 |
| 4618 | CAGUUAAUC UUAAAUCU | 3670 | AGAUUUAA CUGAUGAGGCCGUUAGGCCGAA AUUAACUG | 13077 |
| 4620 | GUUAAUCUU AAAUCUUU | 3671 | AAAGAUUU CUGAUGAGGCCGUUAGGCCGAA AGAUUAAC | 13078 |
| 4621 | UUAAUCUUA AAUCUUUU | 3672 | AAAAGAUU CUGAUGAGGCCGUUAGGCCGAA AAGAUUAA | 13079 |
| 4625 | UCUUAAAUC UUUUCCCG | 3673 | CGGGAAAA CUGAUGAGGCCGUUAGGCCGAA AUUUAAGA | 13080 |
| 4627 | UUAAAUCUU UUCCCGGG | 3674 | CCCGGGAA CUGAUGAGGCCGUUAGGCCGAA AGAUUUAA | 13081 |
| 4628 | UAAAUCUUU UCCCGGGA | 3675 | UCCCGGGA CUGAUGAGGCCGUUAGGCCGAA AAGAUUUA | 13082 |
| 4629 | AAAUCUUUU CCCGGGAG | 3676 | CUCCCGGG CUGAUGAGGCCGUUAGGCCGAA AAAGAUUU | 13083 |
| 4630 | AAUCUUUUC CCGGGAGU | 3677 | ACUCCCGG CUGAUGAGGCCGUUAGGCCGAA AAAAGAUU | 13084 |
| 4639 | CCGGGAGUC UUCUGUUG | 3678 | CAACAGAA CUGAUGAGGCCGUUAGGCCGAA ACUCCCGG | 13085 |
| 4641 | GGGAGUCUU CUGUUGUC | 3679 | GACAACAG CUGAUGAGGCCGUUAGGCCGAA AGACUCCC | 13086 |
| 4642 | GGAGUCUUC UGUUGUCU | 3680 | AGACAACA CUGAUGAGGCCGUUAGGCCGAA AAGACUCC | 13087 |
| 4646 | UCUUCUGUU GUCUGUUU | 3681 | AAACAGAC CUGAUGAGGCCGUUAGGCCGAA ACAGAAGA | 13088 |
| 4649 | UCUGUUGUC UGUUUACC | 3682 | GGUAAACA CUGAUGAGGCCGUUAGGCCGAA ACAACAGA | 13089 |
| 4653 | UUGUCUGUU UACCAUCC | 3683 | GGAUGGUA CUGAUGAGGCCGUUAGGCCGAA ACAGACAA | 13090 |
| 4654 | UGUCUGUUU ACCAUCCA | 3684 | UGGAUGGU CUGAUGAGGCCGUUAGGCCGAA AACAGACA | 13092 |
| 4655 | GUCUGUUUA CCAUCCAA | 3685 | UUGGAUGG CUGAUGAGGCCGUUAGGCCGAA AAACAGAC | 13092 |
| 4660 | UUUACCAUC CAAAGCAU | 3686 | AUGCUUUG CUGAUGAGGCCGUUAGGCCGAA AUGGUAAA | 13093 |
| 4669 | CAAAGCAUA UUUAACAU | 3687 | AUGUUAAA CUGAUGAGGCCGUUAGGCCGAA AUGCUUUG | 13094 |
| 4671 | AAGCAUAUU UAACAUGU | 3688 | ACAUGUUA CUGAUGAGGCCGUUAGGCCGAA AUAUGCUU | 13095 |
| 4672 | AGCAUAUUU AACAUGUG | 3689 | CACAUGUU CUGAUGAGGCCGUUAGGCCGAA AAUAUGCU | 13096 |
| 4673 | GCAUAUUUA ACAUGUGU | 3690 | ACACAUGU CUGAUGAGGCCGUUAGGCCGAA AAAUAUGC | 13097 |
| 4682 | ACAUGUGUC AGUGGGGG | 3691 | CCCCCACU CUGAUGAGGCCGUUAGGCCGAA ACACAUGU | 13098 |
| 4698 | GUGGCGCUU GGCUUCUG | 3692 | CAGAAGCC CUGAUGAGGCCGUUAGGCCGAA AGCGCCAC | 13099 |
| 4703 | GCUUGGCUU CUGAGGCC | 3693 | GGCCUCAG CUGAUGAGGCCGUUAGGCCGAA AGCCAAGC | 13100 |
| 4704 | CUUGGCUUC UGAGGCCA | 3694 | UGGCCUCA CUGAUGAGGCCGUUAGGCCGAA AAGCCAAG | 13101 |
| 4720 | AGAGCCAUC AUCAGUUC | 3695 | GAACUGAU CUGAUGAGGCCGUUAGGCCGAA AUGGCUCU | 13102 |
| 4723 | GCCAUCAUC AGUUCCUC | 3696 | GAGGAACU CUGAUGAGGCCGUUAGGCCGAA AUGAUGGC | 13103 |
| 4727 | UCAUCAGUU CCUCUAGU | 3697 | ACUAGAGG CUGAUGAGGCCGUUAGGCCGAA ACUGAUGA | 13104 |
| 4728 | CAUCAGUUC CUCUAGUG | 3698 | CACUAGAG CUGAUGAGGCCGUUAGGCCGAA AACUGAUG | 13105 |
| 4731 | CAGUUCCUC UAGUGAGA | 3699 | UCUCACUA CUGAUGAGGCCGUUAGGCCGAA AGGAACUG | 13106 |
| 4733 | GUUCCUCUA GUGAGAUG | 3700 | CAUCUCAC CUGAUGAGGCCGUUAGGCCGAA AGAGGAAC | 13107 |
| 4745 | AGAUGCAUU GAGGUCAU | 3701 | AUGACCUC CUGAUGAGGCCGUUAGGCCGAA AUGCAUCU | 13108 |
| 4751 | AUUGAGGUC AUACCCAA | 3702 | UUGGGUAU CUGAUGAGGCCGUUAGGCCGAA ACCUCAAU | 13109 |
| 4754 | GAGGUCAUA CCCAAGCU | 3703 | AGCUUGGG CUGAUGAGGCCGUUAGGCCGAA AUGACCUC | 13110 |
| 4763 | CCCAAGCUU GCAGGCCU | 3704 | AGGCCUGC CUGAUGAGGCCGUUAGGCCGAA AGCUUGGG | 13111 |
| 4777 | CCUGACCUU CGCAUACU | 3705 | AGUAUGCG CUGAUGAGGCCGUUAGGCCGAA AGGUCAGG | 13112 |
| 4778 | CUGACCUUC GCAUACUG | 3706 | CAGUAUGC CUGAUGAGGCCGUUAGGCCGAA AAGGUCAG | 13113 |
| 4783 | CUUCGCAUA CUGCUCAC | 3707 | GUGAGCAG CUGAUGAGGCCGUUAGGCCGAA AUGCGAAG | 13114 |
| 4789 | AUACUGCUC ACGGGGAG | 3708 | CUCCCCGU CUGAUGAGGCCGUUAGGCCGAA AGCAGUAU | 13115 |
| 4799 | CGGGGAGUU AAGUGGUC | 3709 | GACCACUU CUGAUGAGGCCGUUAGGCCGAA ACUCCCCG | 13116 |
| 4800 | GGGGAGUUA AGUGGUCC | 3710 | GGACCACU CUGAUGAGGCCGUUAGGCCGAA AACUCCCC | 13117 |
| 4807 | UAAGUGGUC CAGUUUGG | 3711 | CCAAACUG CUGAUGAGGCCGUUAGGCCGAA ACCACUUA | 13118 |
| 4812 | GGUCCAGUU UGGCCUAG | 3712 | CUAGGCCA CUGAUGAGGCCGUUAGGCCGAA ACUGGACC | 13119 |
| 4813 | GUCCAGUUU GGCCUAGU | 3713 | ACUAGGCC CUGAUGAGGCCGUUAGGCCGAA AACUGGAC | 13120 |
| 4819 | UUUGGCCUA GUAAGGUU | 3714 | AACCUUAC CUGAUGAGGCCGUUAGGCCGAA AGGCCAAA | 13121 |
| 4822 | GGCCUAGUA AGGUUGCC | 3715 | GGCAACCU CUGAUGAGGCCGUUAGGCCGAA ACUAGGCC | 13122 |
| 4827 | AGUAAGGUU GCCUACUG | 3716 | CAGUAGGC CUGAUGAGGCCGUUAGGCCGAA ACCUUACU | 13123 |
| 4832 | GGUUGCCUA CUGAUGGG | 3717 | CCCAUCAG CUGAUGAGGCCGUUAGGCCGAA AGGCAACC | 13124 |
| 4843 | GAUGGGCUC AAAAGCCA | 3718 | UGGCUUUU CUGAUGAGGCCGUUAGGCCGAA AGCCCAUC | 13125 |
| 4855 | AGCCACAUU UUAAACAG | 3719 | CUGUUUAA CUGAUGAGGCCGUUAGGCCGAA AUGUGGCU | 13126 |
| 4855 | GCCACAUUU UAAACAGG | 3720 | CCUGUUUA CUGAUGAGGCCGUUAGGCCGAA AAUGUGGC | 13127 |
| 4857 | CCACAUUUU AAACAGGU | 3721 | ACCUGUUU CUGAUGAGGCCGUUAGGCCGAA AAAUGUGG | 13128 |
| 4858 | CACAUUUUA AACAGGUU | 3722 | AACCUGUU CUGAUGAGGCCGUUAGGCCGAA AAAAUGUG | 13129 |
| 4866 | AAACAGGUU UUAUCUCA | 3723 | UGAGAUAA CUGAUGAGGCCGUUAGGCCGAA ACCUGUUU | 13130 |
| 4867 | AACAGGUUU UAUCUCAA | 3724 | UUGAGAUA CUGAUGAGGCCGUUAGGCCGAA AACCUGUU | 13131 |
| 4868 | ACAGGUUUU AUCUCAAG | 3725 | CUUGAGAU CUGAUGAGGCCGUUAGGCCGAA AAACCUGU | 13132 |
| 4869 | CAGGUUUUA UCUCAAGU | 3726 | ACUUGAGA CUGAUGAGGCCGUUAGGCCGAA AAAACCUG | 13133 |
| 4871 | GGUUUUAUC UCAAGUAU | 3727 | AUACUUGA CUGAUGAGGCCGUUAGGCCGAA AUAAAACC | 13134 |
| 4873 | UUUUAUCUC AAGUAUUA | 3728 | UAAUACUU CUGAUGAGGCCGUUAGGCCGAA AGAUAAAA | 13135 |
| 4878 | UCUCAAGUA UUAAUAUA | 3729 | UAUAUUAA CUGAUGAGGCCGUUAGGCCGAA ACUUGAGA | 13136 |
| 4880 | UCAAGUAUU AAUAUAUA | 3730 | UAUAUAUU CUGAUGAGGCCGUUAGGCCGAA AUACUUGA | 13137 |
| 4881 | CAAGUAUUA AUAUAUAG | 3731 | CUAUAUAU CUGAUGAGGCCGUUAGGCCGAA AAUACUUG | 13138 |
| 4884 | GUAUUAAUA UAUAGACA | 3732 | UGUCUAUA CUGAUGAGGCCGUUAGGCCGAA AUUAAUAC | 13139 |
| 4886 | AUUAAUAUA UAGACAAG | 3733 | CUUGUCUA CUGAUGAGGCCGUUAGGCCGAA AUAUUAAU | 13140 |
| 4888 | UAAUAUAUA GACAAGAC | 3734 | GUCUUGUC CUGAUGAGGCCGUUAGGCCGAA AUAUAUUA | 13141 |
| 4900 | AAGACACUU AUGCAUUA | 3735 | UAAUGCAU CUGAUGAGGCCGUUAGGCCGAA AGUGUCUU | 13142 |
| 4901 | AGACACUUA UGCAUUAU | 3736 | AUAAUGCA CUGAUGAGGCCGUUAGGCCGAA AAGUGUCU | 13143 |
| 4907 | UUAUGCAUU AUCCUGUU | 3737 | AACAGGAU CUGAUGAGGCCGUUAGGCCGAA AUGCAUAA | 13144 |
| 4908 | UAUGCAUUA UCCUGUUU | 3738 | AAACAGGA CUGAUGAGGCCGUUAGGCCGAA AAUGCAUA | 13145 |
| 4910 | UGCAUUAUC CUGUUUUA | 3739 | UAAAACAG CUGAUGAGGCCGUUAGGCCGAA AUAAUGCA | 13146 |
| 4915 | UAUCCUGUU UUAUAUAU | 3740 | AUAUAUAA CUGAUGAGGCCGUUAGGCCGAA ACAGGAUA | 13147 |
| 4916 | AUCCUGUUU UAUAUAUC | 3741 | GAUAUAUA CUGAUGAGGCCGUUAGGCCGAA AACAGGAU | 13148 |
| 4917 | UCCUGUUUU AUAUAUCC | 3742 | GGAUAUAU CUGAUGAGGCCGUUAGGCCGAA AAACAGGA | 13149 |
| 4918 | CCUGUUUUA UAUAUCCA | 3743 | UGGAUAUA CUGAUGAGGCCGUUAGGCCGAA AAAACAGG | 13150 |
| 4920 | UGUUUUAUA UAUCCAAU | 3744 | AUUGGAUA CUGAUGAGGCCGUUAGGCCGAA AUAAAACA | 13151 |
| 4922 | UUUUAUAUA UCCAAUGA | 3745 | UCAUUGGA CUGAUGAGGCCGUUAGGCCGAA AUAUAAAA | 13152 |
| 4924 | UUAUAUAUC CAAUGAAU | 3746 | AUUCAUUG CUGAUGAGGCCGUUAGGCCGAA AUAUAUAA | 13153 |
| 4933 | CAAUGAAUA UAACUGGG | 3747 | CCCAGUUA CUGAUGAGGCCGUUAGGCCGAA AUUCAUUG | 13154 |
| 4935 | AUGAAUAUA ACUGGGGC | 3748 | GCCCCAGU CUGAUGAGGCCGUUAGGCCGAA AUAUUCAU | 13155 |
| 4948 | GGGCGAGUU AAGAGUCA | 3749 | UGACUCUU CUGAUGAGGCCGUUAGGCCGAA ACUCGCCC | 13156 |
| 4949 | GGCGAGUUA AGAGUCAU | 3750 | AUGACUCU CUGAUGAGGCCGUUAGGCCGAA AACUCGCC | 13157 |
| 4955 | UUAAGAGUC AUGGUCUA | 3751 | UAGACCAU CUGAUGAGGCCGUUAGGCCGAA ACUCUUAA | 13158 |
| 4961 | GUCAUGGUC UAGAAAAG | 3752 | CUUUUCUA CUGAUGAGGCCGUUAGGCCGAA ACCAUGAC | 13159 |
| 4963 | CAUGGUCUA GAAAAGGG | 3753 | CCCUUUUC CUGAUGAGGCCGUUAGGCCGAA AGACCAUG | 13160 |
| 4974 | AAAGGGGUU UCUCUGUA | 3754 | UACAGAGA CUGAUGAGGCCGUUAGGCCGAA ACCCCUUU | 13161 |
| 4975 | AAGGGGUUU CUCUGUAC | 3755 | GUACAGAG CUGAUGAGGCCGUUAGGCCGAA AACCCCUU | 13162 |
| 4976 | AGGGGUUUC UCUGUACC | 3756 | GGUACAGA CUGAUGAGGCCGUUAGGCCGAA AAACCCCU | 13163 |
| 4978 | GGGUUUCUC UGUACCCA | 3757 | UGGGUACA CUGAUGAGGCCGUUAGGCCGAA AGAAACCC | 13164 |
| 4982 | UUCUCUGUA CCCAAAUC | 3758 | GAUUUGGG CUGAUGAGGCCGUUAGGCCGAA ACAGAGAA | 13165 |
| 4990 | ACCCAAAUC GGGCUGGU | 3759 | ACCAGCCC CUGAUGAGGCCGUUAGGCCGAA AUUUGGGU | 13166 |
| 4999 | GGGCUGGUU GGACCAAG | 3760 | CUUGGUCC CUGAUGAGGCCGUUAGGCCGAA ACCAGCCC | 13167 |
| 5029 | AGAGUGGUU GUCCCAGC | 3761 | GCUGGGAC CUGAUGAGGCCGUUAGGCCGAA ACCACUCU | 13168 |
| 5032 | GUGGUUGUC CCAGCUAU | 3762 | AUAGCUGG CUGAUGAGGCCGUUAGGCCGAA ACAACCAC | 13169 |
| 5039 | UCCCAGCUA UAGUUACU | 3763 | AGUAACUA CUGAUGAGGCCGUUAGGCCGAA AGCUGGGA | 13170 |
| 5041 | CCAGCUAUA GUUACUAA | 3764 | UUAGUAAC CUGAUGAGGCCGUUAGGCCGAA AUAGCUGG | 13171 |
| 5044 | GCUAUAGUU ACUAAACU | 3765 | AGUUUAGU CUGAUGAGGCCGUUAGGCCGAA ACUAUAGC | 13172 |
| 5045 | CUAUAGUUA CUAAACUA | 3766 | UAGUUUAG CUGAUGAGGCCGUUAGGCCGAA AACUAUAG | 13173 |
| 5048 | UAGUUACUA AACUACUC | 3767 | GAGUAGUU CUGAUGAGGCCGUUAGGCCGAA AGUAACUA | 13174 |
| 5053 | ACUAAACUA CUCACCCA | 3768 | UGGGUGAG CUGAUGAGGCCGUUAGGCCGAA AGUUUAGU | 13175 |
| 5056 | AAACUACUC ACCCAAAG | 3769 | CUUUGGGU CUGAUGAGGCCGUUAGGCCGAA AGUAGUUU | 13176 |
| 5066 | CCCAAAGUU GGGACCUC | 3770 | GAGGUCCC CUGAUGAGGCCGUUAGGCCGAA ACUUUGGG | 13177 |
| 5074 | UGGGACCUC ACUGGCUU | 3771 | AAGCCAGU CUGAUGAGGCCGUUAGGCCGAA AGGUCCCA | 13178 |
| 5082 | CACUGGCUU CUCUUUAC | 3772 | GUAAAGAG CUGAUGAGGCCGUUAGGCCGAA AGCCAGUG | 13179 |
| 5083 | ACUGGCUUC UCUUUACU | 3773 | AGUAAAGA CUGAUGAGGCCGUUAGGCCGAA AAGCCAGU | 13180 |
| 5085 | UGGCUUCUC UUUACUUC | 3774 | GAAGUAAA CUGAUGAGGCCGUUAGGCCGAA AGAAGCCA | 13181 |
| 5087 | GCUUCUCUU UACUUCAU | 3775 | AUGAAGUA CUGAUGAGGCCGUUAGGCCGAA AGAGAAGC | 13182 |
| 5088 | CUUCUCUUU ACUUCAUC | 3776 | GAUGAAGU CUGAUGAGGCCGUUAGGCCGAA AAGAGAAG | 13183 |
| 5089 | UUCUCUUUA CUUCAUCA | 3777 | UGAUGAAG CUGAUGAGGCCGUUAGGCCGAA AAAGAGAA | 13184 |
| 5092 | UCUUUACUU CAUCAUGG | 3778 | CCAUGAUG CUGAUGAGGCCGUUAGGCCGAA AGUAAAGA | 13185 |
| 5093 | CUUUACUUC AUCAUGGA | 3779 | UCCAUGAU CUGAUGAGGCCGUUAGGCCGAA AAGUAAAG | 13186 |
| 5096 | UACUUCAUC AUGGAUUU | 3780 | AAAUCCAU CUGAUGAGGCCGUUAGGCCGAA AUGAAGUA | 13187 |
| 5103 | UCAUGGAUU UCACCAUC | 3781 | GAUGGUGA CUGAUGAGGCCGUUAGGCCGAA AUCCAUGA | 13188 |
| 5104 | CAUGGAUUU CACCAUCC | 3782 | GGAUGGUG CUGAUGAGGCCGUUAGGCCGAA AAUCCAUG | 13189 |
| 5105 | AUGGAUUUC ACCAUCCC | 3783 | GGGAUGGU CUGAUGAGGCCGUUAGGCCGAA AAAUCCAU | 13190 |
| 5111 | UUCACCAUC CCAAGGCA | 3784 | UGCCUUGG CUGAUGAGGCCGUUAGGCCGAA AUGGUGAA | 13191 |
| 5122 | AAGGCAGUC UGAGAGGA | 3785 | UCCUCUCA CUGAUGAGGCCGUUAGGCCGAA ACUGCCUU | 13192 |
| 5134 | GAGGAGCUA AAGAGUAU | 3786 | AUACUCUU CUGAUGAGGCCGUUAGGCCGAA AGCUCCUC | 13193 |
| 5141 | UAAAGAGUA UCAGCCCA | 3787 | UGGGCUGA CUGAUGAGGCCGUUAGGCCGAA ACUCUUUA | 13194 |
| 5143 | AAGAGUAUC AGCCCAUA | 3788 | UAUGGGCU CUGAUGAGGCCGUUAGGCCGAA AUACUCUU | 13195 |
| 5151 | CAGCCCAUA UUUAUUAA | 3789 | UUAAUAAA CUGAUGAGGCCGUUAGGCCGAA AUGGGCUG | 13196 |
| 5153 | GCCCAUAUU UAUUAAGC | 3790 | GCUUAAUA CUGAUGAGGCCGUUAGGCCGAA AUAUGGGC | 13197 |
| 5154 | CCCAUAUUU AUUAAGCA | 3791 | UGCUUAAU CUGAUGAGGCCGUUAGGCCGAA AAUAUGGG | 13198 |
| 5155 | CCAUAUUUA UUAAGCAC | 3792 | GUGCUUAA CUGAUGAGGCCGUUAGGCCGAA AAAUAUGG | 13199 |
| 5157 | AUAUUUAUU AAGCACUU | 3793 | AAGUGCUU CUGAUGAGGCCGUUAGGCCGAA AUAAAUAU | 13200 |
| 5158 | UAUUUAUUA AGCACUUU | 3794 | AAAGUGCU CUGAUGAGGCCGUUAGGCCGAA AAUAAAUA | 13201 |
| 5165 | UAAGCACUU UAUGCUCC | 3795 | GGAGCAUA CUGAUGAGGCCGUUAGGCCGAA AGUGCUUA | 13202 |
| 5166 | AAGCACUUU AUGCUCCU | 3796 | AGGAGCAU CUGAUGAGGCCGUUAGGCCGAA AAGUGCUU | 13203 |
| 5167 | AGCACUUUA UGCUCCUU | 3797 | AAGGAGCA CUGAUGAGGCCGUUAGGCCGAA AAAGUGCU | 13204 |
| 5172 | UUUAUGCUC CUUGGCAC | 3798 | GUGCCAAG CUGAUGAGGCCGUUAGGCCGAA AGCAUAAA | 13205 |
| 5175 | AUGCUCCUU GGCACAGC | 3799 | GCUGUGCC CUGAUGAGGCCGUUAGGCCGAA AGGAGCAU | 13206 |
| 5195 | UGAUGUGUA AUUUAUGC | 3800 | GCAUAAAU CUGAUGAGGCCGUUAGGCCGAA ACACAUCA | 13207 |
| 5198 | UGUGUAAUU UAUGCAAG | 3801 | CUUGCAUA CUGAUGAGGCCGUUAGGCCGAA AUUACACA | 13208 |
| 5199 | GUGUAAUUU AUGCAAGC | 3802 | GCUUGCAU CUGAUGAGGCCGUUAGGCCGAA AAUUACAC | 13209 |
| 5200 | UGUAAUUUA UGCAAGCU | 3803 | AGCUUGCA CUGAUGAGGCCGUUAGGCCGAA AAAUUACA | 13210 |
| 5209 | UGCAAGCUC CCUCUCCA | 3804 | UGGAGAGG CUGAUGAGGCCGUUAGGCCGAA AGCUUGCA | 13211 |
| 5213 | AGCUCCCUC UCCAGCUA | 3805 | UAGCUGGA CUGAUGAGGCCGUUAGGCCGAA AGGGAGCU | 13212 |
| 5215 | CUCCCUCUC CAGCUAGG | 3806 | CCUAGCUG CUGAUGAGGCCGUUAGGCCGAA AGAGGGAG | 13213 |
| 5221 | CUCCAGCUA GGACUCAG | 3807 | CUGAGUCC CUGAUGAGGCCGUUAGGCCGAA AGCUGGAG | 13214 |
| 5227 | CUAGGACUC AGGAUAUU | 3808 | AAUAUCCU CUGAUGAGGCCGUUAGGCCGAA AGUCCUAG | 13215 |
| 5233 | CUCAGGAUA UUAGUCAA | 3809 | UUGACUAA CUGAUGAGGCCGUUAGGCCGAA AUCCUGAG | 13216 |
| 5235 | CAGGAUAUU AGUCAAUG | 3810 | CAUUGACU CUGAUGAGGCCGUUAGGCCGAA AUAUCCUG | 13217 |
| 5236 | AGGAUAUUA GUCAAUGA | 3811 | UCAUUGAC CUGAUGAGGCCGUUAGGCCGAA AAUAUCCU | 13218 |
| 5239 | AUAUUAGUC AAUGAGCC | 3812 | GGCUCAUU CUGAUGAGGCCGUUAGGCCGAA ACUAAUAU | 10358 |
| 5250 | UGAGCCAUC AAAAGGAA | 3813 | UUCCUUUU CUGAUGAGGCCGUUAGGCCGAA AUGGCUCA | 13219 |
| 5273 | AAAAACCUA UCUUAUUU | 3814 | AAAUAAGA CUGAUGAGGCCGUUAGGCCGAA AGGUUUUU | 13220 |
| 5275 | AAACCUAUC UUAUUUUC | 3815 | GAAAAUAA CUGAUGAGGCCGUUAGGCCGAA AUAGGUUU | 13221 |
| 5277 | ACCUAUCUU AUUUUCAU | 3816 | AUGAAAAU CUGAUGAGGCCGUUAGGCCGAA AGAUAGGU | 13222 |
| 5278 | CCUAUCUUA UUUUCAUC | 3817 | GAUGAAAA CUGAUGAGGCCGUUAGGCCGAA AAGAUAGG | 13223 |
| 5280 | UAUCUUAUU UUCAUCUG | 3818 | CAGAUGAA CUGAUGAGGCCGUUAGGCCGAA AUAAGAUA | 13224 |
| 5281 | AUCUUAUUU UCAUCUGU | 3819 | ACAGAUGA CUGAUGAGGCCGUUAGGCCGAA AAUAAGAU | 13225 |
| 5282 | UCUGAUGUG CAUCUGUG | 3820 | AACAGAUG CUGAUGAGGCCGUUAGGCCGAA AAAUAAGA | 13226 |
| 5283 | CUUAUUUUC AUCUGUUU | 3821 | AAACAGAU CUGAUGAGGCCGUUAGGCCGAA AAAAUAAG | 13227 |
| 5286 | AUGGUCAUC UGUUUCAU | 3822 | AUGAAACA CUGAUGAGGCCGUUAGGCCGAA AUGAAAAU | 13228 |
| 5290 | UCAUCUGUU UCAUACCU | 3823 | AGGUAUGA CUGAUGAGGCCGUUAGGCCGAA ACAGAUGA | 13229 |
| 5291 | CAUCUGUUU CAUACCUU | 3824 | AAGGUAUG CUGAUGAGGCCGUUAGGCCGAA AACAGAUG | 13230 |
| 5292 | AUCUGUGUC AUACCUUG | 3825 | CAAGGUAU CUGAUGAGGCCGUUAGGCCGAA AAACAGAU | 13231 |
| 5295 | UGUUUCAUA CCUUGUCU | 3826 | AGACAAGG CUGAUGAGGCCGUUAGGCCGAA AUGAAACA | 13232 |
| 5299 | UCAUACCUU GUCUGGGG | 3827 | CCCCAGAC CUGAUGAGGCCGUUAGGCCGAA AGGUAGGA | 13233 |
| 5302 | UACCUUGUC UGGGGUCU | 3828 | AGACCCCA CUGAUGAGGCCGUUAGGCCGAA ACAAGGUA | 13234 |
| 5309 | UCUGGGGUC UAAUGACG | 3829 | CGUCAUUA CUGAUGAGGCCGUUAGGCCGAA ACCCCAGA | 13235 |
| 5311 | UGGGGUCUA AUGACGAU | 3830 | AUCGUCAU CUGAUGAGGCCGUUAGGCCGAA AGACCCCA | 13236 |
| 5331 | AACAGGGUA GACAUGGG | 3831 | CCCAUGUC CUGAUGAGGCCGUUAGGCCGAA ACCCUGUU | 13237 |
| 5350 | GACAGGGUA GAAAAGGG | 3832 | CCCUUUUC CUGAUGAGGCCGUUAGGCCGAA ACCCUGUC | 13238 |
| 5367 | UGCCCGCUC UUUGGGGU | 3833 | ACCCCAAA CUGAUGAGGCCGUUAGGCCGAA AGCGGGCA | 13239 |
| 5369 | CCCGCUCUU UGGGGUCU | 3834 | AGACCCCA CUGAUGAGGCCGUUAGGCCGAA AGAGCGGG | 13240 |
| 5370 | CCGCUCUUU GGGGUCUA | 3835 | UAGACCCC CUGAUGAGGCCGUUAGGCCGAA AAGAGCGG | 13241 |
| 5376 | UUUGGGGUC UAGAGAUG | 3836 | CAUCUCUA CUGAUGAGGCCGUUAGGCCGAA ACCCCAAA | 13242 |
| 5378 | UGGGGUCUA GAGAUGAG | 3837 | CUCAUCUC CUGAUGAGGCCGUUAGGCCGAA AGACCCCA | 13243 |
| 5395 | CCCUGGGUC UCUAAAAU | 3838 | AUUUUAGA CUGAUGAGGCCGUUAGGCCGAA ACCCAGGG | 13244 |
| 5397 | CUGGGUCUC UAAAAUGG | 3839 | CCAUUUUA CUGAUGAGGCCGUUAGGCCGAA AGACCCAG | 13245 |
| 5399 | GGGUCUCUA AAAUGGCU | 3840 | AGCCAUUU CUGAUGAGGCCGUUAGGCCGAA AGAGACCC | 13246 |
| 5408 | AAAUGGCUC UCUUAGAA | 3841 | UUCUAAGA CUGAUGAGGCCGUUAGGCCGAA AGCCAUUU | 13247 |
| 5410 | AUGGCUCUC UUAGAAGU | 3842 | ACUUCUAA CUGAUGAGGCCGUUAGGCCGAA AGAGCCAU | 13248 |
| 5412 | GGCUCUCUU AGAAGUUG | 3843 | CAACUUCU CUGAUGAGGCCGUUAGGCCGAA AGAGAGCC | 13249 |
| 5413 | GCUCUCUUA GAAGUUGU | 3844 | ACAACUGC CUGAUGAGGCCGUUAGGCCGAA AAGAGAGC | 13250 |
| 5419 | UUAGAAGUU GUAUGUGC | 3845 | GCACAUAC CUGAUGAGGCCGUUAGGCCGAA ACUUCUAA | 13251 |
| 5422 | GAAGUUGUA UGUGCAAA | 3846 | UUUGCACA CUGAUGAGGCCGUUAGGCCGAA ACAACUUC | 13252 |
| 5432 | GUGCAAAUU AUGGUCUG | 3847 | CAGACCAG CUGAUGAGGCCGUUAGGCCGAA AUUUGCAC | 13253 |
| 5433 | UGCAAAUUA UGGUCUGU | 3848 | ACAGACCA CUGAUGAGGCCGUUAGGCCGAA AAUUUGCA | 13254 |
| 5438 | AUUAUGGUC UGUGUGCU | 3849 | AGCACACA CUGAUGAGGCCGUUAGGCCGAA ACCAUAAU | 13255 |
| 5447 | UGUGUGCUU AGGUCGUG | 3850 | CACGACCU CUGAUGAGGCCGUUAGGCCGAA AGCACACA | 13256 |
| 5448 | GUGUGCUUA GGUCGUGC | 3851 | GCACGACC CUGAUGAGGCCGUUAGGCCGAA AAGCACAC | 13257 |
| 5452 | GCUUAGGUC GUGCACAC | 3852 | GUGUGCAC CUGAUGAGGCCGUUAGGCCGAA ACCUAAGC | 13258 |
| 5475 | GAGCCGGUC ACAGCUGG | 3853 | CCAGCUGU CUGAUGAGGCCGUUAGGCCGAA ACCGGCUC | 13259 |
| 5497 | CGAUGAAUA GCUGCUUU | 3854 | AAAGCAGC CUGAUGAGGCCGUUAGGCCGAA AUUCAUCG | 13260 |
| 5504 | UAGCUGCUU UGGGAGAG | 3855 | CUCUCCCA CUGAUGAGGCCGUUAGGCCGAA AGCAGCUA | 13261 |
| 5505 | AGCUGCUUU GGGAGAGC | 3856 | GCUCUCCC CUGAUGAGGCCGUUAGGCCGAA AAGCAGCU | 13262 |
| 5524 | AGCAUGCUA GCCACUUA | 3857 | UAAGUGGC CUGAUGAGGCCGUUAGGCCGAA AGCAUGCU | 13263 |
| 5531 | UAGCCACUU AAUUCUCU | 3858 | AGAGAAUU CUGAUGAGGCCGUUAGGCCGAA AGUGGCUA | 13264 |
| 5532 | AGCCACUUA AUUCUCUG | 3859 | CAGAGAAU CUGAUGAGGCCGUUAGGCCGAA AAGUGGCU | 13265 |
| 5535 | CACUUAAUU CUCUGACC | 3860 | GGUCAGAG CUGAUGAGGCCGUUAGGCCGAA AUUAAGUG | 13266 |
| 5536 | ACUUAAUUC UCUGACCG | 3861 | CGGUCAGA CUGAUGAGGCCGUUAGGCCGAA AAUUAAGU | 13267 |
| 5538 | UUAAUUCUC UGACCGGG | 3862 | CCCGGUCA CUGAUGAGGCCGUUAGGCCGAA AGAAUUAA | 13268 |
| 5554 | GCCAGCAUC AUGGGUAC | 3863 | GUACCCAU CUGAUGAGGCCGUUAGGCCGAA AUGCUGGC | 13269 |
| 5561 | UCAUGGGUA CCUGCUCC | 3864 | GGAGCAGG CUGAUGAGGCCGUUAGGCCGAA ACCCAUGA | 13270 |
| 5568 | UACCUGCUC CCCUGUGU | 3865 | ACACAGGG CUGAUGAGGCCGUUAGGCCGAA AGCAGGUA | 13271 |
| 5577 | CCCUGUGUA CCCCAUCC | 3866 | GGAUGGGG CUGAUGAGGCCGUUAGGCCGAA ACACAGGG | 13272 |
| 5584 | UACCCCAUC CUUAAGGU | 3867 | ACCUUAAG CUGAUGAGGCCGUUAGGCCGAA AUGGGGUA | 13273 |
| 5587 | CCCAUCCUU AAGGUUUU | 3868 | AAAACCUU CUGAUGAGGCCGUUAGGCCGAA AGGAUGGG | 13274 |
| 5588 | CCAUCCUUA AGGUUUUC | 3869 | GAAAACCU CUGAUGAGGCCGUUAGGCCGAA AAGGAUGG | 13275 |
| 5593 | CUUAAGGUU UUCUGUCU | 3870 | AGACAGAA CUGAUGAGGCCGUUAGGCCGAA ACCUUAAG | 13276 |
| 5594 | UUAAGGUUU UCUGUCUG | 3871 | CAGACAGA CUGAUGAGGCCGUUAGGCCGAA AACCUUAA | 13277 |
| 5595 | UAAGGUUUU CUGUCUGA | 3872 | UCAGACAG CUGAUGAGGCCGUUAGGCCGAA AAACCUUA | 13278 |
| 5596 | AAGGUUUUC UGUCUGAU | 3873 | AUCAGACA CUGAUGAGGCCGUUAGGCCGAA AAAACCUU | 13279 |
| 5600 | UUUUCUGUC UGAUGAGA | 3874 | UCUCAUCA CUGAUGAGGCCGUUAGGCCGAA ACAGAAAA | 13280 |
| 5627 | AGUGCAAUC CCCACUGA | 3875 | UCAGUGGG CUGAUGAGGCCGUUAGGCCGAA AUUGCACU | 13281 |
| 5660 | CUGUGGCUC UUGGUGCA | 3876 | UGCACCAA CUGAUGAGGCCGUUAGGCCGAA AGCCACAG | 13282 |
| 5662 | GUGGCUCUU GGUGCACU | 3877 | AGUGCACC CUGAUGAGGCCGUUAGGCCGAA AGAGCCAC | 13283 |
| 5671 | GGUGCACUC ACCAGCCA | 3878 | UGGCUGGU CUGAUGAGGCCGUUAGGCCGAA AGUGCACC | 13284 |
| 5685 | CCAGGACUA GACAAGUA | 3879 | UACUUGUC CUGAUGAGGCCGUUAGGCCGAA AGUCCUGG | 13285 |
| 5693 | AGACAAGUA GGAAAGGG | 3880 | CCCUUUCC CUGAUGAGGCCGUUAGGCCGAA ACUUGUCU | 13286 |
| 5704 | AAAGGGCUU CUAGCCAC | 3881 | GUGGCUAG CUGAUGAGGCCGUUAGGCCGAA AGCCCUUU | 13287 |
| 5705 | AAGGGCUUC UAGCCACA | 3882 | UGUGGCUA CUGAUGAGGCCGUUAGGCCGAA AAGCCCUU | 13288 |
| 5707 | GGGCUUCUA GCCACACU | 3883 | AGUGUGGC CUGAUGAGGCCGUUAGGCCGAA AGAAGCCC | 13289 |
| 5731 | AAGAAAAUC AGGUAGGG | 3884 | CCCUACCU CUGAUGAGGCCGUUAGGCCGAA AUUUUCUU | 13290 |
| 5736 | AAUCAGGUA GGGCUGGC | 3885 | GCCAGCCC CUGAUGAGGCCGUUAGGCCGAA ACCUGAUU | 13291 |
| 5754 | AAAGACAUC UUUGUCCA | 3886 | UGGACAAA CUGAUGAGGCCGUUAGGCCGAA AUGUCUUU | 13292 |
| 5756 | AGACAUCUU UGUCCAUU | 3887 | AAUGGACA CUGAUGAGGCCGUUAGGCCGAA AGAUGUCU | 13293 |
| 5757 | GACAUCUUU GUCCAUUC | 3888 | GAAUGGAC CUGAUGAGGCCGUUAGGCCGAA AAGAUGUC | 13294 |
| 5760 | AUCUUUGUC CAUUCGCA | 3889 | UGCGAAUG CUGAUGAGGCCGUUAGGCCGAA ACAAAGAU | 13295 |
| 5764 | UUGUCCAUU CGCAAAAG | 3890 | CUUUUGCG CUGAUGAGGCCGUUAGGCCGAA AUGGACAA | 13296 |
| 5765 | UGUCCAUUC GCAAAAGC | 3891 | GCUUUUGC CUGAUGAGGCCGUUAGGCCGAA AAUGGACA | 13297 |
| 5775 | CAAAAGCUC UUGUCGGC | 3892 | GCCGACAA CUGAUGAGGCCGUUAGGCCGAA AGCUUUUG | 13298 |
| 5777 | AAAGCUCUU GUCGGCUG | 3893 | CAGCCGAC CUGAUGAGGCCGUUAGGCCGAA AGAGCUUU | 13299 |
| 5780 | GCUCUUGUC GGCUGCAG | 3894 | CUGCAGCC CUGAUGAGGCCGUUAGGCCGAA ACAAGAGC | 13300 |
| 5794 | CAGUGUGUA AGUCAGGC | 3895 | GCCUGACU CUGAUGAGGCCGUUAGGCCGAA ACACACUG | 13301 |
| 5798 | GUGUAAGUC AGGCGAUG | 3896 | CAUCGCCU CUGAUGAGGCCGUUAGGCCGAA ACUUACAC | 13302 |
| 5818 | CAGAGGCUA CCAGAGAA | 3897 | UUCUCUGG CUGAUGAGGCCGUUAGGCCGAA AGCCUCUG | 13303 |
| 5852 | CCUGAGGUU UCUCAUCC | 3898 | GGAUGAGA CUGAUGAGGCCGUUAGGCCGAA ACCUCAGG | 13304 |
| 5853 | CUGAGGUUU CUCAUCCA | 3899 | UGGAUGAG CUGAUGAGGCCGUUAGGCCGAA AACCUCAG | 13305 |
| 5854 | UGAGGUUUC UCAUCCAG | 3900 | CUGGAUGA CUGAUGAGGCCGUUAGGCCGAA AAACCUCA | 13306 |
| 5856 | AGGUUUCUC AUCCAGAU | 3901 | AUCUGGAU CUGAUGAGGCCGUUAGGCCGAA AGAAACCU | 13307 |
| 5859 | UUUCUCAUC CAGAUAUC | 3902 | GAUAUCUG CUGAUGAGGCCGUUAGGCCGAA AUGAGAAA | 13308 |
| 5865 | AUCCAGAUA UCCAGCAA | 3903 | UUGCUGGA CUGAUGAGGCCGUUAGGCCGAA AUCUGGAU | 13309 |
| 5867 | CCAGAUAUC CAGCAAUU | 3904 | AAUUGCUG CUGAUGAGGCCGUUAGGCCGAA AUAUCUGG | 13310 |
| 5875 | CCAGCAAUU GGGGGGUG | 3905 | CACCCCCC CUGAUGAGGCCGUUAGGCCGAA AUUGCUGG | 13311 |
| 5896 | AAGACCAUA GAUGGUCC | 3906 | GGACCAUC CUGAUGAGGCCGUUAGGCCGAA AUGGUCUU | 13312 |
| 5903 | UAGAUGGUC CUGUAUUA | 3907 | UAAUACAG CUGAUGAGGCCGUUAGGCCGAA ACCAUCUA | 13313 |
| 5908 | GGUCCUGUA UUAUUCCG | 3908 | CGGAAUAA CUGAUGAGGCCGUUAGGCCGAA ACAGGACC | 13314 |
| 5910 | UCCUGUAUU AUUCCGAU | 3909 | AUCGGAAU CUGAUGAGGCCGUUAGGCCGAA AUACAGGA | 13315 |
| 5911 | CCUGUAUUA UUCCGAUU | 3910 | AAUCGGAA CUGAUGAGGCCGUUAGGCCGAA AAUACAGG | 13316 |
| 5913 | UGUAUUAUU CCGAUUUU | 3911 | AAAAUCGG CUGAUGAGGCCGUUAGGCCGAA AUAAUACA | 13317 |
| 5914 | GUAUUAUUC CGAUUUUA | 3912 | UAAAAUCG CUGAUGAGGCCGUUAGGCCGAA AAUAAUAC | 13318 |
| 5919 | AUUCCGAUU UUAAUAAU | 3913 | AUUAUUAA CUGAUGAGGCCGUUAGGCCGAA AUCGGAAU | 13319 |
| 5920 | UUCCGAUUU UAAUAAUC | 3914 | GAUUAUUA CUGAUGAGGCCGUUAGGCCGAA AAUCGGAA | 13320 |
| 5921 | UCCGAUUUU AAUAAUCU | 3915 | AGAUUAUU CUGAUGAGGCCGUUAGGCCGAA AAAUCGGA | 13321 |
| 5922 | CCGAUUUUA AUAAUCUA | 3916 | UAGAUUAU CUGAUGAGGCCGUUAGGCCGAA AAAAUCGG | 13322 |
| 5925 | AUUUUAAUA AUCUAAUU | 3917 | AAUUAGAU CUGAUGAGGCCGUUAGGCCGAA AUUAAAAU | 13323 |
| 5928 | UUAAUAAUC UAAUUCGU | 3918 | ACGAAUUA CUGAUGAGGCCGUUAGGCCGAA AUUAUUAA | 13324 |
| 5930 | AAUAAUCUA AUUCGUGA | 3919 | UCACGAAU CUGAUGAGGCCGUUAGGCCGAA AGAUUAUU | 13325 |
| 5933 | AAUCUAAUU CGUGAUCA | 3920 | UGAUCACG CUGAUGAGGCCGUUAGGCCGAA AUUAGAUU | 13326 |
| 5934 | AUCUAAUUC GUGAUCAU | 3921 | AUGAUCAC CUGAUGAGGCCGUUAGGCCGAA AAUUAGAU | 13327 |
| 5940 | UUCGUGAUC AUUAAGAG | 3922 | CUCUUAAU CUGAUGAGGCCGUUAGGCCGAA AUCACGAA | 13328 |
| 5943 | GUGAUCAUU AAGAGACU | 3923 | AGUCUCUU CUGAUGAGGCCGUUAGGCCGAA AUGAUCAC | 13329 |
| 5944 | UGAUCAUGA AGAGACUU | 3924 | AAGUCUCU CUGAUGAGGCCGUUAGGCCGAA AAUGAUCA | 13330 |
| 5952 | AAGAGACUU UAGUAAAU | 3925 | AUUUACUA CUGAUGAGGCCGUUAGGCCGAA AGUCUCUU | 13331 |
| 5953 | AGAGACUUU AGUAAAUG | 3926 | CAUUUACU CUGAUGAGGCCGUUAGGCCGAA AAGUCUCU | 13332 |
| 5954 | GAGACUUUA GUAAAUGU | 3927 | ACAUUUAC CUGAUGAGGCCGUUAGGCCGAA AAAGUCUC | 13333 |
| 5957 | ACUUUAGUA AAUGUCCC | 3928 | GGGACAUU CUGAUGAGGCCGUUAGGCCGAA ACUAAAGU | 13334 |
| 5963 | GUAAAUGUC CCUUUUCC | 3929 | GGAAAAGG CUGAUGAGGCCGUUAGGCCGAA ACAUUUAC | 13335 |
| 5967 | AUGUCCCUU UUCCCACA | 3930 | UGUGGGAA CUGAUGAGGCCGUUAGGCCGAA AGGGACAU | 13336 |
| 5968 | UGUCCCUUU UCCCACAA | 3931 | UUGUGGGA CUGAUGAGGCCGUUAGGCCGAA AAGGGACA | 13337 |
| 5969 | GUCCCUUUU CCCACAAA | 3932 | UUUGUGGG CUGAUGAGGCCGUUAGGCCGAA AAAGGGAC | 13338 |
| 5970 | UCCCUUUUC CCACAAAA | 3933 | UUUUGUGG CUGAUGAGGCCGUUAGGCCGAA AAAAGGGA | 13339 |
| 5981 | ACAAAAGUA AAGAAAAG | 3934 | CUUUUCUU CUGAUGAGGCCGUUAGGCCGAA ACUUUUGU | 13340 |
| 5992 | GAAAAGCUA UCGGGAUU | 3935 | AAUCCCGA CUGAUGAGGCCGUUAGGCCGAA AGCUUUUC | 13341 |
| 5994 | AAAGCUAUC GGGAUUCU | 3936 | AGAAUCCC CUGAUGAGGCCGUUAGGCCGAA AUAGCUUU | 13342 |
| 6000 | AUCGGGAUU CUCUGGUU | 3937 | AACCAGAG CUGAUGAGGCCGUUAGGCCGAA AUCCCGAU | 13343 |
| 6001 | UCGGGAUUC UCUGGUUC | 3938 | GAACCAGA CUGAUGAGGCCGUUAGGCCGAA AAUCCCGA | 13344 |
| 6003 | GGGAUUCUC UGGUUCUG | 3939 | CAGAACCA CUGAUGAGGCCGUUAGGCCGAA AGAAUCCC | 13345 |
| 6008 | UCUCUGGUU CUGCUUAA | 3940 | UUAAGCAG CUGAUGAGGCCGUUAGGCCGAA ACCAGAGA | 13346 |
| 6009 | CUCUGGUUC UGCUUAAA | 3941 | UUUAAGCA CUGAUGAGGCCGUUAGGCCGAA AACCAGAG | 13347 |
| 6014 | GUUCUGCUU AAAGACUU | 3942 | AAGUCUUU CUGAUGAGGCCGUUAGGCCGAA AGCAGAAC | 13348 |
| 6015 | UUCUGCUUA AAGACUUA | 3943 | UAAGUCUU CUGAUGAGGCCGUUAGGCCGAA AAGCAGAA | 13349 |
| 6022 | UAAAGACUU AGCUUUGG | 3944 | CCAAAGCU CUGAUGAGGCCGUUAGGCCGAA AGUCUUUA | 13350 |
| 6023 | AAAGACUUA GCUUUGGA | 3945 | UCCAAAGC CUGAUGAGGCCGUUAGGCCGAA AAGUCUUU | 13351 |
| 6027 | ACUUAGCUU UGGAGCCU | 3946 | AGGCUCCA CUGAUGAGGCCGUUAGGCCGAA AGCUAAGU | 13352 |
| 6028 | CUUAGCUUU GGAGCCUA | 3947 | UAGGCUCC CUGAUGAGGCCGUUAGGCCGAA AAGCUAAG | 13353 |
| 6036 | UGGAGCCUA UGAAAGUU | 3948 | AACUUUCA CUGAUGAGGCCGUUAGGCCGAA AGGCUCCA | 13354 |
| 6044 | AUGAAAGUU GAUCAGCC | 3949 | GGCUGAUC CUGAUGAGGCCGUUAGGCCGAA ACUUUCAU | 13355 |

Where “X” represents stem II region of a HH ribozyme (Hertel et al., 1992 Nucleic Acids Res. 20 3252).
The length of stem II may be 2 base-pairs.
Underlined region can be any X sequence or linker, as described herein.

[0348] TABLE IX

Mouse flt1 VEGF Receptor-Hairpin Ribozyme and Substrate Sequence

| | | | | |
|---|---|---|---|---|
| | | Seq | | Seq |
| | | ID | | ID |
| Pos | Substrate | No | HP Ribozyme | No |

| | | | | |
|---|---|---|---|---|
| 33 | AUGGUCA GCU GCUGGGAC | 3950 | GUCCCAGC AGAA GACCAC ACCAGAGAAACACACGUUGUGGUACAUUACCUGGUA | 13356 |
| 36 | GUCAGCU GCU GGGACACC | 3951 | GGUGUCCC AGAA GCUGAC ACCAGAGAAACACACGUUGUGGUACAUUACCUGGUA | 13357 |
| 50 | CACCGCG GUC UUGCCUUA | 3952 | UAAGGCAA AGAA GCGGUG ACCAGAGAAACACACGUUGUGGUACAUUACCUGGUA | 13358 |
| 67 | ACGCGCU GCU CGGGUGUC | 3953 | GACACCCG AGAA GCGCGU ACCAGAGAAACACACGUUGUGGUACAUUACCUGGUA | 13359 |
| 79 | GGUGUCU GCU UCUCACAG | 3954 | CUGUGAGA AGAA GACACC ACCAGAGAAACACACGUUGUGGUACAUUACCUGGUA | 13360 |
| 166 | CAGGCCA GAC UCUCUUUC | 3955 | GAAAGAGA AGAA GGCCUG ACCAGAGAAACACACGUUGUGGUACAUUACCUGGUA | 13361 |
| 197 | GGAGGCA GCC CACUCAUG | 3956 | CAUGAGUG AGAA GCCUCC ACCAGAGAAACACACGUUGUGGUACAUUACCUGGUA | 13362 |
| 214 | GGUCUCU GCC CACGACCG | 3957 | GGGUCGUG AGAA GAGACC ACCAGAGAAACACACGUUGUGGUACAUUACCUGGUA | 13363 |
| 266 | CCCAUCG GCC UGUGGGAG | 3958 | CUCCCACA AGAA GAUGGG ACCAGAGAAACACACGUUGUGGUACAUUACCUGGUA | 13364 |
| 487 | GAAGACA GCU CAUCAUCC | 3959 | GGAUGAUG AGAA GUCUUC ACCAGAGAAACACACGUUGUGGUACAUUACCUGGUA | 13365 |
| 501 | AUCCCCU GCC GGGUGACG | 3960 | CGUCACCC AGAA GGGGAU ACCAGAGAAACACACGUUGUGGUACAUUACCUGGUA | 13366 |
| 566 | UACCCCU GAU GGGCAAAG | 3961 | CUUUGCCC AGAA GGGGUA ACCAGAGAAACACACGUUGUGGUACAUUACCUGGUA | 13367 |
| 640 | UAGGACU GCU GAACUGCG | 3962 | CGCAGUUC AGAA GUCCUA ACCAGAGAAACACACGUUGUGGUACAUUACCUGGUA | 13368 |
| 691 | ACUAUCU GAC CCAUCGGC | 3963 | GCCGAUGG AGAA GAUAGU ACCAGAGAAACACACGUUGUGGUACAUUACCUGGUA | 13369 |
| 703 | AUCGGCA GAC CAAUACAA | 3964 | UUGUAUUG AGAA GCCGAU ACCAGAGAAACACACGUUGUGGUACAUUACCUGGUA | 13370 |
| 736 | UACGCCC GCC GAGCCCAG | 3965 | CUGGGCUC AGAA GGCGUA ACCAGAGAAACACACGUUGUGGUACAUUACCUGGUA | 13371 |
| 754 | UGAGACU GCU CCACGGGC | 3966 | GCCCGUGG AGAA GUCUCA ACCAGAGAAACACACGUUGUGGUACAUUACCUGGUA | 13372 |
| 766 | ACGGGCA GAC UCUUGUCC | 3967 | GGACAAGA AGAA GCCCGU ACCAGAGAAACACACGUUGUGGUACAUUACCUGGUA | 13373 |
| 871 | GGCAGCG GAU UGACCGGA | 3968 | UCCGGUCA AGAA GCUGCC ACCAGAGAAACACACGUUGUGGUACAUUACCUGGUA | 13374 |
| 960 | UACACCU GUC GCGUGAAG | 3969 | CUUCACGC AGAA GGUGUA ACCAGAGAAACACACGUUGUGGUACAUUACCUGGUA | 13375 |
| 988 | CGUUCCA GUC UUUCAACA | 3970 | UGUUGAAA AGAA GGAACG ACCAGAGAAACACACGUUGUGGUACAUUACCUGGUA | 13376 |
| 1051 | GGAAGCA GCC GGUGCAGG | 3971 | CCUGCACC AGAA GCUUCC ACCAGAGAAACACACGUUGUGGUACAUUACCUGGUA | 13377 |
| 1081 | GAAGACG GUC CUAUCGGC | 3972 | GCCGAUAG AGAA GUCUUC ACCAGAGAAACACACGUUGUGGUACAUUACCUGGUA | 13378 |
| 1090 | CCUAUCG GCU GUCCAUGA | 3973 | UCAUGGAC AGAA GAUAGG ACCAGAGAAACACACGUUGUGGUACAUUACCUGGUA | 13379 |
| 1093 | AUCGGCU GUC CAUGAAAG | 3974 | CUUUCAUG AGAA GCCGAU ACCAGAGAAACACACGUUGUGGUACAUUACCUGGUA | 13380 |
| 1169 | GAAGUCU GCU CGCUAUUU | 3975 | AAAUAGCG AGAA GACUUC ACCAGAGAAACACACGUUGUGGUACAUUACCUGGUA | 13381 |
| 1315 | AACCUCA GAU CUACGAAA | 3976 | UUUCGUAG AGAA GAGGUU ACCAGAGAAACACACGUUGUGGUACAUUACCUGGUA | 13382 |
| 1363 | UCUAUCC GCU GGGCAGCA | 3977 | UGCUGCCC AGAA GAUAGA ACCAGAGAAACACACGUUGUGGUACAUUACCUGGUA | 13383 |
| 1604 | GGUGGCU GAC UCUCAGAC | 3978 | GUCUGAGA AGAA GCCACC ACCAGAGAAACACACGUUGUGGUACAUUACCUGGUA | 13384 |
| 1612 | ACUCUCA GAC CCCUGGAA | 3979 | UUCCAGGG AGAA GAGAGU ACCAGAGAAACACACGUUGUGGUACAUUACCUGGUA | 13385 |
| 1629 | AUCUACA GCU GCCGGGCC | 3980 | GGCCCGGC AGAA GUAGAU ACCAGAGAAACACACGUUGUGGUACAUUACCUGGUA | 13386 |
| 1632 | UACAGCU GCC GGGCCUUC | 3981 | GAAGCCCC AGAA GCUGUA ACCAGACAAACACACGUUGUGGUACAUUACCUGGUA | 13387 |
| 1688 | UGUCACA GAU GUGCCGAA | 3982 | UUCGGCAC AGAA GUGACA ACCAGAGAAACACACGUUCUGGUACAUUACCUCGUA | 13388 |
| 1730 | GAUGCCA GCC CAAGGAGA | 3983 | UCUCCUUC AGAA GGCAUC ACCACAGAAACACACGUUCUGGUACAUUACCUGGUA | 13389 |
| 1753 | UCAAACU CUC CUCUCUGG | 3984 | CCACACAG AGAA GUUUCA ACCAGAGUAACACACGUUGUGGUACAUUACCUGGUA | 13390 |
| 2017 | CACACCU GCU UCAAAACC | 3985 | GGUUUUGA AGAA GGUGUG ACCAGAGAAACACACGUUGUGGUACAUUACCUGGUA | 13391 |
| 2101 | CGCCUCA GAU CACUUGGU | 3986 | ACCAAGUG AGAA GAGGCC ACCAGAGAAACACACGUUGUGGUACAUUACCUGGUA | 13392 |
| 2176 | GCACGCU GUU UAUUCAAA | 1441 | UUUCAAUA AGAA GCGUCC ACCAGAGAAACACACGUUGUGGUACAUUACCUGGUA | 10860 |
| 2258 | AACCGCA GCC UACCUCAC | 3987 | GUCAGGUA AGAA GCGCUU ACCAGAGAAACACACGUUGUGGUACAUUACCUGGUA | 13393 |
| 2305 | UGGAGCU GAU CACGCUCA | 3988 | UGAGCGUG AGAA GCUCCA ACCAGAGAAACACACGUUGUGGUACAUUACCUGGUA | 13394 |
| 2383 | UGAAGCG GUC UUCUUCCG | 3989 | CGGAAGAA AGAA GCUUCA ACCAGAGAAACACACGUUGUCCUACAUUACCUGGUA | 13395 |
| 2405 | AAACACA GAC UACCUGUC | 3990 | GACACGUA AGAA GUCUUU ACCAGAGAAACACACGUUGUGGUACAUUACCUGGUA | 13396 |
| 2432 | GGACCCA GAU GAAGUUCC | 1445 | GGAACUUC AGAA GGGUCC ACCAGAGAAACACACGUUGUGGUACAUUACCUGGUA | 10864 |
| 2464 | GUGAACG GCU GCCCUAUG | 3991 | CAUAGGCC AGAA GUUCAC ACCAGAGAAACACACGUUGUGGUACAUUACCUGGUA | 13397 |
| 2467 | AACGGCU GCC CUAUGAUC | 3992 | CAUCAUAG AGAA GCCGUU ACCAGAGAAACACACGUUGUGGUACAUUACCUGGUA | 13398 |
| 2592 | CCCACCU GCC GGACUGUG | 3993 | CACAGUCC AGAA GGUGCG ACCAGAGAAACACACCUUGUGGUACAUUACCUGGUA | 13399 |
| 2596 | CCUGCCG GAC UGUGGCUG | 3994 | CAGCCACA AGAA GGCACG ACCAGAGAAACACACCUUGUGGUACAUUACCUGGUA | 13400 |
| 2653 | AAGCUCU GAU GACCGAAC | 3995 | GUUCGGUC AGAA GAGCUC ACCAGAGAAACACACGUUGUGGUACAUUACCUGGUA | 13401 |
| 2743 | GGCCUCU GAU GGUGAUCG | 3996 | CGAUCACC AGAA GAGGCC ACCAGAGAAACACACGUUGUGGUACAUUACCUGGUA | 13402 |
| 2779 | GAAACCU GUC CAACUACC | 3997 | GGUAGUUG AGAA GGUUUC ACCAGAGAAACACACGUUGUGGUACAUUACCUGGUA | 13403 |
| 2814 | UUAUUCU GUC UCAACAAG | 3998 | CUUGUUGA AGAA GAAUAA ACCAGAGAAACACACGUUGUGGUACAUUACCUGGUA | 13404 |
| 2831 | GGACGCA GCC UUGCAUAU | 3999 | AUAUGCAA AGAA GCGUCC ACCAGAGAAACACACGUUCUGGUACAUUACCUGGUA | 13405 |
| 2895 | AACCCCC CCC UAGACAGU | 4000 | ACUGUCUA AGAA GGGCUU ACCAGAGAAACACACGUUCUGGUACAUUACCUGGUA | 13406 |
| 2913 | GUCAGCA GCU CAACUGUC | 4001 | GACACUUG AGAA GCUGAC ACCAGAGAAACACACGUUCUGGUACAUUACCUGGUA | 13407 |
| 2928 | GUCACCA GCU CCACCUUC | 4002 | GAACCUGG AGAA GGUGAC ACCAGAGAAACACACGUUCUGGUACAUUACCUGGUA | 13408 |
| 2934 | AGCUCCA GCU UCCCUGAA | 4003 | UUCAGGGA AGAA GGAGCU ACCAGAGAAACACACGUUCUGGUACAUUACCUGGUA | 13409 |
| 3001 | CCAAGCA GCC CCUCACCA | 4004 | UGGUCACC AGAA GCUUCG ACCAGAGAAACACACGUUGUGGUACAUUACCUGGUA | 13410 |
| 3022 | AACACCU GAU UUCCUACA | 4005 | UGUAGGAA AGAA GGUCUU ACCAGACAAACACACGUUGUGGUACAUUACCUGGUA | 13411 |
| 3033 | UCCUACA GUU UCCAAGUG | 4006 | CACUUCGA AGAA GUAGGA ACCAGACAAACACACGUUGUGGUACAUUACCUGGUA | 13412 |
| 3064 | ACUUUCU GUC CUCCACAA | 4007 | UUCUGGAG AGAA GAAACU ACCAGACAAACACACGUUGUGGUACAUUACCUGGUA | 13413 |
| 3179 | GAACCCU GAU UAUGUGAG | 4008 | CUCACAUA AGAA GGCUUC ACCAGACAAACACACGUUCUGGUACAUUACCUGGUA | 10876 |
| 3357 | UUCUGCA GCC GCCUGAAG | 4009 | CUUCAGGC AGAA GCAGAA ACCAGACAAACACACGUUCUGGUACAUUACCUGGUA | 13414 |
| 3360 | UGCAGCC GCC UGAAGGAA | 4010 | UUCCUUCA AGAA GCUGCA ACCAGACAAACACACGUUCUGGUACAUUACCUGGUA | 13415 |
| 3379 | GCAUGCG GAU GAGAACCC | 4011 | GGGUUCUC AGAA GCAUGC ACCAGACAAACACACGUUCUGGUACAUUACCUGGUA | 13416 |
| 3463 | GGCCCCG GUU UGCUGAAC | 4012 | GUUCAGCA AGAA GGGGCC ACCAGACAAACACACGUUCUGGUACAUUACCUGGUA | 13417 |
| 3496 | GUGACCU GCU UCAAGCCA | 4013 | UGGCUUGA AGAA GGUCAC ACCAGACAAACACACGUUCUGGUACAUUACCUGGUA | 13418 |
| 3553 | CCAUACU GAC UAGAAACA | 4014 | UGUUUCUA AGAA GUAUGG ACCAGACAAACACACGUUCUGGUACAUUACCUGGUA | 13419 |
| 3615 | AAGGACG GCU UUGCAGAU | 4015 | AUCUGCAA AGAA GUCCUU ACCAGAGAAACACACGUUGUGGUACAUUACCUGGUA | 13420 |
| 3623 | CUUUGCA GAU CCACAUUU | 4016 | AAAUGUGG AGAA GCAAAG ACCAGAGAAACACACGUUGUGGUACAUUACCUGGUA | 13421 |
| 3650 | AAGCUCU GAU GAUGUGAG | 4017 | CUCACAUC AGAA GAGCUU ACCAGAGAAACACACGUUGUGGUACAUUACCUGGUA | 13422 |
| 3754 | ACUAUCA GCU GGACACUA | 4018 | UAGUGUCC AGAA GAUAGU ACCAGAGAAACACACGUUGUGGUACAUUACCUGGUA | 13423 |
| 3772 | GCACUCU GCU GGGCUCCC | 4019 | GGGAGCCC AGAA GAGUGC ACCAGAGAAACACACGUUGUGGUACAUUACCUGGUA | 13424 |
| 3796 | UGAAGCG GUU CACCUGGA | 4020 | UCCAGGUG AGAA GCUUCA ACCAGAGAAACACACGUUGUGGUACAUUACCUGGUA | 13425 |
| 3881 | ACUUUCC GAU CUGCCGAG | 4021 | CUCGGCAG AGAA GAAAGU ACCAGAGAAACACACGUUGUGGUACAUUACCUGGUA | 13426 |
| 3886 | CCGAUCU GCC GAGGCCCA | 4022 | UGGGCCUC AGAA GAUCGG ACCAGAGAAACACACGUUGUGGUACAUUACCUGGUA | 13427 |
| 3897 | AGGCCCA GCU UCUGCUUC | 4023 | GAAGCAGA AGAA GGGCCU ACCAGAGAAACACACGUUGUGGUACAUUACCUGGUA | 13428 |
| 3903 | AGCUUCU GCU UCUCCAGC | 4024 | GCUGGAGA AGAA GAAGCU ACCAGAGAAACACACGUUGUGGUACAUUACCUGGUA | 13429 |
| 3912 | UUCUCCA GCU GUGGCCAC | 4025 | GUGGCCAC AGAA GGAGAA ACCAGAGAAACACACGUUGUGGUACAUUACCUGGUA | 13430 |
| 3969 | GAGUCCU GCU GUUCUCCA | 4026 | UGGAGAAC AGAA GGACUC ACCAGAGAAACACACGUUGUGGUACAUUACCUGGUA | 13431 |
| 3972 | UCCUGCU GUU CUCCACCC | 4027 | GGGUGGAG AGAA GCAGGA ACCAGAGAAACACACGUUGUGGUACAUUACCUGGUA | 13432 |
| 3986 | ACCCCCA GAC UACAACUC | 4028 | GAGUUGUA AGAA GGGGGU ACCAGAGAAACACACGUUGUGGUACAUUACCUGGUA | 13433 |
| 4018 | CCUCCCC GCC CGCCUAAA | 4029 | UUUAGGCG AGAA GGGAGG ACCAGAGAAACACACGUUGUGGUACAUUACCUGGUA | 13434 |
| 4022 | CCCGCCC GCC UAAAGCUU | 4030 | AAGCUUUA AGAA GGCGGG ACCAGAGAAACACACGUUGUGGUACAUUACCUGGUA | 13435 |
| 4040 | CUCACCA GCC CCGACAAC | 4031 | GUUGUCGG AGAA GGUGAG ACCAGAGAAACACACGUUGUGGUACAUUACCUGGUA | 13436 |
| 4053 | ACAACCA GCC CCUGACAG | 4032 | CUGUCAGG AGAA GGUUGU ACCAGAGAAACACACGUUGUGGUACAUUACCUGGUA | 13437 |
| 4095 | CUAUUCC GCU CCACAGGA | 4033 | UCCUGUGG AGAA GAAUAG ACCAGAGAAACACACGUUGUGGUACAUUACCUGGUA | 13438 |
| 4110 | GGAGCCA GCU GCUUUUCG | 4034 | CGAAAAGC AGAA GGCUCC ACCAGAGAAACACACGUUGUGGUACAUUACCUGGUA | 13439 |
| 4113 | GCCAGCU GCU UUUCGUGA | 4035 | UCACGAAA AGAA GCUGGC ACCAGAGAAACACACGUUGUGGUACAUUACCUGGUA | 13440 |
| 4168 | UGUUGCU GUU UUGACUAA | 4036 | UUAGUCAA AGAA GCAACA ACCAGAGAAACACACGUUGUGGUACAUUACCUGGUA | 13441 |
| 4290 | GGCGACC GCC CGCCCACC | 4037 | GGUGGGCG AGAA GUCGCC ACCAGAGAAACACACGUUGUGGUACAUUACCUGGUA | 13442 |
| 4294 | ACCGCCC GCC CACCGGCC | 4038 | GGCCGGUG AGAA GGCGGU ACCAGAGAAACACACGUUGUGGUACAUUACCUGGUA | 13443 |
| 4329 | CCCUGCA GCU GUGGGACU | 4039 | AGUCCCAC AGAA GCAGGG ACCAGAGAAACACACGUUGUGGUACAUUACCUGGUA | 13444 |
| 4378 | AUGCACU GAC CUGGUCUG | 4040 | CAGACCAG AGAA GUCCAG ACCAGAGAAACACACGUUGUGGUACAUUACCUGGUA | 13445 |
| 4383 | CUGACCU GCU CUGUCUCU | 4041 | AGAGACAG AGAA GGUCAG ACCAGAGAAACACACGUUGUGGUACAUUACCUGGUA | 13446 |
| 4388 | CUGCUCU GUC UCUCUUAU | 4042 | AUAAGAGA AGAA GAGCAG ACCAGAGAAACACACGUUGUGGUACAUUACCUGGUA | 13447 |
| 4457 | UGCGUCC GUC CUGUGGAG | 4043 | CUCCACAG AGAA GACGCA ACCAGAGAAACACACGUUGUGGUACAUUACCUGGUA | 13448 |
| 4525 | GGCCUCC GCU GUUUCGGG | 4044 | CCCGAAAC AGAA GAGGCC ACCAGAGAAACACACGUUGUGGUACAUUACCUGGUA | 13449 |
| 4528 | CUCCGCU GUU UCGGGCCC | 4045 | GGGCCCGA AGAA GCGGAG ACCAGAGAAACACACGUUGUGGUACAUUACCUGGUA | 13450 |
| 4643 | GUCUUCU GUU GUCUGUUU | 4046 | AAACAGAC AGAA GAAGAC ACCAGAGAAACACACGUUGUGGUACAUUACCUGGUA | 13451 |
| 4650 | GUUGUCU GUU UACCAUCC | 4047 | GGAUGGUA AGAA GACAAC ACCAGAGAAACACACGUUGUGGUACAUUACCUGGUA | 13452 |
| 4724 | AUCAUCA GUU CCUCUAGU | 4048 | ACUAGAGG AGAA GAUGAG ACCAGAGAAACACACGUUGUGGUACAUUACCUGGUA | 13453 |
| 4771 | CAGGCCU GAC CUUCGCAU | 4049 | AUGCGAAG AGAA GGCCUG ACCAGAGAAACACACGUUGUGGUACAUUACCUGGUA | 13454 |
| 4785 | GCAUACU GCU CACGGGGA | 4050 | UCCCCGUG AGAA GUAUGC ACCAGAGAAACACACGUUGUGGUACAUUACCUGGUA | 13455 |
| 4809 | UGGUCCA GUU UGGCCUAG | 4051 | CUAGGCCA AGAA GGACCA ACCAGAGAAACACACGUUGUGGUACAUUACCUGGUA | 13456 |
| 4834 | GCCUACU GAU GGGCUCAA | 4052 | UUGAGCCC AGAA GUAGGC ACCAGAGAAACACACGUUGUGGUACAUUACCUGGUA | 13457 |
| 4912 | UUAUCCU GUU UUAUAUAU | 4053 | AUAUAUAA AGAA GGAUAA ACCAGAGAAACACACGUUGUGGUACAUUACCUGGUA | 13458 |
| 5119 | CAAGGCA GUC UGAGAGGA | 4054 | UCCUCUCA AGAA GCCUUG ACCAGAGAAACACACGUUGUGGUACAUUACCUGGUA | 13459 |
| 5144 | AGUAUCA GCC CAUAUUUA | 4055 | UAAAUAUG AGAA GAUACU ACCAGAGAAACACACGUUGUGGUACAUUACCUGGUA | 13460 |
| 5287 | UUCAUCU GUU UCAUACCU | 4056 | AGGUAUGA AGAA GAUGAA ACCAGAGAAACACACGUUGUGGUACAUUACCUGGUA | 13461 |
| 5363 | GGUGCCC GCU CUUUGGGG | 4057 | CCCCAAAG AGAA GGCACC ACCAGAGAAACACACGUUGUGGUACAUUACCUGGUA | 13462 |
| 5462 | CACACCU GCC GGAGCCGG | 4058 | CCGGCUCC AGAA GGUGUG ACCAGAGAAACACACGUUGUGGUACAUUACCUGGUA | 13463 |
| 5478 | GGUCACA GCU GGGCAGAC | 4059 | GUCUGCCC AGAA GUGACC ACCAGAGAAACACACGUUGUGGUACAUUACCUGGUA | 13464 |
| 5486 | CUGGGCA GAC GAUGAAUA | 4060 | UAUUCAUC AGAA GCCCAG ACCAGAGAAACACACGUUGUGGUACAUUACCUGGUA | 13465 |
| 5500 | AAUAGCU GCU UUGGGAGA | 4061 | UCUCCCAA AGAA GCUAUU ACCAGAGAAACACACGUUGUGGUACAUUACCUGGUA | 13466 |
| 5539 | AUUCUCU GAC CGGGCCAG | 4062 | CUGGCCCG AGAA GAGAAU ACCAGAGAAACACACGUUGUGGUACAUUACCUGGUA | 13467 |
| 5564 | GGUACCU GCU CCCCUGUG | 4063 | CACAGGGG AGAA GGUACC ACCAGAGAAACACACGUUGUGGUACAUUACCUGGUA | 13468 |
| 5597 | GUUUUCU GUC UGAUGAGA | 4064 | UCUCAUCA AGAA GAAAAC ACCAGAGAAACACACGUUGUGGUACAUUACCUGGUA | 13469 |
| 5601 | UCUGUCU GAU GAGACUGG | 4065 | CCAGUCUC AGAA GACAGA ACCAGAGAAACACACGUUGUGGUACAUUACCUGGUA | 13470 |
| 5639 | UGAGACA GCC UGCAGCCC | 4066 | GGGCUGCA AGAA GUCUCA ACCAGAGAAACACACGUUGUGGUACAUUACCUGGUA | 13471 |
| 5646 | GCCUGCA GCC CACUGUGG | 4067 | CCACAGUG AGAA GCAGGC ACCAGAGAAACACACGUUGUGGUACAUUACCUGGUA | 13472 |
| 5781 | CUUGUCG GCU GCAGUGUG | 4068 | CACACUGC AGAA GACAAG ACCAGAGAAACACACGUUGUGGUACAUUACCUGGUA | 13473 |
| 5829 | AGAAACG GAU GAGAACAG | 4069 | CUGUUCUC AGAA GUUUCU ACCAGAGAAACACACGUUGUGGUACAUUACCUGGUA | 13474 |
| 5842 | AACAGCA GCC UGAGGUUU | 4070 | AAACCUCA AGAA GCUGUU ACCAGAGAAACACACGUUGUGGUACAUUACCUGGUA | 13475 |
| 5915 | UUAUUCC GAU UUUAAUAA | 4071 | UUAUUAAA AGAA GAAUAA ACCAGAGAAACACACGUUGUGGUACAUUACCUGGUA | 13476 |
| 6010 | UGGUUCU GCU UAAAGACU | 4072 | AGUCUUUA AGAA GAACCA ACCAGAGAAACACACGUUGUGGUACAUUACCUGGUA | 13477 |

[0349] TABLE X

Homologous Hammerhead Ribozyme Target Sites Between
Human flt-1 and KDR RNA

| | | | | | |
|---|---|---|---|---|---|
| nt. | flt-1 | Seq | nt. | KDR | |
| Position | Target Sequence | ID No | Position | Target Sequence | Seq ID No |

| | | | | | |
|---|---|---|---|---|---|
| 3388 | CCGGGAU A UUUAUAA | 4073 | 3151 | CCGGGAU A UUUAUAA | 4073 |
| 2174 | AAUGUAU A CACAGGG | 4074 | 3069 | AgUGUAU C CACAGGG | 4116 |
| 2990 | UCCAAAU A UGGAAAU | 4075 | 2756 | UGCAAAU u UGGAAAc | 4117 |
| 2693 | CUCCCUU A UGAUGCC | 4076 | 2459 | CUgCCUU A UGAUGCC | 4118 |
| 2981 | GUUGAAU A CUGCAAA | 4077 | 2747 | GUgGAAU u CUGCAAA | 4119 |
| 1359 | UAUGGUU A AAAGAUG | 4078 | 2097 | U9UGGUU u AAAGAUa | 4120 |
| 3390 | GGGAUAU U UAUAAGA | 4079 | 3153 | GGGAUAU U UAUAAag | 4121 |
| 3391 | GGAUAUU U AUAAGAA | 4080 | 3154 | GGAUAUU U AUAAagA | 4122 |
| 2925 | ACGUGGU U AACCUGC | 4081 | 2691 | AuGUGGU a AACCUuC | 4123 |
| 7140 | UAUUUCU A GUCAUGA | 4082 | 2340 | UAcUUCU u GUCAUCA | 4124 |
| 1785 | CAAUAAU A GAAGGAA | 4083 | 1515 | CucUAAU U GAAGGAA | 4125 |
| 2731 | GAGACUU A AACUGGG | 4084 | 768 | uuGACUU a AACUGGG | 4126 |
| 3974 | GAUGACU A CCAGGGC | 4085 | 1466 | GAgGACU u CCAGGGa | 4127 |
| 6590 | UUAAUGU A GAAAGAA | 4086 | 2603 | aaAAUGU u GAAAGAA | 4128 |
| 6705 | GCCAUUU A UGACAAA | 4087 | 3227 | aCaAUUU u UGACAgA | 4129 |
| 974 | GUCAAAU U ACUUAGA | 4088 | 147 | uUCAAAU U ACUUgcA | 4130 |
| 1872 | AUAAAGU U GGGACUG | 4089 | 1602 | ACAAAGU a GGGAgaG | 4131 |
| 2333 | ACUUGGU U UAAAAAC | 4090 | 1088 | AaaUGGU a UAAAAAu | 4132 |
| 2775 | AAGUGGU U CAAGCAU | 4091 | 1745 | AcaUGGU a CAAGCuU | 4133 |
| 3533 | UUCUCCU U AGGUGGG | 4092 | 3296 | UUuUCCU U AGGUGcu | 4134 |
| 3534 | UCUCCUU A GGUGGGU | 4093 | 3297 | UuUCCUU A GGUGcuU | 4135 |
| 3625 | GUACUCU A CUCCUGA | 4094 | 4054 | GagCUCU a CUCCUGu | 4136 |
| 1814 | AGCACCU U GGUUGUG | 4095 | 1059 | AGuACCU U GGUUacc | 4137 |
| 2744 | GGCAAAU C ACUUGGA | 4096 | 147 | uuCAAAU u ACUUGcA | 4130 |
| 2783 | CAAGCAU C AGCAUUU | 4097 | 796 | gAAGCAU C AGCAUaa | 4138 |
| 3613 | GAGAGCU C CUGAGGA | 4098 | 2968 | GgaAGCU C CUGAagA | 4139 |
| 4052 | AAGGCCU C GCUCAAG | 4099 | 1923 | ucuGCCU u GCUCAAG | 4140 |
| 5305 | UCUCCAU A UCAAAAC | 4100 | 456 | ggUCCAU U UCAAAuC | 4141 |
| 7155 | AUGUAUU U UGUAUAC | 4101 | 631 | gUcUAUU a UGUAcAu | 4142 |
| 1836 | CUAGAAU U UCUGGAA | 4102 | 1007 | aUgGAAU a UCUGGug | 4143 |
| 2565 | CUCUCUU C UGGCUCC | 4103 | 2328 | uguUCUU C UGGCUaC | 4144 |
| 4250 | CUGUACU C CACCCCA | 4104 | 3388 | uUaUACU a CACCagA | 4145 |
| 7124 | ACAUGGU U UGGUCCU | 4105 | 3778 | cagUGGU a UGGUuCU | 4146 |
| 436 | AUGGUCU U UGCCUGA | 4106 | 1337 | AcGGUCU a UGCCauu | 4147 |
| 2234 | GCACCAU A CCUCCUG | 4107 | 1344 | augCCAU U CCUCCcc | 4148 |
| 2763 | GGGCUUU U GGAAAAG | 4108 | 990 | uuGCUUU U GGAAgUG | 4149 |
| 4229 | CCAGACU A CAACUCG | 4109 | 767 | auuGACU u CAACUgG | 4150 |
| 5301 | GUUUUCU C CAUAUCA | 4110 | 3307 | ugcUUCU C CAUAUCc | 4151 |
| 6015 | AGAAUGU A UGCCUCU | 4111 | 1917 | AcuAUGU C UGCCUug | 4152 |
| 6095 | AUUCCCU A GUGAGCC | 4112 | 1438 | AUaCCCU u GUGAaya | 4153 |
| 6236 | UGUUGUU C CUCUUCU | 4113 | 76 | UagUGUU u CUCUUga | 4154 |
| 5962 | GCUUCCU U UUAUCCA | 4114 | 3099 | auaUCCU a UUAUCgg | 4155 |
| 7629 | UAUAUAU U CUCUGCU | 4115 | 3096 | gAaAUAU a CUCUuaU | 4156 |

Lowercase letters are used to represent sequence variance between flt-1 and KDR RNA

[0350] TABLE XI

| | | | | | |
|---|---|---|---|---|---|
| | | | | Wait Time* 2′- | Wait Time* |
| Reagent | Equivalents | Amount | Wait Time* DNA | O-methyl | RNA |

A. 2.5 μmol Synthesis Cycle ABI 394 Instrument

| | | | | | |
|---|---|---|---|---|---|
| Phosphoramidites | 6.5 | 163 μL | 45 sec | 2.5 min | 7.5 min |
| S-Ethyl Tetrazole | 23.8 | 238 μL | 45 sec | 2.5 min | 7.5 min |
| Acetic Anhydride | 100 | 233 μL | 5 sec | 5 sec | 5 sec |
| N-Methyl Imidazole | 186 | 233 μL | 5 sec | 5 sec | 5 sec |
| TCA | 176 | 2.3 mL | 21 sec | 21 sec | 21 sec |
| Iodine | 11.2 | 1.7 mL | 45 sec | 45 sec | 45 sec |
| Beaucage | 12.9 | 645 μL | 100 sec | 300 sec | 300 sec |
| Acetonitrile | NA | 6.67 mL | NA | NA | NA |

B. 0.2 μmol Synthesis Cycle ABI 394 Instrument

| Phosphoramidites | 15 | 31 μL | 45 sec | 233 sec | 465 sec |
|---|---|---|---|---|---|
| S-Ethyl Tetrazole | 38.7 | 31 μL | 45 sec | 233 min | 465 sec |
| Acetic Anhydride | 655 | 124 μL | 5 sec | 5 sec | 5 sec |
| N-Methyl Imidazole | 1245 | 124 μL | 5 sec | 5 sec | 5 sec |
| TCA | 700 | 732 μL | 10 sec | 10 sec | 10 sec |
| Iodine | 20.6 | 244 μL | 15 sec | 15 sec | 15 sec |
| Beaucage | 7.7 | 232 μL | 100 sec | 300 sec | 300 sec |
| Acetonitrile | NA | 2.64 mL | NA | NA | NA |
| | Equivalents | Amount | Wait Time* | Wait Time* 2′-O- | |
| Reagent | DNA/2′-O-methyl/Ribo | DNA/2′-O-methyl/Ribo | DNA | methyl | Wait Time* Ribo |

C. 0.2 μmol Synthesis Cycle 96 well Instrument

| | | | | | |
|---|---|---|---|---|---|
| Phosphoramidites | 22/33/66 | 40/60/120 μL | 60 sec | 180 sec | 360 sec |
| S-Ethyl Tetrazole | 70/105/210 | 40/60/120 μL | 60 sec | 180 min | 360 sec |
| Acetic Anhydride | 265/265/265 | 50/50/50 μL | 10 sec | 10 sec | 10 sec |
| N-Methyl Imidazole | 502/502/502 | 50/50/50 μL | 10 sec | 10 sec | 10 sec |
| TCA | 238/475/475 | 250/500/500 μL | 15 sec | 15 sec | 15 sec |
| Iodine | 6.8/6.8/6.8 | 80/80/80 μL | 30 sec | 30 sec | 30 sec |
| Beaucage | 34/51/51 | 80/120/120 | 100 sec | 200 sec | 200 sec |
| Acetonitrile | NA | 1150/1150/1150 μL | NA | NA | NA |

*Wait time does not include contact time during delivery.

[0351] TABLE XII

Ribozyme and attenuated control sequences and locations of modified nucleotides.

| | | | | |
|---|---|---|---|---|
| | RPI | | | Seq. |
| Target Site* | No. | Ribozyme Sequence^{†}(5′-3′) | Activity | ID No. |

| | | | | |
|---|---|---|---|---|
| Flt-1358-amino | RPI 4118 | 5′ aₛuₛcₛuₛuuu cUGAUGaggcgaaagccGaa AccauacB 3′ | Active | 13478 |
| Flt-1358-amino (att.) | RPI 4581 | aₛuₛcₛuₛuuu cUuAUGaggcgaaagccGau AccauacB | Attenuated | 13479 |
| Flt-1358-allyl | RPI 4159 | 5′ aₛuₛcₛUₛuuu cUGAuGaggcgaaagccGaa AccauacB 3′ | Active | 13480 |
| Flt-1358-allyl (att.) | RPI 4583 | aₛuₛcₛuₛuuu cUuAuGaggcgaaagccGau AccauacB | Attenuated | 13481 |
| Flt-4229-amino | RPI 4131 | gₛaₛgₛuₛug cUGAUGaggcgaaagccGaa AgucugB | Active | 13482 |
| Flt-4229-amino (att.) | RPI 4582 | gₛaₛgₛuₛug cUuAUGaggcgaaagccGau AgucugB | Attenuated | 13483 |
| Flt-4229-allyl | RPI 4172 | gₛaₛgₛuₛug cUGAuGaggcgaaagccGaa AgucugB | Active | 13484 |
| Flt-4229-allyl (att.) | RPI 4584 | gₛaₛgₛuₛug cUUAuGaggcgaaagccGau AgucugB | Attenuated | 13485 |
| KDR-726-amino | RPI 4097 | uₛaₛcₛaₛauu cUGAUCaggcgaagccGaa AagacaaB | Active | 13486 |
| KDR-726-amino (att.) | RPI 4674 | uₛaₛcₛaₛauu cUuAUGaggcgaaagccGau Aagacaab | Attenuated | 13487 |
| KDR-726-allyl | RPI 4138 | uₛaₛcₛaₛauu cUGAuGaggcgaaagccGaa AagacaaB | Active | 13488 |
| KDR-726allyl (att.) | | uₛaₛcₛaₛauu cUuAuGaggcgaagccGau AagacaaB | Attenuated | 13489 |
| KDR-3950-amino | RPI 4110 | cₛuₛgₛgₛag cUGAUGaggcgaaagccGaa AcacggB | Active | 13490 |
| KDR-3950-amino (att.) | RPI 4677 | cₛuₛgₛgₛag cUuAUGaggcgaaagccGau AcacggB | Attenuated | 13491 |
| KDR-3950-allyl | RPI 4151 | cₛuₛgₛgₛag cUcAuGaggcgaaagccGaa AcacggB | Active | 13492 |
| KDR-3950-allyl (att.) | | cₛuₛgₛgₛag cUuAuGaggcgaaagccGau AcacggB | Attenuated | 13493 |
| | | binding arm/catalytic core & stem II/binding arm | | |

*Ribozyme target sites are named according to the cleavage position in human Flt-1 (EMBL accession no. X51602) or human KDR mRNA (EMBL accession no. L0497).
\ Modifications are indicated as follows: 2′-O-methyl nucleotides, lowercase; ribonucleotides, uppercase G, A; inverted 3′-3′deoxyabasic, B. Two ribozyme motifs were tested²³. For the NH₂-modified ribozymes, U indicates the two core positions where 2′-NH₂ uridines are present. U indicates 2′-C-allyl-uridine modification. The positions of four phosphorothioate linkages at the 5′ end are indicated by a subscript ”s⇄.
Changes in the attenuated controls are underlined. Nucleotides comprising the base paired region of stem II are in italics. A 3 bp stem II is shown above.
Ribozymes or attenuated controls referred to in the text with a 4 bp stem II have one additional base pair such that the stem II/loop sequence is ggccgaaaggcc.

[0352] TABLE XIII

Ribozyme and attenuated control sequences with locations of modified
nucleotides.

| | | | |
|---|---|---|---|
| | | | Seq |
| | | | ID |
| Ribozyme | Sequence^{†} (5′-3′) | Activity | Nos. |

| RPI.4610 | gₛaₛgₛuₛug cUGAuGaggccgaaaggccGaa AgucugB | Active | 13494 |
|---|---|---|---|
| (ANGIOZYME™) | | | |
| RPI.13141 | gₛaₛgₛuₛug cUAGaGaggccgaaggccGauAgucugB | BAC† | 13499 |
| RPI.13030 | gₛaₛaₛgₛgu cUAGuGaggccgaaaggccGauAugucB | BAC‡ | 13496 |
| | binding arm/core & stem II/binding arm | | |
| †Modifications are indicated as follows: 2′-O-methyl nucleotides, lowercase; ribonucleotides, uppercase G, A; 2′- C-allyl uridine, U; inverted 3′-3′ deoxyabasic, B. The positions of four phosphorothioate linkages at the 5′ end are indicated by a subscript “s”. Nucleotides comprising the base paired region of stem II are in italics. Nucleotide changes in the core of the attenuated controls are underlined. ANGIOZYME ribozyme is targeted to | | | |
| # cleave site 4229 in human flt-1 RNA and is identical to Flt-4229-allyl ribozyme (Table XII) except that the ANGIOZYME has a stem II of length 4 bps. | | | |

‡BAc: Binding arm, Attenuated core Control.
*SAC: Scrambled arm, Attenuated core Control.

[0353] TABLE XIV

NCH Ribozyme and Target Sequences

| | | | | |
|---|---|---|---|---|
| | | Seq ID | | Seq ID |
| Pos | Target | No | NCH Ribozyme | No |

| | | | | |
|---|---|---|---|---|
| 9 | GCGGACAC U CCUCUCGG | 4157 | CCGAGAGG CUGAUGAGGCCGUUAGGCCGAA IUGUCCGC | 13497 |
| 11 | GGACACUC C UCUCGGCU | 4158 | AGCCGAGA CUGAUGAGGCCGUUAGGCCGAA IAGUGUCC | 13498 |
| 12 | GACACUCC U CUCGGCUC | 4159 | GAGCCGAG CUGAUGAGGCCGUUAGGCCGAA IGAGUGUC | 13499 |
| 14 | CACUCCUC U CGGCUCCU | 4160 | AGGAGCCG CUGAUGAGGCCGUUAGGCCGAA IAGGAGUG | 13500 |
| 19 | CUCUCGGC U CCUCCCCG | 4161 | CGGGGAGG CUGAUGAGGCCGUUAGGCCGAA ICCGAGAG | 13501 |
| 21 | CUCGGCUC C UCCCCGGC | 4162 | GCCGGGGA CUGAUGAGGCCGUUAGGCCGAA IAGCCGAG | 13502 |
| 22 | UCGGCUCC U CCCCGGCA | 4163 | UGCCGGGG CUGAUGAGGCCGUUAGGCCGAA IGAGCCGA | 13503 |
| 24 | GGCUCCUC C CCGGCAGC | 4164 | GCUGCCGG CUGAUGAGGCCGUUAGGCCGAA IAGGAGCC | 13504 |
| 25 | GCUCCUCC C CGGCAGCG | 4165 | CGCUGCCG CUGAUGAGGCCGUUAGGCCGAA IGAGGAGC | 13505 |
| 26 | CUCCUCCC C GGCAGCGG | 4166 | CCGCUGCC CUGAUGAGGCCGUUAGGCCGAA IGGAGGAG | 13506 |
| 30 | UCCCCGGC A GCGGCGGC | 4167 | GCCGCCGC CUGAUGAGGCCGUUAGGCCGAA ICCGGGGA | 13507 |
| 42 | GCGGCGGC U CGGAGCGG | 4168 | CCGCUCCG CUGAUGAGGCCGUUAGGCCGAA ICCGCCGC | 13508 |
| 53 | GAGCGGGC U CCGGGGCU | 4169 | AGCCCCGG CUGAUGAGGCCGUUAGGCCGAA ICCCGCUC | 13509 |
| 55 | GCGGGCUC C GGGGCUCG | 4170 | CGAGCCCC CUGAUGAGGCCGUUAGGCCGAA IAGCCCGC | 13510 |
| 61 | UCCGGGGC U CGGGUGCA | 4171 | UGCACCCG CUGAUGAGGCCGUUAGGCCGAA ICCCCGGA | 13511 |
| 69 | UCGGGUGC A GCGGCCAG | 4172 | CUGGCCGC CUGAUGAGGCCGUUAGGCCGAA ICACCCGA | 13512 |
| 75 | GCAGCGGC C AGCGGGCC | 4173 | GGCCCGCU CUGAUGAGGCCGUUAGGCCGAA ICCGCUGC | 13513 |
| 76 | CAGCGGCC A GCGGGCCU | 4174 | AGGCCCGC CUGAUGAGGCCGUUAGGCCGAA IGCCGCUG | 13514 |
| 83 | CAGCGGGC C UGGCGGCG | 4175 | CGCCGCCA CUGAUGAGGCCGUUAGGCCGAA ICCCGCUG | 13515 |
| 84 | AGCGGGCC U GGCGGCGA | 4176 | UCGCCGCC CUGAUGAGGCCGUUAGGCCGAA IGCCCGCU | 13516 |
| 100 | AGGAUUAC C CGGGGAAG | 4177 | CUUCCCCG CUGAUGAGGCCGUUAGGCCGAA IUAAUCCU | 13517 |
| 101 | GGAUUACC C GGGGAAGU | 4178 | ACUUCCCC CUGAUGAGGCCGUUAGGCCGAA IGUAAUCC | 13518 |
| 117 | UGGUUGUC U CCUGGCUG | 4179 | CAGCCAGG CUGAUGAGGCCGUUAGGCCGAA IACAACCA | 13519 |
| 119 | GUUGUCUC C UGGCUGGA | 4180 | UCCAGCCA CUGAUGAGGCCGUUAGGCCGAA IAGACAAC | 13520 |
| 120 | UUGUCUCC U GGCUGGAG | 4181 | CUCCAGCC CUGAUGAGGCCGUUAGGCCGAA IGAGACAA | 13521 |
| 124 | CUCCUGGC U GGAGCCGC | 4182 | GCGGCUCC CUGAUGAGGCCGUUAGGCCGAA ICCAGGAG | 13522 |
| 130 | GCUGGAGC C GCGAGACG | 4183 | CGUCUCGC CUGAUGAGGCCGUUAGGCCGAA ICUCCAGC | 13523 |
| 144 | ACGGGCGC U CAGGGCGC | 4184 | GCGCCCUG CUGAUGAGGCCGUUAGGCCGAA ICGCCCGU | 13524 |
| 146 | GGGCGCUC A GGGCGCGG | 4185 | CCGCGCCC CUGAUGAGGCCGUUAGGCCGAA IAGCGCCC | 13525 |
| 158 | CGCGGGGC C GGCGGCGG | 4186 | CCGCCGCC CUGAUGAGGCCGUUAGGCCGAA ICCCCGCG | 13526 |
| 184 | GGACGGAC U CUGGCGGC | 4187 | GCCGCCAG CUGAUGAGGCCGUUAGGCCGAA IUCCGUCC | 13527 |
| 186 | ACGGACUC U GGCGGCCG | 4188 | CGGCCGCC CUGAUGAGGCCGUUAGGCCGAA IAGUCCGU | 13528 |
| 193 | CUGGCGGC C GGGUCGUU | 4189 | AACGACCC CUGAUGAGGCCGUUAGGCCGAA ICCGCCAG | 13529 |
| 205 | UCGUUGGC C GGGGGAGC | 4190 | GCUCCCCC CUGAUGAGGCCGUUAGGCCGAA ICCAACGA | 13530 |
| 220 | GCGCGGGC A CCGGGCGA | 4191 | UCGCCCGG CUGAUGAGGCCGUUAGGCCGAA ICCCGCGC | 13531 |
| 222 | GCGGGCAC C GGGCGAGC | 4192 | GCUCGCCC CUGAUGAGGCCGUUAGGCCGAA IUGCCCGC | 13532 |
| 231 | GGGCGAGC A GGCCGCGU | 4193 | ACGCGGCC CUGAUGAGGCCGUUAGGCCGAA ICUCGCCC | 13533 |
| 235 | GAGCAGGC C GCGUCGCG | 4194 | CGCGACGC CUGAUGAGGCCGUUAGGCCGAA ICCUGCUC | 13534 |
| 245 | CGUCGCGC U CACCAUGG | 4195 | CCAUGGUG CUGAUGAGGCCGUUAGGCCGAA ICGCGACG | 13535 |
| 247 | UCGCGCUC A CCAUGGUC | 4196 | GACCAUGG CUGAUGAGGCCGUUAGGCCGAA IAGCGCGA | 13536 |
| 249 | GCGCUCAC C AUGGUCAG | 4197 | CUGACCAU CUGAUGAGGCCGUUAGGCCGAA IUGAGCGC | 13537 |
| 250 | CGCUCACC A UGGUCAGC | 4198 | GCUGACCA CUGAUGAGGCCGUUAGGCCGAA IGUGAGCG | 13538 |
| 256 | CCAUGGUC A GCUACUGG | 4199 | CCAGUAGC CUGAUGAGGCCGUUAGGCCGAA IACCAUGG | 13539 |
| 259 | UGGUCAGC U ACUGGGAC | 4200 | GUCCCAGU CUGAUGAGGCCGUUAGGCCGAA ICUGACCA | 13540 |
| 262 | UCAGCUAC U GGGACACC | 4201 | GGUGUCCC CUGAUGAGGCCGUUAGGCCGAA IUAGCUGA | 13541 |
| 268 | ACUGGGAC A CCGGGGUC | 4202 | GACCCCGG CUGAUGAGGCCGUUAGGCCGAA IUCCCAGU | 13542 |
| 270 | UGGGACAC C GCGGUCCU | 4203 | AGGACCCC CUGAUGAGGCCGUUAGGCCGAA IUGUCCCA | 13543 |
| 277 | CCGGGGUC C UGCUGUGC | 4204 | GCACAGCA CUGAUGAGGCCGUUAGGCCGAA IACCCCGG | 13544 |
| 278 | CGGGGUCC U GCUGUGCG | 4205 | CGCACAGC CUGAUGAGGCCGUUAGGCCGAA IGACCCCG | 13545 |
| 281 | GGUCCUGC U GUGCGCGC | 4206 | GCGCGCAC CUGAUGAGGCCGUUAGGCCGAA ICAGGACC | 13546 |
| 290 | GUGCGCGC U GCUCAGCU | 4207 | AGCUGAGC CUGAUGAGGCCGUUAGCCCGAA ICGCGCAC | 13547 |
| 293 | CGCGCUGC U CAGCUGUC | 4208 | GACAGCUG CUGAUGAGGCCGUUAGGCCGAA ICAGCGCG | 13548 |
| 295 | CGCUGCUC A GCUGUCUG | 4209 | CAGACAGC CUGAUGAGGCCGUUAGGCCGAA IAGCAGCG | 13549 |
| 298 | UGCUCAGC U GUCUGCUU | 4210 | AAGCAGAC CUGAUGAGGCCGUUAGGCCGAA ICUGAGCA | 13550 |
| 302 | CAGCUGUC U GCUUCUCA | 4211 | UGAGAAGC CUGAUGAGGCCGUUAGCCCGAA IACAGCUG | 13551 |
| 305 | CUGUCUGC U UCUCACAG | 4212 | CUGUGAGA CUGAUGAGGCCGUUAGGCCGAA ICAGACAG | 13552 |
| 308 | UCUGCUUC U CACAGGAU | 4213 | AUCCUGUG CUGAUGAGGCCGUUAGGCCGAA IAAGCAGA | 13553 |
| 310 | UGCUUCUC A CAGGAUCU | 4214 | AGAUCCUG CUGAUGAGGCCGUUAGGCCGAA IAGAAGCA | 13554 |
| 312 | CUUCUCAC A GGAUCUAG | 4215 | CUAGAUCC CUGAUGAGGCCGUUAGGCCGAA IUGAGAAG | 13555 |
| 318 | ACAGGAUC U AGUUCAGG | 4216 | CCUGAACU CUGAUGAGGCCGUUAGGCCGAA IAUCCUGU | 13556 |
| 324 | UCUAGUUC A GGUUCAAA | 4217 | UUUGAACC CUGAUGAGGCCGUUAGGCCGAA IAACUAGA | 13557 |
| 330 | UCAGGUUC A AAAUUAAA | 4218 | UUUAAUUU CUGAUGAGGCCGUUAGGCCGAA IAACCUGA | 13558 |
| 344 | AAAAGAUC C UGAACUGA | 4219 | UCAGUUCA CUGAUGAGGCCGUUAGGCCGAA IAUCUUUU | 13559 |
| 345 | AAAGAUCC U GAACUGAG | 4220 | CUCAGUUC CUGAUGAGGCCGUUAGGCCGAA IGAUCUUU | 13560 |
| 350 | UCCUGAAC U GAGUUUAA | 4221 | UUAAACUC CUGAUGAGGCCGUUAGGCCGAA IUUCAGGA | 13561 |
| 364 | UAAAAGGC A CCCAGCAC | 4222 | GUGCUGGG CUGAUGAGGCCGUUAGGCCGAA ICCUUUUA | 13562 |
| 366 | AAAGGCAC C CAGCACAU | 4223 | AUGUGCUG CUGAUGAGGCCGUUAGGCCGAA IUGCCUUU | 13563 |
| 367 | AAGGCACC C AGCACAUC | 4224 | GAUGUGCU CUGAUGAGGCCGUUAGGCCGAA IGUGCCUU | 13564 |
| 368 | AGGCACCC A GCACAUCA | 4225 | UGAUGUGC CUGAUGAGGCCGUUAGGCCGAA IGGUGCCU | 13565 |
| 371 | CACCCAGC A CAUCAUGC | 4226 | GCAUGAUG CUGAUGAGGCCGUUAGGCCGAA ICUGGGUG | 13566 |
| 373 | CCCAGCAC A UCAUGCAA | 4227 | UUGCAUGA CUGAUGAGGCCGUUAGGCCGAA IUGCUGGG | 13567 |
| 376 | AGCACAUC A UGCAAGCA | 4228 | UGCUUGCA CUGAUGAGGCCGUUAGGCCGAA IAUGUGCU | 13568 |
| 380 | CAUCAUGC A AGCAGGCC | 4229 | GGCCUGCU CUGAUGAGGCCGUUAGGCCGAA ICAUGAUG | 13569 |
| 384 | AUGCAAGC A GGCCAGAC | 4230 | GUCUGGCC CUGAUGAGGCCGUUAGGCCGAA ICUUGCAU | 13570 |
| 388 | AAGCAGGC C AGACACUG | 4231 | CAGUGUCU CUGAUGAGGCCGUUAGGCCGAA ICCUGCUU | 13571 |
| 389 | AGCAGGCC A GACACUGC | 4232 | GCAGUGUC CUGAUGAGGCCGUUAGGCCGAA IGCCUGCU | 13572 |
| 393 | GGCCAGAC A CUGCAUCU | 4233 | AGAUGCAG CUGAUGAGGCCGUUAGGCCGAA IUCUGGCC | 13573 |
| 395 | CCAGACAC U GCAUCUCC | 4234 | GGAGAUGC CUGAUGAGGCCGUUAGGCCGAA IUGUCUGG | 13574 |
| 398 | GACACUGC A UCUCCAAU | 4235 | AUUGGAGA CUGAUGAGGCCGUUAGGCCGAA ICAGUGUC | 13575 |
| 401 | ACUGCAUC U CCAAUGCA | 4236 | UGCAUUGG CUGAUGAGGCCGUUAGGCCGAA IAUGCAGU | 13576 |
| 403 | UGCAUCUC C AAUGCAGG | 4237 | CCUGCAUU CUGAUGAGGCCGUUAGGCCGAA IAGAUGCA | 13577 |
| 404 | GCAUCUCC A AUGCAGGG | 4238 | CCCUGCAU CUGAUGAGGCCGUUAGGCCGAA IGAGAUGC | 13578 |
| 409 | UCCAAUGC A GGGGGGAA | 4239 | UUCCCCCC CUGAUGAGGCCGUUAGGCCGAA ICAUUGGA | 13579 |
| 420 | GGGGAAGC A GCCCAUAA | 4240 | UUAUGGGC CUGAUGAGGCCGUUAGGCCGAA ICUUCCCC | 13580 |
| 423 | GAAGCAGC C CAUAAAUG | 4241 | CAUUUAUG CUGAUGAGGCCGUUAGGCCGAA ICUGCUUC | 13581 |
| 424 | AAGCAGCC C AUAAAUGG | 4242 | CCAUUUAU CUGAUGAGGCCGUUAGGCCGAA IGCUGCUU | 13582 |
| 425 | AGCAGCCC A UAAAUGGU | 4243 | ACCAUUUA CUGAUGAGGCCGUUAGGCCGAA IGGCUGCU | 13583 |
| 435 | AAAUGGUC U UUGCCUGA | 4244 | UCAGGCAA CUGAUGAGGCCGUUAGGCCGAA IACCAUUU | 13584 |
| 440 | GUCUUUGC C UGAAAUGG | 4245 | CCAUUUCA CUGAUGAGGCCGUUAGGCCGAA ICAAAGAC | 13585 |
| 441 | UCUUUGCC U GAAAUGGU | 4246 | ACCAUUUC CUGAUGAGGCCGUUAGGCCGAA IGCAAAGA | 13586 |
| 470 | CGAAAGGC U GAGCAUAA | 4247 | UUAUGCUC CUGAUGAGGCCGUUAGGCCGAA ICCUUUCG | 13587 |
| 475 | GGCUGAGC A UAACUAAA | 4248 | UUUAGUUA CUGAUGAGGCCGUUAGGCCGAA ICUCAGCC | 13588 |
| 480 | AGCAUAAC U AAAUCUGC | 4249 | GCAGAUUU CUGAUGAGGCCGUUAGGCCGAA IUUAUGCU | 13589 |
| 486 | ACUAAAUC U GCCUGUGG | 4250 | CCACAGGC CUGAUGAGGCCGUUAGGCCGAA IAUUUAGU | 13590 |
| 489 | AAAUCUGC C UGUGGAAG | 4251 | CUUCCACA CUGAUGAGGCCGUUAGGCCGAA ICAGAUUU | 13591 |
| 490 | AAUCUGCC U GUGGAAGA | 4252 | UCUUCCAC CUGAUGAGGCCGUUAGGCCGAA IGCAGAUU | 13592 |
| 505 | GAAAUGGC A AACAAUUC | 4253 | GAAUUGUU CUGAUGAGGCCGUUAGGCCGAA ICCAUUUC | 13593 |
| 509 | UGGCAAAC A AUUCUGCA | 4254 | UGCAGAAU CUGAUGAGGCCGUUAGGCCGAA IUUUGCCA | 13594 |
| 514 | AACAAUUC U GCAGUACU | 4255 | AGUACUGC CUGAUGAGGCCGUUAGGCCGAA IAAUUGUU | 13595 |
| 517 | AAUUCUGC A GUACUUUA | 4256 | UAAAGUAC CUGAUGAGGCCGUUAGGCCGAA ICAGAAUU | 13596 |
| 522 | UGCAGUAC U UUAACCUU | 4257 | AAGGUUAA CUGAUGAGGCCGUUAGGCCGAA IUACUGCA | 13597 |
| 528 | ACUUUAAC C UUGAACAC | 4258 | CUGUUCAA CUGAUGAGGCCGUUAGGCCGAA IUUAAAGU | 13598 |
| 529 | CUUUAACC U UGAACACA | 4259 | UGUGUUCA CUGAUGAGGCCGUUAGGCCGAA IGUUAAAG | 13599 |
| 535 | CCUUGAAC A CAGCUCAA | 4260 | UUGAGCUG CUGAUGAGGCCGUUAGGCCGAA IUUCAAGG | 13600 |
| 537 | UUGAACAC A GCUCAAGC | 4261 | GCUUGAGC CUGAUGAGGCCGUUACGCCGAA IUGUUCAA | 13601 |
| 540 | AACACAGC U CAAGCAAA | 4262 | UUUGCUUG CUGAUGAGGCCGUUAGGCCGAA ICUGUGUU | 13602 |
| 542 | CACAGCUC A AGCAAACC | 4263 | GGUUUGCU CUGAUGAGGCCGUUAGGCCGAA IAGCUGUG | 13603 |
| 546 | GCUCAAGC A AACCACAC | 4264 | GUGUGGUU CUGAUCAGGCCGUUAGGCCGAA ICUUGAGC | 13604 |
| 550 | AAGCAAAC C ACACUGGC | 4265 | GCCAGUGU CUGAUGAGGCCGUUAGGCCGAA IUUUGCUU | 13605 |
| 551 | AGCAAACC A CACUGGCU | 4266 | AGCCAGUG CUGAUGAGGCCGUUAGGCCGAA IGUUUGCU | 13606 |
| 553 | CAAACCAC A CUGGCUUC | 4267 | GAAGCCAG CUGAUGAGGCCGUUAGGCCGAA IUGGUUUG | 13607 |
| 555 | AACCACAC U GGCUUCUA | 4268 | UAGAAGCC CUGAUGAGGCCGUUAGGCCGAA IUGUGGUU | 13608 |
| 559 | ACACUGUC U UCUACAGC | 4269 | GCUGUAGA CUGAUGAGGCCGUUAGGCCGAA ICCAGUGU | 13609 |
| 562 | CUGGCUUC U ACAGCUGC | 4270 | GCAGCUGU CUGAUGAGGCCGUUAGGCCGAA IAAGCCAG | 13610 |
| 565 | GCUUCUAC A GCUGCAAA | 4271 | UUUGCAGC CUGAUGAGGCCGUUAGGCCGAA IUAGAAGC | 13611 |
| 568 | UCUACAGC U GCAAAUAU | 4272 | AUAUUUGC CUGAUGAGGCCGUUAGGCCGAA ICUGUAGA | 13612 |
| 571 | ACAGCUGC A AAUAUCUA | 4273 | UAGAUAUU CUGAUGAGGCCGUUAGGCCGAA ICAGCUGU | 13613 |
| 578 | CAAAUAUC U AGCUGUAC | 4274 | GUACAGCU CUGAUGAGGCCGUUAGGCCGAA IAUAUUUG | 13614 |
| 582 | UAUCUAGC U GUACCUAC | 4275 | GUAGGUAC CUGAUGAGGCCGUUAGGCCGAA ICUAGAUA | 13615 |
| 587 | AGGUGUAC C UACUUCAA | 4276 | UUGAAGUA CUGAUGAGGCCGUUAGGCCGAA IUACAGCU | 13616 |
| 588 | GCUGUACC U ACUUCAAA | 4277 | UUUGAAGU CUGAUGAGGCCGUUAGGCCGAA IGUACAGC | 13617 |
| 591 | GUACCUAC U UCAAAGAA | 4278 | UUCUUUGA CUGAUGAGGCCGUUAGGCCGAA IUAGGUAC | 13618 |
| 594 | CCUACUUC A AAGAAGAA | 4279 | UUCUUCUU CUGAUGAGGCCGUUAGGCCGAA IAAGUAGG | 13619 |
| 609 | AAGGAAAC A GAAUCUGC | 4280 | GCAGAUUC CUGAUGAGGCCGUUAGGCCGAA IUUUCCUU | 13620 |
| 615 | ACAGAAUC U GCAAUCUA | 4281 | UAGAUUGC CUGAUGAGGCCGUUAGGCCGAA IAUUCUGU | 13621 |
| 618 | GAAUCUGC A AUCUAUAU | 4282 | AUAUAGAU CUGAUGAGGCCGUUAGGCCGAA ICAGACUC | 13622 |
| 622 | CUGCAAUC U AUAUAUUU | 4283 | AAAUAUAU CUGAUGAGGCCGUUAGGCCGAA IAUUGCAG | 13623 |
| 642 | AGUGAUAC A GGUAGACC | 4284 | GGUCUACC CUGAUGAGGCCGUUAGGCCGAA IUAUCACU | 13624 |
| 650 | AGGUAGAC C UUUCGUAG | 4285 | CUACGAAA CUGAUGAGGCCGUUAGGCCGAA IUCUACCU | 13625 |
| 651 | GGUAGACC U UUCGUAGA | 4286 | UCUACGAA CUGAUGAGGCCGUUAGGCCGAA IGUCUACC | 13626 |
| 667 | AGAUGUAC A GUGAAAUC | 4287 | GAUUUCAC CUGAUGAGGCCGUUAGGCCGAA IUACAUCU | 13627 |
| 676 | GUGAAAUC C CCGAAAUU | 4288 | AAUUUCGG CUGAUGAGGCCGUUAGGCCGAA IAUUUCAC | 13628 |
| 677 | UGAAAUCC C CGAAAUUA | 4289 | UAAUUUCG CUGAUGAGGCCGUUAGGCCGAA IGAUUUCA | 13629 |
| 678 | GAAAUCCC C GAAAUUAU | 4290 | AUAAUUUC CUGAUGAGGCCGUUAGGCCGAA IGGAUUUC | 13630 |
| 689 | AAUUAUAC A CAUGACUG | 4291 | CAGUCAUG CUGAUGAGGCCGUUAGGCCGAA IUAUAAUU | 13631 |
| 691 | UUAUACAC A UGACUGAA | 4292 | UUCAGUCA CUGAUGAGGCCGUUAGGCCGAA IUGUAUAA | 13632 |
| 696 | CACAUGAC U GAAGGAAG | 4293 | CUUCCUUC CUGAUGAGGCCGUUAGGCCGAA IUCAUGUG | 13633 |
| 710 | AAGGGAGC U CGUCAUUC | 4294 | GAAUGACG CUGAUGAGGCCGUUAGGCCGAA ICUCCCUU | 13634 |
| 715 | AGCUCGUC A UUCCCUGC | 4295 | GCAGGGAA CUGAUGAGGCCGUUAGGCCGAA IACGAGCU | 13635 |
| 719 | CGUCAUUC C CUGCCGGG | 4296 | CCCGGCAG CUGAUGAGGCCGUUAGGCCGAA IAAUGACG | 13636 |
| 720 | GUCAUUCC C UGCCGGGU | 4297 | ACCCGGCA CUGAUGAGGCCGUUAGGCCGAA IGAAUGAC | 13637 |
| 721 | UCAUUCCC U GCCGGGUU | 4298 | AACCCGGC CUGAUGAGGCCGUUAGGCCGAA IGGAAUGA | 13638 |
| 724 | UUCCCUGC C GGGUUACG | 4299 | CGUAACCC CUGAUGAGGCCGUUAGGCCGAA ICAGGGAA | 13639 |
| 735 | GUUACGUC A CCUAACAU | 4300 | AUGUUAGG CUGAUGAGGCCGUUAGGCCGAA IACGUAAC | 13640 |
| 737 | UACGUCAC C UAACAUCA | 4301 | UGAUGUUA CUGAUGAGGCCGUUAGGCCGAA IUGACGUA | 13641 |
| 738 | ACGUCACC U AACAUCAC | 4302 | GUGAUGUU CUGAUGAGGCCGUUAGGCCGAA IGUGACGU | 13642 |
| 742 | CACCUAAC A UCACUGUU | 4303 | AACAGUGA CUGAUGAGGCCGUUAGGCCGAA IUUAGGUG | 13643 |
| 745 | CUUACAUC A CUGUUACU | 4304 | AGUAACAG CUGAUGAGGCCGUUAGGCCGAA IAUGUUAG | 13644 |
| 747 | AACAUCAC U GUUACUUU | 4305 | AAAGUAAC CUGAUGAGGCCGUUAGGCCGAA IUGAUGUU | 13645 |
| 753 | ACUGUGAC U UUAAAAAA | 4306 | UUUUUUAA CUGAUGAGGCCGUUAGGCCGAA IUAACAGU | 13646 |
| 767 | AAAGUUUC C ACUUGACA | 4307 | UGUCAAGU CUGAUGAGGCCGUUAGGCCGAA IAAACUUU | 13647 |
| 768 | AAGUUUCC A CUUGACAC | 4308 | GUGUCAAG CUGAUGAGGCCGUUAGGCCGAA IGAAACUU | 13648 |
| 770 | GUUUCCAC U UGACACUU | 4309 | AAGUGUCA CUGAUGAGGCCGUUAGGCCGAA IUGGAAAC | 13649 |
| 775 | CACUUGAC A CUUUGAUC | 4310 | GAUCAAAG CUGAUGAGGCCGUUAGGCCGAA IUCAAGUG | 13650 |
| 777 | CUUGACAC U UUGAUCCC | 4311 | GGGAUCAA CUGAUGAGGCCGUUAGGCCGAA IUGUCAAG | 13651 |
| 784 | CUUUGAUC C CUGAUGGA | 4312 | UCCAUCAG CUGAUGAGGCCGUUAGGCCGAA IAUCAAAG | 13652 |
| 785 | UUUGAUCC C UGAUGGAA | 4313 | UUCCAUCA CUGAUGAGGCCGUUAGGCCGAA IGAUCAAA | 13653 |
| 786 | UUGAUCCC U GAUGGAAA | 4314 | UUUCCAUC CUGAUGAGGCCGUUAGGCCGAA IGGAUCAA | 13654 |
| 799 | GAAAACGC A UAAUCUGG | 4315 | UCAGAUUA CUGAUGAGGCCGUUAGGCCGAA ICGUUUUC | 13655 |
| 805 | GCAUAAUC U GGGACAGU | 4316 | ACUGUCCC CUGAUGAGGCCGUUAGGCCGAA IAUUAUGC | 13656 |
| 811 | UCUGGGAC A GUAGAAAG | 4317 | CUUUCUAC CUGAUGAGGCCGUUAGGCCGAA IUCCCAGA | 13657 |
| 823 | GAAAGGGC U UCAUCAUA | 4318 | UAUGAUGA CUGAUGAGGCCGUUAGGCCGAA ICCCUUUC | 13658 |
| 826 | AGGGCUUC A UCAUAUCA | 4319 | UGAUAUGA CUGAUGAGGCCGUUAGGCCGAA IAAGCCCU | 13659 |
| 829 | GCUUCAUC A UAUCAAAU | 4320 | AUUUGAUA CUGAUGAGGCCGUUAGGCCGAA IAUGAAGC | 13660 |
| 834 | AUCAUAUC A AAUGCAAC | 4321 | GUUGCAUU CUGAUGAGGCCGUUAGGCCGAA IAUAUGAU | 13661 |
| 840 | UCAAAUGC A ACGUACAA | 4322 | UUGUACGU CUGAUGAGGCCGUUAGGCCGAA ICAGUUGA | 13662 |
| 847 | CAACGUAC A AAGAAAUA | 4323 | UAUUUCUU CUGAUGAGGCCGUUAGGCCGAA IUAGGUUG | 13663 |
| 860 | AAUAGGGC U UCUGACCU | 4324 | AGGUCAGA CUGAUGAGGCCGUUAGGCCGAA ICCCUAUU | 13664 |
| 863 | AGGGCUUC U GACCUGUG | 4325 | CACAGGUC CUGAUGAGGCCGUUAGGCCGAA IAAGCCCU | 13665 |
| 867 | CUUCUGAC C UGUGAAGC | 4326 | GCUUCACA CUGAUGAGGCCGUUAGGCCGAA IUCAGAAG | 13666 |
| 868 | UUCUGACC U GUGAAGCA | 4327 | UGCUUCAC CUGAUGAGGCCGUUAGGCCGAA IGUCAGAA | 13667 |
| 876 | UGUGAAGC A ACAGUCAA | 4328 | UUGACUGU CUGAUGAGGCCGUUAGGCCGAA ICUUCACA | 13668 |
| 879 | GAAGCAAC A GUCAAUGG | 4329 | CCAUUGAC CUGAUGAGGCCGUUAGGCCGAA IUUGCUUC | 13669 |
| 883 | CAACAGUC A AUGGGCAU | 4330 | AUGCCCAU CUGAUGAGGCCGUUAGGCCGAA IACUGUUG | 13670 |
| 890 | CAAUGGGC A UUUGUAUA | 4331 | UAUACAAA CUGAUGAGGCCGUUAGGCCGAA ICCCAUUG | 13671 |
| 903 | UAUAAGAC A AACUAUCU | 4332 | AGAUAGUU CUGAUGAGGCCGUUAGGCCGAA IUCUUAUA | 13672 |
| 907 | AGACAAAC U AUCUCACA | 4333 | UGUGAGAU CUGAUGAGGCCGUUAGGCCGAA IUUUGUCU | 13673 |
| 911 | AAACUAUC U CACACAUC | 4334 | GAUGUGUG CUGAUGAGGCCGUUAGGCCGAA IAUAGUUU | 13674 |
| 913 | ACUAUCUC A CACAUCGA | 4335 | UCGAUGUG CUGAUGAGGCCGUUAGGCCGAA IAGAUAGU | 13675 |
| 915 | UAUCUCAC A CAUCGACA | 4336 | UGUCGAUG CUGAUGAGGCCGUUAGGCCGAA IUGAGAUA | 13676 |
| 917 | UCUCACAC A UCGACAAA | 4337 | UUUGUCGA CUGAUGAGGCCGUUAGGCCGAA IUGUGAGA | 13677 |
| 923 | ACAUCGAC A AACCAAUA | 4338 | UAUUGGUU CUGAUGAGGCCGUUAGGCCGAA IUCCAUGU | 13678 |
| 927 | CGACAAAC C AAUACAAU | 4339 | AUUGUAUU CUGAUGAGGCCGUUAGGCCGAA IUUUGUCG | 13679 |
| 928 | GACAAACC A AUACAAUC | 4340 | GAUUGUAU CUGAUGAGGCCGUUAGGCCGAA IGUUUGUC | 13680 |
| 933 | ACCAAUAC A AUCAUAGA | 4341 | UCUAUGAU CUGAUGAGGCCGUUAGGCCGAA IUAUUGGU | 13681 |
| 937 | AUACAAUC A UAGAUGUC | 4342 | GACAUCUA CUGAUGAGGCCGUUAGGCCGAA IAUUGUAU | 13682 |
| 946 | UAGAUGUC C AAAUAAGC | 4343 | GCUUAUUU CUGAUGAGGCCGUUAGGCCGAA IACAUCUA | 13683 |
| 947 | AGAUGUCC A AAUAAGCA | 4344 | UGCUUAUU CUGAUGAGGCCGUUAGGCCGAA IGACAUCU | 13684 |
| 955 | AAAUAAGC A CACCACGC | 4345 | GCGUGGUG CUGAUGAGGCCGUUAGGCCGAA ICUUAUUU | 13685 |
| 957 | AUAAGCAC A CCACGCCC | 4346 | GGGCGUGG CUGAUGAGGCCGUUAGGCCGAA IUGCUUAU | 13686 |
| 959 | AAGCACAC C ACGCCCAG | 4347 | CUGGGCGU CUGAUGAGGCCGUUAGGCCGAA IUGUGCUU | 13687 |
| 960 | AGCACACC A CGCCCAGU | 4348 | ACUGGGCG CUGAUGAGGCCGUUAGGCCGAA IGUGUGCU | 13688 |
| 964 | CACCACGC C CAGUCAAA | 4349 | UUUGACUG CUGAUGAGGCCGUUAGGCCGAA ICGUGGUG | 13689 |
| 965 | ACCACGCC C AGUCAAAU | 4350 | AUUUGACU CUGAUGAGGCCGUUAGGCCGAA IGCGUGGU | 13690 |
| 966 | CCACGCCC A GUCAAAUU | 4351 | AAUUUGAC CUGAUGAGGCCGUUAGGCCGAA IGGCGUGG | 13691 |
| 970 | GCCCAGUC A AAUUACUU | 4352 | AAGUAAUU CUGAUGAGGCCGUUAGGCCGAA IACUGGGC | 13692 |
| 977 | CAAAUUAC U UAGAGGCC | 4353 | GGCCUCUA CUGAUGAGGCCGUUAGGCCGAA IUAAUUUG | 13693 |
| 985 | UUAGAGGC C AUACUCUU | 4354 | AAGAGUAU CUGAUGAGGCCGUUAGGCCGAA ICCUCUAA | 13694 |
| 986 | UAGAGGCC A UACUCUUG | 4355 | CAAGAGUA CUGAUGAGGCCGUUAGGCCGAA IGCCUCUA | 13695 |
| 990 | GGCCAUAC U CUUGUCCU | 4356 | AGGACAAG CUGAUGAGGCCGUUAGGCCGAA IUAUGGCC | 13696 |
| 992 | CCAUACUC U UGUCCUCA | 4337 | UGAGGACA CUGAUGAGGCCGUUAGGCCGAA IAGUAUGG | 13697 |
| 997 | CUCUUGUC C UCAAUUGU | 4358 | ACAAUUGA CUGAUGAGGCCGUUAGGCCGAA IACAAGAG | 13698 |
| 998 | UCUUGUCC U CAAUUGUA | 4359 | UACAAUUG CUGAUGAGGCCGUUAGGCCGAA IGACAAGA | 13699 |
| 1000 | UUGUCCUC A AUUGUACU | 4360 | AGUACAAU CUGAUGAGGCCGUUAGGCCGAA IAGGACAA | 13700 |
| 1008 | AAUUGUAC U GCUACCAC | 4361 | GUGGUAGC CUGAUGAGGCCGUUAGGCCGAA IUACAAUU | 13701 |
| 1011 | UGUACUGC U ACCACUCC | 4362 | GGAGUGGU CUGAUGAGGCCGUUAGGCCGAA ICAGUACA | 13702 |
| 1014 | ACUGCUAC C ACUCCCUU | 4363 | AAGGGAGU CUGAUGAGGCCGUUAGGCCGAA IUAGCAGU | 13703 |
| 1015 | CUGCUACC A CUCCCUUG | 4364 | CAAGGGAG CUGAUGAGGCCGUUAGGCCGAA IGUAGCAG | 13704 |
| 1017 | GCUACCAC U CCCUUGAA | 4365 | UUCAAGGG CUGAUGAGGCCGUUAGGCCGAA IUGGUAGC | 13705 |
| 1019 | UACCACUC C CUUGAACA | 4366 | UGUUCAAG CUGAUGAGGCCGUUAGGCCGAA IAGUGGUA | 13706 |
| 1020 | ACCACUCC C UUGAACAC | 4367 | GUGUUCAA CUGAUGAGGCCGUUAGGCCGAA IGAGUGGU | 13707 |
| 1021 | CCACUCCC U UGAACACG | 4368 | CGUGUUCA CUGAUGAGGCCGUUAGGCCGAA IGGAGUGG | 13708 |
| 1027 | CCUUGAAC A CGAGAGUU | 4369 | AACUCUCG CUGAUGAGGCCGUUAGGCCGAA IUUCAAGG | 13709 |
| 1037 | GAGAGUUC A AAUGACCU | 4370 | AGGUCAUU CUGAUGAGGCCGUUAGGCCGAA IAACUCUC | 13710 |
| 1044 | CAAAUGAC C UGGAGUUA | 4371 | UAACUCCA CUGAUGAGGCCGUUAGGCCGAA IUCAUUUG | 13711 |
| 1045 | AAAUGACC U GGAGUUAC | 4372 | GUAACUCC CUGAUGAGGCCGUUAGGCCGAA IGUCAUUU | 13712 |
| 1054 | GGAGUUAC C CUGAUGAA | 4373 | UUCAUCAG CUGAUGAGGCCGUUAGGCCGAA IUAACUCC | 13713 |
| 1055 | GAGUUACC C UGAUGAAA | 4374 | UUUCAUCA CUGAUGAGGCCGUUAGGCCGAA IGUAACUC | 13714 |
| 1056 | AGUUACCC U GAUGAAAA | 4375 | UUUUCAUC CUGAUGAGGCCGUUAGGCCGAA IGGUAACU | 13715 |
| 1077 | AAGAGAGC U UCCGUAAG | 4376 | CUUACGGA CUGAUGAGGCCGUUAGGCCGAA ICUCUCUU | 13716 |
| 1080 | AGAGCUUC C GUAAGGCG | 4377 | CGCCUUAC CUGAUGAGGCCGUUAGGCCGAA IAAGCUCU | 13717 |
| 1099 | GAAUUGAC C AAAGCAAU | 4378 | AUUGCUUU CUGAUGAGGCCGUUAGGCCGAA IUCAAUUC | 13718 |
| 1100 | AAUUGACC A AAGCAAUU | 4379 | AAUUGCUU CUGAUGAGGCCGUUAGGCCGAA IGUCAAUU | 13719 |
| 1105 | ACCAAAGC A AUUCCCAU | 4380 | AUGGGAAU CUGAUGAGGCCGUUAGGCCGAA ICUUUGGU | 13720 |
| 1110 | AGCAAUUC C CAUGCCAA | 4381 | UUGGCAUG CUGAUGAGGCCGUUAGGCCGAA IAAUUGCU | 13721 |
| 1111 | GCAAUUCC C AUGCCAAC | 4382 | GUUGGCAU CUGAUGAGGCCGUUAGGCCGAA IGAAUUGC | 13722 |
| 1112 | CAAUUCCC A UGCCAACA | 4383 | UGUUGGCA CUGAUGAGGCCGUUAGGCCGAA IGGAAUUG | 13723 |
| 1116 | UCCCAUGC C AACAUAUU | 4384 | AAUAUGUU CUGAUGAGGCCGUUAGGCCGAA ICAUGGGA | 13724 |
| 1117 | CCCAUGCC A ACAUAUUC | 4385 | GAAUAUGU CUGAUGAGGCCGUUAGGCCGAA IGCAUGGG | 13725 |
| 1120 | AUGCCAAC A UAUUCUAC | 4386 | GUAGAAUA CUGAUGAGGCCGUUAGGCCGAA IUUGGCAU | 13726 |
| 1126 | ACAUAUUC U ACAGUGUU | 4387 | AACACUGU CUGAUGAGGCCGUUAGGCCGAA IAAUAUGU | 13727 |
| 1129 | UAUUCUAC A GUGUUCUU | 4388 | AAGAACAC CUGAUGAGGCCGUUAGGCCGAA IUAGAAUA | 13728 |
| 1136 | CAGUGUUC U UACUAUUG | 4389 | CAAUAGUA CUGAUGAGGCCGUUAGGCCGAA IAACACUG | 13729 |
| 1140 | GUUCUUAC U AUUGACAA | 4390 | UUGUCAAU CUGAUGAGGCCGUUAGGCCGAA IUAAGAAC | 13730 |
| 1147 | CUAUUGAC A AAAUGCAG | 4391 | CUGCAUUU CUGAUGAGGCCGUUAGGCCGAA IUCAAUAG | 13731 |
| 1154 | CAAAAUGC A GAACAAAG | 4392 | CUUUGUUC CUGAUGAGGCCGUUAGGCCGAA ICAUUUUG | 13732 |
| 1159 | UGCAGAAC A AAGACAAA | 4393 | UUUGUCUU CUGAUGAGGCCGUUAGGCCGAA IUUCUGCA | 13733 |
| 1165 | ACAAAGAC A AAGGACUU | 4394 | AAGUCCUU CUGAUGAGGCCGUUAGGCCGAA IUCUUUGU | 13734 |
| 1172 | CAAAGGAC U UUAUACUU | 4395 | AAGUAUAA CUGAUGAGGCCGUUAGGCCGAA IUCCUCUG | 13735 |
| 1179 | CUUUAUAC U UGUCGUGU | 4396 | ACACGACA CUGAUGAGGCCGUUAGGCCGAA IUAUAAAG | 13736 |
| 1199 | GAGUGGAC C AUCAUCCA | 4397 | UGAAUGAU CUGAUGAGGCCGUUAGGCCGAA UUCCACUC | 13737 |
| 1200 | AGUGGACC A UCAUCCAA | 4398 | UUGAAUGA CUGAUGAGGCCGUUAGGCCGAA IGUCCACU | 13738 |
| 1203 | GGACCAUC A UUCAAAUC | 4399 | GAUUUGAA CUGAUGAGGCCGUUAGGCCGAA IAUGGUCC | 13739 |
| 1207 | CAUCAUUC A AAUCUGUU | 4400 | AACAGAUU CUGAUGAGGCCGUUAGGCCGAA IAAUGAUG | 13740 |
| 1212 | UUCAAAUC U GUUAACAC | 4401 | GUGUUAAC CUGAUGAGGCCGUUAGGCCGAA IAUUUGAA | 13741 |
| 1219 | CUGUUAAC A CCUCAGUG | 4402 | CACUGAGG CUGAUGAGGCCGUUAGGCCGAA IUUAACAG | 13742 |
| 1221 | GUUAACAC C UCAGUGCA | 4403 | UGCACUGA CUGAUGAGGCCGUUAGGCCGAA IUGUUAAC | 13743 |
| 1222 | UUAACACC U CAGUGCAU | 4404 | AUGCACUG CUGAUGAGGCCGUUAGGCCGAA IGUGUUAA | 13744 |
| 1224 | AACACCUC A GUGCAUAU | 4405 | AUAUGCAC CUGAUGAGGCCGUUAGGCCGAA IAGGUGUU | 13745 |
| 1229 | CUCAGUGC A UAUAUAUG | 4406 | CAUAUAUA CUGAUGAGGCCGUUAGGCCGAA ICACUGAG | 13746 |
| 1245 | GAUAAAGC A UUCAUCAC | 4407 | GUGAUGAA CUGAUGAGGCCGUUAGGCCGAA ICUUUAUC | 13747 |
| 1249 | AAGCAUUC A UCACUGUG | 4408 | CACAGUGA CUGAUGAGGCCGUUAGGCCGAA IAAUGCUU | 13748 |
| 1252 | CAUUCAUC A CUGUGAAA | 4409 | UUUCACAG CUGAUGAGGCCGUUAGGCCGAA IAUGAAUG | 13749 |
| 1254 | UUCAUCAC U GUGAAACA | 4410 | UGUUUCAC CUGAUGAGGCCGUUAGGCCGAA IUGAUGAA | 13750 |
| 1262 | UGUGAAAC A UCGAAAAC | 4411 | GUUUUCGA CUGAUGAGGCCGUUAGGCCGAA IUUUCACA | 13751 |
| 1271 | UCGAAAAC A GCAGGUGC | 4412 | GCACCUGC CUGAUGAGGCCGUUAGGCCGAA IUUUUCGA | 13752 |
| 1274 | AAAACAGC A GGUGCUUG | 4413 | CAAGCACC CUGAUGAGGCCGUUAGGCCGAA ICUGUUUU | 13753 |
| 1280 | GCAGGUGC U UGAAACCG | 4414 | CGGUUUCA CUGAUGAGGCCGUUAGGCCGAA ICACCUGC | 13754 |
| 1287 | CUUGAAAC C GUAGCUGG | 4415 | CCAGCUAC CUGAUGAGGCCGUUAGGCCGAA IUUUCAAG | 13755 |
| 1293 | ACCGUAGC U GGCAAGCG | 4416 | CGCUUGCC CUGAUGAGGCCGUUAGGCCGAA ICUACGGU | 13756 |
| 1297 | UAGCUGGC A AGCGGUCU | 4417 | AGACCGCU CUGAUGAGGCCGUUAGGCCGAA ICCAGCUA | 13757 |
| 1305 | AAGCGGUC U UACCGGCU | 4418 | AGCCGGUA CUGAUGAGGCCGUUAGGCCGAA IACCGCUU | 13758 |
| 1309 | GGUCUUAC C GGCUCUCU | 4419 | AGAGAGCC CUGAUGAGGCCGUUAGGCCGAA IUAAGACC | 13759 |
| 1313 | UUACCGGC U CUCUAUGA | 4420 | UCAUAGAG CUGAUGAGGCCGUUAGGCCGAA ICCGGUAA | 13760 |
| 1315 | ACCGGCUC U CUAUGAAA | 4421 | UUUCAUAG CUGAUGAGGCCGUUAGGCCGAA IAGCCGGU | 13761 |
| 1317 | CGGCUCUC U AUGAAAGU | 4422 | ACUUUCAU CUGAUGAGGCCGUUAGGCCGAA IAGAGCCG | 13762 |
| 1332 | GUGAAGGC A UUUCCCUC | 4423 | GAGGGAAA CUGAUGAGGCCGUUAGGCCGAA ICCUUCAC | 13763 |
| 1337 | GGCAUUUC C CUCGCCGG | 4424 | CCGGCGAG CUGAUGAGGCCGUUAGGCCGAA IAAAUGCC | 13764 |
| 1338 | GCAUUUCC C UCGCCGGA | 4425 | UCCGGCGA CUGAUGAGGCCGUUAGGCCGAA IGAAAUGC | 13765 |
| 1339 | CAUUUCCC U CGCCGGAA | 4426 | UUCCGGCG CUGAUGAGGCCGUUAGGCCGAA IGCAAAUC | 13766 |
| 1343 | UCCCUCGC C GGAAGUUG | 4427 | CAACUUCC CUGAUGAGGCCGUUAGGCCGAA ICGAGGGA | 13767 |
| 1373 | UGGGUUAC C UGCGACUG | 4428 | CAGUCGCA CUGAUGAGGCCGUUAGGCCGAA IUAACCCA | 13768 |
| 1374 | GGGUUACC U GCGACUGA | 4429 | UCAGUCGC CUGAUGAGGCCGUUAGGCCGAA IGUAACCC | 13769 |
| 1380 | CCUGCGAC U GAGAAAUC | 4430 | GAUUUCUC CUGAUGAGGCCGUUAGGCCGAA IUCGCAGG | 13770 |
| 1389 | GAGAAAUC U GCUCGCUA | 4431 | UAGCGAGC CUGAUGAGGCCGUUAGGCCGAA IAUUUCUC | 13771 |
| 1392 | AAAUCUGC U CGCUAUUU | 4432 | AAAUAGCG CUGAUGAGGCCGUUAGGCCGAA ICAGAUUU | 13772 |
| 1396 | CUGCUCGC U AUUUGACU | 4433 | AGUCAAAU CUGAUGAGGCCGUUAGGCCGAA ICGAGCAG | 13773 |
| 1404 | UAUUUGAC U CGUGGCUA | 4434 | UAGCCACG CUGAUGAGGCCGUUAGGCCGAA IUCAAAUA | 13774 |
| 1411 | CUCGUGGC U ACUCGUUA | 4435 | UAACGAGU CUGAUGAGGCCGUUAGGCCGAA ICCACGAG | 13775 |
| 1414 | GUGGCUAC U CGUUAAUU | 4436 | AAUUAACG CUGAUGAGGCCGUUAGGCCGAA IUAGCCAC | 13776 |
| 1426 | UAAUUAUC A AGGACGUA | 4437 | UACGUCCU CUGAUGAGGCCGUUAGGCCGAA IAUAAUUA | 13777 |
| 1437 | GACGUAAC U GAAGAGGA | 4438 | UCCUCUUC CUGAUGAGGCCGUUAGGCCGAA IUUACGUC | 13778 |
| 1449 | GAGGAUGC A GGGAAUUA | 4439 | UAAUUCCC CUGAUGAGGCCGUUAGGCCGAA ICAUCCUC | 13779 |
| 1461 | AAUUAUAC A AUCUUGCU | 4440 | AGCAAGAU CUGAUGAGGCCGUUAGGCCGAA IUAUAAUU | 13780 |
| 1465 | AUACAAUC U UGCUGAGC | 4441 | GCUCAGCA CUGAUGAGGCCGUUAGGCCGAA IAUUGUAU | 13781 |
| 1469 | AAUCUUGC U GAGCAUAA | 4442 | UUAUGCUC CUGAUGAGGCCGUUAGGCCGAA ICAAGAUU | 13782 |
| 1474 | UGCUGAGC A UAAAACAG | 4443 | CUGUUUUA CUGAUGAGGCCGUUAGGCCGAA ICUCAGCA | 13783 |
| 1481 | CAUAAAAC A GUCAAAUG | 4444 | CAUUUGAC CUGAUGAGGCCGUUAGGCCGAA IUUUUAUG | 13784 |
| 1485 | AAACAGUC A AAUGUGUU | 4445 | AACACAUU CUGAUGAGGCCGUUAGGCCGAA IACUGUUU | 13785 |
| 1501 | UUAAAAAC C UCACUGCC | 4446 | GGCAGUGA CUGAUGAGGCCGUUAGGCCGAA IUUUUUAA | 13786 |
| 1502 | UAAAAACC U CACUGCCA | 4447 | UGGCAGUG CUGAUGAGGCCGUUAGGCCGAA IGUUUUUA | 13787 |
| 1504 | AAAACCUC A CUGCCACU | 4448 | AGUGGCAG CUGAUGAGGCCGUUAGGCCGAA IAGGUUUU | 13788 |
| 1506 | AACCUCAC U GCCACUCU | 4449 | AGAGUGGC CUGAUGAGGCCGUUAGGCCGAA IUGAGGUU | 13789 |
| 1509 | CUCACUGC C ACUCUAAU | 4450 | AUUAGAGU CUGAUGAGGCCGUUAGGCCGAA ICAGUGAG | 13790 |
| 1510 | UCACUGCC A CUCUAAUU | 4451 | AAUUAGAG CUGAUGAGGCCGUUAGGCCGAA IGCAGUGA | 13791 |
| 1512 | ACUGCCAC U CUAAUUGU | 4452 | ACAAUUAG CUGAUGAGGCCGUUAGGCCGAA IUGGCAGU | 13792 |
| 1514 | UGCCACUC U AAUUGUCA | 4453 | UGACAAUU CUGAUGAGGCCGUUAGGCCGAA IAGUGGCA | 13793 |
| 1522 | UAAUUGUC A AUGUGAAA | 4454 | UUUCACAU CUGAUGAGGCCGUUAGGCCGAA IACAAUUA | 13794 |
| 1532 | UGUGAAAC C CCAGAUUU | 4455 | AAAUCUGG CUGAUGAGGCCGUUAGGCCGAA IUUUCACA | 13795 |
| 1533 | GUGAAACC C CAGAUUUA | 4456 | UAAAUCUG CUGAUGAGGCCGUUAGGCCGAA IGUUUCAC | 13796 |
| 1534 | UGAAACCC C AGAUUUAC | 4457 | GUAAAUCU CUGAUGAGGCCGUUAGGCCGAA IGGUUUCA | 13797 |
| 1535 | GAAACCCC A GAUUUACG | 4458 | CGUAAAUC CUGAUGAGGCCGUUAGGCCGAA IGGGUUUC | 13798 |
| 1551 | GAAAAGGC C GUGUCAUC | 4459 | GAUGACAC CUGAUGAGGCCGUUAGGCCGAA ICCUUUUC | 13799 |
| 1557 | GCCGUGUC A UCGUUUCC | 4480 | GGAAACGA CUGAUGAGGCCGUUAGGCCGAA IACACGGC | 13800 |
| 1565 | AUCGUUUC C AGACCCGG | 4461 | CCGGGUCU CUGAUGAGGCCGUUAGGCCGAA IAAACGAU | 13801 |
| 1566 | UCGUUUCC A GACCCGGC | 4462 | GCCGGGUC CUGAUGAGGCCGUUAGGCCGAA IGAAACGA | 13802 |
| 1570 | UUCCAGAC C CGGCUCUC | 4463 | GAGAGCCG CUGAUGAGGCCGUUAGGCCGAA IUCUGGAA | 13803 |
| 1571 | UCCAGACC C GGCUCUCU | 4464 | AGAGAGCC CUGAUGAGGCCGUUAGGCCGAA IGUCUGGA | 13804 |
| 1575 | GACCCGGC U CUCUACCC | 4465 | GGGUAGAG CUGAUGAGGCCGUUAGGCCGAA ICCGGGUC | 13805 |
| 1577 | CCCGGCUC U CUACCCAC | 4466 | GUGGGUAG CUGAUGAGGCCGUUAGGCCGAA IAGCCGGG | 13806 |
| 1579 | CGGCUCUC U ACCCACUG | 4467 | CAGUGGGU CUGAUGAGGCCGUUAGGCCGAA IAGAGCCG | 13807 |
| 1582 | CUCUCUAC C CACUGGGC | 4468 | GCCCAGUG CUGAUGAGGCCGUUAGGCCGAA IUAGAGAG | 13808 |
| 1583 | UCUCUACC C ACUGGGCA | 4469 | UGCCCAGU CUGAUGAGGCCGUUAGGCCGAA IGUAGAGA | 13809 |
| 1584 | CUCUACCC A CUGGGCAG | 4470 | CUGCCCAG CUGAUGAGGCCGUUAGGCCGAA IGGUAGAG | 13810 |
| 1586 | CUACCCAC U GGGCAGCA | 4471 | UGCUGCCC CUGAUGAGGCCGUUAGGCCGAA IUGGGUAG | 13811 |
| 1591 | CACUGGGC A GCAGACAA | 4472 | UUGUCUGC CUGAUGAGGCCGUUAGGCCGAA ICCCAGUG | 13812 |
| 1594 | UGGGCAGC A GACAAAUC | 4473 | GAUUUGUC CUGAUGAGGCCGUUAGGCCGAA ICUGCCCA | 13813 |
| 1598 | CAGCAGAC A AAUCCUGA | 4474 | UCAGGAUU CUGAUGAGGCCGUUAGGCCGAA IUCUGCUG | 13814 |
| 1603 | GACAAAUC C UGACUUGU | 4475 | ACAAGUCA CUGAUGAGGCCGUUAGGCCGAA IAUUUGUC | 13815 |
| 1604 | ACAAAUCC U GACUUGUA | 4476 | UACAAGUC CUGAUGAGGCCGUUAGGCCGAA IGAUUUGU | 13816 |
| 1608 | AUCCUGAC U UGUACCGC | 4477 | GCGGUACA CUGAUGAGGCCGUUAGGCCGAA IUCAGGAU | 13817 |
| 1614 | ACUUGUAC C GCAUAUGG | 4478 | CCAUAUGC CUGAUGAGGCCGUUAGGCCGAA IUACAAGU | 13818 |
| 1617 | UGUACCGC A UAUGGUAU | 4479 | AUACCAUA CUGAUGAGGCCGUUAGGCCGAA ICGGUACA | 13819 |
| 1627 | AUGGUAUC C CUCAACCU | 4480 | AGGUUGAG CUGAUGAGGCCGUUAGGCCGAA IAUACCAU | 13820 |
| 1628 | UGGUAUCC C UCAACCUA | 4481 | UAGGUUGA CUGAUGAGGCCGUUAGGCCGAA IGAUACCA | 13821 |
| 1629 | GGUAUCCC U CAACCUAC | 4482 | GUAGGUUG CUGAUGAGGCCGUUAGGCCGAA IGGAUACC | 13822 |
| 1631 | UAUCCCUC A ACCUACAA | 4483 | UUGUAGGU CUGAUGAGGCCGUUAGGCCGAA IAGGGAUA | 13823 |
| 1634 | CCCUCAAC C UACAAUCA | 4484 | UGAUUGUA CUGAUGAGGCCGUUAGGCCGAA IUUGAGGG | 13824 |
| 1635 | CCUCAACC U ACAAUCAA | 4485 | UUGAUUGU CUGAUGAGGCCGUUAGGCCGAA IGUUGAGG | 13825 |
| 1638 | CAACCUAC A AUCAAGUG | 4486 | CACUUGAU CUGAUGAGGCCGUUAGGCCGAA IUAGGUUG | 13826 |
| 1642 | CUACAAUC A AGUGGUUC | 4487 | GAACCACU CUGAUGAGGCCGUUAGGCCGAA IAUUGUAG | 13827 |
| 1651 | AGUGGUUC U GGCACCCC | 4488 | GGGGUGCC CUGAUGAGGCCGUUAGGCCGAA IAACCACU | 13828 |
| 1655 | GUUCUGGC A CCCCUGUA | 4489 | UACAGGGG CUGAUGAGGCCGUUAGGCCGAA ICCAGAAC | 13829 |
| 1657 | UCUGGCAC C CCUGUAAC | 4490 | GUUACAGG CUGAUGAGGCCGUUAGGCCGAA IUGCCAGA | 13830 |
| 1658 | CUGGCACC C CUGUAACC | 4491 | GGUUACAG CUGAUGAGGCCGUUAGGCCGAA IGUGCCAG | 13831 |
| 1659 | UGGCACCC C UGUAACCA | 4492 | UGGUUACA CUGAUGAGGCCGUUAGGCCGAA IGGUGCCA | 13832 |
| 1660 | GGCACCCC U GUAACCAU | 4493 | AUGGUUAC CUGAUGAGGCCGUUAGGCCGAA IGGGUGCC | 13833 |
| 1666 | CCUGUAAC C AUAAUCAU | 4494 | AUGAUUAU CUGAUGAGGCCGUUAGGCCGAA IUUACAGG | 13834 |
| 1667 | CUGUAACC A UAAUCAUU | 4495 | AAUGAUUA CUGAUGAGGCCGUUAGGCCGAA IGUUACAG | 13835 |
| 1673 | CCAUAAUC A UUCCGAAG | 4496 | CUUCGGAA CUGAUGAGGCCGUUAGGCCGAA IAUUAUGG | 13836 |
| 1677 | AAUCAUUC C GAAGCAAG | 4497 | CUUGCUUC CUGAUGAGGCCGUUAGGCCGAA IAAUGAUU | 13837 |
| 1683 | UCCGAAGC A AGGUGUGA | 4498 | UCACACCU CUGAUGAGGCCGUUAGGCCGAA ICUUCGGA | 13838 |
| 1693 | GGUGUGAC U UUEUUUCC | 4499 | GGAACAAA CUGAUGAGGCCGUUAGGCCGAA IUCACACC | 13839 |
| 1701 | UUUUGUUC C AAUAAUGA | 4500 | UCAUUAUU CUGAUGAGGCCGUUAGGCCGAA IAACAAAA | 13840 |
| 1702 | UUUGUUCC A AUAAUGAA | 4501 | UUCAUUAU CUGAUGAGGCCGUUAGGCCGAA IGAACAAA | 13841 |
| 1716 | GAAGAGUC C UUUAUCCU | 4502 | AGGAUAAA CUGAUGAGGCCGUUAGGCCGAA IACUCUUC | 13842 |
| 1717 | AAGAGUCC U UUAUCCUG | 4503 | CAGGAUAA CUGAUGAGGCCGUUAGGCCGAA IGACUCUU | 13843 |
| 1723 | CCUUUAUC C UGGAUGCU | 4504 | AGCAUCCA CUGAUGAGGCCGUUAGGCCGAA IAUAAAGG | 13844 |
| 1724 | CUUUAUCC U GGAUGCUG | 4505 | CAGCAUCC CUGAUGAGGCCGUUAGGCCGAA IGAUAAAG | 13845 |
| 1731 | CUGGAUGC U GACAGCAA | 4506 | UUGCUGUC CUGAUGAGGCCGUUAGGCCGAA ICAUCCAG | 13846 |
| 1735 | AUGCUGAC A GCAACAUG | 4507 | CAUGUUGC CUGAUGAGGCCGUUAGGCCGAA IUCAGCAU | 13847 |
| 1738 | CUGACAGC A ACAUGGGA | 4508 | UCCCAUGU CUGAUGAGGCCGUUAGGCCGAA ICUGUCAG | 13848 |
| 1741 | ACAGCAAC A UGGGAAAC | 4509 | GUUUCCCA CUGAUGAGGCCGUUAGGCCGAA IUUGCUGU | 13849 |
| 1750 | UGGGAAAC A GAAUUGAG | 4510 | CUCAAUUC CUGAUGAGGCCGUUAGGCCGAA IUUUCCCA | 13850 |
| 1762 | UUGAGAGC A UCACUCAG | 4511 | CUGAGUGA CUGAUGAGGCCGUUAGGCCGAA ICUCUCAA | 13851 |
| 1765 | AGAGCAUC A CUCAGCGC | 4512 | GCGCUGAG CUGAUGAGGCCGUUAGGCCGAA IAUGCUCU | 13852 |
| 1767 | AGGAUCAC U CAGCGCAU | 4513 | AUGCGCUG CUGAUGAGGCCGUUAGGCCGAA IUGAUGCU | 13853 |
| 1769 | CAUCACUC A GCGCAUGG | 4514 | CCAUGCGC CUGAUGAGGCCGUUAGGCCGAA IAGUGAUG | 13854 |
| 1774 | CUCAGCGC A UGGCAAUA | 4515 | UAUUGCCA CUGAUGAGGCCGUUAGGCCGAA ICGCUGAG | 13855 |
| 1779 | CGCAUGGC A AUAAUAGA | 4516 | UCUAUUAU CUGAUGAGGCCGUUAGGCCGAA ICCAUGCG | 13856 |
| 1806 | AAGAUGGC U AGCACCUU | 4517 | AAGGUGCU CUGAUGAGGCCGUUAGGCCGAA ICCAUCUU | 13857 |
| 1810 | UGGCUAGC A CCUUGGUU | 4518 | AACCAAGG CUGAUGAGGCCGUUAGGCCGAA ICUAGCCA | 13858 |
| 1812 | GCUAGCAC C UUGGUUGU | 4519 | ACAACCAA CUGAUGAGGCCGUUAGGCCGAA IUGCUAGC | 13859 |
| 1813 | CUAGCACC U UGGUUGUG | 4520 | CACAACCA CUGAUGAGGCCGUUAGGCCGAA IGUGCUAG | 13860 |
| 1824 | GUUGUGGC U GACUCUAG | 4521 | CUAGAGUC CUGAUGAGGCCGUUAGGCCGAA ICCACAAC | 13861 |
| 1828 | UGGCUGAC U CUAGAAUU | 4522 | AAUUCUAG CUGAUGAGGCCGUUAGGCCGAA IUCAGCCA | 13862 |
| 1830 | GCUGACUC U AGAAUUUC | 4523 | GAAAUUCU CUGAUGAGGCCGUUAGGCCGAA IAGUCAGC | 13863 |
| 1839 | AGAAUUUC U GGAAUCUA | 4524 | UAGAUUCC CUGAUGAGGCCGUUAGGCCGAA IAAAUUCU | 13864 |
| 1846 | CUGGAAUC U ACAUUUGC | 4525 | GCAAAUGU CUGAUGAGGCCGUUAGGCCGAA IAUUCCAG | 13865 |
| 1849 | GAAUCUAC A UUUGCAUA | 4526 | UAUGCAAA CUGAUGAGGCCGUUAGGCCGAA IUAGAUUC | 13866 |
| 1855 | ACAUUUGC A UAGCUUCC | 4527 | GGAAGCUA CUGAUGAGGCCGUUAGGCCGAA ICAAAUGU | 13867 |
| 1860 | UGCAUAGC U UCCAAUAA | 4528 | UUAUUGGA CUGAUGAGGCCGUUAGGCCGAA ICUAUGCA | 13868 |
| 1863 | AUAGCUUC C AAUAAAGU | 4529 | ACUUUAUU CUGAUGAGGCCGUUAGGCCGAA IAAGCUAU | 13869 |
| 1864 | UAGCUUCC A AUAAAGUU | 4530 | AACUUUAU CUGAUGAGGCCGUUAGGCCGAA IGAAGCUA | 13870 |
| 1878 | GUUGGGAC U GUGGGAAG | 4531 | CUUCCCAC CUGAUGAGGCCGUUAGGCCGAA IUCCCAAC | 13871 |
| 1891 | GAAGAAAC A UAAGCUUU | 4532 | AAAGCUUA CUGAUGAGGCCGUUAGGCCGAA IUUUCUUC | 13872 |
| 1897 | ACAUAAGC U UUUAUAUC | 4533 | GAUAUAAA CUGAUGAGGCCGUUAGGCCGAA ICUUAUGU | 13873 |
| 1906 | UUUAUAUC A CAGAUGUG | 4534 | CACAUCUG CUGAUGAGGCCGUUAGGCCGAA IAUAUAAA | 13874 |
| 1908 | UAUAUCAC A GAUGUGCC | 4535 | GGCACAUC CUGAUGAGGCCGUUAGGCCGAA IUGAUAUA | 13875 |
| 1916 | AGAUGUGC C AAAUGGGU | 4536 | ACCCAUUU CUGAUGAGGCCGUUAGGCCGAA ICACAUCU | 13876 |
| 1917 | GAUGUGCC A AAUGGGUU | 4537 | AACCCAUU CUGAUGAGGCCGUUAGGCCGAA IGCACAUC | 13877 |
| 1928 | UGGGUUUC A UGUUAACU | 4538 | AGUUAACA CUGAUGAGGCCGUUAGGCCGAA IAAACCCA | 13878 |
| 1936 | AUGUUAAC U UGGAAAAA | 4539 | UUUUUCCA CUGAUGAGGCCGUUAGGCCGAA IUUAACAU | 13879 |
| 1949 | AAAAAUGC C GACGGAAG | 4540 | CUUCCGUC CUGAUGAGGCCGUUAGGCCGAA ICAUUUUU | 13880 |
| 1966 | GAGAGGAC C UGAAACUG | 4541 | CAGUUUCA CUGAUGAGGCCGUUAGGCCGAA IUCCUCUC | 13881 |
| 1967 | AGAGGACC U GAAACUGU | 4542 | ACAGUUUC CUGAUGAGGCCGUUAGGCCGAA IGUCCUCU | 13882 |
| 1973 | CCUGAAAC U GUCUUGCA | 4543 | UGCAAGAC CUGAUGAGGCCGUUAGGCCGAA IUUUCAGG | 13883 |
| 1977 | AAACUGUC U UGCACAGU | 4544 | ACUGUGCA CUGAUGAGGCCGUUAGGCCGAA IACAGUUU | 13884 |
| 1981 | UGUCUUGC A CAGUUAAC | 4545 | GUUAACUG CUGAUGAGGCCGUUAGGCCGAA ICAAGACA | 13885 |
| 1983 | UCUUGCAC A GUUAACAA | 4546 | UUGUUAAC CUGAUGAGGCCGUUAGGCCGAA IUGCAAGA | 13886 |
| 1990 | CAGUUAAC A AGUUCUUA | 4547 | UAAGAACU CUGAUGAGGCCGUUAGGCCGAA IUUAACUG | 13887 |
| 1996 | ACAAGUUC U UAUACAGA | 4548 | UCUGUAUA CUGAUGAGGCCGUUAGGCCGAA IAACUUGU | 13888 |
| 2002 | UCUUAUAC A GAGACGUU | 4549 | AACGUCUC CUGAUGAGGCCGUUAGGCCGAA IUAUAAGA | 13889 |
| 2013 | GACGUUAC U UGGAUUUU | 4550 | AAAAUCCA CUGAUGAGGCCGUUAGGCCGAA IUAACGUC | 13890 |
| 2024 | GAUUUUAC U GCGGACAG | 4551 | CUGUCCGC CUGAUGAGGCCGUUAGGCCGAA IUAAAAUC | 13891 |
| 2031 | CUGCGGAC A GUUAAUAA | 4552 | UUAUUAAC CUGAUGAGGCCGUUAGGCCGAA IUCCGCAG | 13892 |
| 2041 | UUAAUAAC A GAACAAUG | 4553 | CAUUGUUC CUGAUGAGGCCGUUAGGCCGAA IUUAUUAA | 13893 |
| 2046 | AACAGAAC A AUGCACUA | 4554 | UAGUGCAU CUGAUGAGGCCGUUAGGCCGAA IUUCUGUU | 13894 |
| 2051 | AACAAUGC A CUACAGUA | 4555 | UACUGUAG CUGAUGAGGCCGUUAGGCCGAA ICAUUGUU | 13895 |
| 2053 | CAAUGCAC U ACAGUAUU | 4556 | AAUACUGU CUGAUGAGGCCGUUAGGCCGAA IUGCAUUG | 13896 |
| 2056 | UGCACUAC A GUAUUAGC | 4557 | GCUAAUAC CUGAUGAGGCCGUUAGGCCGAA IUAGUGCA | 13897 |
| 2065 | GUAUUAGC A AGCAAAAA | 4558 | UUUUUGCU CUGAUGAGGCCGUUAGGCCGAA ICUAAUAC | 13898 |
| 2069 | UAGCAAGC A AAAAAUGG | 4559 | CCAUUUUU CUGAUGAGGCCGUUAGGCCGAA ICUUGCUA | 13899 |
| 2079 | AAAAUGGC C AUCACUAA | 4560 | UUAGUGAU CUGAUGAGGCCGUUAGGCCGAA ICCAUUUU | 13900 |
| 2080 | AAAUGGCC A UCACUAAG | 4561 | CUUAGUGA CUGAUGAGGCCGUUAGGCCGAA IGCCAUUU | 13901 |
| 2083 | UGGCCAUC A CUAAGGAG | 4562 | CUCCUUAG CUGAUGAGGCCGUUAGGCCGAA IAUGGCCA | 13902 |
| 2085 | GCCAUCAC U AAGGAGCA | 4563 | UGCUCCUU CUGAUGAGGCCGUUAGGCCGAA IUGAUGGC | 13903 |
| 2093 | UAAGGAGC A CUCCAUCA | 4564 | UGAUGGAG CUGAUGAGGCCGUUAGGCCGAA ICUCCUUA | 13904 |
| 2095 | AGGAGCAC U CCAUCACU | 4565 | AGUGAUGG CUGAUGAGGCCGUUAGGCCGAA IUGCUCCU | 13905 |
| 2097 | GAGCACUC C AUCACUCU | 4566 | AGAGUGAU CUGAUGAGGCCGUUAGGCCGAA IAGUGCUC | 13906 |
| 2098 | AGCACUCC A UCACUCUU | 4567 | AAGAGUGA CUGAUGAGGCCGUUAGGCCGAA IGAGUGCU | 13907 |
| 2101 | ACUCCAUC A CUCUUAAU | 4568 | AUUAAGAG CUGAUGAGGCCGUUAGGCCGAA IAUGGAGU | 13908 |
| 2103 | UCCAUCAC U CUUAAUCU | 4569 | AGAUUAAG CUGAUGAGGCCGUUAGGCCGAA IUGAUGGA | 13909 |
| 2105 | CAUCACUC U UAAUCUUA | 4570 | UAAGAUUA CUGAUGAGGCCGUUAGGCCGAA IAGUGAUG | 13910 |
| 2111 | UCUUAAUC U UACCAUCA | 4571 | UGAUGGUA CUGAUGAGGCCGUUAGGCCGAA IAUUAAGA | 13911 |
| 2115 | AAUCUUAC C AUCAUGAA | 4572 | UUCAUGAU CUGAUGAGGCCGUUAGGCCGAA IUAAGAUU | 13912 |
| 2116 | AUCUUACC A UCAUGAAU | 4573 | AUUCAUGA CUGAUGAGGCCGUUAGGCCGAA IGUAAGAU | 13913 |
| 2119 | UUACCAUC A UGAAUGUU | 4574 | AACAUUCA CUGAUGAGGCCGUUAGGCCGAA IAUGGUAA | 13914 |
| 2130 | AAUGUUUC C CUGCAAGA | 4575 | UCUUGCAG CUGAUGAGGCCGUUAGGCCGAA IAAACAUU | 13915 |
| 2131 | AUGUUUCC C UGCAAGAU | 4576 | AUCUUGCA CUGAUGAGGCCGUUAGGCCGAA IGAAACAU | 13916 |
| 2132 | UGUUUCCC U GCAAGAUU | 4577 | AAUCUUGC CUGAUGAGGCCGUUAGGCCGAA IGGAAACA | 13917 |
| 2135 | UUCCCUGC A AGAUUCAG | 4578 | CUGAAUCU CUGAUGAGGCCGUUAGGCCGAA ICAGGGAA | 13918 |
| 2142 | CAAGAUUC A GGCACCUA | 4579 | UAGGUGCC CUGAUGAGGCCGUUAGGCCGAA IAAUCUUG | 13919 |
| 2146 | AUUCAGGC A CCUAUGCC | 4580 | GGCAUAGG CUGAUGAGGCCGUUAGGCCGAA ICCUGAAU | 13920 |
| 2148 | UCAGGCAC C UAUGCCUG | 4581 | CAGGCAUA CUGAUGAGGCCGUUAGGCCGAA IUGCCUGA | 13921 |
| 2149 | CAGGCACC U AUGCCUGC | 4582 | GCAGGCAU CUGAUGAGGCCGUUAGGCCGAA IGUGCCUG | 13922 |
| 2154 | ACCUAUGC C UGCAGAGC | 4583 | GCUCUGCA CUGAUGAGGCCGUUAGGCCGAA ICAUAGGU | 13923 |
| 2155 | CCUAUGCC U GCAGAGCC | 4584 | GGCUCUGC CUGAUGAGGCCGUUAGGCCGAA IGCAUAGG | 13924 |
| 2158 | AUGCCUGC A GAGCCAGG | 4585 | CCUGGCUC CUGAUGAGGCCGUUAGGCCGAA ICAGGCAU | 13925 |
| 2163 | UGCAGAGC C AGGAAUGU | 4586 | ACAUUCCU CUGAUGAGGCCGUUAGGCCGAA ICUCUGCA | 13926 |
| 2164 | GCAGAGCC A GGAAUGUA | 4587 | UACAUUCC CUGAUGAGGCCGUUAGGCCGAA IGCUCUGC | 13927 |
| 2176 | AUGUAUAC A CAGGGGAA | 4588 | UUCCCCUG CUGAUGAGGCCGUUAGGCCGAA IUAUACAU | 13928 |
| 2178 | GUAUACAC A GGGGAAGA | 4589 | UCUUCCCC CUGAUGAGGCCGUUAGGCCGAA IUGUAUAC | 13929 |
| 2191 | AAGAAAUC C UCCAGAAG | 4590 | CUUCUGGA CUGAUGAGGCCGUUAGGCCGAA IAUUUCUU | 13930 |
| 2192 | AGAAAUCC U CCAGAAGA | 4591 | UCUUCUGG CUGAUGAGGCCGUUAGGCCGAA IGAUUUCU | 13931 |
| 2194 | AAAUCCUC C AGAAGAAA | 4592 | UUUCUUCU CUGAUGAGGCCGUUAGGCCGAA IAGGAUUU | 13932 |
| 2195 | AAUCCUCC A GAAGAAAG | 4593 | CUUUCUUC CUGAUGAGGCCGUUAGGCCGAA IGAGGAUU | 13933 |
| 2211 | GAAAUUAC A AUCAGAGA | 4594 | UCUCUGAU CUGAUGAGGCCGUUAGGCCGAA IUAAUUUC | 13934 |
| 2215 | UUACAAUC A GAGAUCAG | 4595 | CUGAUCUC CUGAUGAGGCCGUUAGGCCGAA IAUUGUAA | 13935 |
| 2222 | CAGAGAUC A GGAAGCAC | 4596 | GUGCUUCC CUGAUGAGGCCGUUAGGCCGAA IAUCUCUG | 13936 |
| 2229 | CAGGAAGC A CCAUACCU | 4597 | AGGUAUGG CUGAUGAGGCCGUUAGGCCGAA ICUUCCUG | 13937 |
| 2231 | GGAAGCAC C AUACCUCC | 4598 | GGAGGUAU CUGAUGAGGCCGUUAGGCCGAA IUGCUUCC | 13938 |
| 2232 | GAAGCACC A UACCUCCU | 4599 | AGGAGGUA CUGAUGAGGCCGUUAGGCCGAA IGUGCUUC | 13939 |
| 2236 | CACCAUAC C UCCUGCGA | 4600 | UCGCAGGA CUGAUGAGGCCGUUAGGCCGAA IUAUGGUG | 13940 |
| 2237 | ACCAUACC U CCUGCGAA | 4601 | UUCGCAGG CUGAUGAGGCCGUUAGGCCGAA IGUAUGGU | 13941 |
| 2239 | CAUACCUC C UGCGAAAC | 4602 | GUUUCGCA CUGAUGAGGCCGUUAGGCCGAA IAGGUAUG | 13942 |
| 2240 | AUACCUCC U GCGAAACC | 4603 | GGUUUCGC CUGAUGAGGCCGUUAGGCCGAA IGAGGUAU | 13943 |
| 2248 | UGCGAAAC C UCAGUGAU | 4604 | AUCACUGA CUGAUGAGGCCGUUAGGCCGAA IUUUCGCA | 13944 |
| 2249 | GCGAAACC U CAGUGAUC | 4605 | GAUCACUG CUGAUGAGGCCGUUAGGCCGAA IGUUUCGC | 13945 |
| 2251 | GAAACCUC A GUGAUCAC | 4606 | GUGAUCAC CUGAUGAGGCCGUUAGGCCGAA IAGGUUUC | 13946 |
| 2258 | CAGUGAUC A CACAGUGG | 4607 | CCACUGUG CUGAUGAGGCCGUUAGGCCGAA IAUCACUG | 13947 |
| 2260 | GUGAUCAC A CACUGGCC | 4608 | GGCCACUG CUGAUGAGGCCGUUAGGCCGAA IUGAUCAC | 13948 |
| 2262 | GAUCACAC A GUGGCCAU | 4609 | AUGGCCAC CUGAUGAGGCCGUUAGGCCGAA IUGUGAUC | 13949 |
| 2268 | ACAGUGGC C AUCAGCAG | 4610 | CUGCUGAU CUGAUGAGGCCGUUAGGCCGAA ICCACUGU | 13950 |
| 2269 | CAGUGGCC A UCAGCAGU | 4611 | ACUGCUGA CUGAUGAGGCCGUUAGGCCGAA IGCCACUG | 13951 |
| 2272 | UGGCCAUC A GCAGUUCC | 4612 | GGAACUGC CUGAUGAGGCCGUUAGGCCGAA IAUGGCCA | 13952 |
| 2275 | CCAUCAGC A GUUCCACC | 4613 | GGUGGAAC CUGAUGAGGCCGUUAGGCCGAA ICUGAUGG | 13953 |
| 2280 | AGCAGUUC C ACCACUUU | 4614 | AAAGUGGU CUGAUGAGGCCGUUAGGCCGAA IAACUGCU | 13954 |
| 2281 | GCAGUUCC A CCACUUUA | 4615 | UAAAGUGG CUGAUGAGGCCGUUAGGCCGAA IGAACUGC | 13955 |
| 2283 | AGUUCCAC C ACUUUAGA | 4616 | UCUAAAGU CUGAUGAGGCCGUUAGGCCGAA IUGGAACU | 13956 |
| 2284 | GUUCCACC A CUUUAGAC | 4617 | GUCUAAAG CUGAUGAGGCCGUUAGGCCGAA IGUGGAAC | 13957 |
| 2286 | UCCACCAC U UUAGACUG | 4618 | CAGUCUAA CUGAUGAGGCCGUUAGGCCGAA IUGGUGGA | 13958 |
| 2293 | CUUUAGAC U GUCAUGCU | 4619 | AGCAUGAC CUGAUGAGGCCGUUAGGCCGAA IUCUAAAG | 13959 |
| 2297 | AGACUGUC A UGCUAAUG | 4620 | CAUUAGCA CUGAUGAGGCCGUUAGGCCGAA IACAGUCU | 13960 |
| 2301 | UGUCAUGC U AAUGGUGU | 4621 | ACACCAUU CUGAUGAGGCCGUUAGGCCGAA ICAUGACA | 13961 |
| 2311 | AUGGUGUC C CCGAGCCU | 4622 | AGGCUCGG CUGAUGAGGCCGUUAGGCCGAA IACACCAU | 13962 |
| 2312 | UGGUGUCC C CGAGCCUC | 4623 | GAGGCUCG CUGAUGAGGCCGUUAGGCCGAA IGACACCA | 13963 |
| 2313 | GGUGUCCC C GAGCCUCA | 4624 | UGAGGCUC CUGAUGAGGCCGUUAGGCCGAA IGGACACC | 13964 |
| 2318 | CCCCGAGC C UCAGAUCA | 4625 | UGAUCUGA CUGAUGAGGCCGUUAGGCCGAA ICUCGGGG | 13965 |
| 2319 | CCCGAGCC U CAGAUCAC | 4626 | GUGAUCUG CUGAUGAGGCCGUUAGGCCGAA IGCUCGGG | 13966 |
| 2321 | CGAGCCUC A GAUCACUU | 4627 | AAGUGAUC CUGAUGAGGCCGUUAGGCCGAA IAGGCUCG | 13967 |
| 2326 | CUCAGAUC A CUUGGUUU | 4628 | AAACCAAG CUGAUGAGGCCGUUAGGCCGAA IAUCUGAG | 13968 |
| 2328 | CAGAUCAC U UGGUUUAA | 4629 | UUAAACCA CUGAUGAGGCCGUUAGGCCGAA IUGAUCUG | 13969 |
| 2341 | UUAAAAAC A ACCACAAA | 4630 | UUUGUGGU CUGAUGAGGCCGUUAGGCCGAA IUUUUUAA | 13970 |
| 2344 | AAAACAAC C ACAAAAUA | 4631 | UAUUUUGU CUGAUGAGGCCGUUAGGCCGAA IUUGUUUU | 13971 |
| 2345 | AAACAACC A CAAAAUAC | 4632 | GUAUUUUG CUGAUGAGGCCGUUAGGCCGAA IGUUGUUU | 13972 |
| 2347 | ACAACCAC A AAAUACAA | 4633 | UUGUAUUU CUGAUGAGGCCGUUAGGCCGAA IUGGUUGU | 13973 |
| 2354 | CAAAAUAC A ACAAGAGC | 4634 | GCUCUUGU CUGAUGAGGCCGUUAGGCCGAA IUAUUUUG | 13974 |
| 2357 | AAUACAAC A AGAGCCUG | 4635 | CAGGCUCU CUGAUGAGGCCGUUAGGCCGAA IUUGUAUU | 13975 |
| 2363 | ACAAGAGC C UGGAAUUA | 4636 | UAAUUCCA CUGAUGAGGCCGUUAGGCCGAA ICUCUUGU | 13976 |
| 2364 | CAAGAGCC U GGAAUUAU | 4637 | AUAAUUCC CUGAUGAGGCCGUUAGGCCGAA IGCUCUUG | 13977 |
| 2381 | UUUAGGAC C AGGAAGCA | 4638 | UGCUUCCU CUGAUGAGGCCGUUAGGCCGAA IUCCUAAA | 13978 |
| 2382 | UUAGGACC A GGAAGCAG | 4639 | CUGCUUCC CUGAUGAGGCCGUUAGGCCGAA IGUCCUAA | 13979 |
| 2389 | CAGGAAGC A GCACGCUG | 4640 | CAGCGUGC CUGAUGAGGCCGUUAGGCCGAA ICUUCCUG | 13980 |
| 2392 | GAAGCAGC A CGCUGUUU | 4641 | AAACAGCG CUGAUGAGGCCGUUAGGCCGAA ICUGCUUC | 13981 |
| 2396 | CAGCACGC U GUUUAUUG | 4642 | CAAUAAAC CUGAUGAGGCCGUUAGGCCGAA ICGUGCUG | 13982 |
| 2413 | AAAGAGUC A CAGAAGAG | 4643 | CUCUUCUG CUGAUGAGGCCGUUAGGCCGAA IACUCUUU | 13983 |
| 2415 | AGAGUCAC A GAAGAGGA | 4644 | UCCUCUUC CUGAUGAGGCCGUUAGGCCGAA IUGACUCU | 13984 |
| 2434 | AAGGUGUC U AUCACUGC | 4645 | GCAGUGAU CUGAUGAGGCCGUUAGGCCGAA IACACCUU | 13985 |
| 2438 | UGUCUAUC A CUGCAAAG | 4646 | CUUUGCAG CUGAUGAGGCCGUUAGGCCGAA IAUAGACA | 13986 |
| 2440 | UCUAUCAC U GCAAAGCC | 4647 | GGCUUUGC CUGAUGAGGCCGUUAGGCCGAA IUGAUAGA | 13987 |
| 2443 | AUCACUGC A AAGCCACC | 4648 | GGUGGCUU CUGAUGAGGCCGUUAGGCCGAA ICAGUGAU | 13988 |
| 2448 | UGCAAAGC C ACCAACCA | 4649 | UGGUUGGU CUGAUGAGGCCGUUAGGCCGAA ICUUUGCA | 13989 |
| 2449 | GCAAAGCC A CCAACCAG | 4650 | CUGGUUGG CUGAUGAGGCCGUUAGGCCGAA IGCUUUGC | 13990 |
| 2451 | AAAGCCAC C AACCAGAA | 4651 | UUCUGGUU CUGAUGAGGCCGUUAGGCCGAA IUGGCUUU | 13991 |
| 2452 | AAGCCACC A ACCAGAAG | 4652 | CUUCUGGU CUGAUGAGGCCGUUAGGCCGAA IGUGGCUU | 13992 |
| 2455 | CCACCAAC C AGAAGGGC | 4653 | GCCCUUCU CUGAUGAGGCCGUUAGGCCGAA IUUGGUGG | 13993 |
| 2456 | CACCAACC A GAAGGGCU | 4654 | AGCCCUUC CUGAUGAGGCCGUUAGGCCGAA IGUUGGUG | 13994 |
| 2464 | AGAAGGGC U CUGUGGAA | 4655 | UUCCACAG CUGAUGAGGCCGUUAGGCCGAA ICCCUUCU | 13995 |
| 2466 | AAGGGCUC U GUGGAAAG | 4656 | CUUUCCAC CUGAUGAGGCCGUUAGGCCGAA IAGCCCUU | 13996 |
| 2478 | GAAAGUUC A GCAUACCU | 4657 | AGGUAUGC CUGAUGAGGCCGUUAGGCCGAA IAACUUUC | 13997 |
| 2481 | AGUUCAGC A UACCUCAC | 4658 | GUGAGGUA CUGAUGAGGCCGUUAGGCCGAA ICUGAACU | 13998 |
| 2485 | CAGCAUAC C UCACUGUU | 4659 | AACAGUGA CUGAUGAGGCCGUUAGGCCGAA IUAUGCUG | 13999 |
| 2486 | AGCAUACC U CACUGUUC | 4660 | GAACAGUG CUGAUGAGGCCGUUAGGCCGAA IGUAUGCU | 14000 |
| 2488 | CAUACCUC A CUGUUCAA | 4661 | UUGAACAG CUGAUGAGGCCGUUAGGCCGAA IAGGUAUG | 14001 |
| 2490 | UACCUCAC U GUUCAAGG | 4662 | CCUUGAAC CUGAUGAGGCCGUUAGGCCGAA IUGAGGUA | 14002 |
| 2495 | CACUGUUC A AGGAACCU | 4663 | AGGUUCCU CUGAUGAGGCCGUUAGGCCGAA IAACACUG | 14003 |
| 2502 | CAAGGAAC C UCGGACAA | 4664 | UUGUCCGA CUGAUGAGGCCGUUAGGCCGAA IUUCCUUG | 14004 |
| 2503 | AAGGAACC U CGGACAAG | 4665 | CUUGUCCG CUGAUGAGGCCGUUAGGCCGAA IGUUCCUU | 14005 |
| 2509 | CCUCGGAC A AGUCUAAU | 4666 | AUUAGACU CUGAUGAGGCCGUUAGGCCGAA IUCCGAGG | 14006 |
| 2514 | GACAAGUC U AAUCUGGA | 4667 | UCCAGAUU CUGAUGAGGCCGUUAGGCCGAA IACUUGUC | 14007 |
| 2519 | GUCUAAUC U GGAGCUGA | 4668 | UCAGCUCC CUGAUGAGGCCGUUAGGCCGAA IAUUAGAC | 14008 |
| 2525 | UCUGGAGC U GAUCACUC | 4669 | GAGUGAUC CUGAUGAGGCCGUUAGGCCGAA ICUCCAGA | 14009 |
| 2530 | AGCUGAUC A CUCUAACA | 4670 | UGUUAGAG CUGAUGAGGCCGUUAGGCCGAA IAUCAGCU | 14010 |
| 2532 | CUGAUCAC U CUAACAUG | 4671 | CAUGUUAG CUGAUGAGGCCGUUAGGCCGAA IUGAUCAG | 14011 |
| 2534 | GAUCACUC U AACAUGCA | 4672 | UGCAUGUU CUGAUGAGGCCGUUAGGCCGAA IAGUGAUC | 14012 |
| 2538 | ACUCUAAC A UGCACCUG | 4673 | CAGGUGCA CUGAUGAGGCCGUUAGGCCGAA IUUAGAGU | 14013 |
| 2542 | UAACAUGC A CCUGUGUG | 4674 | CACACAGG CUGAUGAGGCCGUUAGGCCGAA ICAUCUUA | 14014 |
| 2544 | ACAUGCAC C UGUGUGGC | 4675 | GCCACACA CUGAUGAGGCCGUUAGGCCGAA IUGCAUGU | 14015 |
| 2545 | CAUGCACC U GUGUGGCU | 4676 | AGCCACAC CUGAUGAGGCCGUUAGGCCGAA IGUGCAUG | 14016 |
| 2553 | UGUGUGGC U GCGACUCU | 4677 | AGAGUCGC CUGAUGAGGCCGUUAGGCCGAA ICCACACA | 14017 |
| 2559 | GCUGCGAC U CUCUUCUG | 4678 | CAGAAGAG CUGAUGAGGCCGUUAGGCCGAA IUCGCAGC | 14018 |
| 2561 | UGCGACUC U CUUCUGGC | 4679 | GCCAGAAG CUGAUGAGGCCGUUAGGCCGAA IAGUCGCA | 14019 |
| 2563 | CGACUCUC U UCUGGCUC | 4680 | GAGCCAGA CUGAUGAGGCCGUUAGGCCGAA IAGAGUCG | 14020 |
| 2566 | CUCUCUUC U GGCUCCUA | 4681 | UAGGAGCC CUGAUGAGGCCGUUAGGCCGAA IAAGAGAG | 14021 |
| 2570 | CUUCUGGC U CCUAUUAA | 4682 | UUAAUAGG CUGAUGAGGCCGUUAGGCCGAA ICCAGAAG | 14022 |
| 2572 | UCUGGCUC C UAUUAACC | 4683 | GGUUAAUA CUGAUGAGGCCGUUAGGCCGAA IAGCCAGA | 14023 |
| 2573 | CUGGCUCC U AUUAACCC | 4684 | GGGUUAAU CUGAUGAGGCCGUUAGGCCGAA IGAGCCAG | 14024 |
| 2580 | CUAUUAAC C CUCCUUAU | 4685 | AUAAGGAG CUGAUGAGGCCGUUAGGCCGAA IUUAAUAG | 14025 |
| 2581 | UAUUAACC C UCCUUAUC | 4686 | GAUAAGGA CUGAUGAGGCCGUUAGGCCGAA IGUUAAUA | 14026 |
| 2582 | AUUAACCC U CCUUAUCC | 4687 | GGAUAAGG CUGAUGAGGCCGUUAGGCCGAA IGGUUAAU | 14027 |
| 2584 | UAACCCUC C UUAUCCGA | 4688 | UCGGAUAA CUGAUGAGGCCGUUAGGCCGAA IAGGGUUA | 14028 |
| 2585 | AACCCUCC U UAUCCGAA | 4689 | UUCGGAUA CUGAUGAGGCCGUUAGGCCGAA IGAGGGUU | 14029 |
| 2590 | UCCUUAUC C GAAAAAUG | 4690 | CAUUUUUC CUGAUGAGGCCGUUAGGCCGAA IAUAAGGA | 14030 |
| 2607 | AAAAGGUC U UCUUCUGA | 4691 | UCAGAAGA CUGAUGAGGCCGUUAGGCCGAA IACCUUUU | 14031 |
| 2610 | AGGUCUUC U UCUGAAAU | 4692 | AUUUCAGA CUGAUGAGGCCGUUAGGCCGAA IAAGACCU | 14032 |
| 2613 | UCUUCUUC U GAAAUAAA | 4693 | UUUAUUUC CUGAUGAGGCCGUUAGGCCGAA IAAGAAGA | 14033 |
| 2625 | AUAAAGAC U GACUACCU | 4694 | AGGUAGUC CUGAUGAGGCCGUUAGGCCGAA IUCUUUAU | 14034 |
| 2629 | AGACUGAC U ACCUAUCA | 4695 | UGAUAGGU CUGAUGAGGCCGUUAGGCCGAA IUCAGUCU | 14035 |
| 2632 | CUGACUAC C UAUCAAUU | 4696 | AAUUGAUA CUGAUGAGGCCGUUAGGCCGAA IUAGUCAG | 14036 |
| 2633 | UGACUACC U AUCAAUUA | 4697 | UAAUUGAU CUGAUGAGGCCGUUAGGCCGAA IGUAGUCA | 14037 |
| 2637 | UACCUAUC A AUUAUAAU | 4698 | AUUAUAAU CUGAUGAGGCCGUUAGGCCGAA IAUAGGUA | 14038 |
| 2650 | UAAUGGAC C CAGAUGAA | 4699 | UUCAUCUG CUGAUGAGGCCGUUAGGCCGAA IUCCAUUA | 14039 |
| 2651 | AAUGGACC C AGAUGAAG | 4700 | CUUCAUCU CUGAUGAGGCCGUUAGGCCGAA IGUCCAUU | 14040 |
| 2652 | AUGGACCC A GAUGAAGU | 4701 | ACUUCAUC CUGAUGAGGCCGUUAGGCCGAA IGGUCCAU | 14041 |
| 2663 | UGAAGUUC C UUUGGAUG | 4702 | CAUCCAAA CUGAUGAGGCCGUUAGGCCGAA IAACUUCA | 14042 |
| 2664 | GAAGUUCC U UUGGAUGA | 4703 | UCAUCCAA CUGAUGAGGCCGUUAGGCCGAA IGAACUUC | 14043 |
| 2675 | GGAUGAGC A GUGUGAGC | 4704 | GCUCACAC CUGAUGAGGCCGUUAGGCCGAA ICUCAUCC | 14044 |
| 2687 | UGAGCGGC U CCCUUAUG | 4705 | CAUAAGGG CUGAUGAGGCCGUUAGGCCGAA ICCGCUCA | 14045 |
| 2689 | AGCGGCUC C CUUAUGAU | 4706 | AUCAUAAG CUGAUGAGGCCGUUAGGCCGAA IAGCCGCU | 14046 |
| 2690 | GCGGCUCC C UUAUGAUG | 4707 | CAUCAUAA CUGAUGAGGCCGUUAGGCCGAA IGAGCCGC | 14047 |
| 2691 | CGGCUCCC U UAUGAUGC | 4708 | GCAUCAUA CUGAUGAGGCCGUUAGGCCGAA IGGAGCCG | 14048 |
| 2700 | UAUGAUGC C AGCAAGUG | 4709 | CACUUGCU CUGAUGAGGCCGUUAGGCCGAA ICAUCAUA | 14049 |
| 2701 | AUGAUGCC A GCAAGUGG | 4710 | CCACUUGC CUGAUGAGGCCGUUAGGCCGAA IGCAUCAU | 14050 |
| 2704 | AUGCCAGC A AGUGGGAG | 4711 | CUCCCACU CUGAUGAGGCCGUUAGGCCGAA ICUGGCAU | 14051 |
| 2718 | GAGUUUGC C CGGGAGAG | 4712 | CUCUCCCG CUGAUGAGGCCGUUAGGCCGAA ICAAACUC | 14052 |
| 2719 | AGUUUGCC C GGGAGAGA | 4713 | UCUCUCCC CUGAUGAGGCCGUUAGGCCGAA IGCAAACU | 14053 |
| 2729 | GGAGAGAC U UAAACUGG | 4714 | CCAGUUUA CUGAUGAGGCCGUUAGGCCGAA IUCUCUCC | 14054 |
| 2735 | ACUUAAAC U GGGCAAAU | 4715 | AUUUGCCC CUGAUGAGGCCGUUAGGCCGAA IUUUAAGU | 14055 |
| 2740 | AACUGGGC A AAUCACUU | 4716 | AAGUGAUU CUGAUGAGGCCGUUAGGCCGAA ICCCAGUU | 14056 |
| 2745 | GGCAAAUC A CUUGGAAG | 4717 | CUUCCAAG CUGAUGAGGCCGUUAGGCCGAA IAUUUGCC | 14057 |
| 2747 | CAAAUCAC U UGGAAGAG | 4718 | CUCUUCCA CUGAUGAGGCCGUUAGGCCGAA IUGAUUUG | 14058 |
| 2760 | AGAGGGGC U UUUGGAAA | 4719 | UUUCCAAA CUGAUGAGGCCGUUAGGCCGAA ICCCCUCU | 14059 |
| 2777 | AGUGGUUC A AGCAUCAG | 4720 | CUGAUGCU CUGAUGAGGCCGUUAGGCCGAA IAACCACU | 14060 |
| 2781 | GUUCAAGC A UCAGCAUU | 4721 | AAUGCUGA CUGAUGAGGCCGUUAGGCCGAA ICUUGAAC | 14061 |
| 2784 | CAAGCAUC A GCAUUUGG | 4722 | CCAAAUGC CUGAUGAGGCCGUUAGGCCGAA IAUGCUUG | 14062 |
| 2787 | GCAUCAGC A UUUGGCAU | 4723 | AUGCCAAA CUGAUGAGGCCGUUAGGCCGAA ICUGAUGC | 14063 |
| 2794 | CAUUUGGC A UUAAGAAA | 4724 | UUUCUUAA CUGAUGAGGCCGUUAGGCCGAA ICCAAAUG | 14064 |
| 2805 | AAGAAAUC A CCUACGUG | 4725 | CACGUAGG CUGAUGAGGCCGUUAGGCCGAA IAUUUCUU | 14065 |
| 2807 | GAAAUCAC C UACGUGCC | 4726 | GGCACGUA CUGAUGAGGCCGUUAGGCCGAA IUGAUUUC | 14066 |
| 2808 | AAAUCACC U ACGUGCCG | 4727 | CGGCACGU CUGAUGAGGCCGUUAGGCCGAA IGUGAUUU | 14067 |
| 2815 | CUACGUGC C GGACUGUG | 4728 | CACAGUCC CUGAUGAGGCCGUUAGGCCGAA ICACGUAG | 14068 |
| 2820 | UGCCGGAC U GUGGCUGU | 4729 | ACAGCCAC CUGAUGAGGCCGUUAGGCCGAA IUCCGGCA | 14069 |
| 2826 | ACUGUGGC U GUGAAAAU | 4730 | AUUUUCAC CUGAUGAGGCCGUUAGGCCGAA ICCACAGU | 14070 |
| 2837 | GAAAAUGC U GAAAGAGG | 4731 | CCUCUUUC CUGAUGAGGCCGUUAGGCCGAA ICAUUUUC | 14071 |
| 2850 | GAGGGGGC C ACGGCCAG | 4732 | CUGGCCGU CUGAUGAGGCCGUUAGGCCGAA ICCCCCUC | 14072 |
| 2851 | AGGGGGCC A CGGCCAGC | 4733 | GCUGGCCG CUGAUGAGGCCGUUAGGCCGAA IGCCCCCU | 14073 |
| 2856 | GCCACGGC C AGCGAGUA | 4734 | UACUCGCU CUGAUGAGGCCGUUAGGCCGAA ICCGUGGC | 14074 |
| 2857 | CCACGGCC A GCGAGUAC | 4735 | GUACUCGC CUGAUGAGGCCGUUAGGCCGAA IGCCGUGG | 14075 |
| 2866 | GCGAGUAC A AAGCUCUG | 4736 | CAGAGCUU CUGAUGAGGCCGUUAGGCCGAA IUACUCGC | 14076 |
| 2871 | UACAAAGC U CUGAUGAC | 4737 | GUCAUCAG CUGAUGAGGCCGUUAGGCCGAA ICUUUGUA | 14077 |
| 2873 | CAAAGCUC U GAUGACUG | 4738 | CAGUCAUC CUGAUGAGGCCGUUAGGCCGAA IAGCUUUG | 14078 |
| 2880 | CUGAUGAC U GAGCUAAA | 4739 | UUUAGCUC CUGAUGAGGCCGUUAGGCCGAA IUCAUCAG | 14079 |
| 2885 | GACUGAGC U AAAAAUCU | 4740 | AGAUUUUU CUGAUGAGGCCGUUAGGCCGAA ICUCAGUC | 14080 |
| 2893 | UAAAAAUC U UGACCCAC | 4741 | GUGGGUCA CUGAUGAGGCCGUUAGGCCGAA IAUUUUUA | 14081 |
| 2898 | AUCUUGAC C CACAUUGG | 4742 | CCAAUGUG CUGAUGAGGCCGUUAGGCCGAA IUCAAGAU | 14082 |
| 2899 | UCUUGACC C ACAUUGGC | 4743 | GCCAAUGU CUGAUGAGGCCGUUAGGCCGAA IGUCAAGA | 14083 |
| 2900 | CUUGACCC A CAUUGGCC | 4744 | GGCCAAUG CUGAUGAGGCCGUUAGGCCGAA IGGUCAAG | 14084 |
| 2902 | UGACCCAC A UUGGCCAC | 4745 | GUGGCCAA CUGAUGAGGCCGUUAGGCCGAA IUGGGUCA | 14085 |
| 2908 | ACAUUGGC C ACCAUCUG | 4746 | CAGAUGGU CUGAUGAGGCCGUUAGGCCGAA ICCAAUGU | 14086 |
| 2909 | CAUUGGCC A CCAUCUGA | 4747 | UCAGAUGG CUGAUGAGGCCGUUAGGCCGAA IGCCAAUG | 14087 |
| 2911 | UUGGCCAC C AUCUGAAC | 4748 | GUUCAGAU CUGAUGAGGCCGUUAGGCCGAA IUGGCCAA | 14088 |
| 2912 | UGGCCACC A UCUGAACG | 4749 | CGUUCAGA CUGAUGAGGCCGUUAGGCCGAA IGUGGCCA | 14089 |
| 2915 | CCACCAUC U GAACGUGG | 4750 | CCACGUUC CUGAUGAGGCCGUUAGGCCGAA IAUGGUGG | 14090 |
| 2929 | UGGUUAAC C UGCUGGGA | 4751 | UCCCAGCA CUGAUGAGGCCGUUAGGCCGAA IUUAACCA | 14091 |
| 2930 | GGUUAACC U GCUGGGAG | 4752 | CUCCCAGC CUGAUGAGGCCGUUAGGCCGAA IGUUAACC | 14092 |
| 2933 | UAACCUGC U GGGAGCCU | 4753 | AGGCUCCC CUGAUGAGGCCGUUAGGCCGAA ICAGGUUA | 14093 |
| 2940 | CUGGGAGC C UGCACCAA | 4754 | UUGGUGCA CUGAUGAGGCCGUUAGGCCGAA ICUCCCAG | 14094 |
| 2941 | UGGGAGCC U GCACCAAG | 4755 | CUUGGUGC CUGAUGAGGCCGUUAGGCCGAA IGCUCCCA | 14095 |
| 2944 | GAGCCUGC A CCAAGCAA | 4756 | UUGCUUGG CUGAUGAGGCCGUUAGGCCGAA ICAGGCUC | 14096 |
| 2946 | GCCUGCAC C AAGCAAGG | 4757 | CCUUGCUU CUGAUGAGGCCGUUAGGCCGAA IUGCAGGC | 14097 |
| 2947 | CCUGCACC A AGCAAGGA | 4758 | UCCUUGCU CUGAUGAGGCCGUUAGGCCGAA IGUGCAGG | 14098 |
| 2951 | CACCAAGC A AGGAGGGC | 4759 | GCCCUCCU CUGAUGAGGCCGUUAGGCCGAA ICUUGGUG | 14099 |
| 2960 | AGGAGGGC C UCUGAUGG | 4760 | CCAUCAGA CUGAUGAGGCCGUUAGGCCGAA ICCCUCCU | 14100 |
| 2961 | GGAGGGCC U CUGAUGGU | 4761 | ACCAUCAG CUGAUGAGGCCGUUAGGCCGAA IGCCCUCC | 14101 |
| 2963 | AGGGCCUC U GAUGGUGA | 4762 | UCACCAUC CUGAUGAGGCCGUUAGGCCGAA IAGGCCCU | 14102 |
| 2983 | UUGAAUAC U GCAAAUAU | 4763 | AUAUUUGC CUGAUGAGGCCGUUAGGCCGAA IUAUUCAA | 14103 |
| 2986 | AAUACUGC A AAUAUGGA | 4764 | UCCAUAUU CUGAUGAGGCCGUUAGGCCGAA ICAGUAUU | 14104 |
| 2999 | UGGAAAUC U CUCCAACU | 4765 | AGUUGGAG CUGAUGAGGCCGUUAGGCCGAA IAUUUCCA | 14105 |
| 3001 | GAAAUCUC U CCAACUAC | 4766 | GUAGUUGG CUGAUGAGGCCGUUAGGCCGAA IAGAUUUC | 14106 |
| 3003 | AAUCUCUC C AACUACCU | 4767 | AGGUAGUU CUGAUGAGGCCGUUAGGCCGAA IAGAGAUU | 14107 |
| 3004 | AUCUCUCC A ACUACCUC | 4768 | GAGGUAGU CUGAUGAGGCCGUUAGGCCCAA IGAGAGAU | 14108 |
| 3007 | UCUCCAAC U ACCUCAAG | 4769 | CUUGAGGU CUGAUGAGGCCGUUAGGCCGAA IUUGGAGA | 14109 |
| 3010 | CCAACUAC C UCAAGAGC | 4770 | GCUCUUGA CUGAUGAGGCCGUUAGGCCGAA IUAGUUGG | 14110 |
| 3011 | CAACUACC U CAAGAGCA | 4771 | UGCUCUUG CUGAUGAGGCCGUUAGGCCGAA IGUAGUUG | 14111 |
| 3013 | ACUACCUC A AGAGCAAA | 4772 | UUUGCUCU CUGAUGAGGCCGUUAGGCCGAA IAGGUAGU | 14112 |
| 3019 | UCAAGAGC A AACGUGAC | 4773 | GUCACGUU CUGAUGAGGCCGUUAGGCCGAA ICUCUUGA | 14113 |
| 3028 | AACGUGAC U UAUUUUUU | 4774 | AAAAAAUA CUGAUGAGGCCGUUAGGCCGAA IUCACGUU | 14114 |
| 3038 | AUUUUUUU U CAACAAGG | 4775 | CCUUGUUG CUGAUGAGGCCGUUAGGCCGAA IAAAAAAU | 14115 |
| 3040 | UUUUUCUC A ACAAGGAU | 4776 | AUCCUUGU CUGAUGAGGCCGUUAGGCCGAA IAGAAAAA | 14116 |
| 3043 | UUCUCAAC A AGGAUGCA | 4777 | UGCAUCCU CUGAUGAGGCCGUUAGGCCGAA IUUGAGAA | 14117 |
| 3051 | AAGGAUGC A GCACUACA | 4778 | UGUAGUGC CUGAUGAGGCCGUUAGGCCGAA ICAUCCUU | 14118 |
| 3054 | GAUGCAGC A CUACACAU | 4779 | AUGUGUAG CUGAUGAGGCCGUUAGGCCGAA ICUGCAUC | 14119 |
| 3056 | UGCAGCAC U ACACAUGG | 4780 | CCAUGUGU CUGAUGAGGCCGUUAGGCCGAA IUGCUGCA | 14120 |
| 3059 | AGCACUAC A CAUGGAGC | 4781 | GCUCCAUG CUGAUGAGGCCGUUAGGCCGAA IUAGUGCU | 14121 |
| 3061 | CACUACAC A UGGAGCCU | 4782 | AGGCUCCA CUGAUGAGGCCGUUAGGCCGAA IUGUAGUG | 14122 |
| 3068 | CAUGGAGC C UAAGAAAG | 4783 | CUUUCUUA CUGAUGAGGCCGUUAGGCCGAA ICUCCAUG | 14123 |
| 3069 | AUGGAGCC U AAGAAAGA | 4784 | UCUUUCUU CUGAUGAGGCCGUUAGGCCGAA IGCUCCAU | 14124 |
| 3089 | AAUGGAGC C AGGCCUGG | 4785 | CCAGGCCU CUGAUGAGGCCGUUAGGCCGAA ICUCCAUU | 14125 |
| 3090 | AUGGAGCC A GGCCUGGA | 4786 | UCCAGGCC CUGAUGAGGCCGUUAGGCCGAA IGCUCCAU | 14126 |
| 3094 | AGCCAGGC C UGGAACAA | 4787 | UUGUUCCA CUGAUGAGGCCGUUAGGCCGAA ICCUGGCU | 14127 |
| 3095 | GCCAGGCC U GGAACAAG | 4788 | CUUGUUCC CUGAUGAGGCCGUUAGGCCGAA IGCCUGGC | 14128 |
| 3101 | CCUGGAAC A AGGCAAGA | 4789 | UCUUGCCU CUGAUGAGGCCGUUAGGCCGAA IUUCCAGG | 14129 |
| 3106 | AACAAGGC A AGAAACCA | 4790 | UGGUUUCU CUGAUGAGGCCGUUAGGCCGAA ICCUUGUU | 14130 |
| 3113 | CAAGAAAC C AAGACUAG | 4791 | CUAGUCUU CUGAUGAGGCCGUUAGGCCGAA IUUUCUUG | 14131 |
| 3114 | AAGAAACC A AGACUAGA | 4792 | UCUAGUCU CUGAUGAGGCCGUUAGGCCGAA IGUUUCUU | 14132 |
| 3119 | ACCAAGAC U AGAUAGCG | 4793 | CGCUAUCU CUGAUGAGGCCGUUAGGCCGAA IUCUUGGU | 14133 |
| 3130 | AUAGCGUC A CCAGCAGC | 4794 | GCUGCUGG CUGAUGAGGCCGUUAGGCCGAA IACGCUAU | 14134 |
| 3132 | AGCGUCAC C AGCAGCGA | 4795 | UCGCUGCU CUGAUGAGGCCGUUAGGCCGAA IUGACGCU | 14135 |
| 3133 | GCGUCACC A GCAGCGAA | 4796 | UUCGCUGC CUGAUGAGGCCGUUAGGCCGAA IGUGACGC | 14136 |
| 3136 | UCACCAGC A GCGAAAGC | 4797 | GCUUUCGC CUGAUGAGGCCGUUAGGCCGAA ICUGGUGA | 14137 |
| 3145 | GCGAAAGC U UUGCGAGC | 4798 | GCUCGCAA CUGAUGAGGCCGUUAGGCCGAA ICUUUCGC | 14138 |
| 3154 | UUGCGAGC U CCGGCUUU | 4799 | AAAGCCGG CUGAUGAGGCCGUUAGGCCGAA ICUCGCAA | 14139 |
| 3156 | GCGAGCUC C GGCUUUCA | 4800 | UGAAAGCC CUGAUGAGGCCGUUAGGCCGAA IAGCUCGC | 14140 |
| 3160 | GCUCCGGC U UUCAGGAA | 4801 | UUCCUGAA CUGAUGAGGCCGUUAGGCCGAA ICCGGAGC | 14141 |
| 3164 | CGGCUUUC A GGAAGAUA | 4802 | UAUCUUCC CUGAUGAGGCCGUUAGGCCGAA IAAAGCCG | 14142 |
| 3179 | UAAAAGUC U GAGUGAUG | 4803 | CAUCACUC CUGAUGAGGCCGUUAGGCCGAA IACUUUUA | 14143 |
| 3207 | GAGGAUUC U GACGGUUU | 4804 | AAACCGUC CUGAUGAGGCCGUUAGGCCGAA IAAUCCUC | 14144 |
| 3217 | ACGGUUUC U ACAAGGAG | 4805 | CUCCUUGU CUGAUGAGGCCGUUAGGCCGAA IAAACCGU | 14145 |
| 3220 | GUUUCUAC A AGGAGCCC | 4806 | GGGCUCCU CUGAUGAGGCCGUUAGGCCGAA IUAGAAAC | 14146 |
| 3227 | CAAGGAGC C CAUCACUA | 4807 | UAGUGAUG CUGAUGAGGCCGUUAGGCCGAA ICUCCUUG | 14147 |
| 3228 | AAGGAGCC C AUCACUAU | 4808 | AUAGUGAU CUGAUGAGGCCGUUAGGCCGAA IGCUCCUU | 14148 |
| 3229 | AGGAGCCC A UCACUAUG | 4809 | CAUAGUGA CUGAUGAGGCCGUUAGGCCGAA IGGCUCCU | 14149 |
| 3232 | AGCCCAUC A CUAUGGAA | 4810 | UUCCAUAG CUGAUGAGGCCGUUAGGCCGAA IAUGGGCU | 14150 |
| 3234 | CCCAUCAC U AUGGAAGA | 4811 | UCUUCCAU CUGAUGAGGCCGUUAGGCCGAA IUGAUGGG | 14151 |
| 3245 | GGAAGAUC U GAUUUCUU | 4812 | AAGAAAUC CUGAUGAGGCCGUUAGGCCGAA IAUCUUCC | 14152 |
| 3252 | CUGAUUUC U UACAGUUU | 4813 | AAACUGUA CUGAUGAGGCCGUUAGGCCGAA IAAAUCAG | 14153 |
| 3256 | UUUCUUAC A GUUUUCAA | 4814 | UUGAAAAC CUGAUGAGGCCGUUAGGCCGAA IUAAGAAA | 14154 |
| 3263 | CAGUUUUC A AGUGGCCA | 4815 | UGGCCACU CUGAUGAGGCCGUUAGGCCGAA IAAAACUG | 14155 |
| 3270 | CAAGUGGC C AGAGGCAU | 4816 | AUGCCUCU CUGAUGAGGCCGUUAGGCCGAA ICCACUUG | 14156 |
| 3271 | AAGUGGCC A GAGGCAUG | 4817 | CAUGCCUC CUGAUGAGGCCGUUAGGCCGAA IGCCACUU | 14157 |
| 3277 | CCAGAGGC A UGGAGUUC | 4818 | GAACUCCA CUGAUGAGGCCGUUAGGCCGAA ICCUCUGG | 14158 |
| 3286 | UGGAGUUC C UGUCUUCC | 4819 | GGAAGACA CUGAUGAGGCCGUUAGGCCGAA IAACUCCA | 14159 |
| 3287 | GGAGUUCC U GUCUUCCA | 4820 | UGGAAGAC CUGAUGAGGCCGUUAGGCCGAA IGAACUCC | 14160 |
| 3291 | UUCCUGUC U UCCAGAAA | 4821 | UUUCUGGA CUGAUGAGGCCGUUAGGCCGAA IACAGGAA | 14161 |
| 3294 | CUGUCUUC C AGAAAGUG | 4822 | CACUUUCU CUGAUGAGGCCGUUAGGCCGAA IAAGACAG | 14162 |
| 3295 | UGUCUUCC A GAAAGUGC | 4823 | GCACUUUC CUGAUGAGGCCGUUAGGCCGAA IGAAGACA | 14163 |
| 3304 | GAAAGUGC A UUCAUCGG | 4824 | CCGAUGAA CUGAUGAGGCCGUUAGGCCGAA ICACUUUC | 14164 |
| 3308 | GUGCAUUC A UCGGGACC | 4825 | GGUCCCGA CUGAUGAGGCCGUUAGGCCGAA IAAUGCAC | 14165 |
| 3316 | AUCGGGAC C UGGCAGCG | 4826 | CGCUGCCA CUGAUGAGGCCGUUAGGCCGAA IUCCCGAU | 14166 |
| 3317 | UCGGGACC U GGCAGCGA | 4827 | UCGCUGCC CUGAUGAGGCCGUUAGGCCGAA IGUCCCGA | 14167 |
| 3321 | GACCUGGC A GCGAGAAA | 4828 | UUUCUCGC CUGAUGAGGCCGUUAGGCCGAA ICCAGGUC | 14168 |
| 3331 | CGAGAAAC A UUCUUUUA | 4829 | UAAAAGAA CUGAUGAGGCCGUUAGGCCGAA IUUUCUCG | 14169 |
| 3335 | AAACAUUC U UUUAUCUG | 4830 | CAGAUAAA CUGAUGAGGCCGUUAGGCCGAA IAAUGUUU | 14170 |
| 3342 | CUUUUAUC U GAGAACAA | 4831 | UUGUUCUC CUGAUGAGGCCGUUAGGCCGAA IAUAAAAG | 14171 |
| 3349 | CUGAGAAC A ACGUGGUG | 4832 | CACCACGU CUGAUGAGGCCGUUAGGCCGAA IUUCUCAG | 14172 |
| 3376 | AUUUUGGC C UUGCCCGG | 4833 | CCGGGCAA CUGAUGAGGCCGUUAGGCCGAA ICCAAAAU | 14173 |
| 3377 | UUUUGGCC U UGCCCGGG | 4834 | CCCGGGCA CUGAUGAGGCCGUUAGGCCGAA IGCCAAAA | 14174 |
| 3381 | GGCCUUGC C CGGGAUAU | 4835 | AUAUCCCG CUGAUGAGGCCGUUAGGCCGAA ICAAGGCC | 14175 |
| 3382 | GCCUUGCC C GGGAUAUU | 4836 | AAUAUCCC CUGAUGAGGCCGUUAGGCCGAA IGCAAGGC | 14176 |
| 3400 | AUAAGAAC C CCGAUUAU | 4837 | AUAAUCGG CUGAUGAGGCCGUUAGGCCGAA IUUCUUAU | 14177 |
| 3401 | UAAGAACC C CGAUUAUG | 4838 | CAUAAUCG CUGAUGAGGCCGUUAGGCCGAA IGUUCUUA | 14178 |
| 3402 | AAGAACCC C GAUUAUGU | 4839 | ACAUAAUC CUGAUGAGGCCGUUAGGCCGAA IGGUUCUU | 14179 |
| 3426 | GGAGAUAC U CGACUUCC | 4840 | GGAAGUCG CUGAUGAGGCCGUUAGGCCGAA IUAUCUCC | 14180 |
| 3431 | UACUCGAC U UCCUCUGA | 4841 | UCAGAGGA CUGAUGAGGCCGUUAGGCCGAA IUCGAGUA | 14181 |
| 3434 | UCGACUUC C UCUGAAAU | 4842 | AUUUCAGA CUGAUGAGGCCGUUAGGCCGAA IAAGUCGA | 14182 |
| 3435 | CGACUUCC U CUGAAAUG | 4843 | CAUUUCAG CUGAUGAGGCCGUUAGGCCGAA IGAAGUCG | 14183 |
| 3437 | ACUUCCUC U GAAAUGGA | 4844 | UCCAUUUC CUGAUGAGGCCGUUAGGCCGAA IAGGAAGU | 14184 |
| 3450 | UGGAUGGC U CCCGAAUC | 4845 | GAUUCGGG CUGAUGAGGCCGUUAGGCCGAA ICCAUCCA | 14185 |
| 3452 | CAUGGCUC C CGAAUCUA | 4846 | UAGAUUCG CUGAUGAGGCCGUUAGGCCGAA IAGCCAUC | 14186 |
| 3453 | AUGGCUCC C GAAUCUAU | 4847 | AUAGAUUC CUGAUGAGGCCGUUAGGCCGAA IGAGCCAU | 14187 |
| 3459 | CCCGAAUC U AUCUUUGA | 4848 | UCAAAGAU CUGAUGAGGCCGUUAGGCCGAA IAUUCGGG | 14188 |
| 3463 | AAUCUAUC U UUGACAAA | 4849 | UUUGUCAA CUGAUGAGGCCGUUAGGCCGAA IAUAGAUU | 14189 |
| 3469 | UCUUUGAC A AAAUCUAC | 4850 | GUAGAUUU CUGAUGAGGCCGUUAGGCCGAA IUCAAAGA | 14190 |
| 3475 | ACAAAAUC U ACAGCACC | 4851 | GGUGCUGU CUGAUGAGGCCGUUAGGCCGAA IAUUUUGU | 14191 |
| 3478 | AAAUCUAC A GCACCAAG | 4852 | CUUGGUGC CUGAUGAGGCCGUUAGGCCGAA IUAGAUUU | 14192 |
| 3481 | UCUACAGC A CCAAGAGC | 4853 | GCUCUUGG CUGAUGAGGCCGUUAGGCCGAA ICUGUAGA | 14193 |
| 3483 | UACAGCAC C AAGAGCGA | 4854 | UCGCUCUU CUGAUGAGGCCGUUAGGCCGAA IUGCUGUA | 14194 |
| 3484 | ACAGCACC A AGAGCGAC | 4855 | GUCGCUCU CUGAUGAGGCCGUUAGGCCGAA IGUGCUGU | 14195 |
| 3501 | GUGUGGUC U UACGGAGU | 4856 | ACUCCGUA CUGAUGAGGCCGUUAGGCCGAA IACCACAC | 14196 |
| 3515 | AGUAUUGC U GUGGGAAA | 4857 | UUUCCCAC CUGAUGAGGCCGUUAGGCCGAA ICAAUACU | 14197 |
| 3526 | GGGAAAUC U UCUCCUUA | 4858 | UAAGGAGA CUGAUGAGGCCGUUAGGCCGAA IAUUUCCC | 14198 |
| 3529 | AAAUCUUC U CCUUAGGU | 4859 | ACCUAAGG CUGAUGAGGCCGUUAGGCCGAA IAAGAUUU | 14199 |
| 3531 | AUCUUCUC C UUAGGUGG | 4860 | CCACCUAA CUGAUGAGGCCGUUAGGCCGAA IAGAAGAU | 14200 |
| 3532 | UCUUCUCC U UAGGUGGG | 4861 | CCCACCUA CUGAUGAGGCCGUUAGGCCGAA IGAGAAGA | 14201 |
| 3543 | GGUGGGUC U CCAUACCC | 4862 | GGGUAUGG CUGAUGAGGCCGUUAGGCCGAA IACCCACC | 14202 |
| 3545 | UGGGUCUC C AUACCCAG | 4863 | CUGGGUAU CUGAUGAGGCCGUUAGGCCGAA IAGACCCA | 14203 |
| 3546 | GGGUCUCC A UACCCAGG | 4864 | CCUGGGUA CUGAUGAGGCCGUUAGGCCGAA IGAGACCC | 14204 |
| 3550 | CUCCAUAC C CAGGAGUA | 4865 | UACUCCUG CUGAUGAGGCCGUUAGGCCGAA IUAUGGAG | 14205 |
| 3551 | UCCAUACC C AGGAGUAC | 4866 | GUACUCCU CUGAUGAGGCCGUUAGGCCGAA IGUAUGGA | 14206 |
| 3552 | CCAUACCC A GGAGUACA | 4867 | UGUACUCC CUGAUGAGGCCGUUAGGCCGAA IGGUAUGG | 14207 |
| 3560 | AGGAGUAC A AAUGGAUG | 4868 | CAUCCAUU CUGAUGAGGCCGUUAGGCCGAA IUACUCCU | 14208 |
| 3574 | AUGAGGAC U UUUGCAGU | 4869 | ACUGCAAA CUGAUGAGGCCGUUAGGCCGAA IUCCUCAU | 14209 |
| 3580 | ACUUUUGC A GUCGCCUG | 4870 | CAGGCGAC CUGAUGAGGCCGUUAGGCCGAA ICAAAAGU | 14210 |
| 3586 | GCAGUCGC C UGAGGGAA | 4871 | UUCCCUCA CUGAUGAGGCCGUUAGGCCGAA ICGACUGC | 14211 |
| 3587 | CAGUCGCC U GAGGGAAG | 4872 | CUUCCCUC CUGAUGAGGCCGUUAGGCCGAA IGCGACUG | 14212 |
| 3598 | GGGAAGGC A UGAGGAUG | 4873 | CAUCCUCA CUGAUGAGGCCGUUAGGCCGAA ICCUUCCC | 14213 |
| 3612 | AUGAGAGC U CCUGAGUA | 4874 | UACUCAGG CUGAUGAGGCCGUUAGGCCGAA ICUCUCAU | 14214 |
| 3614 | GAGAGCUC C UGAGUACU | 4875 | AGUACUCA CUGAUGAGGCCGUUAGGCCGAA IAGCUCUC | 14215 |
| 3615 | AGAGCUCC U GAGUACUC | 4876 | GAGUACUC CUGAUGAGGCCGUUAGGCCGAA IGAGCUCU | 14216 |
| 3622 | CUGAGUAC U CUACUCCU | 4877 | AGGAGUAG CUGAUGAGGCCGUUAGGCCGAA IUACUCAG | 14217 |
| 3624 | GAGUACUC U ACUCCUGA | 4878 | UCAGGAGU CUGAUGAGGCCGUUAGGCCGAA IAGUACUC | 14218 |
| 3627 | UACUCUAC U CCUGAAAU | 4879 | AUUUCAGG CUGAUGAGGCCGUUAGGCCGAA IUAGAGUA | 14219 |
| 3629 | CUCUACUC C UGAAAUCU | 4880 | AGAUUUCA CUGAUGAGGCCGUUAGGCCGAA IAGUAGAG | 14220 |
| 3630 | UCUACUCC U GAAAUCUA | 4881 | UAGAUUUC CUGAUGAGGCCGUUAGGCCGAA IGAGUAGA | 14221 |
| 3637 | CUGAAAUC U AUCAGAUC | 4882 | GAUCUGAU CUGAUGAGGCCGUUAGGCCGAA IAUUUCAG | 14222 |
| 3641 | AAUCUAUC A GAUCAUGC | 4883 | GCAUGAUC CUGAUGAGGCCGUUAGGCCGAA IAUAGAUU | 14223 |
| 3646 | AUCAGAUC A UGCUGGAC | 4884 | GUCCAGCA CUGAUGAGGCCGUUAGGCCGAA IAUCUGAU | 14224 |
| 3650 | GAUCAUGC U GGACUGCU | 4885 | AGCAGUCC CUGAUGAGGCCGUUAGGCCGAA ICAUGAUC | 14225 |
| 3655 | UGCUGGAC U GCUGGCAC | 4886 | GUGCCAGC CUGAUGAGGCCGUUAGGCCGAA IUCCAGCA | 14226 |
| 3658 | UGGACUGC U GGCACAGA | 4887 | UCUGUGCC CUGAUGAGGCCGUUAGGCCGAA ICAGUCCA | 14227 |
| 3662 | CUGCUGGC A CAGAGACC | 4888 | GGUCUCUG CUGAUGAGGCCGUUAGGCCGAA ICCAGCAG | 14228 |
| 3664 | GCUGGCAC A GAGACCCA | 4889 | UGGGUCUC CUGAUGAGGCCGUUAGGCCGAA IUGCCAGC | 14229 |
| 3670 | ACAGAGAC C CAAAAGAA | 4890 | UUCUUUUG CUGAUGAGGCCGUUAGGCCGAA IUCUCUGU | 14230 |
| 3671 | CAGAGACC C AAAAGAAA | 4891 | UUUCUUUU CUGAUGAGGCCGUUAGGCCGAA IGUCUCUG | 14231 |
| 3672 | AGAGACCC A AAAGAAAG | 4892 | CUUUCUUU CUGAUGAGGCCGUUAGGCCGAA IGGUCUCU | 14232 |
| 3683 | AGAAAGGC C AAGAUUUG | 4893 | CAAAUCUU CUGAUGAGGCCGUUAGGCCGAA ICCUUUCU | 14233 |
| 3684 | GAAAGGCC A AGAUUUGC | 4894 | GCAAAUCU CUGAUGAGGCCGUUAGGCCGAA IGCCUUUC | 14234 |
| 3693 | AGAUUUGC A GAACUUGU | 4895 | ACAAGUUC CUGAUGAGGCCGUUAGGCCGAA ICAAAUCU | 14235 |
| 3698 | UGCAGAAC U UGUGGAAA | 4896 | UUUCCACA CUGAUGAGGCCGUUAGGCCGAA IUUCUGCA | 14236 |
| 3710 | GGAAAAAC U AGGUGAUU | 4897 | AAUCACCU CUGAUGAGGCCGUUAGGCCGAA IUUUUUCC | 14237 |
| 3722 | UGAUUUGC U UCAAGCAA | 4898 | UUUCCACA CUGAUGAGGCCGUUAGGCCGAA ICAAAUCA | 14238 |
| 3725 | UUUGCUUC A AGCAAAUG | 4899 | CAUUUGCU CUGAUGAGGCCGUUAGGCCGAA IAAGCAAA | 14239 |
| 3729 | CUUCAAGC A AAUGUACA | 4900 | UGUACAUU CUGAUGAGGCCGUUAGGCCGAA ICUUGAAG | 14240 |
| 3737 | AAAUGUAC A ACAGGAUG | 4901 | CAUCCUGU CUGAUGAGGCCGUUAGGCCGAA IUACAUUU | 14241 |
| 3740 | UGUACAAC A GGAUGGUA | 4902 | UACCAUCC CUGAUGAGGCCGUUAGGCCGAA IUUGUACA | 14242 |
| 3754 | GUAAAGAC U ACAUCCCA | 4903 | UGGGAUGU CUGAUGAGGCCGUUAGGCCGAA IUCUUUAC | 14243 |
| 3757 | AAGACUAC A UCCCAAUC | 4904 | GAUUGGGA CUGAUGAGGCCGUUAGGCCGAA IUAGUCUU | 14244 |
| 3760 | ACUACAUC C CAAUCAAU | 4905 | AUUGAUUG CUGAUGAGGCCGUUAGGCCGAA IAUGUAGU | 14245 |
| 3761 | CUACAUCC C AAUCAAUG | 4906 | CAUUGAUU CUGAUGAGGCCGUUAGGCCGAA IGAUGUAG | 14246 |
| 3762 | UACAUCCC A UACUGACA | 4907 | GCAUUGAU CUGAUGAGGCCGUUAGGCCGAA IGGAUGUA | 14247 |
| 3766 | UCCCAAUC A AUGCCAUA | 4908 | UAUGGCAU CUGAUGAGGCCGUUAGGCCGAA IAUUGGGA | 14248 |
| 3771 | AUCAAUGC C AUACUGAC | 4909 | GUCAGUAU CUGAUGAGGCCGUUAGGCCGAA ICAUUGAU | 14249 |
| 3772 | UCAAUGCC A UACUGACA | 4910 | UGUCAGUA CUGAUGAGGCCGUUAGGCCGAA IGCAUUGA | 14250 |
| 3776 | UGCCAUAC U GACAGGAA | 4911 | UUCCUGUC CUGAUGAGGCCGUUAGGCCGAA IUAUGGCA | 14251 |
| 3780 | AUACUGAC A GGAAAUAG | 4912 | CUAUUUCC CUGAUGAGGCCGUUAGGCCGAA IUCAGUAU | 14252 |
| 3798 | GGGUUUAC A UACUCAAC | 4913 | GUUGAGUA CUGAUGAGGCCGUUAGGCCGAA IUAAACCC | 14253 |
| 3802 | UUACAUAC U CAACUCCU | 4914 | AGGAGUUG CUGAUGAGGCCGUUAGGCCGAA IUAUGUAA | 14254 |
| 3804 | ACAUACUC A ACUCCUGC | 4915 | GCAGGAGU CUGAUGAGGCCGUUAGGCCGAA IAGUAUGU | 14255 |
| 3807 | UACUCAAC U CCUGCCUU | 4916 | AAGGCAGG CUGAUGAGGCCGUUAGGCCGAA IUUGAGUA | 14256 |
| 3809 | CUCAACUC C UGCCUUCU | 4917 | AGAAGGCA CUGAUGAGGCCGUUAGGCCGAA IAGUUGAG | 14257 |
| 3810 | UCAACUCC U GCCUUCUC | 4918 | GAGAAGGC CUGAUGAGGCCGUUAGGCCGAA IGAGUUGA | 14258 |
| 3813 | ACUCCUGC C UUCUUUGA | 4919 | UCAGAGAA CUGAUGAGGCCGUUAGGCCGAA ICAGGAGU | 14259 |
| 3814 | CUCCUGCC U UCUCUGAG | 4920 | CUCAGAGA CUGAUGAGGCCGUUAGGCCGAA IGCAGGAG | 14260 |
| 3817 | CUGCCUUC U CUGAGGAC | 4921 | GUCCUCAG CUGAUGAGGCCGUUAGGCCGAA IAAGGCAG | 14261 |
| 3819 | GCCUUCUC U GAGGACUU | 4922 | AAGUCCUC CUGAUGAGGCCGUUAGGCCGAA IAGAAGGC | 14262 |
| 3826 | CUGAGGAC U UCUUCAGG | 4923 | CUUGAAGA CUGAUGAGGCCGUUAGGCCGAA IUCCUCAG | 14263 |
| 3829 | AGGACUUC U UCAAGGAA | 4924 | UUCCUUGA CUGAUGAGGCCGUUAGGCCGAA IAAGUCCU | 14264 |
| 3832 | ACUUCUUC A AGGAAAGU | 4925 | ACUUUCCU CUGAUGAGGCCGUUAGGCCGAA IAAGAAGU | 14265 |
| 3846 | AGUAUUUC A GCUCCGAA | 4926 | UUCGGAGC CUGAUGAGGCCGUUAGGCCGAA IAAAUACU | 14266 |
| 3849 | AUUUCAGC U CCGAAGUU | 4927 | AACUUCGG CUGAUGAGGCCGUUAGGCCGAA ICUGAAAU | 14267 |
| 3851 | UUCAGCUC C GAAGUUUA | 4928 | UAAACUUC CUGAUGAGGCCGUUAGGCCGAA IAGCUGAA | 14268 |
| 3864 | UUUAAUUC A GGAAGCUC | 4929 | GAGCUUCC CUGAUGAGGCCGUUAGGCCGAA IAAUUAAA | 14269 |
| 3871 | CAGGAAGC U CUGAUGAU | 4930 | AUCAUCAG CUGAUGAGGCCGUUAGGCCGAA ICUUCCUG | 14270 |
| 3873 | GGAAGCUC U GAUGAUGU | 4931 | ACAUCAUC CUGAUGAGGCCGUUAGGCCGAA IAGCUUCC | 14271 |
| 3883 | AUGAUGUC A GAUAUGUA | 4932 | UACAUAUC CUGAUGAGGCCGUUAGGCCGAA IACAUCAU | 14272 |
| 3897 | GUAAAUGC U UUCAAGUU | 4933 | AACUUGAA CUGAUGAGGCCGUUAGGCCGAA ICAUUUAC | 14273 |
| 3901 | AUGCUUUC A AGUUCAUG | 4934 | CAUGAACU CUGAUGAGGCCGUUAGGCCGAA IAAAGCAU | 14274 |
| 3907 | UCAAGUUC A UGAGCCUG | 4935 | CAGGCUCA CUGAUGAGGCCGUUAGGCCGAA IAACUUGA | 14275 |
| 3913 | UCAUGAGC C UGGAAAGA | 4936 | UCUUUCCA CUGAUGAGGCCGUUAGGCCGAA ICUCAUGA | 14276 |
| 3914 | CAUGAGCC U GGAAAGAA | 4937 | UUCUUUCC CUGAUGAGGCCGUUAGGCCGAA IGCUCAUG | 14277 |
| 3925 | AAAGAAUC A AAACCUUU | 4938 | AAAGGUUU CUGAUGAGGCCGUUAGGCCGAA IAUUCUUU | 14278 |
| 3930 | AUCAAAAC C UUUGAAGA | 4939 | UCUUCAAA CUGAUGAGGCCGUUAGGCCGAA IUUUUGAU | 14279 |
| 3931 | UCAAAACC U UUGAAGAA | 4940 | UUCUUCAA CUGAUGAGGCCGUUAGGCCGAA IGUUUUGA | 14280 |
| 3941 | UGAAGAAC U UUUACCGA | 4941 | UCGGUAAA CUGAUGAGGCCGUUAGGCCGAA IUUCUUCA | 14281 |
| 3947 | ACUUUUAC C GAAUGCCA | 4942 | UGGCAUUC CUGAUGAGGCCGUUAGGCCGAA IUAAAAGU | 14282 |
| 3954 | CCGAAUGC C ACCUCCAU | 4943 | AUGGAGGU CUGAUGAGGCCGUUAGGCCGAA ICAUUCGG | 14283 |
| 3955 | CGAAUGCC A CCUCCAUG | 4944 | CAUGGAGG CUGAUGAGGCCGUUAGGCCGAA IGCAUUCG | 14284 |
| 3957 | AAUGCCAC C UCCAUGUU | 4945 | AACAUGGA CUGAUGAGGCCGUUAGGCCGAA IUGGCAUU | 14285 |
| 3958 | AUGCCACC U CCAUGUUU | 4946 | AAACAUGG CUGAUGAGGCCGUUAGGCCGAA IGUGGCAU | 14286 |
| 3960 | GCCACCUC C AUGUUUGA | 4947 | UCAAACAU CUGAUGAGGCCGUUAGGCCGAA IAGGUGGC | 14287 |
| 3961 | CCACCUCC A UGUUUGAU | 4948 | AUCAAACA CUGAUGAGGCCGUUAGGCCGAA IGAGGUGG | 14288 |
| 3973 | UUGAUGAC U ACCAGGGC | 4949 | GCCCUGGU CUGAUGAGGCCGUUAGGCCGAA IUCAUCAA | 14289 |
| 3976 | AUGACUAC C AGGGCGAC | 4950 | GUCGCCCU CUGAUGAGGCCGUUAGGCCGAA IUAGUCAU | 14290 |
| 3977 | UGACUACC A GGGCGACA | 4951 | UGUCGCCC CUGAUGAGGCCGUUAGGCCGAA IGUAGUCA | 14291 |
| 3985 | AGGGCGAC A GCAGCACU | 4952 | AGUGCUGC CUGAUGAGGCCGUUAGGCCGAA IUCGCCCU | 14292 |
| 3988 | GCGACAGC A GCACUCUG | 4953 | CAGAGUGC CUGAUGAGGCCGUUAGGCCGAA ICUGUCGC | 14293 |
| 3991 | ACAGCAGC A CUCUGUUG | 4954 | CAACAGAG CUGAUGAGGCCGUUAGGCCGAA ICUGCUGU | 14294 |
| 3993 | AGCAGCAC U CUGUUGGC | 4955 | GCCAACAG CUGAUGAGGCCGUUAGGCCGAA IUGCUGCU | 14295 |
| 3995 | CAGCACUC U GUUGGCCU | 4956 | AGGCCAAC CUGAUGAGGCCGUUAGGCCGAA IAGUGCUG | 14296 |
| 4002 | CUGUUGGC C UCUCCCAU | 4957 | AUGGGAGA CUGAUGAGGCCGUUAGGCCGAA ICCAACAG | 14297 |
| 4003 | UGUUGGCC U CUCCCAUG | 4958 | CAUGGGAG CUGAUGAGGCCGUUAGGCCGAA IGCCAACA | 14298 |
| 4005 | UUGGCCUC U CCCAUGCU | 4959 | AGCAUGGG CUGAUGAGGCCGUUAGGCCGAA IAGGCCAA | 14299 |
| 4007 | GGCCUCUC C CAUGCUGA | 4960 | UCAGCAUG CUGAUGAGGCCGUUAGGCCGAA IAGAGGCC | 14300 |
| 4008 | GCCUCUCC C AUGCUGAA | 4961 | UUCAGCAU CUGAUGAGGCCGUUAGGCCGAA IGAGAGGC | 14301 |
| 4009 | CCUCUCCC A UGCUGAAG | 4962 | CUUCAGCA CUGAUGAGGCCGUUAGGCCGAA IGGAGAGG | 14302 |
| 4013 | UCCCAUGC U GAAGCGCU | 4963 | AGCGCUUC CUGAUGAGGCCGUUAGGCCGAA ICAUGGGA | 14303 |
| 4021 | UGAAGCGC U UCACCUGG | 4964 | CCAGGUGA CUGAUGAGGCCGUUAGGCCGAA ICGCUUCA | 14304 |
| 4024 | AGCGCUUC A CCUGGACU | 4965 | AGUCCAGG CUGAUGAGGCCGUUAGGCCGAA IAAGCGCU | 14305 |
| 4026 | CGCUUCAC C UGGACUGA | 4966 | UCAGUCCA CUGAUGAGGCCGUUAGGCCGAA IUGAAGCG | 14306 |
| 4027 | GCUUCACC U GGACUGAC | 4967 | GUCAGUCC CUGAUGAGGCCGUUAGGCCGAA IGUGAAGC | 14307 |
| 4032 | ACCUGGAC U GACAGCAA | 4968 | UUGCUGUC CUGAUGAGGCCGUUAGGCCGAA IUCCAGGU | 14308 |
| 4036 | GGACUGAC A GCAAACCC | 4969 | GGGUUUGC CUGAUGAGGCCGUUAGGCCGAA IUCAGUCC | 14309 |
| 4039 | CUGACAGC A AACCCAAG | 4970 | CUUGGGUU CUGAUGAGGCCGUUAGGCCGAA ICUGUCAG | 14310 |
| 4043 | CAGCAAAC C CAAGGCCU | 4971 | AGGCCUUG CUGAUGAGGCCGUUAGGCCGAA IUUUGCUG | 14311 |
| 4044 | AGCAAACC C AAGGCCUC | 4972 | GAGGCCUU CUGAUGAGGCCGUUAGGCCGAA IGUUUGCU | 14312 |
| 4045 | GCAAACCC A AGGCCUCG | 4973 | CGAGGCCU CUGAUGAGGCCGUUAGGCCGAA IGGUUUGC | 14313 |
| 4050 | CCCAAGGC C UCGCUCAA | 4974 | UUGAGCGA CUGAUGAGGCCGUUAGGCCGAA ICCUUGGG | 14314 |
| 4051 | CCAAGGCC U CGCUCAAG | 4975 | CUUGAGCG CUGAUGAGGCCGUUAGGCCGAA IGCCUUGG | 14315 |
| 4055 | GGCCUCGC U CAAGAUUG | 4976 | CAAUCUUG CUGAUGAGGCCGUUAGGCCGAA ICGAGGCC | 14316 |
| 4057 | CCUCGCUC A AGAUUGAC | 4977 | GUCAAUCU CUGAUGAGGCCGUUAGGCCGAA IAGCGAGG | 14317 |
| 4066 | AGAUUGAC U UGAGAGUA | 4978 | UACUCUCA CUGAUGAGGCCGUUAGGCCGAA IUCAAUCU | 14318 |
| 4077 | AGAGUAAC C AGUAAAAG | 4979 | CUUUUACU CUGAUGAGGCCGUUAGGCCGAA IUUACUCU | 14319 |
| 4078 | GAGUAACC A GUAAAAGU | 4980 | ACUUUUAC CUGAUGAGGCCGUUAGGCCGAA IGUUACUC | 14320 |
| 4100 | GUCGGGGC U GUCUGAUG | 4981 | CAUCAGAC CUGAUGAGGCCGUUAGGCCGAA ICCCCGAC | 14321 |
| 4104 | GGGCUGUC U GAUGUCAG | 4982 | CUGACAUC CUGAUGAGGCCGUUAGGCCGAA IACAGCCC | 14322 |
| 4111 | CUGAUGUC A GCAGGCCC | 4983 | GGGCCUGC CUGAUGAGGCCGUUAGGCCGAA IACAUCAG | 14323 |
| 4114 | AUGUCAGC A GGCCCAGU | 4984 | ACUGGGCC CUGAUGAGGCCGUUAGGCCGAA ICUGACAU | 14324 |
| 4118 | CAGCAGGC C CAGUUUCU | 4985 | AGAAACUG CUGAUGAGGCCGUUAGGCCGAA ICCUGCUG | 14325 |
| 4119 | AGCAGGCC C AGUUUCUG | 4986 | CAGAAACU CUGAUGAGGCCGUUAGGCCGAA IGCCUGCU | 14326 |
| 4120 | GCAGGCCC A GUUUCUGC | 4987 | GCAGAAAC CUGAUGAGGCCGUUAGGCCGAA IGGCCUGC | 14327 |
| 4126 | CCAGUUUC U GCCAUUCC | 4988 | GGAAUGGC CUGAUGAGGCCGUUAGGCCGAA IAAACUGG | 14328 |
| 4129 | GUUUCUGC C AUUCCAGC | 4989 | GCUGGAAU CUGAUGAGGCCGUUAGGCCGAA ICAGAAAC | 14329 |
| 4130 | UUUCUGCC A UUCCAGCU | 4990 | AGCUGGAA CUGAUGAGGCCGUUAGGCCGAA IGCAGAAA | 14330 |
| 4134 | UGCCAUUC C AGCUGUGG | 4991 | CCACAGCU CUGAUGAGGCCGUUAGGCCGAA IAAUGGCA | 14331 |
| 4135 | GCCAUUCC A GCUGUGGG | 4992 | CCCACAGC CUGAUGAGGCCGUUAGGCCGAA IGAAUGGC | 14332 |
| 4138 | AUUCCAGC U GUGGGCAC | 4993 | GUGCCCAC CUGAUGAGGCCGUUAGGCCGAA ICUGGAAU | 14333 |
| 4145 | CUGUGGGC A CGUCAGCG | 4994 | CGCUGACG CUGAUGAGGCCGUUAGGCCGAA ICCCACAG | 14334 |
| 4150 | GGCACGUC A GCGAAGGC | 4995 | GCCUUCGC CUGAUGAGGCCGUUAGGCCGAA IACGUGCC | 14335 |
| 4159 | GCGAAGGC A AGCGCAGG | 4996 | CCUGCGCU CUGAUGAGGCCGUUAGGCCGAA ICCUUCGC | 14336 |
| 4165 | GCAAGCGC A GGUUCACC | 4997 | GGUGAACC CUGAUGAGGCCGUUAGGCCGAA ICGCUUGC | 14337 |
| 4171 | GCAGGUUC A CCUACGAC | 4998 | GUCGUAGG CUGAUGAGGCCGUUAGGCCGAA IAACCUGC | 14338 |
| 4173 | AGGUUCAC C UACGACCA | 4999 | UGGUCGUA CUGAUGAGGCCGUUAGGCCGAA IUGAACCU | 14339 |
| 4174 | GGUUCACC U ACGACCAC | 5000 | GUGGUCGU CUGAUGAGGCCGUUAGGCCGAA IGUGAACC | 14340 |
| 4180 | CCUACGAC C ACGCUGAG | 5001 | CUCAGCGU CUGAUGAGGCCGUUAGGCCGAA IUCGUAGG | 14341 |
| 4181 | CUACGACC A CGCUGAGC | 5002 | GCUCAGCG CUGAUGAGGCCGUUAGGCCGAA IGUCGUAG | 14342 |
| 4185 | GACCACGC U GAGCUGGA | 5003 | UCCAGCUC CUGAUGAGGCCGUUAGGCCGAA ICGUGGUC | 14343 |
| 4190 | CGCUGAGC U GGAAAGGA | 5004 | UCCUUUCC CUGAUGAGGCCGUUAGGCCGAA ICUCAGCG | 14344 |
| 4210 | UCGCGUGC U GCUCCCCG | 5005 | CGGGGAGC CUGAUGAGGCCGUUAGGCCGAA ICACGCGA | 14345 |
| 4213 | CGUGCUGC U CCCCGCCC | 5006 | GGGCGGGG CUGAUGAGGCCGUUAGGCCGAA ICAGCACG | 14346 |
| 4215 | UGCUGCUC C CCGCCCCC | 5007 | GGGGGCGG CUGAUGAGGCCGUUAGGCCGAA IAGCAGCA | 14347 |
| 4216 | GCUGCUCC C CGCCCCCA | 5008 | UGGGGGCG CUGAUGAGGCCGUUAGGCCGAA IGAGCAGC | 14348 |
| 4217 | CUGCUCCC C GCCCCCAG | 5009 | CUGGGGGC CUGAUGAGGCCGUUAGGCCGAA IGGAGCAG | 14349 |
| 4220 | CUCCCCGC C CCCAGACU | 5010 | AGUCUGGG CUGAUGAGGCCGUUAGGCCGAA ICGGGGAG | 14350 |
| 4221 | UCCCCGCC C CCAGACUA | 5011 | UAGUCUGG CUGAUGAGGCCGUUAGGCCGAA IGCGGGGA | 14351 |
| 4222 | CCCCGCCC C CAGACUAC | 5012 | GUAGUCUG CUGAUGAGGCCGUUAGGCCGAA IGGCGGGG | 14352 |
| 4223 | CCCGCCCC C AGACUACA | 5013 | UGUAGUCU CUGAUGAGGCCGUUAGGCCGAA IGGGCGGG | 14353 |
| 4224 | CCGCCCCC A GACUACAA | 5014 | UUGUAGUC CUGAUGAGGCCGUUAGGCCGAA IGGGGCGG | 14354 |
| 4228 | CCCCAGAC U ACAACUCG | 5015 | CGAGUUGU CUGAUGAGGCCGUUAGGCCGAA IUCUGGGG | 14355 |
| 4231 | CAGACUAC A ACUCGGUG | 5016 | CACCGAGU CUGAUGAGGCCGUUAGGCCGAA IUAGUCUG | 14356 |
| 4234 | ACUACAAC U CGGUGGUC | 5017 | GACCACCG CUGAUGAGGCCGUUAGGCCGAA IUUGUAGU | 14357 |
| 4243 | CGGUGGUC C UGUACUCC | 5018 | GGAGUACA CUGAUGAGGCCGUUAGGCCGAA IACCACCG | 14358 |
| 4244 | GGUGGUCC U GUACUCCA | 5019 | UGGAGUAC CUGAUGAGGCCGUUAGGCCGAA IGACCACC | 14359 |
| 4249 | UCCUGUAC U CCACCCCA | 5020 | UGGGGUGG CUGAUGAGGCCGUUAGGCCGAA IUACAGGA | 14360 |
| 4251 | CUGUACUC C ACCCCACC | 5021 | GGUGGGGU CUGAUGAGGCCGUUAGGCCGAA IAGUACAG | 14361 |
| 4252 | UGUACUCC A CCCCACCC | 5022 | GGGUGGGG CUGAUGAGGCCGUUAGGCCGAA IGAGUACA | 14362 |
| 4254 | UACUCCAC C CCACCCAU | 5023 | AUGGGUGG CUGAUGAGGCCGUUAGGCCGAA IUGGAGUA | 14363 |
| 4255 | ACUCCACC C CACCCAUC | 5024 | GAUGGGUG CUGAUGAGGCCGUUAGGCCGAA IGUGGAGU | 14364 |
| 4256 | CUCCACCC C ACCCAUCU | 5025 | AGAUGGGU CUGAUGAGGCCGUUAGGCCGAA IGGUGGAG | 14365 |
| 4257 | UCCACCCC A CCCAUCUA | 5026 | UAGAUGGG CUGAUGAGGCCGUUAGGCCGAA IGGGUGGA | 14366 |
| 4259 | CACCCCAC C CAUCUAGA | 5027 | UCUAGAUG CUGAUGAGGCCGUUAGGCCGAA IUGGGGUG | 14367 |
| 4260 | ACCCCACC C AUCUAGAG | 5028 | CUCUAGAU CUGAUGAGGCCGUUAGGCCGAA IGUGGGGU | 14368 |
| 4261 | CCCCACCC A UCUAGAGU | 5029 | ACUCUAGA CUGAUGAGGCCGUUAGGCCGAA IGGUGGGG | 14369 |
| 4264 | CACCCAUC U AGAGUUUG | 5030 | CAAACUCU CUGAUGAGGCCGUUAGGCCGAA IAUGGGUG | 14370 |
| 4275 | AGUUUGAC A CGAAGCCU | 5031 | AGGCUUCG CUGAUGAGGCCGUUAGGCCGAA IUCAAACU | 14371 |
| 4282 | CACGAAGC C UUAUUUCU | 5032 | AGAAAUAA CUGAUGAGGCCGUUAGGCCGAA ICUUCGUG | 14372 |
| 4283 | ACGAAGCC U UAUUUCUA | 5033 | UAGAAAUA CUGAUGAGGCCGUUAGGCCGAA IGCUUCGU | 14373 |
| 4290 | CUUAUUUC U AGAAGCAC | 5034 | GUGCUUCU CUGAUGAGGCCGUUAGGCCGAA IAAAUAAG | 14374 |
| 4297 | CUAGAAGC A CAUGUGUA | 5035 | UACACAUG CUGAUGAGGCCGUUAGGCCGAA ICUUCUAG | 14375 |
| 4299 | AGAAGCAC A UGUGUAUU | 5036 | AAUACACA CUGAUGAGGCCGUUAGGCCGAA IUGCUUCU | 14376 |
| 4313 | AUUUAUAC C CCCAGGAA | 5037 | UUCCUGGG CUGAUGAGGCCGUUAGGCCGAA IUAUAAAU | 14377 |
| 4314 | UUUAUACC C CCAGGAAA | 5038 | UUUCCUGG CUGAUGAGGCCGUUAGGCCGAA IGUAUAAA | 14378 |
| 4315 | UUAUACCC C CAGGAAAC | 5039 | GUUUCCUG CUGAUGAGGCCGUUAGGCCGAA IGGUAUAA | 14379 |
| 4316 | UAUACCCC C AGGAAACU | 5040 | AGUUUCCU CUGAUGAGGCCGUUAGGCCGAA IGGGUAUA | 14380 |
| 4317 | AUACCCCC A GGAAACUA | 5041 | UAGUUUCC CUGAUGAGGCCGUUAGGCCGAA IGGGGUAU | 14381 |
| 4324 | CAGGAAAC U AGCUUUUG | 5042 | CAAAAGCU CUGAUGAGGCCGUUAGGCCGAA IUUUCCUG | 14382 |
| 4328 | AAACUAGC U UUUGCCAG | 5043 | CUGGCAAA CUGAUGAGGCCGUUAGGCCGAA ICUAGUUU | 14383 |
| 4334 | GCUUUUGC C AGUAUUAU | 5044 | AUAAUACU CUGAUGAGGCCGUUAGGCCGAA ICAAAAGC | 14384 |
| 4335 | CUUUUGCC A GUAUUAUG | 5045 | CAUAAUAC CUGAUGAGGCCGUUAGGCCGAA IGCAAAAG | 14385 |
| 4345 | UAUUAUGC A UAUAUAAG | 5046 | CUUAUAUA CUGAUGAGGCCGUUAGGCCGAA ICAUAAUA | 14386 |
| 4359 | AAGUUUAC A CCUUUAUC | 5047 | GAUAAAGG CUGAUGAGGCCGUUAGGCCGAA IUAAACUU | 14387 |
| 4361 | GUUUACAC C UUUAUCUU | 5048 | AAGAUAAA CUGAUGAGGCCGUUAGGCCGAA IUGUAAAC | 14388 |
| 4362 | UUUACACC U UUAUCUUU | 5049 | AAAGAUAA CUGAUGAGGCCGUUAGGCCGAA IGUGUAAA | 14389 |
| 4368 | CCUUUAUC U UUCCAUGG | 5050 | CCAUGGAA CUGAUGAGGCCGUUAGGCCGAA IAUAAAGG | 14390 |
| 4372 | UAUCUUUC C AUGGGAGC | 5051 | GCUCCCAU CUGAUGAGGCCGUUAGGCCGAA IAAAGAUA | 14391 |
| 4373 | AUCUUUCC A UGGGAGCC | 5052 | GGCUCCCA CUGAUGAGGCCGUUAGGCCGAA IGAAAGAU | 14392 |
| 4381 | AUGGGAGC C AGCUGCUU | 5053 | AAGCAGCU CUGAUGAGGCCGUUAGGCCGAA ICUCCCAU | 14393 |
| 4382 | UGGGAGCC A GCUGCUUU | 5054 | AAAGCAGC CUGAUGAGGCCGUUAGGCCGAA IGCUCCCA | 14394 |
| 4385 | GAGCCAGC U GCUUUUUG | 5055 | CAAAAAGC CUGAUGAGGCCGUUAGGCCGAA ICUGGCUC | 14395 |
| 4388 | CCAGCUGC U UUUUGUGA | 5056 | UCACAAAA CUGAUGAGGCCGUUAGGCCGAA ICAGCUGG | 14396 |
| 4412 | AAUAGUGC U UUUUUUUU | 5057 | AAAAAAAA CUGAUGAGGCCGUUAGGCCGAA ICACUAUU | 14397 |
| 4426 | UUUUUGAC U AACAAGAA | 5058 | UUCUUGUU CUGAUGAGGCCGUUAGGCCGAA IUCAAAAA | 14398 |
| 4430 | UGACUAAC A AGAAUGUA | 5059 | UACAUUCU CUGAUGAGGCCGUUAGGCCGAA IUUAGUCA | 14399 |
| 4441 | AAUGUAAC U CCAGAUAG | 5060 | CUAUCUGG CUGAUGAGGCCGUUAGGCCGAA IUUACAUU | 14400 |
| 4443 | UGUAACUC C AGAUAGAG | 5061 | CUCUAUCU CUGAUGAGGCCGUUAGGCCGAA IAGUUACA | 14401 |
| 4444 | GUAACUCC A GAUAGAGA | 5062 | UCUCUAUC CUGAUGAGGCCGUUAGGCCGAA IGAGUUAC | 14402 |
| 4462 | AUAGUGAC A AGUGAAGA | 5063 | UCUUCACU CUGAUGAGGCCGUUAGGCCGAA IUCACUAU | 14403 |
| 4473 | UGAAGAAC A CUACUGCU | 5064 | AGCAGUAG CUGAUGAGGCCGUUAGGCCGAA IUUCUUCA | 14404 |
| 4475 | AAGAACAC U ACUGCUAA | 5065 | UUAGCAGU CUGAUGAGGCCGUUAGGCCGAA IUGUUCUU | 14405 |
| 4478 | AACACUAC U GCUAAAUC | 5066 | GAUUUAGC CUGAUGAGGCCGUUAGGCCGAA IUAGUGUU | 14406 |
| 4481 | ACUACUGC U AAAUCCUC | 5067 | GAGGAUUU CUGAUGAGGCCGUUAGGCCGAA ICAGUAGU | 14407 |
| 4487 | GCUAAAUC C UCAUGUUA | 5068 | UAACAUGA CUGAUGAGGCCGUUAGGCCGAA IAUUUAGC | 14408 |
| 4488 | CUAAAUCC U CAUGUUAC | 5069 | GUAACAUG CUGAUGAGGCCGUUAGGCCGAA IGAUUUAG | 14409 |
| 4490 | AAAUCCUC A UGUUACUC | 5070 | GAGUAACA CUGAUGAGGCCGUUAGGCCGAA IAGGAUUU | 14410 |
| 4497 | CAUGUUAC U CAGUGUUA | 5071 | UAACACUG CUGAUGAGGCCGUUAGGCCGAA IUAACAUG | 14411 |
| 4499 | UGUUACUC A GUGUUAGA | 5072 | UCUAACAC CUGAUGAGGCCGUUAGGCCGAA IAGUAACA | 14412 |
| 4514 | GAGAAAUC C UUCCUAAA | 5073 | UUUAGGAA CUGAUGAGGCCGUUAGGCCGAA IAUUUCUC | 14413 |
| 4515 | AGAAAUCC U UCCUAAAC | 5074 | GUUUAGGA CUGAUGAGGCCGUUAGGCCGAA IGAUUUCU | 14414 |
| 4518 | AAUCCUUC C UAAACCCA | 5075 | UUGGGUUA CUGAUGAGGCCGUUAGGCCGAA IAAGGAUU | 14415 |
| 4519 | AUCCUUCC U AAACCCAA | 5076 | UUGGGUUU CUGAUGAGGCCGUUAGGCCGAA IGAAGGAU | 14416 |
| 4524 | UCCUAAAC C CAAUGACU | 5077 | AGUCAUUG CUGAUGAGGCCGUUAGGCCGAA IUUUAGGA | 14417 |
| 4525 | CCUAAACC C AAUGACUU | 5078 | AAGUCAUU CUGAUGAGGCCGUUAGGCCGAA IGUUUAGG | 14418 |
| 4526 | CUAAACCC A AUGACUUC | 5079 | GAAGUCAU CUGAUGAGGCCGUUAGGCCGAA IGGUUUAG | 14419 |
| 4532 | CCAAUGAC U UCCCUGCU | 5080 | AGCAGGGA CUGAUGAGGCCGUUAGGCCGAA IUCAUUGG | 14420 |
| 4535 | AUGACUUC C CUGGUCCA | 5081 | UGGAGCAG CUGAUGAGGCCGUUAGGCCGAA IAAGUCAU | 14421 |
| 4536 | UGACUUCC C UGCUCCAA | 5082 | UUGGAGCA CUGAUGAGGCCGUUAGGCCGAA IGAAGUCA | 14422 |
| 4537 | GACUUCCC U GCUCCAAC | 5083 | GUUGGAGC CUGAUGAGGCCGUUAGGCCGAA IGGAAGUC | 14423 |
| 4540 | UUCCCUGC U CCAACCCC | 5084 | GGGGUUGG CUGAUGAGGCCGUUAGGCCGAA ICAGGGAA | 14424 |
| 4542 | CCCUGCUC C AACCCCCG | 5085 | CGGGGGUU CUGAUGAGGCCGUUAGGCCGAA IAGCAGGG | 14425 |
| 4543 | CCUGCUCC A ACCCCCGC | 5086 | GCGGGGGU CUGAUGAGGCCGUUAGGCCGAA IGAGCAGG | 14426 |
| 4546 | GCUCCAAC C CCCGCCAC | 5087 | GUGGCGGG CUGAUGAGGCCGUUAGGCCGAA IUUGGAGC | 14427 |
| 4547 | CUCCAACC C CCGCCACC | 5088 | GGUGGCGG CUGAUGAGGCCGUUAGGCCGAA IGUUGGAG | 14428 |
| 4548 | UCCAACCC C CGCCACCU | 5089 | AGGUGGCG CUGAUGAGGCCGUUAGGCCGAA IGGUUGGA | 14429 |
| 4549 | CCAACCCC C GCCACCUC | 5090 | GAGGUGGC CUGAUGAGGCCGUUAGGCCGAA IGGGUUGG | 14430 |
| 4552 | ACCCCCGC C ACCUCAGG | 5091 | CCUGAGGU CUGAUGAGGCCGUUAGGCCGAA ICGGGGGU | 14431 |
| 4553 | CCCCCGCC A CCUCAGGG | 5092 | CCCUGAGG CUGAUGAGGCCGUUAGGCCGAA IGCGGGGG | 14432 |
| 4555 | CCCGCCAC C UCAGGGCA | 5093 | UGCCCUGA CUGAUGAGGCCGUUAGGCCGAA IUGGCGGG | 14433 |
| 4556 | CCGCCACC U CAGGGCAC | 5094 | GUGCCCUG CUGAUGAGGCCGUUAGGCCGAA IGUGGCGG | 14434 |
| 4558 | GCCACCUC A GGGCACGC | 5095 | GCGUGCCC CUGAUGAGGCCGUUAGGCCGAA IAGGUGGC | 14435 |
| 4563 | CUCAGGGC A CGCAGGAC | 5096 | GUCCUGCG CUGAUGAGGCCGUUAGGCCGAA ICCCUGAG | 14436 |
| 4567 | GGGCACGC A GGACCAGU | 5097 | ACUGGUCC CUGAUGAGGCCGUUAGGCCGAA ICGUGCCC | 14437 |
| 4572 | CGCAGGAC C AGUUUGAU | 5098 | AUCAAACU CUGAUGAGGCCGUUAGGCCGAA IUCCUGCG | 14438 |
| 4573 | GCAGGACC A GUUUGAUU | 5099 | AAUCAAAC CUGAUGAGGCCGUUAGGCCGAA IGUCCUGG | 14439 |
| 4589 | UGAGGAGC U GCACUGAU | 5100 | AUCAGUGC CUGAUGAGGCCGUUAGGCCGAA ICUCCUCA | 14440 |
| 4592 | GGAGCUGC A CUGAUCAC | 5101 | GUGAUCAG CUGAUGAGGCCGUUAGGCCGAA ICAGCUCC | 14441 |
| 4594 | AGCUGCAC U GAUCACCC | 5102 | GGGUGAUC CUGAUGAGGCCGUUAGGCCGAA IUGCAGCU | 14442 |
| 4599 | CACUGAUC A CCCAAUGC | 5103 | GCAUUGGG CUGAUGAGGCCGUUAGGCCGAA IAUCAGUG | 14443 |
| 4601 | CUGAUCAC C CAAUGCAU | 5104 | AUGCAUUG CUGAUGAGGCCGUUAGGCCGAA IUGAUCAG | 14444 |
| 4602 | UGAUCACC C AAUGCAUC | 5105 | GAUGCAUU CUGAUGAGGCCGUUAGGCCGAA IGUGAUCA | 14445 |
| 4603 | GAUCACCC A AUGCAUCA | 5106 | UGAUGCAU CUGAUGAGGCCGUUAGGCCGAA IGGUGAUC | 14446 |
| 4608 | CCCAAUGC A UCACGUAC | 5107 | GUACGUGA CUGAUGAGGCCGUUAGGCCGAA ICAUUGGG | 14447 |
| 4611 | AAUGCAUC A CGUACCCC | 5108 | GGGGUACG CUGAUGAGGCCGUUAGGCCGAA IAUGCAUU | 14448 |
| 4617 | UCACGUAC C CCACUGGG | 5109 | CCCAGUGG CUGAUGAGGCCGUUAGGCCGAA IUACGUGA | 14449 |
| 4618 | CACGUACC C CACUGGGC | 5110 | GCCCAGUG CUGAUGAGGCCGUUAGGCCGAA IGUACGUG | 14450 |
| 4619 | ACGUACCC C ACUGGGCC | 5111 | GGCCCAGU CUGAUGAGGCCGUUAGGCCGAA IGGUACGU | 14451 |
| 4620 | CGUACCCC A CUGGGCCA | 5112 | UGGCCCAG CUGAUGAGGCCGUUAGGCCGAA IGGGUACG | 14452 |
| 4622 | UACCCCAC U GGGCCAGC | 5113 | GCUGGCCC CUGAUGAGGCCGUUAGGCCGAA IUGGGGUA | 14453 |
| 4627 | CACUGGGC C AGCCCUGC | 5114 | GCAGGGCU CUGAUGAGGCCGUUAGGCCGAA ICCCAGUG | 14454 |
| 4628 | ACUGGGCC A GCCCUGCA | 5115 | UGCAGGGC CUGAUGAGGCCGUUAGGCCGAA IGCCCAGU | 14455 |
| 4631 | GGGCCAGC C CUGCAGCC | 5116 | GGCUGCAG CUGAUGAGGCCGUUAGGCCGAA ICUGGCCC | 14456 |
| 4632 | GGCCAGCC C UGCAGCCC | 5117 | GGGCUGCA CUGAUGAGGCCGUUAGGCCGAA IGCUGGCC | 14457 |
| 4633 | GCCAGCCC U GCAGCCCA | 5118 | UGGGCUGC CUGAUGAGGCCGUUAGGCCGAA IGGCUGGC | 14458 |
| 4636 | AGCCCUGC A GCCCAAAA | 5119 | UUUUGGGC CUGAUGAGGCCGUUAGGCCGAA ICAGGGCU | 14459 |
| 4639 | CCUGCAGC C CAAAACCC | 5120 | GGGUUUUG CUGAUGAGGCCGUUAGGCCGAA ICUGCAGG | 14460 |
| 4640 | CUGCAGCC C AAAACCCA | 5121 | UGGGUUUU CUGAUGAGGCCGUUAGGCCGAA IGCUGCAG | 14461 |
| 4641 | UGCAGCCC A AAACCCAG | 5122 | CUGGGUUU CUGAUGAGGCCGUUAGGCCGAA IGGCUGCA | 14462 |
| 4646 | CCCAAAAC C CAGGGCAA | 5123 | UUGCCCUG CUGAUGAGGCCGUUAGGCCGAA IUUUUGGG | 14463 |
| 4647 | CCAAAACC C AGGGCAAC | 5124 | GUUGCCCU CUGAUGAGGCCGUUAGGCCGAA IGUUUUGG | 14464 |
| 4648 | CAAAACCC A GGGCAACA | 5125 | UGUUGCCC CUGAUGAGGCCGUUAGGCCGAA IGGUUUUG | 14465 |
| 4653 | CCCAGGGC A ACAAGCCC | 5126 | GGGCUUGU CUGAUGAGGCCGUUAGGCCGAA ICCCUGGG | 14466 |
| 4656 | AGGGCAAC A AGCCCGUU | 5127 | AACGGGCU CUGAUGAGGCCGUUAGGCCGAA IUUGCCCU | 14467 |
| 4660 | CAACAAGC C CGUUAGCC | 5128 | GGCUAACG CUGAUGAGGCCGUUAGGCCGAA ICUUGUUG | 14468 |
| 4661 | AACAAGCC C GUUAGCCC | 5129 | GGGCUAAC CUGAUGAGGCCGUUAGGCCGAA IGCUUGUU | 14469 |
| 4668 | CCGUUAGC C CCAGGGGA | 5130 | UCCCCUGG CUGAUGAGGCCGUUAGGCCGAA ICUAACGG | 14470 |
| 4669 | CGUUAGCC C CAGGGGAU | 5131 | AUCCCCUG CUGAUGAGGCCGUUAGGCCGAA IGCUAACG | 14471 |
| 4670 | GUUAGCCC C AGGGGAUC | 5132 | GAUCCCCU CUGAUGAGGCCGUUAGGCCGAA IGGCUAAC | 14472 |
| 4671 | UUAGCCCC A GGGGAUCA | 5133 | UGAUCCCC CUGAUGAGGCCGUUAGGCCGAA IGGGCUAA | 14473 |
| 4679 | AGGGGAUC A CUGGCUGG | 5134 | CCAGCCAG CUGAUGAGGCCGUUAGGCCGAA IAUCCCCU | 14474 |
| 4681 | GGGAUCAC U GGCUGGCC | 5135 | GGCCAGCC CUGAUGAGGCCGUUAGGCCGAA IUGAUCCC | 14475 |
| 4685 | UCACUGGC U GGCCUGAG | 5136 | CUCAGGCC CUGAUGAGGCCGUUAGGCCGAA ICCAGUGA | 14476 |
| 4689 | UGGCUGGC C UGAGCAAC | 5137 | GUUGCUCA CUGAUGAGGCCGUUAGGCCGAA ICCAGCCA | 14477 |
| 4690 | GGCUGGCC U GAGCAACA | 5138 | UGUUGCUC CUGAUGAGGCCGUUAGGCCGAA IGCCAGCC | 14478 |
| 4695 | GCCUGAGC A ACAUCUCG | 5139 | CGAGAUGU CUGAUGAGGCCGUUAGGCCGAA ICUCAGGC | 14479 |
| 4698 | UGAGCAAC A UCUCGGGA | 5140 | UCCCGAGA CUGAUGAGGCCGUUAGGCCGAA IUUGCUCA | 14480 |
| 4701 | GCAACAUC U CGGGAGUC | 5141 | GACUCCCG CUGAUGAGGCCGUUAGGCCGAA IAUGUUGC | 14481 |
| 4710 | CGGGAGUC C UCUAGCAG | 5142 | CUGCUAGA CUGAUGAGGCCGUUAGGCCGAA IACUCCCG | 14482 |
| 4711 | GGGAGUCC U CUAGCAGG | 5143 | CCUGCUAG CUGAUGAGGCCGUUAGGCCGAA IGACUCCC | 14483 |
| 4713 | GAGUCCUC U AGCAGGCC | 5144 | GGCCUGCU CUGAUGAGGCCGUUAGGCCGAA IAGGACUC | 14484 |
| 4717 | CCUCUAGC A GGCCUAAG | 5145 | CUUAGGCC CUGAUGAGGCCGUUAGGCCGAA ICUAGAGG | 14485 |
| 4721 | UAGCAGGC C UAAGACAU | 5146 | AUGUCUUA CUGAUGAGGCCGUUAGGCCGAA ICCUGCUA | 14486 |
| 4722 | AGCAGGCC U AAGACAUG | 5147 | CAUGUCUU CUGAUGAGGCCGUUAGGCCGAA IGCCUGCU | 14487 |
| 4728 | CCUAAGAC A UGUGAGGA | 5148 | UCCUCACA CUGAUGAGGCCGUUAGGCCGAA IUCUUAGG | 14488 |
| 4754 | AAAAAAGC A AAAAGCAA | 5149 | UUGCUUUU CUGAUGAGGCCGUUAGGCCGAA ICUUUUUU | 14489 |
| 4761 | CAAAAAGC A AGGGAGAA | 5150 | UUCUCCCU CUGAUGAGGCCGUUAGGCCGAA ICUUUUUG | 14490 |
| 4779 | AGAGAAAC C GGGAGAAG | 5151 | CUUCUCCC CUGAUGAGGCCGUUAGGCCGAA IUUUCUCU | 14491 |
| 4790 | GAGAAGGC A UGAGAAAG | 5152 | CUUUCUCA CUGAUGAGGCCGUUAGGCCGAA ICCUUCUC | 14492 |
| 4811 | UGAGACGC A CCAUGUGG | 5153 | CCACAUGG CUGAUGAGGCCGUUAGGCCGAA ICGUCUCA | 14493 |
| 4813 | AGACGCAC C AUGUGGGC | 5154 | GCCCACAU CUGAUGAGGCCGUUAGGCCGAA IUGCGUCU | 14494 |
| 4814 | GACGCACC A UGUGGGCA | 5155 | UGCCCACA CUGAUGAGGCCGUUAGGCCGAA IGUGCGUC | 14495 |
| 4822 | AUGUGGGC A CGGAGGGG | 5156 | CCCCUCCG CUGAUGAGGCCGUUAGGCCGAA ICCCACAU | 14496 |
| 4839 | GACGGGGC U CAGCAAUG | 5157 | CAUUGCUG CUGAUGAGGCCGUUAGGCCGAA ICCCCGUC | 14497 |
| 4841 | CGGGGCUC A GCAAUGCC | 5158 | GGCAUUGC CUGAUGAGGCCGUUAGGCCGAA IAGCCCCG | 14498 |
| 4844 | GGCUCAGC A AUGCCAUU | 5159 | AAUGGCAU CUGAUGAGGCCGUUAGGCCGAA ICUGAGCC | 14499 |
| 4849 | AGCAAUGC C AUUUCAGU | 5160 | ACUGAAAU CUGAUGAGGCCGUUAGGCCGAA ICAUUGCU | 14500 |
| 4850 | GCAAUGCC A UUUCAGUG | 5161 | CACUGAAA CUGAUGAGGCCGUUAGGCCGAA IGCAUUGC | 14501 |
| 4855 | GCCAUUUC A GUGGCUUC | 5162 | GAAGCCAC CUGAUGAGGCCGUUAGGCCGAA IAAAUGGC | 14502 |
| 4861 | UCAGUGGC U UCCCAGCU | 5163 | AGCUGGGA CUGAUGAGGCCGUUAGGCCGAA ICCACUGA | 14503 |
| 4864 | GUGGCUUC C CAGCUCUG | 5164 | CAGAGCUG CUGAUGAGGCCGUUAGGCCGAA IAAGCCAC | 14504 |
| 4865 | UGGCUUCC C AGCUCUGA | 5165 | UCAGAGCU CUGAUGAGGCCGUUAGGCCGAA IGAAGCCA | 14505 |
| 4866 | GGCUUCCC A GCUCUGAC | 5166 | GUCAGAGC CUGAUGAGGCCGUUAGGCCGAA IGGAAGCC | 14506 |
| 4869 | UUCCCAGC U CUGACCCU | 5167 | AGGGUCAG CUGAUGAGGCCGUUAGGCCGAA ICUGGGAA | 14507 |
| 4871 | CCCAGCUC U GACCCUUC | 5168 | GAAGGGUC CUGAUGAGGCCGUUAGGCCGAA IAGCUGGG | 14508 |
| 4875 | GCUCUGAC C CUUCUACA | 5169 | UGUAGAAG CUGAUGAGGCCGUUAGGCCGAA IUCAGAGC | 14509 |
| 4876 | CUCUGACC C UUCUACAU | 5170 | AUGUAGAA CUGAUGAGGCCGUUAGGCCGAA IGUCAGAG | 14510 |
| 4877 | UCUGACCC U UCUACAUU | 5171 | AAUGUAGA CUGAUGAGGCCGUUAGGCCGAA IGGUCAGA | 14511 |
| 4880 | GACCCUUC U ACAUUUGA | 5172 | UCAAAUGU CUGAUGAGGCCGUUAGGCCGAA IAAGGGUC | 14512 |
| 4883 | CCUUCUAC A UUUGAGGG | 5173 | CCCUCAAA CUGAUGAGGCCGUUAGGCCGAA IUAGAAGG | 14513 |
| 4893 | UUGAGGGC C CAGCCAGG | 5174 | CCUGGCUG CUGAUGAGGCCGUUAGGCCGAA ICCCUCAA | 14514 |
| 4894 | UGAGGGCC C AGCCAGGA | 5175 | UCCUGGCU CUGAUGAGGCCGUUAGGCCGAA IGOCCUCA | 14515 |
| 4895 | GAGGGCCC A GCCAGGAG | 5176 | CUCCUGGC CUGAUGAGGCCGUUAGGCCGAA IGGCCCUC | 14516 |
| 4898 | GGCCCAGC C AGGAGCAG | 5177 | CUGCUCCU CUGAUGAGGCCGUUAGGCCGAA ICUGGGCC | 14517 |
| 4899 | GCCCAGCC A GGAGCAGA | 5178 | UCUGCUCC CUGAUGAGGCCGUUAGGCCGAA IGCUGGGC | 14518 |
| 4905 | CCAGGAGC A GAUGGACA | 5179 | UGUCCAUC CUGAUGAGGCCGUUAGGCCGAA ICUCCUGG | 14519 |
| 4913 | AGAUGGAC A GCGAUGAG | 5180 | CUCAUCGC CUGAUGAGGCCGUUAGGCCGAA IUCCAUCU | 14520 |
| 4927 | GAGGGGAC A UUUUCUGG | 5181 | CCAGAAAA CUGAUGAGGCCGUUAGGCCGAA IUCCCCUC | 14521 |
| 4933 | ACAUUUUC U GGAUUCUG | 5182 | CAGAAUCC CUGAUGAGGCCGUUAGGCCGAA IAAAAUGU | 14522 |
| 4940 | CUGGAUUC U GGGAGGCA | 5183 | UGCCUCCC CUGAUGAGGCCGUUAGGCCGAA IAAUCCAG | 14523 |
| 4948 | UGGGAGGC A AGAAAAGG | 5184 | CCUUUUCU CUGAUGAGGCCGUUAGGCCGAA ICCUCCCA | 14524 |
| 4959 | AAAAGGAC A AAUAUCUU | 5185 | AAGAUAUU CUGAUGAGGCCGUUAGGCCGAA IUCCUUUU | 14525 |
| 4966 | CAAAUAUC U UUUUUGGA | 5186 | UCCAAAAA CUGAUGAGGCCGUUAGGCCGAA IAUAUUUG | 14526 |
| 4977 | UUUGGAAC U AAAGCAAA | 5187 | UUUGCUUU CUGAUGAGGCCGUUAGGCCGAA IUUCCAAA | 14527 |
| 4983 | ACUAAAGC A AAUUUUAG | 5188 | CUAAAAUU CUGAUGAGGCCGUUAGGCCGAA ICUUUAGU | 14528 |
| 4994 | UUUUAGAC C UUUACCUA | 5189 | UAGGUAAA CUGAUGAGGCCGUUAGGCCGAA IUCUAAAA | 14529 |
| 4995 | UUUAGACC U UUACCUAU | 5190 | AUAGGUAA CUGAUGAGGCCGUUAGGCCGAA IGUCUAAA | 14530 |
| 5000 | ACCUUUAC C UAUGGAAG | 5191 | CUUCCAUA CUGAUGAGGCCGUUAGGCCGAA IUAAAGGU | 14531 |
| 5001 | CCUUUACC U AUGGAAGU | 5192 | ACUUCCAU CUGAUGAGGCCGUUAGGCCGAA IGUAAAGG | 14532 |
| 5015 | AGUGGUUC U AUGUCCAU | 5193 | AUGGACAU CUGAUGAGGCCGUUAGGCCGAA IAACCACU | 14533 |
| 5021 | UCUAUGUC C AUUCUCAU | 5194 | AUGAGAAU CUGAUGAGGCCGUUAGGCCGAA IACAUAGA | 14534 |
| 5022 | CUAUGUCC A UUCUCAUU | 5195 | AAUGAGAA CUGAUGAGGCCGUUAGGCCGAA IGACAUAG | 14535 |
| 5026 | GUCCAUUC U CAUUCGUG | 5196 | CACGAAUG CUGAUGAGGCCGUUAGGCCGAA IAAUGGAC | 14536 |
| 5028 | CCAUUCUC A UUCGUGGC | 5197 | GCCACGAA CUGAUGAGGCCGUUAGGCCGAA IAGAAUGG | 14537 |
| 5037 | UUCGUGGC A UGUUUUGA | 5198 | UCAAAACA CUGAUGAGGCCGUUAGGCCGAA ICCACGAA | 14538 |
| 5054 | UUUGUAGC A CUGAGGGU | 5199 | ACCCUCAG CUGAUGAGGCCGUUAGGCCGAA ICUACAAA | 14539 |
| 5056 | UGUAGCAC U GAGGGUGG | 5200 | CCACCCUC CUGAUGAGGCCGUUAGGCCGAA IUGCUACA | 14540 |
| 5066 | AGGGUGGC A CUCAACUC | 5201 | GAGUUGAG CUGAUGAGGCCGUUAGGCCGAA ICCACCCU | 14541 |
| 5068 | GGUGGCAC U CAACUCUG | 5202 | CAGAGUUG CUGAUGAGGCCGUUAGGCCGAA IUGCCACC | 14542 |
| 5070 | UGGCACUC A ACUCUGAG | 5203 | CUCAGAGU CUGAUGAGGCCGUUAGGCCGAA IAGUGCCA | 14543 |
| 5073 | CACUCAAC U CUGAGCCC | 5204 | GGGCUCAG CUGAUGAGGCCGUUAGGCCGAA IUUGAGUG | 14544 |
| 5075 | CUCAACUC U GAGCCCAU | 5205 | AUGGGCUC CUGAUGAGGCCGUUAGGCCGAA IAGUUGAG | 14545 |
| 5080 | CUCUGAGC C CAUACUUU | 5206 | AAAGUAUG CUGAUGAGGCCGUUAGGCCGAA ICUCAGAG | 14546 |
| 5081 | UCUGAGCC C AUACUUUU | 5207 | AAAAGUAU CUGAUGAGGCCGUUAGGCCGAA IGCUCAGA | 14547 |
| 5082 | CUGAGCCC A UACUUUUG | 5208 | CAAAAGUA CUGAUGAGGCCGUUAGGCCGAA IGGCUCAG | 14548 |
| 5086 | GCCCAUAC U UUUGGCUC | 5209 | GAGCCAAA CUGAUGAGGCCGUUAGGCCGAA IUAUGGGC | 14549 |
| 5093 | CUUUUGGC U CCUCUAGU | 5210 | ACUAGAGG CUGAUGAGGCCGUUAGGCCGAA ICCAAAAG | 14550 |
| 5095 | UUUGGCUC C UCUAGUAA | 5211 | UUACUAGA CUGAUGAGGCCGUUAGGCCGAA IAGCCAAA | 14551 |
| 5096 | UUGGCUCC U CUAGUAAG | 5212 | CUUACUAG CUGAUGAGGCCGUUAGGCCGAA IGAGCCAA | 14552 |
| 5098 | GGCUCCUC U AGUAAGAU | 5213 | AUCUUACU CUGAUGAGGCCGUUAGGCCGAA IAGGAGCC | 14553 |
| 5109 | UAAGAUGC A CUGAAAAC | 5214 | GUUUUCAG CUGAUGAGGCCGUUAGGCCGAA ICAUCUUA | 14554 |
| 5111 | AGAUGCAC U GAAAACUU | 5215 | AAGUUUUC CUGAUGAGGCCGUUAGGCCGAA IUGCAUCU | 14555 |
| 5118 | CUGAAAAC U UAGCCAGA | 5216 | UCUGGCUA CUGAUGAGGCCGUUAGGCCGAA IUUUUCAG | 14556 |
| 5123 | AACUUAGC C AGAGUUAG | 5217 | CUAACUCU CUGAUGAGGCCGUUAGGCCGAA ICUAAGUU | 14557 |
| 5124 | ACUUAGCC A GAGUUAGG | 5218 | CCUAACUC CUGAUGAGGCCGUUAGGCCGAA IGCUAAGU | 14558 |
| 5138 | AGGUUGUC U CCAGGCCA | 5219 | UGGCCUGG CUGAUGAGGCCGUUAGGCCGAA IACAACCU | 14559 |
| 5140 | GUUGUCUC C AGGCCAUG | 5220 | CAUGGCCU CUGAUGAGGCCGUUAGGCCGAA IAGACAAC | 14560 |
| 5141 | UUGUCUCC A GGCCAUGA | 5221 | UCAUGGCC CUGAUGAGGCCGUUAGGCCGAA IGAGACAA | 14561 |
| 5145 | CUCCAGGC C AUGAUGGC | 5222 | GCCAUCAU CUGAUGAGGCCGUUAGGCCGAA ICCUGGAG | 14562 |
| 5146 | UCCAGGCC A UGAUGGCC | 5223 | GGCCAUCA CUGAUGAGGCCGUUAGGCCGAA IGCCUGGA | 14563 |
| 5154 | AUGAUGGC C UUACACUG | 5224 | CAGUGUAA CUGAUGAGGCCGUUAGGCCGAA ICCAUCAU | 14564 |
| 5155 | UGAUGGCC U UACACUGA | 5225 | UCAGUGUA CUGAUGAGGCCGUUAGGCCGAA IGCCAUCA | 14565 |
| 5159 | GGCCUUAC A CUGAAAAU | 5226 | AUUUUCAG CUGAUGAGGCCGUUAGGCCGAA IUAAGGCC | 14566 |
| 5161 | CCUUACAC U GAAAAUGU | 5227 | ACAUUUUC CUGAUGAGGCCGUUAGGCCGAA IUGUAAGG | 14567 |
| 5171 | AAAAUGUC A CAUUCUAU | 5228 | AUAGAAUG CUGAUGAGGCCGUUAGGCCGAA IACAUUUU | 14568 |
| 5173 | AAUGUCAC A UUCUAUUU | 5229 | AAAUAGAA CUGAUGAGGCCGUUAGGCCGAA IUGACAUU | 14569 |
| 5177 | UCACAUUC U AUUUUGGG | 5230 | CCCAAAAU CUGAUGAGGCCGUUAGGCCGAA IAAUGUGA | 14570 |
| 5201 | AUAUAGUC C AGACACUU | 5231 | AAGUGUCU CUGAUGAGGCCGUUAGGCCGAA IACUAUAU | 14571 |
| 5202 | UAUAGUCC A GACACUUA | 5232 | UAAGUGUC CUGAUGAGGCCGUUAGGCCGAA IGACUAUA | 14572 |
| 5206 | GUCCAGAC A CUUAACUC | 5233 | GAGUUAAG CUGAUGAGGCCGUUAGGCCGAA IUCUGGAC | 14573 |
| 5208 | CCAGACAC U UAACUCAA | 5234 | UUGAGUUA CUGAUGAGGCCGUUAGGCCGAA IUGUCUGG | 14574 |
| 5213 | CACUUAAC U CAAUUUCU | 5235 | AGAAAUUG CUGAUGAGGCCGUUAGGCCGAA IUUAAGUG | 14575 |
| 5215 | CUUAACUC A AUUUCUUG | 5236 | CAAGAAAU CUGAUGAGGCCGUUAGGCCGAA IAGUUAAG | 14576 |
| 5221 | UCAAUUUC U UGGUAUUA | 5237 | UAAUACCA CUGAUGAGGCCGUUAGGCCGAA IAAAUUGA | 14577 |
| 5233 | UAUUAUUC U GUUUUGCA | 5238 | UGCAAAAC CUGAUGAGGCCGUUAGGCCGAA IAAUAAUA | 14578 |
| 5241 | UGUUUUGC A CAGUUAGU | 5239 | ACUAACUG CUGAUGAGGCCGUUAGGCCGAA ICAAAACA | 14579 |
| 5243 | UUUUGCAC A GUUAGUUG | 5240 | CAACUAAC CUGAUGAGGCCGUUAGGCCGAA IUGCAAAA | 14580 |
| 5263 | AAGAAAGC U GAGAAGAA | 5241 | UUCUUCUC CUGAUGAGGCCGUUAGGCCGAA ICUUUCUU | 14581 |
| 5281 | GAAAAUGC A GUCCUGAG | 5242 | CUCAGGAC CUGAUGAGGCCGUUAGGCCGAA ICAUUUUC | 14582 |
| 5285 | AUGCAGUC C UGAGGAGA | 5243 | UCUCCUCA CUGAUGAGGCCGUUAGGCCGAA IACUGCAU | 14583 |
| 5286 | UGCAGUCC U GAGGAGAG | 5244 | CUCUCCUC CUGAUGAGGCCGUUAGGCCGAA IGACUGCA | 14584 |
| 5300 | GAGUUUUC U CCAUAUCA | 5245 | UGAUAUGG CUGAUGAGGCCGUUAGGCCGAA IAAAACUC | 14585 |
| 5302 | GUUUUCUC C AUAUCAAA | 5246 | UUUGAUAU CUGAUGAGGCCGUUAGGCCGAA IAGAAAAC | 14586 |
| 5303 | UUUUCUCC A UAUCAAAA | 5247 | UUUUGAUA CUGAUGAGGCCGUUAGGCCGAA IGAGAAAA | 14587 |
| 5308 | UCCAUAUC A AAACGAGG | 5248 | CCUCGUUU CUGAUGAGGCCGUUAGGCCGAA IAUAUGGA | 14588 |
| 5319 | ACGAGGGC U GAUGGAGG | 5249 | CCUCCAUC CUGAUGAGGCCGUUAGGCCGAA ICCCUCGU | 14589 |
| 5337 | AAAAGGUC A AUAAGGUC | 5250 | GACCUUAU CUGAUGAGGCCGUUAGGCCGAA IACCUUUU | 14590 |
| 5346 | AUAAGGUC A AGGGAAGA | 5251 | UCUUCCCU CUGAUGAGGCCGUUAGGCCGAA IACCUUAU | 14591 |
| 5356 | GGGAAGAC C CCGUCUCU | 5252 | AGAGACGG CUGAUGAGGCCGUUAGGCCGAA IUCUUCCC | 14592 |
| 5357 | GGAAGACC C CGUCUCUA | 5253 | UAGAGACG CUGAUGAGGCCGUUAGGCCGAA IGUCUUCC | 14593 |
| 5358 | GAAGACCC C GUCUCUAU | 5254 | AUAGAGAC CUGAUGAGGCCGUUAGGCCGAA IGGUCUUC | 14594 |
| 5362 | ACCCCGUC U CUAUACCA | 5255 | UGGUAUAG CUGAUGAGGCCGUUAGGCCGAA IACGGGGU | 14595 |
| 5364 | CCCGUCUC U AUACCAAC | 5256 | GUUGGUAU CUGAUGAGGCCGUUAGGCCGAA IAGACGGG | 14596 |
| 5369 | CUCUAUAC C AACCAAAC | 5257 | GUUUGGUU CUGAUGAGGCCGUUAGGCCGAA IUAUAGAG | 14597 |
| 5370 | UCUAUACC A ACCAAACC | 5258 | GGUUUGGU CUGAUGAGGCCGUUAGGCCGAA IGUAUAGA | 14598 |
| 5373 | AUACCAAC C AAACCAAU | 5259 | AUUGGUUU CUGAUGAGGCCGUUAGGCCGAA IUUGGUAU | 14599 |
| 5374 | UACCAACC A AACCAAUU | 5260 | AAUUGGUU CUGAUGAGGCCGUUAGGCCGAA IGUUGGUA | 14600 |
| 5378 | AACCAAAC C AAUUCACC | 5261 | GGUGAAUU CUGAUGAGGCCGUUAGGCCGAA IUUUGGUU | 14601 |
| 5379 | ACCAAACC A AUUCACCA | 5262 | UGGUGAAU CUGAUGAGGCCGUUAGGCCGAA IGUUUGGU | 14602 |
| 5384 | ACCAAUUC A CCAACACA | 5263 | UGUGUUGG CUGAUGAGGCCGUUAGGCCGAA IAAUUGGU | 14603 |
| 5386 | CAAUUCAC C AACACAGU | 5264 | ACUGUGUU CUGAUGAGGCCGUUAGGCCGAA IUGAAUUG | 14604 |
| 5387 | AAUUCACC A ACACAGUU | 5265 | AACUGUGU CUGAUGAGGCCGUUAGGCCGAA IGUGAAUU | 14605 |
| 5390 | UCACCAAC A CAGUUGGG | 5266 | CCCAACUG CUGAUGAGGCCGUUAGGCCGAA IUUGGUGA | 14606 |
| 5392 | ACCAACAC A GUUGGGAC | 5267 | GUCCCAAC CUGAUGAGGCCGUUAGGCCGAA IUGUUGGU | 14607 |
| 5401 | GUUGGGAC C CAAAACAC | 5268 | GUGUUUUG CUGAUGAGGCCGUUAGGCCGAA IUCCCAAC | 14608 |
| 5402 | UUGGGACC C AAAACACA | 5269 | UGUGUUUU CUGAUGAGGCCGUUAGGCCGAA IGUCCCAA | 14609 |
| 5403 | UGGGACCC A AAACACAG | 5270 | CUGUGUUU CUGAUGAGGCCGUUAGGCCGAA IGGUCCCA | 14610 |
| 5408 | CCCAAAAC A CAGGAAGU | 5271 | ACUUCCUG CUGAUGAGGCCGUUAGGCCGAA IUUUUGGG | 14611 |
| 5410 | CAAAACAC A GGAAGUCA | 5272 | UGACUUCC CUGAUGAGGCCGUUAGGCCGAA IUGUUUUG | 14612 |
| 5418 | AGGAAGUC A GUCACGUU | 5273 | AACGUGAC CUGAUGAGGCCGUUAGGCCGAA IACUUCCU | 14613 |
| 5422 | AGUCAGUC A CGUUUCCU | 5274 | AGGAAACG CUGAUGAGGCCGUUAGGCCGAA IACUGACU | 14614 |
| 5429 | CACGUUUC C UUUUCAUU | 5275 | AAUGAAAA CUGAUGAGGCCGUUAGGCCGAA IAAACGUG | 14615 |
| 5430 | ACGUUUCC U UUUCAUUU | 5276 | AAAUGAAA CUGAUGAGGCCGUUAGGCCGAA IGAAACGU | 14616 |
| 5435 | UCCUUUUC A UUUAAUGG | 5277 | CCAUUAAA CUGAUGAGGCCGUUAGGCCGAA IAAAAGGA | 14617 |
| 5450 | GGGGAUUC C ACUAUCUC | 5278 | GAGAUAGU CUGAUGAGGCCGUUAGGCCGAA IAAUCCCC | 14618 |
| 5451 | GGGAUUCC A CUAUCUCA | 5279 | UGAGAUAG CUGAUGAGGCCGUUAGGCCGAA IGAAUCCC | 14619 |
| 5453 | GAUUCCAC U AUCUCACA | 5280 | UGUGAGAU CUGAUGAGGCCGUUAGGCCGAA IUGGAAUC | 14620 |
| 5457 | CCACUAUC U CACACUAA | 5281 | UUAGUGUG CUGAUGAGGCCGUUAGGCCGAA IAUAGUGG | 14621 |
| 5459 | ACUAUCUC A CACUAAUC | 5282 | GAUUAGUG CUGAUGAGGCCGUUAGGCCGAA IAGAUAGU | 14622 |
| 5461 | UAUCUCAC A CUAAUCUG | 5283 | CAGACUAG CUGAUGAGGCCGUUAGGCCGAA IUGAGAUA | 14623 |
| 5463 | UCUCACAC U AAUCUGAA | 5284 | UUCAGAUU CUGAUGAGGCCGUUAGGCCGAA IUGUGAGA | 14624 |
| 5468 | CACUAAUC U GAAAGGAU | 5285 | AUCCUUUC CUGAUGAGGCCGUUAGGCCGAA IAUUAGUG | 14625 |
| 5487 | GGAAGAGC A UUAGCUGG | 5286 | CCAGCUAA CUGAUGAGGCCGUUAGGCCGAA ICUCUUCC | 14626 |
| 5493 | GCAUUAGC U GGCGCAUA | 5287 | UAUGCGCC CUGAUGAGGCCGUUAGGCCGAA ICUAAUGC | 14627 |
| 5499 | GCUGGCGC A UAUUAAGC | 5288 | GCUUAAUA CUGAUGAGGCCGUUAGGCCGAA ICGCCAGC | 14628 |
| 5508 | UAUUAAGC A CUUUAAGC | 5289 | GCUUAAAG CUGAUGAGGCCGUUAGGCCGAA ICUUAAUA | 14629 |
| 5510 | UUAAGCAC U UUAAGCUC | 5290 | GAGCUUAA CUGAUGAGGCCGUUAGGCCGAA IUGCUUAA | 14630 |
| 5517 | CUUUAAGC U CCUUGAGU | 5291 | ACUCAAGG CUGAUGAGGCCGUUAGGCCGAA ICUUAAAG | 14631 |
| 5519 | UUAAGCUC C UUGAGUAA | 5292 | UUACUCAA CUGAUGAGGCCGUUAGGCCGAA IAGCUUAA | 14632 |
| 5520 | UAAGCUCC U UGAGUAAA | 5293 | UUUACUCA CUGAUGAGGCCGUUAGGCCGAA IGAGCUUA | 14633 |
| 5550 | AUUUAUGC A AGGUAUUU | 5294 | AAAUACCU CUGAUGAGGCCGUUAGGCCGAA ICAUAAAU | 14634 |
| 5560 | GGUAUUUC U CCAGUUGG | 5295 | CCAACUGG CUGAUGAGGCCGUUAGGCCGAA IAAAUACC | 14635 |
| 5562 | UAUUUCUC C AGUUGGGA | 5296 | UCCCAACU CUGAUGAGGCCGUUAGGCCGAA IAGAAAUA | 14636 |
| 5563 | AUUUCUCC A GUUGGGAC | 5297 | GUCCCAAC CUGAUGAGGCCGUUAGGCCGAA IGAGAAAU | 14637 |
| 5572 | GUUGGGAC U CAGGAUAU | 5298 | AUAUCCUG CUGAUGAGGCCGUUAGGCCGAA IUCCCAAC | 14638 |
| 5574 | UGGGACUC A GGAUAUUA | 5299 | UAAUAUCC CUGAUGAGGCCGUUAGGCCGAA IAGUCCCA | 14639 |
| 5593 | UAAUGAGC C AUCACUAG | 5300 | CUAGUGAU CUGAUGAGGCCGUUAGGCCGAA ICUCAUUA | 14640 |
| 5594 | AAUGAGCC A UCACUAGA | 5301 | UCUAGUGA CUGAUGAGGCCGUUAGGCCGAA IGCUCAUU | 14641 |
| 5597 | GAGCCAUC A CUAGAAGA | 5302 | UCUUCUAG CUGAUGAGGCCGUUAGGCCGAA IAUGGCUC | 14642 |
| 5599 | GCCAUCAC U AGAAGAAA | 5303 | UUUCUUCU CUGAUGAGGCCGUUAGGCCGAA IUGAUGGC | 14643 |
| 5611 | AGAAAAGC C CAUUUUCA | 5304 | UGAAAAUG CUGAUGAGGCCGUUAGGCCGAA ICUUUUCU | 14644 |
| 5612 | GAAAAGCC C AUUUUCAA | 5305 | UUGAAAAU CUGAUGAGGCCGUUAGGCCGAA IGCUUUUC | 14645 |
| 5613 | AAAAGCCC A UUUUCAAC | 5306 | GUUGAAAA CUGAUGAGGCCGUUAGGCCGAA IGGCUUUU | 14646 |
| 5619 | CCAUUUUC A ACUGCUUU | 5307 | AAAGCAGU CUGAUGAGGCCGUUAGGCCGAA IAAAAUGG | 14647 |
| 5622 | UUUUCAAC U GCUUUGAA | 5308 | UUCAAAGC CUGAUGAGGCCGUUAGGCCGAA IUUGAAAA | 14648 |
| 5625 | UCAACUGC U UUGAAACU | 5309 | AGUUUCAA CUGAUGAGGCCGUUAGGCCGAA ICAGUUGA | 14649 |
| 5633 | UUUGAAAC U UGCCUGGG | 5310 | CCCAGGCA CUGAUGAGGCCGUUAGGCCGAA IUUUCAAA | 14650 |
| 5637 | AAACUUGC C UGGGGUCU | 5311 | AGACCCCA CUGAUGAGGCCGUUAGGCCGAA ICAAGUUU | 14651 |
| 5638 | AACUUGCC U GGGGUCUG | 5312 | CAGACCCC CUGAUGAGGCCGUUAGGCCGAA IGCAAGUU | 14652 |
| 5645 | CUGGGGUC U GAGCAUGA | 5313 | UCAUGCUC CUGAUGAGGCCGUUAGGCCGAA IACCCCAG | 14653 |
| 5650 | GUCUGAGC A UGAUGGGA | 5314 | UCCCAUCA CUGAUGAGGCCGUUAGGCCGAA ICUCAGAC | 14654 |
| 5669 | AGGGAGAC A GGGUAGGA | 5315 | UCCUACCC CUGAUGAGGCCGUUAGGCCGAA IUCUCCCU | 14655 |
| 5686 | AAGGGCGC C UACUCUUC | 5316 | GAAGAGUA CUGAUGAGGCCGUUAGGCCGAA ICGCCCUU | 14656 |
| 5687 | AGGGCGCC U ACUCUUCA | 5317 | UGAAGAGU CUGAUGAGGCCGUUAGGCCGAA IGCGCCCU | 14657 |
| 5690 | GCGCCUAC U CUUCAGGG | 5318 | CCCUGAAG CUGAUGAGGCCGUUAGGCCGAA IUAGGCGC | 14658 |
| 5692 | GCCUACUC U UCAGGGUC | 5319 | GACCCUGA CUGAUGAGGCCGUUAGGCCGAA IAGUAGGC | 14659 |
| 5695 | UACUCUUC A GGGUCUAA | 5320 | UUAGACCC CUGAUGAGGCCGUUAGGCCGAA IAAGAGUA | 14660 |
| 5701 | UCAGGGUC U AAAGAUCA | 5321 | UGAUCUUU CUGAUGAGGCCGUUAGGCCGAA IACCCUGA | 14661 |
| 5709 | UAAAGAUC A AGUGGGCC | 5322 | GGCCCACU CUGAUGAGGCCGUUAGGCCGAA IAUCUUUA | 14662 |
| 5717 | AAGUGGGC C UUGGAUCG | 5323 | CGAUCCAA CUGAUGAGGCCGUUAGGCCGAA ICCCACUU | 14663 |
| 5718 | AGUGGGCC U UGGAUCGC | 5324 | GCGAUCCA CUGAUGAGGCCGUUAGGCCGAA IGCCCACU | 14664 |
| 5727 | UGGAUCGC U AAGCUGGC | 5325 | GCCAGCUU CUGAUGAGGCCGUUAGGCCGAA ICGAUCCA | 14665 |
| 5732 | CGCUAAGC U GGCUCUGU | 5326 | ACAGAGCC CUGAUGAGGCCGUUAGGCCGAA ICUUAGCG | 14666 |
| 5736 | AAGCUGGC U CUGUUUGA | 5327 | UCAAACAG CUGAUGAGGCCGUUAGGCCGAA ICCAGCUU | 14667 |
| 5738 | GCUGGCUC U GUUUGAUG | 5328 | CAUCAAAC CUGAUGAGGCCGUUAGGCCGAA IAGCCAGC | 14668 |
| 5748 | UUUGAUGC U AUUUAUGC | 5329 | GCAUAAAU CUGAUGAGGCCGUUAGGCCGAA ICAUCAAA | 14669 |
| 5757 | AUUUAUGC A AGUUAGGG | 5330 | CCCUAACU CUGAUGAGGCCGUUAGGCCGAA ICAUAAAU | 14670 |
| 5768 | UUAGGGUC U AUGUAUUU | 5331 | AAAUACAU CUGAUGAGGCCGUUAGGCCGAA IACCCUAA | 14671 |
| 5786 | GGAUGCGC C UACUCUUC | 5332 | GAAGAGUA CUGAUGAGGCCGUUAGGCCGAA ICGCAUCC | 14672 |
| 5787 | GAUGCGCC U ACUCUUCA | 5333 | UGAAGAGU CUGAUGAGGCCGUUAGGCCGAA IGCGCAUC | 14673 |
| 5790 | GCGCCUAC U CUUCAGGG | 5318 | CCCUGAAG CUGAUGAGGCCGUUAGGCCGAA IUAGGCGC | 14658 |
| 5792 | GCCUACUC U UCAGGGUC | 5319 | GACCCUGA CUGAUGAGGCCGUUAGGCCGAA IAGUAGGC | 14659 |
| 5795 | UACUCUUC A GGGUCUAA | 5320 | UUAGACCC CUGAUGAGGCCGUUAGGCCGAA IAAGAGUA | 14660 |
| 5801 | UCAGGGUC U AAAGAUCA | 5321 | UGAUCUUU CUGAUGAGGCCGUUAGGCCGAA IACCCUGA | 14661 |
| 5809 | UAAAGAUC A AGUGGGCC | 5322 | GGCCCACU CUGAUGAGGCCGUUAGGCCGAA IAUCUUUA | 14662 |
| 5817 | AAGUGGGC C UUGGAUCG | 5323 | CGAUCCAA CUGAUGAGGCCCUUAGGCCGAA ICCCACUU | 14663 |
| 5818 | AGUGGGCC U UGGAUCGC | 5324 | GCGAUCCA CUGAUGAGGCCGUUAGGCCGAA IGCCCACU | 14664 |
| 5827 | UGGAUCGC U AAGCUGGC | 5325 | GCCAGCUU CUGAUGAGGCCGUUAGGCCGAA ICGAUCCA | 14665 |
| 5832 | CGCUAAGC U GGCUCUGU | 5326 | ACAGAGCC CUGAUGAGGCCGUUAGGCCGAA ICUUAGCG | 14666 |
| 5836 | AAGCUGGC U CUGUUUGA | 5327 | UCAAACAG CUGAUGAGGCCGUUACGCCGAA ICCAGCUU | 14667 |
| 5838 | GCUGGCUC U GUUUGAUG | 5328 | CAUCAAAC CUGAUGAGGCCGUUAGGCCGAA IAGCCAGC | 14668 |
| 5848 | UUUGAUGC U AUUUAUGC | 5329 | GCAUAAAU CUGAUGAGGCCCUUAGGCCGAA ICAUCAAA | 14669 |
| 5857 | AUUUAUGC A AGUUAGGG | 5330 | CCCUAACU CUGAUGAGGCCGUUAGGCCGAA ICAUAAAU | 14670 |
| 5868 | UUAGGGUC U AUGUAUUU | 5331 | AAAUACAU CUGAUGAGGCCGUUAGGCCGAA IACCCUAA | 14671 |
| 5885 | AGGAUGUC U GCACCUUC | 5334 | GAAGGUGC CUGAUGAGGCCGUUAGGCCGAA IACAUCCU | 14674 |
| 5888 | AUGUCUGC A CCUUCUGC | 5335 | GCAGAAGG CUGAUGAGGCCCUUAGGCCGAA ICAGACAU | 14675 |
| 5890 | GUCUGCAC C UUCUGCAG | 5336 | CUGCAGAA CUGAUGAGGCCGUUAGGCCGAA IUGCAGAC | 14676 |
| 5891 | UCUGCACC U UCUGCAGC | 5337 | GCUGCAGA CUGAUGAGGCCGUUAGGCCGAA IGUGCAGA | 14677 |
| 5894 | GCACCUUC U GCAGCCAG | 5338 | CUGGCUGC CUGAUGAGGCCGUUAGGCCGAA IAAGGUGC | 14678 |
| 5897 | CCUUCUGC A GCCAGUCA | 5339 | UGACUGGC CUGAUGAGGCCGUUAGGCCGAA ICAGAAGG | 14679 |
| 5900 | UCUGCAGC C AGUCAGAA | 5340 | UUCUGACU CUGAUGAGGCCGUUAGGCCGAA ICUGCAGA | 14680 |
| 5901 | CUGCAGCC A GUCAGAAG | 5341 | CUUCUGAC CUGAUGAGGCCGUUAGGCCGAA IGCUGCAG | 14681 |
| 5905 | AGCCAGUC A GAAGCUGG | 5342 | CCAGCUUC CUGAUGAGGCCGUUAGGCCGAA IACUGGCU | 14682 |
| 5911 | UCAGAAGC U GGAGAGGC | 5343 | GCCUCUCC CUGAUGAGGCCGUUAGGCCGAA ICUUCUGA | 14683 |
| 5920 | GGAGAGGC A ACAGUGGA | 5344 | UCCACUGU CUGAUGAGGCCGUUAGGCCGAA ICCUCUCC | 14684 |
| 5923 | GAGGCAAC A GUGGAUUG | 5345 | CAAUCCAC CUGAUGAGGCCGUUAGGCCGAA IUUGCCUC | 14685 |
| 5933 | UGGAUUGC U GCUUCUUG | 5346 | CAAGAAGC CUGAUGAGGCCGUUAGGCCGAA ICAAUCCA | 14686 |
| 5936 | AUUGCUGC U UCUUGGGG | 5347 | CCCCAAGA CUGAUGAGGCCGUUAGGCCGAA ICAGCAAU | 14687 |
| 5939 | GCUGCUUC U UGGGGAGA | 5348 | UCUCCCCA CUGAUGAGGCCGUUAGGCCGAA IAAGCAGC | 14688 |
| 5957 | GAGUAUGC U UCCUUUUA | 5349 | UAAAAGGA CUGAUGAGGCCGUUAGGCCGAA ICAUACUC | 14689 |
| 5960 | UAUGCUUC C UUUUAUCC | 5350 | GGAUAAAA CUGAUGAGGCCGUUAGGCCGAA IAAGCAUA | 14690 |
| 5961 | AUGCUUCC U UUUAUCCA | 5351 | UGGAUAAA CUGAUGAGGCCGUUAGGCCGAA IGAAGCAU | 14691 |
| 5968 | CUUUUAUC C AUGUAAUU | 5352 | AAUUACAU CUGAUGAGGCCGUUAGGCCGAA IAUAAAAG | 14692 |
| 5969 | UUUUAUCC A UGUAAUUU | 5353 | AAAUUACA CUGAUGAGGCCGUUAGGCCGAA IGAUAAAA | 14693 |
| 5981 | AAUUUAAC U GUAGAACC | 5354 | GGUUCUAC CUGAUGAGGCCGUUAGGCCGAA IUUAAAUU | 14694 |
| 5989 | UGUAGAAC C UGAGCUCU | 5355 | AGAGCUCA CUGAUGAGGCCGUUACGCCGAA IUUCUACA | 14695 |
| 5990 | GUAGAACC U GAGCUCUA | 5356 | UAGAGCUC CUGAUGAGGCCGUUAGGCCGAA IGUUCUAC | 14696 |
| 5995 | ACCUGAGC U CUAAGUAA | 5357 | UUACUUAG CUGAUGAGGCCGUUAGGCCGAA ICUCAGGU | 14697 |
| 5997 | CUGAGCUC U AAGUAACC | 5358 | GGUUACUU CUGAUGAGGCCGUUAGGCCGAA IACCUCAG | 14698 |
| 6005 | UAAGUAAC C GAAGAAUG | 5359 | CAUUCUUC CUGAUGAGGCCGUUAGGCCGAA IUUACUUA | 14699 |
| 6019 | AUGUAUGC C UCUGUUCU | 5360 | AGAACAGA CUGAUGAGGCCGUUAGGCCGAA ICAUACAU | 14700 |
| 6020 | UGUAUGCC U CUGUUCUU | 5361 | AAGAACAG CUGAUGAGGCCGUUAGGCCGAA IGCAUACA | 14701 |
| 6022 | UAUGCCUC U GUUCUUAU | 5362 | AUAAGAAC CUGAUGAGGCCGUUAGGCCGAA IAGGCAUA | 14702 |
| 6027 | CUCUGUUC U UAUGUGCC | 5363 | GGCACAUA CUGAUGAGGCCGUUAGGCCGAA IAACAGAG | 14703 |
| 6035 | UUAUGUGC C ACAUCCUU | 5364 | AAGGAUGU CUGAUGAGGCCGUUAGGCCGAA ICACAUAA | 14704 |
| 6036 | UAUGUGCC A CAUCCUUG | 5365 | CAAGGAUG CUGAUGAGGCCGUUAGGCCGAA IGCACAUA | 14705 |
| 6038 | UGUGCCAC A UCCUUGUU | 5366 | AACAAGGA CUGAUGAGGCCGUUAGGCCGAA IUGGCACA | 14706 |
| 6041 | GCCACAUC C UUGUUUAA | 5367 | UUAAACAA CUGAUGAGGCCGUUAGGCCGAA IAUGUGGC | 14707 |
| 6042 | CCACAUCC U UGUUUAAA | 5368 | UUUAAACA CUGAUGAGGCCGUUAGGCCGAA ICAUGUGG | 14708 |
| 6054 | UUAAAGGC U CUCUGUAU | 5369 | AUACAGAG CUGAUGAGGCCGUUAGGCCGAA ICCUUUAA | 14709 |
| 6056 | AAAGGCUC U CUGUAUGA | 5370 | UCAUACAG CUGAUGAGGCCGUUAGGCCGAA IAGCCUUU | 14710 |
| 6058 | AGGCUCUC U GUAUGAAG | 5371 | CUUCAUAC CUGAUGAGGCCGUUAGGCCGAA IAGAGCCU | 14711 |
| 6076 | GAUGGGAC C GUCAUCAG | 5372 | CUGAUGAC CUGAUGAGGCCGUUAGGCCGAA IUCCCAUC | 14712 |
| 6080 | GGACCGUC A UCAGCACA | 5373 | UGUGCUGA CUGAUGAGGCCGUUAGGCCGAA IACGGUCC | 14713 |
| 6083 | CCGUCAUC A GCACAUUC | 5374 | GAAUGUGC CUGAUGAGGCCGUUAGGCCGAA IAUGACGG | 14714 |
| 6086 | UCAUCAGC A CAUUCCCU | 5375 | AGGGAAUG CUGAUGAGGCCGUUAGGCCGAA ICUGAUGA | 14715 |
| 6088 | AUCAGCAC A UUCCCUAG | 5376 | CUAGGGAA CUGAUGAGGCCGUUAGGCCGAA IUGCUGAU | 14716 |
| 6092 | GCACAUUC C CUAGUGAG | 5377 | CUCACUAG CUGAUGAGGCCGUUAGGCCGAA IAAUGUGC | 14717 |
| 6093 | CACAUUCC C UAGUGAGC | 5378 | GCUCACUA CUGAUGAGGCCGUUAGGCCGAA IGAAUGUG | 14718 |
| 6094 | ACAUUCCC U AGUGAGCC | 5379 | GGCUCACU CUGAUGAGGCCGUUAGGCCGAA IGGAAUGU | 14719 |
| 6102 | UAGUGAGC C UACUGGCU | 5380 | AGCCAGUA CUGAUGAGGCCGUUAGGCCGAA ICUCACUA | 14720 |
| 6103 | AGUGAGCC U ACUGGCUC | 5381 | GAGCCAGU CUGAUGAGGCCGUUAGGCCGAA IGCUCACU | 14721 |
| 6106 | GAGCCUAC U GGCUCCUG | 5382 | CAGGAGCC CUGAUGAGGCCGUUAGGCCGAA IUAGGCUC | 14722 |
| 6110 | CUACUGGC U CCUGGCAG | 5383 | CUGCCAGG CUGAUGAGGCCGUUAGGCCGAA ICCAGUAG | 14723 |
| 6112 | ACUGGCUC C UGGCAGCG | 5384 | CGCUGCCA CUGAUGAGGCCGUUAGGCCGAA IAGCCAGU | 14724 |
| 6113 | CUGGCUCC U GGCAGCGG | 5385 | CCGCUGCC CUGAUGAGGCCGUUAGGCCGAA IGAGCCAG | 14725 |
| 6117 | CUCCUGGC A GCGGCUUU | 5386 | AAAGCCGC CUGAUGAGGCCGUUAGGCCGAA ICCAGGAG | 14726 |
| 6123 | GCAGCGGC U UUUGUGGA | 5387 | UCCACAAA CUGAUGAGGCCGUUAGGCCGAA ICCGCUGC | 14727 |
| 6136 | UGGAAGAC U CACUAGCC | 5388 | GGCUAGUG CUGAUGAGGCCGUUAGGCCGAA IUCUUCCA | 14728 |
| 6138 | GAAGACUC A CUAGCCAG | 5389 | CUGOCUAG CUGAUGAGGCCGUUAGGCCGAA IAGUCUUC | 14729 |
| 6140 | AGACUCAC U AGCCAGAA | 5390 | UUCUGGCU CUGAUGAGGCCGUUAGGCCGAA IUGAGUCU | 14730 |
| 6144 | UCACUAGC C AGAAGAGA | 5391 | UCUCUUCU CUGAUGAGGCCGUUAGGCCGAA ICUAGUGA | 14731 |
| 6145 | CACUAGCC A GAAGAGAG | 5392 | CUCUCUUC CUGAUGAGGCCGUUAGGCCGAA IGCUAGUG | 14732 |
| 6163 | AGUGGGAC A GUCCUCUC | 5393 | GAGAGGAC CUGAUGAGGCCGUUAGGCCGAA IUCCCACU | 14733 |
| 6167 | GGACAGUC C UCUCCACC | 5394 | GGUGGAGA CUGAUGAGGCCGUUAGGCCGAA IACUGUCC | 14734 |
| 6168 | GACAGUCC U CUCCACCA | 5395 | UGGUGGAG CUGAUGAGGCCGUUAGGCCGAA IGACUGUC | 14735 |
| 6170 | CAGUCCUC U CCACCAAG | 5396 | CUUGGUGG CUGAUGAGGCCGUUAGGCCGAA IAGGACUG | 14736 |
| 6172 | GUCCUCUC C ACCAAGAU | 5397 | AUCUUGGU CUGAUGAGGCCGUUAGGCCGAA IAGAGGAC | 14737 |
| 6173 | UCCUCUCC A CCAAGAUC | 5398 | GAUCUUGG CUGAUGAGGCCGUUAGGCCGAA IGAGAGGA | 14738 |
| 6175 | CUCUCCAC C AAGAUCUA | 5399 | UAGAUCUU CUGAUGAGGCCGUUAGGCCGAA IUGGAGAG | 14739 |
| 6176 | UCUCCACC A AGAUCUAA | 5400 | UUAGAUCU CUGAUGAGGCCGUUAGGCCGAA IGUGGAGA | 14740 |
| 6182 | CCAAGAUC U AAAUCCAA | 5401 | UUGGAUUU CUGAUGAGGCCGUUAGGCCGAA IAUCUUGG | 14741 |
| 6188 | UCUAAAUC C AAACAAAA | 5402 | UUUUGUUU CUGAUGAGGCCGUUAGGCCGAA IAUUUAGA | 14742 |
| 6189 | CUAAAUCC A AACAAAAG | 5403 | CUUUUGUU CUGAUGAGGCCGUUAGGCCGAA IGAUUUAG | 14743 |
| 6193 | AUCCAAAC A AAAGCAGG | 5404 | CCUGCUUU CUGAUGAGGCCGUUAGGCCGAA IUUUGGAU | 14744 |
| 6199 | ACAAAAGC A GGCUAGAG | 5405 | CUCUAGCC CUGAUGAGGCCGUUAGGCCGAA ICUUUUGU | 14745 |
| 6203 | AAGCAGGC U AGAGCCAG | 5406 | CUGGCUCU CUGAUGAGGCCGUUAGGCCGAA ICCUGCUU | 14746 |
| 6209 | GCUAGAGC C AGAAGAGA | 5407 | UCUCUUCU CUGAUGAGGCCGUUAGGCCGAA ICUCUAGC | 14747 |
| 6210 | CUAGAGCC A GAAGAGAG | 5408 | CUCUCUUC CUGAUGAGGCCGUUAGGCCGAA IGCUCUAG | 14748 |
| 6222 | GAGAGGAC A AAUCUUUG | 5409 | CAAAGAUU CUGAUGAGGCCGUUAGGCCGAA IUCCUCUC | 14749 |
| 6227 | GACAAAUC U UUGUUGUU | 5410 | AACAACAA CUGAUGAGGCCGUUAGGCCGAA IAUUGGUC | 14750 |
| 6237 | UGUUGUUC C UCUUCUUU | 5411 | AAAGAAGA CUGAUGAGGCCGUUAGGCCGAA IAACAACA | 14751 |
| 6238 | GUUGUUCC U CUUCUUUA | 5412 | UAAAGAAG CUGAUGAGGCCGUUAGGCCGAA IGAACAAC | 14752 |
| 6240 | UGUUCCUC U UCUUUACA | 5413 | UGUAAAGA CUGAUGAGGCCGUUAGGCCGAA IAGGAACA | 14753 |
| 6243 | UCCUCUUC U UUACACAU | 5414 | AUGUGUAA CUGAUGAGGCCGUUAGGCCGAA IAAGAGGA | 14754 |
| 6248 | UUCUUUAC A CAUACGCA | 5415 | UGCGUAUG CUGAUGAGGCCGUUAGGCCGAA IUAAAGAA | 14755 |
| 6250 | CUUUACAC A UACGCAAA | 5416 | UUUGCGUA CUGAUGAGGCCGUUAGGCCGAA IUGUAAAG | 14756 |
| 6256 | ACAUACGC A AACCACCU | 5417 | AGGUGGUU CUGAUGAGGCCGUUAGGCCGAA ICGUAUGU | 14757 |
| 6260 | ACGCAAAC C ACCUGUGA | 5418 | UCACAGGU CUGAUGAGGCCGUUAGGCCGAA IUUUGCGU | 14758 |
| 6261 | CGCAAACC A CCUGUGAC | 5419 | GUCACAGG CUGAUGAGGCCGUUAGGCCGAA IGUUUGCG | 14759 |
| 6263 | CAAACCAC C UGUGACAG | 5420 | CUGUCACA CUGAUGAGGCCGUUAGGCCGAA IUGGUUUG | 14760 |
| 6264 | AAACCACC U GUGACAGC | 5421 | GCUGUCAC CUGAUGAGGCCGUUAGGCCGAA IGUGGUUU | 14761 |
| 6270 | CCUGUGAC A GCUGGCAA | 5422 | UUGCCAGC CUGAUGAGGCCGUUAGGCCGAA IUCACAGG | 14762 |
| 6273 | GUGACAGC U GGCAAUUU | 5423 | AAAUUGCC CUGAUGAGGCCGUUAGGCCGAA ICUGUCAC | 14763 |
| 6277 | CAGCUGGC A AUUUUAUA | 5424 | UAUAAAAU CUGAUGAGGCCGUUAGGCCGAA ICCAGCUG | 14764 |
| 6290 | UAUAAAUC A GGUAACUG | 5425 | CAGUUACC CUGAUGAGGCCGUUAGGCCGAA IAUUUAUA | 14765 |
| 6297 | CAGGUAAC U GGAAGGAG | 5426 | CUCCUUCC CUGAUGAGGCCGUUAGGCCGAA IUUACCUG | 14766 |
| 6313 | GGUUAAAC U CAGAAAAA | 5427 | UUUUUCUG CUGAUGAGGCCGUUAGGCCGAA IUUUAACC | 14767 |
| 6315 | UUAAACUC A GAAAAAAG | 5428 | CUUUUUUC CUGAUGAGGCCGUUAGGCCGAA IAGUUUAA | 14768 |
| 6329 | AAGAAGAC C UCAGUCAA | 5429 | UUGACUGA CUGAUGAGGCCGUUAGGCCGAA IUCUUCUU | 14769 |
| 6330 | AGAAGACC U CAGUCAAA | 5430 | AUUGACUG CUGAUGAGGCCGUUAGGCCGAA IGUCUUCU | 14770 |
| 6332 | AAGACCUC A GUCAAUUC | 5431 | GAAUUGAC CUGAUGAGGCCGUUAGGCCGAA IAGGUCUU | 14771 |
| 6336 | CCUCAGUC A AUUCUCUA | 5432 | UAGAGAAU CUGAUGAGGCCGUUAGGCCGAA IACUGAGG | 14772 |
| 6341 | GUCAAUUC U CUACUUUU | 5433 | AAAAGUAG CUGAUGAGGCCGUUAGGCCGAA IAAUUGAC | 14773 |
| 6343 | CAAUUCUC U ACUUUUUU | 5434 | AAAAAAGU CUGAUGAGGCCGUUAGGCCGAA IAGAAUUG | 14774 |
| 6346 | UUCUCUAC U UUUUUUUU | 5435 | AAAAAAAA CUGAUGAGGCCGUUAGGCCGAA IUAGAGAA | 14775 |
| 6363 | UUUUUUUC C AAAUCAGA | 5436 | UCUGAUUU CUGAUGAGGCCGUUAGGCCGAA IAAAAAAA | 14776 |
| 6364 | UUUUUUCC A AAUCAGAU | 5437 | AUCUGAUU CUGAUGAGGCCGUUAGGCCGAA IGAAAAAA | 14777 |
| 6369 | UCCAAAUC A GAUAAUAG | 5438 | CUAUUAUC CUGAUGAGGCCGUUAGGCCGAA IAUUUGGA | 14778 |
| 6379 | AUAAUAGC C CAGCAAAU | 5439 | AUUUGCUG CUGAUGAGGCCGUUAGGCCGAA ICUAUUAU | 14779 |
| 6380 | UAAUAGCC C AGCAAAUA | 5440 | UAUUUGCU CUGAUGAGGCCGUUAGGCCGAA IGCUAUUA | 14780 |
| 6381 | AAUAGCCC A GCAAAUAG | 5441 | CUAUUUGC CUGAUGAGGCCGUUAGGCCGAA IGGCUAUU | 14781 |
| 6384 | AGCCCAGC A AAUAGUGA | 5442 | UCACUAUU CUGAUGAGGCCGUUAGGCCGAA ICUGGGCU | 14782 |
| 6397 | GUGAUAAC A AAUAAAAC | 5443 | GUUUUAUU CUGAUGAGGCCGUUAGGCCGAA IUUAUCAC | 14783 |
| 6406 | AAUAAAAC C UUAGCUGU | 5444 | ACAGCUAA CUGAUGAGGCCGUUAGGCCGAA IUUUUAUU | 14784 |
| 6407 | AUAAAACC U UAGCUGUU | 5445 | AACAGCUA CUGAUGAGGCCGUUAGGCCGAA IGUUUUAU | 14785 |
| 6412 | ACCUUAGC U GUUCAUGU | 5446 | ACAUGAAC CUGAUGAGGCCGUUAGGCCGAA ICUAAGGU | 14786 |
| 6417 | AGCUGUUC A UGUCUUGA | 5447 | UCAAGACA CUGAUGAGGCCGUUAGGCCGAA IAACAGCU | 14787 |
| 6422 | UUCAUGUC U UGAUUUCA | 5448 | UGAAAUCA CUGAUGAGGCCGUUAGGCCGAA IACAUGAA | 14788 |
| 6430 | UUGAUUUC A AUAAUUAA | 5449 | UUAAUUAU CUGAUGAGGCCGUUAGGCCGAA IAAAUCAA | 14789 |
| 6442 | AUUAAUUC U UAAUCAUU | 5450 | AAUGAUUA CUGAUGAGGCCGUUAGGCCGAA IAAUUAAU | 14790 |
| 6448 | UCUUAAUC A UUAAGAGA | 5451 | UCUCUUAA CUGAUGAGGCCGUUAGGCCGAA IAUUAAGA | 14791 |
| 6458 | UAAGAGAC C AUAAUAAA | 5452 | UUUAUUAU CUGAUGAGGCCGUUAGGCCGAA IUCUCUUA | 14792 |
| 6459 | AAGAGACC A UAAUAAAU | 5453 | AUUUAUUA CUGAUGAGGCCGUUAGGCCGAA IGUCUCUU | 14793 |
| 6470 | AUAAAUAC U CCUUUUCA | 5454 | UGAAAAGG CUGAUGAGGCCGUUAGGCCGAA IUAUUUAU | 14794 |
| 6472 | AAAUACUC C UUUUCAAG | 5455 | CUUGAAAA CUGAUGAGGCCGUUAGGCCGAA IAGUAUUU | 14795 |
| 6473 | AAUACUCC U UUUCAAGA | 5456 | UCUUGAAA CUGAUGAGGCCGUUAGGCCGAA IGAGUAUU | 14796 |
| 6478 | UCCUUUUC A AGAGAAAA | 5457 | UUUUCUCU CUGAUGAGGCCGUUAGGCCGAA IAAAAGGA | 14797 |
| 6489 | AGAAAAGC A AAACCAUU | 5458 | AAUGGUUU CUGAUGAGGCCGUUAGGCCGAA ICUUUUCU | 14798 |
| 6494 | AGCAAAAC C AUUAGAAU | 5459 | AUUCUAAU CUGAUGAGGCCGUUAGGCCGAA IUUUUGCU | 14799 |
| 6495 | GCAAAACC A UUAGAAUU | 5460 | AAUUCUAA CUGAUGAGGCCGUUAGGCCGAA IGUUUUGC | 14800 |
| 6509 | AUUGUUAC U CAGCUCCU | 5461 | AGGAGCUG CUGAUGAGGCCGUUAGGCCGAA IUAACAAU | 14801 |
| 6511 | UGUUACUC A GCUCCUUC | 5462 | GAAGGAGC CUGAUGAGGCCGUUAGGCCGAA IAGUAACA | 14802 |
| 6514 | UACUCAGC U CCUUCAAA | 5463 | UUUGAAGG CUGAUGAGGCCGUUAGGCCGAA ICUGAGUA | 14803 |
| 6516 | CUCAGCUC C UUCAAACU | 5464 | AGUUUGAA CUGAUGAGCCCGUUAGGCCGAA IAGCUGAG | 14804 |
| 6517 | UCAGCUCC U UCAAACUC | 5465 | GAGUUUGA CUGAUGAGGCCGUUAGGCCGAA IGAGOUGA | 14805 |
| 6520 | GCUCCUUC A AACUCAGG | 5466 | CCUGAGUU CUGAUGAGGCCGUUAGGCCGAA IAAGGAGC | 14806 |
| 6524 | CUUCAAAC U CAGGUUUG | 5467 | CAAACCUG CUGAUGAGGCCGUUAGGCCGAA IUUUGAAG | 14807 |
| 6526 | UCAAACUC A GGUUUGUA | 5468 | UACAAACC CUGAUGAGGCCGUUAGGCCGAA IAGUUUGA | 14808 |
| 6537 | UUUGUAGC A UACAUGAG | 5469 | CUCAUGUA CUGAUGAGGCCGUUAGGCCGAA ICUACAAA | 14809 |
| 6541 | UAGCAUAC A UGAGUCCA | 5470 | UGGACUCA CUGAUGAGGCCGUUAGGCCGAA IUAUGCUA | 14810 |
| 6548 | CAUGAGUC C AUCCAUCA | 5471 | UGAUGGAU CUGAUGAGGCCGUUAGGCCGAA IACUCAUG | 14811 |
| 6549 | AUGAGUCC A UCCAUCAG | 5472 | CUGAUGGA CUGAUGAGGCCGUUAGGCCGAA IGACUCAU | 14812 |
| 6552 | AGUCCAUC C AUCAGUCA | 5473 | UGACUGAU CUGAUGAGGCCGUUAGGCCGAA IAUGGACU | 14813 |
| 6553 | GUCCAUCC A UCAGUCAA | 5474 | UUGACUGA CUGAUGAGGCCGUUAGGCCGAA IGAUGGAC | 14814 |
| 6556 | CAUCCAUC A GUCAAAGA | 5475 | UCUUUGAC CUGAUGAGGCCGUUAGGCCGAA IAUGGAUG | 14815 |
| 6560 | CAUCAGUC A AAGAAUGG | 5476 | CCAUUCUU CUGAUGAGGCCGUUAGGCCGAA IACUGAUG | 14816 |
| 6572 | AAUGGUUC C AUCUGGAG | 5477 | CUCCAGAU CUGAUGAGGCCGUUAGGCCGAA IAACCAUU | 14817 |
| 6573 | AUGGUUCC A UCUGGAGU | 5478 | ACUCCAGA CUGAUGAGGCCGUUAGGCCGAA IGAACCAU | 14818 |
| 6576 | GUUCCAUC U GGAGUCUU | 5479 | AAGACUCC CUGAUGAGGCCGUUAGGCCGAA IAUGGAAC | 14819 |
| 6583 | CUGGAGUC U UAAUGUAG | 5480 | CUACAUUA CUGAUGAGGCCGUUAGGCCGAA IACUCCAG | 14820 |
| 6608 | AUGGAGAC U UGUAAUAA | 5481 | UUAUUACA CUGAUGAGGCCGUUAGGCCGAA IUCUCCAU | 14821 |
| 6622 | UAAUGAGC U AGUUACAA | 5482 | UUGUAACU CUGAUGAGGCCGUUAGGCCGAA ICUCAUUA | 14822 |
| 6629 | CUAGUUAC A AAGUGCUU | 5483 | AAGCACUU CUGAUGAGGCCGUUAGGCCGAA IUAACUAG | 14823 |
| 6636 | CAAAGUGC U UGUUCAUU | 5484 | AAUGAACA CUGAUGAGGCCGUUAGGCCGAA ICACUUUG | 14824 |
| 6642 | GCUUGUUC A UUAAAAUA | 5485 | UAUUUUAA CUGAUGAGGCCGUUAGGCCGAA IAACAAGC | 14825 |
| 6653 | AAAAUAGC A CUGAAAAU | 5486 | AUUUUCAG CUGAUGAGGCCGUUAGGCCGAA ICUAUUUU | 14826 |
| 6655 | AAUAGCAC U GAAAAUUG | 5487 | CAAUUUUC CUGAUGAGGCCGUUAGGCCGAA IUGCUAUU | 14827 |
| 6668 | AUUGAAAC A UGAAUUAA | 5488 | UUAAUUCA CUGAUGAGGCCGUUAGGCCGAA IUUUCAAU | 14828 |
| 6678 | GAAUUAAC U GAUAAUAU | 5489 | AUAUUAUC CUGAUGAGGCCGUUAGGCCGAA IUUAAUUC | 14829 |
| 6689 | UAAUAUUC C AAUCACAU | 5490 | AAAUGAUU CUGAUGAGGCCGUUAGGCCGAA IAAUAUUA | 14830 |
| 6690 | AAUAUUCC A AUCAUUUG | 5491 | CAAAUGAU CUGAUGAGGCCGUUAGGCCGAA IGAAUAUU | 14831 |
| 6694 | UUCCAAUC A UUUGCCAU | 5492 | AUGGCAAA CUGAUGAGGCCGUUAGGCCGAA IAUUGGAA | 14832 |
| 6700 | UCAUUUGC C AUUUAUGA | 5493 | UCAUAAAU CUGAUGAGGCCGUUAGGCCGAA ICAAAUGA | 14833 |
| 6701 | CAUUUGCC A UUUAUGAC | 5494 | GUCAUAAA CUGAUGAGGCCGUUAGGCCGAA IGCAAAUG | 14834 |
| 6710 | UUUAUGAC A AAAAUGGU | 5495 | ACCAUUUU CUGAUGAGGCCGUUAGGCCGAA IUCAUAAA | 14835 |
| 6723 | UGGUUGGC A CUAACAAA | 5496 | UUUGUUAG CUGAUGAGGCCGUUAGGCCGAA ICCAACCA | 14836 |
| 6725 | GUUGGCAC U AACAAAGA | 5497 | UCUUUGUU CUGAUGAGGCCGUUAGGCCGAA IUGCCAAC | 14837 |
| 6729 | GCACUAAC A AAGAACGA | 5498 | UCGUUCUU CUGAUGAGGCCGUUAGGCCGAA IUUAGUGC | 14838 |
| 6740 | GAACGAGC A CUUCCUUU | 5499 | AAAGGAAG CUGAUGAGGCCGUUAGGCCGAA ICUCGUUC | 14839 |
| 6742 | ACGAGCAC U UCCUUUCA | 5500 | UGAAAGGA CUGAUGAGGCCGUUAGGCCGAA IUGCUCGU | 14840 |
| 6745 | AGCACUUC C UUUCAGAG | 5501 | CUCUGAAA CUGAUGAGGCCGUUAGGCCGAA IAAGUGCU | 14841 |
| 6746 | GCACUUCC U UUCAGAGU | 5502 | ACUCUGAA CUGAUGAGGCCGUUAGGCCGAA IGAAGUGC | 14842 |
| 6750 | UUCCUUUC A GAGUUUCU | 5503 | AGAAACUC CUGAUGAGGCCGUUAGGCCGAA IAAAGGAA | 14843 |
| 6758 | AGAGUUUC U GAGAUAAU | 5504 | AUUAUCUC CUGAUGAGGCCGUUAGGCCGAA IAAACUCU | 14844 |
| 6778 | CGUGGAAC A GUCUGGGU | 5505 | ACCCAGAC CUGAUGAGGCCGUUAGGCCGAA IUUCCACG | 14845 |
| 6782 | GAACAGUC U GGGUGGAA | 5506 | UUCCACCC CUGAUGAGGCCGUUAGGCCGAA IACUGUUC | 14846 |
| 6797 | AAUGGGGC U GAAACCAU | 5507 | AUGGUUUC CUGAUGAGGCCGUUAGGCCGAA ICCCCAUU | 14847 |
| 6803 | GCUGAAAC C AUGUGCAA | 5508 | UUGCACAU CUGAUGAGGCCGUUAGGCCGAA IUUUCAGC | 14848 |
| 6804 | CUGAAACC A UGUGCAAG | 5509 | CUUGCACA CUGAUGAGGCCGUUAGGCCGAA IGUUUCAG | 14849 |
| 6810 | CCAUGUGC A AGUCUGUG | 5510 | CACAGACU CUGAUGAGGCCGUUAGGCCGAA ICACAUGG | 14850 |
| 6815 | UGCAAGUC U GUGUCUUG | 5511 | CAAGACAC CUGAUGAGGCCGUUAGGCCGAA IACUUGCA | 14851 |
| 6821 | UCUGUGUC U UGUCAGUC | 5512 | GACUGACA CUGAUGAGGCCGUUAGGCCGAA IACACAGA | 14852 |
| 6826 | GUCUUGUC A GUCCAAGA | 5513 | UCUUGGAC CUGAUGAGGCCGUUAGGCCGAA IACAAGAC | 14853 |
| 6830 | UGUCAGUC C AAGAAGUG | 5514 | CACUUCUU CUGAUGAGGCCGUUAGGCCGAA IACUGACA | 14854 |
| 6831 | GUCAGUCC A AGAAGUGA | 5515 | UCACUUCU CUGAUGAGGCCGUUAGGCCGAA IGACUGAC | 14855 |
| 6841 | GAAGUGAC A CCGAGAUG | 5516 | CAUCUCGG CUGAUGAGGCCGUUAGGCCGAA IUCACUUC | 14856 |
| 6843 | AGUGACAC C GAGAUGUU | 5517 | AACAUCUC CUGAUGAGGCCGUUAGGCCGAA IUGUCACU | 14857 |
| 6864 | UUAGGGAC C CGUGCCUU | 5518 | AAGGCACG CUGAUGAGGCCGUUAGGCCGAA IUCCCUAA | 14858 |
| 6865 | UAGGGACC C GUGCCUUG | 5519 | CAAGGCAC CUGAUGAGGCCGUUAGGCCGAA IGUCCCUA | 14859 |
| 6870 | ACCCGUGC C UUGUUUCC | 5520 | GGAAACAA CUGAUGAGGCCGUUAGGCCGAA ICACGGGU | 14860 |
| 6871 | CCCGUGCC U UGUUUCCU | 5521 | AGGAAACA CUGAUGAGGCCGUUAGGCCGAA IGCACGGG | 14861 |
| 6878 | CUUGUUUC C UAGCCCAC | 5522 | GUGGGCUA CUGAUGAGGCCGUUAGGCCGAA IAAACAAG | 14862 |
| 6879 | UUGUUUCC U AGCCCACA | 5523 | UGUGGGCU CUGAUGAGGCCGUUAGGCCGAA IGAAACAA | 14863 |
| 6883 | UUCCUAGC C CACAAGAA | 5524 | UUCUUGUG CUGAUGAGGCCGUUAGGCCGAA ICUAGGAA | 14864 |
| 6884 | UCCUAGCC C ACAAGAAU | 5525 | AUUCUUGU CUGAUGAGGCCGUUAGGCCGAA IGCUAGGA | 14865 |
| 6885 | CCUAGCCC A CAAGAAUG | 5526 | CAUUCUUG CUGAUGAGGCCGUUAGGCCGAA IGGCUAGG | 14866 |
| 6887 | UAGCCCAC A AGAAUGCA | 5527 | UGCAUUCU CUGAUGAGGCCGUUAGGCCGAA IUGGGCUA | 14867 |
| 6895 | AAGAAUGC A AACAUCAA | 5528 | UUGAUGUU CUGAUGAGGCCGUUAGGCCGAA ICAUUCUU | 14868 |
| 6899 | AUGCAAAC A UCAAACAG | 5529 | CUGUUUGA CUGAUGAGGCCGUUAGGCCGAA IUUUGCAU | 14869 |
| 6902 | CAAACAUC A AACAGAUA | 5530 | UAUCUGUU CUGAUGAGGCCGUUAGGCCGAA IAUGUUUG | 14870 |
| 6906 | CAUCAAAC A GAUACUCG | 5531 | CGAGUAUC CUGAUGAGGCCGUUAGGCCGAA IUUUGAUG | 14871 |
| 6912 | ACAGAUAC U CGCUAGCC | 5532 | GGCUAGCG CUGAUGAGGCCGUUAGGCCGAA IUAUCUGU | 14872 |
| 6916 | AUACUCGC U AGCCUCAU | 5533 | AUGAGGCU CUGAUGAGGCCGUUAGGCCGAA ICGAGUAU | 14873 |
| 6920 | UCGCUAGC C UCAUUUAA | 5534 | UUAAAUGA CUGAUGAGGCCGUUAGGCCGAA ICUAGCGA | 14874 |
| 6921 | CGCUAGCC U CAUUUAAA | 5535 | UUUAAAUG CUGAUGAGGCCGUUAGGCCGAA IGCUAGCG | 14875 |
| 6923 | CUAGCCUC A UUUAAAUU | 5536 | AAUUUAAA CUGAUGAGGCCGUUAGGCCGAA IAGGCUAG | 14876 |
| 6949 | AGGAGUGC A UCUUUGGC | 5537 | GCCAAAGA CUGAUGAGGCCGUUAGGCCGAA ICACUCCU | 14877 |
| 6952 | AGUGCAUC U UUGGCCGA | 5538 | UCGGCCAA CUGAUGAGGCCGUUAGGCCGAA IAUGCACU | 14878 |
| 6958 | UCUUUGGC C GACAGUGG | 5539 | CCACUGUC CUGAUGAGGCCGUUAGGCCGAA ICCAAAGA | 14879 |
| 6962 | UGGCCGAC A GUGGUGUA | 5540 | UACACCAC CUGAUGAGGCCGUUAGGCCGAA IUCGGCCA | 14880 |
| 6973 | GGUGUAAC U GUGUGUGU | 5541 | ACACACAC CUGAUGAGGCCGUUAGGCCGAA IUUACACC | 14881 |
| 7041 | UUUUGUGC A UAACUAUU | 5542 | AAUAGUUA CUGAUGAGGCCGUUAGGCCGAA ICACAAAA | 14882 |
| 7046 | UGCAUAAC U AUUUAAGG | 5543 | CCUUAAAU CUGAUGAGGCCGUUAGGCCGAA IUUAUGCA | 14883 |
| 7059 | AAGGAAAC U GGAAUUUU | 5544 | AAAAUUCC CUGAUGAGGCCGUUAGGCCGAA IUUUCCUU | 14884 |
| 7076 | AAAGUUAC U UUUAUACA | 5545 | UGUAUAAA CUGAUGAGGCCGUUAGGCCGAA IUAACUUU | 14885 |
| 7084 | UUUUAUAC A AACCAAGA | 5546 | UCUUGGUU CUGAUGAGGCCGUUAGGCCGAA IUAUAAAA | 14886 |
| 7088 | AUACAAAC C AAGAAUAU | 5547 | AUAUUCUU CUGAUGAGGCCGUUAGGCCGAA IUUUGUAU | 14887 |
| 7089 | UACAAACC A AGAAUAUA | 5548 | UAUAUUCU CUGAUGAGGCCGUUAGGCCGAA IGUUUGUA | 14888 |
| 7101 | AUAUAUGC U ACAGAUAU | 5549 | AUAUCUGU CUGAUGAGGCCGUUAGGCCGAA ICAUAUAU | 14889 |
| 7104 | UAUGCUAC A GAUAUAAG | 5550 | CUUAUAUC CUGAUGAGGCCGUUAGGCCGAA IUAGCAUA | 14890 |
| 7115 | UAUAAGAC A GACAUGGU | 5551 | ACCAUGUC CUGAUGAGGCCGUUAGGCCGAA IUCUUAUA | 14891 |
| 7119 | AGACAGAC A UGGUUUGG | 5552 | CCAAACCA CUGAUGAGGCCGUUAGGCCGAA IUCUGUCU | 14892 |
| 7130 | GUUUGGUC C UAUAUUUC | 5553 | GAAAUAUA CUGAUGAGGCCGUUAGGCCGAA IACCAAAC | 14893 |
| 7131 | UUUGGUCC U AUAUUUCU | 5554 | AGAAAUAU CUGAUGAGGCCGUUAGGCCGAA IGACCAAA | 14894 |
| 7139 | UAUAUUUC U AGUCAUGA | 5555 | UCAUGACU CUGAUGAGGCCGUUAGGCCGAA IAAAUAUA | 14895 |
| 7144 | UUCUAGUC A UGAUGAAU | 5556 | AUUCAUCA CUGAUGAGGCCGUUAGGCCGAA IACUAGAA | 14896 |
| 7166 | UUGUAUAC C AUCUUCAU | 5557 | AUGAAGAU CUGAUGAGGCCGUUAGGCCGAA IUAUACAA | 14897 |
| 7167 | UGUAUACC A UCUUCAUA | 5558 | UAUGAAGA CUGAUGAGGCCGUUAGGCCGAA IGUAUACA | 14898 |
| 7170 | AUACCAUC U UCAUAUAA | 5559 | UUAUAUGA CUGAUGAGGCCGUUAGGCCGAA IAUGGUAU | 14899 |
| 7173 | CCAUCUUC A UAUAAUAU | 5560 | AUAUUAUA CUGAUGAGGCCGUUAGGCCGAA IAAGAUGG | 14900 |
| 7184 | UAAUAUAC U UAAAAAUA | 5561 | UAUUUUUA CUGAUGAGGCCGUUAGGCCGAA IUAUAUUA | 14901 |
| 7197 | AAUAUUUC U UAAUUGGG | 5562 | CCCAAUUA CUGAUGAGGCCGUUAGGCCGAA IAAAUAUU | 14902 |
| 7220 | AAUCGUAC C AACUUAAU | 5563 | AUUAAGUU CUGAUGAGGCCGUUAGGCCGAA IUACGAUU | 14903 |
| 7221 | AUCGUACC A ACUUAAUU | 5564 | AAUUAAGU CUGAUGAGGCCGUUAGGCCGAA IGUACGAU | 14904 |
| 7224 | GUACCAAC U UAAUUGAU | 5565 | AUCAAUUA CUGAUGAGGCCGUUAGGCCGAA IUUGGUAC | 14905 |
| 7237 | UGAUAAAC U UGGCAACU | 5566 | AGUUGCCA CUGAUGAGGCCGUUAGGCCGAA ICUUAUCA | 14906 |
| 7242 | AACUUGGC A ACUGCUUU | 5567 | AAAGCAGU CUCAUGAGGCCGUUAGGCCGAA ICCAAGUU | 14907 |
| 7245 | UUGGCAAC U GCUUUUAU | 5568 | AUAAAAGC CUGAUGAGGCCGUUAGGCCGAA IUUGCCAA | 14908 |
| 7248 | GCAACUGC U UUUAUGUU | 5569 | AACAUAAA CUGAUGAGGCCGUUAGGCCGAA ICAGUUGC | 14909 |
| 7258 | UUAUGUUC U GUCUCCUU | 5570 | AAGGAGAC CUGAUGAGGCCGUUAGGCCGAA IAACAUAA | 14910 |
| 7262 | GUUCUGUC U CCUUCCAU | 5571 | AUGGAAGG CUGAUGAGGCCGUUAGGCCGAA IACAGAAC | 14911 |
| 7264 | UCUGUCUC C UUCCAUAA | 5572 | UUAUGGAA CUGAUGAGGCCGUUAGGCCGAA IAGACAGA | 14912 |
| 7265 | CUGUCUCC U UCCAUAAA | 5573 | UUUAUGGA CUGAUGAGGCCGUUAGGCCGAA IGAGACAG | 14913 |
| 7268 | UCUCCUUC C AUAAAUUU | 5574 | AAAUUUAU CUGAUGAGGCCGUUAGGCCGAA IAAGGAGA | 14914 |
| 7269 | CUCCUUCC A UAAAUUUU | 5575 | AAAAUUUA CUGAUGAGGCCGUUAGGCCGAA IGAAGGAG | 14915 |
| 7280 | AAUUUUUC A AAAUACUA | 5576 | UAGUAUUU CUGAUGAGGCCGUUAGGCCGAA IAAAAAUU | 14916 |
| 7287 | CAAAAUAC U AAUUCAAC | 5577 | GUUGAAUU CUGAUGAGGCCGUUAGGCCGAA IUAUUUUG | 14917 |
| 7293 | ACUAAUUC A ACAAAGAA | 5578 | UUCUUUGU CUGAUGAGGCCGUUAGGCCGAA IAAUUAGU | 14918 |
| 7296 | AAUUCAAC A AAGAAAAA | 5579 | UUUUUCUU CUGAUGAGGCCGUUAGGCCGAA IUUGAAUU | 14919 |
| 7307 | GAAAAAGC U CUUUUUUU | 5580 | AAAAAAAG CUGAUGAGGCCGUUAGGCCGAA ICUUUUUC | 14920 |
| 7309 | AAAAGCUC U UUUUUUUC | 5581 | GAAAAAAA CUGAUGAGGCCGUUAGGCCGAA IAGCUUUU | 14921 |
| 7318 | UUUUUUUC C UAAAAUAA | 5582 | UUAUUUUA CUGAUGAGGCCGUUAGGCCGAA IAAAAAAA | 14922 |
| 7319 | UUUUUUCC U AAAAUAAA | 5583 | UUUAUUUU CUGAUGAGGCCGUUAGGCCGAA IGAAAGAA | 14923 |
| 7329 | AAAUAAAC U CAAAUUUA | 5584 | UAAAUUUG CUGAUGAGGCCGUUAGGCCGAA IUUUAUUU | 14924 |
| 7331 | AUAAACUC A AAUUUAUC | 5585 | GAUAAAUU CUGAUGAGGCCGUUAGGCCGAA IAGUUUAU | 14925 |
| 7340 | AAUUUAUC C UUGUUUAG | 5586 | CUAAACAA CUGAUGAGGCCGUUAGGCCGAA IAUAAAUU | 14926 |
| 7341 | AUUUAUCC U UGUUUAGA | 5587 | UCUAAACA CUGAUGAGGCCGUUAGGCCGAA IGAUAAAU | 14927 |
| 7352 | UUUAGAGC A GAGAAAAA | 5588 | UUUUUCUC CUGAUGAGGCCGUUAGGCCGAA ICUCUAAA | 14928 |
| 7372 | AGAAAAAC U UUGAAAUG | 5589 | CAUUUCAA CUGAUGAGGCCGUUAGGCCGAA IUUUUUCU | 14929 |
| 7384 | AAAUGGUC U CAAAAAAU | 5590 | AUUUUUUG CUGAUGAGGCCGUUAGGCCGAA IACCAUUU | 14930 |
| 7386 | AUGGUCUC A AAAAAUUG | 5591 | CAAUUUUU CUGAUGAGGCCGUUAGGCCGAA IAGACCAU | 14931 |
| 7396 | AAAAUUGC U AAAUAUUU | 5592 | AAAUAUUU CUGAUGAGGCCGUUAGGCCGAA ICAAUUUU | 14932 |
| 7407 | AUAUUUUC A AUGGAAAA | 5593 | UUUUCCAU CUGAUGAGGCCGUUAGGCCGAA IAAAAUAU | 14933 |
| 7417 | UGGAAAAC U AAAUGUUA | 5594 | UAACAUUU CUGAUGAGGCCGUUAGGCCGAA IUUUUCCA | 14934 |
| 7433 | AGUUUAGC U GAUUGUAU | 5595 | AUACAAUC CUGAUGAGGCCGUUAGGCCGAA ICUAAACU | 14935 |
| 7455 | UUUCGAAC C UUUCACUU | 5596 | AAGUGAAA CUGAUGAGGCCGUUAGGCCGAA IUUCGAAA | 14936 |
| 7456 | UUCGAACC U UUCACUUU | 5597 | AAAGUGAA CUGAUGAGGCCGUUAGGCCGAA IGUUCGAA | 14937 |
| 7460 | AACCUUUC A CUUUUUGU | 5598 | ACAAAAAG CUGAUGAGGCCGUUAGGCCGAA IAAAGGUU | 14938 |
| 7462 | CCUUUCAC U UUUUGUUU | 5599 | AAACAAAA CUGAUGAGGCCGUUAGGCCGAA IUGAAAGG | 14939 |
| 7478 | UGUUUUAC C UAUUUCAC | 5600 | GUGAAAUA CUGAUGAGGCCGUUAGGCCGAA IUAAAACA | 14940 |
| 7479 | GUUUUACC U AUUUCACA | 5601 | UGUGAAAU CUGAUGAGGCCGUUAGGCCGAA IGUAAAAC | 14941 |
| 7485 | CCUAUUUC A CAACUGUG | 5602 | CACAGUUG CUGAUGAGGCCGUUAGGCCGAA IAAAUAGG | 14942 |
| 7487 | UAUUUCAC A ACUGUGUA | 5603 | UACACAGU CUGAUGAGGCCGUUAGGCCGAA IUGAAAUA | 14943 |
| 7490 | UUCACAAC U GUGUAAAU | 5604 | AUUUACAC CUGAUGAGGCCGUUAGGCCGAA IUUGUGAA | 14944 |
| 7502 | UAAAUUGC C AAUAAUUC | 5605 | GAAUUAUU CUGAUGAGGCCGUUAGGCCGAA ICAAUUUA | 14945 |
| 7503 | AAAUUGCC A AUAAUUCC | 5606 | GGAAUUAU CUGAUGAGGCCGUUAGGCCGAA IGCAAUUU | 14946 |
| 7511 | AAUAAUUC C UGUCCAUG | 5607 | CAUGGACA CUGAUGAGGCCGUUAGGCCGAA IAAUUAUU | 14947 |
| 7512 | AUAAUUCC U GUCCAUGA | 5608 | UCAUGGAC CUGAUGAGGCCGUUAGGCCGAA IGAAUUAU | 14948 |
| 7516 | UUCCUGUC C AUGAAAAU | 5609 | AUUUUCAU CUGAUGAGGCCGUUAGGCCGAA IACAGGAA | 14949 |
| 7517 | UCCUGUCC A UGAAAAUG | 5610 | CAUUUUCA CUGAUGAGGCCGUUAGGCCGAA IGACAGGA | 14950 |
| 7527 | GAAAAUGC A AAUUAUCC | 5611 | GGAUAAUU CUGAUGAGGCCGUUAGGCCGAA ICAUUUUC | 14951 |
| 7535 | AAAUUAUC C AGUGUAGA | 5612 | UCUACACU CUGAUGAGGCCGUUAGGCCGAA IAUAAUUU | 14952 |
| 7536 | AAUUAUCC A GUGUAGAU | 5613 | AUCUACAC CUGAUGAGGCCGUUAGGCCGAA IGAUAAUU | 14953 |
| 7554 | UAUUUGAC C AUCACCCU | 5614 | AGGGUGAU CUGAUGAGGCCGUUAGGCCGAA IUCAAAUA | 14954 |
| 7555 | AUUUGACC A UCACCCUA | 5615 | UAGGGUGA CUGAUGAGGCCGUUAGGCCGAA IGUCAAAU | 14955 |
| 7558 | UGACCAUC A CCCUAUGG | 5616 | CCAUAGGG CUGAUGAGGCCGUUAGGCCGAA IAUGGUCA | 14956 |
| 7560 | ACCAUCAC C CUAUGGAU | 5617 | AUCCAUAG CUGAUGAGGCCGUUAGGCCGAA IUGAUGGU | 14957 |
| 7561 | CCAUCACC C UAUGGAUA | 5618 | UAUCCAUA CUGAUGAGGCCGUUAGGCCGAA IGUGAUGG | 14958 |
| 7562 | CAUCACCC U AUGGAUAU | 5619 | AUAUCCAU CUGAUGAGGCCGUUAGGCCGAA IGGUGAUG | 14959 |
| 7575 | AUAUUGGC U AGUUUUGC | 5620 | GCAAAACU CUGAUGAGGCCGUUAGGCCGAA ICCAAUAU | 14960 |
| 7584 | AGUUUUGC C UUUAUUAA | 5621 | UUAAUAAA CUGAUGAGGCCGUUAGGCCGAA ICAAAACU | 14961 |
| 7585 | GUUUUGCC U UUAUUAAG | 5622 | CUUAAUAA CUGAUGAGGCCGUUAGGCCGAA IGCAAAAC | 14962 |
| 7595 | UAUUAAGC A AAUUCAUU | 5623 | AAUGAAUU CUGAUGAGGCCGUUAGGCCGAA ICUUAAUA | 14963 |
| 7601 | GCAAAUUC A UUUCAGCC | 5624 | GGCUGAAA CUGAUGAGGCCGUUAGGCCGAA IAAUUUGC | 14964 |
| 7606 | UUCAUUUC A GCCUGAAU | 5625 | AUUCAGGC CUGAUGAGGCCGUUAGGCCGAA IAAAUGAA | 14965 |
| 7609 | AUUUCAGC C UGAAUGUC | 5626 | GACAUUCA CUGAUGAGGCCGUUAGGCCGAA ICUGAAAU | 14966 |
| 7610 | UUUCAGCC U GAAUGUCU | 5627 | AGACAUUC CUGAUGAGGCCGUUAGGCCGAA IGCUGAAA | 14967 |
| 7618 | UGAAUGUC U GCCUAUAU | 5628 | AUAUAGGC CUGAUGAGGCCGUUAGGCCGAA IACAUUCA | 14968 |
| 7621 | AUGUCUGC C UAUAUAUU | 5629 | AAUAUAUA CUGAUGAGGCCGUUAGGCCGAA ICAGACAU | 14969 |
| 7622 | UGUCUGCC U AUAUAUUC | 5630 | GAAUAUAU CUGAUGAGGCCGUUAGGCCGAA IGCAGACA | 14970 |
| 7631 | AUAUAUUC U CUGCUCUU | 5631 | AAGAGCAG CUGAUGAGGCCGUUAGGCCGAA IAAUAUAU | 14971 |
| 7633 | AUAUUCUC U GCUCUUUG | 5632 | CAAAGAGC CUGAUGAGGCCGUUAGGCCGAA IAGAAUAU | 14972 |
| 7636 | UUCUCUGC U CUUUGUAU | 5633 | AUACAAAG CUGAUGAGGCCGUUAGGCCGAA ICAGAGAA | 14973 |
| 7638 | CUCUGCUC U UUGUAUUC | 5634 | GAAUACAA CUGAUGAGGCCGUUAGGCCGAA IAGCAGAG | 14974 |
| 7647 | UUGUAUUC U CCUUUGAA | 5635 | UUCAAAGG CUGAUGAGGCCGUUAGGCCGAA IAAUACAA | 14975 |
| 7649 | GUAUUCUC C UUUGAACC | 5636 | GGUUCAAA CUGAUGAGGCCGUUAGGCCGAA IAGAAUAC | 14976 |
| 7650 | UAUUCUCC U UUGAACCC | 5637 | GGGUUCAA CUGAUGAGGCCGUUAGGCCGAA IGAGAAUA | 14977 |
| 7657 | CUUUGAAC C CGUUAAAA | 5638 | UUUUAACG CUGAUGAGGCCGUUAGGCCGAA IUUCAAAG | 14978 |
| 7658 | UUUGAACC C GUUAAAAC | 5639 | GUUUUAAC CUGAUGAGGCCGUUAGGCCGAA IGUUCAAA | 14979 |
| 7667 | GUUAAAAC A UCCUGUGG | 5640 | CCACAGGA CUGAUGAGGCCGUUAGGCCGAA IUUUUAAC | 14980 |
| 7670 | AAAACAUC C UGUGGCAC | 5641 | GUGCCACA CUGAUGAGGCCGUUAGGCCGAA IAUGUUUU | 14981 |
| 7671 | AAACAUCC U GUGGCACU | 5642 | AGUGCCAC CUGAUGAGGCCGUUAGGCCGAA IGAUGUUU | 14982 |

Core Sequence = CUGAUGAG GCCGUUAGGC CGAA.
Underlined region can be any X sequence or linker, as described herein.
“I” represents Inosine.

[0354] TABLE XV

G-Cleaver Ribozyme and Target Sequences

| | | | | |
|---|---|---|---|---|
| | | Seq ID | | Seq ID |
| Pos | Target | No | Ribozyme Sequence | No |

| | | | | |
|---|---|---|---|---|
| 67 | GGGCUCGGGU G CAGCG | 5643 | CGCUG UGAUG GCAUGCACUAUGC GCG ACCCGAGCCC | 14983 |
| 91 | GCCUGGCGGC G AGGAU | 5644 | AUCCU UGAUG GCAUGCACUAUGC GCG GCCGCCAGGC | 14984 |
| 114 | GGAAGUGGUU G UCUCC | 5645 | GGAGA UGAUG GCAUGCACUAUGC GCG AACCACUUCC | 14985 |
| 131 | GGCUGGAGCC G CGAGA | 5646 | UCUCG UGAUG GCAUGCACUAUGC GCG GGCUCCAGCC | 14986 |
| 133 | CUGGAGCCGC G AGACG | 5647 | CGUCU UGAUG GCAUGCACUAUGC GCG GCGGCUCCAG | 14987 |
| 142 | CGAGACGGGC G CUCAG | 5648 | CUGAG UGAUG GCAUGCACUAUGC GCG GCCCGUCUCG | 14988 |
| 151 | CGCUCAGGGC G CGGGG | 5649 | CCCCG UGAUG GCAUGCACUAUGC GCG GCCCUGAGCG | 14989 |
| 168 | CGGCGGCGGC G AACGA | 5650 | UCGUU UGAUG GCAUGCACUAUGC GCG GCCGCCGCCG | 14990 |
| 172 | GGCGGCGAAC G AGAGG | 5651 | CCUCU UGAUG GCAUGCACUAUGC GCG GUUCGCCGCC | 14991 |
| 214 | CCGGGGGAGC G CGGGC | 5652 | GCCCG UGAUG GCAUGCACUAUGC GCG GCUCCCCCGG | 14992 |
| 227 | GGCACCGGGC G AGCAG | 5653 | CUGCU UGAUG GCAUGCACUAUGC GCG GCCCGGUGCC | 14993 |
| 236 | CGAGCAGGCC G CGUCG | 5654 | CGACG UGAUG GCAUGCACUAUGC GCG GGCCUGCUCG | 14994 |
| 241 | AGGCCGCGUC G CGCUC | 5655 | GAGCG UGAUG GCAUGCACUAUGC GCG GACGCGGCCU | 14995 |
| 243 | GCCGCGUCGC G CUCAC | 5656 | GUGAG UGAUG GCAUGCACUAUGC GCG GCGACGCGGC | 14996 |
| 279 | CCGGGGUCCU G CUGUG | 5657 | CACAG UGAUG GCAUGCACUAUGC GCG AGGACCCCGG | 14997 |
| 282 | GGGUCCUGCU G UGCGC | 5658 | GCGCA UGAUG GCAUGCACUAUGC GCG AGCAGGACCC | 14998 |
| 284 | GUCCUGCUGU G CGCGC | 5659 | GCGCG UGAUG GCAUGCACUAUGC GCG ACAGCAGGAC | 14999 |
| 286 | CCUGCUGUGC G CGCUG | 5660 | CAGCG UGAUG GCAUGCACUAUGC GCG GCACAGCAGG | 15000 |
| 288 | UGCUGUGCGC G CUGCU | 5661 | AGCAG UGAUG GCAUGCACUAUGC GCG GCGCACAGCA | 15001 |
| 291 | UGUGCGCGCU G CUCAG | 5662 | CUGAG UGAUG GCAUGCACUAUGC GCG AGCGCGCACA | 15002 |
| 299 | CUGCUCAGCU G UCUGC | 5663 | GCAGA UGAUG GCAUGCACUAUGC GCG AGCUGAGCAG | 15003 |
| 303 | UCAGCUGUCU G CUUCU | 5664 | AGAAG UGAUG GCAUGCACUAUGC GCG AGACAGCUGA | 15004 |
| 346 | AAAAGAUCCU G AACUG | 5665 | CAGUU UGAUG GCAUGCACUAUGC GCG AGGAUCUUUU | 15005 |
| 351 | AUCCUGAACU G AGUUU | 5666 | AAACU UGAUG GCAUGCACUAUGC GCG AGUUCAGGAU | 15006 |
| 378 | AGCACAUCAU G CAAGC | 5667 | GCUUG UGAUG GCAUGCACUAUGC GCG AUGAUGUGCU | 15007 |
| 396 | GCCAGACACU G CAUCU | 5668 | AGAUG UGAUG GCAUGCACUAUGC GCG AGUGUCUGGC | 15008 |
| 407 | CAUCUCCAAU G CAGGG | 5669 | CCCUG UGAUG GCAUGCACUAUGC GCG AUUGGAGAUG | 15009 |
| 438 | AAUGGUCUUU G CCUGA | 5670 | UCAGG UGAUG GCAUGCACUAUGC GCG AAAGACCAUU | 15010 |
| 442 | GUCUUUGCCU G AAAUG | 5671 | CAUUU UGAUG GCAUGCACUAUGC GCG AGGCAAAGAC | 15011 |
| 450 | CUGAAAUGGU G AGUAA | 5672 | UUACU UGAUG GCAUGCACUAUGC GCG ACCAUUUCAG | 15012 |
| 463 | UAAGGAAAGC G AAAGG | 5673 | CCUUU UGAUG GCAUGCACUAUGC GCG GCUUUCCUUA | 15013 |
| 471 | GCGAAAGGCU G AGCAU | 5674 | AUGCU UGAUG GCAUGCACUAUGC GCG AGCCUUUCGC | 15014 |
| 487 | AACUAAAUCU G CCUGU | 5675 | ACAGG UGAUG GCAUGCACUAUGC GCG AGAUUUAGUU | 15015 |
| 491 | AAAUCUGCCU G UGGAA | 5676 | UUCCA UGAUG GCAUGCACUAUGC GCG AGGCAGAUUU | 15016 |
| 515 | AAACAAUUCU G CAGUA | 5677 | UACUG UGAUG GCAUGCACUAUGC GCG AGAAUUGUUU | 15017 |
| 531 | CUUUAACCUU G AACAC | 5678 | GUGUU UGAUG GCAUGCACUAUGC GCG AAGGUUAAAG | 15018 |
| 569 | UUCUACAGCU G CAAAU | 5679 | AUUUG UGAUG GCAUGCACUAUGC GCG AGCUGUAGAA | 15019 |
| 583 | AUAUCUAGCU G UACCU | 5680 | AGGUA UGAUG GCAUGCACUAUGC GCG AGCUAGAUAU | 15020 |
| 616 | AACAGAAUCU G CAAUC | 5681 | GAUUG UGAUG GCAUGCACUAUGC GCG AGAUUCUGUU | 15021 |
| 637 | AUUUAUUAGU G AUACA | 5682 | UGUAU UGAUG GCAUGCACUAUGC GCG ACUAAUAAAU | 15022 |
| 663 | UCGUAGAGAU G UACAG | 5683 | CUGUA UGAUG GCAUGCACUAUGC GCG AUCUCUACGA | 15023 |
| 670 | GAUGUACAGU G AAAUC | 5684 | GAUUU UGAUG GCAUGCACUAUGC GCG ACUGUACAUC | 15024 |
| 679 | UGAAAUCCCC G AAAUU | 5685 | AAUUU UGAUG GCAUGCACUAUGC GCG GGGGAUUUCA | 15025 |
| 693 | UUAUACACAU G ACUGA | 5686 | UCAGU UGAUG GCAUGCACUAUGC GCG AUGUGUAUAA | 15026 |
| 697 | ACACAUGACU G AAGGA | 5687 | UCCUU UGAUG GCAUGCACUAUGC GCG AGUCAUGUGU | 15027 |
| 722 | GUCAUUCCCU G CCGGG | 5688 | CCCGG UGAUG GCAUGCACUAUGC GCG AGGGAAUGAC | 15028 |
| 748 | UAACAUCACU G UUACU | 5689 | AGUAA UGAUG GCAUGCACUAUGC GCG AGUGAUGUUA | 15029 |
| 772 | GUUUCCACUU G ACACU | 5690 | AGUGU UGAUG GCAUGCACUAUGC GCG AAGUGGAAAC | 15030 |
| 780 | UUGACACUUU G AUCCC | 5691 | GCGAU UGAUG GCAUGCACUAUGC GCG AAAGUGUCAA | 15031 |
| 787 | UUUGAUCCCU G AUGGA | 5692 | UCCAU UGAUG GCAUGCACUAUGC GCG AGGGAUCAAA | 15032 |
| 797 | GAUGGAAAAC G CAUAA | 5693 | UUAUC UGAUG GCAUGCACUAUGC GCG GUUUUCCAUC | 15033 |
| 838 | CAUAUCAAAU G CAACG | 5694 | CGUUG UGAUG GCAUGCACUAUGC GCG AUUUGAUAUG | 15034 |
| 864 | UAGGGCUUCU G ACCUG | 5695 | CAGGU UGAUG GCAUGCACUAUGC GCG AGAAGCCCUA | 15035 |
| 869 | CUUCUGACCU G UGAAG | 5696 | CUUCA UGAUG GCAUGCACUAUGC GCG AGGUCAGAAG | 15036 |
| 871 | UCUGACCUGU G AAGCA | 5697 | UGCUU UGAUG GCAUGCACUAUGC GCG ACAGGUCAGA | 15037 |
| 894 | AUGGGCAUUU G UAUAA | 5698 | UUAUA UGAUG GCAUGCACUAUGC GCG AAAUGCCCAU | 15038 |
| 920 | CUCACACAUC G ACAAA | 5699 | UUUGU UGAUG GCAUGCACUAUCC GCG GAUGUGUGAG | 15039 |
| 943 | AAUCAUAGAU G UCCAA | 5700 | UUGGA UGAUG GCAUGCACUAUGC GCG AUCUAUGAUU | 15040 |
| 962 | AGCACACCAC G CCCAG | 5701 | CUGGG UGAUG GCAUGCACUAUGC GCG GUGGUGUGCU | 15041 |
| 994 | CCAUACUCUU G UCCUC | 5702 | GAGGA UGAUG GCAUGCACUAUGC GCG AAGAGUAUGG | 15042 |
| 1004 | GUCCUCAAUU G UACUG | 5703 | CAGUA UGAUG GCAUGCACUAUGC GCG AAUUGAGGAC | 15043 |
| 1009 | CAAUUGUACU G CUACC | 5704 | GGUAG UGAUG GCAUGCACUAUGC GCG AGUACAAUUG | 15044 |
| 1023 | CCACUCCCUU G AACAC | 5705 | GUGUU UGAUG GCAUGCACUAUGC GCG AAGGGAGUGG | 15045 |
| 1029 | CCUUGAACAC G AGAGU | 5706 | ACUCU UGAUG GCAUGCACUAUGC GCG GUGUUCAAGG | 15046 |
| 1041 | GAGUUCAAAU G ACCUG | 5707 | CAGGU UGAUG GCAUGCACUAUGC GCG AUUUGAACUC | 15047 |
| 1057 | GAGUUACCCU G AUGAA | 5708 | UUCAU UGAUG GCAUGCACUAUGC GCG AGGGUAACUC | 15048 |
| 1060 | UUACCCUGAU G AAAAA | 5709 | UUUUU UGAUG GCAUGCACUAUGC GCG AUCAGGGUAA | 15049 |
| 1088 | UCCGUAAGGC G ACGAA | 5710 | UUCGU UGAUG GCAUGCACUAUGC GCG GCCUUACGGA | 15050 |
| 1091 | GUAAGGCGAC G AAUUG | 5711 | CAAUU UGAUG GCAUGCACUAUGC GCG GUCGCCUUAC | 15051 |
| 1096 | GCGACGAAUU G ACCAA | 5712 | UUGGU UGAUG GCAUGCACUAUGC GCG AAUUCGUCGC | 15052 |
| 1114 | CAAUUCCCAU G CCAAC | 5713 | GUUGG UGAUG GCAUGCACUAUGC GCG AUGGGAAUUG | 15053 |
| 1132 | AUUCUACAGU G UUCUU | 5714 | AAGAA UGAUG GCAUGCACUAUGC GCG ACUGUAGAAU | 15054 |
| 1144 | UCUUACUAUU G ACAAA | 5715 | UUUGU UGAUG GCAUGCACUAUGC GCG AAUAGUAAGA | 15055 |
| 1152 | UUGACAAAAU G CAGAA | 5716 | UUCUG UGAUG GCAUGCACUAUGC GCG AUUUUGUCAA | 15056 |
| 1181 | CUUUAUACUU G UCGUG | 5717 | CACGA UGAUG GCAUGCACUAUGC GCG AAGUAUAAAG | 15057 |
| 1186 | UACUUGUCGU G UAAGG | 5718 | CCUUA UGAUG GCAUGCACUAUGC GCG ACGACAAGUA | 15058 |
| 1213 | AUUCAAAUCU G UUAAC | 5719 | GUUAA UGAUG GCAUGCACUAUGC GCG AGAUUUGAAU | 15059 |
| 1227 | ACACCUCAGU G CAUAU | 5720 | AUAUG UGAUG GCAUGCACUAUGC GCG ACUGAGGUGU | 15060 |
| 1237 | GCAUAUAUAU G AUAAA | 5721 | UUUAU UGAUG GCAUGCACUAUGC GCG AUAUAUAUGC | 15061 |
| 1255 | AUUCAUCACU G UGAAA | 5722 | UUUCA UGAUG GCAUGCACUAUGC GCG AGUGAUGAAU | 15062 |
| 1257 | UCAUCACUGU G AAACA | 5723 | UGUUU UGAUG GCAUGCACUAUGC GCG ACAGUGAUGA | 15063 |
| 1265 | GUGAAACAUC G AAAAC | 5724 | GUUUU UGAUG GCAUGCACUAUGC GCG GAUGUUUCAC | 15064 |
| 1278 | AACAGCAGGU G CUUGA | 5725 | UCAAG UGAUG GCAUGCACUAUGC GCG ACCUGCUGUU | 15065 |
| 1282 | GCAGGUGCUU G AAACC | 5726 | GGUUU UGAUG GCAUGCACUAUGC GCG AAGCACCUGC | 15066 |
| 1320 | GGCUCUCUAU G AAAGU | 5727 | ACUUU UGAUG GCAUGCACUAUGC GCG AUAGAGAGCC | 15067 |
| 1326 | CUAUGAAAGU G AAGGC | 5728 | GCCUU UGAUG GCAUGCACUAUGC GCG ACUUUCAUAG | 15068 |
| 1341 | CAUUUCCCUC G CCGGA | 5729 | UCCGG UGAUG GCAUGCACUAUGC GCG GAGGGAAAUG | 15069 |
| 1351 | GCCGGAAGUU G UAUGG | 5730 | CCAUA UGAUG GCAUGCACUAUGC GCG AACUUCCGGC | 15070 |
| 1375 | UGGGUUACCU G CGACU | 5731 | AGUCG UGAUG GCAUGCACUAUGC GCG AGGUAACCCA | 15071 |
| 1377 | GGUUACCUGC G ACUGA | 5732 | UCAGU UGAUG GCAUGCACUAUGC GCG GCAGGUAACC | 15072 |
| 1381 | ACCUGCGACU G AGAAA | 5733 | UUUCU UGAUG GCAUGCACUAUGC GCG AGUCGCAGGU | 15073 |
| 1390 | UGAGAAAUCU G CUCGC | 5734 | GCGAG UGAUG GCAUGCACUAUGC GCG AGAUUUCUCA | 15074 |
| 1394 | AAAUCUGCUC G CUAUU | 5735 | AAUAG UGAUG GCAUGCACUAUGC GCG GAGCAGAUUU | 15075 |
| 1401 | CUCGCUAUUU G ACUCG | 5736 | CGAGU UGAUG GCAUGCACUAUGC GCG AAAUAGCGAG | 15076 |
| 1438 | GGACGUAACU G AAGAG | 5737 | CUCUU UGAUG GCAUGCACUAUGC GCG AGUUACGUCC | 15077 |
| 1447 | UGAAGAGGAU G CAGGG | 5738 | CCCUG UGAUG GCAUGCACUAUGC GCG AUCCUCUUCA | 15078 |
| 1467 | AUACAAUCUU G CUGAG | 5739 | CUCAG UGAUG GCAUGCACUAUGC GCG AAGAUUGUAU | 15079 |
| 1470 | CAAUCUUGCU G AGCAU | 5740 | AUGCU UGAUG GCAUGCACUAUGC GCG AGCAAGAUUG | 15080 |
| 1489 | ACAGUCAAAU G UGUUU | 5741 | AAACA UGAUG GCAUGCACUAUGC GCG AUUUGACUGU | 15081 |
| 1491 | AGUCAAAUGU G UUUAA | 5742 | UUAAA UGAUG GCAUGCACUAUGC GCG ACAUUUGACU | 15082 |
| 1507 | AAACCUCACU G CCACU | 5743 | AGUGG UGAUG GCAUGCACUAUGC GCG AGUGAGGUUG | 15083 |
| 1519 | CACUCUAAUU G UCAAU | 5744 | AUUGA UGAUG GCAUGCACUAUGC GCG AAUUAGAGUG | 15084 |
| 1525 | AAUUGUCAAU G UGAAA | 5745 | UGUCA UGAUG GCAUGCACUAUGC GCG AUUGACAAUU | 15085 |
| 1527 | UUGUCAAUGU G AAACC | 5746 | GGUUU UGAUG GCAUGCACUAUGC GCG ACAUUGACAA | 15086 |
| 1543 | CCAGAUUUAC G AAAAG | 5747 | CUUUU UGAUG GCAUGCACUAUGC GCG GUAAAUCUGG | 15087 |
| 1554 | AAAAGGCCGU G UCAUC | 5748 | GAUGA UGAUG GCAUGCACUAUGC GCG ACGGCCUUUU | 15088 |
| 1605 | GACAAAUCCU G ACUUG | 5749 | CAAGU UGAUG GCAUGCACUAUGC GCG AGGAUUUGUC | 15089 |
| 1610 | AUCCUGACUU G UACCG | 5750 | CGGUA UGAUG GCAUGCACUAUGC GCG AAGUCAGGAU | 15090 |
| 1615 | GACUUGUACC G CAUAU | 5751 | AUAUG UGAUG GCAUGCACUAUGC GCG GGUACAAGUC | 15091 |
| 1661 | UGGCACCCCU G UAACC | 5752 | GGUUA UGAUG GCAUGCACUAUGC GCG AGGGGUGCCA | 15092 |
| 1678 | UAAUCAUUCC G AAGCA | 5753 | UGCUU UGAUG GCAUGCACUAUGC GCG GGAAUGAUUA | 15093 |
| 1688 | GAAGCAAGGU G UGACU | 5754 | AGUCA UGAUG GCAUGCACUAUGC GCG ACCUUGCUUC | 15094 |
| 1690 | AGCAAGGUGU G ACUUU | 5755 | AAAGU UGAUG GCAUGCACUAUGC GCG ACACCUUGCU | 15095 |
| 1697 | UGUGACUUUU G UUCCA | 5756 | UGGAA UGAUG GCAUGCACUAUGC GCG AAAAGUCACA | 15096 |
| 1708 | UUCCAAUAAU G AAGAG | 5757 | CUCUU UGAUG GCAUGCACUAUGC GCG AUUAUUGGAA | 15097 |
| 1729 | UAUCCUGGAU G CUGAC | 5758 | GUCAG UGAUG GCAUGCACUAUGC GCG AUCCAGGAUA | 15098 |
| 1732 | CCUGGAUGCU G ACAGC | 5759 | GCUGU UGAUG GCAUGCACUAUGC GCG AGCAUCCAGG | 15099 |
| 1756 | AAACAGAAUU G AGAGC | 5760 | GCUCU UGAUG GCAUGCACUAUGC GCG AAUUCUGUUU | 15100 |
| 1772 | AUCACUCAGC G CAUGG | 5761 | CCAUG UGAUG GCAUGCACUAUGC GCG GCUGAGUGAU | 15101 |
| 1819 | CACCUGGGUU G UGGCU | 5762 | AGCCA UGAUG GCAUGCACUAUGC GCG AACCAAGGUG | 15102 |
| 1825 | GGUUGUGGCU G ACUCU | 5763 | AGAGU UGAUG GCAUGCACUAUGC GCG AGCCACAACC | 15103 |
| 1853 | AUCUACAUUU G CAUAG | 5764 | CUAUG UGAUG GCAUGCACUAUGC GCG AAAUGUAGAU | 15104 |
| 1879 | AGUUGGGACU G UGGGA | 5765 | UCCCA UGAUG GCAUGCACUAUGC GCG AGUCCCAACU | 15105 |
| 1912 | UAUCACAGAU G UGCCA | 5766 | UGGCA UGAUG GCAUGCACUAUGC GCG AUCUGUGAUA | 15106 |
| 1914 | UCACAGAUGU G CCAAA | 5767 | UUUGG UGAUG GCAUGCACUAUGC GCG ACAUCUGUGA | 15107 |
| 1930 | UGGGUUUCAU G UUAAC | 5768 | GUUAA UGAUG GCAUGCACUAUGC GCG AUGAAACCCA | 15108 |
| 1947 | UGGAAAAAAU G CCGAC | 5769 | GUCGG UGAUG GCAUGCACUAUGC GCG AUUUUUUCCA | 15109 |
| 1950 | AAAAAAUGCC G ACGGA | 5770 | UCCGU UGAUG GCAUGCACUAUGC GCG GGCAUUUUUU | 15110 |
| 1968 | GAGAGGACCU G AAACU | 5771 | AGUUU UGAUG GCAUGCACUAUGC GCG AGGUCCUCUC | 15111 |
| 1974 | ACCUGAAACU G UCUUG | 5772 | CAAGA UGAUG GCAUGCACUAUGC GCG AGUUUCAGGU | 15112 |
| 1979 | AAACUGUCUU G CACAG | 5773 | CUGUG UGAUG GCAUGCACUAUGC GCG AAGACAGUUU | 15113 |
| 2025 | GGAUUUUACU G CGGAC | 5774 | GUCCG UGAUG GCAUGCACUAUGC GCG AGUAAAAUCC | 15114 |
| 2049 | ACAGAACAAU G CACUA | 5775 | UAGUG UGAUG GCAUGCACUAUGC GCG AUUGUUCUGU | 15115 |
| 2121 | UUACCAUCAU G AAUGU | 5776 | ACAUU UGAUG GCAUGCACUAUGC GCG AUGAUGGUAA | 15116 |
| 2125 | CAUCAUGAAU G UUUCC | 5777 | GGAAA UGAUG GCAUGCACUAUGC GCG AUUCAUGAUG | 15117 |
| 2133 | AUGUUUCCCU G CAAGA | 5778 | UCUUG UGAUG GCAUGCACUAUGC GCG AGGGAAACAU | 15118 |
| 2152 | AGGCACCUAU G CCUGC | 5779 | GCAGG UGAUG GCAUGCACUAUGC GCG AUAGGUGCCU | 15119 |
| 2156 | ACCUAUGCCU G CAGAG | 5780 | CUCUG UGAUG GCAUGCACUAUGC GCG AGGGAUAGGU | 15120 |
| 2170 | AGCCAGGAAU G UAUAC | 5781 | GUAUA UGAUG GCAUGCACUAUGC GCG AUUCCUGGCU | 15121 |
| 2241 | CAUACCUCCU G CGAAA | 5782 | UUUCG UGAUG GCAUGCACUAUGC GCG AGGAGGUAUG | 15122 |
| 2243 | UACCUCCUGC G AAACC | 5783 | GGUUU UGAUG GCAUGCACUAUGC GCG GCAGGAGGUA | 15123 |
| 2254 | AAACCUCAGU G AUCAC | 5784 | GUGAU UGAUG GCAUGCACUAUGC GCG ACUGAGGUUU | 15124 |
| 2294 | ACUUUAGACU G UCAUG | 5785 | CAUGA UGAUG GCAUGCACUAUGC GCG AGUCUAAAGU | 15125 |
| 2299 | AGACUGUCAU G CUAAU | 5786 | AUUAG UGAUG GCAUGCACUAUGC GCG AUGACAGUCU | 15126 |
| 2308 | UGCUAAUGGU G UCCCC | 5787 | GGGGA UGAUG GCAUGCACUAUGC GCG ACCAUUAGCA | 15127 |
| 2314 | UGGUGUCCCC G AGCCU | 5788 | AGGCU UGAUG GCAUGCACUAUGC GCG GGGGACACCA | 15128 |
| 2394 | GAAGCAGCAC G CUGUU | 5789 | AACAG UGAUG GCAUGCACUAUGC GCG GUGCUGCUUC | 15129 |
| 2397 | GCAGCACGCU G UUUAU | 5790 | AUAAA UGAUG GCAUGCACUAUGC GCG AGCGUGCUGC | 15130 |
| 2404 | GCUGUUUAUU G AAAGA | 5791 | UCUUU UGAUG GCAUGCACUAUGC GCG AAUAAACAGC | 15131 |
| 2425 | AGAAGAGGAU G AAGGU | 5792 | ACCUU UGAUG GCAUGCACUAUGC GCG AUCCUCUUCU | 15132 |
| 2431 | GGAUGAAGGU G UCUAU | 5793 | AUAGA UGAUG GCAUGCACUAUGC GCG ACCUUCAUCC | 15133 |
| 2441 | GUCUAUCACU G CAAAG | 5794 | CUUUG UGAUG GCAUGCACUAUGC GCG AGUGAUAGAC | 15134 |
| 2467 | GAAGGGCUCU G UGGAA | 5795 | UUCCA UGAUG GCAUGCACUAUGC GCG AGAGCCCUUC | 15135 |
| 2491 | AUACCUCACU G UUCAA | 5796 | UUGAA UGAUG GCAUGCACUAUGC GCG AGUGAGGUAU | 15136 |
| 2526 | AUCUGGAGCU G AUCAC | 5797 | GUGAU UGAUG GCAUGCACUAUGC GCG AGCUCCAGAU | 15137 |
| 2540 | ACUCUAACAU G CACCU | 5798 | AGGUG UGAUG GCAUGCACUAUGC GCG AUGUUAGAGU | 15138 |
| 2546 | ACAUGCACCU G UGUGG | 5799 | CCACA UGAUG GCAUGCACUAUGC GCG AGGUGCAUGU | 15139 |
| 2548 | AUGCACCUGU G UGGCU | 5800 | AGCCA UGAUG GCAUGCACUAUGC GCG ACAGGUGCAU | 15140 |
| 2554 | CUGUGUGGCU G CGACU | 5801 | AGUCG UGAUG GCAUGCACUAUGC GCG AGCCACACAG | 15141 |
| 2556 | GUGUGGCUGC G ACUCU | 5802 | AGAGU UGAUG GCAUGCACUAUGC GCG GCAGCCACAC | 15142 |
| 2591 | CUCCUUAUCC G AAAAA | 5803 | UUUUU UGAUG GCAUGCACUAUGC GCG GGAUAAGGAG | 15143 |
| 2598 | UCCGAAAAAU G AAAAG | 5804 | CUUUU UGAUG GCAUGCACUAUGC GCG AUUUUUCGGA | 15144 |
| 2614 | GUCUUCUUCU G AAAUA | 5805 | UAUUU UGAUG GCAUGCACUAUGC GCG AGAAGAAGAC | 15145 |
| 2626 | AAUAAAGACU G ACUAC | 5806 | GUAGU UGAUG GCAUGCACUAUGC GCG AGUCUUUAUU | 15146 |
| 2656 | GGACCCAGAU G AAGUU | 5807 | AACUU UGAUG GCAUGCACUAUGC GCG AUCUGGGUCC | 15147 |
| 2671 | UCCUUUGGAU G AGCAG | 5808 | CUGCU UGAUG GCAUGCACUAUGC GCG AUCCAAAGGA | 15148 |
| 2678 | GAUGAGCAGU G UGAGC | 5809 | GCUCA UGAUG GCAUGCACUAUGC GCG ACUGCUCAUC | 15149 |
| 2680 | UGAGCAGUGU G AGCGG | 5810 | CCGCU UGAUG GCAUGCACUAUGC GCG ACACUGCUCA | 15150 |
| 2695 | GCUCCCUUAU G AUGCC | 5811 | GGCAU UGAUG GCAUGCACUAUGC GCG AUAAGGGAGC | 15151 |
| 2698 | CCCUUAUGAU G CCAGC | 5812 | GCUGG UGAUG GCAUGCACUAUGC GCG AUCAUAAGGG | 15152 |
| 2716 | GUGGGAGUUU G CCCGG | 5813 | CCGGG UGAUG GCAUGCACUAUGC GCG AAACUCCCAC | 15153 |
| 2813 | UCACCUACGU G CCGGA | 5814 | UCCGG UGAUG GCAUGCACUAUGC GCG ACGUAGGUGA | 15154 |
| 2821 | GUGCCGGACU G UGGCU | 5815 | AGCCA UGAUG GCAUGCACUAUGC GCG AGUCCGGCAC | 15155 |
| 2827 | GACUGUGGCU G UGAAA | 5816 | UUUCA UGAUG GCAUGCACUAUGC GCG AGCCACAGUC | 15156 |
| 2829 | CUGUGGCUGU G AAAAU | 5817 | AUUUU UGAUG GCAUGCACUAUGC GCG ACAGCCACAG | 15157 |
| 2835 | CUGUGAAAAU G CUGAA | 5818 | UUCAG UGAUG GCAUGCACUAUGC GCG AUUUUCACAG | 15158 |
| 2838 | UGAAAAUGCU G AAAGA | 5819 | UCUUU UGAUG GCAUGCACUAUGC GCG AGCAUUUUCA | 15159 |
| 2860 | CACGGCCAGC G AGUAC | 5820 | GUACU UGAUG GCAUGCACUAUGC GCG GCUGGCCGUG | 15160 |
| 2874 | ACAAAGCUCU G AUGAC | 5821 | GUCAU UGAUG GCAUGCACUAUGC GCG AGAGCUUUGU | 15161 |
| 2877 | AAGCUCUGAU G ACUGA | 5822 | UCAGU UGAUG GCAUGCACUAUGC GCG AUCAGAGCUU | 15162 |
| 2881 | UCUGAUGACU G AGCUA | 5823 | UAGCU UGAUG GCAUGCACUAUGC GCG AGUCAUCAGA | 15163 |
| 2895 | UAAAAAUCUU G ACCCA | 5824 | UGGGU UGAUG GCAUGCACUAUGC GCG AAGAUUUUUA | 15164 |
| 2916 | GCCACCAUCU G AACGU | 5825 | ACGUU UGAUG GCAUGCACUAUGC GCG AGAUGGUGGC | 15165 |
| 2931 | UGGUUAACCU G CUGGG | 5826 | CCCAG UGAUG GCAUGCACUAUGC GCG AGGUUAACCA | 15166 |
| 2942 | CUGGGAGCCU G CACCA | 5827 | UGGUG UGAUG GCAUGCACUAUGC GCG AGGCUCCCAG | 15167 |
| 2964 | GAGGGCCUCU G AUGGU | 5828 | ACCAU UGAUG GCAUGCACUAUGC GCG AGAGGCCCUC | 15168 |
| 2970 | CUCUGAUGGU G AUUGU | 5829 | ACAAU UGAUG GCAUGCACUAUGC GCG ACCAUCAGAG | 15169 |
| 2974 | GAUGGUGAUU G UUGAA | 5830 | UUCAA UGAUG GCAUGCACUAUGC GCG AAUCACCAUC | 15170 |
| 2977 | GGUGAUUGUU G AAUAC | 5831 | GUAUU UGAUG GCAUGCACUAUGC GCG AACAAUCACC | 15171 |
| 2984 | GUUGAAUACU G CAAAU | 5832 | AUUUG UGAUG GCAUGCACUAUGC GCG AGUAUUCAAC | 15172 |
| 3025 | GAGCAAACGU G ACUUA | 5833 | UAAGU UGAUG GCAUGCACUAUGC GCG ACGUUUGCUC | 15173 |
| 3049 | CAACAAGGAU G CAGCA | 5834 | UGCUG UGAUG GCAUGCACUAUGC GCG AUCCUUGUUG | 15174 |
| 3139 | CACCAGCAGC G AAAGC | 5835 | GCUUU UGAUG GCAUGCACUAUGC GCG GCUGCUGGUG | 15175 |
| 3148 | CGAAAGCUUU G CGAGC | 5838 | GCUCG UGAUG GCAUGCACUAUGC GCG AAAGCUUUCG | 15176 |
| 3150 | AAAGCUUUGC G AGCUC | 5837 | GAGCU UGAUG GCAUGCACUAUGC GCG GCAAAGCUUU | 15177 |
| 3180 | AUAAAAGUCU G AGUGA | 5838 | UCACU UGAUG GCAUGCACUAUGC GCG AGACUUUUAU | 15178 |
| 3184 | AAGUCUGAGU G AUGUU | 5839 | AACAU UGAUG GCAUGCACUAUGC GCG ACUCAGACUU | 15179 |
| 3187 | UCUGAGUGAU G UUGAG | 5840 | CUCAA UGAUG GCAUGCACUAUGC GCG AUCACUCAGA | 15180 |
| 3190 | GAGUGAUGUU G AGGAA | 5841 | UUCCU UGAUG GCAUGCACUAUGC GCG AACAUCACUC | 15181 |
| 3208 | GGAGGAUUCU G ACGGU | 5842 | ACCGU UGAUG GCAUGCACUAUGC GCG AGAAUCCUCC | 15182 |
| 3246 | UGGAAGAUCU G AUUUC | 5843 | GAAAU UGAUG GCAUGCACUAUGC GCG AGAUCUUCCA | 15183 |
| 3288 | UGGAGUUCCU G UCUUC | 5844 | GAAGA UGAUG GCAUGCACUAUGC GCG AGGAACUCCA | 15184 |
| 3302 | UCCAGAAAGU G CAUUC | 5845 | GAAUG UGAUG GCAUGCACUAUGC GCG ACUUUCUGGA | 15185 |
| 3324 | ACCUGGCAGC G AGAAA | 5846 | UUUCU UGAUG GCAUGCACUAUGC GCG GCUGCCAGGU | 15186 |
| 3343 | UCUUUUAUCU G AGAAC | 5847 | GUUCU UGAUG GCAUGCACUAUGC GCG AGAUAAAAGA | 15187 |
| 3357 | ACAACGUGGU G AAGAU | 5848 | AUCUU UGAUG GCAUGCACUAUGC GCG ACCACGUUGU | 15188 |
| 3365 | GUGAAGAUUU G UGAUU | 5849 | AAUCA UGAUG GCAUGCACUAUGC GCG AAAUCUUCAC | 15189 |
| 3367 | GAAGAUUUGU G AUUUU | 5850 | AAAAU UGAUG GCAUGCACUAUGC GCG ACAAAUCUUC | 15190 |
| 3379 | UUUUGGCCUU G CCCGG | 5851 | CCGGG UGAUG GCAUGCACUAUGC GCG AAGGCCAAAA | 15191 |
| 3403 | UAAGAACCCC G AUUAU | 5852 | AUAAU UGAUG GCAUGCACUAUGC GCG GGGGUUCUUA | 15192 |
| 3409 | CCCCGAUUAU G UGAGA | 5853 | UCUCA UGAUG GCAUGCACUAUGC GCG AUAAUCGGGG | 15193 |
| 3411 | CCGAUUAUGU G AGAAA | 5854 | UUUCU UGAUG GCAUGCACUAUGC GCG ACAUAAUCGG | 15194 |
| 3428 | GGAGAUACUC G ACUUC | 5855 | GAAGU UGAUG GCAUGCACUAUGC GCG GAGUAUCUCC | 15195 |
| 3438 | GACUUCCUCU G AAAUG | 5856 | CAUUU UGAUG GCAUGCACUAUGC GCG AGAGGAAGUC | 15196 |
| 3454 | GAUGGCUCCC G AAUCU | 5857 | AGAUU UGAUG GCAUGCACUAUGC GCG GGGAGCCAUC | 15197 |
| 3466 | AUCUAUCUUU G ACAAA | 5858 | UUUGU UGAUG GCAUGCACUAUGC GCG AAAGAUAGAU | 15198 |
| 3490 | CACCAAGAGC G ACGUG | 5859 | CACGU UGAUG GCAUGCACUAUGC GCG GCUCUUGGUG | 15199 |
| 3495 | AGAGCGACGU G UGGUC | 5860 | GACCA UGAUG GCAUGCACUAUGC GCG ACGUGCCUCU | 15200 |
| 3513 | ACGGAGUAUU G CUGUG | 5861 | CACAG UGAUG GCAUGCACUAUGC GCG AAUACUCCGU | 15201 |
| 3516 | GAGUAUUGCU G UGGGA | 5862 | UCCCA UGAUG GCAUGCACUAUGC GCG AGCAAUACUC | 15202 |
| 3568 | ACAAAUGGAU G AGGAC | 5863 | GUCCU UGAUG GCAUGCACUAUGC GCG AUCCAUUUGU | 15203 |
| 3578 | GAGGACUUUU G CAGUC | 5864 | GACUG UGAUG GCAUGCACUAUGC GCG AAAAGUCCUC | 15204 |
| 3584 | UUUUGCAGUC G CCUGA | 5865 | UCAGG UGAUG GCAUGCACUAUGC GCG GACUGCAAAA | 15205 |
| 3588 | GCAGUCGCCU G AGGGA | 5866 | UCCCU UGAUG GCAUGCACUAUGC GCG AGGCGACUGC | 15206 |
| 3600 | GGGAAGGCAU G AGGAU | 5867 | AUCCU UGAUG GCAUGCACUAUGC GCG AUGCCUUCCC | 15207 |
| 3606 | GCAUCAGGAU G AGAGC | 5868 | GCUCU UGAUG GCAUGCACUAUGC GCG AUCCUCAUGC | 15208 |
| 3616 | GAGAGCUCCU G AGUAC | 5869 | CUACU UGAUG GCAUGCACUAUGC GCG AGGAGCUCUC | 15209 |
| 3631 | CUCUACUCCU G AAAUC | 5870 | GAUUU UGAUG GCAUGCACUAUGC GCG AGGAGUAGAG | 15210 |
| 3648 | AUCAGAUCAU G CUGGA | 5871 | UCCAG UGAUG GCAUGCACUAUGC GCG AUGAUCUGAU | 15211 |
| 3656 | AUGCUGGACU G CUGGC | 5872 | GCCAG UGAUG GCAUGCACUAUGC GCG AGUCCAGCAU | 15212 |
| 3691 | GCCAAGAUUU G CAGAA | 5873 | UUCUG UGAUG GCAUGCACUAUGC GCG AAAUCUUGGC | 15213 |
| 3700 | UGCAGAACUU G UGGAA | 5874 | UUCCA UGAUG GCAUGCACUAUGC GCG AAGUUCUGCA | 15214 |
| 3715 | AAAACUAGGU G AUUUG | 5875 | CAAAU UGAUG GCAUGCACUAUGC GCG ACCUAGUUUU | 15215 |
| 3720 | UAGGUGAUUU G CUUCA | 5876 | UGAAG UGAUG GCAUGCACUAUGC GCG AAAUCACCUA | 15216 |
| 3733 | UCAAGCAAAU G UACAA | 5877 | UUGUA UGAUG GCAUGCACUAUGC GCG AUUUGCUUGA | 15217 |
| 3769 | CCCAAUCAAU G CCAUA | 5878 | UAUGG UGAUG GCAUGCACUAUGC GCG AUUGAUUGGG | 15218 |
| 3777 | AUGCCAUACU G ACAGG | 5879 | CCUGU UGAUG GCAUGCACUAUGC GCG AGUAUGGCAU | 15219 |
| 3811 | CUCAACUCCU G CCUUC | 5880 | GAAGG UGAUG GCAUGCACUAUGC GCG AGGAGUUGAG | 15220 |
| 3820 | UGCCUUCUCU G AGGAC | 5881 | GUCCU UGAUG GCAUGCACUAUGC GCG AGAGAAGGCA | 15221 |
| 3852 | UUUCAGCUCC G AAGUU | 5882 | AACUU UGAUG GCAUGCACUAUGC GCG GGAGCUGAAA | 15222 |
| 3874 | AGGAAGCUCU G AUGAU | 5883 | AUCAU UGAUG GCAUGCACUAUGC GCG AGAGCUUCCU | 15223 |
| 3877 | AAGCUCUGAU G AUGUC | 5884 | GACAU UGAUG GCAUGCACUAUGC GCG AUCAGAGCUU | 15224 |
| 3880 | CUCUGAUGAU G UCAGA | 5885 | UCUGA UGAUG GCAUGCACUAUGC GCG AUCAUCAGAG | 15225 |
| 3889 | UGUCAGAUAU G UAAAU | 5886 | AUUUA UGAUG GCAUGCACUAUGC GCG AUAUCUGACA | 15226 |
| 3895 | AUAUGUAAAU G CUUUC | 5887 | GAAAG UGAUG GCAUGCACUAUGC GCG AUUUACAUAU | 15227 |
| 3909 | UCAAGUUCAU G AGCCU | 5888 | AGGCU UGAUG GCAUGCACUAUGC GCG AUGAACUUGA | 15228 |
| 3934 | CAAAACCUUU G AAGAA | 5889 | UUCUU UGAUG GCAUGCACUAUGC GCG AAAGGUUUUG | 15229 |
| 3948 | AACUUUUACC G AAUGC | 5890 | GCAUU UGAUG GCAUGCACUAUGC GCG GGUAAAAGUU | 15230 |
| 3952 | UUUACCGAAU G CCACC | 5891 | GGUGG UGAUG GCAUGCACUAUGC GCG AUUCGGUAAA | 15231 |
| 3963 | CCACCUCCAU G UUUGA | 5892 | UCAAA UGAUG GCAUGCACUAUGC GCG AUGGAGGUGG | 15232 |
| 3967 | CUCCAUGUUU G AUGAC | 5893 | GUCAU UGAUG GCAUGCACUAUGC GCG AAACAUGGAG | 15233 |
| 3970 | CAUGUUUGAU G ACUAC | 5894 | GUAGU UGAUG GCAUGCACUAUGC GCG AUCAAACAUG | 15234 |
| 3982 | CUACCAGGGC G ACAGC | 5895 | GCUGU UGAUG GCAUGCACUAUGC GCG GCCCUGGUAG | 15235 |
| 3996 | GCAGCACUCU G UUGGC | 5896 | GCCAA UGAUG GCAUGCACUAUGC GCG AGAGUGCUGC | 15236 |
| 4011 | CCUCUCCCAU G CUGAA | 5897 | UUCAG UGAUG GCAUGCACUAUGC GCG AUGGGAGAGG | 15237 |
| 4014 | CUCCCAUGCU G AAGCG | 5898 | CGCUU UGAUG GCAUGCACUAUGC GCG AGCAUGGGAG | 15238 |
| 4019 | AUGCUGAAGC G CUUCA | 5899 | UGAAG UGAUG GCAUGCACUAUGC GCG GCUUCAGCAU | 15239 |
| 4033 | CACCUGGACU G ACAGC | 5900 | GCUGU UGAUG GCAUGCACUAUGC GCG AGUCCAGGUG | 15240 |
| 4053 | CCAAGGCCUC G CUCAA | 5901 | UUGAG UGAUG GCAUGCACUAUGC GCG GAGGCCUUGG | 15241 |
| 4063 | GCUCAAGAUU G ACUUG | 5902 | CAAGU UGAUG GCAUGCACUAUGC GCG AAUCUUGAGC | 15242 |
| 4068 | AGAUUGACUU G AGAGU | 5903 | ACUCU UGAUG GCAUGCACUAUGC GCG AAGUCAAUCU | 15243 |
| 4101 | AGUCGGGGCU G UCUGA | 5904 | UCAGA UGAUG GCAUGCACUAUGC GCG AGCCCCGACU | 15244 |
| 4105 | GGGGCUGUCU G AUGUC | 5905 | GACAU UGAUG GCAUGCACUAUGC GCG AGACAGCCCC | 15245 |
| 4108 | GCUGUCUGAU G UCAGC | 5906 | GCUGA UGAUG GCAUGCACUAUGC GCG AUCAGACAGC | 15246 |
| 4127 | CCCAGUUUCU G CCAUU | 5907 | AAUGG UGAUG GCAUGCACUAUGC GCG AGAAACUGGG | 15247 |
| 4139 | CAUUCCAGCU G UGGGC | 5908 | GCCCA UGAUG GCAUGCACUAUGC GCG AGCUGGAAUG | 15248 |
| 4153 | GCACGUCAGC G AAGGC | 5909 | GCCUU UGAUG GCAUGCACUAUGC GCG GCUGACGUGC | 15249 |
| 4163 | GAAGGCAAGC G CAGGU | 5910 | ACCUG UGAUG GCAUGCACUAUGC GCG GCUUGCCUUC | 15250 |
| 4177 | GUUCACCUAC G ACCAC | 5911 | GUGGU UGAUG GCAUGCACUAUGC GCG GUAGGUGAAC | 15251 |
| 4183 | CUACGACCAC G CUGAG | 5912 | CUCAG UGAUG GCAUGCACUAUGC GCG GUGGUCGUAG | 15252 |
| 4186 | CGACCACGCU G AGCUG | 5913 | CAGCU UGAUG GCAUGCACUAUGC GCG AGCGUGGUCG | 15253 |
| 4204 | AAGGAAAAUC G CGUGC | 5914 | GCACG UGAUG GCAUGCACUAUGC GCG GAUUUUCCUU | 15254 |
| 4208 | AAAAUCGCGU G CUGCU | 5915 | AGCAG UGAUG GCAUGCACUAUGC GCG ACGCGAUUUU | 15255 |
| 4211 | AUCGCGUGCU G CUCCC | 5916 | GGGAG UGAUG GCAUGCACUAUGC GCG AGCACGCGAU | 15256 |
| 4218 | GCUGCUCCCC G CCCCC | 5917 | GGGGG UGAUG GCAUGCACUAUGC GCG GGGGAGCAGC | 15257 |
| 4245 | CGGUGGUCCU G UACUC | 5918 | GAGUA UGAUG GCAUGCACUAUGC GCG AGGACCACCG | 15258 |
| 4272 | UCUAGAGUUU G ACACG | 5919 | CGUGU UGAUG GCAUGCACUAUGC GCG AAACUCUAGA | 15259 |
| 4277 | AGUUUGACAC G AAGCC | 5920 | GGCUU UGAUG GCAUGCACUAUGC GCG GUGUCAAACU | 15260 |
| 4301 | AGAAGCACAU G UGUAU | 5921 | AUACA UGAUG GCAUGCACUAUGC GCG AUGUGCUUCU | 15261 |
| 4303 | AAGCACAUGU G UAUUU | 5922 | AAAUA UGAUG GCAUGCACUAUGC GCG ACAUGUGCUU | 15262 |
| 4332 | ACUAGCUUUU G CCAGU | 5923 | ACUGG UGAUG GCAUGCACUAUGC GCG AAAAGCUAGU | 15263 |
| 4343 | CCAGUAUUAU G CAUAU | 5924 | AUAUG UGAUG GCAUGCACUAUGC GCG AUAAUACUGG | 15264 |
| 4386 | GGAGCCAGCU G CUUUU | 5925 | AAAAG UGAUG GCAUGCACUAUGC GCG AGCUGGCUCC | 15265 |
| 4393 | GCUGCUUUUU G UGAUU | 5926 | AAUCA UGAUG GCAUGCACUAUGC GCG AAAAAGCAGC | 15266 |
| 4395 | UGCUUUUUGU G AUUUU | 5927 | AAAAU UGAUG GCAUGCACUAUGC GCG ACAAAAAGCA | 15267 |
| 4410 | UUUUAAUAGU G CUUUU | 5928 | AAAAG UGAUG GCAUGCACUAUGC GCG ACUAUUAAAA | 15268 |
| 4423 | UUUUUUUUUU G ACUAA | 5929 | UUAGU UGAUG GCAUGCACUAUGC GCG AAAAAAAAAA | 15269 |
| 4436 | UAACAAGAAU G UAACU | 5930 | AGUUA UGAUG GCAUGCACUAUGC GCG AUUCUUGUUA | 15270 |
| 4459 | GAGAAAUAGU G ACAAG | 5931 | CUUGU UGAUG GCAUGCACUAUGC GCG ACUAUUUCUC | 15271 |
| 4466 | AGUGACAAGU G AAGAA | 5932 | UUCUU UGAUG GCAUGCACUAUGC GCG ACUUGUCACU | 15272 |
| 4479 | GAACACUACU G CUAAA | 5933 | UUUAG UGAUG GCAUGCACUAUGC GCG AGUAGUGGUC | 15273 |
| 4492 | AAAUCCUCAU G UUACU | 5934 | AGUAA UGAUG GCAUGCACUAUGC GCG AUGAGGAUUU | 15274 |
| 4502 | GUUACUCAGU G UUAGA | 5935 | UCUAA UGAUG GCAUGCACUAUGC GCG ACUGAGUAAC | 15275 |
| 4529 | UAAACCCAAU G ACUUC | 5936 | GAAGU UGAUG GCAUGCACUAUGC GCG AUUGGGUUUA | 15276 |
| 4538 | UGACUUCCCU G CUCCA | 5937 | UGGAG UGAUG GCAUGCACUAUGC GCG AGGGAAGUCA | 15277 |
| 4550 | UCCAACCCCC G CCACC | 5938 | GGUGG UGAUG GCAUGCACUAUGC GCG GGGGGUUGGA | 15278 |
| 4565 | CUCAGGGCAC G CAGGA | 5939 | UCCUG UGAUG GCAUGCACUAUGC GCG GUGCCCUGAG | 15279 |
| 4578 | GGACCAGUUU G AUUGA | 5940 | UCAAU UGAUG GCAUGCACUAUGC GCG AAACUGGUCC | 15280 |
| 4582 | CAGUUUGAUU G AGGAG | 5941 | CUCCU UGAUG GCAUGCACUAUGC GCG AAUCAAACUG | 15281 |
| 4590 | UUGAGGAGCU G CACUG | 5942 | CAGUG UGAUG GCAUGCACUAUGC GCG AGCUCCUCAA | 15282 |
| 4595 | GAGCUGCACU G AUCAC | 5943 | GUGAU UGAUG GCAUGCACUAUGC GCG AGUGCAGCUC | 15283 |
| 4606 | AUCACCCAAU G CAUCA | 5944 | UGAUG UGAUG GCAUGCACUAUGC GCG AUUGGGUGAU | 15284 |
| 4634 | GGCCAGCCCU G CAGCC | 5945 | GGCUG UGAUG GCAUGCACUAUGC GCG AGGGCUGGCC | 15285 |
| 4691 | UGGCUGGCCU G AGCAA | 5946 | UUGCU UGAUG GCAUGCACUAUGC GCG AGGCCAGCCA | 15286 |
| 4730 | CCUAAGACAU G UGAGG | 5947 | CCUCA UGAUG GCAUGCACUAUGC GCG AUGUCUUAGG | 15287 |
| 4732 | UAAGACAUGU G AGGAG | 5948 | CUCCU UGAUG GCAUGCACUAUGC GCG ACAUGUCUUA | 15288 |
| 4792 | GAGAAGGCAU G AGAAA | 5949 | UUUCU UGAUG GCAUGCACUAUGC GCG AUGCCUUCUC | 15289 |
| 4804 | GAAAGAAUUU G AGACG | 5950 | CGUCU UGAUG GCAUGCACUAUGC GCG AAAUUCUUUC | 15290 |
| 4809 | AAUUUGAGAC G CACCA | 5951 | UGGUG UGAUG GCAUGCACUAUGC GCG GUCUCAAAUU | 15291 |
| 4816 | GACGCACCAU G UGGGC | 5952 | GCCCA UGAUG GCAUGCACUAUGC GCG AUGGUGCGUC | 15292 |
| 4847 | GCUCAGCAAU G CCAUU | 5953 | AAUGG UGAUG GCAUGCACUAUGC GCG AUUGCUGAGC | 15293 |
| 4872 | UCCCAGCUCU G ACCCU | 5954 | AGGGU UGAUG GCAUGCACUAUGC GCG AGAGCUGGGA | 15294 |
| 4887 | UUCUACAUUU G AGGGC | 5955 | GCCCU UGAUG GCAUGCACUAUGC GCG AAAUGUAGAA | 15295 |
| 4916 | GAUGGACAGC G AUGAG | 5956 | CUCAU UGAUG GCAUGCACUAUGC GCG GCUGUCCAUC | 15296 |
| 4919 | GGACAGCGAU G AGGGG | 5957 | CCCCU UGAUG GCAUGCACUAUGC GCG AUCGCUGUCC | 15297 |
| 5018 | GUGGUUCUAU G UCCAU | 5958 | AUGGA UGAUG GCAUGCACUAUGC GCG AUAGAACCAC | 15298 |
| 5039 | UUCGUGGCAU G UUUUG | 5959 | CAAAA UGAUG GCAUGCACUAUGC GCG AUGCCACGAA | 15299 |
| 5044 | GGCAUGUUUU G AUUUG | 5960 | CAAAU UGAUG GCAUGCACUAUGC GCG AAAACAUGCC | 15300 |
| 5049 | GUUUUGAUUU G UAGCA | 5961 | UGCUA UGAUG GCAUGCACUAUGC GCG AAAUCAAAAC | 15301 |
| 5057 | UUGUAGCACU G AGGGU | 5962 | ACCCU UGAUG GCAUGCACUAUGC GCG AGUGCUACAA | 15302 |
| 5076 | ACUCAACUCU G AGCCC | 5963 | GGCCU UGAUG GCAUGCACUAUGC GCG AGAGUUGAGU | 15303 |
| 5107 | CUAGUAAGAU G CACUG | 5964 | CAGUG UGAUG GCAUGCACUAUGC GCG AUCUUACUAG | 15304 |
| 5112 | AAGAUGCACU G AAAAC | 5965 | GUUUU UGAUG GCAUGCACUAUGC GCG AGUGCAUCUU | 15305 |
| 5135 | GAGUUAGGUU G UCUCC | 5966 | GGAGA UGAUG GCAUGCACUAUGC GCG AACCUAACUC | 15306 |
| 5148 | UCCAGGCCAU G AUGGC | 5967 | GCCAU UGAUG GCAUGCACUAUGC GCG AUGGCCUGGA | 15307 |
| 5162 | GCCUUACACU G AAAAU | 5968 | AUUUU UGAUG GCAUGCACUAUGC GCG AGUGUAAGGC | 15308 |
| 5168 | CACUGAAAAU G UCACA | 5969 | UGUGA UGAUG GCAUGCACUAUGC GCG AUUUUCAGUG | 15309 |
| 5234 | GUAUUAUUCU G UUUUG | 5970 | CAAAA UGAUG GCAUGCACUAUGC GCG AGAAUAAUAC | 15310 |
| 5239 | AUUCUGUUUU G CACAG | 5971 | CUGUG UGAUG GCAUGCACUAUGC GCG AAAACAGAAU | 15311 |
| 5251 | ACAGUUAGUU G UGAAA | 5972 | UUUCA UGAUG GCAUGCACUAUGC GCG AACUAACUGU | 15312 |
| 5253 | AGUUAGUUGU G AAAGA | 5973 | UCUUU UGAUG GCAUGCACUAUGC GCG ACAACUAACU | 15313 |
| 5264 | AAAGAAAGCU G AGAAG | 5974 | CUUCU UGAUG GCAUGCACUAUGC GCG AGCUUUCUUU | 15314 |
| 5273 | UGAGAAGAAU G AAAAU | 5975 | AUUUU UGAUG GCAUGCACUAUGC GCG AUUCUUCUCA | 15315 |
| 5279 | GAAUGAAAAU G CAGUC | 5976 | GACUG UGAUG GCAUGCACUAUGC GCG AUUUUCAUUC | 15316 |
| 5287 | AUGCAGUCCU G AGGAG | 5977 | CUCCU UGAUG GCAUGCACUAUGC GCG AGGACUGCAU | 15317 |
| 5313 | AUAUCAAAAC G AGGGC | 5978 | GCCCU UGAUG GCAUGCACUAUGC GCG GUUUUGAUAU | 15318 |
| 5320 | AACGAGGGCU G AUGGA | 5979 | UCCAU UGAUG GCAUGCACUAUGC GCG AGCCCUCGUU | 15319 |
| 5469 | ACACUAAUCU G AAAGG | 5980 | CCUUU UGAUG GCAUGCACUAUGC GCG AGAUUAGUGU | 15320 |
| 5477 | CUGAAAGGAU G UGGAA | 5981 | UUCCA UGAUG GCAUGCACUAUGC GCG AUCCUUUCAG | 15321 |
| 5497 | AUUAGCUGGC G CAUAU | 5982 | AUAUG UGAUG GCAUGCACUAUGC GCG GCCAGCUAAU | 15322 |
| 5522 | UAAGCUCCUU G AGUAA | 5983 | UUACU UGAUG GCAUGCACUAUGC GCG AAGGAGCUUA | 15323 |
| 5539 | AAGGUGGUAU G UAAUU | 5984 | AAUUA UGAUG GCAUGCACUAUGC GCG AUACCACCUU | 15324 |
| 5548 | UGUAAUUUAU G CAAGG | 5985 | CCUUG UGAUG GCAUGCACUAUGC GCG AUAAAUUACA | 15325 |
| 5589 | AUUAGUUAAU G AGCCA | 5986 | UGGCU UGAUG GCAUGCACUAUGC GCG AUUAACUAAU | 15326 |
| 5623 | AUUUUCAACU G CUUUG | 5987 | CAAAG UGAUG GCAUGCACUAUGC GCG AGUUGAAAAU | 15327 |
| 5628 | CAACUGCUUU G AAACU | 5988 | AGUUU UGAUG GCAUGCACUAUGC GCG AAAGCAGUUG | 15328 |
| 5635 | UUUGAAACUU G CCUGG | 5989 | CCAGG UGAUG GCAUGCACUAUGC GCG AAGUUUCAAA | 15329 |
| 5646 | CCUGGGGUCU G AGCAU | 5990 | AUGCU UGAUG GCAUGCACUAUGC GCG AGACCCCAGG | 15330 |
| 5652 | GUCUGAGCAU G AUGGG | 5991 | CCCAU UGAUG GCAUGCACUAUGC GCG AUGCUCAGAC | 15331 |
| 5684 | AGGAAAGGGC G CCUAC | 5992 | GUAGG UGAUG GCAUGCACUAUGC GCG GCCCUUUCCU | 15332 |
| 5725 | GCCUUGGAUC G CUAAG | 5993 | CUUAG UGAUG GCAUGCACUAUGC GCG GAUCCAAGGC | 15333 |
| 5739 | AGCUGGCUCU G UUUGA | 5994 | UCAAA UGAUG GCAUGCACUAUGC GCG AGAGCCAGCU | 15334 |
| 5743 | GGCUCUGUUU G AUGCU | 5995 | AGCAU UGAUG GCAUGCACUAUGC GCG AAACAGAGCC | 15335 |
| 5746 | UCUGUUUGAU G CUAUU | 5996 | AAUAG UGAUG GCAUGCACUAUGC GCG AUCAAACAGA | 15336 |
| 5755 | UGCUAUUUAU G CAAGU | 5997 | ACUUG UGAUG GCAUGCACUAUGC GCG AUAAAUAGCA | 15337 |
| 5771 | UAGGGUCUAU G UAUUU | 5998 | AAAUA UGAUG GCAUGCACUAUGC GCG AUAGACCCUA | 15338 |
| 5782 | UAUUUAGGAU G CGCCU | 5999 | AGGCG UGAUG GCAUGCACUAUGC GCG AUCCUAAAUA | 15339 |
| 5784 | UUUAGGAUGC G CCUAC | 6000 | GUAGG UGAUG GCAUGCACUAUGC GCG GCAUCCUAAA | 15340 |
| 5825 | GCCUUGGAUC G CUAAG | 5993 | CUUAG UGAUG GCAUGCACUAUGC GCG GAUCCAAGGC | 15333 |
| 5839 | AGCUGGCUCU G UUUGA | 5994 | UCAAA UGAUG GCAUGCACUAUGC GCG AGAGCCAGCU | 15334 |
| 5843 | GGCUCUGUUU G AUGCU | 5995 | AGCAU UGAUG GCAUGCACUAUGC GCG AAACAGAGCC | 15335 |
| 5846 | UCUGUUUGAU G CUAUU | 5996 | AAUAG UGAUG GCAUGCACUAUGC GCG AUCAAACAGA | 15336 |
| 5855 | UGCUAUUUAU G CAAGU | 5997 | ACUUG UGAUG GCAUGCACUAUGC GCG AUAAAUAGCA | 15337 |
| 5871 | UAGGGUCUAU G UAUUU | 5998 | AAAUA UGAUG GCAUGCACUAUGC GCG AUAGACCCUA | 15338 |
| 5882 | UAUUUAGGAU G UCUGC | 6001 | GCAGA UGAUG GCAUGCACUAUGC GCG AUCCUAAAUA | 15341 |
| 5886 | UAGGAUGUCU G CACCU | 6002 | AGGUG UGAUG GCAUGCACUAUGC GCG AGACAUCCUA | 15342 |
| 5895 | UGCACCUUCU G CAGCC | 6003 | GCCUG UGAUG GCAUGCACUAUGC GCG AGAAGGUGCA | 15343 |
| 5931 | ACAGUGGAUU G CUGCU | 6004 | AGCAG UGAUG GCAUGCACUAUGC GCG AAUCCACUGU | 15344 |
| 5934 | GUGGAUUGCU G CUUCU | 6005 | AGAAG UGAUG GCAUGCACUAUGC GCG AGCAAUCCAC | 15345 |
| 5955 | AGAAGAGUAU G CUUCC | 6006 | GGAAG UGAUG GCAUGCACUAUGC GCG AUACUCUUCU | 15346 |
| 5971 | UUUUAUCCAU G UAAUU | 6007 | AAUUA UGAUG GCAUGCACUAUGC GCG AUGGAUAAAA | 15347 |
| 5982 | UAAUUUAACU G UAGAA | 6008 | UUCUA UGAUG GCAUGCACUAUGC GCG AGUUAAAUUA | 15348 |
| 5991 | UGUAGAACCU G AGCUC | 6009 | GAGCU UGAUG GCAUGCACUAUGC GCG AGGUUCUACA | 15349 |
| 6006 | CUAAGUAACC G AAGAA | 6010 | UUCUU UGAUG GCAUGCACUAUGC GCG GGUUACUUAG | 15350 |
| 6013 | ACCGAAGAAU G UAUGC | 6011 | GCAUA UGAUG GCAUGCACUAUGC GCG AUUCUUCGGU | 15351 |
| 6017 | AAGAAUGUAU G CCUCU | 6012 | AGAGG UGAUG GCAUGCACUAUGC GCG AUACAUUCUU | 15352 |
| 6023 | GUAUGCCUCU G UUCUU | 6013 | AAGAA UGAUG GCAUGCACUAUGC GCG AGAGGCAUAC | 15353 |
| 6031 | CUGUUCUUAU G UGCCA | 6014 | UGGCA UGAUG GCAUGCACUAUGC GCG AUAAGAACAG | 15354 |
| 6033 | GUUCUUAUGU G CCACA | 6015 | UGUGG UGAUG GCAUGCACUAUGC GCG ACAUAAGAAC | 15355 |
| 6044 | CCACAUCCUU G UUUAA | 6016 | UUAAA UGAUG GCAUGCACUAUGC GCG AAGGAUGUGG | 15356 |
| 6059 | AAGGCUCUCU G UAUGA | 6017 | UCAUA UGAUG GCAUGCACUAUGC GCG AGAGAGCCUU | 15357 |
| 6063 | CUCUCUGUAU G AAGAG | 6018 | CUCUU UGAUG GCAUGCACUAUGC GCG AUACAGAGAG | 15358 |
| 6098 | AUUCCCUAGU G AGCCU | 6019 | AGGCU UGAUG GCAUGCACUAUGC GCG ACUAGGGAAU | 15359 |
| 6127 | AGCGGCUUUU G UGGAA | 6020 | UUCCA UGAUG GCAUGCACUAUGC GCG AAAAGCCGCU | 15360 |
| 6230 | ACAAAUCUUU G UUGUU | 6021 | AACAA UGAUG GCAUGCACUAUGC GCG AAAGAUUUCU | 15361 |
| 6233 | AAUCUUUGUU G UUCCU | 6022 | AGGAA UGAUG GCAUGCACUAUGC GCG AACAAAGAUU | 15362 |
| 6254 | UUACACAUAC G CAAAC | 6023 | GUUUG UGAUG GCAUGCACUAUGC GCG GUAUGUGUAA | 15363 |
| 6265 | CAAACCACCU G UGACA | 6024 | UGUCA UGAUG GCAUGCACUAUGC GCG AGGUGGUUUG | 15364 |
| 6267 | AACCACCUGU G ACAGC | 6025 | GCUGU UGAUG GCAUGCACUAUGC GCG ACAGGUGGUU | 15265 |
| 6391 | AGCAAAUAGU G AUAAC | 6026 | GUUAU UGAUG GCAUGCACUAUGC GCG ACUAUUUGCU | 15366 |
| 6413 | AACCUUAGCU G UUCAU | 6027 | AUGAA UGAUG GCAUGCACUAUGC GCG AGCUAAGGUU | 15367 |
| 6419 | AGCUGUUCAU G UCUUG | 6028 | CAAGA UGAUG GCAUGCACUAUGC GCG AUGAACAGCU | 15368 |
| 6424 | UUCAUGUCUU G AUUUC | 6029 | GAAAU UGAUG GCAUGCACUAUGC GCG AAGACAUGAA | 15369 |
| 6504 | CAUUAGAAUU G UUACU | 6030 | AGUAA UGAUG GCAUGCACUAUGC GCG AAUUCUAAUG | 15370 |
| 6532 | ACUCAGGUUU G UAGCA | 6031 | UGCUA UGAUG GCAUGCACUAUGC GCG AAACCUGAGU | 15371 |
| 6543 | UAGCAUACAU G AGUCC | 6032 | GGACU UGAUG GCAUGCACUAUGC GCG AUGUAUGCUA | 15372 |
| 6588 | GAGUCUUAAU G UAGAA | 6033 | UUCUA UGAUG GCAUGCACUAUGC GCG AUUAAGACUC | 15373 |
| 6610 | AUGGAGACUU G UAAUA | 6034 | UAUUA UGAUG GCAUGCACUAUGC GCG AAGUCUCCAU | 15374 |
| 6618 | UUGUAAUAAU G AGCUA | 6035 | UAGCU UGAUG GCAUGCACUAUGC GCG AUUAUUACAA | 15375 |
| 6634 | GUUACAAAGU G CUUGU | 6036 | ACAAG UGAUG GCAUGCACUAUGC GCG ACUUUGUAAC | 15376 |
| 6638 | CAAAGUGCUU G UUCAU | 6037 | AUGAA UGAUG GCAUGCACUAUGC GCG AAGCACUUUG | 15377 |
| 6656 | AAAUAGCACU G AAAAU | 6038 | AUUUU UGAUG GCAUGCACUAUGC GCG AGUGCUAUUU | 15378 |
| 6663 | ACUGAAAAUU G AAACA | 6039 | UGUUU UGAUG GCAUGCACUAUGC GCG AAUUUUCAGU | 15379 |
| 6670 | AUUGAAACAU G AAUUA | 6040 | UAAUU UGAUG GCAUGCACUAUGC GCG AUGUUUCAAU | 15380 |
| 6679 | UGAAUUAACU G AUAAU | 6041 | AUUAU UGAUG GCAUGCACUAUGC GCG AGUUAAUUCA | 15381 |
| 6698 | CCAAUCAUUU G CCAUU | 6042 | AAUGG UGAUG GCAUGCACUAUGC GCG AAAUGAUUGG | 15382 |
| 6707 | UGCCAUUUAU G ACAAA | 6043 | UUUGU UGAUG GCAUGCACUAUGC GCG AUAAAUGGCA | 15383 |
| 6736 | AACAAAGAAC G AGCAC | 6044 | GUGCU UGAUG GCAUGCACUAUGC GCG GUUCUUUGUU | 15384 |
| 6759 | CAGAGUUUCU G AGAUA | 6045 | UAUCU UGAUG GCAUGCACUAUGC GCG AGAAACUCUG | 15385 |
| 6767 | CUGAGAUAAU G UACGU | 6046 | ACGUA UGAUG GCAUGCACUAUGC GCG AUUAUCUCAG | 15386 |
| 6798 | GAAUGGGGCU G AAACC | 6047 | GGUUU UGAUG GCAUGCACUAUGC GCG AGCCCCAUUC | 15387 |
| 6806 | CUGAAACCAU G UGCAA | 6048 | UUGCA UGAUG GCAUGCACUAUGC GCG AUGGUUUCAG | 15388 |
| 6808 | GAAACCAUGU G CAAGU | 6049 | ACUUG UGAUG GCAUGCACUAUGC GCG ACAUGGUUUC | 15389 |
| 6816 | GUGCAAGUCU G UGUCU | 6050 | AGACA UGAUG GCAUGCACUAUGC GCG AGACUUGCAC | 15390 |
| 6818 | GCAAGUCUGU G UCUUG | 6051 | CAAGA UGAUG GCAUGCACUAUGC GCG ACAGACUUGC | 15391 |
| 6823 | UCUGUGUCUU G UCAGU | 6052 | ACUGA UGAUG GCAUGCACUAUGC GCG AAGACACAGA | 15392 |
| 6838 | UCCAAGAAGU G ACACC | 6053 | GGUGU UGAUG GCAUGCACUAUGC GCG ACUUCUUGGA | 15393 |
| 6844 | AAGUGACACC G AGAUG | 6054 | CAUCU UGAUG GCAUGCACUAUGC GCG GGUGUCACUU | 15394 |
| 6849 | ACACCGAGAU G UUAAU | 6055 | AUUAA UGAUG GCAUGCACUAUGC GCG AUCUCGGUGU | 15395 |
| 6868 | AGGGACCCGU G CCUUG | 6056 | CAAGG UGAUG GCAUGCACUAUGC GCG ACGGGUCCCU | 15396 |
| 6873 | CCCGUGCCUU G UUUCC | 6057 | GGAAA UGAUG GCAUGCACUAUGC GCG AAGGCACGGG | 15397 |
| 6893 | CCACAAGAAU G CAAAC | 6058 | GUUUG UGAUG GCAUGCACUAUGC GCG AUUCUUGUGG | 15398 |
| 6914 | ACAGAUACUC G CUAGC | 6059 | GCUAG UGAUG GCAUGCACUAUGC GCG GAGUAUCUGU | 15399 |
| 6932 | CAUUUAAAUU G AUUAA | 6060 | UUAAU UGAUG GCAUGCACUAUGC GCG AAUUUAAAUG | 15400 |
| 6947 | AAGGAGGAGU G CAUCU | 6061 | AGAUG UGAUG GCAUGCACUAUGC GCG ACUCCUCCUU | 15401 |
| 6959 | AUCUUUGGCC G ACAGU | 6062 | ACUGU UGAUG GCAUGCACUAUGC GCG GGCCAAAGAU | 15402 |
| 6968 | CGACAGUGGU G UAACU | 6063 | AGUUA UGAUG GCAUGCACUAUGC GCG ACCACUGUCG | 15403 |
| 6974 | UGGUGUAACU G UGUGU | 6064 | ACACA UGAUG GCAUGCACUAUGC GCG AGUUACACCA | 15404 |
| 6976 | GUGUAACUGU G UGUGU | 6065 | ACACA UGAUG GCAUGCACUAUGC GCG ACAGUUACAC | 15405 |
| 6978 | GUAACUGUGU G UGUGU | 6066 | ACACA UGAUG GCAUGCACUAUGC GCG ACACAGUUAC | 15406 |
| 6980 | AACUGUGUGU G UGUGU | 6067 | ACACA UGAUG GCAUGCACUAUGC GCG ACACACAGUU | 15407 |
| 6982 | CUGUGUGUGU G UGUGU | 6068 | ACACA UGAUG GCAUGCACUAUGC GCG ACACACACAG | 15408 |
| 6984 | GUGUGUGUGU G UGUGU | 6069 | ACACA UGAUG GCAUGCACUAUGC GCG ACACACACAC | 15409 |
| 6986 | GUGUGUGUGU G UGUGU | 6069 | ACACA UGAUG GCAUGCACUAUGC GCG ACACACACAC | 15409 |
| 6988 | GUGUGUGUGU G UGUGU | 6069 | ACACA UGAUG GCAUGCACUAUGC GCG ACACACACAC | 15409 |
| 6990 | GUGUGUGUGU G UGUGU | 6069 | ACACA UGAUG GCAUGCACUAUGC GCG ACACACACAC | 15409 |
| 6992 | GUGUGUGUGU G UGUGU | 6069 | ACACA UGAUG GCAUGCACUAUGC GCG ACACACACAC | 15409 |
| 6994 | GUGUGUGUGU G UGUGU | 6069 | ACACA UGAUG GCAUGCACUAUGC GCG ACACACACAC | 15409 |
| 6996 | GUGUGUGUGU G UGUGU | 6069 | ACACA UGAUG GCAUGCACUAUGC GCG ACACACACAC | 15409 |
| 6998 | GUGUGUGUGU G UGUGU | 6069 | ACACA UGAUG GCAUGCACUAUGC GCG ACACACACAC | 15409 |
| 7000 | GUGUGUGUGU G UGUGU | 6069 | ACACA UGAUG GCAUGCACUAUGC GCG ACACACACAC | 15409 |
| 7002 | GUGUGUGUGU G UGUGU | 6069 | ACACA UGAUG GCAUGCACUAUGC GCG ACACACACAC | 15409 |
| 7004 | GUGUGUGUGU G UGUGU | 6069 | ACACA UGAUG GCAUGCACUAUGC GCG ACACACACAC | 15409 |
| 7006 | GUGUGUGUGU G UGUGU | 6069 | ACACA UGAUG GCAUGCACUAUGC GCG ACACACACAC | 15409 |
| 7008 | GUGUGUGUGU G UGUGU | 6069 | ACACA UGAUG GCAUGCACUAUGC GCG ACACACACAC | 15409 |
| 7010 | GUGUGUGUGU G UGUGG | 6070 | CCACA UGAUG GCAUGCACUAUGC GCG ACACACACAC | 15410 |
| 7012 | GUGUGUGUGU G UGGGU | 6071 | ACCCA UGAUG GCAUGCACUAUGC GCG ACACACACAC | 15411 |
| 7018 | GUGUGUGGGU G UGGGU | 6072 | ACCCA UGAUG GCAUGCACUAUGC GCG ACCCACACAC | 15412 |
| 7024 | GGGUGUGGGU G UAUGU | 6073 | ACAUA UGAUG GCAUGCACUAUGC GCG ACCCACACCC | 19413 |
| 7028 | GUGGGUGUAU G UGUGU | 6074 | ACACA UGAUG GCAUGCACUAUGC GCG AUACACCCAC | 15414 |
| 7030 | GGGUGUAUGU G UGUUU | 6075 | AAACA UGAUG GCAUGCACUAUGC GCG ACAUACACCC | 15415 |
| 7032 | GUGUAUGUGU G UUUUG | 6076 | CAAAA UGAUG GCAUGCACUAUGC GCG ACACAUACAC | 15416 |
| 7037 | UGUGUGUUUU G UGCAU | 6077 | AUGCA UGAUG GCAUGCACUAUGC GCG AAAACACACA | 15417 |
| 7039 | UGUGUUUUGU G CAUAA | 6078 | UUAUG UGAUG GCAUGCACUAUGC GCG ACAAAACACA | 15418 |
| 7099 | AAGAAUAUAU G CUACA | 6079 | UGUAG UGAUG GCAUGCACUAUGC GCG AUAUAUUCUU | 15419 |
| 7146 | UUCUAGUCAU G AUGAA | 6080 | UUCAU UGAUG GCAUGCACUAUGC GCG AUGACUAGAA | 15420 |
| 7149 | UAGUCAUGAU G AAUGU | 6081 | ACAUU UGAUG GCAUGCACUAUGC GCG AUCAUGACUA | 15421 |
| 7153 | CAUGAUGAAU G UAUUU | 6082 | AAAUA UGAUG GCAUGCACUAUGC GCG AUUCAUCAUG | 15422 |
| 7160 | AAUGUAUUUU G UAUAC | 6083 | GUAUA UGAUG GCAUGCACUAUGC GCG AAAAUACAUU | 15423 |
| 7210 | AUUGGGAUUU G UAAUC | 6084 | GAUUA UGAUG GCAUGCACUAUGC GCG AAAUCCCAAU | 15424 |
| 7230 | CAACUUAAUU G AUAAA | 6085 | UUUAU UGAUG GCAUGCACUAUGC GCG AAUUAAGUUG | 15425 |
| 7246 | CUUGGCAACU G CUUUU | 6086 | AAAAG UGAUG GCAUGCACUAUGC GCG AGUUGCCAAG | 15426 |
| 7254 | CUGCUUUUAU G UUCUG | 6087 | CAGAA UGAUG GCAUGCACUAUGC GCG AUAAAAGCAG | 15427 |
| 7259 | UUUAUGUUCU G UCUCC | 6088 | GGAGA UGAUG GCAUGCACUAUGC GCG AGAACAUAAA | 15428 |
| 7343 | AUUUAUCCUU G UUUAC | 6089 | CUAAA UGAUG GCAUGCACUAUGC GCG AAGGAUAAAU | 15429 |
| 7375 | GAAAAACUUU G AAAUG | 6090 | CAUUU UGAUG GCAUGCACUAUGC GCG AAAGUUUUUC | 15430 |
| 7394 | UCAAAAAAUU G CUAAA | 6091 | UUUAG UGAUG GCAUGCACUAUGC GCG AAUUUUUUGA | 15431 |
| 7422 | AAAACUAAAU G UUAGU | 6092 | ACUAA UGAUG GCAUGCACUAUGC GCG AUUUAGUUUU | 15432 |
| 7434 | UAGUUUAGCU G AUUGU | 6093 | ACAAU UGAUG GCAUGCACUAUGC GCG AGCUAAACUA | 15433 |
| 7438 | UUAGCUGAUU G UAUGG | 6094 | CCAUA UGAUG GCAUGCACUAUGC GCG AAUCAGCUAA | 15434 |
| 7451 | UGGGGUUUUC G AACCU | 6095 | AGGUU UGAUG GCAUGCACUAUGC GCG GAAAACCCCA | 15435 |
| 7467 | UUCACUUUUU G UUUGU | 6096 | ACAAA UGAUG GCAUGCACUAUGC GCG AAAAAGUGAA | 15436 |
| 7471 | CUUUUUGUUU G UUUUA | 6097 | UAAAA UGAUG GCAUGCACUAUGC GCG AAACAAAAAG | 15437 |
| 7491 | UUUCACAACU G UGUAA | 6098 | UUACA UGAUG GCAUGCACUAUGC GCG AGUUGUGAAA | 15438 |
| 7493 | UCACAACUGU G UAAAU | 6099 | AUUUA UGAUG GCAUGCACUAUGC GCG ACAGUUGUGA | 15439 |
| 7500 | UGUGUAAAUU G CCAAU | 6100 | AUUGG UGAUG GCAUGCACUAUGC GCG AAUUUACACA | 15440 |
| 7513 | AAUAAUUCCU G UCCAU | 6101 | AUGGA UGAUG GCAUGCACUAUGC GCG AGGAAUUAUU | 15441 |
| 7519 | UCCUGUCCAU G AAAAU | 6102 | AUUUU UGAUG GCAUGCACUAUGC GCG AUGGACAGGA | 15442 |
| 7525 | CCAUGAAAAU G CAAAU | 6103 | AUUUG UGAUG GCAUGCACUAUGC GCG AUUUUCAUGG | 15443 |
| 7539 | AUUAUCCAGU G UAGAU | 6104 | AUCUA UGAUG GCAUGCACUAUGC GCG ACUGGAUAAU | 15444 |
| 7551 | AGAUAUAUUU G ACCAU | 6105 | AUGGU UGAUG GCAUGCACUAUGC GCG AAAUAUAUCU | 15445 |
| 7582 | GGCUAGUUUU G CCUUU | 6106 | AAAGG UGAUG GCAUGCACUAUGC GCG AAAACUAGCC | 15446 |
| 7611 | AUUUCAGCCU G AAUGU | 6107 | ACAUU UGAUG GCAUGCACUAUGC GCG AGGCUGAAAU | 15447 |
| 7615 | CAGCCUGAAU G UCUGC | 6108 | GCAGA UGAUG GCAUGCACUAUGC GCG AUUCAGGCUG | 15448 |
| 7619 | CUGAAUGUCU G CCUAU | 6109 | AUAGG UGAUG GCAUGCACUAUGC GCG AGACAUUCAG | 15449 |
| 7634 | UAUAUUCUCU G CUCUU | 6110 | AAGAG UGAUG GCAUGCACUAUGC GCG AGAGAAUAUA | 15450 |
| 7641 | UCUGCUCUUU G UAUUC | 6111 | GAAUA UGAUG GCAUGCACUAUGC GCG AAAGAGCAGA | 15451 |
| 7653 | AUUCUCCUUU G AACCC | 6112 | GGGUU UGAUG GCAUGCACUAUGC GCG AAAGGAGAAU | 15452 |
| 7672 | AAAACAUCCU G UGGCA | 6113 | UGCCA UGAUG GCAUGCACUAUGC GCG AGGAUGUUUU | 15453 |

[0355] TABLE XV

Human KDR NCH Ribozyme and Target Sequences

| | | | | |
|---|---|---|---|---|
| | | Seq ID | | Seq ID |
| Pos | Target | No | Ribozyme Sequence | No. |

| | | | | |
|---|---|---|---|---|
| 11 | CAAGGUGC U GCUGGCCG | 6114 | CGGCCAGC CUGAUGAGGCCGUUAGGCCGAA ICACCUUG | 15454 |
| 14 | GGUGCUGC U GGCCGUCG | 6115 | CGACGGCC CUGAUGAGGCCGUUAGGCCGAA ICAGCACC | 15455 |
| 18 | CUGCUGGC C GUCGCCCU | 6116 | AGGGCGAC CUGAUGAGGCCGUUAGGCCGAA ICCAGCAG | 15456 |
| 24 | GCCGUCGC C CUGUGGCU | 6117 | AGCCACAG CUGAUGAGGCCGUUAGGCCGAA ICGACGGC | 15457 |
| 25 | CCGUCGCC C UGUGGCUC | 6118 | GAGCCACA CUGAUGAGGCCGUUAGGCCGAA IGCGACGG | 15458 |
| 26 | CGUCGCCC U GUGGCUCU | 6119 | AGAGCCAC CUGAUGAGGCCGUUAGGCCGAA IGGCGACG | 15459 |
| 32 | CCUGUGGC U CUGCGUGG | 6120 | CCACGCAG CUGAUGAGGCCGUUAGGCCGAA ICCACAGG | 15460 |
| 34 | UGUGGCUC U GCGUGGAG | 6121 | CUCCACGC CUGAUGAGGCCGUUAGGCCGAA IAGCCACA | 15461 |
| 45 | GUGGAGAC C CGGGCCGC | 6122 | GCGGCCCG CUGAUGAGGCCGUUAGGCCGAA IUCUCCAC | 15462 |
| 46 | UGGAGACO C GGGCCGCC | 6123 | GGCGGCCC CUGAUGAGGCCGUUAGGCCGAA IGUCUCCA | 15463 |
| 51 | ACCCGGGC C GCCUCUGU | 6124 | ACAGAGGC CUGAUGAGGCCGUUAGGCCGAA ICCCGGGU | 15464 |
| 54 | CGGGCCGC C UCUGUGGG | 6125 | CCCACAGA CUGAUGAGGCCGUUAGGCCGAA ICGGCCCG | 15465 |
| 55 | GGGCCGCC U CUGUGGGU | 6126 | ACCCACAG CUGAUGAGGCCGUUAGGCCGAA IGCGGCCC | 15466 |
| 57 | GCCGCCUC U GUGGGUUU | 6127 | AAACCCAC CUGAUGAGGCCGUUAGGCCGAA IAGGCGGC | 15467 |
| 68 | GGGUUUGC C UAGUGUUU | 6128 | AAACACUA CUGAUGAGGCCGUUAGGCCGAA ICAAACCC | 15468 |
| 69 | GGUUUGCC U AGUGUUUC | 6129 | GAAACACU CUGAUGAGGCCGUUAGGCCGAA IGCAAACC | 15469 |
| 78 | AGUGUUUC U CUUGAUCU | 6130 | AGAUCAAG CUGAUGAGGCCGUUAGGCCGAA IAAACACU | 15470 |
| 80 | UGUUUCUC U UGAUCUGC | 6131 | GCAGAUCA CUGAUGAGGCCGUUAGGCCGAA IAGAAACA | 15471 |
| 86 | UCIUGAUC U GCCCAGGC | 6132 | GCCUGGGC CUGAUGAGGCCGUUAGGCCGAA IAUCAAGA | 15472 |
| 89 | UGAUCUGC C CAGUCUCA | 6133 | UGAGCCUG CUGAUGAGGCCGUUAGGCCGAA ICAGAUCA | 15473 |
| 90 | GAUCUGCC C AGGCUCAG | 6134 | CUGAGCCU CUGAUGAGGCCGUUAGGCCGAA IGCAGAUC | 15474 |
| 91 | AUCUGCCC A GGCUCAGC | 6135 | GCUGAGCC CUGAUGAGGCCGUUAGGCCGAA IGGCAGAU | 15475 |
| 95 | GCCCAGGC U CAGCAUAC | 6136 | GUAUGCUG CUGAUGAGGCCGUUAGGCCGAA ICCUGGGC | 15476 |
| 97 | CCAGGCUC A GCAUACAA | 6137 | UUGUAUGC CUGAUGAGGCCGUUAGGCCGAA IAGCCUGG | 15477 |
| 100 | GGCUCAGC A UACAAAAA | 6138 | UUUUUGUA CUGAUGAGGCCGUUAGGCCGAA ICUGAGCC | 15478 |
| 104 | CAGCAUAC A AAAAGACA | 6139 | UGUCUUUU CUGAUGAGGCCGUUAGGCCGAA IUAUGCUG | 15479 |
| 112 | AAAAAGAC A UACUUACA | 6140 | UGUAAGUA CUGAUGAGGCCGUUAGGCCGAA IUCUUUUU | 15480 |
| 116 | AGACAUAC U UACAAUUA | 6141 | UAAUUGUA CUGAUGAGGCCGUUAGGCCGAA IUAUGUCU | 15481 |
| 120 | AUACUUAC A AUUAAGGC | 6142 | GCCUUAAU CUGAUGAGGCCGUUAGGCCGAA IUAAGUAU | 15482 |
| 129 | AUUAAGGC U AAUACAAC | 6143 | GUUGUAUU CUGAUGAGGCCGUUAGGCCGAA ICCUUAAU | 15483 |
| 135 | GCUAAUAC A ACUCUUCA | 6144 | UGAAGAGU CUGAUGAGGCCGUUAGGCCGAA IUAUUAGC | 15484 |
| 138 | AAUACAAC U CUUCAAAU | 6145 | AUUUGAAG CUGAUGAGGCCGUUAGGCCGAA IUUGUAUU | 15485 |
| 140 | UACAACUC U UCAAAUUA | 6146 | UAAUUUGA CUGAUGAGGCCGUUAGGCCGAA IAGUUGUA | 15486 |
| 143 | AACUCUUC A AAUUACUU | 6147 | AAGUAAUU CUGAUGAGGCCGUUAGGCCGAA IAAGAGUU | 15487 |
| 150 | CAAAUUAC U UGCAGGGG | 6148 | CCCCUGCA CUGAUGAGGCCGUUAGGCCGAA IUAAUUUG | 15488 |
| 154 | UUACUUGC A GGGGACAG | 6149 | CUGUCCCC CUGAUGAGGCCGUUAGGCCGAA ICAAGUAA | 15489 |
| 161 | CAGGGGAC A GAGGGACU | 6150 | AGUCCCUC CUGAUGAGGCCGUUAGGCCGAA IUCCCCUG | 15490 |
| 169 | AGAGGGAC U UGGACUGG | 6151 | CCAGUCCA CUGAUGAGGCCGUUAGGCCGAA IUCCCUCU | 15491 |
| 175 | ACUUGGAC U GGCUUUGG | 6152 | CCAAAGCC CUGAUGAGGCCGUUAGGCCGAA IUCCAAGU | 15492 |
| 179 | GGACUGGC U JUGGCCCA | 6153 | UGGGCCAA CUGAUGAGGCCGUUAGGCCGAA ICCAGUCC | 15493 |
| 185 | GCUUUGGC C CAAUAAUC | 6154 | GAUUAUUG CUGAUGAGGCCGUUAGGCCGAA ICCAAAGC | 15494 |
| 186 | CUUUGGCC C AAUAAUCA | 6155 | UGAUUAUU CUGAUGAGGCCGUUAGGCCGAA IGCCAAAG | 15495 |
| 187 | UUUGGCCC A AUAAUCAG | 6156 | CUGAUUAU CUGAUGAGGCCGUUAGGCCGAA IGGCCAAA | 15496 |
| 194 | CAAUAAUC A GAGUGGCA | 6157 | UGCCACUC CUGAUGAGGCCGUUAGGCCGAA IAUUAUUG | 15497 |
| 202 | AGAGUGGC A GUGAGCAA | 6158 | UUGCUCAC CUGAUGAGGCCGUUAGGCCGAA ICCACUCU | 15498 |
| 209 | CAGUGAGC A AAGGGUGG | 6159 | CCACCCUU CUGAUGAGGCCGUUAGGCCGAA ICUCACUG | 15499 |
| 225 | GAGGUGAC U GAGUGCAG | 6160 | CUGCACUC CUGAUGAGGCCGUUAGGCCGAA IUCACCUC | 15500 |
| 232 | CUGAGUGC A GCGAUGGC | 6161 | GCCAUCGC CUGAUGAGGCCGUUAGGCCGAA ICACUCAG | 15501 |
| 241 | GCGAUGGC C UCUUCUGU | 6162 | ACAGAAGA CUGAUGAGGCCGUUAGGCCGAA ICCAUCGC | 15502 |
| 242 | CGAUGGCC U CUUCUGUA | 6163 | UACAGAAG CUGAUGAGGCCGUUAGGCCGAA IGCCAUCG | 15503 |
| 244 | AUGGCCUC U UCUGUAAG | 6164 | CUUACAGA CUGAUGAGGCCGUUAGGCCGAA IAGGCCAU | 15504 |
| 247 | GCCUCUUC U GUAAGACA | 6165 | UGUCUUAC CUGAUGAGGCCGUUAGGCCGAA IAAGAGGC | 15505 |
| 255 | UGUAAGAC A CUCACAAU | 6166 | AUUGUGAG CUGAUGAGGCCGUUAGGCCGAA IUCUUACA | 15506 |
| 257 | UAAGACAC U CACAAUUC | 6167 | GAAUUGUG CUGAUGAGGCCGUUAGGCCGAA IUGUCUUA | 15507 |
| 259 | AGACACUC A CAAUUCCA | 6168 | UGGAAUUG CUGAUGAGGCCGUUAGGCCGAA IAGUGUCU | 15508 |
| 261 | ACACUCAC A AUUCCAAA | 6169 | UUUGGAAU CUGAUGAGGCCGUUAGGCCGAA IUGAGUGU | 15509 |
| 266 | CACAAUUC C AAAAGUGA | 6170 | UCACUUEU CUGAUGAGGCCGUUAGGCCGAA IAAUUGUG | 15510 |
| 267 | ACAAUUCC A AAAGUGAU | 6171 | AUCACUUU CUGAUGAGGCCGUUAGGCCGAA IGAAUUGU | 15511 |
| 286 | GAAAUGAC A CUGGAGCC | 6172 | GGCUCCAG CUGAUGAGGCCGUUAGGCCGAA IUCAUUUC | 15512 |
| 288 | AAUGACAC U GGAGCCUA | 6173 | UAGGCUCC CUGAUGAGGCCGUUAGGCCGAA IUGUCAUU | 15513 |
| 294 | ACUGGAGC C UACAAGUG | 6174 | CACUUGUA CUGAUGAGGCCGUUAGGCCGAA ICUCCAGU | 15514 |
| 295 | CUGGAGCC U ACAAGUGC | 6175 | GCACUUGU CUGAUGAGGCCGUUAGGCCGAA IGCUCCAG | 15515 |
| 298 | GAGCCUAC A AGUGCUUC | 6176 | GAAGCACU CUGAUGAGGCCGUUAGGCCGAA IUAGGCUC | 15516 |
| 304 | ACAAGUGC U UCUACCGG | 6177 | CCGGUAGA CUGAUGAGGCCGUUAGGCCGAA ICACUUGU | 15517 |
| 307 | AGUGCUUC U ACCGGGAA | 6178 | UUCCCGGU CUGAUGAGGCCGUUAGGCCGAA IAAGCACU | 15518 |
| 310 | GCUUCUAC C GGGAAACU | 6179 | AGUUUCCC CUGAUGAGGCCGUUAGGCCGAA IUAGAAGC | 15519 |
| 318 | CGGGAAAC U GACUUGGC | 6180 | GCCAAGUC CUGAUGAGGCCGUUAGGCCGAA IUUUCCCG | 15520 |
| 322 | AAACUGAC U UGGCCUCG | 6181 | CGAGGCCA CUGAUGAGGCCGUUAGGCCGAA IUCAGUUU | 15521 |
| 327 | GACUUGGC C UCGGUCAU | 6182 | AUGACCGA CUGAUGAGGCCGUUAGGCCGAA ICCAAGUC | 15522 |
| 328 | ACUUGGCC U CGGUCAUU | 6183 | AAUGACCG CUGAUGAGGCCGUUAGGCCGAA IGCCAAGU | 15523 |
| 334 | CCUCGGUC A UUUAUGUC | 6184 | GACAUAAA CUGAUGAGGCCGUUAGGCCGAA IACCGAGG | 15524 |
| 343 | UUUAUGUC U AUGUUCAA | 6185 | UUGAACAU CUGAUGAGGCCGUUAGGCCGAA IACAUAAA | 15525 |
| 350 | CUAUGUUC A AGAUUACA | 6186 | UGUAAUCU CUGAUGAGGCCGUUAGGCCGAA IAACAUAG | 15526 |
| 358 | AAGAUUAC A GAUCUCCA | 6187 | UGGAGAUC CUGAUGAGGCCGUUAGGCCGAA IUAAUCUU | 15527 |
| 363 | UACAGAUC U CCAUUUAU | 6188 | AUAAAUGG CUGAUGAGGCCGUUAGGCCGAA IAUCUGUA | 15528 |
| 365 | CAGAUCUC C AUUUAUUG | 6189 | CAAUAAAU CUGAUGAGGCCGUUAGGCCGAA IAGAUCUG | 15529 |
| 366 | AGAUCUCC A UUUAUUGC | 6190 | GCAAUAAA CUGAUGAGGCCGUUAGGCCGAA IGAGAUCU | 15530 |
| 375 | UUUAUUGC U UCUGUUAG | 6191 | CUAACAGA CUGAUGAGGCCGUUAGGCCGAA ICAAUAAA | 15531 |
| 378 | AUUGCUUC U GUUAGUGA | 6192 | UCACUAAC CUGAUGAGGCCGUUAGGCCGAA IAAGCAAU | 15532 |
| 388 | UUAGUGAC C AACAUGGA | 6193 | UCCAUGUU CUGAUGAGGCCGUUAGGCCGAA IUCACUAA | 15533 |
| 389 | UAGUGACC A ACAUGGAG | 6194 | CUCCAUGU CUGAUGAGGCCGUUAGGCCGAA IGUCACUA | 15534 |
| 392 | UGACCAAC A UGGAGUCG | 6195 | CGACUCCA CUGAUGAGGCCGUUAGGCCGAA IUUGGUCA | 15535 |
| 406 | UCGUGUAC A UUACUGAG | 6196 | CUCAGUAA CUGAUGAGGCCGUUAGGCCGAA IUACACGA | 15536 |
| 411 | UACAUUAC U GAGAACAA | 6197 | UUGUUCUC CUGAUGAGGCCGUUAGGCCGAA IUAAUGUA | 15537 |
| 418 | CUGAGAAC A AAAACAAA | 6198 | UTUGUUUU CUGAUGAGGCCGUUAGGCCGAA IUUCUCAG | 15538 |
| 424 | ACAAAAAC A AAACUGUG | 6199 | CACAGUUU CUGAUGAGGCCGUUAGGCCGAA IUUUUUGU | 15539 |
| 429 | AACAAAAC U GUGGUGAU | 6200 | AUCACCAC CUGAUGAGGCCGUUAGGCCGAA IUUUUGUU | 15540 |
| 440 | GGUGAUUC C AUGUCUCG | 6201 | CGAGACAU CUGAUGAGGCCGUUAGGCCGAA IAAUCACC | 15541 |
| 441 | GUGAUUCC A UGUCUCGG | 6202 | CCGAGACA CUGAUGAGGCCGUUAGGCCGAA IGAAUCAC | 15542 |
| 446 | UCCAUGUC U CGGGUCCA | 6203 | UGGACCCG CUGAUGAGGCCGUUAGGCCGAA IACAUGGA | 15543 |
| 453 | CUCGGGUC C AUUUCAAA | 6204 | UUUGAAAU CUGAUGAGGCCGUUAGGCCGAA IACCCGAG | 15544 |
| 454 | UCGGGUCC A UUUCAAAU | 6205 | AUUUGAAA CUGAUGAGGCCGUUAGGCCGAA IGACCCGA | 15545 |
| 459 | UCCAUUUC A AAUCUCAA | 6206 | UUGAGAUU CUGAUGAGGCCGUUAGGCCGAA IAAAUGGA | 15546 |
| 464 | UUCAAAUC U CAACGUGU | 6207 | ACACGUUG CUGAUGAGGCCGUUAGGCCGAA IAUUUGAA | 15547 |
| 466 | CAAAUCUC A ACGUGUCA | 6208 | UGACACGU CUGAUGAGGCCGUUAGGCCGAA IAGAUUUG | 15548 |
| 474 | AACGUGUC A CUUUGUGC | 6209 | GCACAAAG CUGAUGAGGCCGUUAGGCCGAA IACACGUU | 15549 |
| 476 | CGUGUCAC U UUGUGCAA | 6210 | UUGCACAA CUGAUGAGGCCGUUAGGCCGAA IUGACACG | 15550 |
| 483 | CUUUGUGC A AGAUACCC | 6211 | GGGUAUCU CUGAUGAGGCCGUUAGGCCGAA ICACAAAG | 15551 |
| 490 | CAAGAUAC C CAGAAAAG | 6212 | CUUUUCUG CUGAUGAGGCCGUUAGGCCGAA ICAUCCUG | 15552 |
| 491 | AAGAUACC C AGAAAAGA | 6213 | UCUUUUCU CUGAUGAGGCCGUUAGGCCGAA IGUAUCUU | 15553 |
| 492 | AGAUACCC A GAAAAGAG | 6214 | CUCUUUUC CUGAUGAGGCCGUUAGGCCGAA IGGUAUCU | 15554 |
| 509 | AUUUGUUC C UGAUGGUA | 6215 | UACCAUCA CUGAUGAGGCCGUUAGGCCGAA IAACAAAU | 15555 |
| 510 | UUUGUUCC U GAUGGUAA | 6216 | UUACCAUC CUGAUGAGGCCGUUAGGCCGAA IGAACAAA | 15556 |
| 520 | AUGGUAAC A GAAUUUCC | 6217 | GGAAAUUC CUGAUGAGGCCGUUAGGCCGAA IUUACCAU | 15557 |
| 528 | AGAAUUUC C UGGGACAG | 6218 | CUGUCCCA CUGAUGAGGCCGUUAGGCCGAA IAAAUUCU | 15558 |
| 529 | GAAUUUCC U GGGACAGC | 6219 | GCUGUCCC CUGAUGAGGCCGUUAGGCCGAA IGAAAUUC | 15559 |
| 535 | CCUGGGAC A GCAAGAAG | 6220 | CUUCUUGC CUGAUGAGGCCGUUAGGCCGAA IUCCCAGG | 15560 |
| 538 | GGGACAGC A AGAAGGGC | 6221 | GCCCUUCU CUGAUGAGGCCGUUAGGCCGAA ICUGUCCC | 15561 |
| 547 | AGAAGGGC U UUACUAUU | 6222 | AAUAGUAA CUGAUGAGGCCGUUAGGCCGAA ICCCUUCU | 15562 |
| 552 | GGCUUUAC U AUUCCCAG | 6223 | CUGGGAAU CUGAUGAGGCCGUUAGGCCGAA IUAAAGCC | 15563 |
| 557 | UACUAUUC C CAGCUACA | 6224 | UGUAGCUG CUGAUGAGGCCGUUAGGCCGAA IAAUAGUA | 15564 |
| 558 | ACUAUUCC C AGCUACAU | 6225 | AUGUAGCU CUGAUGAGGCCGUUAGGCCGAA IGAAUAGU | 15565 |
| 559 | CUAUUCCC A GCUACAUG | 6226 | CAUGUAGC CUGAUGAGGCCGUUAGGCCGAA IGGAAUAG | 15566 |
| 562 | UUCCCAGC U ACAUGAUC | 6227 | GAUCAUGU CUGAUGAGGCCGUUAGGCCGAA ICUGGGAA | 15567 |
| 565 | CCAGCUAC A UGAUCAGC | 6228 | GCUGAUCA CUGAUGAGGCCGUUAGGCCGAA IUAGCUGG | 15568 |
| 571 | ACAUGAUC A GCUAUGCU | 6229 | AGCAUAGC CUGAUGAGGCCGUUAGGCCGAA IAUCAUGU | 15569 |
| 574 | UGAUCAGC U AUGCUGGC | 6230 | GCCAGCAU CUGAUGAGGCCGUUAGGCCGAA ICUGAUCA | 15570 |
| 579 | AGCUAUGC U GGCAUGGU | 6231 | ACCAUGCC CUGAUGAGGCCGUUAGGCCGAA ICAUAGCU | 15571 |
| 583 | AUGCUGGC A UGGUCUUC | 6232 | GAAGACCA CUGAUGAGGCCGUUAGGCCGAA ICCAGCAU | 15572 |
| 589 | GCAUGGUC U UCUGUGAA | 6233 | UUCACAGA CUGAUGAGGCCGUUAGGCCGAA IACCAUGC | 15573 |
| 592 | UGGUCUUC U GUGAAGCA | 6234 | UGCUUCAC CUGAUGAGGCCGUUAGGCCGAA IAAGACCA | 15574 |
| 600 | UGUGAAGC A AAAAUUAA | 6235 | UUAAUUUU CUGAUGAGGCCGUUAGGCCGAA ICUUCACA | 15575 |
| 622 | AAAGUUAC C AGUCUAUU | 6236 | AAUAGACU CUGAUGAGGCCGUUAGGCCGAA IUAACUUU | 15576 |
| 623 | AAGUUACC A GUCUAUUA | 6237 | UAAUAGAC CUGAUGAGGCCGUUAGGCCGAA IGUAACUU | 15577 |
| 627 | UACCAGUC U AUUAUGUA | 6238 | UACAUAAU CUGAUGAGGCCGUUAGGCCGAA IACUGGUA | 15578 |
| 637 | UUAUGUAC A UAGUUGUC | 6239 | GACAACUA CUGAUGAGGCCGUUAGGCCGAA IUACAUAA | 15579 |
| 677 | UGUGGUUC U GAGUCCGU | 6240 | ACGGACUC CUGAUGAGGCCGUUAGGCCGAA IAACCACA | 15580 |
| 683 | UCUGAGUC C GUCUCAUG | 6241 | CAUGAGAC CUGAUGAGGCCGUUAGGCCGAA IACUCAGA | 15581 |
| 687 | AGUCCGUC U CAUGGAAU | 6242 | AUUCCAUG CUGAUGAGGCCGUUAGGCCGAA IACGGACU | 15582 |
| 689 | UCCGUCUC A UGGAAUUG | 6243 | CAAUUCCA CUGAUGAGGCCGUUAGGCCGAA IAGACGGA | 15583 |
| 701 | AAUUGAAC U AUCUGUUG | 6244 | CAACAGAU CUGAUGAGGCCGUUAGGCCGAA IUUCAAUU | 15584 |
| 705 | GAACUAUC U GUUGGAGA | 6245 | UCUCCAAC CUGAUGAGGCCGUUAGGCCGAA IAUAGUUC | 15585 |
| 719 | AGAAAAGC U UGUCUUAA | 6246 | UUAAGACA CUGAUGAGGCCGUUAGGCCGAA ICUUUUCU | 15586 |
| 724 | AGCUUGUC U UAAAUUGU | 6247 | ACAAUUUA CUGAUGAGGCCGUUAGGCCGAA IACAAGCU | 15587 |
| 735 | AAUUGUAC A GCAAGAAC | 6248 | GUUCUUGC CUGAUGAGGCCGUUAGGCCGAA IUACAAUU | 15588 |
| 738 | UGUACAGC A AGAACUGA | 6249 | UCAGUUCU CUGAUGAGGCCGUUAGGCCGAA ICUGUACA | 15589 |
| 744 | GCAAGAAC U GAACUAAA | 6250 | UUUAGUUC CUGAUGAGGCCGUUAGGCCGAA IUUCUUGC | 15590 |
| 749 | AACUGAAC U AAAUGUGG | 6251 | CCACAUUU CUGAUGAGGCCGUUAGGCCGAA IUUCAGUU | 15591 |
| 766 | GGAUUGAC U UCAACUGG | 6252 | CCAGUUGA CUGAUGAGGCCGUUAGGCCGAA IUCAAUCC | 15592 |
| 769 | UUGACUUC A ACUGGGAA | 6253 | UUCCCAGU CUGAUGAGGCCGUUAGGCCGAA IAAGUCAA | 15593 |
| 772 | ACUUCAAC U GGGAAUAC | 6254 | GUAUUCCC CUGAUGAGGCCGUUAGGCCGAA IUUGAAGU | 15594 |
| 781 | GGGAAUAC C CUUCUUCG | 6255 | CGAAGAAG CUGAUGAGGCCGUUAGGCCGAA IUAUUCCC | 15595 |
| 782 | GGAAUACC C UUCUUCGA | 6256 | UCGAAGAA CUGAUGAGGCCGUUAGGCCGAA IGUAUUCC | 15596 |
| 783 | GAAUACCC U UCUUCGAA | 6257 | UUCGAAGA CUGAUGAGGCCGUUAGGCCGAA IGGUAUUC | 15597 |
| 786 | UACCCUUC U UCGAAGCA | 6258 | UGCUUCGA CUGAUGAGGCCGUUAGGCCGAA IAAGGGUA | 15598 |
| 794 | UUCGAAGC A UCAGCAUA | 6259 | UAUGCUGA CUGAUGAGGCCGUUAGGCCGAA ICUUCGAA | 15599 |
| 797 | GAAGCAUC A GCAUAAGA | 6260 | UCUUAUGC CUGAUGAGGCCGUUAGGCCGAA IAUGCUUC | 15600 |
| 800 | GCAUCAGC A UAAGAAAC | 6261 | GUUUCUUA CUGAUGAGGCCGUUAGGCCGAA ICUGAUGC | 15601 |
| 809 | UAAGAAAC U UGUAAACC | 6262 | GGUUUACA CUGAUGAGGCCGUUAGGCCGAA IUUUCUUA | 15602 |
| 817 | UUGUAAAC C CAGACCUA | 6263 | UAGGUCUC CUGAUGAGGCCGUUAGGCCGAA IUUUACAA | 15603 |
| 823 | ACCGAGAC C UAAAAACC | 6264 | GGUUUUUA CUGAUGAGGCCGUUAGGCCGAA IUCUCGGU | 15604 |
| 824 | CCGAGACC U AAAAACCC | 6265 | GGGUUUUU CUGAUGAGGCCGUUAGGCCGAA IGUCUCGG | 15605 |
| 831 | CUAAAAAC C CAGUCUGG | 6266 | CCAGACUG CUGAUGAGGCCGUUAGGCCGAA IUUUUUAG | 15606 |
| 832 | UAAAAACC C AGUCUGGG | 6267 | CCCAGACU CUGAUGAGGCCGUUAGGCCGAA IGUUUUUA | 15607 |
| 833 | AAAAACCC A GUCUGGGA | 6268 | UCCCAGAC CUGAUGAGGCCGUUAGGCCGAA IGGUUUUU | 15608 |
| 837 | ACCCAGUC U GGGAGUGA | 6269 | UCACUCCC CUGAUGAGGCCGUUAGGCCGAA IACUGGGU | 15609 |
| 865 | UUUUGAGC A CCUUAACU | 6270 | AGUUAAGG CUGAUGAGGCCGUUAGGCCGAA ICUCAAAA | 15610 |
| 867 | UUGAGCAC C UUAACUAU | 6271 | AUAGUUAA CUGAUGAGGCCGUUAGGCCGAA IUGCUCAA | 15611 |
| 868 | UGAGCACC U UAACUAUA | 6272 | UAUAGUUA CUGAUGAGGCCGUUAGGCCGAA IGUGCUCA | 15612 |
| 873 | ACCUUAAC U AUAGAUGG | 6273 | CCAUCUAU CUGAUGAGGCCGUUAGGCCGAA IUUAAGGU | 15613 |
| 888 | GGUGUAAC C CGGAGUGA | 6274 | UCACUCCG CUGAUGAGGCCGUUAGGCCGAA IUUACACC | 15614 |
| 889 | GUGUAACC C CGAGUGAC | 6275 | GUCACUCC CUGAUGAGGCCGUUAGGCCGAA IGUUACAC | 15615 |
| 898 | GGAGUGAC C AAGGAUUG | 6276 | CAAUCCUU CUGAUGAGGCCGUUAGGCCGAA IUCACUCC | 15616 |
| 899 | GAGUGACC A AGGAUUGU | 6277 | ACAAUCCU CUGAUGAGGCCGUUAGGCCGAA ICUCACUC | 15617 |
| 910 | GAUUGUAC A CCUGUGCA | 6278 | UGCACAGG CUGAUGAGGCCGUUAGGCCGAA IUACAAUC | 15618 |
| 912 | UUGUACAC C UGUGCAGC | 6279 | GCUGCACA CUGAUGAGGCCGUUAGGCCGAA IUGUACAA | 15619 |
| 913 | UGUACACC U GUGCAGCA | 6280 | UGCUGCAC CUGAUCAGGCCGUUAGGCCGAA IGUGUACA | 15620 |
| 918 | ACCUGUGC A GCAUCCAG | 6281 | CUGGAUGC CUGAUGAGGCCGUUAGGCCGAA ICACAGGU | 15621 |
| 921 | UGUGCAGC A UCCAGUGG | 6282 | CCACUGGA CUGAUGAGGCCGUUAGGCCGAA ICUGCACA | 15622 |
| 924 | GCAGCAUC C AGUGGGCU | 6283 | AGCCCACU CUGAUGAGGCCGUUAGGCCGAA IAUGCUGC | 15623 |
| 925 | CAGCAUCC A GUGGGCUG | 6284 | CAGCCCAC CUGAUGAGGCCGUUAGGCCGAA IGAUGCUG | 15624 |
| 932 | CAGUGGGC U GAUGACCA | 6285 | UGGUCAUC CUGAUGAGGCCGUUAGGCCGAA ICCCACUG | 15625 |
| 939 | CUGAUGAC C AAGAAGAA | 6286 | UUCUUCUU CUGAUGAGGCCGUUAGGCCGAA IUCAUCAG | 15626 |
| 940 | UGAUGACC A AGAAGAAC | 6287 | GUUCUUCU CUGAUGAGGCCGUUAGGCCGAA IGUCAUCA | 15627 |
| 949 | AGAAGAAC A GCACAUUU | 6288 | AAAUGUGC CUGAUGAGGCCGUUAGGCCGAA IUUCUUCU | 15628 |
| 952 | AGAACAGC A CAUUUGUC | 6289 | GACAAAUG CUGAUGAGGCCGUUAGGCCGAA ICUGUUCU | 15629 |
| 954 | AACAGCAC A UUUGUCAG | 6290 | CUGACAAA CUGAUGAGGCCGUUAGGCCGAA IUGCUGUU | 15630 |
| 961 | CAUUUGUC A GGGUCCAU | 6291 | AUGGACCC CUGAUGAGGCCGUUAGGCCGAA IACAAAUG | 15631 |
| 967 | UCAGGGUC C AUGAAAAA | 6292 | UUUUUCAU CUGAUGAGGCCGUUAGGCCGAA IACCCUGA | 15632 |
| 968 | CAGGGUCC A UGAAAAAC | 6293 | GUUUUUCA CUGAUGAGGCCGUUAGGCCGAA IGACCCUG | 15633 |
| 977 | UGAAAAAC C UUUUGUUG | 6294 | CAACAAAA CUGAUGAGGCCGUUAGGCCGAA IUUUUUCA | 15634 |
| 978 | GAAAAACC U UUUGUUGC | 6295 | GCAACAAA CUGAUGAGGCCGUUAGGCCGAA IGUUUUUC | 15635 |
| 987 | UUUGUUGC U UUUGGAAG | 6296 | CUUCCAAA CUGAUGAGGCCGUUAGGCCGAA ICAACAAA | 15636 |
| 1000 | GAAGUGGC A UGGAAUCU | 6297 | AGAUUCCA CUGAUGAGGCCGUUAGGCCGAA ICCACUUC | 15637 |
| 1008 | AUGGAAUC U CUGGUGGA | 6298 | UCCACCAG CUGAUGAGGCCGUUAGGCCGAA IAUUCCAU | 15638 |
| 1010 | GGAAUCUC U GGUGGAAG | 6299 | CUUCCACC CUGAUGAGGCCGUUAGGCCGAA IAGAUUCC | 15639 |
| 1020 | GUGGAAGC C ACGGUGGG | 6300 | CCCACCGU CUGAUGAGGCCGUUAGGCCGAA ICUUCCAC | 15640 |
| 1021 | UGGAAGCC A CGGUGGGG | 6301 | CCCCACCG CUGAUGAGGCCGUUAGGCCGAA IGCUUCCA | 15641 |
| 1039 | AGCGUGUC A GAAUCCCU | 6302 | AGGGAUUC CUGAUGAGGCCGUUAGGCCGAA IACACGCU | 15642 |
| 1045 | UCAGAAUC C CUGCGAAG | 6303 | CUUCGCAG CUGAUGAGGCCGUUAGGCCGAA IAUUCUGA | 15643 |
| 1046 | CAGAAUCC C UGCGAAGU | 6304 | ACUUCGCA CUGAUGAGGCCGUUAGGCCGAA IGAUUCUG | 15644 |
| 1047 | AGAAUCCC U GCGAAGUA | 6305 | UACUUCGC CUGAUGAGGCCGUUAGGCCGAA IGGAUUCU | 15645 |
| 1057 | CGAAGUAC C UUGGUUAC | 6306 | GUAACCAA CUGAUGAGGCCGUUAGGCCGAA IUACUUCG | 15646 |
| 1058 | GAAGUACC U UGGUUACC | 6307 | GGUAACCA CUGAUGAGGCCGUUAGGCCGAA IGUACUUC | 15647 |
| 1066 | UUGGUUAC C CACCCCCA | 6308 | UGGGGGUG CUGAUGAGGCCGUUAGGCCGAA IUAACCAA | 15648 |
| 1067 | UGGUUACC C ACCCCCAG | 6309 | CUGGGGGU CUGAUGAGGCCGUUAGGCCGAA IGUAACCA | 15649 |
| 1068 | GGUUACCC A CCCCCAGA | 6310 | UCUGGGGG CUGAUGAGGCCGUUAGGCCGAA IGGUAACC | 15650 |
| 1070 | UUACCCAC C CCCAGAAA | 6311 | UUUCUGGG CUGAUGAGGCCGUUAGGCCGAA IUGGGUAA | 15651 |
| 1071 | UACCCACC C CCAGAAAU | 6312 | AUUUCUGG CUGAUGAGGCCGUUAGGCCGAA IGUGGGUA | 15652 |
| 1072 | ACCCACCC C CAGAAAUA | 6313 | UAUUUCUG CUGAUGAGGCCGUUAGGCCGAA IGGUGGGU | 15653 |
| 1073 | CCCACCCC C AGAAAUAA | 6314 | UUAUUUCU CUGAUGAGGCCGUUAGGCCGAA IGGGUGGG | 15654 |
| 1074 | CCACCCCC A GAAAUAAA | 6315 | UUUAUUUC CUGAUGAGGCCGUUAGGCCGAA IGGGGUGG | 15655 |
| 1103 | UGGAAUAC C CCUUGAGU | 6316 | ACUCAAGG CUGAUGAGGCCGUUAGGCCGAA IUAUUCCA | 15656 |
| 1104 | GGAAUACC C CUUGAGUC | 6317 | GACUCAAG CUGAUGAGGCCGUUAGGCCGAA IGUAUUCC | 15657 |
| 1105 | GAAUACCC C UUGAGUCC | 6318 | GGACUCAA CUGAUGAGGCCGUUAGGCCGAA IGGUAUUC | 15658 |
| 1106 | AAUACCCC U UGAGUCCA | 6319 | UGGACUCA CUGAUGAGGCCGUUAGGCCGAA IGGGUAUU | 15659 |
| 1113 | CUUGAGUC C AAUCACAC | 6320 | GUGUGAUU CUGAUGAGGCCGUUAGGCCGAA IACUCAAG | 15660 |
| 1114 | UUGAGUCC A AUCACACA | 6321 | UGUGUGAU CUGAUGAGGCCGUUAGGCCGAA IGACUCAA | 15661 |
| 1118 | GUCCAAUC A CACAAUUA | 6322 | UAAUUGUG CUGAUGAGGCCGUUAGGCCGAA IAUUGGAC | 15662 |
| 1120 | CCAAUCAC A CAAUUAAA | 6323 | UUUAAUUG CUGAUGAGGCCGUUAGGCCGAA IUGAUUGG | 15663 |
| 1122 | AAUCACAC A AUUAAAGC | 6324 | GCUUUAAU CUGAUGAGGCCGUUAGGCCGAA IUGUGAUU | 15664 |
| 1136 | AGCGGGGC A UGUACUGA | 6325 | UCAGUACA CUGAUGAGGCCGUUAGGCCGAA ICCCCGCU | 15665 |
| 1142 | GCAUGUAC U GACGAUUA | 6326 | UAAUCGUC CUGAUGAGGCCGUUAGGCCGAA IUACAUGC | 15666 |
| 1171 | AAAGAGAC A CAGGAAAU | 6327 | AUUUCCUG CUGAUGAGGCCGUUAGGCCGAA IUCUCUUU | 15667 |
| 1173 | AGAGACAC A GGAAAUUA | 6328 | UAAUUUCC CUGAUGAGGCCGUUAGGCCGAA IUGUCUCU | 15668 |
| 1183 | GAAAUUAC A CUGUCAUC | 6329 | GAUGACAG CUGAUGAGGCCGUUAGGCCGAA IUAAUUUC | 15669 |
| 1185 | AAUUACAC U GUCAUCCU | 6330 | AGGAUGAC CUGAUGAGGCCGUUAGGCCGAA IUGUAAUU | 15670 |
| 1189 | ACACUGUC A UCCUUACC | 6331 | GGUAAGGA CUGAUGAGGCCGUUAGGCCGAA IACAGUGU | 15671 |
| 1192 | CUGUCAUC C UUACCAAU | 6332 | AUUGGUAA CUGAUGAGGCCGUUAGGCCGAA IAUGACAG | 15672 |
| 1193 | UGUCAUCC U UACCAAUC | 6333 | GAUUGGUA CUGAUGAGGCCGUUAGGCCGAA IGAUGACA | 15673 |
| 1197 | AUCCUUAC C AAUCCCAU | 6334 | AUGGGAUU CUGAUGAGGCCGUUAGGCCGAA IUAAGGAU | 15674 |
| 1198 | UCCUUACC A AUCCCAUU | 6335 | AAUGGGAU CUGAUGAGGCCGUUAGGCCGAA IGUAAGGA | 15675 |
| 1202 | UACCAAUC C CAUUUCAA | 6336 | UUGAAAUG CUGAUGAGGCCGUUAGGCCGAA IAUUGGUA | 15676 |
| 1203 | ACCAAUCC C AUUUCAAA | 6337 | UUUGAAAU CUGAUGAGGCCGUUAGGCCGAA IGAUUGGU | 15677 |
| 1204 | CCAAUCCC A UUUCAAAG | 6338 | CUUUGAAA CUGAUGAGGCCGUUAGGCCGAA IGGAUUGG | 15678 |
| 1209 | CCCAUUUC A AAGGAGAA | 6339 | UUCUCCUU CUGAUGAGGCCGUUAGGCCGAA IAAAUGGG | 15679 |
| 1220 | GGAGAAGC A GAGCCAUG | 6340 | CAUGGCUC CUGAUGAGGCCGUUAGGCCGAA ICUUCUCC | 15680 |
| 1225 | AGCAGAGC C AUGUGGUC | 6341 | GACCACAU CUGAUGAGGCCGUUAGGCCGAA ICUCUGCU | 15681 |
| 1226 | GCAGAGCC A UGUGGUCU | 6342 | AGACCACA CUGAUGAGGCCGUUAGGCCGAA IGCUCUGC | 15682 |
| 1234 | AUGUGGUC U CUCUGGUU | 6343 | AACCAGAG CUGAUGAGGCCGUUAGGCCGAA IACCACAU | 15683 |
| 1236 | GUGGUCUC U CUGGUUGU | 6344 | ACAACCAG CUGAUGAGGCCGUUAGGCCGAA IAGACCAC | 15684 |
| 1238 | GGUCUCUC U GGUUGUGU | 6345 | ACACAACC CUGAUGAGGCCGUUAGGCCGAA IAGAGACC | 15685 |
| 1252 | UGUAUGUC C CACCCCAG | 6346 | CUGGGGUG CUGAUGAGGCCGUUAGGCCGAA IACAUACA | 15686 |
| 1253 | GUAUGUCC C ACCCCAGA | 6347 | UCUGGGGU CUGAUGAGGCCGUUAGGCCGAA IGACAUAC | 15687 |
| 1254 | UAUGUCCC A CCCCAGAU | 6348 | AUCUGGGG CUGAUGAGGCCGUUAGGCCGAA IGGACAUA | 15688 |
| 1256 | UGUCCCAC C CCAGAUUG | 6349 | CAAUCUGG CUGAUGAGGCCGUUAGGCCGAA IUGGGACA | 15689 |
| 1257 | GUCCCACC C CAGAUUGG | 6350 | CCAAUCUG CUGAUGAGGCCGUUAGGCCGAA IGUGGGAC | 15690 |
| 1258 | UCCCACCC C AGAUUGGU | 6351 | ACCAAUCU CUGAUGAGGCCGUUAGGCCGAA IGGUGGGA | 15691 |
| 1259 | CCCACCCC A GAUUGGUG | 6352 | CACCAAUC CUGAUGAGGCCGUUAGGCCGAA IGGGUGUG | 15692 |
| 1275 | GAGAAAUC U CUAAUCUC | 6353 | GAGAUUAG CUGAUGAGGCCGUUAGGCCGAA IAUUUCUC | 15693 |
| 1277 | GAAAUCUC U AAUCUCUC | 6354 | GAGAGAUU CUGAUGAGGCCGUUAGGCCGAA IAGAUUUC | 15694 |
| 1282 | CUCUAAUC U CUCCUGUG | 6355 | CACAGGAG CUGAUGAGGCCGUUAGGCCGAA IAUUAGAG | 15695 |
| 1284 | CUAAUCUC U CCUGUGGA | 6356 | UCCACAGG CUGAUGAGGCCGUUAGGCCGAA IAGAUUAG | 15696 |
| 1286 | AAUCUCUC C UGUGGAUU | 6357 | AAUCCACA CUGAUGAGGCCGUUAGGCCGAA IAGAGAUU | 15697 |
| 1287 | AUCUCUCC U GUGGAUUC | 6358 | GAAUCCAC CUGAUGAGGCCGUUAGGCCGAA IGAGAGAU | 15698 |
| 1296 | GUGGAUUC C UACCAGUA | 6359 | UACUGGUA CUGAUGAGGCCGUUAGGCCGAA IAAUCCAC | 15699 |
| 1297 | UGGAUUCC U ACCAGUAC | 6360 | GUACUGGU CUGAUGAGGCCGUUAGGCCGAA IGAAUCCA | 15700 |
| 1300 | AUUCCUAC C AGUACGGC | 6361 | GCCGUACU CUGAUGAGGCCGUUAGGCCGAA IUAGGAAU | 15701 |
| 1301 | UUCCUACC A GUACGGCA | 6362 | UGCCGUAC CUGAUGAGGCCGUUAGGCCGAA IGUAGGAA | 15702 |
| 1309 | AGUACGGC A CCACUCAA | 6363 | UUGAGUGG CUGAUGAGGCCGUUAGGCCGAA ICCGUACU | 15703 |
| 1311 | UACGGCAC C ACUCAAAC | 6364 | GUUUGAGU CUGAUGAGGCCGUUAGGCCGAA IUGCCGUA | 15704 |
| 1312 | ACGGCACC A CUCAAACG | 6365 | CGUUUGAG CUGAUGAGGCCGUUAGGCCGAA IGUGCCGU | 15705 |
| 1314 | GGCACCAC U CAAACGCU | 6366 | AGCGUUUG CUGAUGAGGCCGUUAGGCCGAA IUGGUGCC | 15706 |
| 1316 | CACCACUC A AACGCUGA | 6367 | UCAGCGUU CUGAUGAGGCCGUUAGGCCGAA IAGUGGUG | 15707 |
| 1322 | UCAAACGC U GACAUGUA | 6368 | UACAUGUC CUGAUGAGGCCGUUAGGCCGAA ICGUUUGA | 15708 |
| 1326 | ACGCUGAC A UGUACGGU | 6369 | ACCGUACA CUGAUGAGGCCGUUAGGCCGAA IUCAGCGU | 15709 |
| 1336 | GUACGGUC U AUGCCAUU | 6370 | AAUGGCAU CUGAUGAGGCCGUUAGGCCGAA IACCGUAC | 15710 |
| 1341 | GUCUAUGC C AUUCCUCC | 6371 | GGAGGAAU CUGAUGAGGCCGUUAGGCCGAA ICAUAGAC | 15711 |
| 1342 | UCUAUGCC A UUCCUCCC | 6372 | GGGAGGAA CUGAUGAGGCCGUUAGGCCGAA IGCAUAGA | 15712 |
| 1346 | UGCCAUUC C UCCCCCGC | 6373 | GCGGGGGA CUGAUGAGGCCGUUAGGCCGAA IAAUGGCA | 15713 |
| 1347 | GCCAUUCC U CCCCCGCA | 6374 | UGCGGGGG CUGAUGAGGCCGUUAGGCCGAA IGAAUGGC | 15714 |
| 1349 | CAUUCCUC C CCCGCAUC | 6375 | GAUGCGGG CUGAUGAGGCCGUUAGGCCGAA IAGGAAUG | 15715 |
| 1350 | AUUCCUCC C CCCCAUCA | 6376 | UGAUGCGG CUGAUGAGGCCGUUAGGCCGAA IGAGGAAU | 15716 |
| 1351 | UUCCUCCC C CCCAUCAC | 6377 | GUGAUGCG CUGAUGAGGCCGUUAGGCCGAA IGGAGGAA | 15717 |
| 1352 | UCCUCCCC C GCAUCACA | 6378 | UGUGAUGC CUGAUGAGGCCGUUAGGCCGAA IGGGAGGA | 15718 |
| 1355 | UCCCCCGC A UCACAUCC | 6379 | GGAUGUGA CUGAUGAGGCCGUUAGGCCGAA ICGGGGGA | 15719 |
| 1358 | CCCGCAUC A CAUCCACU | 6380 | AGUGGAUG CUGAUGAGGCCGUUAGGCCGAA IAUGCGGG | 15720 |
| 1360 | CGCAUCAC A UCCACUGG | 6381 | CCAGUGGA CUGAUGAGGCCGUUAGGCCGAA IUGAUGCG | 15721 |
| 1363 | AUCACAUC C ACUGGUAU | 6382 | AUACCAGU CUGAUGAGGCCGUUAGGCCGAA IAUGUGAU | 15722 |
| 1364 | UCACAUCC A CUGGUAUU | 6383 | AAUACCAG CUGAUGAGGCCGUUAGGCCGAA IGAUGUGA | 15723 |
| 1366 | ACAUCCAC U GGUAUUGG | 6384 | CCAAUACC CUGAUGAGGCCGUUAGGCCGAA IUGGAUGU | 15724 |
| 1376 | GUAUUGGC A GUUGGAGG | 6385 | CCUCCAAC CUGAUGAGGCCGUUAGGCCGAA ICCAAUAC | 15725 |
| 1395 | GAGUGCGC C AACGAGCC | 6386 | GGCUCGUU CUGAUGAGGCCGUUAGGCCGAA ICGCACUC | 15726 |
| 1396 | AGUGCGCC A ACGAGCCC | 6387 | GGGCUCGU CUGAUGAGGCCGUUAGGCCGAA IGCGCACU | 15727 |
| 1403 | CAACGAGC C CAGCCAAG | 6388 | CUUGGCUG CUGAUGAGGCCGUUAGGCCGAA ICUCGUUG | 15728 |
| 1404 | AACGAGCC C AGCCAAGC | 6389 | GCUUGGCU CUGAUGAGGCCGUUAGGCCGAA IGCUCGUU | 15729 |
| 1405 | ACGAGCCC A GCCAAGCU | 6390 | AGCUUGGC CUGAUGAGGCCGUUAGGCCGAA IGGCUCGU | 15730 |
| 1408 | AGCCCAGC C AAGCUGUC | 6391 | GACAGCUU CUGAUGAGGCCGUUAGGCCGAA ICUGGGCU | 15731 |
| 1409 | GCCCAGCC A AGCUGUCU | 6392 | AGACAGCU CUGAUGAGGCCGUUAGGCCGAA IGCUGGGC | 15732 |
| 1413 | AGCCAAGC U GUCUCAGU | 6393 | ACUGAGAC CUGAUGAGGCCGUUAGGCCGAA ICUUGGCU | 15733 |
| 1417 | AAGCUGUC U CAGUGACA | 6394 | UGUCACUG CUGAUGAGGCCGUUAGGCCGAA IACAGCUU | 15734 |
| 1419 | GCUGUCUC A GUGACAAA | 6395 | UUUGUCAC CUGAUGAGGCCGUUAGGCCGAA IAGACAGC | 15735 |
| 1425 | UCAGUGAC A AACCCAUA | 6396 | UAUGGGUU CUGAUGAGGCCGUUAGGCCGAA IUCACUGA | 15736 |
| 1429 | UGACAAAC C CAUACCCU | 6397 | AGGGUAUG CUGAUGAGGCCGUUAGGCCGAA IUUUGUCA | 15737 |
| 1430 | GACAAACC C AUACCCUU | 6398 | AAGGGUAU CUGAUGAGGCCGUUAGGCCGAA IGUUUGUC | 15738 |
| 1431 | ACAAACCC A UACCCUUG | 6399 | CAAGGGUA CUGAUGAGGCCGUUAGGCCGAA IGGUUUGU | 15739 |
| 1435 | ACCCAUAC C CUUGUGAA | 6400 | UUCACAAG CUGAUGAGGCCGUUAGGCCGAA IUAUGGGU | 15740 |
| 1436 | CCCAUACC C UUGUGAAG | 6401 | CUUCACAA CUGAUGAGGCCGUUAGGCCGAA IGUAUGGG | 15741 |
| 1437 | CCAUACCC U UGUGAAGA | 6402 | UCUUCACA CUGAUGAGGCCGUUAGGCCGAA IGGUAUGG | 15742 |
| 1465 | UGGAGGAC U UCCAGGGA | 6403 | UCCCUGGA CUGAUGAGGCCGUUAGGCCGAA IUCCUCCA | 15743 |
| 1468 | AGGACUUC C AGGGAGGA | 6404 | UCCUCCCU CUGAUGAGGCCGUUAGGCCGAA IAAGUCCU | 15744 |
| 1469 | GGACUUCC A GGGAGGAA | 6405 | UUCCUCCC CUGAUGAGGCCGUUAGGCCGAA IGAAGUCC | 15745 |
| 1502 | UAAAAAUC A AUUUGCUC | 6406 | GAGCAAAU CUGAUGAGGCCGUUAGGCCGAA IAUUUUUA | 15746 |
| 1509 | CAAUUUGC U CUAAUUGA | 6407 | UCAAUUAG CUGAUGAGGCCGUUAGGCCGAA ICAAAUUG | 15747 |
| 1511 | AUUUGCUC U AAUUGAAG | 6408 | CUUCAAUU CUGAUGAGGCCGUUAGGCCGAA IAGCAAAU | 15748 |
| 1528 | GAAAAAAC A AAACUGUA | 6409 | UACAGUUU CUGAUGAGGCCGUUAGGCCGAA IUUUUUUC | 15749 |
| 1533 | AACAAAAC U GUAAGUAC | 6410 | GUACUUAC CUGAUGAGGCCGUUAGGCCGAA IUUUUGUU | 15750 |
| 1542 | GUAAGUAC C CUUGUUAU | 6411 | AUAACAAG CUGAUGAGGCCGUUAGGCCGAA IUACUUAC | 15751 |
| 1543 | UAAGUACC C UUGUUAUC | 6412 | GAUAACAA CUGAUGAGGCCGUUAGGCCGAA IGUACUUA | 15752 |
| 1544 | AAGUACCC U UGUUAUCC | 6413 | GGAUAACA CUGAUGAGGCCGUUAGGCCGAA IGGUACUU | 15753 |
| 1552 | UUGUUAUC C AAGCGGCA | 6414 | UGCCGCUU CUGAUGAGGCCGUUAGGCCGAA IAUAACAA | 15754 |
| 1553 | UGUUAUCC A AGCGGCAA | 6415 | UUGCCGCU CUGAUGAGGCCGUUAGGCCGAA IGAUAACA | 15755 |
| 1560 | CAAGCGGC A AAUGUGUC | 6416 | GACACAUU CUGAUGAGGCCGUUAGGCCGAA ICCGCUUG | 15756 |
| 1569 | AAUGUGUC A GCUUUGUA | 6417 | UACAAAGC CUGAUGAGGCCGUUAGGCCGAA IACACAUU | 15757 |
| 1572 | GUGUCAGC U UUGUACAA | 6418 | UUGUACAA CUGAUGAGGCCGUUAGGCCGAA ICUGACAC | 15758 |
| 1579 | CUUUGUAC A AAUGUGAA | 6419 | UUCACAUU CUGAUGAGGCCGUUAGGCCGAA IUACAAAG | 15759 |
| 1594 | AAGCGGUC A ACAAAGUC | 6420 | GACUUUGU CUGAUGAGGCCGUUAGGCCGAA IACCGCUU | 15760 |
| 1597 | CGGUCAAC A AAGUCGGG | 6421 | CCCGACUU CUGAUGAGGCCGUUAGGCCGAA IUUGACCG | 15761 |
| 1624 | GGGUGAUC U CCUUCCAC | 6422 | GUGGAAGG CUGAUGAGGCCGUUAGGCCGAA IAUCACCC | 15762 |
| 1626 | GUGAUCUC C UUCCACGU | 6423 | ACGUGGAA CUGAUGAGGCCGUUAGGCCGAA IAGAUCAC | 15763 |
| 1627 | UGAUCUCC U UCCACGUG | 6424 | CACGUGGA CUGAUGAGGCCGUUAGGCCGAA IGAGAUCA | 15764 |
| 1630 | UCUCCUUC C ACGUGACC | 6425 | GGUCACGU CUGAUGAGGCCGUUAGGCCGAA IAAGGAGA | 15765 |
| 1631 | CUCCUUCC A CGUGACCA | 6426 | UGGUCACG CUGAUGAGGCCGUUAGGCCGAA IGAAGGAG | 15766 |
| 1638 | CACGUGAC C AGGGGUCC | 6427 | GGACCCCU CUGAUGAGGCCGUUAGGCCGAA IUCACGUG | 15767 |
| 1639 | ACGUGACC A GGGGUCCU | 6428 | AGGACCCC CUGAUGAGGCCGUUAGGCCGAA IGUCACGU | 15768 |
| 1646 | CAGGGGUC C UGAAAUUA | 6429 | UAAUUUCA CUGAUGAGGCCGUUAAGCCCGA IACCCCUG | 15769 |
| 1647 | AGGGGUCC U GAAAUUAC | 6430 | GUAAUUUC CUGAUGAGGCCGUUAGGCCGAA IGACCCCU | 15770 |
| 1656 | GAAAUUAC U UUGCAACC | 6431 | GGUUGCAA CUGAUGAGGCCGUUAGGCCGAA IUAAUUUC | 15771 |
| 1661 | UACUUUGC A ACCUGACA | 6432 | UGUCAGGU CUGAUGAGGCCGUUAGGCCGAA ICAAAGUA | 15772 |
| 1664 | UUUGCAAC C UGACAUGC | 6433 | GCAUGUCA CUGAUGAGGCCGUUAGGCCGAA IUUGCAAA | 15773 |
| 1665 | UUGCAACC U GACAUGCA | 6434 | UGCAUGUC CUGAUGAGGCCGUUAGGCCGAA IGUUGCAA | 15774 |
| 1669 | AACCUGAC A UGCAGCCC | 6435 | GGGCUGCA CUGAUGAGGCCGUUAGGCCGAA IUCAGGUU | 15775 |
| 1673 | UGACAUGC A GCCCACUG | 6436 | CAGUGGGC CUGAUGAGGCCGUUAGGCCGAA ICAUGUCA | 15776 |
| 1676 | CAUGCAGC C CACUGAGC | 6437 | GCUCAGUG CUGAUGAGGCCGUUAGGCCGAA ICUGCAUG | 15777 |
| 1677 | AUGCAGCC C ACUGAGCA | 6438 | UGCUCAGU CUGAUGAGGCCGUUAGGCCGAA IGCUGCAU | 15778 |
| 1678 | UGCAGCCC A CUGAGCAG | 6439 | CUGCUCAG CUGAUGAGGCCGUUAGGCCGAA IGGCUGCA | 15779 |
| 1680 | CAGCCCAC U GAGCAGGA | 6440 | UCCUGCUC CUGAUGAGGCCGUUAGGCCGAA IUGGGCUG | 15780 |
| 1685 | CACUGAGC A GGAGAGCG | 6441 | CGCUCUCC CUGAUGAGGCCGUUAGGCCGAA ICUCAGUG | 15781 |
| 1698 | AGCGUGUC U UUGUGGUG | 6442 | CACCACAA CUGAUGAGGCCGUUAGGCCGAA IACACGCU | 15782 |
| 1708 | UGUGGUGC A CUGCAGAC | 6443 | GUCUGCAG CUGAUGAGGCCGUUAGGCCGAA ICACCACA | 15783 |
| 1710 | UGGUGCAC U GCAGACAG | 6444 | CUGUCUGC CUGAUGAGGCCGUUAGGCCGAA IUGCACCA | 15784 |
| 1713 | UGCACUGC A GACAGAUC | 6445 | GAUCUGUC CUGAUGAGGCCGUUAGGCCGAA ICAGUGCA | 15785 |
| 1717 | CUGCAGAC A GAUCUACG | 6446 | CGUAGAUC CUGAUGAGGCCGUUAGGCCGAA IUCUGCAG | 15786 |
| 1722 | GACAGAUC U ACGUUUGA | 6447 | UCAAACGU CUGAUGAGGCCGUUAGGCCGAA IAUCUGUC | 15787 |
| 1735 | UUGAGAAC C UCACAUGG | 6448 | CCAUGUGA CUGAUGAGGCCGUUAGGCCGAA IUUCUCAA | 15788 |
| 1736 | UGAGAACC U CACAUGGU | 6449 | ACCAUGUG CUGAUGAGGCCGUUAGGCCGAA IGUUCUCA | 15789 |
| 1738 | AGAACCUC A CAUGGUAC | 6450 | GUACCAUG CUGAUGAGGCCGUUAGGCCGAA IAGGUUCU | 15790 |
| 1740 | AACCUCAC A UGGUACAA | 6451 | UUGUACCA CUGAUGAGGCCGUUAGGCCGAA IUGAGGUU | 15791 |
| 1747 | CAUGGUAC A AGCUUGGC | 6452 | GCCAAGCU CUGAUGAGGCCGUUAGGCCGAA IUACCAUG | 15792 |
| 1751 | GUACAAGC U UGGCCCAC | 6453 | GUGGGCCA CUGAUGAGGCCGUUAGGCCGAA ICUUGUAC | 15793 |
| 1756 | AGCUUGGC C CACAGCCU | 6454 | AGGCUGUG CUGAUGAGGCCGUUAGGCCGAA ICCAAGCU | 15794 |
| 1757 | GCUUGGCC C ACAGCCUC | 6455 | GAGGCUGU CUGAUGAGGCCGUUAGGCCGAA IGCCAAGC | 15795 |
| 1758 | CUUGGCCC A CAGCCUCU | 6456 | AGAGGCUG CUGAUGAGGCCGUUAGGCCGAA IGGCCAAG | 15796 |
| 1760 | UGGCCCAC A GCCUCUGC | 6457 | GCAGAGGC CUGAUGAGGCCGUUAGGCCGAA IUGGGCCA | 15797 |
| 1763 | CCCACAGC C UCUGCCAA | 6458 | UUGGCAGA CUGAUGAGGCCGUUAGGCCGAA ICUGUGGG | 15798 |
| 1764 | CCACAGCC U CUGCCAAU | 6459 | AUUGGCAG CUGAUGAGGCCGUUAGGCCGAA IGCUGUGG | 15799 |
| 1766 | ACAGCCUC U GCCAAUCC | 6460 | GGAUUGGC CUGAUGAGGCCGUUAGGCCGAA IAGGCUGU | 15800 |
| 1769 | GCCUCUGC C AAUCCAUG | 6461 | CAUGGAUU CUGAUGAGGCCGUUAGGCCGAA ICAGAGGC | 15801 |
| 1770 | CCUCUGCC A AUCCAUGU | 6462 | ACAUGGAU CUGAUGAGGCCGUUAGGCCGAA IGCAGAGG | 15802 |
| 1774 | UGCCAAUC C AUGUGGGA | 6463 | UCCCACAU CUGAUGAGGCCGUUAGGCCGAA IAUUGGCA | 15803 |
| 1775 | GCCAAUCC A UGUGGGAG | 6464 | CUCCCACA CUGAUGAGGCCGUUAGGCCGAA IGAUUGGC | 15804 |
| 1790 | AGAGUUGC C CACACCUG | 6465 | CAGGUGUG CUGAUGAGGCCGUUAGGCCGAA ICAACUCU | 15805 |
| 1791 | GAGUUGCC C ACACCUGU | 6466 | ACAGGUGU CUGAUGAGGCCGUUAGGCCGAA IGCAACUC | 15806 |
| 1792 | AGUUGCCC A CACCUGUU | 6467 | AACAGGUG CUGAUGAGGCCGUUAGGCCGAA IGGCAACU | 15807 |
| 1794 | UUGCCCAC A CCUGUUUG | 6468 | CAAACAGG CUGAUGAGGCCGUUAGGCCGAA IUGGGCAA | 15808 |
| 1796 | GCCCACAC C UGUUUGCA | 6469 | UGCAAACA CUGAUGAGGCCGUUAGGCCGAA IUGUGGGC | 15809 |
| 1797 | CCCACACC U GUUUGCAA | 6470 | UUGCAAAC CUGAUGAGGCCGUUAGGCCGAA IGUGUGGG | 15810 |
| 1804 | CUGUUUGC A AGAACUUG | 6471 | CAAGUUCU CUGAUGAGGCCGUUAGGCCGAA ICAAACAG | 15811 |
| 1810 | GCAAGAAC U UGGAUACU | 6472 | AGUAUCCA CUGAUGAGGCCGUUAGGCCGAA IUUCUUGC | 15812 |
| 1818 | UUGGAUAC U CUUUGGAA | 6473 | UUCCAAAG CUGAUGAGGCCGUUAGGCCGAA IUAUCCAA | 15813 |
| 1820 | GGAUACUC U UUGGAAAU | 6474 | AUUUCCAA CUGAUGAGGCCGUUAGGCCGAA IAGUAUCC | 15814 |
| 1836 | UUGAAUGC C ACCAUGUU | 6475 | AACAUGGU CUGAUGAGGCCGUUAGGCCGAA ICAUUCAA | 15815 |
| 1837 | UGAAUGCC A CCAUGUUC | 6476 | GAACAUGG CUGAUGAGGCCGUUAGGCCGAA IGCAUUCA | 15816 |
| 1839 | AAUGCCAC C AUGUUCUC | 6477 | GAGAACAU CUGAUGAGGCCGUUAGGCCGAA IUGGCAUU | 15817 |
| 1840 | AUGCCACC A UGUUCUCU | 6478 | AGAGAACA CUGAUGAGGCCGUUAGGCCGAA IGUGGCAU | 15818 |
| 1846 | CCAUGUUC U CUAAUAGC | 6479 | GCUAUUAG CUGAUGAGGCCGUUAGGCCGAA IAACAUGG | 15819 |
| 1848 | AUGUUCUC U AAUAGCAC | 6480 | GUGCUAUU CUGAUGAGGCCGUUAGGCCGAA IAGAACAU | 15820 |
| 1855 | CUAAUAGC A CAAAUGAC | 6481 | GUCAUUUG CUGAUGAGGCCGUUAGGCCGAA ICUAUUAG | 15821 |
| 1857 | AAUAGCAC A AAUGACAU | 6482 | AUGUCAUU CUGAUGAGGCCGUUAGGCCGAA IUGCUAUU | 15822 |
| 1864 | CAAAUGAC A UUUUGAUC | 6483 | GAUCAAAA CUGAUGAGGCCGUUAGGCCGAA IUCAUUUG | 15823 |
| 1873 | UUUUGAUC A UGGAGCUU | 6484 | AAGCUCCA CUGAUGAGGCCGUUAGGCCGAA IAUCAAAA | 15824 |
| 1880 | CAUGGAGC U UAAGAAUG | 6485 | CAUUCUUA CUGAUGAGGCCGUUAGGCCGAA ICUCCAUG | 15825 |
| 1890 | AAGAAUGC A UCCUUGCA | 6486 | UGCAAGGA CUGAUGAGGCCGUUAGGCCGAA ICAUUCUU | 15826 |
| 1893 | AAUGCAUC C UUGCAGGA | 6487 | UCCUGCAA CUGAUGAGGCCGUUAGGCCGAA IAUGCAUU | 15827 |
| 1894 | AUGCAUCC U UGCAGGAC | 6488 | GUCCUGCA CUGAUGAGGCCGUUAGGCCGAA IGAUGCAU | 15828 |
| 1898 | AUCCUUGC A GGACCAAG | 6489 | CUUGGUCC CUGAUGAGGCCGUUAGGCCGAA ICAAGGAU | 15829 |
| 1903 | UGCAGGAC C AAGGAGAC | 6490 | GUCUCCUU CUGAUGAGGCCGUUAGGCCGAA IUCCUGCA | 15830 |
| 1904 | GCAGGACC A AGGAGACU | 6491 | AGUCUCCU CUGAUGAGGCCGUUAGGCCGAA IGUCCUGC | 15831 |
| 1912 | AAGGAGAC U AUGUCUGC | 6492 | GCAGACAU CUGAUGAGGCCGUUAGGCCGAA IUCUCCUU | 15832 |
| 1918 | ACUAUGUC U GCCUUGCU | 6493 | AGCAAGGC CUGAUGAGGCCGUUAGGCCGAA IACAUAGU | 15833 |
| 1921 | AUGUCUGC C UUGCUCAA | 6494 | UUGAGCAA CUGAUGAGGCCGUUAGGCCGAA ICAGACAU | 15834 |
| 1922 | UGUCUGCC U UGCUCAAG | 6495 | CUUGAGCA CUGAUGAGGCCGUUAGGCCGAA IGCAGACA | 15835 |
| 1926 | UGCCUUGC U CAAGACAG | 6496 | CUGUCUUG CUGAUGAGGCCGUUAGGCCGAA ICAAGGCA | 15836 |
| 1928 | CCUUGCUC A AGACAGGA | 6497 | UCCUGUCU CUGAUGAGGCCGUUAGGCCGAA IAGCAAGG | 15837 |
| 1933 | CUCAAGAC A GGAAGACC | 6498 | GGUCUUCC CUGAUGAGGCCGUUAGGCCGAA IUCUUGAG | 15838 |
| 1941 | AGGAAGAC C AAGAAAAG | 6499 | CUUUCUUU CUGAUGAGGCCGUUAGGCCGAA IUCUUCCU | 15839 |
| 1942 | GGAAGACC A AGAAAAGA | 6500 | UCUUUUCU CUGAUGAGGCCGUUAGGCCGAA IGUCUUCC | 15840 |
| 1952 | GAAAAGAC A UUGCGUGG | 6501 | CCACGCAA CUGAUGAGGCCGUUAGGCCGAA IUCUUUUC | 15841 |
| 1963 | GCGUGGUC A GGCAGCUC | 6502 | GAGCUGCC CUGAUGAGGCCGUUAGGCCGAA IACCACGC | 15842 |
| 1967 | GGUCAGGC A GCUCACAG | 6503 | CUGUGAGC CUGAUGAGGCCGUUAGGCCGAA ICCUGACC | 15843 |
| 1970 | CAGGCAGC U CACAGUCC | 6504 | GGACUGUG CUGAUGAGGCCGUUAGGCCGAA ICUGCCUG | 15844 |
| 1972 | GGCAGCUC A CAGUCCUA | 6505 | UAGGACUG CUGAUGAGGCCGUUAGGCCGAA IAGCUGCC | 15845 |
| 1974 | CAGCUCAC A GUCCUAGA | 6506 | UCUAGGAC CUGAUGAGGCCGUUAGGCCGAA IUGAGCUG | 15846 |
| 1978 | UCACAGUC C UAGAGCGU | 6507 | ACGCUCUA CUGAUGAGGCCGUUAGGCCGAA IACUGUGA | 15847 |
| 1979 | CACAGUCC U AGAGCGUG | 6508 | CACGCUCU CUGAUGAGGCCGUUAGGCCGAA IGACUGUG | 15848 |
| 1992 | CGUGUGGC A CCCACGAU | 6509 | AUCGUGGG CUGAUGAGGCCGUUAGGCCGAA ICCACACG | 15849 |
| 1994 | UGUGGCAC C CACGAUCA | 6510 | UGAUCGUG CUGAUGAGGCCGUUAGGCCGAA IUGCCACA | 15850 |
| 1995 | GUGGCACC C ACGAUCAC | 6511 | GUGAUCGU CUGAUGAGGCCGUUAGGCCGAA IGUGCCAC | 15851 |
| 1996 | UGGCACCC A CGAUCACA | 6512 | UGUGAUCG CUGAUGAGGCCGUUAGGCCGAA IGGUGCCA | 15852 |
| 2002 | CCACGAUC A CAGGAAAC | 6513 | GUUUCCUG CUGAUGAGGCCGUUAGGCCGAA IAUCGUGG | 15853 |
| 2004 | ACGAUCAC A GGAAACCU | 6514 | AGGUUUCC CUGAUGAGGCCGUUAGGCCGAA IUGAUCGU | 15854 |
| 2011 | CAGGAAAC C UGGAGAAU | 6515 | AUUCUCCA CUGAUGAGGCCGUUAGGCCGAA IUUUCCUG | 15855 |
| 2012 | AGGAAACC U GGAGAAUC | 6516 | GAUUCUCC CUGAUGAGGCCGUUAGGCCGAA IGUUUCCU | 15856 |
| 2021 | GGAGAAUC A GACGACAA | 6517 | UUGUCGUC CUGAUGAGGCCGUUAGGCCGAA IAUUCUCC | 15857 |
| 2028 | CAGACGAC A AGUAUUGG | 6518 | CCAAUACU CUGAUGAGGCCGUUAGGCCGAA IUCGUCUG | 15858 |
| 2044 | GGGAAAGC A UCGAAGUC | 6519 | GACUUCGA CUGAUGAGGCCGUUAGGCCGAA ICUUUCCC | 15859 |
| 2053 | UCGAAGUC U CAUGCACG | 6520 | CGUGCAUG CUGAUGAGGCCGUUAGGCCGAA IACUUCGA | 15860 |
| 2055 | GAAGUCUC A UGCACGGC | 6521 | GCCGUGCA CUGAUGAGGCCGUUAGGCCGAA IAGACUUC | 15861 |
| 2059 | UCUCAUGC A CGGCAUCU | 6522 | AGAUGCCG CUGAUGAGGCCGUUAGGCCGAA ICAUGAGA | 15862 |
| 2064 | UGCACGGC A UCUGGGAA | 6523 | UUCCCAGA CUGAUGAGGCCGUUAGGCCGAA ICCGUGCA | 15863 |
| 2067 | ACGGCAUC U GGGAAUCC | 6524 | GGAUUCCC CUGAUGAGGCCGUUAGGCCGAA IAUGCCGU | 15864 |
| 2075 | UGGGAAUC C CCCUCCAC | 6525 | GUGGAGGG CUGAUGAGGCCGUUAGGCCGAA IAUUCCCA | 15865 |
| 2076 | GGGAAUCC C CCUCCACA | 6526 | UGUGGAGO CUGAUGAGGCCGUUAGGCCGAA IGAUUCCC | 15866 |
| 2077 | GGAAUCCC C CUCCACAG | 6527 | CUGUGGAG CUGAUGAGGCCGUUAGGCCGAA IGGAUUCC | 15867 |
| 2078 | GAAUCCCC C UCCACAGA | 6528 | UCUGUGGA CUGAUGAGGCCGUUAGGCCGAA IGGGAUUC | 15868 |
| 2079 | AAUCCCCC U CCACAGAU | 6529 | AUCUGUGG CUGAUGAGGCCGUUAGGCCGAA IGGGGAUU | 15869 |
| 2081 | UCCCCCUC C ACAGAUCA | 6530 | UGAUCUGU CUGAUGAGGCCGUUAGGCCGAA IAGGGGGA | 15870 |
| 2082 | CCCCCUCC A CAGAUCAU | 6531 | AUGAUCUG CUGAUGAGGCCGUUAGGCCGAA IGAGGGGG | 15871 |
| 2084 | CCCUCCAC A GAUCAUGU | 6532 | ACAUGAUC CUGAUGAGGCCGUUAGGCCGAA IUGGAGGG | 15872 |
| 2089 | CACAGAUC A UGUGGUUU | 6533 | AAACCACA CUGAUGAGGCCGUUAGGCCGAA IAUCUGUG | 15873 |
| 2112 | AAUGAGAC C CUUGUAGA | 6534 | UCUACAAG CUGAUGAGGCCGUUAGGCCGAA IUCUCAUU | 15874 |
| 2113 | AUGAGACC C UUGUAGAA | 6535 | UUCUACAA CUGAUGAGGCCGUUAGGCCGAA IGUCUCAU | 15875 |
| 2114 | UGAGACCC U UGUAGAAG | 6536 | CUUCUACA CUGAUGAGGCCGUUAGGCCGAA IGGUCUCA | 15876 |
| 2125 | UAGAAGAC U CAGGCAUU | 6537 | AAUGCCUG CUGAUGAGGCCGUUAGGCCGAA IUCUUCUA | 15877 |
| 2127 | GAAGACUC A GGCAUUGU | 6538 | ACAAUGCC CUGAUGAGGCCGUUAGGCCGAA IAGUCUUC | 15878 |
| 2131 | ACUCAGGC A UUGUAUUG | 6539 | CAAUACAA CUGAUGAGGCCGUUAGGCCGAA ICCUGAGU | 15879 |
| 2152 | AUGGGAAC C GGAACCUC | 6540 | GAGGUUCC CUGAUGAGGCCGUUAGGCCGAA IUUCCCAU | 15880 |
| 2158 | ACCGGAAC C UCACUAUC | 6541 | GAUAGUGA CUGAUGAGGCCGUUAGGCCGAA IUUCCGGU | 15881 |
| 2159 | CCGGAACC U CACUAUCC | 6542 | GGAUAGUG CUGAUGAGGCCGUUAGGCCGAA IGUUCCGG | 15882 |
| 2161 | GGAACCUC A CUAUCCGC | 6543 | GCGGAUAG CUGAUGAGGCCGUUAGGCCGAA IAGGUUCC | 15883 |
| 2163 | AACCUCAC U AUCCGCAG | 6544 | CUGCGGAU CUGAUGAGGCCGUUAGGCCGAA IUGAGGUU | 15884 |
| 2167 | UCACUAUC C GCAGAGUG | 6545 | CACUCUGC CUGAUGAGGCCGUUAGGCCGAA IAUAGUGA | 15885 |
| 2170 | CUAUCCGC A GAGUGAGG | 6546 | CCUCACUC CUGAUGAGGCCGUUAGGCCGAA ICGGAUAG | 15886 |
| 2194 | ACGAAGGC C UCUACACC | 6547 | GGUGUAGA CUGAUGAGGCCGUUAGGCCGAA ICCUUCGU | 15887 |
| 2195 | CGAAGGCC U CUACACCU | 6548 | AGGUGUAG CUGAUGAGGCCGUUAGGCCGAA IGCCUUCG | 15888 |
| 2197 | AAGGCCUC U ACACCUGC | 6549 | GCAGGUGU CUGAUGAGGCCGUUAGGCCGAA IAGGCCUU | 15889 |
| 2200 | GCCUCUAC A CCUGCCAG | 6550 | CUGGCAGG CUGAUGAGGCCGUUAGGCCGAA IUAGAGGC | 15890 |
| 2202 | CUCUACAC C UGCCAGGC | 6551 | GCCUGGCA CUGAUGAGGCCGUUAGGCCGAA IUGUAGAG | 15891 |
| 2203 | UCUACACC U GCCAGGCA | 6552 | UGCCUGGC CUGAUGAGGCCGUUAGGCCGAA IGUGUAGA | 15892 |
| 2206 | ACACCUGC C AGGCAUGC | 6553 | GCAUGCCU CUGAUGAGGCCGUUAGGCCGAA ICAGGUGU | 15893 |
| 2207 | CACCUGCC A GGCAUGCA | 6554 | UGCAUGCC CUGAUGAGGCCGUUAGGCCGAA IGCAGGUG | 15894 |
| 2211 | UGCCAGGC A UGCAGUGU | 6555 | ACACUGCA CUGAUGAGGCCGUUAGGCCGAA ICCUGGCA | 15895 |
| 2215 | AGGCAUGC A GUGUUCUU | 6556 | AAGAACAC CUGAUGAGGCCGUUAGGCCGAA ICAUGCCU | 15896 |
| 2222 | CAGUGUUC U UGGCUGUG | 6557 | CACAGCCA CUGAUGAGGCCGUUAGGCCGAA IAACACUG | 15897 |
| 2227 | UUCUUGGC U GUGCAAAA | 6558 | UUUUGCAC CUGAUGAGGCCGUUAGGCCGAA ICCAAGAA | 15898 |
| 2232 | GGCUGUGC A AAAGUGGA | 6559 | UCCACUUU CUGAUGAGGCCGUUAGGCCGAA ICACAGCC | 15899 |
| 2244 | GUGGAGGC A UUUUUCAU | 6560 | AUGAAAAA CUGAUGAGGCCGUUAGGCCGAA ICCUCCAC | 15900 |
| 2251 | CAUUUUUC A UAAUAGAA | 6561 | UUCUAUUA CUGAUGAGGCCGUUAGGCCGAA IAAAAAUG | 15901 |
| 2265 | GAAGGUGC C CAGGAAAA | 6562 | UUUUCCUG CUGAUGAGGCCGUUAGGCCGAA ICACCUUC | 15902 |
| 2266 | AAGGUGCC C AGGAAAAG | 6563 | CUUUUCCU CUGAUGAGGCCGUUAGGCCGAA IGCACCUU | 15903 |
| 2267 | AGGUGCCC A GGAAAAGA | 6564 | UCUUUUCC CUGAUGAGGCCGUUAGGCCGAA IGGCACCU | 15904 |
| 2281 | AGACGAAC U UGGAAAUC | 6565 | GAUUUCCA CUGAUGAGGCCGUUAGGCCGAA IUUCGUCU | 15905 |
| 2290 | UGGAAAUC A UUAUUCUA | 6566 | UAGAAUAA CUGAUGAGGCCGUUAGGCCGAA IAUUUCCA | 15906 |
| 2297 | CAUUAUUC U AGUAGGCA | 6567 | UGCCUACU CUGAUGAGGCCGUUAGGCCGAA IAAUAAUG | 15907 |
| 2305 | UAGUAGGC A CGACGGUG | 6568 | CACCGUCG CUGAUGAGGCCGUUAGGCCGAA ICCUACUA | 15908 |
| 2319 | GUGAUUGC C AUGUUCUU | 6569 | AAGAACAU CUGAUGAGGCCGUUAGGCCGAA ICAAUCAC | 15909 |
| 2320 | UGAUUGCC A UGUUCUUC | 6570 | GAAGAACA CUGAUGAGGCCGUUAGGCCGAA IGCAAUCA | 15910 |
| 2326 | CCAUGUUC U UCUGGCUA | 6571 | UAGCCAGA CUGAUGAGGCCGUUAGGCCGAA IAACAUGG | 15911 |
| 2329 | UGUUCUUC U GGCUACUU | 6572 | AAGUAGCC CUGAUGAGGCCGUUAGGCCGAA IAAGAACA | 15912 |
| 2333 | CUUCUGGC U ACUUCUUG | 6573 | CAAGAAGU CUGAUGAGGCCGUUAGGCCGAA ICCAGAAG | 15913 |
| 2336 | CUGGCUAC U UCUUGUCA | 6574 | UGACAAGA CUGAUGAGGCCGUUAGGCCGAA IUAGCCAG | 15914 |
| 2339 | GCUACUUC U UGUCAUCA | 6575 | UGAUGACA CUGAUGAGGCCGUUAGGCCGAA IAAGUAGC | 15915 |
| 2344 | UUCUUGUC A UCAUCCUA | 6576 | UAGGAUGA CUGAUGAGGCCGUUAGGCCGAA IACAAGAA | 15916 |
| 2347 | UUGUCAUC A UCCUAGGG | 6577 | CCCUAGGA CUGAUGAGGCCGUUAGGCCGAA IAUGACAA | 15917 |
| 2350 | UCAUCAUC C UAGGGACC | 6578 | GGUCCCUA CUGAUGAGGCCGUUAGGCCGAA IAUGAUGA | 15918 |
| 2351 | CAUCAUCC U AGGGACCG | 6579 | CGGUCCCU CUGAUGAGGCCGUUAGGCCGAA IGAUGAUG | 15919 |
| 2358 | CUAGGGAC C GUUAAGCG | 6580 | CGCUUAAC CUGAUGAGGCCGUUAGGCCGAA IUCCCUAG | 15920 |
| 2370 | AAGCGGGC C AAUGGAGG | 6581 | CCUCCAUU CUGAUGAGGCCGUUAGGCCGAA ICCCGCUU | 15921 |
| 2371 | AGCGGGCC A AUGGAGGG | 6582 | CCCUCCAU CUGAUGAGGCCGUUAGGCCGAA IGCCCGCU | 15922 |
| 2384 | AGGGGAAC U GAAGACAG | 6583 | CUGUCUUC CUGAUGAGGCCGUUAGGCCGAA IUUCCCCU | 15923 |
| 2391 | CUGAAGAC A GGCUACUU | 6584 | AAGUAGCC CUGAUGAGGCCGUUAGGCCGAA IUCUUCAG | 15924 |
| 2395 | AGACAGGC U ACUUGUCC | 6585 | GGACAAGU CUGAUGAGGCCGUUAGGCCGAA ICCUGUCU | 15925 |
| 2398 | CAGGCUAC U UGUCCAUC | 6586 | GAUGGACA CUGAUGAGGCCGUUAGGCCGAA IUAGCCUG | 15926 |
| 2403 | UACUUGUC C AUCGUCAU | 6587 | AUGACGAU CUGAUGAGGCCGUUAGGCCGAA IACAAGUA | 15927 |
| 2404 | ACUUGUCC A UCGUCAUG | 6588 | CAUGACGA CUGAUGAGGCCGUUAGGCCGAA IGACAAGU | 15928 |
| 2410 | CCAUCGUC A UGGAUCCA | 6589 | UGGAUCCA CUGAUGAGGCCGUUAGGCCGAA IACGAUGG | 15929 |
| 2417 | CAUGGAUC C AGAUGAAC | 6590 | GUUCAUCU CUGAUGAGGCCGUUAGGCCGAA IAUCCAUG | 15930 |
| 2418 | AUGGAUCC A GAUGAACU | 6591 | AGUUCAUC CUGAUGAGGCCGUUAGGCCGAA IGAUCCAU | 15931 |
| 2426 | AGAUGAAC U CCCAUUGG | 6592 | CCAAUGGG CUGAUGAGGCCGUUAGGCCGAA IUUCAUCU | 15932 |
| 2428 | AUGAACUC C CAUUGGAU | 6593 | AUCCAAUG CUGAUGAGGCCGUUAGGCCGAA IAGUUCAU | 15933 |
| 2429 | UGAACUCC C AUUGGAUG | 6594 | CAUCCAAU CUGAUGAGGCCGUUAGGCCGAA IGAGUUCA | 15934 |
| 2430 | GAACUCCC A UUGGAUGA | 6595 | UCAUCCAA CUGAUGAGGCCGUUAGGCCGAA IGGAGUUC | 15935 |
| 2441 | GGAUGAAC A UUGUGAAC | 6596 | GUUCACAA CUGAUGAGGCCGUUAGGCCGAA IUUCAUCC | 15936 |
| 2453 | UGAACGAC U GCCUUAUG | 6597 | CAUAAGGC CUGAUGAGGCCGUUAGGCCGAA IUCGUUCA | 15937 |
| 2456 | ACGACUGC C UUAUGAUG | 6598 | CAUCAUAA CUGAUGAGGCCGUUAGGCCGAA ICAGUCGU | 15938 |
| 2457 | CGACUGCC U UAUGAUGC | 6599 | GCAUCAUA CUGAUGAGGCCGUUAGGCCGAA IGCAGUCG | 15939 |
| 2466 | UAUGAUGC C AGCAAAUG | 6600 | CAUUUGCU CUGAUGAGGCCGUUAGGCCGAA ICAUCAUA | 15940 |
| 2467 | AUGAUGCC A GCAAAUGG | 6601 | CCAUUUGC CUCAUGAGGCCGUUAGGCCGAA IGCAUCAU | 15941 |
| 2470 | AUGCCAGC A AAUGGGAA | 6602 | UUCCCAUU CUGAUGAGGCCGUUAGGCCGAA ICUGGCAU | 15942 |
| 2482 | GGGAAUUC C CCAGAGAC | 6603 | GUCUCUGG CUGAUGAGGCCGUUAGGCCGAA IAAUUCCC | 15943 |
| 2483 | GGAAUUCC C CAGAGACC | 6604 | GGUCUCUG CUGAUGAGGCCGUUAGGCCGAA IGAAUUCC | 15944 |
| 2484 | GAAUUCCC C AGAGACCG | 6605 | CGGUCUCU CUGAUGAGGCCGUUAGGCCGAA IGGAAUUC | 15945 |
| 2485 | AAUUCCCC A GAGACCGG | 6606 | CCGGUCUC CUGAUGAGGCCGUUAGGCCGAA IGGGAAUU | 15946 |
| 2491 | CCAGAGAC C GGCUGAAC | 6607 | GUUCAGCC CUGAUGAGGCCGUUAGGCCGAA IUCUCUGG | 15947 |
| 2495 | AGACCGGC U GAACCUAG | 6608 | CUAGGUUC CUGAUGAGGCCGUUAGGCCGAA ICCGGUCU | 15948 |
| 2500 | GGCUGAAC C UAGGUAAG | 6609 | CUUACCUA CUGAUGAGGCCGUUAGGCCGAA IUUCAGCC | 15949 |
| 2501 | GCUGAACC U AGGUAAGC | 6610 | GCUUACCU CUGAUGAGGCCGUUAGGCCGAA IGUUCAGC | 15950 |
| 2510 | AGGUAAGC C UCUUGGCC | 6611 | GGCCAAGA CUCAUGAGGCCGUUAGGCCGAA ICUUACCU | 15951 |
| 2511 | GGUAAGCC U CUUGGCCG | 6612 | CGGCCAAG CUGAUGAGGCCGUUAGGCCGAA IGCUUACC | 15952 |
| 2513 | UAAGCCUC U UGGCCGUG | 6613 | CACGGCCA CUGAUGAGGCCGUUAGGCCGAA IAGGCUUA | 15953 |
| 2518 | CUCUUGGC C GUGGUGCC | 6614 | GGCACCAC CUGAUGAGGCCGUUAGGCCGAA ICCAAGAG | 15954 |
| 2526 | CGUGGUGC C UUUGGCCA | 6615 | UGGCCAAA CUGAUGAGGCCGUUAGGCCGAA ICACCACO | 15955 |
| 2527 | GUGGUGCC U UUGGCCAA | 6616 | UUGGCCAA CUGAUGAGGCCGUUAGGCCGAA IGCACCAC | 15956 |
| 2533 | CCUUUGGC C AAGAGAUU | 6617 | AAUCUCUU CUGAUGAGGCCGUUAGGCCGAA ICCAAAGG | 15957 |
| 2534 | CUUUGGCC A AGAGACUG | 6618 | CAAUCUCU CUGAUGAGGCCGUUAGGCCGAA IGCCAAAG | 15958 |
| 2547 | AUUGAAGC A GAUGCCUU | 6619 | AAGGCAUC CUGAUGAGGCCGUUAGGCCGAA ICUUCAAU | 15959 |
| 2553 | GCAGAUGC C UUUGGAAU | 6620 | AUUCCAAA CUGAUGAGGCCGUUAGGCCGAA ICAUCUGC | 15960 |
| 2554 | CAGAUGCC U UUGGAAUU | 6621 | AAUUCCAA CUGAUGAGGCCGUUAGGCCGAA IGCAUCUG | 15961 |
| 2566 | GAAUUGAC A AGACAGCA | 6622 | UGCUGUCU CUGAUGAGGCCGUUAGGCCGAA IUCAAUUC | 15962 |
| 2571 | GACAAGAC A GCAACUUG | 6623 | CAAGUUGC CUGAUGAGGCCGUUAGGCCGAA IUCUUGUC | 15963 |
| 2574 | AAGACAGC A ACUUGCAG | 6624 | CUGCAAGU CUGAUGAGGCCGUUAGGCCGAA ICUGUCUU | 15964 |
| 2577 | ACAGCAAC U UGCAGGAC | 6625 | GUCCUGCA CUGAUGAGGCCGUUAGGCCGAA IUUGCUGU | 15965 |
| 2581 | CAACUUGC A GGACAGUA | 6626 | UACUGUCC CUGAUGAGGCCGUUAGGCCGAA ICAAGUUG | 15966 |
| 2586 | UGCAGGAC A GUAGCAGU | 6627 | ACUGCUAC CUGAUGAGGCCGUUAGGCCGAA IUCCUGCA | 15967 |
| 2592 | ACAGUAGC A GUCAAAAU | 6628 | AUUUUGAC CUGAUGAGGCCGUUAGGCCGAA ICUACUGU | 15968 |
| 2596 | UAGCAGUC A AAAUGUUG | 6629 | CAACAUUU CUGAUGAGGCCGUUAGGCCGAA IACUGCUA | 15969 |
| 2616 | GAAGGAGC A ACACACAG | 6630 | CUGUGUGU CUGAUGAGGCCGUUAGGCCGAA ICUCCUUC | 15970 |
| 2619 | GGAGCAAC A CACAGUGA | 6631 | UCACUGUG CUGAUGAGGCCGUUAGGCCGAA IUUGCUCC | 15971 |
| 2621 | AGCAACAC A CAGUGAGC | 6632 | GCUCACUG CUGAUGAGGCCGUUAGGCCGAA IUGUUGCU | 15972 |
| 2623 | CAACACAC A GUGAGCAU | 6633 | AUGCUCAC CUGAUGAGGCCGUUAGGCCGAA IUGUGUUG | 15973 |
| 2630 | CAGUGAGC A UCGAGCUC | 6634 | GAGCUCGA CUGAUGAGGCCGUUAGGCCGAA ICUCACUG | 15974 |
| 2637 | CAUCGAGC U CUCAUGUC | 6635 | GACAUGAG CUGAUGAGGCCGUUAGGCCGAA ICUCGAUG | 15975 |
| 2639 | UCGAGCUC U CAUGUCUG | 6636 | CAGACAUG CUGAUGAGGCCGUUAGGCCGAA IAGCUCGA | 15976 |
| 2641 | GAGCUCUC A UGUCUGAA | 6637 | UUCAGACA CUGAUGAGGCCGUUAGGCCGAA IAGAGCUC | 15977 |
| 2646 | CUCAUGUC U GAACUCAA | 6638 | UUGAGUUC CUGAUGAGGCCGUUAGGCCGAA IACAUGAG | 15978 |
| 2651 | GUCUGAAC U CAAGAUCC | 6639 | GGAUCUUG CUGAUGAGGCCGUUAGGCCGAA IUUCAGAC | 15979 |
| 2653 | CUGAACUC A AGAUCCUC | 6640 | GAGGAUCU CUGAUGAGGCCGUUAGGCCGAA IAGUUCAG | 15980 |
| 2659 | UCAAGAUC C UCAUUCAU | 6641 | AUGAAUGA CUGAUGAGGCCGUUAGGCCGAA IAUCUUGA | 15981 |
| 2660 | CAAGAUCC U CAUUCAUA | 6642 | UAUGAAUG CUGAUGAGGCCGUUAGGCCGAA IGAUCUUG | 15982 |
| 2662 | AGAUCCUC A UUCAUAUU | 6643 | AAUAUGAA CUGAUGAGGCCGUUAGGCCGAA IAGGAUCU | 15983 |
| 2666 | CCUCAUUC A UAUUGGUC | 6644 | GACCAAUA CUGAUGAGGCCGUUAGGCCGAA IAAUGAGG | 15984 |
| 2675 | UAUUGGUC A CCAUCUCA | 6645 | UGAGAUGG CUGAUGAGGCCGUUAGGCCGAA IACCAAUA | 15985 |
| 2677 | UUGGUCAC C AUCUCAAU | 6646 | AUUGAGAU CUGAUGAGGCCGUUAGGCCGAA IUGACCAA | 15986 |
| 2678 | UGGUCACC A UCUCAAUG | 6647 | CAGUGAGA CUGAUGAGGCCGUUAGGCCGAA IGUGACCA | 15987 |
| 2681 | UCACCAUC U CAAUGUGG | 6648 | CCACAUUG CUGAUGAGGCCGUUAGGCCGAA IAUGGUGA | 15988 |
| 2683 | ACCAUCUC A AUGUGGUC | 6649 | GACCACAU CUGAUGAGGCCGUUAGGCCGAA IAGAUGGU | 15989 |
| 2692 | AUGUGGUC A ACCUUCUA | 6650 | UAGAAGGU CUGAUGAGGCCGUUAGGCCGAA IACCACAU | 15990 |
| 2695 | UGGUCAAC C UUCUAGGU | 6651 | ACCUAGAA CUGAUGAGGCCGUUAGGCCGAA IUUGACCA | 15991 |
| 2696 | GGUCAACC U UCUAGGUG | 6652 | CACCUAGA CUGAUGAGGCCGUUAGGCCGAA IGUUGACC | 15992 |
| 2699 | CAACCUUC U AGGUGCCU | 6653 | AGGCACCU CUGAUGAGGCCGUUAGGCCGAA IAAGGUUG | 15993 |
| 2706 | CUAGGUGC C UGUACCAA | 6654 | UUGGUACA CUGAUGAGGCCGUUAGGCCGAA ICACCUAG | 15994 |
| 2707 | UAGGUGCC U GUACCAAG | 6655 | CUUGGUAC CUGAUGAGGCCGUUAGGCCGAA IGCACCUA | 15995 |
| 2712 | GCCUGUAC C AAGCCAGG | 6656 | CCUGGCUU CUGAUGAGGCCGUUAGGCCGAA IUACAGGC | 15996 |
| 2713 | CCUGUACC A AGCCAGGA | 6657 | UCCUGGCU CUGAUGAGGCCGUUAGGCCGAA IGUACAGG | 15997 |
| 2717 | UACCAAGC C AGGAGGGC | 6658 | GCCCUCCU CUGAUGAGGCCGUUAGGCCGAA ICUUGGUA | 15998 |
| 2718 | ACCAAGCC A GGAGGGCC | 6659 | GGCCCUCC CUGAUGAGGCCGUUAGGCCGAA IGCUUGGU | 15999 |
| 2726 | AGGAGGGC C ACUCAUGG | 6660 | CCAUGAGU CUGAUGAGGCCGUUAGGCCGAA ICCCUCCU | 16000 |
| 2727 | GGAGGGCC A CUCAUGGU | 6661 | ACCAUGAG CUGAUGAGGCCGUUAGGCCGAA IGCCCUCC | 16001 |
| 2729 | AGGGCCAC U CAUGGUGA | 6662 | UCACCAUG CUGAUGAGGCCGUUAGGCCGAA IUGGCCCU | 16002 |
| 2731 | GGCCACUC A UGGUGAUU | 6663 | AAUCACCA CUGAUGAGGCCGUUAGGCCGAA IAGUGGCC | 16003 |
| 2749 | UGGAAUUC U GCAAAUUU | 6664 | AAAUUUGC CUGAUGAGGCCGUUAGGCCGAA IAAUUCCA | 16004 |
| 2752 | AAUUCUGC A AAUUUGGA | 6665 | UCCAAAUU CUGAUGAGGCCGUUAGGCCGAA ICAGAAUU | 16005 |
| 2764 | UUGGAAAC C UGUCCACU | 6666 | AGUGGACA CUGAUGAGGCCGUUAGGCCGAA IUUUCCAA | 16006 |
| 2765 | UGGAAACC U GUCCACUU | 6667 | AAGUGGAC CUGAUGAGGCCGUUAGGCCGAA IGUUUCCA | 16007 |
| 2769 | AACCUGUC C ACUUACCU | 6668 | AGGUAAGU CUGAUGAGGCCGUUAGGCCGAA IACAGGUU | 16008 |
| 2770 | ACCUGUCC A CUUACCUG | 6669 | CAGGUAAG CUGAUGAGGCCGUUAGGCCGAA IGACAGGU | 16009 |
| 2772 | CUGUCCAC U UACCUGAG | 6670 | CUCAGGUA CUGAUGAGGCCGUUAGGCCGAA IUGGACAG | 16010 |
| 2776 | CCACUUAC C UGAGGAGC | 6671 | GCUCCUCA CUGAUGAGGCCGUUAGGCCGAA IUAAGUGG | 16011 |
| 2777 | CACUUACC U GAGGAGCA | 6672 | UGCUCCUC CUGAUGAGGCCGUUAGGCCGAA IGUAAGUG | 16012 |
| 2785 | UGAGGAGC A AGAGAAAU | 6673 | AUUUCUCU CUGAUGAGGCCGUUAGGCCGAA ICUCCUCA | 16013 |
| 2803 | AAUUUGUC C CCUACAAG | 6674 | CUUGUAGG CUGAUGAGGCCGUUAGGCCGAA IACAAAUU | 16014 |
| 2804 | AUUUGUCC C CUACAAGA | 6675 | UCUUGUAG CUGAUGAGGCCGUUAGGCCGAA IGACAAAU | 16015 |
| 2805 | UUUGUCCC C UACAAGAC | 6676 | GUCUUGUA CUGAUGAGGCCGUUAGGCCGAA IGGACAAA | 16016 |
| 2806 | UUGUCCCC U ACAAGACC | 6677 | GGUCUUGU CUGAUGAGGCCGUUAGGCCGAA IGGGACAA | 16017 |
| 2809 | UCCCCUAC A AGACCAAA | 6678 | UUUGGUCU CUGAUGAGGCCGUUAGGCCGAA IUAGGGGA | 16018 |
| 2814 | UACAAGAC C AAAGGGGC | 6679 | GCCCCUUU CUGAUGAGGCCGUUAGGCCGAA IUCUUGUA | 16019 |
| 2815 | ACAAGACC A AAGGGGCA | 6680 | UGCCCCUU CUGAUGAGGCCGUUAGGCCGAA IGUCUUGU | 16020 |
| 2823 | AAAGGGGC A CGAUUCCG | 6681 | CGGAAUCG CUGAUGAGGCCGUUAGGCCGAA ICCCCUUU | 16021 |
| 2830 | CACGAUUC C GUCAAGGG | 6682 | CCCUUGAC CUGAUGAGGCCGUUAGGCCGAA IAAUCGUG | 16022 |
| 2834 | AUUCCGUC A AGGGAAAG | 6683 | CUUUCCCU CUGAUGAGGCCGUUAGGCCGAA IACGGAAU | 16023 |
| 2845 | GGAAAGAC U ACGUUGGA | 6684 | UCCAACGU CUGAUGAGGCCGUUAGGCCGAA IUCUUUCC | 16024 |
| 2856 | GUUGGAGC A AUCCCUGU | 6685 | ACAGGGAU CUGAUGAGGCCGUUAGGCCGAA ICUCCAAC | 16025 |
| 2860 | GAGCAAUC C CUGUGGAU | 6686 | AUCCACAG CUGAUGAGGCCGUUAGGCCGAA IAUUGCUC | 16026 |
| 2861 | AGCAAUCC C UGUGGAUC | 6687 | GAUCCACA CUGAUGAGGCCGUUAGGCCGAA IGAUUGCU | 16027 |
| 2862 | GCAAUCCC U GUGGAUCU | 6688 | AGAUCCAC CUGAUGAGGCCGUUAGGCCGAA IGGAUUGC | 16028 |
| 2870 | UGUGGAUC U GAAACGGC | 6689 | GCCGUUUC CUGAUGAGGCCGUUAGGCCGAA IAUCCACA | 16029 |
| 2881 | AACGGCGC U UGGACAGC | 6690 | GCUGUCCA CUGAUGAGGCCGUUAGGCCGAA ICGCCGUU | 16030 |
| 2887 | GCUUGGAC A GCAUCACC | 6691 | GGUGAUGC CUGAUGAGGCCGUUAGGCCGAA IUCCAAGC | 16031 |
| 2890 | UGGACAGC A UCACCAGU | 6692 | ACUGGUGA CUGAUGAGGCCGUUAGGCCGAA ICUGUCCA | 16032 |
| 2893 | ACAGCAUC A CCAGUAGC | 6693 | GCUACUGG CUGAUGAGGCCGUUAGGCCGAA IAUGCUGU | 16033 |
| 2895 | AGCAUCAC C AGUAGCCA | 6694 | UGGCUACU CUGAUGAGGCCGUUAGGCCGAA IUGAUGCU | 16034 |
| 2896 | GCAUCACC A GUAGCCAG | 6695 | CUGGCUAC CUGAUGAGGCCGUUAGGCCGAA IGUGAUGC | 16035 |
| 2902 | CCAGUAGC C AGAGCUCA | 6696 | UGAGCUCU CUGAUGAGGCCGUUAGGCCGAA ICUACUGG | 16036 |
| 2903 | CAGUAGCC A GAGCUCAG | 6697 | CUGAGCUC CUGAUGAGGCCGUUAGGCCGAA IGCUACUG | 16037 |
| 2908 | GCCAGAGC U CAGCCAGC | 6698 | GCUGGCUG CUGAUGAGGCCGUUAGGCCGAA ICUCUGGC | 16038 |
| 2910 | CAGAGCUC A GCCAGCUC | 6699 | GAGCUGGC CUGAUGAGGCCGUUAGGCCGAA IAGCUCUG | 16039 |
| 2913 | AGCUCAGC C AGCUCUGG | 6700 | CCAGAGCU CUGAUGAGGCCGUUAGGCCGAA ICUGAGCU | 16040 |
| 2914 | GCUCAGCC A GCUCUGGA | 6701 | UCCAGAGO CUGAUGAGGCCGUUAGGCCGAA IGCUGAGC | 16041 |
| 2917 | CAGCCAGC U CUGGAUUU | 6702 | AAAUCCAG CUGAUGAGGCCGUUAGGCCGAA ICUGGCUG | 16042 |
| 2919 | GCCAGCUC U GGAUUUGU | 6703 | ACAAAUCC CUGAUGAGGCCGUUAGGCCGAA IAGCUGGC | 16043 |
| 2940 | GAGAAGUC C CUCAGUGA | 6704 | UCACUGAG CUGAUGAGGCCGUUAGGCCGAA IACUUCUC | 16044 |
| 2941 | AGAAGUCC C UCAGUGAU | 6705 | AUCACUGA CUGAUGAGGCCGUUAGGCCGAA IGACUUCU | 16045 |
| 2942 | GAAGUCCC U CAGUGAUG | 6706 | CAUCACUG CUGAUGAGGCCGUUAGGCCGAA IGGACUUC | 16046 |
| 2944 | AGUCCCUC A GUGAUGUA | 6707 | UACAUCAC CUGAUGAGGCCGUUAGGCCGAA IAGGGACU | 16047 |
| 2967 | GAGGAAGC U CCUGAAGA | 6708 | UCUUCAGO CUGAUGAGGCCGUUAGGCCGAA ICUUCCUC | 16048 |
| 2969 | GGAAGCUC C UGAAGAUC | 6709 | GAUCUUCA CUGAUGAGGCCGUUAGGCCGAA IAGCUUCC | 16049 |
| 2970 | GAAGCUCC U GAAGAUCU | 6710 | AGAUCUUC CUGAUGAGGCCGUUAGGCCGAA IGAGCUUC | 16050 |
| 2978 | UGAAGAUC U GUAUAAGG | 6711 | CCUUAUAC CUGAUGAGGCCGUUAGGCCGAA IAUCUUCA | 16051 |
| 2989 | AUAAGGAC U UCCUGACC | 6712 | GGUCAGGA CUGAUGAGGCCGUUAGGCCGAA IUCCUUAU | 16052 |
| 2992 | AGGACUUC C UGACCUUG | 6713 | CAAGGUCA CUGAUGAGGCCGUUAGGCCGAA IAAGUCCU | 16053 |
| 2993 | GGACUUCC U GACCUUGG | 6714 | CCAAGGUC CUGAUGAGGCCGUUAGGCCGAA IGAAGUCC | 16054 |
| 2997 | UUCCUGAC C UUGGAGCA | 6715 | UGCUCCAA CUGAUGAGGCCGUUAGGCCGAA IUCAGGAA | 16055 |
| 2998 | UCCUGACC U UGGAGCAU | 6716 | AUGCUCCA CUGAUGAGGCCGUUAGGCCGAA IGUCAGGA | 16056 |
| 3005 | CUUGGAGC A UCUCAUCU | 6717 | AGAUGAGA CUGAUGAGGCCGUUAGGCCGAA ICUCCAAG | 16057 |
| 3008 | GGAGCAUC U CAUCUGUU | 6718 | AACAGAUG CUGAUGAGGCCGUUAGGCCGAA IAUGCUCC | 16058 |
| 3010 | AGCAUCUC A UCUGUUAC | 6719 | GUAACAGA CUGAUGAGGCCGUUAGGCCGAA IAGAUGCU | 16059 |
| 3013 | AUCUCAUC U GUUACAGC | 6720 | GCUGUAAC CUGAUGAGGCCGUUAGGCCGAA IAUGAGAU | 16060 |
| 3029 | UCUGUUAC A GCUUCCAA | 6721 | UUGGAAGC CUGAUGAGGCCGUUAGGCCGAA IUAACAGA | 16061 |
| 3022 | GUUACAGC U UCCAAGUG | 6722 | CACUUGGA CUGAUGAGGCCGUUAGGCCGAA ICUGUAAC | 16062 |
| 3025 | ACAGCUUC C AAGUGGCU | 6723 | AGCCACUU CUGAUGAGGCCGUUAGGCCGAA IAAGCUGU | 16063 |
| 3026 | CAGCUUCC A AGUGGCUA | 6724 | UAGCCACU CUGAUGAGGCCGUUAGGCCGAA IGAAGCUG | 16064 |
| 3033 | CAAGUGGC U AAGGGCAU | 6725 | AUGCCCUU CUGAUGAGGCCGUUAGGCCGAA ICCACUUG | 16065 |
| 3040 | CUAAGGGC A UGGAGUUC | 6726 | GAACUCCA CUGAUGAGGCCGUUAGGCCGAA ICCCUUAG | 16066 |
| 3049 | UGGAGUUC U UGGCAUCG | 6727 | CGAUGCCA CUGAUGAGGCCGUUAGGCCGAA IAACUCCA | 16067 |
| 3054 | UUCUUGGC A UCGCGAAA | 6728 | UUUCGCGA CUGAUGAGGCCGUUAGGCCGAA ICCAAGAA | 16068 |
| 3070 | AGUGUAUC C ACAGGGAC | 6729 | GUCCCUGU CUGAUGAGGCCGUUAGGCCGAA IAUACACU | 16069 |
| 3071 | GUGUAUCC A CAGGGACC | 6730 | GGUCCCUG CUGAUGAGGCCGUUAGGCCGAA IGAUACAC | 16070 |
| 3073 | GUAUCCAC A GGGACCUG | 6731 | CAGGUCCC CUGAUGAGGCCGUUAGGCCGAA IUGGAUAC | 16071 |
| 3079 | ACAGGGAC C UGGCGGCA | 6732 | UGCCGCCA CUGAUGAGGCCGUUAGGCCGAA IUCCCUGU | 16072 |
| 3080 | CAGGGACC U GGCGGCAC | 6733 | GUGCCGCC CUGAUGAGGCCGUUAGGCCGAA IGUCCCUG | 16073 |
| 3087 | CUGGCGGC A CGAAAUAU | 6734 | AUAUUUCG CUGAUGAGGCCGUUAGGCCGAA ICCGCCAG | 16074 |
| 3097 | GAAAUAUC C UCUUAUCG | 6735 | CGAUAAGA CUGAUGAGGCCGUUAGGCCGAA IAUAUUUC | 16075 |
| 3098 | AAAUAUCC U CUUAUCGG | 6736 | CCGAUAAG CUGAUGAGGCCGUUAGGCCGAA IGAUAUUU | 16076 |
| 3100 | AUAUCCUC U UAUCGGAG | 6737 | CUCCGAUA CUGAUGAGGCCGUUAGGCCGAA IAGGAUAU | 16077 |
| 3127 | UUAAAAUC U GUGACUUU | 6738 | AAAGUCAC CUGAUGAGGCCGUUAGGCCGAA IAUUUUAA | 16078 |
| 3133 | UCUGUGAC U UUGGCUUG | 6739 | CAAGCCAA CUGAUGAGGCCGUUAGGCCGAA IUCACAGA | 16079 |
| 3139 | ACUUUGGC U UGGCCCGG | 6740 | CCGGGCCA CUGAUGAGGCCGUUAGGCCGAA ICCAAAGU | 16080 |
| 3144 | GGCUUGGC C CCGGAUAU | 6741 | AUAUCCCG CUGAUGAGGCCGUUAGGCCGAA ICCAAGCC | 16081 |
| 3145 | GCUUGGCC C GGGAUAUU | 6742 | AAUAUCCC CUGAUGAGGCCGUUAGGCCGAA IGCCAAGC | 16082 |
| 3164 | UAAAGAUC C AGAUUAUG | 6743 | CAUAAUCU CUGAUGAGGCCGUUAGGCCGAA IAUCUUUA | 16083 |
| 3165 | AAAGAUCC A GAUUAUGU | 6744 | ACAUAAUC CUGAUGAGGCCGUUAGGCCGAA IGAUCUUU | 16084 |
| 3175 | AUUAUGUC A GAAAAGGA | 6745 | UCCUUUUC CUGAUGAGGCCGUUAGGCCGAA IACAUAAU | 16085 |
| 3189 | GGAGAUGC U CGCCUCCC | 6746 | GGGAGGCG CUGAUGAGGCCGUUAGGCCGAA ICAUCUCC | 16086 |
| 3293 | AUGCUCGC C UCCCUUUG | 6747 | CAAAGGGA CUGAUGAGGCCGUUAGGCCGAA ICGAGCAU | 16087 |
| 3294 | UGCUCGCC U CCCUUUGA | 6748 | UCAAAGGG CUGAUGAGGCCGUUAGGCCGAA IGCGAGCA | 16088 |
| 3296 | CUCGCCUC C CUUUGAAA | 6749 | UUUCAAAG CUGAUGAGGCCGUUAGGCCGAA IAGGCGAG | 16089 |
| 3297 | UCGCCUCC C UUUGAAAU | 6750 | AUUUCAAA CUGAUGAGGCCGUUAGGCCGAA IGAGGCGA | 16090 |
| 3298 | CGCCUCCC U UUGAAAUG | 6751 | CAUUUCAA CUGAUGAGGCCGUUAGGCCGAA IGGAGGCG | 16091 |
| 3213 | UGGAUGGC C CCAGAAAC | 6752 | CUUUCUGG CUGAUGAGGCCGUUAGGCCGAA ICCAUCCA | 16092 |
| 3214 | GGAUGGCC C CAGAAACA | 6753 | UGUUUCUG CUGAUGAGGCCGUUAGGCCGAA IGCCAUCC | 16093 |
| 3215 | GAUGGCCC C AGAAACAA | 6754 | UUGUUUCU CUGAUGAGGCCGUUAGGCCGAA IGGCCAUC | 16094 |
| 3216 | AUGGCCCC A GAAACAAU | 6755 | AUUGUUUC CUGAUGAGGCCGUUAGGCCGAA IGCGCCAU | 16095 |
| 3222 | CCAGAAAC A AUUUUUGA | 6756 | UCAAAAAU CUGAUGAGGCCGUUAGGCCGAA IUUUCUGG | 16096 |
| 3232 | UUUUUGAC A GAGUGUAC | 6757 | GUACACUC CUGAUGAGGCCGUUAGGCCGAA IUCAAAAA | 16097 |
| 3241 | GAGUGUAC A CAAUCCAG | 6758 | CUGGAUUG CUGAUGAGGCCGUUAGGCCGAA IUACACUC | 16098 |
| 3243 | GUGUACAC A AUCCAGAG | 6759 | CUCUGGAU CUGAUGAGGCCGUUAGGCCGAA IUGUACAC | 16099 |
| 3247 | ACACAAUC C AGAGUGAC | 6760 | GUCACUCU CUGAUGAGGCCGUUAGGCCGAA IAUUGUGU | 16100 |
| 3248 | CACAAUCC A GAGUGACG | 6761 | CGUCACUC CUGAUGAGGCCGUUAGGCCGAA IGAUUGUG | 16101 |
| 3259 | GUGACGUC U GGUCUUUU | 6762 | AAAAGACC CUGAUGAGGCCGUUAGGCCGAA IACGUCAC | 16102 |
| 3264 | GUCUGGUC U UUUGGUGU | 6763 | ACACCAAA CUGAUGAGGCCGUUAGGCCGAA IACCAGAC | 16103 |
| 3278 | UGUUUUGC U GUGGGAAA | 6764 | UUUCCCAC CUGAUGAGGCCGUUAGGCCGAA ICAAAACA | 16104 |
| 3294 | AUAUUUUC C UUAGGUGC | 6765 | GCACCUAA CUGAUGAGGCCGUUAGGCCGAA IAAAAUAU | 16105 |
| 3295 | UAUUUUCC U UAGGUGCU | 6766 | AGCACCUA CUGAUGAGGCCGUUAGGCCGAA IGAAAAUA | 16106 |
| 3303 | UUAGGUGC U UCUCCAUA | 6767 | UAUGGAGA CUGAUGAGGCCGUUAGGCCGAA ICACCUAA | 16107 |
| 3306 | GGUGCUUC U CCAUAUCC | 6768 | GGAUAUGG CUGAUGAGGCCGUUAGGCCGAA IAAGCACC | 16108 |
| 3308 | UGCUUCUC C AUAUCCUG | 6769 | CAGGAUAU CUGAUGAGGCCGUUAGGCCGAA IAGAAGCA | 16109 |
| 3309 | GCUUCUCC A UAUCCUGG | 6770 | CCAGGAUA CUGAUGAGGCCGUUAGGCCGAA IGAGAAGC | 16110 |
| 3314 | UCCAUAUC C UGGGGUAA | 6771 | UUACCCCA CUGAUGAGGCCGUUAGGCCGAA IAUAUGGA | 16111 |
| 3315 | CCAUAUCC U GGGGUAAA | 6772 | UUUACCCC CUGAUGAGGCCGUUAGGCCGAA IGAUAUGG | 16112 |
| 3363 | GAAGGAAC U AGAAUGAG | 6773 | CUCAUUCU CUGAUGAGGCCGUUAGGCCGAA IUUCCUUC | 16113 |
| 3375 | AUGAGGGC C CCUGAUUA | 6774 | UAAUCAGG CUGAUGAGGCCGUUAGGCCGAA ICCCUCAU | 16114 |
| 3376 | UGAGGGCC C CUGAUUAU | 6775 | AUAAUCAG CUGAUGAGGCCGUUAGGCCGAA IGCCCUCA | 16115 |
| 3377 | GAGGGCCC C UGAUUAUA | 6776 | UAUAAUCA CUGAUGAGGCCGUUAGGCCGAA IGGCCCUC | 16116 |
| 3378 | AGGGCCCC U GAUUAUAC | 6777 | GUAUAAUC CUGAUGAGGCCGUUAGGCCGAA IGGGCCCU | 16117 |
| 3387 | GAUUAUAC U ACACCAGA | 6778 | UCUGGUGU CUGAUGAGGCCGUUAGGCCGAA IUAUAAUC | 16118 |
| 3390 | UAUACUAC A CCAGAAAU | 6779 | AUUUCUGG CUGAUGAGGCCGUUAGGCCGAA IUAGUAUA | 16119 |
| 3392 | UACUACAC C AGAAAUGU | 6780 | ACAUUUCU CUGAUGAGGCCGUUAGGCCGAA IUGUAGUA | 16120 |
| 3393 | ACUACACC A GAAAUGUA | 6781 | UACAUUUC CUGAUGAGGCCGUUAGGCCGAA IGUGUAGU | 16121 |
| 3403 | AAAUGUAC C AGACCAUG | 6782 | CAUGGUCU CUGAUGAGGCCGUUAGGCCGAA IUACAUUU | 16122 |
| 3404 | AAUGUACC A GACCAUGC | 6783 | GCAUGGUC CUGAUGAGGCCGUUAGGCCGAA IGUACAUU | 16123 |
| 3408 | UACCAGAC C AUGCUGGA | 6784 | UCCAGCAU CUGAUGAGGCCGUUAGGCCGAA IUCUGGUA | 16124 |
| 3409 | ACCAGACC A UGCUGGAC | 6785 | GUCCAGCA CUGAUGAGGCCGUUAGGCCGAA IGUCUGGU | 16125 |
| 3413 | GACCAUGC U GGACUGCU | 6786 | AGCAGUCC CUGAUGAGGCCGUUAGGCCGAA ICAUGGUC | 16126 |
| 3418 | UGCUGGAC U GCUGGCAC | 4886 | GUGCCAGC CUGAUGAGGCCGUUAGGCCGAA IUCCAGCA | 14226 |
| 3421 | UGGACUGC U GGCACGGG | 6787 | CCCGUGCC CUGAUGAGGCCGUUAGGCCGAA ICAGUCCA | 16127 |
| 3425 | CUGCUGGC A CGGGGAGC | 6788 | GCUCCCCG CUGAUGAGGCCGUUAGGCCGAA ICCAGCAG | 16128 |
| 3434 | CGGGGAGC C CAGUCAGA | 6789 | UCUGACUG CUGAUGAGGCCGUUAGGCCGAA ICUCCCCG | 16129 |
| 3435 | GGGGAGCC C AGUCAGAG | 6790 | CUCUGACU CUGAUGAGGCCGUUAGGCCGAA IGCUCCCC | 16130 |
| 3436 | GGGAGCCC A GUCAGAGA | 6791 | UCUCUGAC CUGAUGAGGCCGUUAGGCCGAA IGGCUCCC | 16131 |
| 3440 | GCCCAGUC A GAGACCCA | 6792 | UGGGUCUC CUGAUGAGGCCGUUAGGCCGAA IACUGGGC | 16132 |
| 3446 | UCAGAGAC C CACGUUUU | 6793 | AAAACGUG CUGAUGAGGCCGUUAGGCCGAA IUCUCUGA | 16133 |
| 3447 | CAGAGACC C ACGUUUUC | 6794 | GAAAACGU CUGAUGAGGCCGUUAGGCCGAA IGUCUCUG | 16134 |
| 3448 | AGAGACCC A CGUUUUCA | 6795 | UGAAAACG CUGAUGAGGCCGUUAGGCCGAA IGGUCUCU | 16135 |
| 3456 | ACGUUUUC A GAGUUGGU | 6796 | ACCAACUC CUGAUGAGGCCGUUAGGCCGAA IAAAACGU | 16136 |
| 3470 | GGUGGAAC A UUUGGGAA | 6797 | UUCCCAAA CUGAUGAGGCCGUUAGGCCGAA IUUCCACC | 16137 |
| 3482 | GGGAAAUC U CUUGCAAG | 6798 | CUUGCAAG CUGAUGAGGCCGUUAGGCCGAA IAUUUCCC | 16138 |
| 3484 | GAAAUCUC U UGCAAGCU | 6799 | AGCUUGCA CUGAUGAGGCCGUUAGGCCGAA IAGAUUUC | 16139 |
| 3488 | UCUCUUGC A AGCUAAUG | 6800 | CAUUAGCU CUGAUGAGGCCGUUAGGCCGAA ICAAGAGA | 16140 |
| 3492 | UUGCAAGC U AAUGCUCA | 6801 | UGAGCAUU CUGAUGAGGCCGUUAGGCCGAA ICUUGCAA | 16141 |
| 3498 | GCUAAUGC U CAGCAGGA | 6802 | UCCUGCUG CUGAUGAGGCCGUUAGGCCGAA ICAUUAGC | 16142 |
| 3500 | UAAUGCUC A GCAGGAUG | 6803 | CAUCCUGC CUGAUGAGGCCGUUAGGCCGAA IAGCAUUA | 16143 |
| 3503 | UGCUCAGC A GGAUGGCA | 6804 | UGCCAUCC CUGAUGAGGCCGUUAGGCCGAA ICUGAGCA | 16144 |
| 3511 | AGGAUGGC A AAGACUAC | 6805 | GUAGUCUU CUGAUGAGGCCGUUAGGCCGAA ICCAUCCU | 16145 |
| 3517 | GCAAAGAC U ACAUUGUU | 6806 | AACAAUGU CUGAUGAGGCCGUUAGGCCGAA IUCUUUGC | 16146 |
| 3520 | AAGACUAC A UUGUUCUU | 6807 | AAGAACAA CUGAUGAGGCCGUUAGGCCGAA IUAGUCUU | 16147 |
| 3527 | CAUUGUUC U UCCGAUAU | 6808 | AUAUCGGA CUGAUGAGGCCGUUAGGCCGAA IAACAAUG | 16148 |
| 3530 | UGUUCUUC C GAUAUCAG | 6809 | CUGAUAUC CUGAUGAGGCCGUUAGGCCGAA IAAGAACA | 16149 |
| 3537 | CCGAUAUC A GAGACUUU | 6810 | AAAGUCUC CUGAUGAGGCCGUUAGGCCGAA IAUAUCGG | 16150 |
| 3543 | UCAGAGAC U UUGAGCAU | 6811 | AUGCUCAA CUGAUGAGGCCGUUAGGCCGAA IUCUCUGA | 16151 |
| 3550 | CUUUGAGC A UGGAAGAG | 6812 | CUCUUCCA CUGAUGAGGCCGUUAGGCCGAA ICUCAAAG | 16152 |
| 3564 | GAGGAUUC U GUACUCUC | 6813 | GAGAGUCC CUGAUGAGGCCGUUAGGCCGAA IAAUCCUC | 16153 |
| 3569 | UUCUGGAC U CUCUCUGC | 6814 | GCAGAGAG CUGAUGAGGCCGUUAGGCCGAA IUCCAGAA | 16154 |
| 3571 | CUGGACUC U CUCUGCCU | 6815 | AGGCAGAG CUGAUGAGGCCGUUAGGCCGAA IAGUCCAG | 16155 |
| 3573 | GGACUCUC U CUGCCUAC | 6816 | GUAGGCAG CUGAUGAGGCCGUUAGGCCGAA IAGAGUCC | 16156 |
| 3575 | ACUCUCUC U GCCUACCU | 6817 | AGGUAGGC CUGAUGAGGCCGUUAGGCCGAA IAGAGAGU | 16157 |
| 3578 | CUCUCUGC C UACCUCAC | 6818 | GUGAGGUA CUGAUGAGGCCGUUAGGCCGAA ICAGAGAG | 16158 |
| 3579 | UCUCUGCC U ACCUCACC | 6819 | GGUGAGGU CUGAUGAGGCCGUUAGGCCGAA IGCAGAGA | 16159 |
| 3582 | CUGCCUAC C UCACCUGU | 6820 | ACAGGUGA CUGAUGAGGCCGUUAGGCCGAA IUAGGCAG | 16160 |
| 3583 | UGCCUACC U CACCUGUU | 6821 | AACAGGUG CUGAUGAGGCCGUUAGGCCGAA IGUAGGCA | 16161 |
| 3585 | CCUACCUC A CCUGUUUC | 6822 | GAAACAGG CUGAUGAGGCCGUUAGGCCGAA IAGGUAGG | 16162 |
| 3587 | UACCUCAC C UGUUUCCU | 6823 | AGGAAACA CUGAUGAGGCCGUUAGGCCGAA IUGAGGUA | 16163 |
| 3588 | ACCUCACC U GUUUCCUG | 6824 | CAGGAAAC CUGAUGAGGCCGUUAGGCCGAA IGUGAGGU | 16164 |
| 3594 | CCUGUiUC C UGUAUGGA | 6825 | UCCAUACA CUGAUGAGGCCGUUAGGCCGAA IAAACAGG | 16165 |
| 3595 | CUGUUUCC U GUAUGGAG | 6826 | CUCCAUAC CUGAUGAGGCCGUUAGGCCGAA IGAAACAG | 16166 |
| 3622 | UAUGUGAC C CCAAAUUC | 6827 | GAAUUUGG CUGAUGAGGCCGUUAGGCCGAA IUCACAUA | 16167 |
| 3623 | AUGUGACC C CAAAUUCC | 6828 | GGAAUUUG CUGAUGAGGCCGUUAGGCCGAA IGUCACAU | 16168 |
| 3624 | UGUGACCC C AAAUUCCA | 6829 | UGGAAUUU CUGAUGAGGCCGUUAGGCCGAA IGGUCACA | 16169 |
| 3625 | GUGACCCC A AAUUCCAU | 6830 | AUGGAAUU CUGAUGAGGCCGUUAGGCCGAA IGGGUCAC | 16170 |
| 3631 | CCAAAUUC C AUUAUGAC | 6831 | GUCAUAAU CUGAUGAGGCCGUUAGGCCGAA IAAUUUGG | 16171 |
| 3632 | CAAAUUCC A UUAUGACA | 6832 | UGUCAUAA CUGAUGAGGCCGUUAGGCCGAA IGAAUUUG | 16172 |
| 3640 | AUUAUGAC A ACACAGCA | 6833 | UGCUGUGU CUGAUGAGGCCGUUAGGCCGAA IUCAUAAU | 16173 |
| 3643 | AUGACAAC A CAGCAGGA | 6834 | UCCUGCUG CUGAUGAGGCCGUUAGGCCGAA IUUGUCAU | 16174 |
| 3645 | GACAACAC A GCAGGAAU | 6835 | AUUCCUGC CUGAUGAGGCCGUUAGGCCGAA IUGUUGUC | 16175 |
| 3648 | AACACAGC A GGAAUCAG | 6836 | CUGAUUCC CUGAUGAGGCCGUUAGGCCGAA ICUGUGUU | 16176 |
| 3655 | CAGGAAUC A GUCAGUAU | 6837 | AUACUGAC CUGAUGAGGCCGUUAGGCCGAA IAUUCCUG | 16177 |
| 3659 | AAUCAGUC A GUAUCUGC | 6838 | GCAGAUAC CUGAUGAGGCCGUUAGGCCGAA IACUGAUU | 16178 |
| 3665 | UCAGUAUC U GCAGAACA | 6839 | UGUUCUGC CUGAUGAGGCCGUUAGGCCGAA IAUACUGA | 16179 |
| 3668 | GUAUCUGC A GAACAGUA | 6840 | UACUGUUC CUGAUGAGGCCGUUAGGCCGAA ICAGAUAC | 16180 |
| 3673 | UGCAGAAC A GUAAGCGA | 6841 | UCGCUUAC CUGAUGAGGCCGUUAGGCCGAA IUUCUGCA | 16181 |
| 3688 | GAAAGAGC C GGCCUGUG | 6842 | CACAGGCC CUGAUGAGGCCGUUAGGCCGAA ICUCUUUC | 16182 |
| 3692 | GAGCCGGC C UGUGAGUG | 6843 | CACUCACA CUGAUGAGGCCGUUAGGCCGAA ICCGGCUC | 16183 |
| 3693 | AGCCGGCC U GUGAGUGU | 6844 | ACACUCAC CUGAUGAGGCCGUUAGGCCGAA IGCCGGCU | 16184 |
| 3708 | GUAAAAAC A UUUGAAGA | 6845 | UCUUCAAA CUGAUGAGGCCGUUAGGCCGAA IUUUUUAC | 16185 |
| 3721 | AAGAUAUC C CCUUAGAA | 6846 | UUCUAACG CUGAUGAGGCCGUUAGGCCGAA IAUAUCUU | 16186 |
| 3722 | AGAUAUCC C GUUAGAAG | 6847 | CUUCUAAC CUGAUGAGGCCGUUAGGCCGAA IGAUAUCU | 16187 |
| 3734 | AGAAGAAC C AGAAGUAA | 6848 | UUACUUCU CUGAUGAGGCCGUUAGGCCGAA IUUCUUCU | 16188 |
| 3735 | GAAGAACC A GAAGUAAA | 6849 | UUUACUUC CUGAUGAGGCCGUUAGGCCGAA IGUUCUUC | 16189 |
| 3751 | AAGUAAUC C CAGAUGAC | 6850 | GUCAUCUG CUGAUGAGGCCGUUAGGCCGAA IAUUACUU | 16190 |
| 3752 | AGUAAUCC C AGAUGACA | 6851 | UGUCAUCU CUGAUGAGGCCGUUAGGCCGAA IGAUUACU | 16191 |
| 3753 | GUAAUCCC A GAUGACAA | 6852 | UUGUCAUC CUGAUGAGGCCGUUAGGCCGAA IGGAUUAC | 16192 |
| 3760 | CAGAUGAC A ACCAGACG | 6853 | CGUCUGGU CUGAUGAGGCCGUUAGGCCGAA IUCAUCUG | 16193 |
| 3763 | AUGACAAC C AGACGGAC | 6854 | GUCCGUCU CUGAUGAGGCCGUUAGGCCGAA IUUGUCAU | 16194 |
| 3764 | UGACAACC A GACGGACA | 6855 | UGUCCGUC CUGAUGAGGCCGUUAGGCCGAA IGUUGUCA | 16195 |
| 3772 | AGACGGAC A GUGGUAUG | 6856 | CAUACCAC CUGAUGAGGCCGUUAGGCCGAA IUCCGUCU | 16196 |
| 3785 | UAUGGUUC U UGCCUCAG | 6857 | CUGAGGCA CUGAUGAGGCCGUUAGGCCGAA IAACCAUA | 16197 |
| 3789 | GUUCUUGC C UCAGAAGA | 6858 | UCUUCUGA CUGAUGAGGCCGUUAGGCCGAA ICAAGAAC | 16198 |
| 3790 | UUCUUGCC U CAGAAGAG | 6859 | CUCCUCUG CUGAUGAGGCCGUUAGGCCGAA IGCAAGAA | 16199 |
| 3792 | CUUGCCUC A GAAGAGCU | 6860 | AGCUCUUC CUGAUGAGGCCGUUAGGCCGAA IAGGCAAG | 16200 |
| 3800 | AGAAGAGC U GAAAACUU | 6861 | AAGUUUUC CUGAUGAGGCCGUUAGGCCGAA ICUCUUCU | 16201 |
| 3807 | CUGAAAAC U UUGGAAGA | 6862 | UCUUCCAA CUGAUGAGGCCGUUAGGCCGAA IUUUUCAG | 16202 |
| 3817 | UGGAAGAC A GAACCAAA | 6863 | UUUGGUUC CUGAUGAGGCCGUUAGGCCGAA IUCUUCCA | 16203 |
| 3822 | GACAGAAC C AAAUUAUC | 6864 | GAUAAUUU CUGAUGAGGCCGUUAGGCCGAA IUUCUGUC | 16204 |
| 3823 | ACAGAACC A AAUUAUCU | 6865 | AGAUAAUU CUGAUGAGGCCGUUAGGCCGAA IGUUCUGU | 16205 |
| 3831 | AAAUUAUC U CCAUCUUU | 6866 | AAAGAUGG CUGAUGAGGCCGUUAGGCCGAA IAUAAUUU | 16206 |
| 3833 | AUUAUCUC C AUCUUUUG | 6867 | CAAAAGAU CUGAUGAGGCCGUUAGGCCGAA IAGAUAAU | 16207 |
| 3834 | UUAUCUCC A UCUUUUGG | 6868 | CCAAAAGA CUGAUGAGGCCGUUAGGCCGAA IGAGAUAA | 16208 |
| 3837 | UCUCCAUC U UUUGGUGG | 6869 | CCACCAAA CUGAUGAGGCCGUUAGGCCGAA IAUGGAGA | 16209 |
| 3854 | AAUGGUGC C CAGCAAAA | 6870 | UUUUGCUG CUGAUGAGGCCGUUAGGCCGAA ICACCAUU | 16210 |
| 3855 | AUGGUGCC C AGCAAAAG | 6871 | CUUUUGCU CUGAUGAGGCCGUUAGGCCGAA IGCACCAU | 16211 |
| 3856 | UGGUGCCC A GCAAAAGC | 6872 | GCUUUUGC CUGAUGAGGCCGUUAGGCCGAA IGGCACCA | 16212 |
| 3859 | UGCCCAGC A AAAGCAGG | 6873 | CCUGCUUU CUGAUGAGGCCGUUAGGCCGAA ICUGGGCA | 16213 |
| 3865 | GCAAAAGC A GGGAGUCU | 6874 | AGACUCCC CUGAUGAGGCCGUUAGGCCGAA ICU(UUGC | 16214 |
| 3873 | AGGGAGUC U GUGGCAUC | 6875 | GAUGCCAC CUGAUGAGGCCGUUAGGCCGAA IACUCCCU | 16215 |
| 3879 | UCUGUGGC A UCUGAAGG | 6876 | CCUUCAGA CUGAUGAGGCCGUUAGGCCGAA ICCACAGA | 16216 |
| 3882 | GUGGCAUC U GAAGGCUC | 6877 | GAGCCUUC CUGAUGAGGCCGUUAGGCCGAA IAUGCCAC | 16217 |
| 3889 | CUGAAGGC U CAAACCAG | 6878 | CUGGUUUG CUGAUGAGGCCGUUAGGCCGAA ICCUUCAG | 16218 |
| 3891 | GAAGGCUC A AACCAGAC | 6879 | GUCUGGUU CUGAUGAGGCCGUUAGGCCGAA IAGCCUUC | 16219 |
| 3895 | GCUCAAAC C AGACAAGC | 6880 | GCUUGUCU CUGAUGAGGCCGUUAGGCCGAA IUUUGAGC | 16220 |
| 3896 | CUCAAACC A GACAAGCG | 6881 | CGCUUGUC CUGAUGAGGCCGUUAGGCCGAA IGUUUGAG | 16221 |
| 3900 | AACCAGAC A AGCGGCUA | 6882 | UAGCCGCU CUGAUGAGGCCGUUAGGCCGAA IUCUGGUU | 16222 |
| 3907 | CAAGCGGC U ACCAGUCC | 6883 | GGACUGGU CUGAUGAGGCCGUUAGGCCGAA ICCGCUUG | 16223 |
| 3910 | GCGGCUAC C AGUCCGGA | 6884 | UCCGGACU CUGAUGAGGCCGUUAGGCCGAA IUAGCCGC | 16224 |
| 3911 | CGGCUACC A GUCCGGAU | 6885 | AUCCGGAC CUGAUGAGGCCGUUAGGCCGAA IGUAGCCG | 16225 |
| 3915 | UACCAGUC C GGAUAUCA | 6886 | UGAUAUCC CUGAUGAGGCCGUUAGGCCGAA IACUGGUA | 16226 |
| 3923 | CGGAUAUC A CUCCGAUG | 6887 | CAUCGGAG CUGAUGAGGCCGUUAGGCCGAA IAUAUCCG | 16227 |
| 3925 | GAUAUCAC U CCGAUGAC | 6888 | GUCAUCGG CUGAUGAGGCCGUUAGGCCGAA IUGAUAUC | 16228 |
| 3927 | UAUCACUC C GAUGACAC | 6889 | GUGUCAUC CUGAUGAGGCCGUUAGGCCGAA IAGUGAUA | 16229 |
| 3934 | CCGAUGAC A CAGACACC | 6890 | GGUGUCUG CUGAUGAGGCCGUUAGGCCGAA IUCAUCGG | 16230 |
| 3936 | GAUGACAC A GACACCAC | 6891 | GUGGUGUC CUGAUGAGGCCGUUAGGCCGAA IUGUCAUC | 16231 |
| 3940 | ACACAGAC A CCACCGUG | 6892 | CACGGUGG CUGAUGAGGCCGUUAGGCCGAA IUCUGUGU | 16232 |
| 3942 | ACAGACAC C ACCGUGUA | 6893 | UACACGGU CUGAUGAGGCCGUUAGGCCGAA IUGUCUGU | 16233 |
| 3943 | CAGACACC A CCGUGUAC | 6894 | GUACACGG CUGAUGAGGCCGUUAGGCCGAA IGUGUCUG | 16234 |
| 3945 | GACACCAC C GUGUACUC | 6895 | GAGUACAC CUGAUGAGGCCGUUAGGCCGAA IUGGUGUC | 16235 |
| 3952 | CCGUGUAC U CCAGUGAG | 6896 | CUCACUGG CUGAUGAGGCCGUUAGGCCGAA IUACACGG | 16236 |
| 3954 | GUGUACUC C AGUGAGGA | 6897 | UCCUCACU CUGAUGAGGCCGUUAGGCCGAA IAGUACAC | 16237 |
| 3955 | UGUACUCC A GUGAGGAA | 6898 | UUCCUCAC CUGAUGAGGCCGUUAGGCCGAA IGAGUACA | 16238 |
| 3966 | GAGGAAGC A GAACUUUU | 6899 | AAAAGUUC CUGAUGAGGCCGUUAGGCCGAA ICUUCCUC | 16239 |
| 3971 | AGCAGAAC U UUUAAAGC | 6900 | GCUUUAAA CUGAUGAGGCCGUUAGGCCGAA IUUCUGCU | 16240 |
| 3980 | UUUAAAGC U GAUAGAGA | 6901 | UCUCUAUC CUGAUGAGGCCGUUAGGCCGAA ICUUUAAA | 16241 |
| 3998 | UGGAGUGC A AACCGGUA | 6902 | UACCGGUU CUGAUGAGGCCGUUAGGCCGAA ICACUCCA | 16242 |
| 4002 | GUGCAAAC C GGUAGCAC | 6903 | GUGCUACC CUGAUGAGGCCGUUAGGCCGAA IUUUGCAC | 16243 |
| 4009 | CCGGUAGC A CAGCCCAG | 6904 | CUGGGCUG CUGAUGAGGCCGUUAGGCCGAA ICUACCGG | 16244 |
| 4011 | GGUAGCAC A GCCCAGAU | 6905 | AUCUGGGC CUGAUGAGGCCGUUAGGCCGAA IUGCUACC | 16245 |
| 4014 | AGCACAGC C CAGAUUCU | 6906 | AGAAUCUG CUGAUGAGGCCGUUAGGCCGAA ICUGUGCU | 16246 |
| 4015 | GCACAGCC C AGAUUCUC | 6907 | GAGAAUCU CUGAUGAGGCCGUUAGGCCGAA IGCUGUGC | 16247 |
| 4016 | CACAGCCC A GAUUCUCC | 6908 | GGAGAAUC CUGAUGAGGCCGUUAGGCCGAA IGGCUGUG | 16248 |
| 4022 | CCAGAUUC U CCAGCCUG | 6909 | CAGGCUGG CUGAUGAGGCCGUUAGGCCGAA IAAUCUGG | 16249 |
| 4024 | AGAUUCUC C AGCCUGAC | 6910 | GUCAGGCU CUGAUGAGGCCGUUAGGCCGAA IAGAAUCU | 16250 |
| 4025 | GAUUCUCC A GCCUGACA | 6911 | UGUCAGGC CUGAUGAGGCCGUUAGGCCGAA IGAGAAUC | 16251 |
| 4028 | UCUCCAGC C UGACACGG | 6912 | CCGUGUCA CUGAUGAGGCCGUUAGGCCGAA ICUGGAGA | 16252 |
| 4029 | CUCCAGCC U GACACGGG | 6913 | CCCGUGUC CUGAUGAGGCCGUUAGGCCGAA IGCUGGAG | 16253 |
| 4033 | AGCCUGAC A CGGGGACC | 6914 | GGUCCCCG CUGAUGAGGCCGUUAGGCCGAA IUCAGGCU | 16254 |
| 4041 | ACGGGGAC C ACACUGAG | 6915 | CUCAGUGU CUGAUGAGGCCGUUAGGCCGAA IUCCCCGU | 16255 |
| 4042 | CGGGGACC A CACUGAGC | 6916 | GCUCAGUG CUGAUGAGGCCGUUAGGCCGAA IGUCCCCG | 16256 |
| 4044 | GGGACCAC A CUGAGCUC | 6917 | GAGCUCAG CUGAUGAGGCCGUUAGGCCGAA IUGGUCCC | 16257 |
| 4046 | GACCACAC U GAGCUCUC | 6918 | GAGAGCUC CUGAUGAGGCCGUUAGGCCGAA IUGUGGUC | 16258 |
| 4051 | CACUGAGC U CUCCUCCU | 6919 | AGGAGGAG CUGAUGAGGCCGUUAGGCCGAA ICUCAGUG | 16259 |
| 4053 | CUGAGCUC U CCUCCUGU | 6920 | ACAGGAGG CUGAUGAGGCCGUUAGGCCGAA IAGOUCAG | 16260 |
| 4055 | GAGCUCUC C UCCUGUUU | 6921 | AAACAGGA CUGAUGAGGCCGUUAGGCCGAA IAGAGCUC | 16261 |
| 4056 | AGCUCUCC U CCUGUUUA | 6922 | UAAACAGG CUGAUGAGGCCGUUAGGCCGAA IGAGAGCU | 16262 |
| 4058 | CUCUCCUC C UGUUUAAA | 6923 | UUUAAACA CUGAUGAGGCCGUUAGGCCGAA IAGGAGAG | 16263 |
| 4059 | UCUCCUCC U GUUUAAAA | 6924 | UUUUAAAC CUGAUGAGGCCGUUAGGCCGAA IGAGGAGA | 16264 |
| 4074 | AAGGAAGC A UCCACACC | 6925 | GGUGUGGA CUGAUGAGGCCGUUAGGCCGAA ICUUCCUU | 16265 |
| 4077 | GAAGCAUC C ACACCCCA | 6926 | UGGGGUGU CUGAUGAGGCCGUUAGGCCGAA IAUGCUUC | 16266 |
| 4078 | AAGCAUCC A CACCCCAA | 6927 | UUGGGGUG CUGAUGAGGCCGUUAGGCCGAA IGAUGCUU | 16267 |
| 4080 | GCAUCCAC A CCCCAACU | 6928 | AGUUGGGG CUGAUGAGGCCGUUAGGCCGAA IUGGAUGC | 16268 |
| 4082 | AUCCACAC C CCAACUCC | 6929 | GGAGUUGG CUGAUGAGGCCGUUAGGCCGAA IUGUGGAU | 16269 |
| 4083 | UCCACACC C CAACUCCC | 6930 | GGGAGUUG CUGAUGAGGCCGUUAGGCCGAA IGUGUGGA | 16270 |
| 4084 | CCACACCC C AACUCCCG | 6931 | CGGGAGUU CUGAUGAGGCCGUUAGGCCGAA IGGUGUGG | 16271 |
| 4085 | CACACCCC A ACUCCCGG | 6932 | CCGGGAGU CUGAUGAGGCCGUUAGGCCGAA IGGGUGUG | 16272 |
| 4088 | ACCCCAAC U CCCGGACA | 6933 | UGUCCGGG CUGAUGAGGCCGUUAGGCCGAA IUUGGGGU | 16273 |
| 4090 | CCCAACUC C CCGACAUC | 6934 | GAUGUCCG CUGAUGAGGCCGUUAGGCCGAA IAGUUGGG | 16274 |
| 4091 | CCAACUCC C GGACAUCA | 6935 | UGAUGUCC CUGAUGAGGCCGUUAGGCCGAA IGAGUUGG | 16275 |
| 4096 | UCCCGGAC A UCACAUGA | 6936 | UCAUGUGA CUGAUGAGGCCGUUAGGCCGAA IUCCGGGA | 16276 |
| 4099 | CGGACAUC A CAUGAGAG | 6937 | CUCUCAUG CUGAUGAGGCCGUUAGGCCGAA IAUGUCCG | 16277 |
| 4101 | GACAUCAC A UGAGAGGU | 6938 | ACCUCUCA CUGAUGAGGCCGUUAGGCCGAA IUGAUGUC | 16278 |
| 4111 | GAGAGGUC U GCUCAGAU | 6939 | AUCUGAGC CUGAUGAGGCCGUUAGGCCGAA IACCUCUC | 16279 |
| 4114 | AGGUCUGC U CAGAUUUU | 6940 | AAAAUCUG CUGAUGAGGCCGUUAGGCCGAA ICAGACCU | 16280 |
| 4116 | GUCUGCUC A GAUUUUGA | 6941 | UCAAAAUC CUGAUGAGGCCGUUAGGCCGAA IAGCAGAC | 16281 |
| 4135 | UGUUGUUC U UUCCACCA | 6942 | UGGUGGAA CUGAUGAGGCCGUUAGGCCGAA IAACAACA | 16282 |
| 4139 | GUUCUUUC C ACCAGCAG | 6943 | CUGCUGGU CUGAUGAGGCCGUUAGGCCGAA IAAAGAAC | 16283 |
| 4140 | UUCUUUCC A CCAGCAGG | 6944 | CCUGCUGG CUGAUGAGGCCGUUAGGCCGAA IGAAAGAA | 16284 |
| 4142 | CUUUCCAC C AGCAGGAA | 6945 | UUCCUGCU CUGAUGAGGCCGUUAGGCCGAA IUGGAAAG | 16285 |
| 4143 | UUUCCACC A GCAGGAAG | 6946 | CUUCCUGC CUGAUGAGGCCGUUAGGCCGAA IGUGGAAA | 16286 |
| 4146 | CCACCAGC A GGAAGUAG | 6947 | CUACUUCC CUGAUGAGGCCGUUAGGCCGAA ICUGGUGG | 16287 |
| 4156 | GAAGUAGC C CCAUUUGA | 6948 | UCAAAUGC CUGAUGAGGCCGUUAGGCCGAA ICUACUUC | 16288 |
| 4159 | GUAGCCGC A UUUGAUUU | 6949 | AAAUCAAA CUGAUGAGGCCGUUAGGCCGAA ICGGCUAC | 16289 |
| 4170 | UGAUUUUC A UUUCGACA | 6950 | UGUCGAAA CUGAUGAGGCCGUUAGGCCGAA IAAAAUCA | 16290 |
| 4178 | AUUUCGAC A ACAGAAAA | 6951 | UUUUCUGU CUGAUGAGGCCGUUAGGCCGAA IUCGAAAU | 16291 |
| 4181 | UCGACAAC A GAAAAAGG | 6952 | CCUUUUUC CUGAUGAGGCCGUUAGGCCGAA IUUGUCGA | 16292 |
| 4192 | AAAAGGAC C UCGGACUG | 6953 | CAGUCCGA CUGAUGAGGCCGUUAGGCCGAA IUCCUUUU | 16293 |
| 4193 | AAAGGACC U CGGACUGC | 6954 | GCAGUCCG CUGAUGAGGCCGUUAGGCCGAA IGUCCUUU | 16294 |
| 4199 | CCUCGGAC U GCAGGGAG | 6955 | CUCCCUGC CUGAUGAGGCCGUUAGGCCGAA IUCCGAGG | 16295 |
| 4202 | CGGACUGC A GGGAGCCA | 6956 | UGGCUCCC CUGAUGAGGCCGUUAGGCCGAA ICAGUCCG | 16296 |
| 4209 | CAGGGAGC C AGCUCUUC | 6957 | GAAGAGCU CUGAUGAGGCCGUUAGGCCGAA ICUCCCUG | 16297 |
| 4210 | AGGGAGCC A GCUCUUCU | 6958 | AGAAGAGC CUGAUGAGGCCGUUAGGCCGAA IGCUCCCU | 16298 |
| 4213 | GAGCCAGC U CUUCUAGG | 6959 | CCUAGAAG CUGAUGAGGCCGUUAGGCCGAA ICUGGCUC | 16299 |
| 4215 | GCCAGCUC U UCUAGGCU | 6960 | AGCCUAGA CUGAUGAGGCCGUUAGGCCGAA IAGCUGGC | 16300 |
| 4218 | AGCUCUUC U AGGCUUGU | 6961 | ACAAGCCU CUGAUGAGGCCGUUAGGCCGAA IAAGAGCU | 16301 |

Core Sequence = CUGAUGAG GCCGUUAGGC CGAA.
Underlined region can be any X sequence or linker, as described herein.
“I” represents Inosine

[0356] TABLE XVII
KDR G-Cleaver Ribozyme and Target Sequences

| | | Seq ID | | Seq ID |
|---|---|---|---|---|
| Pos | Target | No | Ribozyme Sequence | No |
| 12 | GCAAGGUGCU G CUGGC | 6962 | GCCAG UGAUG GCAUGCACUAUGC GCG AGCACCUUGC | 16302 |
| 22 | GCUGGCCGUC G CCCUG | 6963 | CAGGG UGAUG GCAUGCACUAUGC GCG GACGGCCAGC | 16303 |
| 35 | CUGUGGCUCU G CGUGG | 6964 | CCACG UGAUG GCAUGCACUAUGC GCG AGAGCCACAG | 16304 |
| 52 | GACCCGGGCC G CCUCU | 6965 | AGAGG UGAUG GCAUGCACUAUGC GCG GGCCCGGGUC | 16305 |
| 66 | CUGUGGGUUU G CCUAG | 6966 | CUAGG UGAUG GCAUGCACUAUGC GCG AAACCCACAG | 16306 |
| 82 | UGUUUCUCUU G AUCUG | 6967 | CAGAU UGAUG GCAUGCACUAUGC GCG AAGAGAAACA | 16307 |
| 87 | CUCUUGAUCU G CCCAG | 6968 | CUGGG UGAUG GCAUGCACUAUGC GCG AGAUCAAGAG | 16308 |
| 152 | CAAAUUACUU G CAGGG | 6969 | CCCUG UGAUG GCAUGCACUAUGC GCG AAGUAAUUUG | 16309 |
| 205 | GAGUGGCAGU G AGCAA | 6970 | UUGCU UGAUG GCAUGCACUAUGC GCG ACUGCCACUC | 16310 |
| 222 | GGGUGGAGGU G ACUGA | 6971 | UCAGU UGAUG GCAUGCACUAUGC GCG ACCUCCACCC | 16311 |
| 226 | GGAGGUGACU G AGUGC | 6972 | GCACU UGAUG GCAUGCACUAUGC GCG AGUCACCUCC | 16312 |
| 230 | GUGACUGAGU G CAGCG | 6973 | CGCUG UGAUG GCAUGCACUAUGC GCG ACUCAGUCAC | 16313 |
| 235 | UGAGUGCAGC G AUGGC | 6974 | GCCAU UGAUG GCAUGCACUAUGC GCG GCUGCACUCA | 16314 |
| 273 | UUCCAAAAGU G AUCGG | 6975 | CCGAU UGAUG GCAUGCACUAUGC GCG ACUUUUGGAA | 16315 |
| 283 | GAUCGGAAAU G ACACU | 6976 | AGUGU UGAUG GCAUGCACUAUGC GCG AUUUCCGAUC | 16316 |
| 302 | GCCUACAAGU G CUUCU | 6977 | AGAAG UGAUG GCAUGCACUAUGC GCG ACUUGUAGGC | 16317 |
| 319 | CCGGGAAACU G ACUUG | 6978 | CAAGU UGAUG GCAUGCACUAUGC GCG AGUUUCCCGG | 16318 |
| 373 | UCCAUUUAUU C CUUCU | 6979 | AGAAG UGAUG GCAUGCACUAUGC GCG AAUAAAUGGA | 16319 |
| 385 | UUCUGUUAGU G ACCAA | 6980 | UUGGU UGAUG GCAUGCACUAUGC GCG ACUAACAGAA | 16320 |
| 412 | GUACAUUACU G AGAAC | 6981 | GUUCU UGAUG GCAUGCACUAUGC GCG AGUAAUGUAC | 16321 |
| 435 | AAACUGUGGU G AUUCC | 6982 | GGAAU UGAUG GCAUGCACUAUGC GCG ACCACAGUUU | 16322 |
| 481 | GUCACUUUGU G CAAGA | 6983 | UCUUG UGAUG GCAUGCACUAUGC GCG ACAAAGUGAC | 16323 |
| 511 | AUUUGUUCCU G AUGGU | 6984 | ACCAU UGAUG GCAUGCACUAUGC GCG AGGAACAAAU | 16324 |
| 567 | CCAGCUACAU G AUCAG | 6985 | CUGAU UGAUG GCAUGCACUAUGC GCG AUGUAGCUGG | 16325 |
| 577 | GAUCAGCUAU G CUGGC | 6986 | GCCAG UGAUG GCAUGCACUAUGC GCG AUAGCUGAUC | 16326 |
| 595 | GGUCUUCUGU G AAGCA | 6987 | UGCUU UGAUG GCAUGCACUAUGC GCG ACAGAAGACC | 16327 |
| 610 | AAAAAUUAAU G AUGAA | 6988 | UUCAU UGAUG GCAUGCACUAUGC GCG AUUAAUUUUU | 16328 |
| 613 | AAUUAAUGAU G AAAGU | 6989 | ACUUU UGAUG GCAUGCACUAUGC GCG AUCAUUAAUU | 16329 |
| 667 | UAGGAUUUAU G AUGUG | 6990 | CACAU UGAUG GCAUGCACUAUGC GCG AUAAAUCCUA | 16330 |
| 678 | AUGUGGUUCU G AGUCC | 6991 | GGACU UGAUG GCAUGCACUAUGC GCG AGAACCACAU | 16331 |
| 697 | UCAUGGAAUU G AACUA | 6992 | UAGUU UGAUG GCAUGCACUAUGC GCG AAUUCCAUGA | 16332 |
| 745 | AGCAAGAACU G AACUA | 6993 | UAGUU UGAUG GCAUGCACUAUGC GCG AGUUCUUGCU | 16333 |
| 763 | UGUGGGGAUU G ACUUC | 6994 | GAAGU UGAUG GCAUGCACUAUGC GCG AAUCCCCACA | 16334 |
| 789 | ACCCUUCUUC G AAGCA | 6995 | UGCUU UGAUG GCAUGCACUAUGC GCG GAAGAAGGGU | 16335 |
| 818 | CUUGUAAACC G AGACC | 6996 | GGUCU UGAUG GCAUGCACUAUGC GCG GGUUUACAAG | 16336 |
| 844 | GUCUGGGAGU G AGAUG | 6997 | CAUCU UGAUG GCAUGCACUAUGC GCG ACUCCCAGAC | 16337 |
| 849 | GGAGUGAGAU G AAGAA | 6998 | UUCUU UGAUG GCAUGCACUAUGC GCG AUCUCACUCC | 16338 |
| 861 | AGAAAUUUUU G AGCAC | 6999 | GUGCU UGAUG GCAUGCACUAUGC GCG AAAAAUUUCU | 16339 |
| 895 | AACCCGGAGU G ACCAA | 7000 | UUGGU UGAUG GCAUGCACUAUGC GCG ACUCCGGGUU | 16340 |
| 916 | GUACACCUGU G CAGCA | 7001 | UGCUG UGAUG GCAUGCACUAUGC CCC ACACCUCUAC | 16341 |
| 933 | CCAGUGGGCU G AUGAC | 7002 | GUCAU UGAUC GCAUCCACUAUGC GCG AGCCCACUGG | 16342 |
| 936 | GUGGGCUGAU G ACCAA | 7003 | UUGGU UGAUG GCAUGCACUAUGC GCG AUCAGCCCAC | 16343 |
| 970 | CAGGGUCCAU G AAAAA | 7004 | UUUUU UGAUG GCAUGCACUAUGC GCG AUGGACCCUG | 16344 |
| 985 | ACCUUUUGUU G CUUUU | 7005 | AAAAG UGAUG GCAUGCACUAUGC GCG AACAAAAGGU | 16345 |
| 1048 | CAGAAUCCCU G CGAAG | 7006 | CUUCG UGAUG GCAUGCACUAUGC GCG AGGGAUUCUG | 16346 |
| 1050 | GAAUCCCUGC G AAGUA | 7007 | UACUU UGAUG GCAUGCACUAUCC CCC GCAGCGAUUC | 16347 |
| 1108 | AAUACCCCUU G AGUCC | 7008 | GGACU UGAUG GCAUGCACUAUGC GCG AAGGGGUAUU | 16348 |
| 1143 | GGCAUGUACU G ACGAU | 7009 | AUCGU UGAUG GCAUGCACUAUGC GCG AGUACAUGCC | 16349 |
| 1146 | AUGUACUGAC G AUUAU | 7010 | AUAAU UGAUG GCAUGCACUAUGC GCG GUCAGUACAU | 16350 |
| 1158 | UUAUGGAAGU G AGUGA | 7011 | UCACU UGAUG GCAUGCACUAUGC GCG ACUUCCAUAA | 16351 |
| 1162 | GGAAGUGAGU G AAAGA | 7012 | UCUUU UGAUG GCAUGCACUAUGC GCG ACUCACUUCC | 16352 |
| 1267 | CCAGAUUGGU G AGAAA | 7013 | UUUCU UGAUG GCAUGCACUAUGC GCG ACCAAUCUGG | 16353 |
| 1320 | CCACUCAAAC G CUGAC | 7014 | GUCAG UGAUG GCAUGCACUAUGC GCG GUUUGAGUGG | 16354 |
| 1323 | CUCAAACGCU G ACAUG | 7015 | CAUGU UGAUG GCAUGCACUAUGC GCG AGCGUUUGAG | 16355 |
| 1339 | UACGGUCUAU G CCAUU | 7016 | AAUGG UGAUG GCAUGCACUAUGC GCG AUAGACCGUA | 16356 |
| 1353 | UUCCUCCCCC G CAUCA | 7017 | UGAUG UGAUG GCAUGCACUAUGC GCG GGGGGAGGAA | 16357 |
| 1391 | GAGGAAGAGU G CGCCA | 7018 | UGGCG UGAUG GCAUGCACUAUGC GCG ACUCUUCCUC | 16358 |
| 1393 | GGAAGAGUGC G CCAAC | 7019 | GUGUG UGAUG GCAUGCACUAUGC GCG GCACUCUUCC | 16359 |
| 1399 | GUGCGCCAAC G AGCCC | 7020 | GGGCU UGAUG GCAUGCACUAUGC GCG GUUGGCGCAC | 16360 |
| 1422 | CUGUCUCAGU G ACAAA | 7021 | UUUGU UGAUG GCAUGCACUAUGC GCG ACUGAGACAG | 16361 |
| 1441 | AUACCCUUGU G AAGAA | 7022 | UUCUU UGAUG GCAUGCACUAUGC GCG ACAAGGGUAU | 16362 |
| 1486 | AAAUAAAAUU G AAGUU | 7023 | AACUU UGAUG GCAUGCACUAUGC GCG AAUUUUAUUU | 16363 |
| 1507 | AAAUCAAUUU G CUCUA | 7024 | UAGAG UGAUG GCAUGCACUAUGC GCG AAAUUGAUUU | 16364 |
| 1516 | UGCUCUAAUU G AAGGA | 7025 | UCCUU UGAUG GCAUGCACUAUGC GCG AAUUAGAGCA | 16365 |
| 1585 | GUACAAAUGU G AAGCG | 7026 | CGCUU UGAUG GCAUGCACUAUGC GCG ACAUUUGUAC | 16366 |
| 1620 | GAGAGAGGGU G AUCUC | 7027 | GAGAU UGAUG GCAUGCACUAUGC GCG ACCCUCUCUC | 16367 |
| 1635 | CCUUCCACGU G ACCAG | 7028 | CUGGU UGAUG GCAUGCACUAUGC GCG ACGUGGAAGG | 16368 |
| 1648 | CAGGGGUCCU G AAAUU | 7029 | AAUUU UGAUG GCAUGCACUAUGC GCG AGGACCCCUG | 16369 |
| 1659 | AAAUUACUUU G CAACC | 7030 | GGUUG UGAUG GCAUGCACUAUGC GCG AAAGUAAUUU | 16370 |
| 1666 | UUUGCAACCU G ACAUG | 7031 | CAUGU UGAUG GCAUGCACUAUGC GCG AGGUUGCAAA | 16371 |
| 1671 | AACCUGACAU G CAGCC | 7032 | GGCUG UGAUG GCAUGCACUAUGC GCG AUGUCAGGUU | 16372 |
| 1681 | GCAGCCCACU G AGCAG | 7033 | CUGCU UGAUG GCAUGCACUAUGC GCG AGUGGGCUGC | 16373 |
| 1706 | UCUUUGUGGU G CACUG | 7034 | CAGUG UGAUG GCAUGCACUAUGC GCG ACCACAAAGA | 16374 |
| 1711 | GUGGUGCACU G CAGAC | 7035 | GUCUG UGAUG GCAUGCACUAUGC GCG AGUGCACCAC | 16375 |
| 1729 | AUCUACGUUU G AGAAC | 7036 | GUUCU UGAUG GCAUGCACUAUGC GCG AAACGUAGAU | 16376 |
| 1767 | CACAGCCUCU G CCAAU | 7037 | AUUGG UGAUG GCAUGCACUAUGC GCG AGAGGCUGUG | 16377 |
| 1788 | UGGGAGAGUU G CCCAC | 7038 | GUGGG UGAUG GCAUGCACUAUGC GCG AACUCUCCCA | 16378 |
| 1802 | ACACCUGUUU G CAAGA | 7039 | UCUUG UGAUG GCAUGCACUAUGC GCG AAACAGGUGU | 16379 |
| 1830 | UUUGGAAAUU G AAUGC | 7040 | GCAUU UGAUG GCAUGCACUAUGC GCG AAUUUCCAAA | 16380 |
| 1834 | GAAAUUGAAU G CCACC | 7041 | GGUGG UGAUG GCAUGCACUAUGC GCG AUUCAAUUUC | 16381 |
| 1861 | UAGCACAAAU G ACAUU | 7042 | AAUGU UGAUG GCAUGCACUAUGC GCG AUUUGUGCUA | 16382 |
| 1869 | AUGACAUUUU G AUCAU | 7043 | AUGAU UGAUG GCAUGCACUAUGC GCG AAAAUGUCAU | 16383 |
| 1888 | GCUUAAGAAU G CAUCC | 7044 | GGAUG UGAUG GCAUGCACUAUGC GCG AUUCUUAAGC | 16384 |
| 1896 | AUGCAUCCUU G CAGGA | 7045 | UCCUG UGAUG GCAUGCACUAUGC GCG AAGGAUGCAU | 16385 |
| 1919 | GACUAUGUCU G CCUUG | 7046 | CAAGG UGAUG GCAUGCACUAUGC GCG AGACAUAGUC | 16386 |
| 1924 | UGUCUGCCUU G CUCAA | 7047 | UUGAG UGAUG GCAUGCACUAUGC GCG AAGGCAGACA | 16387 |
| 1955 | AAAAGACAUU G CGUGG | 7048 | CCACG UGAUG GCAUGCACUAUGC GCG AAUGUCUUUU | 16388 |
| 1998 | UGGCACCCAC G AUCAC | 7049 | GUGAU UGAUG GCAUGCACUAUGC GCG GUGGGUGCCA | 16389 |
| 2025 | AGAAUCAGAC G ACAAG | 7050 | CUUGU UGAUG GCAUGCACUAUGC GCG GUCUGAUUCU | 16390 |
| 2047 | GGAAAGCAUC G AAGUC | 7051 | GACUU UGAUG GCAUGCACUAUGC GCG GAUGCUUUCC | 16391 |
| 2057 | GAAGUCUCAU G CACGG | 7052 | CCGUG UGAUG GCAUGCACUAUGC GCG AUGAGACUUC | 16392 |
| 2107 | UAAAGAUAAU G AGACC | 7053 | GGUCU UGAUG GCAUGCACUAUGC GCG AUUAUCUUUA | 16393 |
| 2139 | GCAUUGUAUU G AAGGA | 7054 | UCCUU UGAUG GCAUGCACUAUGC GCG AAUACAAUGC | 16394 |
| 2168 | CUCACUAUCC G CAGAG | 7055 | CUCUG UGAUG GCAUGCACUAUGC GCG GGAUAGUGAG | 16395 |
| 2175 | UCCGCAGAGU G AGGAA | 7056 | UUCCU UGAUG GCAUGCACUAUGC GCG ACUCUGCGGA | 16396 |
| 2188 | GAAGGAGGAC G AAGGC | 7057 | GCCUU UGAUG GCAUGCACUAUGC GCG GUCCUCCUUC | 16397 |
| 2204 | CUCUACACCU G CCAGG | 7058 | CCUGG UGAUG GCAUGCACUAUGC GCG AGGUGUAGAG | 16398 |
| 2213 | UGCCAGGCAU G CAGUG | 7059 | CACUG UGAUG GCAUGCACUAUGC GCG AUGCCUGGCA | 16399 |
| 2230 | UCUUGGCUGU G CAAAA | 7060 | UUUUG UGAUG GCAUGCACUAUGC GCG ACAGCCAAGA | 16400 |
| 2263 | AAUAGAAGGU G CCCAG | 7061 | CUGGG UGAUG GCAUGCACUAUGC GCG ACCUUCUAUU | 16401 |
| 2277 | AGGAAAAGAC G AACUU | 7062 | AAGUU UGAUG GCAUGCACUAUGC GCG GUCUUUUCCU | 16402 |
| 2307 | UAGUAGGCAC G ACGGU | 7063 | ACCGU UGAUG GCAUGCACUAUGC GCG GUGCCUACUA | 16403 |
| 2313 | GCACGACGGU G AUUGC | 7064 | GCAAU UGAUG GCAUGCACUAUGC GCG ACCGUCGUGC | 16404 |
| 2317 | GACGGUGAUU G CCAUG | 7065 | CAUGG UGAUG GCAUGCACUAUGC GCG AAUCACCGUC | 16405 |
| 2385 | GAGGGGAACU G AAGAC | 7066 | GUCUU UGAUG GCAUGCACUAUGC GCG AGUUCCCCUC | 16406 |
| 2422 | GGAUCCAGAU G AACUC | 7067 | GAGUU UGAUG GCAUGCACUAUGC GCG AUCUGGAUCC | 16407 |
| 2437 | CCCAUUGGAU G AACAU | 7068 | AUGUU UGAUG GCAUGCACUAUGC GCG AUCCAAUGGG | 16408 |
| 2446 | UGAACAUUGU G AACGA | 7069 | UCGUU UGAUG GCAUGCACUAUGC GCG ACAAUGUUCA | 16409 |
| 2450 | CAUUGUGAAC G ACUGC | 7070 | GCAGU UGAUG GCAUGCACUAUGC GCG GUUCACAAUG | 16410 |
| 2454 | GUGAACGACU G CCUUA | 7071 | UAAGG UGAUG GCAUGCACUAUGC GCG AGUCGUUCAC | 16411 |
| 2461 | ACUGCCUUAU G AUGCC | 7072 | GGCAU UGAUG GCAUGCACUAUGC GCG AUAAGGCAGU | 16412 |
| 2464 | GCCUUAUGAU G CCAGC | 7073 | GCUGG UGAUG GCAUGCACUAUGC GCG AUCAUAAGGC | 16413 |
| 2496 | GAGACCGGCU G AACCU | 7074 | AGGUU UGAUG GCAUGCACUAUGC GCG AGCCGGUCUC | 16414 |
| 2524 | UGGCCGUGGU G CCUUU | 7075 | AAAGG UGAUG GCAUGCACUAUGC GCG ACCACGGCCA | 16415 |
| 2542 | CCAAGAGAUU G AAGCA | 7076 | UGCUU UGAUG GCAUGCACUAUGC GCG AAUCUCUUGG | 16416 |
| 2551 | UGAAGCAGAU G CCUUU | 7077 | AAAGG UGAUG GCAUGCACUAUGC GCG AUCUGCUUCA | 16417 |
| 2563 | CUUUGGAAUU G ACAAG | 7078 | CUUGU UGAUG GCAUGCACUAUGC GCG AAUUCCAAAG | 16418 |
| 2579 | ACAGCAACUU G CAGGA | 7079 | UCCUG UGAUG GCAUGCACUAUGC GCG AAGUUGCUGU | 16419 |
| 2604 | UCAAAAUGUU G AAAGA | 7080 | UCUUU UGAUG GCAUGCACUAUGC GCG AACAUUUUGA | 16420 |
| 2626 | AACACACAGU G AGCAU | 7081 | AUGCU UGAUG GCAUGCACUAUGC GCG ACUGUGUGUU | 16421 |
| 2633 | AGUGAGCAUC G ACCUC | 7082 | GAGCU UGAUG GCAUGCACUAUGC GCG GAUGCUCACU | 16422 |
| 2647 | UCUCAUGUCU G AACUC | 7083 | GAGUU UGAUG GCAUGCACUAUGC GCG AGACAUGAGA | 16423 |
| 2704 | CCUUCUAGGU G CCUGU | 7084 | ACAGG UGAUG GCAUGCACUAUGC GCG ACCUAGAAGG | 16424 |
| 2736 | CACUCAUGGU G AUUGU | 7085 | ACAAU UGAUG GCAUGCACUAUGC GCG ACCAUGAGUG | 16425 |
| 2750 | GUGGAAUUCU G CAAAU | 7086 | AUUUG UGAUG GCAUGCACUAUGC GCG AGAAUUCCAC | 16426 |
| 2778 | CCACUUACCU G AGGAG | 7087 | CUCCU UGAUG GCAUGCACUAUGC GCG AGGUAAGUGG | 16427 |
| 2794 | CAAGAGAAAU G AAUUU | 7088 | AAAUU UGAUG GCAUGCACUAUGC GCG AUUUCUCUUG | 16428 |
| 2825 | AAAGGGGCAC G AUUCC | 7089 | GGAAU UGAUG GCAUGCACUAUGC GCG GUGCCCCUUU | 16429 |
| 2871 | CUGUGGAUCU G AAACG | 7090 | CGUUU UGAUG GCAUGCACUAUGC GCG AGAUCCACAG | 16430 |
| 2879 | CUGAAACGGC G CUUGG | 7091 | CCAAG UGAUG GCAUGCACUAUGC GCG GCCGUUUCAG | 16431 |
| 2947 | GUCCCUCAGU G AUGUA | 7092 | UACAU UGAUG GCAUGCACUAUGC GCG ACUGAGGGAC | 16432 |
| 2971 | GGAAGCUCCU G AAGAU | 7093 | AUCUU UGAUG GCAUGCACUAUGC GCG AGGAGCUUCC | 16433 |
| 2994 | AGGACUUCCU G ACCUU | 7094 | AAGGU UGAUG GCAUGCACUAUGC GCG AGGAAGUCCU | 16434 |
| 3057 | UCUUGGCAUC G CGAAA | 7095 | UUUCG UGAUG GCAUGCACUAUGC GCG GAUGCCAAGA | 16435 |
| 3059 | UUGGCAUCGC G AAAGU | 7096 | ACUUU UGAUG GCAUGCACUAUGC GCG GCGAUGCCAA | 16436 |
| 3089 | CUGGCGGCAC G AAAUA | 7097 | UAUUU UGAUG GCAUGCACUAUGC GCG GUGCCGCCAG | 16437 |
| 3130 | UAAAAUCUGU G ACUUU | 7098 | AAAGU UGAUG GCAUGCACUAUGC GCG ACAGAUUUUA | 16438 |
| 3187 | AAAAGGAGAU G CUCGC | 7099 | GCGAG UGAUG GCAUGCACUAUGC GCG AUCUCCUUUU | 16439 |
| 3191 | GGAGAUGCUC G CCUCC | 7100 | GGAGG UGAUG GCAUGCACUAUGC GCG GAGCAUCUCC | 16440 |
| 3201 | GCCUCCCUUU G AAAUG | 7101 | CAUUU UGAUG GCAUGCACUAUGC GCG AAAGGGAGGC | 16441 |
| 3229 | AACAAUUUUU G ACAGA | 7102 | UCUGU UGAUG GCAUGCACUAUGC GCG AAAAAUUGUU | 16442 |
| 3253 | AAUCCAGAGU G ACUUC | 7103 | GACGU UGAUG GCAUGCACUAUGC GCG ACUCUGGAUU | 16443 |
| 3276 | UUGGUGUUUU G CUGUG | 7104 | CACAG UGAUG GCAUGCACUAUGC GCG AAAACACCAA | 16444 |
| 3301 | UUCCUUAGGU G CUUCU | 7105 | AGAAG UGAUG GCAUGCACUAUGC GCG ACCUAAGGAA | 16445 |
| 3328 | GGUAAAGAUU G AUGAA | 7106 | UUCAU UGAUG GCAUGCACUAUGC GCG AAUCUUUACC | 16446 |
| 3331 | AAAGAUUGAU G AAGAA | 7107 | UUCUU UGAUG GCAUGCACUAUGC GCG AUCAAUCUUU | 16447 |
| 3347 | UUUUGUAGGC G AUUGA | 7108 | UCAAU UGAUG GCAUGCACUAUGC GCG GCCUACAAAA | 16448 |
| 3351 | GUAGGCGAUU G AAAGA | 7109 | UCUUU UGAUG GCAUGCACUAUGC GCG AAUCGCCUAC | 16449 |
| 3369 | GAACUAGAAU G AGGGC | 7110 | GCCCU UGAUG GCAUGCACUAUGC GCG AUUCUAGUUC | 16450 |
| 3379 | GAGGGCCCCU G AUUAU | 7111 | AUAAU UGAUG GCAUGCACUAUGC GCG AGGGGCCCUC | 16451 |
| 3411 | ACCAGACCAU G CUGGA | 7112 | UCCAG UGAUG GCAUGCACUAUGC GCG AUGGUCUGGU | 16452 |
| 3419 | AUGCUGGACU G CUGGC | 5872 | GCCAG UGAUG GCAUGCACUAUGC GCG AGUCCAGCAU | 15212 |
| 3486 | GAAAUCUCUU G CAAGC | 7113 | GCUUG UGAUG GCAUGCACUAUGC GCG AAGAGAUUUC | 16453 |
| 3496 | GCAAGCUAAU G CUCAG | 7114 | CUGAG UGAUG GCAUGCACUAUGC GCG AUUAGCUUGC | 16454 |
| 3531 | UUGUUCUUCC G AUAUC | 7115 | GAUAU UGAUG GCAUGCACUAUGC GCG GGAAGAACAA | 16455 |
| 3546 | CAGAGACUUU G AGCAU | 7116 | AUGCU UGAUG GCAUGCACUAUGC GCG AAAGUCUCUG | 16456 |
| 3576 | GACUCUCUCU G CCUAC | 7117 | GUAGG UGAUG GCAUGCACUAUGC GCG AGAGAGAGUC | 16457 |
| 3619 | GGAAGUAUGU G ACCCC | 7118 | GGGGU UGAUG GCAUGCACUAUGC GCG ACAUACUUCC | 16458 |
| 3637 | AUUCCAUUAU G ACAAC | 7119 | GUUGU UGAUG GCAUGCACUAUGC GCG AUAAUGGAAU | 16459 |
| 3666 | GUCAGUAUCU G CAGAA | 7120 | UCCUG UGAUG GCAUGCACUAUGC GCG AGAUACUGAC | 16460 |
| 3680 | AACAGUAAGC G AAAGA | 7121 | UCUUU UGAUG GCAUGCACUAUGC GCG GCUUACUGUU | 16461 |
| 3696 | GCCGGCCUGU G AGUGU | 7122 | ACACU UGAUG GCAUGCACUAUGC GCG ACAGGCCGGC | 16462 |
| 3712 | AAAAACAUUU G AAGAU | 7123 | AUCUU UGAUG GCAUGCACUAUGC GCG AAAUGUUUUU | 16463 |
| 3757 | AAUCCCAGAU G ACAAC | 7124 | GUUGU UGAUG GCAUGCACUAUGC GCG AUCUGGGAUU | 16464 |
| 3787 | UAUGGUUCUU G CCUCA | 7125 | UGAGG UGAUG GCAUGCACUAUGC GCG AAGAACCAUA | 16465 |
| 3801 | CAGAAGAGCU G AAAAC | 7126 | GUUUU UGAUG GCAUGCACUAUGC GCG AGCUCUUCUG | 16466 |
| 3852 | GUGGAAUGGU G CCCAG | 7127 | CUGGG UGAUG GCAUGCACUAUGC GCG ACCAUUCCAC | 16467 |
| 3883 | UGUGGCAUCU G AAGGC | 7128 | GCCUU UGAUG GCAUGCACUAUGC GCG AGAUGCCACA | 16468 |
| 3928 | AUAUCACUCC G AUGAC | 7129 | GUCAU UGAUG GCAUGCACUAUGC GCG GGAGUGAUAU | 16469 |
| 3931 | UCACUCCGAU G ACACA | 7130 | UGUGU UGAUG GCAUGCACUAUGC GCG AUCGGAGUGA | 16470 |
| 3958 | GUACUCCAGU G AGGAA | 7131 | UUCCU UGAUG GCAUGCACUAUGC GCG ACUGGAGUAC | 16471 |
| 3981 | UUUUAAAGCU G AGAGA | 7132 | UCUAU UGAUG GCAUGCACUAUGC GCG AGCUUUAAAA | 16472 |
| 3996 | AGAUUGGAGU G CAAAC | 7133 | GUUUG UGAUG GCAUGCACUAUGC GCG ACUCCAAUCU | 16473 |
| 4030 | UCUCCAGCCU G ACACG | 7134 | CGUGU UGAUG GCAUGCACUAUGC GCG AGGCUGGAGA | 16474 |
| 4047 | GGACCACACU G AGCUC | 7135 | GAGCU UGAUG GCAUGCACUAUGC GCG AGUGUGGUCC | 16475 |
| 4103 | GACAUCACAU G AGAGG | 7136 | CCUCU UGAUG GCAUGCACUAUGC GCG AUGUGAUGUC | 16476 |
| 4112 | UGAGAGGUCU G CUCAG | 7137 | CUGAG UGAUG GCAUGCACUAUGC GCG AGACCUCUCA | 16477 |
| 4123 | CUCAGAUUUU G AAGUG | 7138 | CACUU UGAUG GCAUGCACUAUGC GCG AAAAUCUGAG | 16478 |
| 4157 | GGAAGUAGCC G CAUUU | 7139 | AAAUG UGAUG GCAUGCACUAUGC GCG GGCUACUUCC | 16479 |
| 4163 | AGCCGCAUUU G AUUUU | 7140 | AAAAU UGAUG GCAUGCACUAUGC GCG AAAUGCGGCU | 16480 |
| 4175 | UUUUCAUUUC G ACAAC | 7141 | GUUGU UGAUG GCAUGCACUAUGC GCG GAAAUGAAAA | 16481 |
| 4200 | ACCUCGGACU G CAGGG | 7142 | CCCUG UGAUG GCAUGCACUAUGC GCG AGUCCGAGGU | 16482 |

[0357] TABLE XVIII
Human FLT DNAzyme and Substrate Sequence

| | | Seq ID | | Seq ID |
|---|---|---|---|---|
| Pos | Substrate | No | DNAzyme | No |
| 17 | UCCUCUCG G CUCCUCCC | 7143 | GGGAGGAG GGCTAGCTACAACGA CGAGAGGA | 16483 |
| 28 | CCUCCCCG G CAGCGGCG | 7144 | CGCCGCTG GGCTAGCTACAACGA CGGGGAGG | 16484 |
| 31 | CCCCGGCA G CGGCGGCG | 7145 | CGCCGCCG GGCTAGCTACAACGA TGCCGGGG | 16485 |
| 34 | CGGCAGCG G CGGCGGCU | 7146 | AGCCGCCG GGCTAGCTACAACGA CGCTGCCG | 16486 |
| 37 | CAGCGGCG G CGGCUCGG | 7147 | CCGAGCCG GGCTAGCTACAACGA CGCCGCTG | 16487 |
| 40 | CGGCGGCG G CUCGGAGC | 7148 | GCTCCGAG GGCTAGCTACAACGA CGCCGCCG | 16488 |
| 47 | GGCUCGGA G CGGGCUCC | 7149 | GGAGCCCG GGCTAGCTACAACGA TCCGAGCC | 16489 |
| 51 | CGGAGCGG G CUCCGGGG | 7150 | CCCCGGAG GGCTAGCTACAACGA CCGCTCCG | 16490 |
| 59 | GCUCCGGG G CUCGGGUG | 7151 | CACCCGAG GGCTAGCTACAACGA CCCGGAGC | 16491 |
| 65 | GGGCUCGG G UGCAGCGG | 7152 | CCGCTGCA GGCTAGCTACAACGA CCGAGCCC | 16492 |
| 67 | GCUCGGGU G CAGCGGCC | 7153 | GGCCGCTG GGCTAGCTACAACGA ACCCGAGC | 16493 |
| 70 | CGGGUGCA G CGGCCAGC | 7154 | GCTGGCCG GGCTAGCTACAACGA TGCACCCG | 16494 |
| 73 | GUGCAGCG G CCAGCGGG | 7155 | CCCGCTGG GGCTAGCTACAACGA CGCTGCAC | 16495 |
| 77 | AGCGCCCA G CGGGCCUG | 7156 | CAGGCCCG GGCTAGCTACAACGA TGGCCGCT | 16496 |
| 81 | GCCAGCGG G CCUGGCGG | 7157 | CCGCCAGG GGCTAGCTACAACGA CCGCTGGC | 16497 |
| 86 | CGGGCCUG G CGGCGAGG | 7158 | CCTCGCCG GGCTAGCTACAACGA CAGGCCCG | 16498 |
| 89 | GCCUGGCG G CGAGGAUU | 7159 | AATCCTCG GGCTAGCTACAACGA CGCCAGGC | 16499 |
| 95 | CGGCGAGG A UUACCCGG | 7160 | CCGGGTAA GGCTAGCTACAACGA CCTCGCCG | 16500 |
| 98 | CGAGGAUU A CCCGGGGA | 10 | TCCCCGGG GGCTAGCTACAACGA AATCCTCG | 16501 |
| 108 | CCGGGGAA G UGGUUGUC | 7161 | GACAACCA GGCTAGCTACAACGA TTCCCCGG | 16502 |
| 111 | GGGAAGUG G UUGUCUCC | 7162 | GGAGACAA GGCTAGCTACAACGA CACTTCCC | 16503 |
| 114 | AAGUGGUU G UCUCCUGG | 7163 | CCAGGAGA GGCTAGCTACAACGA AACCACTT | 16504 |
| 122 | GUCUCCUG G CUGGAGCC | 7164 | GGCTCCAG GGCTAGCTACAACGA CAGGAGAC | 16505 |
| 128 | UGGCUGGA G CCGCGAGA | 7165 | TCTCGCGG GGCTAGCTACAACGA TCCAGCCA | 16506 |
| 131 | CUGGAGCC G CGAGACGG | 7166 | CCGTCTCG GGCTAGCTACAACGA GGCTCCAG | 16507 |
| 136 | GCCGCGAG A CGGGCGCU | 7167 | AGCGCCCG GGCTAGCTACAACGA CTCGCGGC | 16508 |
| 140 | CGAGACGG G CGCUCAGG | 7168 | CCTGAGCG GGCTAGCTACAACGA CCGTCTCG | 16509 |
| 142 | AGACGGGC G CUCAGGGC | 7169 | GCCCTGAG GGCTAGCTACAACGA GCCCGTCT | 16510 |
| 149 | CGCUCAGG G CGCGGGGC | 7170 | GCCCCGCG GGCTAGCTACAACGA CCTGAGCG | 16511 |
| 151 | CUCAGGGC G CGGGGCCG | 7171 | CGGCCCCG GGCTAGCTACAACGA GCCCTGAG | 16512 |
| 156 | GGCGCGGG G CCGGCGGC | 7172 | GCCGCCGG GGCTAGCTACAACGA CCCGCGCC | 16513 |
| 160 | CGGGGCCG G CGGCGGCG | 7173 | CGCCGCCG GGCTAGCTACAACGA CGGCCCCG | 16514 |
| 163 | GGCCGGCG G CGGCGAAC | 7174 | GTTCGCCG GGCTAGCTACAACGA CGCCGGCC | 16515 |
| 166 | CGGCGGCG G CGAACGAG | 7175 | CTCGTTCG GGCTAGCTACAACGA CGCCGCCG | 16516 |
| 170 | GGCGGCGA A CGAGAGGA | 7176 | TCCTCTCG GGCTAGCTACAACGA TCGCCGCC | 16517 |
| 178 | ACGAGAGG A CGGACUCU | 7177 | AGAGTCCG GGCTAGCTACAACGA CCTCTCGT | 16518 |
| 182 | GAGGACGG A CUCUGGCG | 7178 | CGCCAGAG GGCTAGCTACAACGA CCGTCCTC | 16519 |
| 188 | GGACUCUG G CGGCCGGG | 7179 | CCCGGCCG GGCTAGCTACAACGA CAGAGTCC | 16520 |
| 191 | CUCUGGCG G CCGGGUCG | 7180 | CGACCCGG GGCTAGCTACAACGA CGCCAGAG | 16521 |
| 196 | GCGGCCGG G UCGUUGGC | 7181 | GCCAACGA GGCTAGCTACAACGA CCGGCCGC | 16522 |
| 199 | GCCGGGUC G UUGGCCGG | 7182 | CCGGCCAA GGCTAGCTACAACGA GACCCGGC | 16523 |
| 203 | GGUCGUUG G CCGGGGGA | 7183 | TCCCCCGG GGCTAGCTACAACGA CAACGACC | 16524 |
| 212 | CCGGGGGA G CGCGGGCA | 7184 | TGCCCGCG GGCTAGCTACAACGA TCCCCCGG | 16525 |
| 214 | GGGGGAGC G CGGGCACC | 7185 | GGTGCCCG GGCTAGCTACAACGA GCTCCCCC | 16526 |
| 218 | GAGCGCGG G CACCGGGC | 7186 | GCCCGGTG GGCTAGCTACAACGA CCGCGCTC | 16527 |
| 220 | GCGCGGGC A CCGGGCGA | 4191 | UCGCCCGG GGCTAGCTACAACGA GCCCGCGC | 16528 |
| 225 | GGCACCGG G CGAGCAGG | 7187 | CCTGCTCG GGCTAGCTACAACGA CCGGTGCC | 16529 |
| 229 | CCGGGCGA G CAGGCCGC | 7188 | GCGGCCTG GGCTAGCTACAACGA TCGCCCGG | 16530 |
| 233 | GCGAGCAG G CCGCGUCG | 7189 | CGACGCGG GGCTAGCTACAACGA CTGCTCGC | 16531 |
| 236 | AGCAGGCC G CGUCGCGC | 7190 | GCGCGACG GGCTAGCTACAACGA GGCCTGCT | 16532 |
| 238 | CAGGCCGC G UCGCGCUC | 7191 | GAGCGCGA GGCTAGCTACAACGA GCGGCCTG | 16533 |
| 241 | GCCGCGUC G CGCUCACC | 7192 | GGTGAGCG GGCTAGCTACAACGA GACGCGGC | 16534 |
| 243 | CGCGUCGC G CUCACCAU | 7193 | ATGGTGAG GGCTAGCTACAACGA GCGACGCG | 16535 |
| 247 | UCGCGCUC A CCAUGGUC | 4196 | GACCATGG GGCTAGCTACAACGA GAGCGCGA | 16536 |
| 250 | CGCUCACC A UGGUCAGC | 4198 | GCTGACCA GGCTAGCTACAACGA GGTGAGCG | 16537 |
| 253 | UCACCAUG C UCAGCUAC | 7194 | GTAGCTGA GGCTAGCTACAACGA CATGGTGA | 16538 |
| 257 | CAUGGUCA G CUACUGGG | 7195 | CCCAGTAG GGCTAGCTACAACGA TGACCATG | 16539 |
| 260 | GGUCAGCU A CUGGGACA | 21 | UGTCCCAG GGCTAGCTACAACGA AGCTGACC | 16540 |
| 266 | CUACUGGG A CACCGGGG | 7196 | CCCCGGTG GGCTAGCTACAACGA CCCAGTAG | 16541 |
| 268 | ACUGGGAC A CCGGGGUC | 4202 | GACCCCGG GGCTAGCTACAACGA GTCCCAGT | 16542 |
| 274 | ACACCGGG C UCCUGCUG | 7197 | CACCAGGA GGCTAGCTACAACGA CCCGGTGT | 16543 |
| 279 | GGGGUCCU G CUGUGCGC | 7198 | GCGCACAG GGCTAGCTACAACGA AGGACCCC | 16544 |
| 282 | GUCCUGCU G UGCGCGCU | 7199 | ACCGCGCA GGCTAGCTACAACGA AGCAGGAC | 16545 |
| 284 | CCUGCUGU G CGCGCUGC | 7200 | GCAGCGCG GGCTAGCTACAACGA ACAGCAGG | 16546 |
| 286 | UGCUGUGC G CGCUGCUC | 7201 | GAGCAGCG GGCTAGCTACAACGA GCACAGCA | 16547 |
| 288 | CUGUGCGC C CUCCUCAG | 7202 | CTGAGCAG GCCTAGCTACAACGA GCGCACAG | 16548 |
| 291 | UGCGCGCU C CUCAGCUG | 7203 | CAGCTGAG GGCTAGCTACAACGA AGCGCGCA | 16549 |
| 296 | GCUCCUCA C CUGUCUGC | 7204 | GCAGACAG CGCTAGCTACAACGA TGAGCAGC | 16550 |
| 299 | CCUCAGCU G UCUCCGUC | 7205 | GAAGCAGA GGCTAGCTACAACGA AGCTGAGC | 16551 |
| 303 | AGCUCUCU G CUUCUCAC | 7206 | GTGAGAAG CGCTAGCTACAACGA AGACAGCT | 16552 |
| 310 | UGCUUCUC A CACCAUCU | 4214 | AGATCCTG GGCTAGCTACAACGA GAGAAGCA | 16553 |
| 315 | CUCACACG A UCUAGUUC | 7207 | GAACTAGA CGCTACCTACAACGA CCTGTGAC | 16554 |
| 320 | ACCAUCUA G UUCAGCUU | 7208 | AACCTGAA GGCTAGCTACAACGA TACATCCT | 16555 |
| 326 | UAGUUCAG C UUCAAAAU | 7209 | ATTTTGAA GCCTAGCTACAACGA CTGAACTA | 16556 |
| 333 | GGUUCAAA A UUAAAAGA | 7210 | TCTTTTAA GGCTAGCTACAACGA TTTGAACC | 16557 |
| 341 | AUUAAAAG A UCCUGAAC | 7211 | GTTCAGGA GGCTAGCTACAACGA CTTTTAAT | 16558 |
| 348 | GAUCCUCA A CUGACUUU | 7212 | AAACTCAG GGCTAGCTACAACGA TCAGGATC | 16559 |
| 353 | UGAACUGA G UUUAAAAG | 7213 | CTTTTAAA GGCTAGCTACAACGA TCAGTTCA | 16560 |
| 362 | UUUAAAAG C CACCCAGC | 7214 | GCTGGGTG GGCTAGCTACAACGA CTTTTAAA | 16561 |
| 364 | UAAAAGGC A CCCAGCAC | 4222 | CTCCTCCG GGCTAGCTACAACGA GCCTTTTA | 16562 |
| 369 | CCCACCCA C CACAUCAU | 7215 | ATCATGTC GGCTAGCTACAACGA TCCGTGCC | 16563 |
| 371 | CACCCAGC A CAUCAUGC | 4226 | GCATGATG GGCTAGCTACAACGA CCTCGGTG | 16564 |
| 373 | CCCAGCAC A UCAUGCAA | 4227 | TTGCATCA GGCTAGCTACAACGA GTCCTGCC | 16565 |
| 376 | ACCACAUC A UCCAAGCA | 4228 | TCCTTCCA GGCTAGCTACAACGA CATCTGCT | 16566 |
| 378 | CACAUCAU C CAAGCAGG | 7216 | CCTGCTTG GGCTACCTACAACGA ATGATGTG | 16567 |
| 382 | UCAUCCAA C CAGGCCAG | 7217 | CTGGCCTC GGCTAGCTACAACGA TTCCATGA | 16568 |
| 386 | GCAAGCAG C CCAGACAC | 7218 | GTCTCTGC GGCTAGCTACAACGA CTGCTTCC | 16569 |
| 391 | CACCCCAG A CACUGCAU | 7219 | ATCCAGTC GGCTACCTACAACGA CTCCCCTC | 16570 |
| 393 | GGCCACAC A CUGCAUCU | 4233 | ACATCCAC GGCTAGCTACAACGA CTCTGGCC | 16571 |
| 396 | CAGACACU C CAUCUCCA | 7220 | TGCACATC GGCTAGCTACAACGA ACTGTCTG | 16572 |
| 398 | CACACUGC A UCUCCAAU | 4235 | ATTGCAGA GGCTAGCTACAACGA GCACTCTC | 16573 |
| 405 | CAUCUCCA A UCCAGGGC | 7221 | CCCCTCCA GGCTAGCTACAACGA TGCACATG | 16574 |
| 407 | UCUCCAAU C CACGCCGC | 7222 | CCCCCCTG GGCTAGCTACAACGA ATTGCACA | 16575 |
| 418 | GGGGGGAA C CAGCCCAU | 7223 | ATCGCCTC GGCTAGCTACAACGA TTCCCCCC | 16576 |
| 421 | GGGAAGCA G CCCAUAAA | 7224 | TTTATGGG GGCTAGCTACAACGA TGCTTCCC | 16577 |
| 425 | AGCAGCCC A UAAAUGGU | 4243 | ACCATTTA GGCTAGCTACAACGA GGGCTGCT | 16578 |
| 429 | GCCCAUAA A UGGUCUUU | 7225 | AAAGACCA GGCTAGCTACAACGA TTATGGGC | 16579 |
| 432 | CAUAAAUG G UCUUUGCC | 7226 | GGCAAAGA GGCTAGCTACAACGA CATTTATG | 16580 |
| 438 | UGGUCUUU G CCUGAAAU | 7227 | ATTTCAGG GGCTAGCTACAACGA AAAGACCA | 16581 |
| 445 | UGCCUGAA A UGGUGAGU | 7228 | ACTCACCA GGCTAGCTACAACGA TTCAGGCA | 16582 |
| 448 | CUGAAAUG G UGAGUAAG | 7229 | CTTACTCA GGCTAGCTACAACGA CATTTCAG | 16583 |
| 452 | AAUGGUGA G UAAGGAAA | 7230 | TTTCCTTA GGCTAGCTACAACGA TCACCATT | 16584 |
| 461 | UAAGGAAA G CGAAAGGC | 7231 | GCCTTTCG GGCTAGCTACAACGA TTTCCTTA | 16585 |
| 468 | AGCGAAAG G CUGAGCAU | 7232 | ATGCTCAG GGCTAGCTACAACGA CTTTCGCT | 16586 |
| 473 | AAGGCUGA G CAUAACUA | 7233 | TAGTTATG GGCTAGCTACAACGA TCAGCCTT | 16587 |
| 475 | GGCUGAGC A UAACUAAA | 4248 | TTTAGTTA GGCTAGCTACAACGA GCTCAGCC | 16588 |
| 478 | UGAGCAUA A CUAAAUCU | 7234 | AGATTTAG GGCTAGCTACAACGA TATGCTCA | 16589 |
| 483 | AUAACUAA A UCUGCCUG | 7235 | CAGGCAGA GGCTAGCTACAACGA TTAGTTAT | 16590 |
| 487 | CUAAAUCU G CCUGUGGA | 7236 | TCCACAGG QGCTAGCTACAACGA AGATTTAG | 16591 |
| 491 | AUCUGCCU G UGGAAGAA | 7237 | TTCTTCCA GGCTAGCTACAACGA AGGCAGAT | 16592 |
| 500 | UGGAAGAA A UGGCAAAC | 7238 | GTTTGCCA GGCTAGCTACAACGA TTCTTCCA | 16593 |
| 503 | AAGAAAUG G CAAACAAU | 7239 | ATTGTTTG GGCTAGCTACAACGA CATTTCTT | 16594 |
| 507 | AAUGGCAA A CAAUUCUG | 7240 | CAGAATTG GGCTAGCTACAACGA TTGCCATT | 16595 |
| 510 | GGCAAACA A UUCUGCAG | 7241 | CTGCAGAA GGCTAGCTACAACGA TGTTTGCC | 16596 |
| 515 | ACAAUUCU G CAGUACUU | 7242 | AAGTACTG GGCTAGCTACAACGA ACAATTGT | 16597 |
| 518 | AUUCUGCA G UACUUUAA | 7243 | TTAAAGTA GGCTAGCTACAACGA TGCAGAAT | 16598 |
| 520 | UCUGCAGU A CUUUAACC | 53 | GGTTAAAG GGCTAGCTACAACGA ACTGCAGA | 16599 |
| 526 | GUACUUUA A CCUUGAAC | 7244 | GTTCAAGG GGCTAGCTACAACGA TAAAGTAC | 16600 |
| 533 | AACCUUGA A CACAGCUC | 7245 | GAGCTGTG GGCTAGCTACAACGA TCAAGGTT | 16601 |
| 535 | CCUUGAAC A CAGCUCAA | 4260 | TTGAGCTG GGCTAGCTACAACGA GTTCAAGG | 16602 |
| 538 | UGAACACA G CUCAAGCA | 7246 | TGCTTGAG GGCTAGCTACAACGA TGTGTTCA | 16603 |
| 544 | CAGCUCAA G CAAACCAC | 7247 | GTGGTTTG GGCTAGCTACAACGA TTGAGCTG | 16604 |
| 548 | UCAAGCAA A CGACACUG | 7248 | CAGTGTGG GGCTAGCTACAACGA TTGCTTGA | 16605 |
| 551 | AGCAAACC A CACUGGCU | 4266 | AGCCAGTG GGCTAGCTACAACGA GGTTTGCT | 16606 |
| 553 | CAAACCAC A CUGGCUUC | 4267 | GAAGCCAG GGCTAGCTACAACGA GTGGTTTG | 16607 |
| 557 | CGACACUG G CUUCUACA | 7249 | TGTAGAAG GGCTAGCTACAACGA CAGTGTGG | 16608 |
| 563 | UGGCUUCU A CAGCUGCA | 61 | UGCAGCTG GGCTAGCTACAACGA AGAAGCCA | 16609 |
| 566 | CUlICUACA G CUGCAAAU | 7250 | ATTTGCAG GGCTAGCTACAACGA TGTAGAAG | 16610 |
| 569 | CUACAGCU G CAAAUAUC | 7251 | GATATTTG GGCTAGCTACAACGA AGCTGTAG | 16611 |
| 573 | AGCUGCAA A UAUCUAGC | 7252 | GCTAGATA GGCTAGCTACAACGA TTGCAGCT | 16612 |
| 575 | CUGCAAAU A UCUAGCUG | 62 | CAGCTAGA GGCTAGCTACAACGA ATTTGCAG | 16613 |
| 580 | AAUAUCUA G CUGUACCU | 7253 | AGGTACAG GGCTAGCTACAACGA TAGATATT | 16614 |
| 583 | AUCUAGCU G UACCUACU | 7254 | AGTAGGTA GGCTAGCTACAACGA AGCTAGAT | 16615 |
| 585 | CUAGCUGU A CCUACUUC | 65 | GAAGTAGG GGCTAGCTACAACGA ACAGCTAG | 16616 |
| 589 | CUGUACCU A CUUCAAAG | 66 | CTTTGAAG GGCTAGCTACAACGA AGGTACAG | 16617 |
| 607 | AGAAGGAA A CAGAAUCU | 7255 | AGATTCTG GGCTAGCTACAACGA TTCCTTCT | 16618 |
| 612 | GAAACAGA A UCUCCAAU | 7256 | ATTGCAGA GGCTAGCTACAACGA TCTGTTTC | 16619 |
| 616 | CAGAAUCU G CAAUCUAU | 7257 | ATAGATTG GGCTAGCTACAACGA AGATTCTG | 16620 |
| 619 | AAUCUGCA A UCUAUAUA | 7258 | TATATAGA GGCTAGCTACAACGA TGCAGATT | 16621 |
| 623 | UGCAAUCU A UAUAUUUA | 71 | UAAATATA GGCTAGCTACAACGA AGATTGCA | 16622 |
| 625 | CAAUCUAU A UAUUUAUU | 72 | AATAAATA GGCTAGCTACAACGA ATAGATTG | 16623 |
| 627 | AUCUAUAU A UUUAUUAG | 73 | CTAATAAA GGCTAGCTACAACGA ATATAGAT | 16624 |
| 631 | AUAUAUUU A UUAGUGAU | 76 | ATCACTAA GGCTAGCTACAACGA AAATATAT | 16625 |
| 635 | AUUUAUUA G UGAUACAG | 7259 | CTGTATCA GGCTAGCTACAACGA TAATAAAT | 16626 |
| 638 | UAUUAGUG A UACAGGUA | 7260 | TACCTGTA GGCTAGCTACAACGA CACTAATA | 16627 |
| 640 | UUAGUGAU A CAGGUAGA | 79 | TCTACCTG GGCTAGCTACAACGA ATCACTAA | 16628 |
| 644 | UGAUACAG G UAGACCUU | 7261 | AAGGTCTA GGCTAGCTACAACGA CTGTATCA | 16629 |
| 648 | ACAGGUAG A CCUUUCGU | 7262 | ACGAAAGG GGCTAGCTACAACGA CTACCTGT | 16630 |
| 655 | GACCUUUC G UAGAGAUG | 7263 | CATCTCTA GGCTAGCTACAACGA GAAAGGTC | 16631 |
| 661 | UCGUAGAG A UGUACAGU | 7264 | ACTGTACA GGCTAGCTACAACGA CTCTACGA | 16632 |
| 663 | GUAGAGAU G UACAGUGA | 7265 | TCACTGTA GGCTAGCTACAACGA ATCTCTAC | 16633 |
| 665 | AGAGAUGU A CAGUGAAA | 85 | TTTCACTG GGCTAGCTACAACGA ACATCTCT | 16634 |
| 668 | GAUGUACA G UGAAAUCC | 7266 | GGATTTCA GGCTAGCTACAACGA TGTACATC | 16635 |
| 673 | ACAGUGAA A UCCCCGAA | 7267 | TTCGGGGA GGCTAGCTACAACGA TTCACTGT | 16636 |
| 682 | UCCCCGAA A UUAUACAC | 7268 | GTGTATAA GGCTAGCTACAACGA TTCGGGGA | 16637 |
| 685 | CCGAAAUU A UACACAUG | 88 | CATGTGTA GGCTAGCTACAACGA AATTTCGG | 16638 |
| 687 | GAAAUUAU A CACAUGAC | 89 | GTCATGTG GGCTAGCTACAACGA ATAATTTC | 16639 |
| 689 | AAUUAUAC A CAUGACUG | 4291 | CAGTCATG GGCTAGCTACAACGA GTATAATT | 16640 |
| 691 | UUAUACAC A UGACUGAA | 4292 | TTCAGTCA GGCTAGCTACAACGA GTGTATAA | 16641 |
| 694 | UACACAUG A CUGAAGGA | 7269 | TCCTTCAG GGCTAGCTACAACGA CATGTGTA | 16642 |
| 708 | GGAAGGGA G CUCGUCAU | 7270 | ATGACGAG GGCTAGCTACAACGA TCCCTTCC | 16643 |
| 712 | GGGAGCUC G UCAUUCCC | 7271 | GGGAATGA GGCTAGCTACAACGA GAGCTCCC | 16644 |
| 715 | AGCUCGUC A UUCCCUGC | 4295 | GCAGGGAA GGCTAGCTACAACGA GACGAGCT | 16645 |
| 722 | CAUUCCCU G CCGGGUUA | 7272 | TAACCCGG GGCTAGCTACAACGA AGGGAATG | 16646 |
| 727 | CCUGCCGG G UUACGUCA | 7273 | TGACGTAA GGCTAGCTACAACGA CCGGCAGG | 16647 |
| 730 | GCCGGGUU A CGUCACCU | 95 | AGGTGACG GGCTAGCTACAACGA AACCCGGC | 16648 |
| 732 | CGGGUUAC G UCACCUAA | 7274 | TTAGGTGA GGCTAGCTACAACGA GTAACCCG | 16649 |
| 735 | GUUACGUC A CCUAACAU | 4300 | ATGTTAGG GGCTAGCTACAACGA GACGTAAC | 16650 |
| 740 | GUCACCUA A CAUCACUG | 7275 | CAGTGATG GGCTAGCTACAACGA TAGGTGAC | 16651 |
| 742 | CACCUAAC A UCACUGUU | 4303 | AACAGTGA GGCTAGCTACAACGA GTTAGGTG | 16652 |
| 745 | CUAACAUC A CUGUUACU | 4304 | AGTAACAG GGCTAGCTACAACGA GATGTTAG | 16653 |
| 748 | ACAUCACU G UUACUUUA | 7276 | TAAAGTAA GGCTAGCTACAACQA AGTGATGT | 16654 |
| 751 | UCACUGUU A CUUUAAAA | 100 | TTTTAAAG GGCTAGCTACAACGA AACAGTGA | 16655 |
| 762 | UUAAAAAA G UUUCCACU | 7277 | AGTGGAAA GGCTAGCTACAACGA TTTTTTAA | 16656 |
| 768 | AAGUUUCC A CUUGACAC | 4308 | GTGTCAAG GGCTAGCTACAACGA GGAAACTT | 16657 |
| 773 | UCCACUUG A CACUUUGA | 7278 | TCAAAGTG GGCTAGCTACAACGA CAAGTGGA | 16658 |
| 775 | CACUUGAC A CUUUGAUC | 4310 | GATCAAAG GGCTAGCTACAACGA GTCAAGTG | 16659 |
| 781 | ACACUUUG A UCCCUGAU | 7279 | ATCAGGGA GGCTAGCTACAACGA CAAAGTGT | 16660 |
| 788 | GAUCCCUG A UGGAAAAC | 7280 | GTTTTCCA GGCTAGCTACAACGA CAGGGATC | 16661 |
| 795 | GAUGGAAA A CGCAUAAU | 7281 | ATTATGCG GGCTAGCTACAACGA TTTCCATC | 16662 |
| 797 | UGGAAAAC G CAUAAUCU | 7282 | AGATTATG GGCTAGCTACAACGA GTTTTCCA | 16663 |
| 799 | GAAAACGC A UAAUCUGG | 4315 | CCAGATTA GGCTAGCTACAACGA GCGTTTTC | 16664 |
| 802 | AACGCAUA A UCUGGGAC | 7283 | GTCCCAGA GGCTAGCTACAACGA TATGCGTT | 16665 |
| 809 | AAUCUGGG A CAGUAGAA | 7284 | TTCTACTG GGCTAGCTACAACGA CCCAGATT | 16666 |
| 812 | CUGGGACA G UAGAAAGG | 7285 | CCTTTCTA GGCTAGCTACAACGA TGTCCCAG | 16667 |
| 821 | UAGAAAGG C CUUCAUCA | 7286 | TGATGAAG GGCTAGCTACAACGA CCTTTCTA | 16668 |
| 826 | AGGGCUUC A UCAUAUCA | 4319 | TGATATGA GGCTAGCTACAACGA GAAGCCCT | 16669 |
| 829 | GCUUCAUC A UAUCAAAU | 4320 | ATTTGATA GGCTAGCTACAACGA GATGAAGC | 16670 |
| 831 | UUCAUCAU A UCAAAUGC | 117 | GCATTTGA GGCTAGCTACAACGA ATGATGAA | 16671 |
| 836 | CAUAUCAA A UGCAACGU | 7287 | ACGTTGCA GGCTAGCTACAACGA TTGATATG | 16672 |
| 838 | UAUCAAAU C CAACGUAC | 7288 | GTACGTTG GGCTAGCTACAACGA ATTTGATA | 16673 |
| 841 | CAAAUGCA A CGUACAAA | 7289 | TTTGTACG GGCTAGCTACAACGA TGCATTTG | 16674 |
| 843 | AAUGCAAC G UACAAAGA | 7290 | TCTTTGTA GGCTAGCTACAACGA GTTGCATT | 16675 |
| 845 | UGCAACGU A CAAAGAAA | 119 | TTTCTTTG GGCTAGCTACAACGA ACGTTGCA | 16676 |
| 853 | ACAAAGAA A UAGGGCUU | 7291 | AAGCCCTA GGCTAGCTACAACGA TTCTTTGT | 16677 |
| 858 | GAAAUAGG G CUUCUGAC | 7292 | GTCAGAAG GGCTAGCTACAACGA CCTATTTC | 16678 |
| 865 | GGCUUCUG A CCUGUGAA | 7293 | TTCACAGG GGCTAGCTACAACGA CAGAAGCC | 16679 |
| 869 | UCUGACCU G UGAAGCAA | 7294 | TTGCTTCA GGCTAGCTACAACGA AGGTCAGA | 16680 |
| 874 | CCUGUGAA C CAACAGUC | 7295 | GACTGTTG GGCTAGCTACAACGA TTCACAGG | 16681 |
| 877 | GUGAAGCA A CAGUCAAU | 7296 | ATTGACTG GGCTAGCTACAACGA TGCTTCAC | 16682 |
| 880 | AAGCAACA G UCAAUGGG | 7297 | CCCATTGA GGCTAGCTACAACGA TGTTGCTT | 16683 |
| 884 | AACAGUCA A UGGGCAUU | 7298 | AATGCCCA GGCTAGCTACAACGA TGACTGTT | 16684 |
| 888 | GUCAAUGG G CAUUUGUA | 7299 | TACAAATG GGCTAGCTACAACGA CCATTGAC | 16685 |
| 890 | CAAUGGGC A UUUGUAUA | 433 | UATACAAA GGCTAGCTACAACGA GCCCATTG | 16686 |
| 894 | GGGCAUUU G UAUAAGAC | 7300 | GTCTTATA GGCTAGCTACAACGA AAATGCCC | 16687 |
| 896 | GCAUUUGU A UAAGACAA | 126 | TTGTCTTA GGCTAGCTACAACGA ACAAATGC | 16688 |
| 901 | UGUAUAAG A CAAACUAU | 7301 | ATAGTTTG GGCTAGCTACAACGA CTTATACA | 16689 |
| 905 | UAAGACAA A CUAUCUCA | 7302 | TGAGATAG GGCTAGCTACAACGA TTGTCTTA | 16690 |
| 908 | GACAAACU A UCUCACAC | 128 | GTGTGAGA GGCTAGCTACAACGA AGTTTCTC | 16691 |
| 913 | ACUAUCUC A CACAUCCA | 4335 | TCGATGTG GGCTAGCTACAACGA GAGATAGT | 16692 |
| 915 | UAUCUCAC A CAUCGACA | 4336 | TGTCGATG GGCTAGCTACAACGA GTGAGATA | 16693 |
| 917 | UCUCACAC A UCGACAAA | 4337 | TTTGTCGA GGCTAGCTACAACGA GTGTGAGA | 16694 |
| 921 | ACACAUCG A CAAACCAA | 7303 | TTGGTTTG GGCTAGCTACAACGA CGATGTCT | 16695 |
| 925 | AUCGACAA A CCAAUACA | 7304 | TGTATTGG GGCTAGCTACAACGA TTGTCGAT | 16696 |
| 929 | ACAAACCA A UACAAUCA | 7305 | TGATTGTA GGCTAGCTACAACGA TGGTTTGT | 16697 |
| 931 | AAACCAAU A CAAUCAUA | 132 | TATGATTG GGCTAGCTACAACGA ATTGGTTT | 16698 |
| 934 | CCAAUACA A UCAUAGAU | 7306 | ATCTATGA GGCTAGCTACAACGA TGTATTCG | 16699 |
| 937 | AUACAAUC A UAGAUGUC | 4342 | GACATCTA GGCTAGCTACAACGA GATTGTAT | 16700 |
| 941 | AAUCAUAG A UGUCCAAA | 7307 | TTTGGACA GGCTAGCTACAACGA CTATGATT | 16701 |
| 943 | UCAUAGAU C UCCAAAUA | 7308 | TATTTGGA GGCTAGCTACAACGA ATCTATGA | 16702 |
| 949 | AUGUCCAA A UAAGCACA | 7309 | TGTCCTTA GGCTACCTACAACGA TTGGACAT | 16703 |
| 953 | CCAAAUAA G CACACCAC | 7310 | GTGGTGTG GGCTAGCTACAACGA TTATTTGG | 16704 |
| 955 | AAAUAAGC A CACCACGC | 4345 | GCGTGGTG GGCTAGCTACAACGA GCTTATTT | 16705 |
| 957 | AUAAGCAC A CCACGCCC | 4346 | GGGCGTGG GCCTAGCTACAACGA GTGCTTAT | 16706 |
| 960 | AGCACACC A CGCCCAGU | 4348 | ACTGGCCG GCCTAGCTACAACGA GGTGTGCT | 16707 |
| 962 | CACACCAC C CCCAGUCA | 731 | UGACTGGG GGCTAGCTACAACGA GTGGTGTG | 16708 |
| 967 | CACGCCCA C UCAAAUUA | 7312 | TAATTTGA GGCTAGCTACAACGA TGGGCGTG | 16709 |
| 972 | CCAGUCAA A UUACUUAG | 7313 | CTAAGTAA GGCTAGCTACAACGA TTGACTGG | 16710 |
| 975 | GUCAAAUU A CUUAGAGG | 139 | CCTCTAAG GGCTAGCTACAACGA AATTTGAC | 16711 |
| 983 | ACUUAGAG G CCAUACUC | 7314 | GAGTATGG GGCTAGCTACAACGA CTCTAAGT | 16712 |
| 986 | UAGAGGCC A UACUCUUG | 4355 | CAAGAGTA CGCTAGCTACAACGA GGCCTCTA | 16713 |
| 988 | GAGGCCAU A CUCUUGUC | 142 | GACAACAG GGCTAGCTACAACGA ATGGCCTC | 16714 |
| 994 | AUACUCUU G UCCUCAAU | 7315 | ATTGAGGA GGCTAGCTACAACGA AAGAGTAT | 16715 |
| 1001 | UGUCCUCA A UUGUACUG | 7316 | CAGTACAA GGCTAGCTACAACGA TGAGGACA | 16716 |
| 1004 | CCUCAAUU G UACUGCUA | 7317 | TACCACTA GGCTAGCTACAACGA AATTGAGG | 16717 |
| 1006 | UCAAUUCU A CUGCUACC | 148 | GGTAGCAG CGCTAGCTACAACGA ACAATTGA | 16718 |
| 1009 | AUUCUACU C CUACCACU | 7318 | AGTGGTAC GGCTAGCTACAACGA AGTACAAT | 16719 |
| 1012 | GUACUGCU A CCACUCCC | 149 | GGGAGTGG GGCTAGCTACAACGA ACCACTAC | 16720 |
| 1015 | CUGCUACC A CUCCCUUC | 4364 | CAAGGGAG GGCTAGCTACAACGA GGTAGCAG | 16721 |
| 1025 | UCCCUUCA A CACGAGAG | 7319 | CTCTCGTC CGCTAGCTACAACGA TCAACGCA | 16722 |
| 1027 | CCUUGAAC A CGAGAGUU | 4369 | AACTCTCG GGCTACCTACAACGA CTTCAAGC | 16723 |
| 1033 | ACACGAGA G UUCAAAUG | 7320 | CATTTGAA GGCTAGCTACAACGA TCTCGTGT | 16724 |
| 1039 | GAGUUCAA A UGACCUGG | 7321 | CCAGGTCA GGCTAGCTACAACGA TTGAACTC | 16725 |
| 1042 | UUCAAAUG A CCUGGAGU | 7322 | ACTCCAGG GGCTAGCTACAACGA CATTTGAA | 16726 |
| 1049 | GACCUGGA G UUACCCUG | 7323 | CAGGGTAA GGCTAGCTACAACGA TCCAGGTC | 16727 |
| 1052 | CUGGAGUU A CCCUGAUG | 155 | CATCAGGG GGCTAGCTACAACGA AACTCCAG | 16728 |
| 1058 | UUACCCUG A UGAAAAAA | 7324 | TTTTTTCA GGCTAGCTACAACGA CAGGGTAA | 16729 |
| 1067 | UGAAAAAA A UAAGAGAG | 7325 | CTCTCTTA GGCTAGCTACAACGA TTTTTTCA | 16730 |
| 1075 | AUAAGAGA G CUUCCGUA | 7326 | TACGGAA3 GGCTAGCTACAACGA TCTCTTAT | 16731 |
| 1081 | GAGCUUCC G UAAGGCGA | 7327 | TCGCCTTA GGCTAGCTACAACGA GGAAGCTC | 16732 |
| 1086 | UCCGUAAG G CGACGAAU | 7328 | ATTCGTCG GGCTAGCTACAACGA CTTACGGA | 16733 |
| 1089 | GUAAGGCG A CGAAUUGA | 7329 | TCAATTCG GGCTAGCTACAACGA CGCCTTAC | 16734 |
| 1093 | GGCGACGA A UUGACCAA | 7330 | TTGGTCAA GGCTAGCTACAACGA TCGTCGCC | 16735 |
| 1097 | ACGAAUUG A CCAAAGCA | 733 | UGCTTTGG GGCTAGCTACAACGA CAATTCGT | 16736 |
| 1103 | UGACCAAA G CAAUUCCC | 7332 | GGGAATTG GGCTAGCTACAACGA TTTGGTCA | 16737 |
| 1106 | CCAAAGCA A UUCCCAUG | 7333 | CATGGGAA GGCTAGCTACAACGA TGCTTTGG | 16738 |
| 1112 | CAAUUCCC A UGCCAACA | 4383 | TGTTGGCA GGCTAGCTACAACGA GGGAATTG | 16739 |
| 1114 | AUUCCCAU G CCAACAUA | 7334 | TATGTTGG GGCTAGCTACAACGA ATGGGAAT | 16740 |
| 1118 | CCAUGCCA A CAUAUUCU | 7335 | AGAATATG GGCTAGCTACAACGA TGGCATGG | 16741 |
| 1120 | AUGCCAAC A UAUUCUAC | 4386 | GTAGAATA GGCTAGCTACAACGA GTTGGCAT | 16742 |
| 1122 | GCCAACAU A UUCUACAG | 163 | CTGTAGAA GGCTAGCTACAACGA ATGTTGGC | 16743 |
| 1127 | CAUAUUCU A CAGUGUUC | 166 | GAACACTG GGCTAGCTACAACGA AGAATATG | 16744 |
| 1130 | AUUCUACA G UGUUCUUA | 7336 | TAAGAACA GGCTAGCTACAACGA TGTAGAAT | 16745 |
| 1132 | UCUACAGU G UUCUUACU | 7337 | AGTAAGAA GGCTAGCTACAACGA ACTGTAGA | 16746 |
| 1138 | GUGUUCUU A CUAUUGAC | 170 | GTCAATAG GGCTAGCTACAACGA AAGAACAC | 16747 |
| 1141 | UUCUUACU A UUGACAAA | 171 | UTTGTCAA GGCTAGCTACAACGA AGTAAGAA | 16748 |
| 1145 | UACUAUUG A CAAAAUGC | 7338 | GCATTTTG GGCTAGCTACAACGA CAATAGTA | 16749 |
| 1150 | UUGACAAA A UGCAGAAC | 7339 | GTTCTGCA GGCTAGCTACAACGA TTTGTCAA | 16750 |
| 1152 | GACAAAAU G CAGAACAA | 7340 | TTGTTCTG GGCTAGCTACAACGA ATTTTGTC | 16751 |
| 1157 | AAUGCAGA A CAAAGACA | 734 | UGTCTTTG GCCTAGCTACAACGA TCTGCATT | 16752 |
| 1163 | GAACAAAG A CAAAGGAC | 7342 | GTCCTTTG GGCTAGCTACAACGA CTTTGTTC | 16753 |
| 1170 | GACAAAGG A CUUUAUAC | 7343 | GTATAAAG GGCTAGCTACAACGA CCTTTGTC | 16754 |
| 1175 | AGGACUUU A UACUUGUC | 175 | GACAAGTA GGCTAGCTACAACGA AAAGTCCT | 16755 |
| 1177 | GACUUUAU A CUUGUCGU | 176 | ACGACAAG GGCTAGCTACAACGA ATAAAGTC | 16756 |
| 1181 | UUAUACUU G UCGUGUAA | 7344 | TTACACGA GGCTAGCTACAACGA AAGTATAA | 16757 |
| 1184 | UACUUGUC G UGUAAGGA | 7345 | TCCTTACA GGCTAGCTACAACGA GACAAGTA | 16758 |
| 1186 | CUUGUCGU G UAAGGAGU | 7346 | ACTCCTTA GGCTAGCTACAACGA ACGACAAG | 16759 |
| 1193 | UGUAAGGA G UGGACCAU | 7347 | ATGGTCCA GGCTAGCTACAACGA TCCTTACA | 16760 |
| 1197 | AGGAGUGG A CCAUCAUU | 7348 | AATGATGG GGCTAGCTACAACGA CCACTCCT | 16761 |
| 1200 | AGUGGACC A UCAUUCAA | 4398 | TTGAATGA GGCTAGCTACAACGA GGTCCACT | 16762 |
| 1203 | UGACCAUC A UUCAAAUC | 4399 | GATTTGAA GGCTAGCTACAACGA GATGGTCC | 16763 |
| 1209 | UCAUUCAA A UCUCUUAA | 7349 | TTAACAGA GGCTAGCTACAACGA TTGAATGA | 16764 |
| 1213 | UCAAAUCU G UUAACACC | 7350 | GGTGTTAA GGCTAGCTACAACGA AGATTTGA | 16765 |
| 1217 | AUCUGUUA A CACCUCAG | 7351 | CTGAGGTG GGCTAGCTACAACGA TAACAGAT | 16766 |
| 1219 | CUGUUAAC A CCUCAGUG | 4402 | CACTGAGG GGCTAGCTACAACGA GTTAACAG | 16767 |
| 1225 | ACACCUCA G UGCAUAUA | 7352 | TATATGCA GGCTAGCTACAACGA TGAGGTGT | 16768 |
| 1227 | ACCUCAGU G CAUAUAUA | 7353 | TATATATG GGCTAGCTACAACGA ACTGAGGT | 16769 |
| 1229 | CUCAGUGC A UAUAUAUG | 4406 | CATATATA GGCTAGCTACAACGA GCACTGAG | 16770 |
| 1231 | CAGUGCAU A UAUAUGAU | 187 | ATCATATA GGCTAGCTACAACGA ATGCACTG | 16771 |
| 1233 | GUGCAUAU A UAUGAUAA | 188 | TTATCATA GGCTAGCTACAACGA ATATGCAC | 16772 |
| 1235 | GCAUAUAU A UGAUAAAG | 189 | CTTTATCA GGCTAGCTACAACGA ATATATGC | 16773 |
| 1238 | UAUAUAUG A UAAAGCAU | 7354 | ATGCTTTA GGCTAGCTACAACGA CATATATA | 16774 |
| 1243 | AUGAUAAA G CAUUCAUC | 7355 | GATGAATG GGCTAGCTACAACGA TTTATCAT | 16775 |
| 1245 | GAUAAAGC A UUCAUCAC | 4407 | GTGATGAA GGCTAGCTACAACGA GCTTTATC | 16776 |
| 1249 | AAGCAUUC A UCACUGUG | 4408 | CACAGTGA GGCTAGCTACAACGA GAATGCTT | 16777 |
| 1252 | CAUUCAUC A CUGUGAAA | 4409 | TTTCACAG GGCTAGCTACAACGA GATGAATG | 16778 |
| 1255 | UCAUCACU G UGAAACAU | 7356 | ATGTTTCA GGCTAGCTACAACGA AGTGATGA | 16779 |
| 1260 | ACUGUGAA A CAUCGAAA | 7357 | TTTCGATG GGCTAGCTACAACGA TTCACAGT | 16780 |
| 1262 | UGUGAAAC A UCGAAAAC | 4411 | GTTTTCGA GGCTAGCTACAACGA GTTTCACA | 16781 |
| 1269 | CAUCGAAA A CAGCAGGU | 7358 | ACCTGCTG GGCTAGCTACAACGA TTTCGATG | 16782 |
| 1272 | CGAAAACA G CAGGUGCU | 7359 | AGCACCTG GGCTAGCTACAACGA TGTTTTCG | 16783 |
| 1276 | AACAGCAG G UGCUUGAA | 7360 | TTCAAGCA GGCTAGCTACAACGA CTGCTGTT | 16784 |
| 1278 | CAGCAGGU G CUUGAAAC | 7361 | GTTTCAAG GGCTAGCTACAACGA ACCTGCTG | 16785 |
| 1285 | UGCUUGAA A CCGUAGCU | 7362 | AGCTACGG GGCTAGCTACAACGA TTCAAGCA | 16786 |
| 1288 | UUGAAACC C UACCUGGC | 7363 | GCCAGCTA GGCTAGCTACAACGA GCTTTCAA | 16787 |
| 1291 | AAACCGUA G CUGGCAAG | 7364 | CTTGCCAG GGCTAGCTACAACGA TACGGTTT | 16788 |
| 1295 | CGUAGCUG G CAACCGCU | 7365 | ACCGCTTG GGCTAGCTACAACGA CAGCTACG | 16789 |
| 1299 | GCUGGCAA C CGGUCUUA | 7366 | TAAGACCG GGCTAGCTACAACGA TTGCCAGC | 16790 |
| 1302 | GGCAAGCG G UCUUACCG | 7367 | CGGTAAGA GGCTAGCTACAACGA CGCTTGCC | 16791 |
| 1307 | GCGGUCUU A CCGGCUCU | 199 | AGAGCCGG GGCTAGCTACAACGA AAGACCGC | 16792 |
| 1311 | UCUUACCG G CUCUCUAU | 7368 | ATAGAGAG GGCTAGCTACAACGA CGGTAAGA | 16793 |
| 1318 | GGCUCUCU A UGAAAGUG | 202 | CACTTTCA GGCTAGCTACAACGA AGAGAGCC | 16794 |
| 1324 | CUAUGAAA G UGAAGGCA | 7369 | TGCCTTCA GGCTAGCTACAACGA TTTCATAG | 16795 |
| 1330 | AAGUGAAG G CAUUUCCC | 7370 | GGGAAATG GGCTAGCTACAACGA CTTCACTT | 16796 |
| 1332 | GUGAAGGC A UUUCCCUC | 4423 | GAGGGAAA GGCTAGCTACAACGA GCCTTCAC | 16797 |
| 1341 | UUUCCCUC G CCGGAAGU | 7371 | ACTTCCGG GGCTAGCTACAACGA GAGGGAAA | 16798 |
| 1348 | CGCCGGAA C UUGUAUGG | 7372 | CCATACAA GGCTAGCTACAACGA TTCCGGCG | 16799 |
| 1351 | CGGAAGUU G UAUGGUUA | 7373 | TAACCATA GGCTAGCTACAACGA AACTTCCG | 16800 |
| 1353 | GAAGUUGU A UGGUUAAA | 208 | TTTAACCA GGCTAGCTACAACGA ACAACTTC | 16801 |
| 1356 | GUUGUAUG C UUAAAAGA | 7374 | TCTTTTAA GGCTAGCTACAACGA CATACAAC | 16802 |
| 1364 | GUUAAAAG A UGGGUUAC | 7375 | GTAACCCA GGCTAGCTACAACGA CTTTTAAC | 16803 |
| 1368 | AAAGAUGG C UUACCUGC | 7376 | GCAGGTAA GGCTAGCTACAACGA CCATCTTT | 16804 |
| 1371 | GAUGGGUU A CCUGCGAC | 212 | GTCGCAGG GGCTAGCTACAACGA AACCCATC | 16805 |
| 1375 | GGUUACCU C CCACUGAC | 7377 | CTCAGTCG CGCTAGCTACAACGA ACGTAACC | 16806 |
| 1378 | UACCUGCG A CUGAGAAA | 7378 | TTTCTCAC GCCTAGCTACAACGA CGCAGGTA | 16807 |
| 1386 | ACUGAGAA A UCUCCUCC | 7379 | CGAGCACA GCCTAGCTACAACGA TTCTCACT | 16808 |
| 1390 | AGAAAUCU C CUCCCUAU | 7380 | ATACCGAG GCCTAGCTACAACGA AGATTTCT | 16809 |
| 1394 | AUCUCCUC C CUAUUUGA | 738 | UCAAATAG GGCTAGCTACAACGA GAGCAGAT | 16810 |
| 1397 | UGCUCGCU A UUUCACUC | 215 | CAGTCAAA GGCTAGCTACAACGA AGCCAGCA | 16811 |
| 1402 | GCUAUUUC A CUCGUCCC | 7382 | CCCACGAG GGCTAGCTACAACGA CAAATACC | 16812 |
| 1406 | UUUGACUC C UGCCUACU | 7383 | AGTAGCCA GGCTAGCTACAACGA GAGTCAAA | 16813 |
| 1409 | CACUCCUC C CUACUCGU | 7384 | ACCAGTAC CGCTAGCTACAACGA CACGACTC | 16814 |
| 1412 | UCGUGCCU A CUCGUUAA | 219 | TTAACCAG CGCTAGCTACAACGA ACCCACCA | 16815 |
| 1416 | GGCUACUC C UUAAUUAU | 7385 | ATAATTAA GGCTAGCTACAACGA GAGTAGCC | 16816 |
| 1420 | ACUCGUUA A UUAUCAAG | 7386 | CTTGATAA GGCTAGCTACAACGA TAACGAGT | 16817 |
| 1423 | CGUUAAUU A UCAAGGAC | 224 | CTCCTTGA GGCTAGCTACAACGA AATTAACG | 16818 |
| 1430 | UAUCAACC A CGUAACUC | 7387 | CAGTTACG GCCTAGCTACAACGA CCTTCATA | 16819 |
| 1432 | UCAACGAC C UAACUGAA | 7388 | TTCAGTTA GCCTAGCTACAACGA GTCCTTCA | 16820 |
| 1435 | AGCACCUA A CUCAACAC | 7389 | CTCTTCAG CCCTACCTACAACGA TACGTCCT | 16821 |
| 1445 | UGAAGAGG A UGCAGGGA | 7390 | TCCCTGCA GGCTAGCTACAACGA CCTCTTCA | 16822 |
| 1447 | AAGAGGAU G CAGGGAAU | 7391 | ATTCCCTG GGCTAGCTACAACGA ATCCTCTT | 16823 |
| 1454 | UGCAGGGA A UUAUACAA | 7392 | TTGTATAA GGCTAGCTACAACGA TCCCTGCA | 16824 |
| 1457 | AGGGAAUU A UACAAUCU | 228 | AGATTGTA GGCTAGCTACAACGA AATTCCCT | 16825 |
| 1459 | GGAAUUAU A CAAUCUUG | 229 | CAAGATTG GGCTAGCTACAACGA ATAATTCC | 16826 |
| 1462 | AUUAUACA A UCUUGCUG | 7393 | CAGCAAGA GGCTAGCTACAACGA TGTATAAT | 16827 |
| 1467 | ACAAUCUU G CUGAGCAU | 7394 | ATGCTCAG GGCTAGCTACAACGA AAGATTGT | 16828 |
| 1472 | CUUGCUGA G CAUAAAAC | 7395 | GTTTTATG GGCTAGCTACAACGA TCAGCAAG | 16829 |
| 1474 | UGCUGAGC A UAAAACAG | 4443 | CTGTTTTA GGCTAGCTACAACGA GCTCAGCA | 16830 |
| 1479 | AGCAUAAA A CAGUCAAA | 7396 | TTTGACTG GGCTAGCTACAACGA TTTATGCT | 16831 |
| 1482 | AUAAAACA G UCAAAUGU | 7397 | ACATTTGA GGCTAGCTACAACGA TGTTTTAT | 16832 |
| 1487 | ACAGUCAA A UGUGUUUA | 7398 | TAAACACA GGCTAGCTACAACGA TTGACTGT | 16833 |
| 1489 | AGUCAAAU G UGUUUAAA | 7399 | TTTAAACA GGCTAGCTACAACGA ATTTGACT | 16834 |
| 1491 | UCAAAUGU G UUUAAAAA | 7400 | TTTTTAAA GGCTAGCTACAACGA ACATTTGA | 16835 |
| 1499 | GUUUAAAA A CCUCACUG | 7401 | CAGTGAGG GGCTAGCTACAACGA TTTTAAAC | 16836 |
| 1504 | AAAACCUC A CUGCCACU | 4448 | AGTGGCAG GGCTAGCTACAACGA GAGGTTTT | 16837 |
| 1507 | ACCUCACU G CCACUCUA | 7402 | TAGAGTGG GGCTAGCTACAACGA AGTGAGGT | 16838 |
| 1510 | UCACUGCC A CUCUAAUU | 4451 | AATTAGAG GGCTAGCTACAACGA GGCAGTGA | 16839 |
| 1516 | CCACUCUA A UUGUCAAU | 7403 | ATTGACAA GGCTAGCTACAACGA TAGAGTGG | 16840 |
| 1519 | CUCUAAUU G UCAAUGUG | 7404 | CACATTGA GGCTAGCTACAACGA AATTAGAG | 16841 |
| 1523 | AAUUGUCA A UGUGAAAC | 7405 | GTTTCACA GGCTAGCTACAACGA TGACAATT | 16842 |
| 1525 | UUGUCAAU G UGAAACCC | 7406 | GGGTTTCA GGCTAGCTACAACGA ATTGACAA | 16843 |
| 1530 | AAUGUGAA A CCCCAGAU | 7407 | ATCTGGGG GGCTAGCTACAACGA TTCACATT | 16844 |
| 1537 | AACCCCAG A UUUACGAA | 7408 | TTCGTAAA GGCTAGCTACAACGA CTGGGGTT | 16845 |
| 1541 | CCAGAUUU A CGAAAAGG | 244 | CCTTTTCG GGCTAGCTACAACGA AAATCTGG | 16846 |
| 1549 | ACGAAAAG G CCGUGUCA | 7409 | TGACACGG GGCTAGCTACAACGA CTTTTCGT | 16847 |
| 1552 | AAAAGGCC G UGUCAUCG | 7410 | CGATGACA GGCTAGCTACAACGA GGCCTTTT | 16848 |
| 1554 | AAGGCCGU G UCAUCGUU | 7411 | AACGATGA GGCTAGCTACAACGA ACGGCCTT | 16849 |
| 1557 | GCCGUGUC A UCGUUUCC | 4460 | GGAAACGA GGCTAGCTACAACGA GACACGGC | 16850 |
| 1560 | GUGUCAUC G UUUCCAGA | 7412 | TCTGGAAA GGCTAGCTACAACGA GATGACAC | 16851 |
| 1568 | GUUUCCAG A GCCGGCUC | 7413 | GAGCCGGG GGCTAGCTACAACGA CTGGAAAC | 16852 |
| 1573 | CAGACCCG G CUCUCUAC | 7414 | GTAGAGAG GGCTAGCTACAACGA CGGGTCTG | 16853 |
| 1580 | GGCUCUCG A CCCACUGG | 252 | CCAGTGGG GGCTAGCTACAACGA AGAGAGCC | 16854 |
| 1584 | CUCUACCC A CUGGGCAG | 4470 | CTGCCCAG GGCTAGCTACAACGA GGGTAGAG | 16855 |
| 1589 | CCCACUGG G CAGCAGAC | 7415 | GTCTGCTG GGCTAGCTACAACGA CCAGTGGG | 16856 |
| 1592 | ACUGGGCA G CAGACAAA | 7416 | TTTGTCTG GGCTAGCTACAACGA TGCCCAGT | 16857 |
| 1596 | GGCAGCAG A CAAAUCCU | 7417 | AGGATTTG GGCTAGCTACAACGA CTGCTGCC | 16858 |
| 1600 | GCAGACAA A UCCUGACU | 7418 | AGTCAGGA GGCTAGCTACAACGA TTGTCTGC | 16859 |
| 1606 | AAAUCCUG A CUUGUACC | 7419 | GGTACAAG GGCTAGCTACAACGA CAGGATTT | 16860 |
| 1610 | CCUGACUU G UACCGCAU | 7420 | ATGCGGTA GGCTAGCTACAACGA AAGTCAGG | 16861 |
| 1612 | UGACUUGU A CCGCAUAU | 255 | ATATGCGG GGCTAGCTACAACGA ACAAGTCA | 16862 |
| 1615 | CUUGUACC G CAUAUGGU | 7421 | ACCATATG GGCTAGCTACAACGA GGTACAAG | 16863 |
| 1617 | UGUACCGC A UAUGGUAU | 4479 | ATACCATA GGCTAGCTACAACGA GCGGTACA | 16864 |
| 1619 | UACCGCAU A UGGUAUCC | 256 | GGATACCA GGCTAGCTACAACGA ATGCCGTA | 16865 |
| 1622 | CGCAUAUG G UAUCCCUC | 7422 | GAGGGATA GGCTAGCTACAACGA CATATGCG | 16866 |
| 1624 | CAUAUGGU A UCCCUCAA | 257 | TTGAGGGA GGCTAGCTACAACGA ACCATATG | 16867 |
| 1632 | AUCCCUCA A CCUACAAU | 7423 | ATTGTAGG GGCTAGCTACAACGA TGAGGGAT | 16868 |
| 1636 | CUCAACCU A CAAUCAAG | 260 | CTTGATTG GGCTAGCTACAACGA AGGTTGAG | 16869 |
| 1639 | AACCUACA A UCAAGUGG | 7424 | CCACTTGA GGCTAGCTACAACGA TGTAGGTT | 16870 |
| 1644 | ACAAUCAA G UGGUUCUG | 7425 | CAGAACCA GGCTAGCTACAACGA TTGATTGT | 16871 |
| 1647 | AUCAAGUG G UUCUGGCA | 7426 | TGCCAGAA GGCTAGCTACAACGA CACTTGAT | 16872 |
| 1653 | UGGUUCUG G CACCCCUG | 7427 | CAGGGGTG GGCTAGCTACAACGA CAGAACCA | 16873 |
| 1655 | GUUCUGGC A CCCCUGUA | 4489 | TACAGGGG GGCTAGCTACAACGA GCCAGAAC | 16874 |
| 1661 | GCACCCCU G UAACCAUA | 7428 | TATGGTTA GGCTAGCTACAACGA AGGGGTGC | 16875 |
| 1664 | CCCCUGUA A CCAUAAUC | 7429 | GATTATGG GGCTAGCTACAACGA TACAGGGG | 16876 |
| 1667 | CUGUAACC A UAAUCAUU | 4495 | AATGATTA GGCTAGCTACAACGA GGTTACAG | 16877 |
| 1670 | UAACCAUA A UCAUUCCG | 7430 | CGGAATGA GGCTAGCTACAACGA TATGGTTA | 16878 |
| 1673 | CCAUAAUC A UUCCGAAG | 4496 | CTTCGGAA GGCTAGCTACAACGA GATTATCG | 16879 |
| 1681 | AUUCCGAA C CAAGGUGU | 7431 | ACACCTTG GGCTAGCTACAACGA TTCGGAAT | 16880 |
| 1686 | GAAGCAAG G UGUGACUU | 7432 | AAGTCACA GGCTAGCTACAACGA CTTCCTTC | 16881 |
| 1688 | AGCAAGGU G UGACUUUU | 7433 | AAAAGTCA GGCTAGCTACAACGA ACCTTGCT | 16882 |
| 1691 | AAGGUGUG A CUUUUGUU | 7434 | AACAAAAG GGCTAGCTACAACGA CACACCTT | 16883 |
| 1697 | UGACUUUU C UUCCAAUA | 7435 | TATTGGAA CGCTAGCTACAACGA AAAAGTCA | 16884 |
| 1703 | UUCUUCCA A UAAUGAAG | 7436 | CTTCATTA GGCTAGCTACAACGA TGGAACAA | 16885 |
| 1706 | UUCCAAUA A UGAAGAGU | 7437 | ACTCTTCA CGCTAGCTACAACGA TATTGCAA | 16886 |
| 1713 | AAUCAAGA G UCCUUUAU | 7438 | ATAAAGGA GGCTACCTACAACGA TCTTCATT | 16887 |
| 1720 | AGUCCUUU A UCCUGGAU | 278 | ATCCAGGA GGCTAGCTACAACGA AAAGGACT | 16888 |
| 1727 | UAUCCUGG A UCCUGACA | 7439 | TGTCAGCA GGCTAGCTACAACGA CCAGGATA | 16889 |
| 1729 | UCCUCGAU C CUGACAGC | 7440 | GCTGTCAC GGCTAGCTACAACGA ATCCACCA | 16890 |
| 1733 | GCAUCCUG A CACCAACA | 744 | UGTTCCTG CCCTAGCTACAACGA CACCATCC | 16891 |
| 1736 | UCCUCACA C CAACAUGC | 7442 | CCATCTTC CCCTACCTACAACGA TGTCAGCA | 16892 |
| 1739 | UGACACCA A CAUCCGAA | 7443 | TTCCCATC CGCTACCTACAACGA TGCTCTCA | 16893 |
| 1741 | ACAGCAAC A UGGCAAAC | 4509 | GTTTCCCA GGCTAGCTACAACGA CTTGCTGT | 16894 |
| 1748 | CAUGGGAA A CACAAUUG | 7444 | CAATTCTC CCCTACCTACAACGA TTCCCATC | 16895 |
| 1753 | GAAACAGA A UUGACAGC | 7445 | CCTCTCAA GGCTAGCTACAACGA TCTGTTTC | 16896 |
| 1760 | AAUUGAGA C CAUCACUC | 7446 | GAGTGATG CGCTACCTACAACGA TCTCAATT | 16897 |
| 1762 | UUGAGAGC A UCACUCAG | 4511 | CTCAGTGA GGCTAGCTACAACGA CCTCTCAA | 16898 |
| 1765 | AGAGCAUC A CUCAGCGC | 4512 | GCGCTCAG GGCTAGCTACAACGA CATGCTCT | 16899 |
| 1770 | AUCACUCA C CGCAUCGC | 7447 | CCCATCCG GGCTAGCTACAACGA TGAGTGAT | 16900 |
| 1772 | CACUCAGC G CAUGGCAA | 7448 | TTGCCATC CGCTAGCTACAACGA GCTGAGTG | 16901 |
| 1774 | CUCACCGC A UGGCAAUA | 4515 | TATTGCCA GCCTAGCTACAACGA GCGCTCAC | 16902 |
| 1777 | AGCGCAUG C CAAUAAUA | 7449 | TATTATTC CGCTAGCTACAACGA CATGCGCT | 16903 |
| 1780 | GCAUGGCA A UAAUACAA | 7450 | TTCTATTA GGCTAGCTACAACGA TGCCATGC | 16904 |
| 1783 | UGCCAAUA A UAGAACGA | 745 | UCCTTCTA GGCTAGCTACAACGA TATTGCCA | 16905 |
| 1796 | ACGAAAGA A UAAGAUGG | 7452 | CCATCTTA GGCTAGCTACAACGA TCTTTCCT | 16906 |
| 1801 | ACAAUAAC A UCCCUACC | 7453 | GCTACCCA GCCTAGCTACAACGA CTTATTCT | 16907 |
| 1804 | AUAACAUG C CUAGCACC | 7454 | CCTCCTAG GGCTAGCTACAACGA CATCTTAT | 16908 |
| 1808 | GAUGGCUA C CACCUUGG | 7455 | CCAAGGTG CGCTAGCTACAACGA TACCCATC | 16909 |
| 1810 | UCGCUAGC A CCUUCCUU | 4518 | AACCAAGG GGCTAGCTACAACGA GCTAGCCA | 16910 |
| 1816 | CCACCUUC C UUCUCCCU | 7456 | ACCCACAA CCCTACCTACAACGA CAACCTCC | 16911 |
| 1819 | CCUUCCUU C UCCCUCAC | 7457 | CTCACCCA CCCTACCTACAACGA AACCAACC | 16912 |
| 1822 | UCCUUCUC C CUCACUCU | 7458 | AGAGTCAC CCCTACCTACAACGA CACAACCA | 16913 |
| 1826 | UCUCGCUC A CUCUACAA | 7459 | TTCTACAG GGCTAGCTACAACGA CACCCACA | 16914 |
| 1834 | ACUCUACA A UUUCUCGA | 7460 | TCCACAAA CCCTACCTACAACGA TCTACAGT | 16915 |
| 1843 | UUUCUCCA A UCUACAUU | 7461 | AATCTAGA CGCTAGCTACAACGA TCCACAAA | 16916 |
| 1847 | UCCAAUCU A CAUUUCCA | 295 | TCCAAATC CCCTACCTACAACGA ACATTCCA | 16917 |
| 1849 | GAAUCUAC A UUUCCAUA | 4526 | TATCCAAA CCCTACCTACAACGA CTACATTC | 16918 |
| 1853 | CUACAUUU C CAUACCUU | 7462 | AACCTATC CCCTACCTACAACGA AAATCTAC | 16919 |
| 1855 | ACAUUUGC A UAGCUUCC | 4527 | GGAAGCTA GGCTAGCTACAACGA GCAAATGT | 16920 |
| 1858 | UUUGCAUA G CUUCCAAU | 7463 | ATTGGAAG GGCTAGCTACAACGA TATGCAAA | 16921 |
| 1865 | AGCUUCCA A UAAAGUUG | 7464 | CAACTTTA GGCTAGCTACAACGA TGGAAGCT | 16922 |
| 1870 | CCAAUAAA G UUGGGACU | 7465 | AGTCCCAA GGCTAGCTACAACGA TTTATTGG | 16923 |
| 1876 | AAGUUGGG A CUGUGGGA | 7466 | TCCCACAG GGCTAGCTACAACGA CCCAACTT | 16924 |
| 1879 | UUGGGACU G UGGGAAGA | 7467 | TCTTCCCA GGCTAGCTACAACGA AGTCCCAA | 16925 |
| 1889 | GGGAAGAA A CAUAAGCU | 7468 | AGCTTATG GGCTAGCTACAACGA TTCTTCCC | 16926 |
| 1891 | GAAGAAAC A UAAGCUUU | 4532 | AAAGCTTA GGCTAGCTACAACGA GTTTCTTC | 16927 |
| 1895 | AAACAUAA G CUUUUAUA | 7469 | TATAAAAG GGCTAGCTACAACGA TTATGTTT | 16928 |
| 1901 | AAGCUUUU A UAUCACAG | 307 | CTGTGATA GGCTAGCTACAACGA AAAAGCTT | 16929 |
| 1903 | GCUUUUAU A UCACAGAU | 308 | ATCTGTGA GGCTAGCTACAACGA ATAAAAGC | 16930 |
| 1906 | UUUAUAUC A CAGAUGUG | 4534 | CACATCTG GGCTAGCTACAACGA GATATAAA | 16931 |
| 1910 | UAUCACAG A UGUGCCAA | 7470 | TTGGCACA GGCTAGCTACAACGA CTGTGATA | 16932 |
| 1912 | UCACAGAU G UGCCAAAU | 7471 | ATTTGGCA GGCTAGCTACAACGA ATCTGTGA | 16933 |
| 1914 | ACAGAUGU G CCAAAUGG | 7472 | CCATTTGG GGCTAGCTACAACGA ACATCTGT | 16934 |
| 1919 | UGUGCCAA A UGGGUUUC | 7473 | GAAACCCA GGCTAGCTACAACGA TTGGCACA | 16935 |
| 1923 | CCAAAUGG G UUUCAUGU | 7474 | ACATGAAA GGCTAGCTACAACGA CCATTTGG | 16936 |
| 1928 | UGGGUUUC A UGUUAACU | 4538 | AGTTAACA GGCTAGCTACAACGA GAAACCCA | 16937 |
| 1930 | GGUUUCAU G UUAACUUG | 7475 | CAAGTTAA GGCTAGCTACAACGA ATGAAACC | 16938 |
| 1934 | UCAUGUUA A CUUGGAAA | 7476 | TTTCCAAG GGCTAGCTACAACGA TAACATGA | 16939 |
| 1945 | UGGAAAAA A UGCCGACG | 7477 | CGTCGGCA GGCTAGCTACAACGA TTTTTCCA | 16940 |
| 1947 | GAAAAAAU G CCGACGGA | 7478 | TCCGTCGG GGCTAGCTACAACGA ATTTTTTC | 16941 |
| 1951 | AAAUGCCG A CGGAAGGA | 7479 | TCCTTCCG GGCTAGCTACAACGA CGGCATTT | 16942 |
| 1964 | AGGAGAGG A CCUGAAAC | 7480 | GTTTCAGG GGCTAGCTACAACGA CCTCTCCT | 16943 |
| 1971 | GACCUGAA A CUGUCUUG | 7481 | CAAGACAG GGCTAGCTACAACGA TTCAGGTC | 16944 |
| 1974 | CUGAAACU G UCUUGCAC | 7482 | GTGCAAGA GGCTAGCTACAACGA AGTTTCAG | 16945 |
| 1979 | ACUGUCUU G CACAGUUA | 7483 | TAACTGTG GGCTAGCTACAACGA AAGACAGT | 16946 |
| 1981 | UGUCUUGC A CAGUUAAC | 4545 | GTTAACTG GGCTAGCTACAACGA GCAAGACA | 16947 |
| 1984 | CUUGCACA G UUAACAAG | 7484 | CTTGTTAA GGCTAGCTACAACGA TGTGCAAG | 16948 |
| 1988 | CACAGUUA A CAAGUUCU | 7485 | AGAACTTG GGCTAGCTACAACGA TAACTGTG | 16949 |
| 1992 | GUUAACAA G UUCUUAUA | 7486 | TATAAGAA GGCTAGCTACAACGA TTGTTAAC | 16950 |
| 1998 | AAGUUCUU A UACAGAGA | 323 | TCTCTGTA GGCTAGCTACAACGA AAGAACTT | 16951 |
| 2000 | GUUCUUAU A CAGAGACG | 324 | CGTCTCTG GGCTAGCTACAACGA ATAAGAAC | 16952 |
| 2006 | AUACAGAG A CGUUACUU | 7487 | AAGTAACG GGCTAGCTACAACGA CTCTGTAT | 16953 |
| 2008 | ACAGAGAC G UUACUUGG | 7488 | CCAAGTAA GGCTAGCTACAACGA GTCTCTGT | 16954 |
| 2011 | GAGACGUU A CUUGGAUU | 326 | AATCCAAG GGCTAGCTACAACGA AACGTCTC | 16955 |
| 2017 | UUACUUGG A UUUUACUG | 7489 | CAGTAAAA GGCTAGCTACAACGA CCAAGTAA | 16956 |
| 2022 | UGGAUUUU A CUGCGGAC | 331 | GTCCGCAG GGCTAGCTACAACGA AAAATCCA | 16957 |
| 2025 | AUUUUACU G CGGACAGU | 7490 | ACTGTCCG GGCTAGCTACAACGA AGTAAAAT | 16958 |
| 2029 | UACUGCGG A CAGUUAAU | 7491 | ATTAACTG GGCTAGCTACAACGA CCGCAGTA | 16959 |
| 2032 | UGCGGACA G UUAAUAAC | 7492 | GTTATTAA GGCTAGCTACAACGA TGTCCGCA | 16960 |
| 2036 | GACAGUUA A UAACAGAA | 7493 | TTCTGTTA GGCTAGCTACAACGA TAACTGTC | 16961 |
| 2039 | AGUUAAUA A CAGAACAA | 7494 | TTGTTCTG GGCTAGCTACAACGA TATTAACT | 16962 |
| 2044 | AUAACAGA A CAAUGCAC | 7495 | GTGCATTG GGCTAGCTACAACGA TCTGTTAT | 16963 |
| 2047 | ACAGAACA A UGCACUAC | 7496 | GTAGTGCA GGCTAGCTACAACGA TGTTCTGT | 16964 |
| 2049 | AGAACAAU G CACUACAG | 7497 | CTGTAGTG GGCTAGCTACAACGA ATTGTTCT | 16965 |
| 2051 | AACAAUGC A CUACAGUA | 4555 | TACTGTAG GGCTAGCTACAACGA GCATTGTT | 16966 |
| 2054 | AAUGCACU A CAGUAUUA | 335 | TAATACTG GGCTAGCTACAACGA AGTGCATT | 16967 |
| 2057 | GCACUACA G UAUUAGCA | 7498 | TGCTAATA GGCTAGCTACAACGA TGTAGTGC | 16968 |
| 2059 | ACUACAGU A UUAGCAAG | 336 | CTTGCTAA GGCTAGCTACAACGA ACTGTAGT | 16969 |
| 2063 | CAGUAUUA G CAAGCAAA | 7499 | TTTGCTTG GGCTAGCTACAACGA TAATACTG | 16970 |
| 2067 | AUUAGCAA G CAAAAAAU | 7500 | ATTTTTTG GGCTAGCTACAACGA TTGCTAAT | 16971 |
| 2074 | AGCAAAAA A UGGCCAUC | 7501 | GATGGCCA GGCTAGCTACAACGA TTTTTGCT | 16972 |
| 2077 | AAAAAAUG G CCAUCACU | 7502 | AGTGATGG GGCTAGCTACAACGA CATTTTTT | 16973 |
| 2080 | AAAUGGCC A UCACUAAG | 4561 | CTTAGTGA GGCTAGCTACAACGA GGCCATTT | 16974 |
| 2083 | UGGCCAUC A CUAAGGAG | 4562 | CTCCTTAG GGCTAGCTACAACGA GATGGCCA | 16975 |
| 2091 | ACUAAGGA G CACUCCAU | 7503 | ATGGAGTG GGCTAGCTACAACGA TCCTTAGT | 16976 |
| 2093 | UAAGGAGC A CUCCAUCA | 4564 | TGATGGAG GGCTAGCTACAACGA GCTCCTTA | 16977 |
| 2098 | AGCACUCC A UCACUCUU | 4567 | AAGAGTGA GGCTAGCTACAACGA GGAGTGCT | 16978 |
| 2101 | ACUCCAUC A CUCUUAAU | 4568 | ATTAAGAG GGCTAGCTACAACGA GATGGAGT | 16979 |
| 2108 | CACUCUUA A UCUUACCA | 7504 | TGGTAAGA GGCTAGCTACAACGA TAAGAGTG | 16980 |
| 2113 | UUAAUCUU A CCAUCAUG | 348 | CATGATGG GGCTAGCTACAACGA AAGATTAA | 16981 |
| 2116 | AUCUUACC A UCAUGAAU | 4573 | ATTCATGA GGCTAGCTACAACGA GGTAAGAT | 16982 |
| 2119 | UUACCAUC A UGAAUGUU | 4574 | AACATTCA GGCTAGCTACAACGA GATGGTAA | 16983 |
| 2123 | CAUCAUGA A UGUUUCCC | 7505 | GGGAAACA GGCTAGCTACAACGA TCATGATG | 16984 |
| 2125 | UCAUGAAU C UUUCCCUG | 7506 | CAGGGAAA GGCTAGCTACAACGA ATTCATGA | 16985 |
| 2133 | GUUUCCCU C CAAGAUUC | 7507 | GAATCTTG GGCTAGCTACAACGA AGGGAAAC | 16986 |
| 2138 | CCUGCAAG A UUCAGGCA | 7508 | TGCCTGAA GGCTAGCTACAACGA CTTGCAGG | 16987 |
| 2144 | AGAUUCAG G CACCUAUG | 7509 | CATAGGTG GGCTAGCTACAACGA CTGAATCT | 16988 |
| 2146 | AUUCAGGC A CCUAUGCC | 4580 | GGCATAGG GCCTAGCTACAACGA GCCTGAAT | 16989 |
| 2150 | AGGCACCU A UGCCUGCA | 355 | TGCAGGCA GGCTAGCTACAACGA AGGTGCCT | 16990 |
| 2152 | GCACCUAU G CCUGCAGA | 7510 | TCTCCAGG GGCTAGCTACAACGA ATACGTCC | 16991 |
| 2156 | CUAUGCCU G CAGAGCCA | 751 | UGGCTCTG GGCTAGCTACAACGA AGGCATAG | 16992 |
| 2161 | CCUGCAGA G CCAGGAAU | 7512 | ATTCCTGC CCCTAGCTACAACGA TCTGCAGG | 16993 |
| 2168 | ACCCAGGA A UGUAUACA | 7513 | TGTATACA GGCTAGCTACAACGA TCCTGGCT | 16994 |
| 2170 | CCAGGAAU G UAUACACA | 7514 | TGTGTATA GGCTAGCTACAACGA ATTCCTGG | 16995 |
| 2172 | AGGAAUGU A UACACAGG | 356 | CCTGTGTA GGCTAGCTACAACGA ACATTCCT | 16996 |
| 2174 | GAAUGUAU A CACAGCGG | 357 | CCCCTCTG GGCTAGCTACAACGA ATACATTC | 16997 |
| 2176 | AUGUAUAC A CAGGGGAA | 4588 | TTCCCCTG GGCTAGCTACAACGA GTATACAT | 16998 |
| 2188 | GGGAAGAA A UCCUCCAG | 7515 | CTGGAGGA GGCTAGCTACAACGA TTCTTCCC | 16999 |
| 2206 | AGAAAGAA A UUACAAUC | 7516 | GATTGTAA GGCTAGCTACAACGA TTCTTTCT | 17000 |
| 2209 | AAGAAAUU A CAAUCAGA | 36 | UCTGATTG GGCTAGCTACAACGA AATTTCTT | 17001 |
| 2212 | AAAUUACA A UCAGAGAU | 7517 | ATCTCTGA GGCTAGCTACAACGA TGTAATTT | 17002 |
| 2219 | AAUCAGAG A UCAGGAAG | 7518 | CTTCCTGA GGCTAGCTACAACGA CTCTGATT | 17003 |
| 2227 | AUCAGGAA C CACCAUAC | 7519 | GTATGGTG GGCTAGCTACAACGA TTCCTCAT | 17004 |
| 2229 | CAGGAACC A CCAUACCU | 4597 | AGCTATGG GGCTAGCTACAACGA GCTTCCTG | 17005 |
| 2232 | GAAGCACC A UACCUCCU | 4599 | AGGACGTA CGCTAGCTACAACGA GGTGCTTC | 17006 |
| 2234 | AGCACCAU A CCUCCUGC | 364 | GCAGGAGG GGCTAGCTACAACGA ATGGTGCT | 17007 |
| 2241 | UACCUCCU C CGAAACCU | 7520 | AGGTTTCG GGCTACCTACAACGA ACCAGGTA | 17008 |
| 2246 | CCUGCGAA A CCUCAGUG | 7521 | CACTGAGG GGCTAGCTACAACGA TTCGCACG | 17009 |
| 2252 | AAACCUCA G UGAUCACA | 7522 | TGTCATCA GGCTAGCTACAACGA TGAGGTTT | 17010 |
| 2255 | CCUCAGUG A UCACACAG | 7523 | CTGTGTGA CGCTAGCTACAACGA CACTCAGG | 17011 |
| 2258 | CAGUGAUC A CACAGUGG | 4607 | CCACTGTG GGCTAGCTACAACGA GATCACTC | 17012 |
| 2260 | GUGAUCAC A CACUGCCC | 4608 | GGCCACTG CCCTAGCTACAACGA GTGATCAC | 17013 |
| 2263 | AUCACACA G UGGCCAUC | 7524 | GATCGCCA GCCTAGCTACAACGA TGTGTGAT | 17014 |
| 2266 | ACACAGUG G CCAUCAGC | 7525 | GCTGATCG CGCTAGCTACAACGA CACTGTCT | 17015 |
| 2269 | CAGUGGCC A UCAGCAGU | 4611 | ACTGCTCA GGCTAGCTACAACGA GCCCACTG | 17016 |
| 2273 | GGCCAUCA G CAGUUCCA | 7526 | TGCAACTG GGCTAGCTACAACGA TGATGGCC | 17017 |
| 2276 | CAUCAGCA G UUCCACCA | 7527 | TGGTGGAA GGCTAGCTACAACGA TGCTGATG | 17018 |
| 2281 | GCAGUUCC A CCACUUUA | 4615 | TAAAGTGG GGCTAGCTACAACGA GGAACTCC | 17019 |
| 2284 | GUUCCACC A CUUUAGAC | 4617 | GTCTAAAG GGCTAGCTACAACGA GGTGGAAC | 17020 |
| 2291 | CACUUUAG A CUGUCAUG | 7528 | CATGACAG GGCTAGCTACAACGA CTAAAGTG | 17021 |
| 2294 | UUUAGACU G UCAUGCUA | 7529 | TAGCATGA GGCTAGCTACAACGA AGTCTAAA | 17022 |
| 2297 | AGACUGUC A UGCUAAUG | 4620 | CATTAGCA GGCTAGCTACAACGA GACAGTCT | 17023 |
| 2299 | ACUGUCAU G CUAAUGGU | 7530 | ACCATTAG GGCTAGCTACAACGA ATGACAGT | 17024 |
| 2303 | UCAUGCUA A UGGUGUCC | 7531 | GGACACCA GGCTAGCTACAACGA TAGCATGA | 17025 |
| 2306 | UGCUAAUG G UGUCCCCG | 7532 | CGGGGACA GGCTAGCTACAACGA CATTAGCA | 17026 |
| 2308 | CUAAUGGU G UCCCCGAG | 7533 | CTCGGGGA GGCTAGCTACAACGA ACCATTAG | 17027 |
| 2316 | GUCCCCGA G CCUCAGAU | 7534 | ATCTGAGG GGCTAGCTACAACGA TCGGGGAC | 17028 |
| 2323 | AGCCUCAG A UCACUUGG | 7535 | CCAAGTGA GGCTAGCTACAACGA CTGAGGCT | 17029 |
| 2326 | CUCAGAUC A CUUGGUUU | 4628 | AAACCAAG GGCTAGCTACAACGA GATCTGAG | 17030 |
| 2331 | AUCACUUG C UUUAAAAA | 7536 | TTTTTAAA GGCTAGCTACAACGA CAAGTGAT | 17031 |
| 2339 | GUUUAAAA A CAACCACA | 7537 | TGTGGTTG GGCTAGCTACAACGA TTTTAAAC | 17032 |
| 2342 | UAAAAACA A CCACAAAA | 7538 | TTTTGTGG GGCTAGCTACAACGA TGTTTTTA | 17033 |
| 2345 | AAACAACC A CAAAAUAC | 4632 | GTATTTTG GGCTAGCTACAACGA GGTTGTTT | 17034 |
| 2350 | ACCACAAA A UACAACAA | 7539 | TTGTTGTA GGCTAGCTACAACGA TTTGTGGT | 17035 |
| 2352 | CACAAAAU A CAACAAGA | 383 | TCTTGTTG GGCTAGCTACAACGA ATTTTGTG | 17036 |
| 2355 | AAAAUACA A CAAGAGCC | 7540 | GGCTCTTG GGCTAGCTACAACGA TGTATTTT | 17037 |
| 2361 | CAACAAGA G CCUGGAAU | 7541 | ATTCCAGG GGCTAGCTACAACGA TCTTGTTG | 17038 |
| 2368 | AGCCUGGA A UUAUUUUA | 7542 | TAAAATAA GGCTAGCTACAACGA TCCAGGCT | 17039 |
| 2371 | CUGGAAUU A UUUUAGGA | 385 | TCCTAAAA GGCTAGCTACAACGA AATTCCAG | 17040 |
| 2379 | AUUUUAGG A CCAGGAAG | 7543 | CTTCCTGG GGCTAGCTACAACGA CCTAAAAT | 17041 |
| 2387 | ACCAGGAA G CAGCACGC | 7544 | GCGTGCTG GGCTAGCTACAACGA TTCCTGGT | 17042 |
| 2390 | AGGAAGCA G CACGCUGU | 7545 | ACAGCGTG GGCTAGCTACAACGA TGCTTCCT | 17043 |
| 2392 | GAAGCAGC A CGCUGUUU | 4641 | AAACAGCG GGCTAGCTACAACGA GCTGCTTC | 17044 |
| 2394 | AGCAGCAC G CUGUUUAU | 7546 | ATAAACAG GGCTAGCTACAACGA GTGCTGCT | 17045 |
| 2397 | AGCACGCU G UUUAUUGA | 7547 | TCAATAAA GGCTAGCTACAACGA AGCGTGCT | 17046 |
| 2401 | CGCUGUUU A UUGAAAGA | 392 | TCTTTCAA GGCTAGCTACAACGA AAACAGCG | 17047 |
| 2410 | UUGAAAGA G UCACAGAA | 7548 | TTCTGTGA GGCTAGCTACAACGA TCTTTCAA | 17048 |
| 2413 | AAAGAGUC A CAGAAGAG | 4643 | CTCTTCTG GGCTAGCTACAACGA GACTCTTT | 17049 |
| 2423 | AGAAGAGG A UGAAGGUG | 7549 | CACCTTCA GGCTAGCTACAACGA CCTCTTCT | 17050 |
| 2429 | GGAUGAAG G UGUCUAUC | 7550 | GATAGACA GGCTAGCTACAACGA CTTCATCC | 17051 |
| 2431 | AUGAAGGU G UCUAUCAC | 7551 | GTGATAGA GGCTAGCTACAACGA ACCTTCAT | 17052 |
| 2435 | AGGUGUCU A UCACUGCA | 396 | TGCAGTGA GGCTAGCTACAACGA AGACACCT | 17053 |
| 2438 | UGUCUAUC A CUGCAAAG | 4646 | CTTTGCAG GGCTAGCTACAACGA GATAGACA | 17054 |
| 2441 | CUAUCACU G CAAAGCCA | 7552 | TGGCTTTG GGCTAGCTACAACGA AGTGATAG | 17055 |
| 2446 | ACUGCAAA G CCACCAAC | 7553 | GTTGGTGG GGCTAGCTACAACGA TTTGCAGT | 17056 |
| 2449 | GCAAAGCC A CCAACCAG | 4650 | CTGGTTGG GGCTAGCTACAACGA GGCTTTGC | 17057 |
| 2453 | AGCCACCA A CCAGAAGG | 7554 | CCTTCTGG GGCTAGCTACAACGA TGGTGGCT | 17058 |
| 2462 | CCAGAAGG G CUCUGUGG | 7555 | CCACAGAG GGCTAGCTACAACGA CCTTCTGG | 17059 |
| 2467 | AGGGCUCU C UGGAAAGU | 7556 | ACTTTCCA GGCTAGCTACAACGA AGAGCCCT | 17060 |
| 2474 | UGUGGAAA G UUCAGCAU | 7557 | ATGCTGAA GGCTAGCTACAACGA TTTCCACA | 17061 |
| 2479 | AAAGUUCA C CAUACCUC | 7558 | GAGGTATG GGCTAGCTACAACGA TGAACTTT | 17062 |
| 2481 | AGUUCAGC A UACCUCAC | 4658 | GTGAGGTA GGCTAGCTACAACGA GCTGAACT | 17063 |
| 2483 | UUCAGCAU A CCUCACUG | 401 | CAGTGAGG GGCTAGCTACAACGA ATGCTGAA | 17064 |
| 2488 | CAUACCUC A CUGUUCAA | 466 | UTGAACAG GGCTAGCTACAACGA GAGGTATG | 17065 |
| 2491 | ACCUCACU C UUCAAGGA | 7559 | TCCTTGAA GGCTAGCTACAACGA AGTGAGGT | 17066 |
| 2500 | UUCAAGGA A CCUCGGAC | 7560 | GTCCGAGG GGCTAGCTACAACGA TCCTTGAA | 17067 |
| 2507 | AACCUCGG A CAAGUCUA | 756 | UAGACTTG GGCTAGCTACAACGA CCGAGGTT | 17068 |
| 2511 | UCGGACAA G UCUAAUCU | 7562 | AGATTAGA GGCTAGCTACAACGA TTGTCCGA | 17069 |
| 2516 | CAAGUCUA A UCUGGAGC | 7563 | GCTCCAGA GGCTAGCTACAACGA TAGACTTG | 17070 |
| 2523 | AAUCUGGA G CUGAUCAC | 7564 | GTGATCAG GGCTAGCTACAACGA TCCAGATT | 17071 |
| 2527 | UGGAGCUG A UCACUCUA | 7565 | TAGAGTGA GGCTAGCTACAACGA CAGCTCCA | 17072 |
| 2530 | AGCUGAUC A CUCUAACA | 4670 | TGTTAGAG GGCTAGCTACAACGA GATCAGCT | 17073 |
| 2536 | UCACUCUA A CAUGCACC | 7566 | GGTGCATG GGCTAGCTACAACGA TAGAGTGA | 17074 |
| 2538 | ACUCUAAC A UGCACCUG | 4673 | CAGGTGCA GGCTAGCTACAACGA GTTAGAGT | 17075 |
| 2540 | UCUAACAU G CACCUGUG | 7567 | CACAGGTG GGCTAGCTACAACGA ATGTTAGA | 17076 |
| 2542 | UAACAUGC A CCUGUGUG | 4674 | CACACAGG GGCTAGCTACAACGA GCATGTTA | 17077 |
| 2546 | AUGCACCU G UGUGGCUG | 7568 | CAGCCACA GGCTAGCTACAACGA AGGTGCAT | 17078 |
| 2548 | GCACCUGU C UGGCUGCG | 7569 | CGCAGCCA GGCTAGCTACAACGA ACAGGTGC | 17079 |
| 2551 | GCUGUGUG C CUGCGACU | 7570 | AGTCGCAG GGCTAGCTACAACGA CACACAGG | 17080 |
| 2554 | GUGUGGCU G CGACUCUC | 7571 | GAGAGTCG GGCTAGCTACAACGA AGCCACAC | 17081 |
| 2557 | UGGCUGCG A CUCUCUUC | 7572 | GAAGACAG GGCTAGCTACAACGA CGCAGCCA | 17082 |
| 2568 | CUCCUCUG G CUCCUAUU | 7573 | AATAGGAG GGCTAGCTACAACGA CAGAAGAG | 17083 |
| 2574 | UGGCUCCU A UUAACCCU | 417 | AGGGTTAA GGCTAGCTACAACGA AGGAGCCA | 17084 |
| 2578 | UCCUAUUA A CCCUCCUU | 7574 | AAGGAGGG GGCTAGCTACAACGA TAATAGGA | 17085 |
| 2587 | CCCUCCUU A UCCGAAAA | 422 | TTTTCGGA GGCTAGCTACAACGA AAGGAGGG | 17086 |
| 2596 | UCCGAAAA A UGAAAAGG | 7575 | CCTTTTCA GGCTAGCTACAACGA TTTTCGGA | 17087 |
| 2604 | AUGAAAAC G UCUUCUUC | 7576 | GAAGAAGA GGCTAGCTACAACGA CTTTTCAT | 17088 |
| 2617 | CUUCUGAA A UAAAGACU | 7577 | AGTCTTTA GGCTAGCTACAACGA TTCAGAAG | 17089 |
| 2623 | AAAUAAAG A CUGACUAC | 7578 | GTAGTCAG GGCTAGCTACAACGA CTTTATTT | 17090 |
| 2627 | AAAGACUG A CUACCUAU | 7579 | ATAGGTAG GGCTAGCTACAACGA CAGTCTTT | 17091 |
| 2630 | GACUGACU A CCUAUCAA | 430 | TTGATAGG GGCTAGCTACAACGA AGTCAGTC | 17092 |
| 2634 | GACUACCU A UCAAUUAU | 431 | ATAATTGA GGCTAGCTACAACGA AGGTAGTC | 17093 |
| 2638 | ACCUAUCA A UUAUAAUG | 7580 | CATTATAA GGCTAGCTACAACGA TGATAGGT | 17094 |
| 2641 | UAUCAAUU A UAAUGGAC | 434 | GTCCATTA GGCTAGCTACAACGA AATTGATA | 17095 |
| 2644 | CAAUUAUA A UGGACCCA | 758 | UGGGTCCA GGCTAGCTACAACGA TATAATTG | 17096 |
| 2648 | UAUAAUGG A CCCAGAUG | 7582 | CATCTGGG GGCTAGCTACAACGA CCATTATA | 17097 |
| 2654 | GGACCCAG A UGAAGUUC | 7583 | GAACTTCA GGCTAGCTACAACGA CTGGGTCC | 17098 |
| 2659 | CAGAUGAA C UUCCUUUG | 7584 | CAAAGGAA GGCTAGCTACAACGA TTCATCTG | 17099 |
| 2669 | UCCUUUGC A UGAGCAGU | 7585 | ACTGCTCA GGCTAGCTACAACGA CCAAAGGA | 17100 |
| 2673 | UUGGAUGA G CAGUGUGA | 7586 | TCACACTG GGCTAGCTACAACGA TCATCCAA | 17101 |
| 2676 | GAUGAGCA G UGUGAGCG | 7587 | CGCTCACA GGCTAGCTACAACGA TGCTCATC | 17102 |
| 2678 | UGAGCAGU G UGAGCGGC | 7588 | GCCGCTCA GGCTAGCTACAACGA ACTGCTCA | 17103 |
| 2682 | CAGUGUGA G CGGCUCCC | 7589 | GGGAGCCG GGCTAGCTACAACGA TCACACTG | 17104 |
| 2685 | UGUGAGCG G CUCCCUUA | 7590 | TAAGGCAG GGCTAGCTACAACGA CGCTCACA | 17105 |
| 2693 | GCUCCCUU A UGAUGCCA | 442 | TGGCATCA GGCTAGCTACAACGA AAGGGAGC | 17106 |
| 2696 | CCCUUAUG A UGCCAGCA | 759 | UGCTGGCA GGCTAGCTACAACGA CATAAGGG | 17107 |
| 2698 | CUUAUGAU G CCAGCAAG | 7592 | CTTGCTGG GGCTAGCTACAACGA ATCATAAG | 17108 |
| 2702 | UGAUGCCA C CAAGUGGG | 7593 | CCCACTTG GGCTAGCTACAACGA TGGCATCA | 17109 |
| 2706 | GCCAGCAA G UGGGAGUU | 7594 | AACTCCCA GGCTAGCTACAACGA TTGCTGGC | 17110 |
| 2712 | AAGUGGGA G UUUGCCCG | 7595 | CGGGCAAA GGCTAGCTACAACGA TCCCACTT | 17111 |
| 2716 | CGGAGUUU C CCCGGGAC | 7596 | CTCCCGGG GGCTAGCTACAACGA AAACTCCC | 17112 |
| 2727 | CGCGAGAG A CUUAAACU | 7597 | AGTTTAAG GGCTAGCTACAACGA CTCTCCCG | 17113 |
| 2733 | AGACUUAA A CUGGGCAA | 7598 | TTGCCCAG GGCTAGCTACAACGA TTAAGTCT | 17114 |
| 2738 | UAAACUGG C CAAAUCAC | 7599 | CTGATTTG GGCTAGCTACAACGA CCAGTTTA | 17115 |
| 2742 | CUGGGCAA A UCACUUGG | 7600 | CCAAGTGA GGCTAGCTACAACGA TTGCCCAG | 17116 |
| 2745 | GGCAAAUC A CUUGGAAG | 4717 | CTTCCAAG GGCTAGCTACAACGA GATTTGCC | 17117 |
| 2758 | GAAGAGGG G CUUUUGGA | 760 | UCCAAAAG GGCTAGCTACAACGA CCCTCTTC | 17118 |
| 2770 | UUGGAAAA G UGGUUCAA | 7602 | TTGAACCA GGCTAGCTACAACGA TTTTCCAA | 17119 |
| 2773 | GAAAAGUG G UUCAAGCA | 7603 | TGCTTGAA GGCTAGCTACAACGA CACTTTTC | 17120 |
| 2779 | UGGUUCAA G CAUCAGCA | 7604 | TGCTGATG GGCTAGCTACAACGA TTGAACCA | 17121 |
| 2781 | GUUCAAGC A UCAGCAUU | 4721 | AATGCTGA GGCTAGCTACAACGA GCTTGAAC | 17122 |
| 2785 | AAGCAUCA G CAUUUGGC | 7605 | GCCAAATG GGCTAGCTACAACGA TGATGCTT | 17123 |
| 2787 | GCAUCAGC A UUUGGCAU | 4723 | ATGCCAAA GGCTAGCTACAACGA GCTGATGC | 17124 |
| 2792 | AGCAUUUG G CAUUAAGA | 7606 | TCTTAATG GGCTAGCTACAACGA CAAATGCT | 17125 |
| 2794 | CAUUUGGC A UUAAGAAA | 4724 | TTTCTTAA GGCTAGCTACAACGA GCCAAATG | 17126 |
| 2802 | AUUAAGAA A UCACCUAC | 7607 | GTAGGTGA GGCTAGCTACAACGA TTCTTAAT | 17127 |
| 2805 | AAGAAAUC A CCUACGUG | 4725 | CACGTAGG GGCTAGCTACAACGA GATTTCTT | 17128 |
| 2809 | AAUCACCU A CGUGCCGG | 460 | CCGGCACG GGCTAGCTACAACGA AGGTGATT | 17129 |
| 2811 | UCACCUAC C UCCCGCAC | 7608 | CTCCGGCA GGCTAGCTACAACGA GTAGGTGA | 17130 |
| 2813 | ACCUACGU C CCGGACUG | 7609 | CAGTCCGG GGCTAGCTACAACGA ACGTAGGT | 17131 |
| 2818 | CGUCCCGC A CUGUGGCU | 7610 | AGCCACAG GGCTACCTACAACGA CCCCCACG | 17132 |
| 2821 | CCCCCACU C UGGCUGUG | 7611 | CACAGCCA GGCTAGCTACAACGA AGTCCGGC | 17133 |
| 2824 | GGACUCUG G CUGUCAAA | 7612 | TTTCACAG GGCTAGCTACAACGA CACAGTCC | 17134 |
| 2827 | CUGUGGCU G UGAAAAUG | 7613 | CATTTTCA GGCTAGCTACAACGA AGCCACAG | 17135 |
| 2833 | CUCUCAAA A UCCUCAAA | 7614 | TTTCACCA CGCTACCTACAACGA TTTCACAG | 17136 |
| 2835 | GUGAAAAU G CUGAAACA | 7615 | TCTTTCAG GGCTAGCTACAACGA ATTTTCAC | 17137 |
| 2848 | AACAGGGC G CCACGGCC | 7616 | GGCCCTGG GGCTACCTACAACGA CCCCTCTT | 17138 |
| 2851 | AGGGCGCC A CCCCCAGC | 4733 | GCTGCCCC GGCTACCTACAACGA CCCCCCCT | 17139 |
| 2854 | GCCCCACC G CCAGCGAG | 7617 | CTCGCTCG GGCTAGCTACAACGA CGTCGCCC | 17140 |
| 2858 | CACCCCCA G CGACUACA | 7618 | TGTACTCC GGCTACCTACAACGA TCCCCCTG | 17141 |
| 2862 | GCCAGCGA G UACAAACC | 7619 | GCTTTGTA GCCTAGCTACAACGA TCCCTCGC | 17142 |
| 2864 | CAGCGAGU A CAAAGCUC | 461 | GAGCTTTC GGCTAGCTACAACGA ACTCCCTC | 17143 |
| 2869 | ACUACAAA C CUCUGAUC | 7620 | CATCAGAC GGCTACCTACAACGA TTTCTACT | 17144 |
| 2875 | AACCUCUG A UGACUGAC | 7621 | CTCAGTCA GCCTAGCTACAACGA CACACCTT | 17145 |
| 2878 | CUCUGAUG A CUGACCUA | 7622 | TACCTCAG GGCTAGCTACAACGA CATCAGAC | 17146 |
| 2883 | AUGACUGA C CUAAAAAU | 7623 | ATTTTTAG GGCTAGCTACAACGA TCAGTCAT | 17147 |
| 2890 | AGCUAAAA A UCUUGACC | 7624 | CCTCAACA GCCTAGCTACAACGA TTTTAGCT | 17148 |
| 2896 | AAAUCUUG A CCCACAUU | 7625 | AATGTGGG GCCTAGCTACAACGA CAAGATTT | 17149 |
| 2900 | CUUGACCC A CAUUGGCC | 4744 | GGCCAATG GGCTAGCTACAACGA GGGTCAAG | 17150 |
| 2902 | UCACCCAC A UUGGCCAC | 4745 | GTCCCCAA GGCTAGCTACAACGA GTGGGTCA | 17151 |
| 2906 | CCACAUUG C CCACCAUC | 7626 | CATCGTGG GGCTACCTACAACGA CAATGTGG | 17152 |
| 2909 | CAUUCGCC A CCAUCUGA | 4747 | TCACATGC CCCTAGCTACAACGA CCCCAATG | 17153 |
| 2912 | UCGCCACC A UCUGAACG | 4749 | CGTTCAGA GCCTAGCTACAACGA GGTGGCCA | 17154 |
| 2918 | CCAUCUGA A CGUGCUUA | 7627 | TAACCACG CCCTAGCTACAACGA TCAGATGG | 17155 |
| 2920 | AUCUGAAC C UCCUUAAC | 7628 | CTTAACCA GGCTACCTACAACGA GTTCACAT | 17156 |
| 2923 | UGAACGUG C UUAACCUG | 7629 | CAGGTTAA GGCTAGCTACAACGA CACGTTCA | 17157 |
| 2927 | CCUCCUUA A CCUCCUCC | 7630 | CCAGCACC CGCTACCTACAACGA TAACCACC | 17158 |
| 2931 | GUUAACCU C CUCCGACC | 7631 | GCTCCCAC GGCTAGCTACAACGA AGCTTAAC | 17159 |
| 2938 | UCCUCCCA C CCUGCACC | 7632 | CCTCCACG CCCTACCTACAACGA TCCCACCA | 17160 |
| 2942 | CCCACCCU C CACCAAGC | 7633 | GCTTCCTG CGCTAGCTACAACGA AGGCTCCC | 17161 |
| 2944 | CACCCUCC A CCAAGCAA | 4756 | TTGCTTCG GCCTAGCTACAACGA GCAGGCTC | 17162 |
| 2949 | UCCACCAA C CAAGGACG | 7634 | CCTCCTTG CGCTAGCTACAACGA TTCCTCCA | 17163 |
| 2958 | CAAGCACG C CCUCUCAU | 7635 | ATCAGACC CCCTACCTACAACGA CCTCCTTC | 17164 |
| 2965 | GGCCUCUG A UGGUGAUU | 7636 | AATCACCA GGCTAGCTACAACGA CAGAGGCC | 17165 |
| 2968 | CUCUGAUG G UGAUUGUU | 7637 | AACAATCA GGCTAGCTACAACGA CATCAGAG | 17166 |
| 2971 | UGAUGGUG A UUGUUGAA | 7638 | TTCAACAA GGCTAGCTACAACGA CACCATCA | 17167 |
| 2974 | UGGUGAUU G UUGAAUAC | 7639 | GTATTCAA GGCTAGCTACAACGA AATCACCA | 17168 |
| 2979 | AUUGUUGA A UACUGCAA | 7640 | TTGCAGTA GGCTAGCTACAACGA TCAACAAT | 17169 |
| 2981 | UGUUGAAU A CUGCAAAU | 473 | ATTTGCAG GGCTAGCTACAACGA ATTCAACA | 17170 |
| 2984 | UGAAUACU G CAAAUAUG | 7641 | CATATTTG GGCTAGCTACAACGA AGTATTCA | 17171 |
| 2988 | UACUGCAA A UAUGGAAA | 7642 | TTTCCATA GGCTAGCTACAACGA TTGCAGTA | 17172 |
| 2990 | CUGCAAAU A UGGAAAUC | 474 | GATTTCCA GGCTAGCTACAACGA ATTTGCAG | 17173 |
| 2996 | AUAUGGAA A UCUCUCCA | 7643 | TGGAGAGA GGCTAGCTACAACGA TTCCATAT | 17174 |
| 3005 | UCUCUCCA A CUACCUCA | 7644 | TGAGGTAG GGCTAGCTACAACGA TGGAGAGA | 17175 |
| 3008 | CUCCAACU A CCUCAAGA | 478 | TCTTGAGG GGCTAGCTACAACGA AGTTGGAG | 17176 |
| 3017 | CCUCAAGA G CAAACGUG | 7645 | CACGTTTG GGCTAGCTACAACGA TCTTGAGG | 17177 |
| 3021 | AAGAGCAA A CGUGACUU | 7646 | AAGTCACG GGCTAGCTACAACGA TTGCTCTT | 17178 |
| 3023 | GAGCAAAC G UGACUUAU | 7647 | ATAAGTCA GGCTAGCTACAACGA GTTTGCTC | 17179 |
| 3026 | CAAACGUG A CUUAUUUU | 7648 | AAAATAAG GGCTAGCTACAACGA CACGTTTG | 17180 |
| 3030 | CGUGACUU A UUUUUUCU | 481 | AGAAAAAA GGCTAGCTACAACGA AAGTCACG | 17181 |
| 3041 | UUUUCUCA A CAAGGAUG | 7649 | CATCCTTG GGCTAGCTACAACGA TGAGAAAA | 17182 |
| 3047 | CAACAAGG A UGCAGCAC | 7650 | GTGCTGCA GGCTAGCTACAACGA CCTTGTTG | 17183 |
| 3049 | ACAAGGAU G CAGCACUA | 765 | UAGTGCTG GGCTAGCTACAACGA ATCCTTGT | 17184 |
| 3052 | AGGAUGCA G CACUACAC | 7652 | GTGTAGTG GGCTAGCTACAACGA TGCATCCT | 17185 |
| 3054 | GAUGCAGC A CUACACAU | 4779 | ATGTGTAG GGCTAGCTACAACGA GCTGCATC | 17186 |
| 3057 | GCAGCACU A CACAUGGA | 489 | TCCATGTG GGCTAGCTACAACGA AGTGCTGC | 17187 |
| 3059 | AGCACUAC A CAUGGAGC | 4781 | GCTCCATG GGCTAGCTACAACGA GTAGTGCT | 17188 |
| 3061 | CACUACAC A UGGAGCCU | 4782 | AGGCTCCA GGCTAGCTACAACGA GTGTAGTG | 17189 |
| 3066 | CACAUGGA G CCUAAGAA | 7653 | TTCTTAGG GGCTAGCTACAACGA TCCATGTG | 17190 |
| 3082 | AAGAAAAA A UGGAGCCA | 7654 | TGGCTCCA GGCTAGCTACAACGA TTTTTCTT | 17191 |
| 3087 | AAAAUGGA G CCAGGCCU | 7655 | AGGCCTGG GGCTAGCTACAACGA TCCATTTT | 17192 |
| 3092 | GGAGCCAG G CCUGGAAC | 7656 | GTTCCAGG GGCTAGCTACAACGA CTGGCTCC | 17193 |
| 3099 | GGCCUGGA A CAAGGCAA | 7657 | TTGCCTTG GGCTAGCTACAACGA TCCAGGCC | 17194 |
| 3104 | GGAACAAG G CAAGAAAC | 7658 | GTTTCTTG GGCTAGCTACAACGA CTTGTTCC | 17195 |
| 3111 | GGCAAGAA A CCAAGACU | 7659 | AGTCTTGG GGCTAGCTACAACGA TTCTTGCC | 17196 |
| 3117 | AAACCAAG A CUAGAUAG | 7660 | CTATCTAG GGCTAGCTACAACGA CTTGGTTT | 17197 |
| 3122 | AAGACUAG A UAGCGUCA | 766 | UGACGCTA GGCTAGCTACAACGA CTAGTCTT | 17198 |
| 3125 | ACUAGAUA G CGUCACCA | 7662 | TGGTGACG GGCTAGCTACAACGA TATCTAGT | 17199 |
| 3127 | UAGAUAGC G UCACCAGC | 7663 | GCTGGTGA GGCTAGCTACAACGA GCTATCTA | 17200 |
| 3130 | AUAGCGUC A CCAGCAGC | 4794 | GCTGCTGG GGCTAGCTACAACGA GACGCTAT | 17201 |
| 3134 | CGUCACCA G CAGCGAAA | 7664 | TTTCGCTG GGCTAGCTACAACGA TGGTGACG | 17202 |
| 3137 | CACCAGCA G CGAAAGCU | 7665 | AGCTTTCG GGCTAGCTACAACGA TGCTGGTG | 17203 |
| 3143 | CAGCGAAA G CUUUGCGA | 7666 | TCGCAAAG GGCTAGCTACAACGA TTTCGCTG | 17204 |
| 3148 | AAAGCUUU G CGAGCUCC | 7667 | GGAGCTCG GGCTAGCTACAACGA AAAGCTTT | 17205 |
| 3152 | CUUUGCGA G CUCCGGCU | 7668 | AGCCGGAG GGCTAGCTACAACGA TCGCAAAG | 17206 |
| 3158 | GAGCUCCG G CUUUCAGG | 7669 | CCTGAAAG GGCTAGCTACAACGA CGGAGCTC | 17207 |
| 3170 | UCAGGAAG A UAAAAGUC | 7670 | GACTTTTA GGCTAGCTACAACGA CTTCCTGA | 17208 |
| 3176 | AGAUAAAA G UCUGAGUG | 7671 | CACTCAGA GGCTAGCTACAACGA TTTTATCT | 17209 |
| 3182 | AAGUCUGA G UGAUGUUG | 7672 | CAACATCA GGCTAGCTACAACGA TCAGACTT | 17210 |
| 3185 | UCUGAGUG A UGUUGAGG | 7673 | CCTCAACA GGCTAGCTACAACGA CACTCAGA | 17211 |
| 3187 | UGAGUGAU G UUGAGGAA | 7674 | TTCCTCAA GGCTAGCTACAACGA ATCACTCA | 17212 |
| 3203 | AGAGGAGG A UUCUGACG | 7675 | CGTCAGAA GGCTAGCTACAACGA CCTCCTCT | 17213 |
| 3209 | GGAUUCUG A CGGUUUCU | 7676 | AGAAACCG GGCTAGCTACAACGA CAGAATCC | 17214 |
| 3212 | UUCUGACG G UUUCUACA | 7677 | TGTAGAAA GGCTAGCTACAACGA CGTCAGAA | 17215 |
| 3218 | CGGUUUCU A CAAGGAGC | 508 | GCTCCTTG GGCTAGCTACAACGA AGAAACCG | 17216 |
| 3225 | UACAAGGA G CCCAUCAC | 7678 | GTGATGGG GGCTAGCTACAACGA TCCTTGTA | 17217 |
| 3229 | AGGAGCCC A UCACUAUG | 4809 | CATAGTGA GGCTAGCTACAACGA GGCCTCCT | 17218 |
| 3232 | AGCCCAUC A CUAUGGAA | 4810 | TTCCATAG GGCTAGCTACAACGA GATGGGCT | 17219 |
| 3235 | CCAUCACU A UGGAAGAU | 510 | ATCTTCCA GGCTAGCTACAACGA AGTGATGG | 17220 |
| 3242 | UAUGGAAG A UCUGAUUU | 7679 | AAATCAGA GGCTAGCTACAACGA CTTCCATA | 17221 |
| 3247 | AAGAUCUG A UUUCUUAC | 7680 | GTAAGAAA GGCTAGCTACAACGA CAGATCTT | 17222 |
| 3254 | GAUUUCUU A CAGUUUUC | 516 | GAAAACTG GGCTAGCTACAACGA AAGAAATC | 17223 |
| 3257 | UUCUUACA G UUUUCAAG | 7681 | CTTGAAAA GGCTAGCTACAACGA TGTAAGAA | 17224 |
| 3265 | GUUUUCAA G UGGCCAGA | 7682 | TCTGGCCA GGCTAGCTACAACGA TTGAAAAC | 17225 |
| 3268 | UUCAAGUG G CCAGAGGC | 7683 | GCCTCTGG GGCTAGCTACAACGA CACTTGAA | 17226 |
| 3275 | GGCCAGAG G CAUGGAGU | 7684 | ACTCCATG GGCTAGCTACAACGA CTCTGGCC | 17227 |
| 3277 | CCAGAGGC A UGGAGUUC | 4818 | GAACTCCA GGCTAGCTACAACGA GCCTCTGG | 17228 |
| 3282 | GGCAUGGA G UUCCUGUC | 7685 | GACAGGAA GGCTAGCTACAACGA TCCATGCC | 17229 |
| 3288 | GAGUUCCU G UCUUCCAG | 7686 | CTGGAAGA GGCTAGCTACAACGA AGGAACTC | 17230 |
| 3300 | UCCAGAAA G UGCAUUCA | 7687 | TGAATGCA GGCTAGCTACAACGA TTTCTGGA | 17231 |
| 3302 | CAGAAAGU C CAUUCAUC | 7688 | GATGAATG GGCTAGCTACAACGA ACTTTCTG | 17232 |
| 3304 | GAAAGUGC A UUCAUCGG | 4824 | CCGATGAA GGCTAGCTACAACGA GCACTTTC | 17233 |
| 3308 | GUGCAUUC A UCGGGACC | 4825 | GGTCCCGA GGCTAGCTACAACGA GAATGCAC | 17234 |
| 3314 | UCAUCGGG A CCUGGCAG | 7689 | CTGCCAGG GGCTAGCTACAACGA CCCGATGA | 17235 |
| 3319 | GGGACCUG C CACCGACA | 7690 | TCTCCCTG GGCTAGCTACAACGA CAGGTCCC | 17236 |
| 3322 | ACCUGGCA G CCAGAAAC | 7691 | GTTTCTCC CGCTACCTACAACGA TGCCACGT | 17237 |
| 3329 | ACCCACAA A CAUUCUUU | 7692 | AAAGAATG GGCTAGCTACAACGA TTCTCGCT | 17238 |
| 3331 | CGAGAAAC A UUCUUUUA | 4829 | TAAAAGAA GGCTAGCTACAACGA GTTTCTCG | 17239 |
| 3339 | AUUCUUUU A UCUGAGAA | 534 | TTCTCAGA GGCTAGCTACAACGA AAAAGAAT | 17240 |
| 3347 | AUCUGAGA A CAACGUCG | 7693 | CCACGTTG GGCTAGCTACAACGA TCTCAGAT | 17241 |
| 3350 | UGAGAACA A CGUGGUCA | 7694 | TCACCACG CGCTAGCTACAACGA TGTTCTCA | 17242 |
| 3352 | AGAACAAC G UGGUGAAG | 7695 | CTTCACCA CCCTACCTACAACGA CTTCTTCT | 17243 |
| 3355 | ACAACGUG G UCAAGAUU | 7696 | AATCTTCA GGCTAGCTACAACGA CACGTTGT | 17244 |
| 3361 | UCCUGAAG A UUUCUGAU | 7697 | ATCACAAA GGCTAGCTACAACGA CTTCACCA | 17245 |
| 3365 | GAAGAUUU C UGAUUUUG | 7698 | CAAAATCA GGCTAGCTACAACGA AAATCTTC | 17246 |
| 3368 | CAUUUGUG A UUUUGGCC | 7699 | GGCCAAAA GCCTAGCTACAACGA CACAAATC | 17247 |
| 3374 | UGAUUUUG G CCUUGCCC | 7700 | GGGCAAGG GGCTAGCTACAACGA CAAAATCA | 17248 |
| 3379 | UUGGCCUU G CCCGGGAU | 7701 | ATCCCCCG GGCTAGCTACAACGA AAGGCCAA | 17249 |
| 3386 | UGCCCGGC A UAUUUAUA | 7702 | TATAAATA GGCTAGCTACAACGA CCCGGGCA | 17250 |
| 3388 | CCCGGGAU A UUUAUAAG | 542 | CTTATAAA GGCTAGCTACAACGA ATCCCGGG | 17251 |
| 3392 | GCAUAUUU A UAAGAACC | 545 | CGTTCTTA CGCTAGCTACAACGA AAATATCC | 17252 |
| 3398 | UUAUAAGA A CCCCGAUU | 7703 | AATCGGGG GGCTAGCTACAACGA TCTTATAA | 17253 |
| 3404 | CAACCCCG A UUAUGUCA | 7704 | TCACATAA CGCTAGCTACAACGA CGGGGTTC | 17254 |
| 3407 | CCCCGAUU A UGUCAGAA | 548 | TTCTCACA GGCTACCTACAACGA AATCGGGG | 17255 |
| 3409 | CCGAUUAU C UCACAAAA | 7705 | TTTTCTCA GGCTAGCTACAACGA ATAATCCG | 17256 |
| 3422 | AAAAGGAG A UACUCGAC | 7706 | GTCGAGTA GGCTAGCTACAACGA CTCCTTTT | 17257 |
| 3424 | AAGCAGAU A CUCGACUU | 549 | AAGTCGAG GGCTAGCTACAACGA ATCTCCTT | 17258 |
| 3429 | GAUACUCG A CUUCCUCU | 7707 | AGAGGAAG GGCTAGCTACAACGA CGAGTATC | 17259 |
| 3441 | CCUCUGAA A UGGAUGGC | 7708 | GCCATCCA GGCTAGCTACAACGA TTCAGAGG | 17260 |
| 3445 | UGAAAUGG A UGGCUCCC | 7709 | CGGACCCA GGCTAGCTACAACGA CCATTTCA | 17261 |
| 3448 | AAUCCAUG G CUCCCGAA | 7710 | TTCGGGAG GGCTAGCTACAACGA CATCCATT | 17262 |
| 3456 | GCUCCCGA A UCUAUCUU | 7711 | AAGATAGA GGCTAGCTACAACGA TCGGGAGC | 17263 |
| 3460 | CCGAAUCU A UCUUUGAC | 556 | TCAAAGA GGCTAGCTACAACGA AGATTCGG | 17264 |
| 3467 | UAUCUUUG A CAAAAUCU | 7712 | AGATTTTG GGCTAGCTACAACGA CAAAGATA | 17265 |
| 3472 | UUGACAAA A UCUACAGC | 7713 | GCTGTAGA GGCTAGCTACAACGA TTTGTCAA | 17266 |
| 3476 | CAAAAUCU A CAGCACCA | 56 | UGGTGCTG GGCTAGCTACAACGA AGATTTTG | 17267 |
| 3479 | AAUCUACA G CACCAAGA | 7714 | TCTTGGTG GGCTAGCTACAACGA TGTAGATT | 17268 |
| 3481 | UCUACAGC A CCAAGAGC | 4853 | GCTCTTGG GGCTAGCTACAACGA GCTGTAGA | 17269 |
| 3488 | CACCAAGA G CGACGUGU | 7715 | ACACGTCG GGCTAGCTACAACGA TCTTGGTG | 17270 |
| 3491 | CAAGAGCG A CGUGUGGU | 7716 | ACCACACG GGCTAGCTACAACGA CGCTCTTG | 17271 |
| 3493 | AGAGCGAC G UGUGGUCU | 7717 | AGACCACA GGCTAGCTACAACGA GTCGCTCT | 17272 |
| 3495 | AGCGACGU C UGGUCUUA | 7718 | TAAGACCA GGCTAGCTACAACGA ACGTCGCT | 17273 |
| 3498 | GACGUGUG G UCUUACGG | 7719 | CCGTAAGA GGCTAGCTACAACGA CACACGTC | 17274 |
| 3503 | GUGGUCUG A CGGAGUAU | 564 | ATACTCCG GGCTAGCTACAACGA AAGACCAC | 17275 |
| 3508 | CUUACGGA C UAUUGCUG | 7720 | CAGCAATA GGCTAGCTACAACGA TCCGTAAG | 17276 |
| 3510 | UACGGAGU A UUGCUGUG | 565 | CACAGCAA GGCTAGCTACAACGA ACTCCGTA | 17277 |
| 3513 | GGAGUAUU G CUGUGGGA | 772 | UGCCACAG GGCTAGCTACAACGA AATACTCC | 17278 |
| 3516 | GUAUUGCU G UGGGAAAU | 7722 | ATTTCCCA GGCTAGCTACAACGA AGCAATAC | 17279 |
| 3523 | UGUGGGAA A UCUUCUCC | 7723 | GGAGAAGA GGCTAGCTACAACGA TTCCCACA | 17280 |
| 3536 | CUCCUUAG C UGGGUCUC | 7724 | GAGACCCA GGCTAGCTACAACGA CTAAGGAG | 17281 |
| 3540 | UUAGGUGG G UCUCCAUA | 7725 | TATGGAGA GGCTAGCTACAACGA CCACCTAA | 17282 |
| 3546 | GGGUCUCC A UACCCAGG | 4864 | CCTGGGTA GGCTAGCTACAACGA GGACACCC | 17283 |
| 3548 | GUCUCCAC A CCCAGGAG | 575 | CTCCTGGG GGCTAGCTACAACGA ATGGAGAC | 17284 |
| 3556 | ACCCAGGA G UACAAAUG | 7726 | CATTTGTA GGCTAGCTACAACGA TCCTGGGT | 17285 |
| 3558 | CCAGGAGU A CAAAUGGA | 576 | TCCATTTG GGCTAGCTACAACGA ACTCCTGG | 17286 |
| 3562 | GAGUACAA A UGGAUGAG | 7727 | CTCATCCA GGCTAGCTACAACGA TTGTACTC | 17287 |
| 3566 | ACAAAUGG A UGAGGACU | 7728 | AGTCCTCA GGCTAGCTACAACGA CCATTTGT | 17288 |
| 3572 | GGAUGAGG A CUUUUGCA | 7729 | TGCAAAAG GGCTAGCTACAACGA CCTCATCC | 17289 |
| 3578 | GGACUUUU C CAGUCGCC | 7730 | GGCGACTG GGCTAGCTACAACGA AAAAGTCC | 17290 |
| 3581 | CUUUUGCA G UCGCCUGA | 773 | UCAGGCGA GGCTAGCTACAACGA TGCAAAAG | 17291 |
| 3584 | UUGCAGUC G CCUGAGGG | 7732 | CCCTCAGG GGCTAGCTACAACGA GACTGCAA | 17292 |
| 3596 | GAGGGAAG G CAUGAGGA | 7733 | TCCTCATG GGCTAGCTACAACGA CTTCCCTC | 17293 |
| 3598 | GGGAAGGC A UGAGGAUG | 4873 | CATCCTCA GGCTAGCTACAACGA GCCTTCCC | 17294 |
| 3604 | GCAUGAGG A UGAGAGCU | 7734 | AGCTCTCA GGCTAGCTACAACGA CCTCATGC | 17295 |
| 3610 | GGAUGAGA G CUCCUGAG | 7735 | CTCAGGAG GGCTAGCTACAACGA TCTCATCC | 17296 |
| 3618 | GCUCCUGA G UACUCUAC | 7736 | GTAGAGTA GGCTAGCTACAACGA TCAGGAGC | 17297 |
| 3620 | UCCUGAGU A CUCUACUC | 582 | GAGTAGAG GGCTAGCTACAACGA ACTCAGGA | 17298 |
| 3625 | AGUACUCU A CUCCUGAA | 584 | TTCAGGAG GGCTAGCTACAACGA AGAGTACT | 17299 |
| 3634 | CUCCUGAA A UCUAUCAG | 7737 | CTGATAGA GGCTAGCTACAACGA TTCAGGAG | 17300 |
| 3638 | UGAAAUCU A UCAGAUCA | 587 | TGATCTGA GGCTAGCTACAACGA AGATTTCA | 17301 |
| 3643 | UCUAUCAG A UCAUGCUG | 7738 | CAGCATGA GGCTAGCTACAACGA CTGATAGA | 17302 |
| 3646 | AUCAGAUC A UCCUGGAC | 4884 | GTCCAGCA GGCTAGCTACAACGA GATCTGAT | 17303 |
| 3648 | CAGAUCAU G CUGGACUG | 7739 | CAGTCCAG GGCTAGCTACAACGA ATGATCTG | 17304 |
| 3653 | CAUGCUGG A CUGCUGGC | 7740 | GCCAGCAG GGCTAGCTACAACGA CCAGCATG | 17305 |
| 3656 | GCUGGACU G CUGGCACA | 774 | UGTGCCAG GGCTAGCTACAACGA AGTCCAGC | 17306 |
| 3660 | GACUCCUG C CACACAGA | 7742 | TCTCTGTG GGCTAGCTACAACGA CAGCAGTC | 17307 |
| 3662 | CUGCUGGC A CAGAGACC | 4888 | GGTCTCTG GGCTACCTACAACGA GCCAGCAG | 17308 |
| 3668 | GCACAGAG A CCCAAAAG | 7743 | CTTTTGGG GGCTAGCTACAACGA CTCTGTGC | 17309 |
| 3681 | AAAGAAAG G CCAAGAUU | 7744 | AATCTTGG GGCTAGCTACAACGA CTTTCTTT | 17310 |
| 3687 | AGGCCAAG A UUUGCAGA | 7745 | TCTGCAAA GCCTAGCTACAACGA CTTGGCCT | 17311 |
| 3691 | CAAGAUUU G CAGAACUU | 7746 | AAGTTCTG GGCTAGCTACAACGA AAATCTTG | 17312 |
| 3696 | UUUGCAGA A CUUGUGGA | 7747 | TCCACAAG GGCTAGCTACAACGA TCTGCAAA | 17313 |
| 3700 | CAGAACUU G UGGAAAAA | 7748 | TTTTTCCA GGCTAGCTACAACGA AAGTTCTG | 17314 |
| 3708 | GUGGAAAA A CUAGGUGA | 7749 | TCACCTAG GGCTAGCTACAACGA TTTTCCAC | 17315 |
| 3713 | AAAACUAG G UGAUUUGC | 7750 | GCAAATCA GGCTAGCTACAACGA CTAGTTTT | 17316 |
| 3716 | ACUAGGUG A UUUGCUUC | 7751 | GAAGCAAA GGCTAGCTACAACGA CACCTAGT | 17317 |
| 3720 | GGUGAUUU C CUUCAAGC | 7752 | GCTTGAAG GGCTAGCTACAACGA AAATCACC | 17318 |
| 3727 | UGCUUCAA G CAAAUGUA | 7753 | TACATTTG GGCTAGCTACAACGA TTGAAGCA | 17319 |
| 3731 | UCAAGCAA A UGUACAAC | 7754 | GTTGTACA GGCTAGCTACAACGA TTGCTTGA | 17320 |
| 3733 | AAGCAAAU C UACAACAG | 7755 | CTGTTGTA GGCTAGCTACAACGA ATTTGCTT | 17321 |
| 3735 | GCAAAUGU A CAACAGGA | 598 | TCCTGTTG GGCTAGCTACAACGA ACATTTGC | 17322 |
| 3738 | AAUGUACA A CAGGAUGG | 7756 | CCATCCTG GGCTAGCTACAACGA TGTACATT | 17323 |
| 3743 | ACAACAGG A UGGUAAAG | 7757 | CTTTACCA GGCTAGCTACAACGA CCTGTTGT | 17324 |
| 3746 | ACAGGAUG C UAAAGACU | 7758 | AGTCTTTA GGCTAGCTACAACGA CATCCTGT | 17325 |
| 3752 | UGGUAAAG A CUACAUCC | 7759 | GGATGTAG GGCTAGCTACAACGA CTTTACCA | 17326 |
| 3755 | UAAAGACU A CAUCCCAA | 600 | TTGGGATG GGCTAGCTACAACGA AGTCTTTA | 17327 |
| 3757 | AAGACUAC A UCCCAAUC | 4904 | GATTGGGA GGCTAGCTACAACGA GTAGTCTT | 17328 |
| 3763 | ACAUCCCA A UCAAUGCC | 7760 | GGCATTGA GGCTACCTACAACGA TGGCATCT | 17329 |
| 3767 | CCCAAUCA A UGCCAUAC | 7761 | GTATGGCA GGCTAGCTACAACGA TGATTGGG | 17330 |
| 3769 | CAAUCAAU G CCAUACUG | 7762 | CAGTATGG GGCTAGCTACAACGA ATTGATTG | 17331 |
| 3772 | UCAAUGCC A UACUGACA | 4910 | TGTCAGTA GGCTAGCTACAACGA GGCATTGA | 17332 |
| 3774 | AAUGCCAU A CUGACAGG | 603 | CCTGTCAG GGCTAGCTACAACGA ATGGCATT | 17333 |
| 3778 | CCAUACUG A CAGGAAAU | 7763 | ATTTCCTG GGCTAGCTACAACGA CAGTATGG | 17334 |
| 3785 | GACAGGAA A UAGUGGGU | 7764 | ACCCACTA GGCTAGCTACAACGA TTCCTGTC | 17335 |
| 3788 | AGGAAAUA G UGGGUUUA | 7765 | TAAACCCA CGCTAGCTACAACGA TATTTCCT | 17336 |
| 3792 | AAUAGUGG G UUUACAUA | 7766 | TATGTAAA GGCTAGCTACAACGA CCACTATT | 17337 |
| 3796 | GUGGGUUU A CAUACUCA | 607 | TGAGTATG GGCTAGCTACAACGA AAACCCAC | 17338 |
| 3798 | GGCUUUAC A UACUCAAC | 4913 | GTTGAGTA GGCTAGCTACAACGA GTAAACCC | 17339 |
| 3800 | GUUUACAU A CUCAACUC | 608 | GAGTTGAG GGCTAGCTACAACGA ATGTAAAC | 17340 |
| 3805 | CAUACUCA A CUCCUGCC | 7767 | GGCAGGAG GGCTAGCTACAACGA TGAGTATG | 17341 |
| 3811 | CAACUCCU G CCUUCUCU | 7768 | AGAGAAGG GGCTAGCTACAACGA AGGAGTTG | 17342 |
| 3824 | CUCUGAGG A CUUCUUCA | 7769 | TGAAGAAG GGCTAGCTACAACGA CCTCAGAG | 17343 |
| 3839 | CAAGGAAA C UAUUUCAG | 7770 | CTGAAATA GGCTAGCTACAACGA TTTCCTTG | 17344 |
| 3841 | AGGAAAGU A UUUCAGCU | 618 | AGCTGAAA GGCTAGCTACAACGA ACTTTCCT | 17345 |
| 3847 | GUAUUUCA C CUCCGAAG | 7771 | CTTCGGAG GGCTAGCTACAACGA TGAAATAC | 17346 |
| 3855 | GCUCCGAA G UUUAAUUC | 7772 | GAATTAAA GGCTAGCTACAACGA TTCGGAGC | 17347 |
| 3860 | GAAGUUUA A UUCAGGAA | 7773 | TTCCTGAA GGCTAGCTACAACGA TAAACTTC | 17348 |
| 3869 | UUCAGGAA C CUCUGAUG | 7774 | CATCAGAG GGCTAGCTACAACGA TTCCTGAA | 17349 |
| 3875 | AAGCUCUG A UGAUGUCA | 7775 | TCACATCA GCCTAGCTACAACGA CACACCTT | 17350 |
| 3878 | CUCUGAUG A UGUCAGAU | 7776 | ATCTGACA GGCTAGCTACAACGA CATCAGAG | 17351 |
| 3880 | CUGAUGAU C UCAGAUAU | 7777 | ATATCTGA GCCTAGCTACAACGA ATCATCAG | 17352 |
| 3885 | GAUGUCAC A UAUGUAAA | 7778 | TTTACATA GGCTAGCTACAACGA CTGACATC | 17353 |
| 3887 | UGUCAGAU A UCUAAAUG | 630 | CATTTACA GGCTAGCTACAACGA ATCTCACA | 17354 |
| 3889 | UCAGAUAU C UAAAUGCU | 7779 | ACCATTTA GGCTAGCTACAACGA ATATCTGA | 17355 |
| 3893 | AUAUGUAA A UCCUCUCA | 7780 | TGAAAGCA GGCTAGCTACAACGA TTACATAT | 17356 |
| 3895 | AUGUAAAU C CUUUCAAG | 7781 | CTTGAAAG GGCTAGCTACAACGA ATTTACAT | 17357 |
| 3903 | GCUUUCAA C UUCAUGAG | 7782 | CTCATGAA GGCTAGCTACAACGA TTGAAAGC | 17358 |
| 3907 | UCAAGUUC A UGAGCCUC | 4935 | CACGCTCA GCCTAGCTACAACGA CAACTTCA | 17359 |
| 3911 | GUUCAUGA C CCUGGAAA | 7783 | TTTCCAGG GGCTAGCTACAACGA TCATGAAC | 17360 |
| 3922 | UGGAAAGA A UCAAAACC | 7784 | GGTTTTGA GGCTAGCTACAACGA TCTTTCCA | 17361 |
| 3928 | GAAUCAAA A CCUUUGAA | 7785 | TTCAAAGG GGCTAGCTACAACGA TTTGATTC | 17362 |
| 3939 | UUUGAAGA A CUUUUACC | 7786 | GGTAAAAG GGCTAGCTACAACGA TCTTCAAA | 17363 |
| 3945 | GAACUUUU A CCGAAUGC | 643 | GCATTCGG GGCTAGCTACAACGA AAAAGTTC | 17364 |
| 3950 | UUUACCGA A UGCCACCU | 7787 | AGGTGGCA GGCTAGCTACAACGA TCGGTAAA | 17365 |
| 3952 | UACCGAAV C CCACCUCC | 7788 | GGAGGTGG GGCTAGCTACAACGA ATTCGGTA | 17366 |
| 3955 | CGAAUGCC A CCUCCAUG | 4944 | CATGGAGG GGCTAGCTACAACGA GGCATTCG | 17367 |
| 3961 | CCACCUCC A UGUUUGAU | 4948 | ATCAAACA GGCTAGCTACAACGA GGAGGTGG | 17368 |
| 3963 | ACCUCCAU G UUUGAUGA | 7789 | TCATCAAA GGCTAGCTACAACGA ATGCAGGT | 17369 |
| 3968 | CAUGUUUG A UGACUACC | 7790 | GGTAGTCA GGCTAGCTACAACGA CAAACATG | 17370 |
| 3971 | GUUUGAUG A CUACCAGG | 7791 | CCTGGTAG GGCTAGCTACAACGA CATCAAAC | 17371 |
| 3974 | UGAUGACU A CCAGCGCC | 647 | CGCCCTGG CGCTAGCTACAACGA AGTCATCA | 17372 |
| 3980 | CUACCAGG C CGACAGCA | 7792 | TGCTGTCG GGCTAGCTACAACGA CCTGCTAG | 17373 |
| 3983 | CCAGGCCG A CAGCAGCA | 7793 | TGCTGCTG GGCTAGCTACAACGA CGCCCTGG | 17374 |
| 3986 | GGGCGACA G CAGCACUC | 7794 | GAGTGCTG GGCTAGCTACAACGA TGTCGCCC | 17375 |
| 3989 | CGACAGCA C CACUCUCU | 7795 | ACAGAGTG CGCTAGCTACAACGA TGCTGTCG | 17376 |
| 3991 | ACAGCACC A CUCUGUUG | 4954 | CAACAGAG GGCTAGCTACAACGA CCTGCTGT | 17377 |
| 3996 | ACCACUCU C UUGGCCUC | 7796 | GAGGCCAA GGCTAGCTACAACGA AGACTCCT | 17378 |
| 4000 | CUCUCUUG C CCUCUCCC | 7797 | CGCACACC GGCTACCTACAACGA CAACAGAC | 17379 |
| 4009 | CCUCUCCC A UGCUGAAG | 4962 | CTTCAGCA CGCTAGCTACAACGA GGGAGAGG | 17380 |
| 4011 | UCUCCCAU G CUGAAGCG | 7798 | CGCTTCAG GGCTACCTACAACGA ATGCCACA | 17381 |
| 4017 | AUGCUCAA G CGCUUCAC | 7799 | CTGAAGCG GGCTAGCTACAACGA TTCAGCAT | 17382 |
| 4019 | CCUCAACC G CUUCACCU | 7800 | ACGTCAAG CGCTAGCTACAACGA GCTTCAGC | 17383 |
| 4024 | ACCGCUUC A CCUGCACU | 4965 | ACTCCAGC GGCTAGCTACAACGA GAAGCGCT | 17384 |
| 4030 | UCACCUGC A CUGACAGC | 7801 | CCTCTCAC CCCTACCTACAACGA CCAGCTCA | 17385 |
| 4034 | CUGGACUG A CAGCAAAC | 7802 | GTTTGCTG GGCTACCTACAACGA CAGTCCAG | 17386 |
| 4037 | GACUGACA C CAAACCCA | 7803 | TGGGTTTC GGCTACCTACAACGA TCTCAGTC | 17387 |
| 4041 | GACAGCAA A CCCAAGGC | 7804 | GCCTTCCC GCCTAGCTACAACGA TTGCTGTC | 17388 |
| 4048 | AACCCAAC G CCUCGCUC | 7805 | CACCCACG GGCTAGCTACAACGA CTTCGCTT | 17389 |
| 4053 | AAGGCCUC C CUCAAGAU | 7806 | ATCTTCAG GGCTACCTACAACGA GAGGCCTT | 17390 |
| 4060 | CGCUCAAG A UUGACUUG | 7807 | CAACTCAA GGCTACCTACAACGA CTTCAGCC | 17391 |
| 4064 | CAACAUUG A CUCCACAG | 7808 | CTCTCAAC GGCTAGCTACAACGA CAATCTTG | 17392 |
| 4072 | ACUUCAGA C UAACCACU | 7809 | ACTCCTTA GGCTACCTACAACGA TCTCAAGT | 17393 |
| 4075 | UCACACCA A CCAGUAAA | 7810 | TTTACTGG GCCTAGCTACAACGA TACTCTCA | 17394 |
| 4079 | AGUAACCA C UAAAAGUA | 781 | UACTTTTA GCCTAGCTACAACGA TGGTTACT | 17395 |
| 4085 | CAGUAAAA C UAAGCACU | 7812 | ACTCCTTA GGCTAGCTACAACGA TTTTACTC | 17396 |
| 4092 | ACUAACCA C UCCGCCCU | 7813 | ACCCCCGA GGCTACCTACAACGA TCCTTACT | 17397 |
| 4098 | CACUCCGC C CUCUCUGA | 7814 | TCACACAC CGCTAGCTACAACGA CCCCACTC | 17398 |
| 4101 | UCCCCGCU C UCUCAUGU | 7815 | ACATCAGA GGCTAGCTACAACGA AGCCCCGA | 17399 |
| 4106 | GCUCUCUC A UCUCAGCA | 7816 | TGCTCACA GGCTAGCTACAACGA CAGACACC | 17400 |
| 4108 | UCUCUCAU C UCACCACC | 7817 | CCTGCTCA GGCTAGCTACAACGA ATCAGACA | 17401 |
| 4112 | UCAUCUCA C CACCCCCA | 7818 | TCCGCCTC CCCTAGCTACAACGA TCACATCA | 17402 |
| 4116 | CUCACCAG C CCCAGUUU | 7819 | AAACTCGC GGCTAGCTACAACGA CTCCTGAC | 17403 |
| 4121 | CACCCCCA C UUUCUCCC | 7820 | GGCAGAAA GGCTAGCTACAACGA TCCCCCTC | 17404 |
| 4127 | CACUUUCU C CCAUUCCA | 782 | UCGAATCG GGCTAGCTACAACGA ACAAACTG | 17405 |
| 4130 | UUUCUCCC A UUCCACCU | 4990 | AGCTCGAA CGCTAGCTACAACGA CGCACAAA | 17406 |
| 4136 | CCAUUCCA C CUGUGGGC | 7822 | CCCCACAC CGCTAGCTACAACGA TGCAATGG | 17407 |
| 4139 | UUCCACCU C UGCCCACC | 7823 | CGTCCCCA CCCTACCTACAACGA ACCTGCAA | 17408 |
| 4143 | AGCUGUGG C CACCUCAG | 7824 | CTCACGTG GGCTAGCTACAACGA CCACACCT | 17409 |
| 4145 | CUGUGGGC A CGUCAGCG | 4994 | CGCTGACG GGCTAGCTACAACGA CCCCACAG | 17410 |
| 4147 | GUGGGCAC G UCAGCGAA | 7825 | TTCGCTGA GGCTAGCTACAACGA GTGCCCAC | 17411 |
| 4151 | GCACGUCA G CGAAGGCA | 7828 | TGCCTTCG GGCTAGCTACAACGA TGACGTGC | 17412 |
| 4157 | CAGCGAAG G CAAGCGCA | 7827 | TGCGCTTG GGCTAGCTACAACGA CTTCGCTG | 17413 |
| 4161 | GAAGGCAA G CGCAGGUU | 7828 | AACCTGCG GGCTAGCTACAACGA TTGCCTTC | 17414 |
| 4163 | AGGCAAGC G CAGGUUCA | 7829 | TGAACCTG GGCTAGCTACAACGA GCTTGCCT | 17415 |
| 4167 | AAGCGCAG G UUCACCUA | 7830 | TAGGTGAA GGCTAGCTACAACGA CTGCGCTT | 17416 |
| 4171 | GCAGGUUC A CCUACGAC | 4998 | GTCGTAGG GGCTAGCTACAACGA GAACCTGC | 17417 |
| 4175 | GUUCACCU A CGACCACG | 672 | CGTGGTCG GGCTAGCTACAACGA AGGTGAAC | 17418 |
| 4178 | CACCUACG A CCACGCUG | 7831 | CAGCGTGG GGCTAGCTACAACGA CGTAGGTG | 17419 |
| 4181 | CUACGACC A CGCUGAGC | 5002 | GCTCAGCG GGCTAGCTACAACGA GGTCGTAG | 17420 |
| 4183 | ACGACCAC G CUGASCUG | 7832 | CAGCTCAG GGCTAGCTACAACGA GTGGTCGT | 17421 |
| 4188 | CACGCUGA G CUGGAAAG | 7833 | CTTTCCAG GGCTAGCTACAACGA TCASCGTG | 17422 |
| 4201 | AAAGGAAA A UCGCGUGC | 7834 | GCACGCGA GGCTAGCTACAACGA TTTCCTTT | 17423 |
| 4204 | GGAAAAUC G CGUGCUGC | 7835 | GCASCACG GGCTAGCTACAACGA GATTTTCC | 17424 |
| 4206 | AAAAUCSC G UGCUGCUC | 7836 | GAGCAGCA GGCTAGCTACAACGA GCGATTTT | 17425 |
| 4208 | AAUCGCGU G CUGCUCCC | 7837 | GGGAGCAG GGCTAGCTACAACSA ACGCGATT | 17426 |
| 4211 | CGCGUGCU G CUCCCCGC | 7838 | GCGGGGAG GGCTAGCTACAACGA AGCACGCG | 17427 |
| 4218 | UGCUCCCC G CCCCCAGA | 7839 | TCTGGGGG GGCTAGCTACAACSA SGGGAGCA | 17428 |
| 4226 | GCCCCCAG A CUACAACU | 7840 | AGTTGTAG SGCTAGCTACAACGA CTGGGGGC | 17429 |
| 4229 | CCCAGACU A CAACUCGG | 675 | CCGAGTTG GGCTAGCTACAACGA AGTCTGSG | 17430 |
| 4232 | AGACUACA A CUCGGUGG | 7841 | CCACCGAG GGCTAGCTACAACSA TGTAGTCT | 17431 |
| 4237 | ACAACUCG G UGGUCCUG | 7842 | CAGGACCA GGCTAGCTACAACGA CGAGTTGT | 17432 |
| 4240 | ACUCGGUG G UCCUGUAC | 7843 | GTACAGGA GGCTAGCTACAACGA CACCGAST | 17433 |
| 4245 | GUGGUCCU G UACUCCAC | 7844 | GTGGAGTA GGCTAGCTACAACSA AGGACCAC | 17434 |
| 4247 | GGUCCUGU A CUCCACCC | 678 | GGGTGGAG GGCTAGCTACAACGA ACAGGACC | 17435 |
| 4252 | UGUACUCC A CCCCACCC | 5022 | GGGTGGGG GGCTAGCTACAACGA GGAGTACA | 17436 |
| 4257 | UCCACCCC A CCCAUCUA | 5026 | TAGATGGG GGCTAGCTACAACGA GGGGTGGA | 17437 |
| 4261 | CCCCACCC A UCUAGAGU | 5029 | ACTCTAGA GGCTAGCTACAACGA SSSTGGGG | 17438 |
| 4268 | CAUCUAGA G UUUGACAC | 7845 | GTGTCAAA GGCTAGCTACAACGA TCTAGATG | 17439 |
| 4273 | AGAGUUUS A CACGAAGC | 7846 | GCTTCGTG GGCTAGCTACAACGA CAAACTCT | 17440 |
| 4275 | AGUUUGAC A CGAAGCCU | 5031 | AGGCTTCG GGCTAGCTACAACGA GTCAAACT | 17441 |
| 4280 | GACACGAA G CCUUAUUU | 7847 | AAATAAGG GGCTAGCTACAACGA TTCGTSTC | 17442 |
| 4285 | GAAGCCUU A UUUCUAGA | 685 | TCTAGAAA GGCTAGCTACAACGA AAGGCTTC | 17443 |
| 4295 | UUCUAGAA G CACAUGUG | 7848 | CACATGTG GGCTAGCTACAACGA TTCTAGAA | 17444 |
| 4297 | CUAGAAGC A CAUGUGUA | 5035 | TACACATG GGCTAGCTACAACGA GCTTCTAG | 17445 |
| 4299 | AGAAGCAC A USUSUAUU | 5036 | AATACACA GGCTAGCTACAACGA STGCTTCT | 17446 |
| 4301 | AAGCACAU G USUAUUUA | 7849 | TAAATACA GGCTAGCTACAACGA ATSTGCTT | 17447 |
| 4303 | GCACAUGU G UAUUUAUA | 7850 | TATAAATA GGCTAGCTACAACGA ACATSTGC | 17448 |
| 4305 | ACAUGUGU A UUUAUACC | 690 | GGTATAAA GGCTAGCTACAACGA ACACATGT | 17449 |
| 4309 | GUGUAUUU A UACCCCCA | 693 | TSGGGGTA GGCTAGCTACAACGA AAATACAC | 17450 |
| 4311 | GUAUUUAU A CCCCCAGG | 694 | CCTGGGGG GGCTAGCTACAACGA ATAAATAC | 17451 |
| 4322 | CCCAGGAA A CUAGCUUU | 7851 | AAAGCTAG GGCTAGCTACAACGA TTCCTGGG | 17452 |
| 4326 | GGAAACUA G CUUUUGCC | 7852 | GGCAAAAG GGCTAGCTACAACGA TAGTTTCC | 17453 |
| 4332 | UAGCUUUU G CCAGUAUU | 7853 | AATACTGG GGCTAGCTACAACGA AAAAGCTA | 17454 |
| 4336 | UUUUGCCA G UAUUAUGC | 7854 | GCATAATA GGCTAGCTACAACGA TGGCAAAA | 17455 |
| 4338 | UUGCCAGU A UUAUGCAU | 699 | ATGCATAA GGCTAGCTACAACGA ACTGGCAA | 17456 |
| 4341 | CCAGUAUU A UGCAUAUA | 70 | UATATGCA GGCTAGCTAGAACGA AATACTGG | 17457 |
| 4343 | AGUAUUAU G CAUAUAUA | 7855 | TATATATG GGCTAGCTACAACGA ATAATACT | 17458 |
| 4345 | UAUUAUGC A UAUAUAAG | 5046 | CTTATATA GGCTAGCTACAACGA GCATAATA | 17459 |
| 4347 | UUAUGCAU A UAUAAGUU | 702 | AACTTATA GGCTAGCTACAACGA ATGCATAA | 17460 |
| 4349 | AUGCAUAU A UAAGUUUA | 703 | TAAACTTA GGCTAGCTACAACGA ATATGCAT | 17461 |
| 4353 | AUAUAUAA G UUUACACC | 7856 | GGTGTAAA GGCTAGCTACAACGA TTATATAT | 17462 |
| 4357 | AUAAGUUU A CACCUUUA | 707 | TAAAGGTG GGCTAGCTACAACGA AAACTTAT | 17463 |
| 4359 | AAGUUUAC A CCUUUAUC | 5047 | GATAAAGG GGCTAGCTACAACGA GTAAACTT | 17464 |
| 4365 | ACACCUUU A UCUUUCCA | 710 | TGGAAAGA GGCTAGCTACAACGA AAAGGTGT | 17465 |
| 4373 | AUCUUUCC A UGGGAGCC | 5052 | GGCTCCCA GGCTAGCTACAACGA GGAAAGAT | 17466 |
| 4379 | CCAUGGGA G CCAGCUGC | 7857 | GCAGCTGG GGCTAGCTACAACGA TCCCATGG | 17467 |
| 4383 | GGGAGCCA G CUGCUUUU | 7858 | AAAAGCAG GGCTAGCTACAACGA TGGCTCCC | 17468 |
| 4386 | AGCCAGCU G CUUUUUGU | 7859 | ACAAAAAG GGCTAGCTACAACGA AGCTGGCT | 17469 |
| 4393 | UGCUUUUU G UGAUUUUU | 7860 | AAAAATCA GGCTAGCTACAACGA AAAAAGCA | 17470 |
| 4396 | UUUUUGUG A UUUUUUUA | 786 | UAAAAAAA GGCTAGCTACAACGA CACAAAAA | 17471 |
| 4405 | UUUUUUUA A UAGUGCUU | 7862 | AAGCACTA GGCTAGCTACAACGA TAAAAAAA | 17472 |
| 4408 | UUUUAAUA G UGCUUUUU | 7863 | AAAAAGCA GGCTAGCTACAACGA TATTAAAA | 17473 |
| 4410 | UUAAUAGU G CUUUUUUU | 7864 | AAAAAAAG GGCTAGCTACAACGA ACTATTAA | 17474 |
| 4424 | UUUUUUUG A CUAACAAG | 7865 | CTTGTTAG GGCTAGCTACAACGA CAAAAAAA | 17475 |
| 4428 | UUUGACUA A CAAGAAUG | 7866 | CATTCTTG GGCTAGCTACAACGA TAGTCAAA | 17476 |
| 4434 | UAACAAGA A UGUAACUC | 7867 | GAGTTACA GGCTAGCTACAACGA TCTTGTTA | 17477 |
| 4436 | ACAAGAAU G UAACUCCA | 7868 | TGGAGTTA GGCTAGCTACAACGA ATTCTTGT | 17478 |
| 4439 | AGAAUGUA A CUCCAGAU | 7869 | ATCTGGAG GGCTAGCTACAACGA TACATTCT | 17479 |
| 4446 | AACUCCAG A UAGAGAAA | 7870 | TTTCTCTA GGCTAGCTACAACGA CTGGAGTT | 17480 |
| 4454 | AUAGAGAA A UAGUGACA | 787 | UGTCACTA GGCTAGCTACAACGA TTCTCTAT | 17481 |
| 4457 | GAGAAAUA G UGACAAGU | 7872 | ACTTGTCA GGCTAGCTACAACGA TATTTCTC | 17482 |
| 4460 | AAAUAGUG A CAAGUGAA | 7873 | TTCACTTG GGCTAGCTACAACGA CACTATTT | 17483 |
| 4464 | AGUGACAA G UGAAGAAC | 7874 | GTTCTTCA GGCTAGCTACAACGA TTGTCACT | 17484 |
| 4471 | AGUGAAGA A CACUACUG | 7875 | CAGTAGTG GGCTAGCTACAACGA TCTTCACT | 17485 |
| 4473 | UGAAGAAC A CUACUGCU | 5064 | AGCAGTAG GGCTAGCTACAACGA GTTCTTCA | 17486 |
| 4476 | AGAACACU A CUGCUAAA | 742 | TTTAGCAG GGCTAGCTACAACGA AGTGTTCT | 17487 |
| 4479 | ACACUACU G CUAAAUCC | 7876 | GGATTTAG GGCTAGCTACAACGA AGTAGTGT | 17488 |
| 4484 | ACUGCUAA A UCCUCAUG | 7877 | CATGAGGA GGCTAGCTACAACGA TTAGCAGT | 17489 |
| 4490 | AAAUCCUC A UGUUACUC | 5070 | GAGTAACA GGCTAGCTACAACGA GAGGATTT | 17490 |
| 4492 | AUCCUCAU G UUACUCAG | 7878 | CTGAGTAA GGCTAGCTACAACGA ATGAGGAT | 17491 |
| 4495 | CUCAUGUU A CUCAGUGU | 747 | ACACTGAG GGCTAGCTACAACGA AACATGAG | 17492 |
| 4500 | GUUACUCA G UGUUAGAG | 7879 | CTCTAACA GGCTAGCTACAACGA TGAGTAAC | 17493 |
| 4502 | UACUCAGU G UUAGAGAA | 7880 | TTCTCTAA GGCTAGCTACAACGA ACTGAGTA | 17494 |
| 4511 | UUAGAGAA A UCCUUCCU | 7881 | AGGAAGGA GGCTAGCTACAACGA TTCTCTAA | 17495 |
| 4522 | CUUCCUAA A CCCAAUGA | 7882 | TCATTGGG GGCTAGCTACAACGA TTAGGAAG | 17496 |
| 4527 | UAAACCCA A UGACUUCC | 7883 | GGAAGTCA GGCTAGCTACAACGA TGGGTTTA | 17497 |
| 4530 | ACCCAAUG A CUUCCCUG | 7884 | CAGGGAAG GGCTAGCTACAACGA CATTGGGT | 17498 |
| 4538 | ACUUCCCU G CUCCAACC | 7885 | GGTTGGAG GGCTAGCTACAACGA AGGGAAGT | 17499 |
| 4544 | CUGCUCCA A CCCCCGCC | 7886 | GGCGGGGG GGCTAGCTACAACGA TGGAGCAG | 17500 |
| 4550 | CAACCCCC G CCACCUCA | 7887 | TGAGGTGG GGCTAGCTACAACGA GGGGGTTG | 17501 |
| 4553 | CCCCCGCC A CCUCAGGG | 5092 | CCCTGAGG GGCTAGCTACAACGA GGCGGGGG | 17502 |
| 4561 | ACCUCAGG G CACGCAGG | 7888 | CCTGCGTG GGCTAGCTACAACGA CCTGAGGT | 17503 |
| 4563 | CUCAGGGC A CGCAGGAC | 5096 | GTCCTGCG GGCTAGCTACAACGA GCCCTGAG | 17504 |
| 4565 | CAGGGCAC G CAGGACCA | 7889 | TGGTCCTG GGCTAGCTACAACGA GTGCCCTG | 17505 |
| 4570 | CACGCAGG A CCAGUUUG | 7890 | CAAACTGG GGCTAGCTACAACGA CCTGCGTG | 17506 |
| 4574 | CAGGACCA G UUUGAUUG | 7891 | CAATCAAA GGCTAGCTACAACGA TGGTCCTG | 17507 |
| 4579 | CCAGUUUG A UUGAGGAG | 7892 | CTCCTCAA GGCTAGCTACAACGA CAAACTGG | 17508 |
| 4587 | AUUGAGGA G CUGCACUG | 7893 | CAGTGCAG GGCTAGCTACAACGA TCCTCAAT | 17509 |
| 4590 | GAGGAGCU G CACUGAUC | 7894 | GATCAGTG GGCTAGCTACAACGA AGCTCCTC | 17510 |
| 4592 | GGAGCUGC A CUGAUCAC | 5101 | GTGATCAG GGCTAGCTACAACGA GCAGCTCC | 17511 |
| 4596 | CUGCACUG A UCACCCAA | 7895 | TTGGGTGA GGCTAGCTACAACGA CAGTGCAG | 17512 |
| 4599 | CACUGAUC A CCCAAUGC | 5103 | GCATTGGG GGCTAGCTACAACGA GATCAGTG | 17513 |
| 4604 | AUCACCCA A UGCAUCAC | 7896 | GTGATGCA GGCTAGCTACAACGA TGGGTGAT | 17514 |
| 4606 | CACCCAAU G CAUCACGU | 7897 | ACGTGATG GGCTAGCTACAACGA ATTGGGTG | 17515 |
| 4608 | CCCAAUGC A UCACGUAC | 5107 | GTACGTGA GGCTAGCTACAACGA GCATTGGG | 17516 |
| 4611 | AAUGCAUC A CGUACCCC | 5108 | GGGGTACG GGCTAGCTACAACGA GATGCATT | 17517 |
| 4613 | UGCAUCAC G UACCCCAC | 7898 | GTGGGGTA GGCTAGCTACAACGA GTGATGCA | 17518 |
| 4615 | CAUCACGU A CCCCACUG | 764 | CAGTGGGG GGCTAGCTACAACGA ACGTGATG | 17519 |
| 4620 | CGUACCCC A CUGGGCCA | 5112 | TGGCCCAG GGCTAGCTACAACGA GGGGTACG | 17520 |
| 4625 | CCCACUGG G CCAGCCCU | 7899 | AGGGCTGG GGCTAGCTACAACGA CCAGTGGG | 17521 |
| 4629 | CUGGGCCA G CCCUGCAG | 7900 | CTGCAGGG GGCTAGCTACAACGA TGGCCCAG | 17522 |
| 4634 | CCAGCCCU G CAGCCCAA | 7901 | UTGGGCTG GGCTAGCTACAACGA AGGGCTGG | 17523 |
| 4637 | GCCCUGCA G CCCAAAAC | 7902 | GTTTTGGG GGCTAGCTACAACGA TGCAGGGC | 17524 |
| 4644 | AGCCCAAA A CCCAGGGC | 7903 | GCCCTGGG GGCTAGCTACAACGA TTTGGGCT | 17525 |
| 4651 | AACCCAGG G CAACAAGC | 7904 | GCTTGTTG GGCTAGCTACAACGA CCTGGGTT | 17526 |
| 4654 | CCAGGGCA A CAAGCCCG | 7905 | CGGGCTTG GGCTAGCTACAACGA TGCCCTGG | 17527 |
| 4658 | GGCAACAA G CCCGUUAG | 7906 | CTAACGGG GGCTAGCTACAACGA TTGTTGCC | 17528 |
| 4662 | ACAAGCCC G UUAGCCCC | 7907 | GGGGCTAA GGCTAGCTACAACGA GGGCTTGT | 17529 |
| 4666 | GCCCGUUA G CCCCAGGG | 7908 | CCCTGGGG GGCTAGCTACAACGA TAACGGGC | 17530 |
| 4676 | CCCAGGGG A UCACUGGC | 7909 | GCCAGTGA GGCTAGCTACAACGA CCCCTGGG | 17531 |
| 4679 | AGGGGAUC A CUGGCUGG | 5134 | CCAGCCAG GGCTAGCTACAACGA GATCCCCT | 17532 |
| 4683 | GAUCACUG G CUGGCCUG | 7910 | CAGGCCAG GGCTAGCTACAACGA CAGTGATC | 17533 |
| 4687 | ACUGGCUG G CCUGAGCA | 791 | UGCTCAGG GGCTAGCTACAACGA CAGCCAGT | 17534 |
| 4693 | UGGCCUGA G CAACAUCU | 7912 | AGATGTTG GGCTAGCTACAACGA TCAGGCCA | 17535 |
| 4696 | CCUGAGCA A CAUCUCGG | 7913 | CCGAGATG GGCTAGCTACAACGA TGCTCAGG | 17536 |
| 4698 | UGAGCAAC A UCUCGGGA | 5140 | TCCCGAGA GGCTAGCTACAACGA GTTGCTCA | 17537 |
| 4707 | UCUCGGGA G UCCUCUAG | 7914 | CTAGAGGA GGCTAGCTACAACGA TCCCGAGA | 17538 |
| 4715 | GUCCUCUA G CAGGCCUA | 7915 | TAGGCCTG GGCTAGCTACAACGA TAGAGGAC | 17539 |
| 4719 | UCUAGCAG G CCUAAGAC | 7916 | GTCTTAGG GGCTAGCTACAACGA CTGCTAGA | 17540 |
| 4726 | GGCCUAAG A CAUGUGAG | 7917 | CTCACATG GGCTAGCTACAACGA CTTAGGCC | 17541 |
| 4728 | CCUAAGAC A UGUGAGGA | 5148 | TCCTCACA GGCTAGCTACAACGA GTCTTAGG | 17542 |
| 4730 | UAAGACAU G UGAGGAGG | 7918 | CCTCCTCA GGCTAGCTACAACGA ATGTCTTA | 17543 |
| 4752 | GAAAAAAA G CAAAAAGC | 7919 | GCTTTTTG GGCTAGCTACAACGA TTTTTTTC | 17544 |
| 4759 | AGCAAAAA G CAAGGGAG | 7920 | CTCCCTTG GGCTAGCTACAACGA TTTTTGCT | 17545 |
| 4777 | AAAGAGAA A CCGGGAGA | 792 | UCTCCCGG GGCTAGCTACAACGA TTCTCTTT | 17546 |
| 4788 | GGGAGAAG G CAUGAGAA | 7922 | TTCTCATG GGCTAGCTACAACGA CTTCTCCC | 17547 |
| 4790 | GAGAAGGC A UGAGAAAG | 5152 | CTTTCTCA GGCTAGCTACAACGA GCCTTCTC | 17548 |
| 4800 | GAGAAAGA A UUUGAGAC | 7923 | GTCTCAAA GGCTAGCTACAACGA TCTTTCTC | 17549 |
| 4807 | AAUUUGAG A CGCACCAU | 7924 | ATGGTGCG GGCTAGCTACAACGA CTCAAATT | 17550 |
| 4809 | UUUGAGAC G CACCAUGU | 7925 | ACATGGTG GGCTAGCTACAACGA GTCTCAAA | 17551 |
| 4811 | UGAGACGC A CCAUGUGG | 5153 | CCACATGG GGCTAGCTACAACGA GCGTCTCA | 17552 |
| 4814 | GACGCACC A UGUGGGCA | 5155 | TGCCCACA GGCTAGCTACAACGA GGTGCGTC | 17553 |
| 4816 | CGCACCAU G UGGGCACG | 7926 | CGTGCCCA GGCTAGCTACAACGA ATGGTGCG | 17554 |
| 4820 | CCAUGUGG G CACGGAGG | 7927 | CCTCCGTG GGCTAGCTACAACGA CCACATGG | 17555 |
| 4822 | AUGUGGGC A CGGAGGGG | 5156 | CCCCTCCG GGCTAGCTACAACGA GCCCACAT | 17556 |
| 4832 | GGAGGGGG A CGGGGCUC | 7928 | GAGCCCCG GGCTAGCTACAACGA CCCCCTCC | 17557 |
| 4837 | GGGACGGG G CUCAGCAA | 7929 | TTGCTGAG GGCTAGCTACAACGA CCCGTCCC | 17558 |
| 4842 | GGGGCUCA G CAAUGCCA | 7930 | TGGCATTG GGCTAGCTACAACGA TGAGCCCC | 17559 |
| 4845 | GCUCAGCA A UGCCAUUU | 7931 | AAATGGCA GGCTAGCTACAACGA TGCTGAGC | 17560 |
| 4847 | UCAGCAAU G CCAUUUCA | 7932 | TGAAATGG GGCTAGCTACAACGA ATTGCTGA | 17561 |
| 4850 | GCAAUGCC A UUUCAGUG | 5161 | CACTGAAA GGCTAGCTACAACGA GGCATTGC | 17562 |
| 4856 | CCAUUUCA G UGGCUUCC | 7933 | GGAAGCCA GGCTAGCTACAACGA TGAAATGG | 17563 |
| 4859 | UUUCAGUG G CUUCCCAG | 7934 | CTGGGAAG GGCTAGCTACAACGA CACTGAAA | 17564 |
| 4867 | GCUUCCCA G CUCUGACC | 7935 | GGTCAGAG GGCTAGCTACAACGA TGGGAAGC | 17565 |
| 4873 | CAGCUCUG A CCCUUCUA | 7936 | TAGAAGGG GGCTAGCTACAACGA CAGAGCTG | 17566 |
| 4881 | ACCCUUCU A CAUUUGAG | 785 | CTCAAATG GGCTAGCTACAACGA AGAAGGGT | 17567 |
| 4883 | CCUUCUAC A UUUGAGGG | 5173 | CCCTCAAA GGCTAGCTACAACGA GTAGAAGG | 17568 |
| 4891 | AUUUGAGG G CCCAGCCA | 7937 | TGGCTGGG GGCTAGCTACAACGA CCTCAAAT | 17569 |
| 4896 | AGGGCCCA G CCAGGAGC | 7938 | GCTCCTGG GGCTAGCTACAACGA TGGGCCCT | 17570 |
| 4903 | AGCCAGGA G CAGAUGGA | 7939 | TCCATCTG GGCTAGCTACAACGA TCCTGGCT | 17571 |
| 4907 | AGGAGCAG A UGGACAGG | 7940 | GCTGTCCA GGCTAGCTACAACGA CTGCTCCT | 17572 |
| 4911 | GCAGAUGG A CAGCGAUG | 7941 | CATCGCTG GGCTAGCTACAACGA CCATCTGC | 17573 |
| 4914 | GAUGGACA G CGAUGAGG | 7942 | CCTCATCG GGCTAGCTACAACGA TGTCCATC | 17574 |
| 4917 | GGACAGCG A UGAGGGGA | 7943 | TCCCCTCA GGCTAGCTACAACGA CGCTGTCC | 17575 |
| 4925 | AUGAGGGG A CAUUUUCU | 7944 | AGAAAATG GGCTAGCTACAACGA CCCCTCAT | 17576 |
| 4927 | GAGGGGAC A UUUUCUGG | 5181 | CCAGAAAA GGCTAGCTACAACGA GTCCCCTC | 17577 |
| 4936 | UUUUCUGG A UUCUGGGA | 7945 | TCCCAGAA GGCTAGCTACAACGA CCAGAAAA | 17578 |
| 4946 | UCUGGGAG G CAAGAAAA | 7946 | TTTTCTTG GGCTAGCTACAACGA CTCCCAGA | 17579 |
| 4957 | AGAAAAGG A CAAAUAUC | 7947 | GATATTTG GGCTAGCTACAACGA CCTTTTCT | 17580 |
| 4961 | AAGGACAA A UAUCUUUU | 7948 | AAAAGATA GGCTAGCTACAACGA TTGTCCTT | 17581 |
| 4963 | GGACAAAU A UCUUUUUU | 794 | AAAAAAGA GGCTAGCTACAACGA ATTTGTCC | 17582 |
| 4975 | UUUUUGGA A CUAAAGCA | 7949 | TGCTTTAG GGCTAGCTACAACGA TCCAAAAA | 17583 |
| 4981 | GAACUAAA G CAAAUUUU | 7950 | AAAATTTG GGCTAGCTACAACGA TTTAGTTC | 17584 |
| 4985 | UAAAGCAA A UUUUAGAC | 7951 | GTCTAAAA GGCTAGCTACAACGA TTGCTTTA | 17585 |
| 4992 | AAUUUUAG A CCUUUACC | 7952 | GGTAAAGG GGCTAGCTACAACGA CTAAAATT | 17586 |
| 4998 | AGACCUUU A CCUAUGGA | 808 | TCCATAGG GGCTAGCTACAACGA AAAGGTCT | 17587 |
| 5002 | CUUUACCU A UGGAAGUG | 809 | CACTTCCA GGCTAGCTACAACGA AGGTAAAG | 17588 |
| 5008 | CUAUGGAA G UGGUUCUA | 7953 | TAGAACCA GGCTAGCTACAACGA TTCCATAG | 17589 |
| 5011 | UGGAAGUG G UUCUAUGU | 7954 | ACATAGAA GGCTAGCTACAACGA CACTTCCA | 17590 |
| 5016 | GUGGUUCU A UGUCCAUU | 812 | AATGGACA GGCTAGCTACAACGA AGAACCAC | 17591 |
| 5018 | GGUUCUAU G UCCAUUCU | 7955 | AGAATGGA GGCTAGCTACAACGA ATAGAACC | 17592 |
| 5022 | CUAUGUCC A UUCUCAUU | 5195 | AATGAGAA GGCTAGCTACAACGA GGACATAG | 17593 |
| 5028 | CCAUUCUC A UUCGUGGC | 5197 | GCCACGAA GGCTAGCTACAACGA GAGAATGG | 17594 |
| 5032 | UCUCAUUC G UGGCAUGU | 7956 | ACATGCCA GGCTAGCTACAACGA GAATGAGA | 17595 |
| 5035 | CAUUCGUG G CAUGUUUU | 7957 | AAAACATG GGCTAGCTACAACGA CACGAATG | 17596 |
| 5037 | UUCGUGGC A UGUUUUGA | 5198 | TCAAAACA GGCTAGCTACAACGA GCCACGAA | 17597 |
| 5039 | CGUGGCAU G UUUUGAUU | 7958 | AATCAAAA GGCTAGCTACAACGA ATGCCACG | 17598 |
| 5045 | AUGUUUUG A UUUGUAGC | 7959 | GCTACAAA GGCTAGCTACAACGA CAAAACAT | 17599 |
| 5049 | UUUGAUUU G UAGCACUG | 7960 | CAGTGCTA GGCTAGCTACAACGA AAATCAAA | 17600 |
| 5052 | GAUUUGUA G CACUGAGG | 7961 | CCTCAGTG GGCTAGCTACAACGA TACAAATC | 17601 |
| 5054 | UUUGUAGC A CUGAGGGU | 5199 | ACCCTCAG GGCTAGCTACAACGA GCTACAAA | 17602 |
| 5061 | CACUGAGG G UGGCACUC | 7962 | GAGTGCCA GGCTAGCTACAACGA CCTCAGTG | 17603 |
| 5064 | UGAGGGUG G CACUCAAC | 7963 | GTTGAGTG GGCTAGCTACAACGA CACCCTCA | 17604 |
| 5066 | AGGGUGGC A CUCAACUC | 5201 | GAGTTGAG GGCTAGCTACAACGA GCCACCCT | 17605 |
| 5071 | GGCACUCA A CUCUGAGC | 7964 | GCTCAGAG GGCTAGCTACAACGA TGAGTGCC | 17606 |
| 5078 | AACUCUGA G CCCAUACU | 7965 | AGTATGGG GGCTAGCTACAACGA TCAGAGTT | 17607 |
| 5082 | CUGAGCCC A UACUUUUG | 5208 | CAAAAGTA GGCTAGCTACAACGA GGGCTCAG | 17608 |
| 5084 | GAGCCCAU A CUUUUGGC | 827 | GCCAAAAG GGCTAGCTACAACGA ATGGGCTC | 17609 |
| 5091 | UACUUUUG G CUCCUCUA | 7966 | TAGAGGAG GGCTAGCTACAACGA CAAAAGTA | 17610 |
| 5100 | CUCCUCUA G UAAGAUGC | 7967 | GCATCTTA GGCTAGCTACAACGA TAGAGGAG | 17611 |
| 5105 | CUAGUAAG A UGCACUGA | 7968 | TCAGTGCA GGCTAGCTACAACGA CTTACTAG | 17612 |
| 5107 | AGUAAGAU G CACUGAAA | 7969 | TTTCAGTG GGCTAGCTACAACGA ATCTTACT | 17613 |
| 5109 | UAAGAUGC A CUGAAAAC | 5214 | GTTTTCAG GGCTAGCTACAACGA GCATCTTA | 17614 |
| 5116 | CACUGAAA A CUUAGCCA | 7970 | TGGCTAAG GGCTAGCTACAACGA TTTCAGTG | 17615 |
| 5121 | AAAACUUA G CCAGAGUU | 7971 | AACTCTGG GGCTAGCTACAACGA TAAGTTTT | 17616 |
| 5127 | UAGCCAGA G UUAGGUUG | 7972 | CAACCTAA GGCTAGCTACAACGA TCTGGCTA | 17617 |
| 5132 | AGAGUUAG G UUGUCUCC | 7973 | GGAGACAA GGCTAGCTACAACGA CTAACTCT | 17618 |
| 5135 | GUUAGGUU G UCUCCAGG | 7974 | CCTGGAGA GGCTAGCTACAACGA AACCTAAC | 17619 |
| 5143 | GUCUCCAG G CCAUGAUG | 7975 | CATCATGG GGCTAGCTACAACGA CTGGAGAC | 17620 |
| 5146 | UCCAGGCC A UGAUGGCC | 5223 | GGCCATCA GGCTAGCTACAACGA GGCCTGGA | 17621 |
| 5149 | AGGCCAUG A UGGCCUUA | 7976 | TAAGGCCA GGCTAGCTACAACGA CATGGCCT | 17622 |
| 5152 | CCAUGAUG G CCUUACAC | 7977 | GTGTAAGG GGCTAGCTACAACGA CATCATGG | 17623 |
| 5157 | AUGGCCUU A CACUGAAA | 843 | TTTCAGTG GGCTAGCTACAACGA AAGGCCAT | 17624 |
| 5159 | GGCCUUAC A CUGAAAAU | 5226 | ATTTTCAG GGCTAGCTACAACGA GTAAGGCC | 17625 |
| 5166 | CACUGAAA A UGUCACAU | 7978 | ATGTGACA GGCTAGCTACAACGA TTTCAGTG | 17626 |
| 5168 | CUGAAAAU G UCACAUUC | 7979 | GAATGTGA GGCTAGCTACAACGA ATTTTCAG | 17627 |
| 5171 | AAAAUGUC A CAUUCUAU | 5228 | ATAGAATG GGCTAGCTACAACGA GACATTTT | 17628 |
| 5173 | AAUGUCAC A UUCUAUUU | 5229 | AAATAGAA GGCTAGCTACAACGA GTGACATT | 17629 |
| 5178 | CACAUUCU A UUUUGGGU | 847 | ACCCAAAA GGCTAGCTACAACGA AGAATGTG | 17630 |
| 5185 | UAUUUUGG G UAUUAAUA | 7980 | TATTAATA GGCTAGCTACAACGA CCAAAATA | 17631 |
| 5187 | UUUUGGGU A UUAAUAUA | 851 | UATATTAA GGCTAGCTACAACGA ACCCAAAA | 17632 |
| 5191 | GGGUAUUA A UAUAUAGU | 7981 | ACTATATA GGCTAGCTACAACGA TAATACCC | 17633 |
| 5193 | GUAUUAAU A UAUAGUCC | 854 | GGACTATA GGCTAGCTACAACGA ATTAATAC | 17634 |
| 5195 | AUUAAUAU A CAGUCCAG | 855 | CTGGACTA GGCTAGCTACAACGA ATATTAAT | 17635 |
| 5198 | AAUAUAUA G UCCAGACA | 7982 | TGTCTGGA GGCTAGCTACAACGA TATATATT | 17636 |
| 5204 | UAGUCCAG A CACUUAAC | 7983 | GTTAAGTG GGCTAGCTACAACGA CTGGACTA | 17637 |
| 5206 | GUCCAGAC A CUUAACUC | 5233 | GAGTTAAG GGCTAGCTACAACGA GTCTGGAC | 17638 |
| 5211 | GACACUUA A CUCAAUUU | 7984 | AAATTGAG GGCTAGCTACAACGA TAAGTGTC | 17639 |
| 5216 | UUAACUCA A UUUCUUGG | 7985 | CCAAGAAA GGCTAGCTACAACGA TGAGTTAA | 17640 |
| 5224 | AUUUCUUG G UAUUAUUC | 7986 | GAATAATA GGCTAGCTACAACGA CAAGAAAT | 17641 |
| 5226 | UUCUUGGU A UUAUUCUG | 865 | CAGAATAA GGCTAGCTACAACGA ACCAAGAA | 17642 |
| 5229 | UUGGUAUU A UUCUGUUU | 867 | AAACAGAA GGCTAGCTACAACGA AATACCAA | 17643 |
| 5234 | AUUAUUCU G UUUUGCAC | 7987 | GTGCAAAA GGCTAGCTACAACGA AGAATAAT | 17644 |
| 5239 | UCUGUUUU G CACAGUUA | 7988 | TAACTGTG GGCTAGCTACAACGA AAAACAGA | 17645 |
| 5241 | UGUUUUGC A CAGUUAGU | 5239 | ACTAACTG GGCTAGCTACAACGA GCAAAACA | 17646 |
| 5244 | UUUGCACA G UUAGUUGU | 7989 | ACAACTAA GGCTAGCTACAACGA TGTGCAAA | 17647 |
| 5248 | CACAGUUA G UUGUGAAA | 7990 | TTTCACAA GGCTAGCTACAACGA TAACTGTG | 17648 |
| 5251 | AGUUAGUU G UGAAAGAA | 799 | UTCTTTCA GGCTAGCTACAACGA AACTAACT | 17649 |
| 5261 | GAAAGAAA G CUGAGAAG | 7992 | CTTCTCAG GGCTAGCTACAACGA TTTCTTTC | 17650 |
| 5271 | UGAGAAGA A UGAAAAUG | 7993 | CATTTTCA GGCTAGCTACAACGA TCTTCTCA | 17651 |
| 5277 | GAAUGAAA A UGCAGUCC | 7994 | GGACTGCA GGCTAGCTACAACGA TTTCATTC | 17652 |
| 5279 | AUGAAAAU G CAGUCCUG | 7995 | CAGGACTG GGCTAGCTACAACGA ATTTTCAT | 17653 |
| 5282 | AAAAUGCA G UCCUGAGG | 7996 | CCTCAGGA GGCTAGCTACAACGA TGCATTTT | 17654 |
| 5294 | UGAGGAGA G UUUUCUCC | 7997 | GGAGAAAA GGCTAGCTACAACGA TCTCCTCA | 17635 |
| 5303 | UUUUCUCC A UAUCAAAA | 5247 | TTTTGATA GGCTAGCTACAACGA GGAGAAAA | 17656 |
| 5305 | UUCUCCAU A UCAAAACG | 882 | CGTTTTGA GGCTAGCTACAACGA ATGGAGAA | 17657 |
| 5312 | AUAUCAAA A CGAGGGCU | 7998 | AGCCCTCG GGCTAGCTACAACGA TTTGATAT | 17658 |
| 5317 | AAACGAGG G CUGAUGGA | 7999 | TCCATCAG GGCTAGCTACAACGA CCTCGTTT | 17659 |
| 5321 | GAGGGCUG A UGGAGGAA | 8000 | TTCCTCCA GGCTAGCTACAACGA CAGCCCTC | 17660 |
| 5334 | GGAAAAAG G UCAAUAAG | 8001 | CTTATTGA GGCTAGCTACAACGA CTTTTTCC | 17661 |
| 5338 | AAAGGUCA A UAAGGUCA | 8002 | TGACCTTA GGCTAGCTACAACGA TGACCTTT | 17662 |
| 5343 | UCAAUAAG G UCAAGGGA | 8003 | TCCCTTGA GGCTAGCTACAACGA CTTATTGA | 17663 |
| 5354 | AAGGGAAG A CCCCGUCU | 8004 | AGACGGGG GGCTAGCTACAACGA CTTCCCTT | 17664 |
| 5359 | AAGACCCC G UCUCUAUA | 8005 | TATAGAGA GGCTAGCTACAACGA GGGGTCTT | 17665 |
| 5365 | CCGUCUCU A UACCAACC | 889 | GGTTGGTA GGCTAGCTACAACGA AGAGACGG | 17666 |
| 5367 | GUCUCUAU A CCAACCAA | 890 | TTGGTTGG GGCTAGCTACAACGA ATAGAGAC | 17667 |
| 5371 | CUAUACCA A CCAAACCA | 8006 | TGGTTTGG GGCTAGCTACAACGA TGGTATAG | 17668 |
| 5376 | CCAACCAA A CCAAUUCA | 8007 | TGAATTGG GGCTAGCTACAACGA TTGGTTGG | 17669 |
| 5380 | CCAAACCA A UUCACCAA | 8008 | TTGGTGAA GGCTAGCTACAACGA TGGTTTGG | 17670 |
| 5384 | ACCAAUUC A CCAACACA | 5263 | TGTGTTGG GGCTAGCTACAACGA GAATTGGT | 17671 |
| 5388 | AUUCACCA A CACAGUUG | 8009 | CAACTGTG GGCTAGCTACAACGA TGGTGAAT | 17672 |
| 5390 | UCACCAAC A CAGUUGGG | 5266 | CCCAACTG GGCTAGCTACAACGA GTTGGTGA | 17673 |
| 5393 | CCAACACA G UUGGGACC | 8010 | GGTCCCAA GGCTAGCTACAACGA TGTGTTGG | 17674 |
| 5399 | CAGUUGGG A CCCAAAAC | 8011 | GTTTTGGG GGCTAGCTACAACGA CCCAACTG | 17675 |
| 5406 | GACCCAAA A CACAGGAA | 8012 | TTCCTGTG GGCTAGCTACAACGA TTTGGGTC | 17676 |
| 5408 | CCCAAAAC A CAGGAAGU | 5271 | ACTTCCTG GGCTAGCTACAACGA GTTTTGGG | 17677 |
| 5415 | CACAGGAA G UCAGUCAC | 8013 | GTGACTGA GGCTAGCTACAACGA TTCCTGTG | 17678 |
| 5419 | GGAAGUCA G UCACGUUU | 8014 | AAACGTGA GGCTAGCTACAACGA TGACTTCC | 17679 |
| 5422 | AGUCAGUC A CGUUUCCU | 5274 | AGGAAACG GGCTAGCTACAACGA GACTGACT | 17680 |
| 5424 | UCAGUCAC G UUUCCUUU | 8015 | AAAGGAAA GGCTAGCTACAACGA GTGACTGA | 17681 |
| 5435 | UCCUUUUC A UUUAAUGG | 5277 | CCATTAAA GGCTAGCTACAACGA GAAAAGGA | 17682 |
| 5440 | UUCAUUUA A UGGGGAUU | 8016 | AATCCCCA GGCTAGCTACAACGA TAAATGAA | 17683 |
| 5446 | UAAUGGGG A UUCCACUA | 8017 | TAGTGGAA GGCTAGCTACAACGA CCCCATTA | 17684 |
| 5451 | GGGAUUCC A CUAUCUCA | 5279 | TGAGATAG GGCTAGCTACAACGA GGAATCCC | 17685 |
| 5454 | AUUCCACU A UCUCACAC | 908 | GTGTGAGA GGCTAGCTACAACGA AGTGGAAT | 17686 |
| 5459 | ACUAUCUC A CACUAAUC | 5282 | GATTAGTG GGCTAGCTACAACGA GAGATAGT | 17687 |
| 5461 | UAUCUCAC A CUAAUCUG | 5283 | CAGATTAG GGCTAGCTACAACGA GTGAGATA | 17688 |
| 5465 | UCACACUA A UCUGAAAG | 8018 | CTTTCAGA GGCTAGCTACAACGA TAGTGTGA | 17689 |
| 5475 | CUGAAAGG A UGUGGAAG | 8019 | CTTCCACA GGCTAGCTACAACGA CCTTTCAG | 17690 |
| 5477 | GAAAGGAU G UGGAAGAG | 8020 | CTCTTCCA GGCTAGCTACAACGA ATCCTTTC | 17691 |
| 5485 | GUGGAAGA G CAUUAGCU | 8021 | AGCTAATG GGCTAGCTACAACGA TCTTCCAC | 17692 |
| 5487 | GGAAGAGC A UUAGCUGG | 5286 | CCAGCTAA GGCTAGCTACAACGA GCTCTTCC | 17693 |
| 5491 | GAGCAUUA G CUGGCGCA | 8022 | TGCGCCAG GGCTAGCTACAACGA TAATGCTC | 17694 |
| 5495 | AUUAGCUG G CGCAUAUU | 8023 | AATATGCG GGCTAGCTACAACGA CAGCTAAT | 17695 |
| 5497 | UAGCUGGC G CAUAUUAA | 8024 | TTAATATG GGCTAGCTACAACGA GCCAGCTA | 17696 |
| 5499 | GCUGGCGC A UAUUAAGC | 5288 | GCTTAATA GGCTAGCTACAACGA GCGCCAGC | 17697 |
| 5501 | UGGCGCAU A UUAAGCAC | 915 | GTGCTTAA GGCTAGCTACAACGA ATGCGCCA | 17698 |
| 5506 | CAUAUUAA G CACUUUAA | 8025 | TTAAAGTG GGCTAGCTACAACGA TTAATATG | 17699 |
| 5508 | UAUUAAGC A CUUUAAGC | 5289 | GCTTAAAG GGCTAGCTACAACGA GCTTAATA | 17700 |
| 5515 | CACUUUAA G CUCCUUGA | 8026 | TCAAGGAG GGCTAGCTACAACGA TTAAAGTG | 17701 |
| 5524 | CUCCUUGA G UAAAAAGG | 8027 | CCTTTTTA GGCTAGCTACAACGA TCAAGGAG | 17702 |
| 5532 | GUAAAAAG G UGGUAUGU | 8028 | ACATACCA GGCTAGCTACAACGA CTTTTTAC | 17703 |
| 5535 | AAAAGGUG G UAUGUAAU | 8029 | ATTACATA GGCTAGCTACAACGA CACCTTTT | 17704 |
| 5537 | AAGGUGGU A UGUAAUUU | 924 | AAATTACA GGCTAGCTACAACGA ACCACCTT | 17705 |
| 5539 | GGUGGUAU G UAAUUUAU | 8030 | ATAAATTA GGCTAGCTACAACGA ATACCACC | 17706 |
| 5542 | GGUAUGUA A UUUAUGCA | 803 | UGCATAAA GGCTAGCTACAACGA TACATACC | 17707 |
| 5546 | UGUAAUUU A UGCAAGGU | 928 | ACCTTGCA GGCTAGCTACAACGA AAATTACA | 17708 |
| 5548 | UAAUUUAU G CAAGGUAU | 8032 | ATACCTTG GGCTAGCTACAACGA ATAAATTA | 17709 |
| 5553 | UAUGCAAG G UAUUUCUC | 8033 | GAGAAATA GGCTAGCTACAACGA CTTGCATA | 17710 |
| 5555 | UGCAAGGU A UUUCUCCA | 929 | TGGAGAAA GGCTAGCTACAACGA ACCTTGCA | 17711 |
| 5564 | UUUCUCCA G UUGGGACU | 8034 | AGTCCCAA GGCTAGCTACAACGA TGGAGAAA | 17712 |
| 5570 | CAGUUGGG A CUCAGGAU | 8035 | ATCCTGAG GGCTAGCTACAACGA CCCAACTG | 17713 |
| 5577 | GACUCAGG A UAUUAGUU | 8036 | AACTAATA GGCTAGCTACAACGA CCTGAGTC | 17714 |
| 5579 | CUCAGGAU A UUAGUUAA | 936 | TTAACTAA GGCTAGCTACAACGA ATCCTGAG | 17715 |
| 5583 | GGAUAUUA G UUAAUGAG | 8037 | CTCATTAA GGCTAGCTACAACGA TAATATCC | 17716 |
| 5587 | AUUAGUUA A UGAGCCAU | 8038 | ATGGCTCA GGCTAGCTACAACGA TAACTAAT | 17717 |
| 5591 | GUUAAUGA G CCAUCACU | 8039 | AGTGATGG GGCTAGCTACAACGA TCATTAAC | 17718 |
| 5594 | AAUGAGCC A UCACUAGA | 530 | UCTAGTGA GGCTAGCTACAACGA GGCTCATT | 17719 |
| 5597 | GAGCCAUC A CUAGAAGA | 5302 | TCTTCTAG GGCTAGCTACAACGA GATGGCTC | 17720 |
| 5609 | GAAGAAAA G CCCAUUUU | 8040 | AAAATGGG GGCTAGCTACAACGA TTTTCTTC | 17721 |
| 5613 | AAAAGCCC A UUUUCAAC | 5306 | GTTGAAAA GGCTAGCTACAACGA GGGCTTTT | 17722 |
| 5620 | CAUUUUCA A CUGCUUUG | 8041 | CAAAGCAG GGCTAGCTACAACGA TGAAAATG | 17723 |
| 5623 | UUUCAACU G CUUUGAAA | 8042 | TTTCAAAG GGCTAGCTACAACGA AGTTGAAA | 17724 |
| 5631 | GCUUUGAA A CUUGCCUG | 8043 | CAGGCAAG GGCTAGCTACAACGA TTCAAAGC | 17725 |
| 5635 | UGAAACUU G CCUGGGGU | 8044 | ACCCCAGG GGCTAGCTACAACGA AAGTTTCA | 17726 |
| 5642 | UGCCUGGG C UCUGACCA | 8045 | TGCTCAGA GGCTAGCTACAACGA CCCAGGCA | 17727 |
| 5648 | GGGUCUGA C CAUGAUGG | 8046 | CCATCATG GGCTAGCTACAACGA TCAGACCC | 17728 |
| 5650 | GUCUGAGC A UGAUGGGA | 5314 | TCCCATCA GGCTAGCTACAACGA GCTCAGAC | 17729 |
| 5653 | UGACCAUG A UGGGAAUA | 8047 | TATTCCCA GGCTAGCTACAACGA CATGCTCA | 17730 |
| 5659 | UGAUGGGA A UAGGGAGA | 8048 | TCTCCCTA GGCTAGCTACAACGA TCCCATCA | 17731 |
| 5667 | AUAGGGAG A CAGGGUAG | 8049 | CTACCCTG GGCTAGCTACAACGA CTCCCTAT | 17732 |
| 5672 | GAGACAGG G UAGGAAAG | 8050 | CTTTCCTA GGCTAGCTACAACGA CCTGTCTC | 17733 |
| 5682 | AGGAAAGG G CGCCUACU | 8051 | AGTAGGCG GGCTAGCTACAACGA CCTTTCCT | 17734 |
| 5684 | GAAAGGGC G CCUACUCU | 8052 | AGAGTAGG GGCTAGCTACAACGA GCCCTTTC | 17735 |
| 5688 | GGGCGCCU A CUCUUCAG | 953 | CTGAAGAG GGCTAGCTACAACGA AGGCGCCC | 17736 |
| 5698 | UCUUCAGG G UCUAAAGA | 8053 | TCTTTAGA GGCTAGCTACAACGA CCTGAAGA | 17737 |
| 5706 | GUCUAAAG A UCAAGUGG | 8054 | CCACTTGA GGCTAGCTACAACGA CTTTAGAC | 17738 |
| 5711 | AAGAUCAA G UGGGCCUU | 8055 | AAGGCCCA GGCTAGCTACAACGA TTGATCTT | 17739 |
| 5715 | UCAAGUGG G CCUUGGAU | 8056 | ATCCAAGG GGCTAGCTACAACGA CCACTTGA | 17740 |
| 5722 | GGCCUUGG A UCGCUAAG | 8057 | CTTAGCGA GGCTAGCTACAACGA CCAAGGCC | 17741 |
| 5725 | CUUGGAUC G CUAAGCUG | 8058 | CAGCTTAG GGCTAGCTACAACGA GATCCAAG | 17742 |
| 5730 | AUCGCUAA C CUGGCUCU | 8059 | AGAGCCAG GGCTAGCTACAACGA TTAGCGAT | 17743 |
| 5734 | CUAAGCUG G CUCUGUUU | 8060 | AAACAGAG GGCTAGCTACAACGA CAGCTTAG | 17744 |
| 5739 | CUGGCUCU G UUUGAUGC | 8061 | GCATCAAA GGCTAGCTACAACGA AGAGCCAG | 17745 |
| 5744 | UCUGUUUG A UGCUAUUU | 8062 | AAATAGCA GGCTAGCTACAACGA CAAACAGA | 17746 |
| 5746 | UGUUUGAU G CUAUUUAU | 8063 | ATAAATAG GGCTAGCTACAACGA ATCAAACA | 17747 |
| 5749 | UUGAUGCU A UUUAUGCA | 966 | TGCATAAA GGCTAGCTACAACGA AGCATCAA | 17748 |
| 5753 | UCCUAUUU A UGCAAGUU | 969 | AACTTGCA GGCTAGCTACAACGA AAATAGCA | 17749 |
| 5755 | CUAUUUAU C CAAGUUAG | 8064 | CTAACTTG CGCTAGCTACAACGA ATAAATAG | 17750 |
| 5759 | UUAUGCAA G UUAGGGUC | 8065 | GACCCTAA GGCTAGCTACAACGA TTGCATAA | 17751 |
| 5765 | AAGUUAGG G UCUAUGUA | 8066 | TACATAGA GGCTAGCTACAACGA CCTAACTT | 17752 |
| 5769 | UAGGGUCU A UGUAUUUA | 973 | TAAATACA GGCTAGCTACAACGA AGACCCTA | 17753 |
| 5771 | GGGUCUAU G UAUUUAGG | 8067 | CCTAAATA GGCTAGCTACAACGA ATAGACCC | 17754 |
| 5773 | GUCUAUGU A UUUAGGAU | 974 | ATCCTAAA GGCTAGCTACAACGA ACATAGAC | 17755 |
| 5780 | UAUUUAGG A UGCGCCUA | 8068 | TAGGCGCA GGCTAGCTACAACGA CCTAAATA | 17756 |
| 5782 | UUUAGGAU G CGCCUACU | 8069 | AGTAGGCG GGCTAGCTACAACGA ATCCTAAA | 17757 |
| 5784 | UAGGAUGC G CCUACUCU | 8070 | AGAGTAGG GGCTAGCTACAACGA GCATCCTA | 17758 |
| 5788 | AUGCGCCU A CUCUUCAG | 978 | CTGAAGAG GGCTAGCTACAACGA AGGCGCAT | 17759 |
| 5798 | UCUUCAGG G UCUAAAGA | 8053 | TCTTTAGA GGCTAGCTACAACGA CCTGAAGA | 17737 |
| 5806 | GUCUAAAG A UCAAGUGG | 8054 | CCACTTCA GGCTAGCTACAACGA CTTTAGAC | 17738 |
| 5811 | AAGAUCAA G UGGGCCUU | 8055 | AAGGCCCA GGCTAGCTACAACGA TTGATCTT | 17739 |
| 5815 | UCAAGUGG G CCUUGGAU | 8056 | ATCCAAGG GGCTAGCTACAACGA CCACTTGA | 17740 |
| 5822 | GGCCUUGG A UCGCUAAG | 8057 | CTTAGCGA GGCTAGCTACAACGA CCAAGGCC | 17741 |
| 5825 | CUUGGAUC G CUAAGCUG | 8058 | CAGCTTAG GGCTAGCTACAACGA GATCCAAG | 17742 |
| 5830 | AUCGCUAA G CUGGCUCU | 8059 | AGAGCCAG GGCTAGCTACAACGA TTAGCGAT | 17743 |
| 5834 | CUAAGCUG G CUCUGUUU | 8060 | AAACAGAG GGCTAGCTACAACGA CAGCTTAG | 17744 |
| 5839 | CUGGCUCU G UUUGAUGC | 8061 | GCATCAAA GGCTAGCTACAACGA AGAGCCAG | 17745 |
| 5844 | UCUGUUUG A UGCUAUUU | 8062 | AAATAGCA GGCTAGCTACAACGA CAAACAGA | 17746 |
| 5846 | UGUUUGAU G CUAUUUAU | 8063 | ATAAATAG GGCTAGCTACAACGA ATCAAACA | 17747 |
| 5849 | UUGAUGCU A UUUAUGCA | 966 | TGCATAAA GGCTAGCTACAACGA AGCATCAA | 17748 |
| 5853 | UGCUAUUU A UGCAAGUU | 969 | AACTTGCA GGCTAGCTACAACGA AAATAGCA | 17749 |
| 5855 | CUAUUUAU G CAAGUUAG | 8064 | CTAACTTG GGCTAGCTACAACGA ATAAATAG | 17750 |
| 5859 | UUAUGCAA G UUAGGGUC | 8065 | GACCCTAA GGCTAGCTACAACGA TTGCATAA | 17751 |
| 5865 | AAGUUAGG G UCUAUGUA | 8066 | TACATAGA GGCTAGCTACAACGA CCTAACTT | 17752 |
| 5869 | UAGGGUCU A UGUAUUUA | 973 | TAAATACA GGCTAGCTACAACGA AGACCCTA | 17753 |
| 5871 | GGGUCUAU G UAUUUAGG | 8067 | CCTAAATA GGCTAGCTACAACGA ATAGACCC | 17754 |
| 5873 | GUCUAUGU A UUUAGGAU | 974 | ATCCTAAA GGCTAGCTACAACGA ACATAGAC | 17755 |
| 5880 | UAUUUAGG A UGUCUGCA | 807 | UGCAGACA GGCTAGCTACAACGA CCTAAATA | 17760 |
| 5882 | UUUAGGAU G UCUGCACC | 8072 | GGTGCAGA GGCTAGCTACAACGA ATCCTAAA | 17761 |
| 5886 | GGAUGUCU G CACCUUCU | 8073 | AGAAGGTG GGCTAGCTACAACGA AGACATCC | 17762 |
| 5888 | AUGUCUGC A CCUUCUGC | 5335 | GCAGAAGG GGCTAGCTACAACGA GCAGACAT | 17763 |
| 5895 | CACCUUCU G CAGCCAGU | 8074 | ACTGGCTG GGCTAGCTACAACGA AGAAGGTG | 17764 |
| 5898 | CUUCUGCA G CCAGUCAG | 8075 | CTGACTGG GGCTAGCTACAACGA TGCAGAAG | 17765 |
| 5902 | UGCAGCCA G UCAGAAGC | 8076 | GCTTCTGA GGCTAGCTACAACGA TGGCTGCA | 17766 |
| 5909 | AGUCAGAA G CUGGAGAG | 8077 | CTCTCCAG GGCTAGCTACAACGA TTCTGACT | 17767 |
| 5918 | CUGGAGAG G CAACAGUG | 8078 | CACTGTTG GGCTAGCTACAACGA CTCTCCAG | 17768 |
| 5921 | GAGAGGCA A CAGUGGAU | 8079 | ATCCACTG GGCTAGCTACAACGA TGCCTCTC | 17769 |
| 5924 | AGGCAACA G UGGAUUGC | 8080 | GCAATCCA GGCTAGCTACAACGA TGTTGCCT | 17770 |
| 5928 | AACAGUGG A UUGCUGCU | 8081 | AGCAGCAA GGCTAGCTACAACGA CCACTGTT | 17771 |
| 5931 | AGUGGAUU G CUGCUUCU | 8082 | AGAAGCAG GGCTAGCTACAACGA AATCCACT | 17772 |
| 5934 | GGAUUGCU G CUUCUUGG | 8083 | CCAAGAAG GGCTAGCTACAACGA AGCAATCC | 17773 |
| 5951 | GGAGAAGA G UAUGCUUC | 8084 | GAAGCATA GGCTAGCTACAACGA TCTTCTCC | 17774 |
| 5953 | AGAAGAGU A UGCUUCCU | 990 | AGGAAGCA GGCTAGCTACAACGA ACTCTTCT | 17775 |
| 5955 | AAGAGUAU G CUUCCUUU | 8085 | AAAGGAAG GGCTAGCTACAACGA ATACTCTT | 17776 |
| 5965 | UUCCUUUU A UCCAUGUA | 996 | TACATGGA GGCTAGCTACAACGA AAAAGGAA | 17777 |
| 5969 | UUUUAUCC A UGUAAUUU | 5353 | AAATTACA GGCTAGCTACAACGA GGATAAAA | 17778 |
| 5971 | UUAUCCAU G UAAUUUAA | 8086 | TTAAATTA GGCTAGCTACAACGA ATGGATAA | 17779 |
| 5974 | UCCAUGUA A UUUAACUG | 8087 | CAGTTAAA GGCTAGCTACAACGA TACATGGA | 17780 |
| 5979 | GUAAUUUA A CUGUAGAA | 8088 | TTCTACAG GGCTAGCTACAACGA TAAATTAC | 17781 |
| 5982 | AUUUAACU G UAGAACCU | 8089 | AGGTTCTA GGCTAGCTACAACGA AGTTAAAT | 17782 |
| 5987 | ACUGUAGA A CCUGAGCU | 8090 | AGCTCAGG GGCTAGCTACAACGA TCTACAGT | 17783 |
| 5993 | GAACCUGA G CUCUAAGU | 8091 | ACTTAGAG GGCTAGCTACAACGA TCAGGTTC | 17784 |
| 6000 | AGCUCUAA G UAACCGAA | 8092 | TTCGGTTA GGCTAGCTACAACGA TTAGAGCT | 17785 |
| 6003 | UCUAAGUA A CCGAAGAA | 8093 | TTCTTCGG GGCTAGCTACAACGA TACTTAGA | 17786 |
| 6011 | ACCGAAGA A UGUAUGCC | 8094 | GGCATACA GGCTAGCTACAACGA TCTTCGGT | 17787 |
| 6013 | CGAAGAAU G UAUGCCUC | 8095 | GAGGCATA GGCTAGCTACAACGA ATTCTTCG | 17788 |
| 6015 | AAGAAUGU A UGCCUCUG | 1006 | CAGAGGCA GGCTAGCTACAACGA ACATTCTT | 17789 |
| 6017 | GAAUGUAU G CCUCUGUU | 8096 | AACAGAGG GGCTAGCTACAACGA ATACATTC | 17790 |
| 6023 | AUGCCUCU G UUCUUAUG | 8097 | CATAAGAA GGCTAGCTACAACGA AGAGGCAT | 17791 |
| 6029 | CUGUUCUU A UGUGCCAC | 1011 | GTGGCACA GGCTAGCTACAACGA AAGAACAG | 17792 |
| 6031 | GUUCUUAU G UGCCACAU | 8098 | ATGTGGCA GGCTAGCTACAACGA ATAAGAAC | 17793 |
| 6033 | UCUUAUGU G CCACAUCC | 8099 | GGATGTGG GGCTAGCTACAACGA ACATAAGA | 17794 |
| 6036 | UAUGUGCC A CAUCCUUG | 5365 | CAAGGATG GGCTAGCTACAACGA GGCACATA | 17795 |
| 6038 | UGUGCCAC A UCCUUGUU | 5366 | AACAAGGA GGCTAGCTACAACGA GTGGCACA | 17796 |
| 6044 | ACAUCCUU G UUUAAAGG | 8100 | CCTTTAAA GGCTAGCTACAACGA AAGGATGT | 17797 |
| 6052 | GUUUAAAG G CUCUCUGU | 8101 | ACAGAGAG GGCTAGCTACAACGA CTTTAAAC | 17798 |
| 6059 | GGCUCUCU G UAUGAAGA | 8102 | TCTTCATA GGCTAGCTACAACGA AGAGAGCC | 17799 |
| 6061 | CUCUCUGU A UGAAGAGA | 1019 | TCTCTTCA GGCTAGCTACAACGA ACAGAGAG | 17800 |
| 6069 | AUGAAGAG A UGGGACCG | 8103 | CGGTCCCA GGCTAGCTACAACGA CTCTTCAT | 17801 |
| 6074 | GAGAUGGG A CCGUCAUC | 8104 | GATGACGG GGCTAGCTACAACGA CCCATCTC | 17802 |
| 6077 | AUGGGACC G UCAUCAGC | 8105 | GCTGATGA GGCTAGCTACAACGA GGTCCCAT | 17803 |
| 6080 | GGACCGUC A UCAGCACA | 5373 | TGTGCTGA GGCTAGCTACAACGA GACGGTCC | 17804 |
| 6084 | CGUCAUCA G CACAUUCC | 8106 | GGAATGTG GGCTAGCTACAACGA TGATGACG | 17805 |
| 6086 | UCAUCAGC A CAUUCCCU | 5375 | AGGGAATG GGCTAGCTACAACGA GCTGATGA | 17806 |
| 6088 | AUCAGCAC A UUCCCUAG | 5376 | CTAGGGAA GGCTAGCTACAACGA GTGCTGAT | 17807 |
| 6096 | AUUCCCUA G UGAGCCUA | 8107 | TAGGCTCA GGCTAGCTACAACGA TAGGGAAT | 17808 |
| 6100 | CCUAGUGA G CCUACUGG | 8108 | CCAGTAGG GGCTAGCTACAACGA TCACTAGG | 17809 |
| 6104 | GUGAGCCU A CUGGCUCC | 1025 | GGAGCCAG GGCTAGCTACAACGA AGGCTCAC | 17810 |
| 6108 | GCCUACUG G CUCCUGGC | 8109 | GCCAGGAG GGCTAGCTACAACGA CAGTAGGC | 17811 |
| 6115 | GGCUCCUG G CAGCGGCU | 8110 | AGCCGCTG GGCTAGCTACAACGA CAGGAGCC | 17812 |
| 6118 | UCCUGGCA G CGGCUUUU | 8111 | AAAAGCCG GGCTAGCTACAACGA TGCCAGGA | 17813 |
| 6121 | UGGCAGCG G CUUUUGUG | 8112 | CACAAAAG GGCTAGCTACAACGA CGCTGCCA | 17814 |
| 6127 | CGGCUUUU G UGGAAGAC | 8113 | GTCTTCCA GGCTAGCTACAACGA AAAAGCCG | 17815 |
| 6134 | UGUGGAAG A CUCACUAG | 8114 | CTAGTGAG GGCTAGCTACAACGA CTTCCACA | 17816 |
| 6138 | GAAGACUC A CUAGCCAG | 5389 | CTGGCTAG GGCTAGCTACAACGA GAGTCTTC | 17817 |
| 6142 | ACUCACUA G CCAGAAGA | 8115 | TCTTCTGG GGCTAGCTACAACGA TAGTGAGT | 17818 |
| 6156 | AGAGAGGA G UGGGACAG | 8116 | CTGTCCCA GGCTAGCTACAACGA TCCTCTCT | 17819 |
| 6161 | GGAGUGGG A CAGUCCUC | 8117 | GAGGACTG GGCTAGCTACAACGA CCCACTCC | 17820 |
| 6164 | GUGGGACA G UCCUCUCC | 8118 | GGAGAGGA GGCTAGCTACAACGA TGTCCCAC | 17821 |
| 6173 | UCCUCUCC A CCAAGAUC | 5398 | GATCTTGG GGCTAGCTACAACGA GGAGAGGA | 17822 |
| 6179 | CCACCAAG A UCUAAAUC | 8119 | GATTTAGA GGCTAGCTACAACGA CTTGGTGG | 17823 |
| 6185 | AGAUCUAA A UCCAAACA | 8120 | TGTTTGGA GGCTAGCTACAACGA TTAGATCT | 17824 |
| 6191 | AAAUCCAA A CAAAAGCA | 812 | UGCTTTTG GGCTAGCTACAACGA TTGGATTT | 17825 |
| 6197 | AAACAAAA G CAGGCUAG | 8122 | CTAGCCTG GGCTAGCTACAACGA TTTTGTTT | 17826 |
| 6201 | AAAAGCAG G CUAGAGCC | 8123 | GGCTCTAG GGCTAGCTACAACGA CTGCTTTT | 17827 |
| 6207 | AGGCUAGA G CCAGAAGA | 8124 | TCTTCTGG GGCTAGCTACAACGA TCTAGCCT | 17828 |
| 6220 | AAGAGAGG A CAAAUCUU | 8125 | AAGATTTG GGCTAGCTACAACGA CCTCTCTT | 17829 |
| 6224 | GAGGACAA A UCUUUGUU | 8126 | AACAAAGA GGCTAGCTACAACGA TTGTCCTC | 17830 |
| 6230 | AAAUCUUU G UUGUUCCU | 8127 | AGGAACAA GGCTAGCTACAACGA AAAGATTT | 17831 |
| 6233 | UCUUUGUU G UUCCUCUU | 8128 | AAGAGGAA GGCTAGCTACAACGA AACAAAGA | 17832 |
| 6246 | UCUUCUUU A CACAUACG | 1050 | CGTATGTG GGCTAGCTACAACGA AAAGAAGA | 17833 |
| 6248 | UUCUUUAC A CAUACGCA | 5415 | TGCGTATG GGCTAGCTACAACGA GTAAAGAA | 17834 |
| 6250 | CUUUACAC A UACGCAAA | 5416 | TTTGCGTA GGCTAGCTACAACGA GTGTAAAG | 17835 |
| 6252 | UUACACAU A CGCAAACC | 1051 | GGTTTGCG GGCTAGCTACAACGA ATGTGTAA | 17836 |
| 6254 | ACACAUAC G CAAACCAC | 8129 | GTGGTTTG GGCTAGCTACAACGA GTATGTGT | 17837 |
| 6258 | AUACGCAA A CCACCUGU | 8130 | ACAGGTGG GGCTAGCTACAACGA TTGCGTAT | 17838 |
| 6262 | CGCAAACC A CCUGUGAC | 5419 | GTCACAGG GGCTAGCTACAACGA GGTTTGCG | 17839 |
| 6265 | AACCACCU G UGACAGCU | 8131 | AGCTGTCA GGCTAGCTACAACGA AGGTGGTT | 17840 |
| 6268 | CACCUGUG A CACCUGGG | 8132 | GCCAGCTG GGCTAGCTACAACGA CACAGGTG | 17841 |
| 6271 | CUGUGACA G CUGGCAAU | 8133 | ATTGCCAG GGCTAGCTACAACGA TGTCACAG | 17842 |
| 6275 | GACACCUG G CAAUUUUA | 8134 | TAAAATTG GGCTAGCTACAACGA CAGCTGTC | 17843 |
| 6278 | AGCUGGCA A UUUUAUAA | 8135 | TTATAAAA GGCTAGCTACAACGA TGCCAGCT | 17844 |
| 6283 | GCAAUUUU A UAAAUCAG | 1055 | CTGATTTA GGCTAGCTACAACGA AAAATTGC | 17845 |
| 6287 | UUUUAUAA A UCAGGUAA | 8136 | TTACCTGA GGCTAGCTACAACGA TTATAAAA | 17846 |
| 6292 | UAAAUCAG G UAACUGGA | 8137 | TCCAGTTA GGCTAGCTACAACGA CTGATTTA | 17847 |
| 6295 | AUCAGGUA A CUGGAAGG | 8138 | CCTTCCAG GGCTAGCTACAACGA TACCTGAT | 17848 |
| 6306 | GGAAGGAG G UUAAACUC | 8139 | GAGTTTAA GGCTAGCTACAACGA CTCCTTCC | 17849 |
| 6311 | GAGGUUAA A CUCAGAAA | 8140 | TTTCTGAG GGCTAGCTACAACGA TTAACCTC | 17850 |
| 6327 | AAAAGAAG A CCUCAGUC | 8141 | GACTGAGG GGCTAGCTACAACGA CTTCTTTT | 17851 |
| 6333 | AGACCUCA G UCAAUUCU | 8142 | AGAATTGA GGCTAGCTACAACGA TGAGGTCT | 17852 |
| 6337 | CUCAGUCA A UUCUCUAC | 8143 | GTAGAGAA GGCTAGCTACAACGA TGACTGAG | 17853 |
| 6344 | AAUUCUCU A CUUUUUUU | 1067 | AAAAAAAG GGCTAGCTACAACGA AGAGAATT | 17854 |
| 6366 | UUUUCCAA A UCAGAUAA | 8144 | TTATCTGA GGCTAGCTACAACGA TTGGAAAA | 17855 |
| 6371 | CAAAUCAG A UAAUAGCC | 8145 | GGCTATTA GGCTAGCTACAACGA CTGATTTG | 17856 |
| 6374 | AUCAGAUA A UAGCCCAG | 8146 | CTGGGCTA GGCTAGCTACAACGA TATCTGAT | 17857 |
| 6377 | AGAUAAUA G CCCAGCAA | 8147 | TTGCTGGG GGCTAGCTACAACGA TATTATCT | 17858 |
| 6382 | AUAGCCCA G CAAAUAGU | 8148 | ACTATTTG GGCTAGCTACAACGA TGGGCTAT | 17859 |
| 6386 | CCCAGCAA A UAGUGAUA | 8149 | TATCACTA GGCTAGCTACAACGA TTGCTGGG | 17860 |
| 6389 | AGCAAAUA G UGAUAACA | 8150 | TGTTATCA GGCTAGCTACAACGA TATTTGCT | 17861 |
| 6392 | AAAUAGUG A UAACAAAU | 8151 | ATTTGTTA GGCTAGCTACAACGA CACTATTT | 17862 |
| 6395 | UAGUGAUA A CAAAUAAA | 8152 | TTTATTTG GGCTAGCTACAACGA TATCACTA | 17863 |
| 6399 | GAUAACAA A UAAAACCU | 8153 | AGGTTTTA GGCTAGCTACAACGA TTGTTATC | 17864 |
| 6404 | CAAAUAAA A CCUUAGCU | 8154 | AGCTAAGG GGCTAGCTACAACGA TTTATTTG | 17865 |
| 6410 | AAACCUUA G CUGUUCAU | 8155 | ATGAACAG GGCTAGCTACAACGA TAAGGTTT | 17866 |
| 6413 | CCUUAGCU G UUCAUGUC | 8156 | GACATGAA GGCTAGCTACAACGA AGCTAAGG | 17867 |
| 6417 | AGCUGUUC A UGUCUUGA | 5447 | TCAAGACA GGCTAGCTACAACGA GAACAGCT | 17868 |
| 6419 | CUGUUCAU G UCUUGAUU | 8157 | AATCAAGA GGCTAGCTACAACGA ATGAACAG | 17869 |
| 6425 | AUGUCUUG A UUUCAAUA | 8158 | TATTGAAA GGCTAGCTACAACGA CAAGACAT | 17870 |
| 6431 | UGAUUUCA A UAAUUAAU | 8159 | ATTAATTA GGCTAGCTACAACGA TGAAATCA | 17871 |
| 6434 | UUUCAAUA A UUAAUUCU | 8160 | AGAATTAA GGCTAGCTACAACGA TATTGAAA | 17872 |
| 6438 | AAUAAUUA A UUCUUAAU | 8161 | ATTAAGAA GGCTAGCTACAACGA TAATTATT | 17873 |
| 6445 | AAUUCUUA A UCAUUAAG | 8162 | CTTAATGA GGCTAGCTACAACGA TAAGAATT | 17874 |
| 6448 | UCUUAAUC A UUAAGAGA | 545 | UCTCTTAA GGCTAGCTACAACGA GATTAAGA | 17875 |
| 6456 | AUUAAGAG A CCAUAAUA | 8163 | TATTATGG GGCTAGCTACAACGA CTCTTAAT | 17876 |
| 6459 | AAGAGACC A UAAUAAAU | 5453 | ATTTATTA GGCTAGCTACAACGA GGTCTCTT | 17877 |
| 6462 | AGACCAUA A UAAAUACU | 8164 | AGTATTTA GGCTAGCTACAACGA TATGGTCT | 17878 |
| 6466 | CAUAAUAA A UACUCCUU | 8165 | AAGGAGTA GGCTAGCTACAACGA TTATTATG | 17879 |
| 6468 | UAAUAAAU A CUCCUUUU | 1111 | AAAAGGAG GGCTAGCTACAACGA ATTTATTA | 17880 |
| 6487 | AGAGAAAA G CAAAACCA | 8166 | TGGTTTTG GGCTAGCTACAACGA TTTTCTCT | 17881 |
| 6492 | AAAGCAAA A CCAUUAGA | 8167 | TCTAATGG GGCTAGCTACAACGA TTTGCTTT | 17882 |
| 6495 | GCAAAACC A UUAGAAUU | 5460 | AATTCTAA GGCTAGCTACAACGA GGTTTTGC | 17883 |
| 6501 | CCAUUAGA A UUGUUACU | 8168 | AGTAACAA GGCTAGCTACAACGA TCTAATGG | 17884 |
| 6504 | UUAGAAUU G UUACUCAG | 8169 | CTGAGTAA GGCTAGCTACAACGA AATTCTAA | 17885 |
| 6507 | GAAUUGUU A CUCAGCUC | 1121 | GAGCTGAG GGCTAGCTACAACGA AACAATTC | 17886 |
| 6512 | GUUACUCA G CUCCUUCA | 8170 | TGAAGGAG GGCTAGCTACAACGA TGAGTAAC | 17887 |
| 6522 | UCCUUCAA A CUCAGGUU | 8171 | AACCTGAG GGCTAGCTACAACGA TTGAAGGA | 17888 |
| 6528 | AAACUCAG G UUUGUAGC | 8172 | GCTACAAA GGCTAGCTACAACGA CTGAGTTT | 17889 |
| 6532 | UCAGGUUU G UAGCAUAC | 8173 | GTATGCTA GGCTAGCTACAACGA AAACCTGA | 17890 |
| 6535 | GGUUUGUA G CAUACAUG | 8174 | CATGTATG GGCTAGCTACAACGA TACAAACC | 17891 |
| 6537 | UUUGUAGC A UACAUGAG | 5469 | CTCATGTA GGCTAGCTACAACGA GCTACAAA | 17892 |
| 6539 | UGUAGCAU A CAUGAGUC | 1130 | GACTCATG GGCTAGCTACAACGA ATGCTACA | 17893 |
| 6541 | UAGCAUAC A UGAGUCCA | 5470 | TGGACTCA GGCTAGCTACAACGA GTATGCTA | 17894 |
| 6545 | AUACAUGA G UCCAUCCA | 8175 | TGGATGGA GGCTAGCTACAACGA TCATGTAT | 17895 |
| 6549 | AUGAGUCC A UCCAUCAG | 5472 | CTGATGGA GGCTAGCTACAACGA GGACTCAT | 17896 |
| 6553 | GUCCAUCC A UCAGUCAA | 5474 | TTGACTGA GGCTAGCTACAACGA GGATGGAC | 17897 |
| 6557 | AUCCAUCA G UCAAAGAA | 8176 | TTCTTTGA GGCTAGCTACAACGA TGATGGAT | 17898 |
| 6565 | GUCAAAGA A UGGUUCCA | 8177 | TGGAACCA GGCTAGCTACAACGA TCTTTGAC | 17899 |
| 6568 | AAAGAAUG G UUCCAUCU | 8178 | AGATGGAA GGCTAGCTACAACGA CATTCTTT | 17900 |
| 6573 | AUGGUUCC A UCUGGAGU | 5478 | ACTCCAGA GGCTAGCTACAACGA GGAACCAT | 17901 |
| 6580 | CAUCUGGA G UCUUAAUG | 8179 | CATTAAGA GGCTAGCTACAACGA TCCAGATG | 17902 |
| 6586 | GAGUCUUA A UGUAGAAA | 8180 | TTTCTACA GGCTAGCTACAACGA TAAGACTC | 17903 |
| 6588 | GUCUUAAU G UAGAAAGA | 818 | UCTTTCTA GGCTAGCTACAACGA ATTAAGAC | 17904 |
| 6600 | AAAGAAAA A UGGAGACU | 8182 | AGTCTCCA GGCTAGCTACAACGA TTTTCTTT | 17905 |
| 6606 | AAAUGGAG A CUUGUAAU | 8183 | ATTACAAG GGCTAGCTACAACGA CTCCATTT | 17906 |
| 6610 | GGAGACUU G UAAUAAUG | 8184 | CATTATTA GGCTAGCTACAACGA AAGTCTCC | 17907 |
| 6613 | GACUUGUA A UAAUGAGC | 8185 | GCTCATTA GGCTAGCTACAACGA TACAAGTC | 17908 |
| 6616 | UUGUAAUA A UGAGCUAG | 8186 | CTAGCTCA GGCTAGCTACAACGA TATTACAA | 17909 |
| 6620 | AAUAAUGA G CUAGUUAC | 8187 | GTAACTAG GGCTAGCTACAACGA TCATTATT | 17910 |
| 6624 | AUGAGCUA G UUACAAAG | 8188 | CTTTGTAA GGCTAGCTACAACGA TAGCTCAT | 17911 |
| 6627 | AGCUAGUU A CAAAGUGC | 1147 | GCACTTTG GGCTAGCTACAACGA AACTAGCT | 17912 |
| 6632 | GUUACAAA G UGCUUGUU | 8189 | AACAAGCA GGCTAGCTACAACGA TTTGTAAC | 17913 |
| 6634 | UACAAAGU G CUUGUUCA | 8190 | TGAACAAG GGCTAGCTACAACGA ACTTTGTA | 17914 |
| 6638 | AAGUGCUU G UUCAUUAA | 819 | UTAATGAA GGCTAGCTACAACGA AAGCACTT | 17915 |
| 6642 | GCUUGUUC A UUAAAAUA | 5485 | TATTTTAA GGCTAGCTACAACGA GAACAAGC | 17916 |
| 6648 | UCAUUAAA A UAGCACUG | 8192 | CAGTGCTA GGCTAGCTACAACGA TTTAATGA | 17917 |
| 6651 | UUAAAAUA G CACUGAAA | 8193 | TTTCAGTG GGCTAGCTACAACGA TATTTTAA | 17918 |
| 6653 | AAAAUAGC A CUGAAAAU | 5486 | ATTTTCAG GGCTAGCTACAACGA GCTATTTT | 17919 |
| 6660 | CACUGAAA A UUGAAACA | 8194 | TGTTTCAA GGCTAGCTACAACGA TTTCAGTG | 17920 |
| 6666 | AAAUUGAA A CAUGAAUU | 8195 | AATTCATG GGCTAGCTACAACGA TTCAATTT | 17921 |
| 6668 | AUUGAAAC A UGAAUUAA | 5488 | TTAATTCA GGCTAGCTACAACGA GTTTCAAT | 17922 |
| 6672 | AAACAUGA A UUAACUGA | 8196 | TCAGTTAA GGCTAGCTACAACGA TCATGTTT | 17923 |
| 6676 | AUGAAUUA A CUGAUAAU | 8197 | ATTATCAG GGCTAGCTACAACGA TAATTCAT | 17924 |
| 6680 | AUUAACUG A UAAUAUUC | 8198 | GAATATTA GGCTAGCTACAACGA CAGTTAAT | 17925 |
| 6683 | AACUGAUA A UAUUCCAA | 8199 | TTGGAATA GGCTAGCTACAACGA TATCAGTT | 17926 |
| 6685 | CUGAUAAU A UUCCAAUC | 1158 | GATTGGAA GGCTAGCTACAACGA ATTATCAG | 17927 |
| 6691 | AUAUUCCA A UCAUUUGC | 8200 | GCAAATGA GGCTAGCTACAACGA TGGAATAT | 17928 |
| 6694 | UUCCAAUC A UUUGCCAU | 5492 | ATGGCAAA GGCTAGCTACAACGA GATTGGAA | 17929 |
| 6698 | AAUCAUUU G CCAUUUAU | 8201 | ATAAATGG GGCTAGCTACAACGA AAATGATT | 17930 |
| 6701 | CAUUUGCC A UUUAUGAC | 5494 | GTCATAAA GGCTAGCTACAACGA GGCAAATG | 17931 |
| 6705 | UGCCAUUU A UGACAAAA | 1166 | TTTTGTCA GGCTAGCTACAACGA AAATGGCA | 17932 |
| 6708 | CAUUUAUG A CAAAAAUG | 8202 | CATTTTTG GGCTAGCTACAACGA CATAAATG | 17933 |
| 6714 | UGACAAAA A UGGUUGGC | 8203 | GCCAACCA GGCTAGCTACAACGA TTTTGTCA | 17934 |
| 6717 | CAAAAUUG G UUGGCACU | 8204 | AGTGCCAA GGCTAGCTACAACGA CATTTTTG | 17935 |
| 6721 | AAUGGUUG G CACUAACA | 8205 | TGTTAGTG GGCTAGCTACAACGA CAACCATT | 17936 |
| 6723 | UGGUUGGC A CUAACAAA | 5496 | TTTGTTAG GGCTAGCTACAACGA GCCAACCA | 17937 |
| 6727 | UGGCACUA A CAAAGAAC | 8206 | GTTCTTTG GGCTAGCTACAACGA TAGTGCCA | 17938 |
| 6734 | AACAAAGA A CGAGCACU | 8207 | AGTGCTCG GGCTAGCTACAACGA TCTTTGTT | 17939 |
| 6738 | AAGAACGA G CACUUCCU | 8208 | AGGAAGTG GGCTAGCTACAACGA TCGTTCTT | 17940 |
| 6740 | GAACGAGC A CUUCCUUU | 5499 | AAAGGAAG GGCTAGCTACAACGA GCTCGTTC | 17941 |
| 6753 | CUUUCAGA G UUUCUGAG | 8209 | CTCAGAAA GGCTAGCTACAACGA TCTGAAAG | 17942 |
| 6762 | UUUCUGAG A UAAUGUAC | 8210 | GTACATTA GGCTAGCTACAACGA CTCAGAAA | 17943 |
| 6765 | CUGAGAUA A UGUACGUG | 8211 | CACGTACA GGCTAGCTACAACGA TATCTCAG | 17944 |
| 6767 | GAGAUAAU G UACGUGGA | 8212 | TCCACGTA GGCTAGCTACAACGA ATTATCTC | 17945 |
| 6769 | GAUAAUGU A CGUGGAAC | 1178 | GTTCCACG GGCTAGCTACAACGA ACATTATC | 17946 |
| 6771 | UAAUGUAC G UGGAACAG | 8213 | CTGTTCCA GGCTAGCTACAACGA GTACATTA | 17947 |
| 6776 | UACGUGGA A CAGUCUGG | 8214 | CCAGACTG GGCTAGCTACAACGA TCCACGTA | 17948 |
| 6779 | GUGGAACA G UCUGGGUG | 8215 | CACCCAGA GGCTAGCTACAACGA TGTTCCAC | 17949 |
| 6785 | CAGUCUGG G UGGAAUGG | 8216 | CCATTCCA GGCTAGCTACAACGA CCAGACTG | 17950 |
| 6790 | UGGGUGGA A UGGGGCUG | 8217 | CAGCCCCA GGCTAGCTACAACGA TCCACCCA | 17951 |
| 6795 | GGAAUGGG G CUGAAACC | 8218 | GGTTTCAG GGCTAGCTACAACGA CCCATTCC | 17952 |
| 6801 | GGGCUGAA A CCAUGUGC | 8219 | GCACATGG GGCTAGCTACAACGA TTCAGCCC | 17953 |
| 6804 | CUGAAACC A UGUGCAAG | 5509 | CTTGCACA GGCTAGCTACAACGA GGTTTCAG | 17954 |
| 6806 | GAAACCAU G UGCAAGUC | 8220 | GACTTGCA GGCTAGCTACAACGA ATGGTTTC | 17955 |
| 6808 | AACCAUGU G CAAGUCUG | 8221 | CAGACTTG GGCTAGCTACAACGA ACATGGTT | 17956 |
| 6812 | AUGUGCAA G UCUGUGUC | 8222 | GACACAGA GGCTAGCTACAACGA TTGCACAT | 17957 |
| 6816 | GCAAGUCU G UGUCUUGU | 8223 | ACAAGACA GGCTAGCTACAACGA AGACTTGC | 17958 |
| 6818 | AAGUCUGU G UCUUGUCA | 8224 | TGACAAGA GGCTAGCTACAACGA ACAGACTT | 17959 |
| 6823 | UGUGUCUU G UCAGUCCA | 8225 | TGGACTGA GGCTAGCTACAACGA AAGACACA | 17960 |
| 6827 | UCUUGUCA G UCCAAGAA | 8226 | TTCTTGGA GGCTAGCTACAACGA TGACAAGA | 17961 |
| 6836 | UCCAAGAA C UGACACCG | 8227 | CGGTGTCA GGCTAGCTACAACGA TTCTTGGA | 17962 |
| 6839 | AAGAAGUG A CACCGAGA | 8228 | TCTCGGTG GGCTAGCTACAACGA CACTTCTT | 17963 |
| 6841 | GAAGUGAC A CCGAGAUG | 5516 | CATCTCGG GGCTAGCTACAACGA GTCACTTC | 17964 |
| 6847 | ACACCGAG A UGUUAAUU | 8229 | AATTAACA GGCTAGCTACAACGA CTCGGTGT | 17965 |
| 6849 | ACCGAGAU C UUAAUUUU | 8230 | AAAATTAA GGCTAGCTACAACGA ATCTCGGT | 17966 |
| 6853 | AGAUGUUA A UUUUAGGG | 8231 | CCCTAAAA GGCTAGCTACAACGA TAACATCT | 17967 |
| 6862 | UUUUAGGG A CCCGUGCC | 8232 | GGCACGGG GGCTAGCTACAACGA CCCTAAAA | 17968 |
| 6866 | AGGGACCC G UGCCUUGU | 8233 | ACAAGGCA GGCTAGCTACAACGA GGGTCCCT | 17969 |
| 6868 | GGACCCGU C CCUUGUUU | 8234 | AAACAAGG GGCTAGCTACAACGA ACGGGTCC | 17970 |
| 6873 | CGUGCCUU G UUUCCUAG | 8235 | CTAGGAAA GGCTAGCTACAACGA AAGGCACG | 17971 |
| 6881 | GUUUCCUA G CCCACAAG | 8236 | CTTGTGGG GGCTAGCTACAACGA TAGGAAAC | 17972 |
| 6885 | CCUAGCCC A CAAGAAUG | 5526 | CATTCTTG GGCTAGCTACAACGA GCGCTAGG | 17973 |
| 6891 | CCACAAGA A UGCAAACA | 8237 | TGTTTGCA GGCTAGCTACAACGA TCTTGTGG | 17974 |
| 6893 | ACAAGAAU G CAAACAUC | 8238 | GATGTTTG GGCTAGCTACAACGA ATTCTTGT | 17975 |
| 6897 | GAAUGCAA A CAUCAAAC | 8239 | GTTTGATG GGCTAGCTACAACGA TTGCATTC | 17976 |
| 6899 | AUGCAAAC A UCAAACAG | 5529 | CTCTTTGA GGCTAGCTACAACGA GTTTGCAT | 17977 |
| 6904 | AACAUCAA A CAGAUACU | 8240 | AGTATCTG GGCTAGCTACAACGA TTGATGTT | 17978 |
| 6908 | UCAAACAG A UACUCGCU | 8241 | AGCGAGTA GGCTAGCTACAACGA CTGTTTGA | 17979 |
| 6910 | AAACAGAU A CUCGCUAG | 1197 | CTAGCGAG GGCTAGCTACAACGA ATCTGTTT | 17980 |
| 6914 | AGAUACUC G CUAGCCUC | 8242 | GAGGCTAG GGCTAGCTACAACGA GAGTATCT | 17981 |
| 6918 | ACUCGCUA G CCUCAUUU | 8243 | AAATGAGG GGCTAGCTACAACGA TAGCGAGT | 17982 |
| 6923 | CUAGCCUC A UUUAAAUU | 5536 | AATTTAAA GGCTAGCTACAACGA GAGGCTAG | 17983 |
| 6929 | UCAUUUAA A UUGAUUAA | 8244 | TTAATCAA GGCTAGCTACAACGA TTAAATGA | 17984 |
| 6933 | UUAAAUUG A UUAAAGGA | 8245 | TCCTTTAA GGCTAGCTACAACGA CAATTTAA | 17985 |
| 6945 | AAGGAGGA G UGCAUCUU | 8246 | AAGATGCA GGCTAGCTACAACGA TCCTCCTT | 17986 |
| 6947 | GGAGGAGU G CAUCUUUG | 8247 | CAAAGATG GGCTAGCTACAACGA ACTCCTCC | 17987 |
| 6949 | AGGAGUGC A UCUUUGGC | 5537 | GCCAAAGA GGCTAGCTACAACGA GCACTCCT | 17988 |
| 6956 | CAUCUUUG G CCGACAGU | 8248 | ACTGTCGG GGCTAGCTACAACGA CAAAGATG | 17989 |
| 6960 | UUUGGCCG A CAGUGGUG | 8249 | CACCACTG GGCTAGCTACAACGA CGGCCAAA | 17990 |
| 6963 | GGCCGACA G UGGUGUAA | 8250 | TTACACCA GGCTAGCTACAACGA TGTCGGCC | 17991 |
| 6966 | CGACAGUG G UGUAACUG | 8251 | CAGTTACA GGCTAGCTACAACGA CACTGTCG | 17992 |
| 6968 | ACAGUGGU C UAACUGUG | 8252 | CACAGTTA GGCTAGCTACAACGA ACCACTGT | 17993 |
| 6971 | GUGGUGUA A CUGUGUGU | 8253 | ACACACAG GGCTAGCTACAACGA TACACCAC | 17994 |
| 6974 | GUGUAACU G UGUGUGUG | 8254 | CACACACA GGCTAGCTACAACGA AGTTACAC | 17995 |
| 6976 | GUAACUGU G UGUGUGUG | 8255 | CACACACA GGCTAGCTACAACGA ACAGTTAC | 17996 |
| 6978 | AACUGUGU G UGUGUGUG | 8256 | CACACACA GGCTAGCTACAACGA ACACAGTT | 17997 |
| 6980 | CUGUGUGU G UGUGUGUG | 8257 | CACACACA GGCTAGCTACAACGA ACACACAG | 17998 |
| 6982 | GUGUGUGU G UGUGUGUG | 8258 | CACACACA GGCTAGCTACAACGA ACACACAC | 17999 |
| 6984 | GUGUGUGU G UGUGUGUG | 8258 | CACACACA GGCTAGCTACAACGA ACACACAC | 17999 |
| 6986 | GUGUGUGU G UGUGUGUG | 8258 | CACACACA GGCTAGCTACAACGA ACACACAC | 17999 |
| 6988 | GUGUGUGU G UGUGUGUG | 8258 | CACACACA GGCTAGCTACAACGA ACACACAC | 17999 |
| 6990 | GUGUGUGU G UGUGUGUG | 8258 | CACACACA GGCTAGCTACAACGA ACACACAC | 17999 |
| 6992 | GUGUGUGU G UGUGUGUG | 8258 | CACACACA GGCTAGCTACAACGA ACACACAC | 17999 |
| 6994 | GUGUGUGU G UGUGUGUG | 8258 | CACACACA GGCTAGCTACAACGA ACACACAC | 17999 |
| 6996 | GUGUGUGU G UGUGUGUG | 8258 | CACACACA GGCTAGCTACAACGA ACACACAC | 17999 |
| 6998 | GUGUGUGU G UGUGUGUG | 8258 | CACACACA GGCTAGCTACAACGA ACACACAC | 17999 |
| 7000 | GUGUGUGU C UGUGUGUG | 8258 | CACACACA GGCTAGCTACAACGA ACACACAC | 17999 |
| 7002 | GUGUGUGU G UGUGUGUG | 8258 | CACACACA GGCTAGCTACAACGA ACACACAC | 17999 |
| 7004 | GUGUGUGU G UGUGUGUG | 8258 | CACACACA GGCTAGCTACAACGA ACACACAC | 17999 |
| 7006 | GUGUGUGU G UGUGUGUG | 8258 | CACACACA GGCTAGCTACAACGA ACACACAC | 17999 |
| 7008 | GUGUGUGU C UGUGUGGG | 8259 | CCCACACA GGCTAGCTACAACGA ACACACAC | 18000 |
| 7010 | GUGUGUGU G UGUGGGUG | 8260 | CACCCACA GGCTAGCTACAACGA ACACACAC | 18001 |
| 7012 | GUGUGUGU G UGGGUGUG | 8261 | CACACCCA GGCTAGCTACAACGA ACACACAC | 18002 |
| 7016 | GUGUGUGG C UGUGGGUG | 8262 | CACCCACA GGCTAGCTACAACGA CCACACAC | 18003 |
| 7018 | GUGUGGGU G UGGGUGUA | 8263 | TACACCCA GGCTAGCTACAACGA ACCCACAC | 18004 |
| 7022 | GGGUGUGG C UGUAUGUG | 8264 | CACATACA GGCTAGCTACAACGA CCACACCC | 18005 |
| 7024 | GUGUGGGU G UAUGUGUG | 8265 | CACACATA GGCTAGCTACAACGA ACCCACAC | 18006 |
| 7026 | GUGGGUGU A UGUGUGUU | 1211 | AACACACA GGCTAGCTACAACGA ACACCCAC | 18007 |
| 7028 | GGGUGUAU C UGUGUUUU | 8266 | AAAACACA GGCTAGCTACAACGA ATACACCC | 18008 |
| 7030 | GUGUAUGU C UGUUUUGU | 8267 | ACAAAACA GGCTAGCTACAACGA ACATACAC | 18009 |
| 7032 | GUAUGUGU G UUUUGUGC | 8268 | GCACAAAA GGCTAGCTACAACGA ACACATAC | 18010 |
| 7037 | UGUGUUUU C UGCAUAAC | 8269 | GTTATGCA GGCTAGCTACAACGA AAAACACA | 18011 |
| 7039 | UGUUUUGU C CAUAACUA | 8270 | TAGTTATG GGCTAGCTACAACGA ACAAAACA | 18012 |
| 7041 | UUUUGUGC A UAACUAUU | 5542 | AATAGTTA GGCTAGCTACAACGA GCACAAAA | 18013 |
| 7044 | UGUGCAUA A CUAUUUAA | 827 | UTAAATAG GGCTAGCTACAACGA TATGCACA | 18014 |
| 7047 | GCAUAACU A UUUAAGGA | 1216 | TCCTTAAA GGCTAGCTACAACGA AGTTATGC | 18015 |
| 7057 | UUAAGGAA A CUGGAAUU | 8272 | AATTCCAG GGCTAGCTACAACGA TTCCTTAA | 18016 |
| 7063 | AAACUGGA A UUUUAAAG | 8273 | CTTTAAAA GGCTAGCTACAACGA TCCAGTTT | 18017 |
| 7071 | AUUUUAAA G UUACUUUU | 8274 | AAAAGTAA GGCTAGCTACAACGA TTTAAAAT | 18018 |
| 7074 | UUAAAGUU A CUUUUAUA | 1225 | TATAAAAG GGCTAGCTACAACGA AACTTTAA | 18019 |
| 7080 | UUACUUUU A UACAAACC | 1229 | GGTTTGTA GGCTAGCTACAACGA AAAAGTAA | 18020 |
| 7082 | ACUUUUAU A CAAACCAA | 1230 | TTGGTTTG GGCTAGCTACAACGA ATAAAAGT | 18021 |
| 7086 | UUAUACAA A CCAAGAAU | 8275 | ATTCTTGG GGCTAGCTACAACGA TTGTATAA | 18022 |
| 7093 | AACCAAGA A UAUAUGCU | 8276 | AGCATATA GGCTAGCTACAACGA TCTTGGTT | 18023 |
| 7095 | CCAAGAAU A UAUGCUAC | 1231 | GTAGCATA GGCTAGCTACAACGA ATTCTTGG | 18024 |
| 7097 | AAGAAUAU A UGCUACAG | 1232 | CTGTAGCA GGCTAGCTACAACGA ATATTCTT | 18025 |
| 7099 | GAAUAUAU G CUACAGAU | 8277 | ATCTGTAG GGCTAGCTACAACGA ATATATTC | 18026 |
| 7102 | UAUAUGCU A CAGAUAUA | 1233 | TATATCTG GGCTAGCTACAACGA AGCATATA | 18027 |
| 7106 | UGCUACAG A UAUAAGAC | 8278 | GTCTTATA GGCTAGCTACAACGA CTGTAGCA | 18028 |
| 7108 | CUACAGAD A UAAGACAG | 1234 | CTGTCTTA GGCTAGCTACAACGA ATCTGTAG | 18029 |
| 7113 | GAUAUAAG A CAGACAUG | 8279 | CATGTCTG GGCTAGCTACAACGA CTTATATC | 18030 |
| 7117 | UAAGACAG A CAUGGUUU | 8280 | AAACCATG GGCTAGCTACAACGA CTGTCTTA | 18031 |
| 7119 | AGACAGAC A UGGUUUGG | 5552 | CCAAACCA GGCTAGCTACAACGA GTCTGTCT | 18032 |
| 7122 | CAGACAUG G UUUGGUCC | 8281 | GGACCAAA GGCTAGCTACAACGA CATGTCTG | 18033 |
| 7127 | AUGGUUUG G UCCUAUAU | 8282 | ATATAGGA GGCTAGCTACAACGA CAAACCAT | 18034 |
| 7132 | UUGGUCCU A UAUUUCUA | 1239 | TAGAAATA GGCTAGCTACAACGA AGGACCAA | 18035 |
| 7134 | GGUCCUAU A UUUCUAGU | 1240 | ACTAGAAA GGCTAGCTACAACGA ATAGGACC | 18036 |
| 7141 | UAUUUCUA G UCAUGAUG | 8283 | CATCATGA GGCTAGCTACAACGA TAGAAATA | 18037 |
| 7144 | UUCUAGUC A UGAUGAAU | 5556 | ATTCATCA GGCTAGCTACAACGA GACTAGAA | 18038 |
| 7147 | UAGUCAUG A UGAAUGUA | 8284 | TACATTCA GGCTAGCTACAACGA CATGACTA | 18039 |
| 7151 | CAUGAUGA A UGUAUUUU | 8285 | AAAATACA GGCTAGCTACAACGA TCATCATG | 18040 |
| 7153 | UGAUGAAU G UAUUUUGU | 8286 | ACAAAATA GGCTAGCTACAACGA ATTCATCA | 18041 |
| 7155 | AUGAAUGU A UUUUGUAU | 1246 | ATACAAAA GGCTAGCTACAACGA ACATTCAT | 18042 |
| 7160 | UGUAUUUU G UAUACCAU | 8287 | ATGGTATA GGCTAGCTACAACGA AAAATACA | 18043 |
| 7162 | UAUUUUGU A UACCAUCU | 1250 | AGATGGTA GGCTAGCTACAACGA ACAAAATA | 18044 |
| 7164 | UUUUGUAU A CCAUCUUC | 1251 | GAAGATGG GGCTAGCTACAACGA ATACAAAA | 18045 |
| 7167 | UGUAUACC A UCUUCAUA | 5558 | TATGAAGA GGCTAGCTACAACGA GGTATACA | 18046 |
| 7173 | CCAUCUUC A UAUAAUAU | 5560 | ATATTATA GGCTAGCTACAACGA GAAGATGG | 18047 |
| 7175 | AUCUUCAU A UAAUAUAC | 1255 | GTATATTA GGCTAGCTACAACGA ATGAAGAT | 18048 |
| 7178 | UUCAUAUA A UAUACUUA | 8288 | TAAGTATA GGCTAGCTACAACGA TATATGAA | 18049 |
| 7180 | CAUAUAAU A UACUUAAA | 1257 | TTTAAGTA GGCTAGCTACAACGA ATTATATG | 18050 |
| 7182 | UAUAAUAU A CUUAAAAA | 1258 | TTTTTAAG GGCTAGCTACAACGA ATATTATA | 18051 |
| 7190 | ACUUAAAA A UAUUUCUU | 8289 | AAGAAATA GGCTAGCTACAACGA TTTTAAGT | 18052 |
| 7192 | UUAAAAAU A UUUCUUAA | 126 | UTAAGAAA GGCTAGCTACAACGA ATTTTTAA | 18053 |
| 7200 | AUUUCUUA A UUGGGAUU | 8290 | AATCCCAA GGCTAGCTACAACGA TAAGAAAT | 18054 |
| 7206 | UAAUUGGG A UUUGUAAU | 8291 | ATTACAAA GGCTAGCTACAACGA CCCAATTA | 18055 |
| 7210 | UGGGAUUU G UAAUCGUA | 8292 | TAGGATTA GGCTAGCTACAACGA AAATCCCA | 18056 |
| 7213 | GAUUUGUA A UCGUACCA | 8293 | TGGTACGA GGCTAGCTACAACGA TACAAATC | 18057 |
| 7216 | UUGUAAUC G UACCAACU | 8294 | AGTTGGTA GGCTAGCTACAACGA GATTACAA | 18058 |
| 7218 | GUAAUCGU A CCAACUUA | 1272 | TAAGTTGG GGCTAGCTACAACGA ACGATTAC | 18059 |
| 7222 | UCGUACCA A CUUAAUUG | 8295 | CAATTAAG GGCTAGCTACAACGA TGGTACGA | 18060 |
| 7227 | CCAACUUA A UUGAUAUA | 8296 | TTTATCAA GGCTAGCTACAACGA TAAGTTGG | 18061 |
| 7231 | CUUAAUUG A UAAACUUG | 8297 | CAAGTTTA GGCTAGCTACAACGA CAATTAAG | 18062 |
| 7235 | AUUGAUAA A CUUGGCAA | 8298 | TTGCCAAG GGCTAGCTACAACGA TTATCAAT | 18063 |
| 7240 | UAAACUUG G CAACUGCU | 8299 | AGCAGTTG GGCTAGCTACAACGA CAAGTTTA | 18064 |
| 7243 | ACUUGGCA A CUGCUUUU | 8300 | AAAAGCAG GGCTAGCTACAACGA TGCCAAGT | 18065 |
| 7246 | UGGCAACU G CUUUUAUG | 8301 | CATAAAAG GGCTAGCTACAACGA AGTTGCCA | 18066 |
| 7252 | CUGCUUUU A UGUUCUGU | 1281 | ACAGAACA GGCTAGCTACAACGA AAAAGCAG | 18067 |
| 7254 | GCUUUUAU G UUCUGUCU | 8302 | AGACAGAA GGCTAGCTACAACGA ATAAAAGC | 18068 |
| 7259 | UAUGUUCU G UCUCCUUC | 8303 | GAAGGAGA GGCTAGCTACAACGA AGAACATA | 18069 |
| 7269 | CUCCUUCC A UAAAUUUU | 5575 | AAAATTTA GGCTAGCTACAACGA GGAAGGAG | 18070 |
| 7273 | UUCCAUAA A UUUUUCAA | 8304 | TTGAAAAA GGCTAGCTACAACGA TTATGGAA | 18071 |
| 7283 | UUUUCAAA A UACUAAUU | 8305 | AATTAGTA GGCTAGCTACAACGA TTTGAAAA | 18072 |
| 7285 | UUCAAAAU A CUAAUUCA | 1294 | TGAATTAG GGCTAGCTACAACGA ATTTTGAA | 18073 |
| 7289 | AAAUACUA A UUCAACAA | 8306 | TTGTTGAA GGCTAGCTACAACGA TAGTATTT | 18074 |
| 7294 | CUAAUUCA A CAAAGAAA | 8307 | TTTCTTTG GGCTAGCTACAACGA TGAATTAG | 18075 |
| 7305 | AAGAAAAA G CUCUUUUU | 8308 | AAAAAGAG GGCTAGCTACAACGA TTTTTCTT | 18076 |
| 7323 | UUCCUAAA A UAAACUCA | 8309 | TGAGTTTA GGCTAGCTACAACGA TTTAGGAA | 18077 |
| 7327 | UAAAAUAA A CUCAAAUU | 8310 | AATTTGAG GGCTAGCTACAACGA TTATTTTA | 18078 |
| 7333 | AAACUCAA A UUUAUCCU | 8311 | AGGATAAA GGCTAGCTACAACGA TTGAGTTT | 18079 |
| 7337 | UCAAAUUU A UCCUUGUU | 1312 | AACAAGGA GGCTAGCTACAACGA AAATTTGA | 18080 |
| 7343 | UUAUCCUU G UUUAGAGC | 8312 | GCTCTAAA GGCTAGCTACAACGA AAGGATAA | 18081 |
| 7350 | UGUUUAGA G CAGAGAAA | 8313 | TTTCTCTG GGCTAGCTACAACGA TCTAAACA | 18082 |
| 7360 | AGAGAAAA A UUAAGAAA | 8314 | TTTCTTAA GGCTAGCTACAACGA TTTTCTCT | 18083 |
| 7370 | UAAGAAAA A CUUUGAAA | 8315 | TTTCAAAG GGCTAGCTACAACGA TTTTCTTA | 18084 |
| 7378 | ACUUUGAA A UGGUCUCA | 8316 | TGAGACCA GGCTAGCTACAACGA TTCAAAGT | 18085 |
| 7381 | UUGAAAUG G UCUCAAAA | 8317 | TTTTGAGA GGCTAGCTACAACGA CATTTCAA | 18086 |
| 7391 | CUCAAAAA A UUGCUAAA | 8318 | TTTAGCAA GGCTAGCTACAACGA TTTTTGAG | 18087 |
| 7394 | AAAAAAUU G CUAAAUAU | 8319 | ATATTTAG GGCTAGCTACAACGA AATTTTTT | 18088 |
| 7399 | AUUGCUAA A UAUUUUCA | 8320 | TGAAAATA GGCTAGCTACAACGA TTAGCAAT | 18089 |
| 7401 | UGCUAAAU A UUUUCAAU | 1326 | ATTGAAAA GGCTAGCTACAACGA ATTTAGCA | 18090 |
| 7408 | UAUUUUCA A UGGAAAAC | 8321 | GTTTTCCA GGCTAGCTACAACGA TGAAAATA | 18091 |
| 7415 | AAUGGAAA A CUAAAUGU | 8322 | ACATTTAG GGCTAGCTACAACGA TTTCCATT | 18092 |
| 7420 | AAAACUAA A UGUUAGUU | 8323 | AACTAACA GGCTAGCTACAACGA TTAGTTTT | 18093 |
| 7422 | AACUAAAU G UUAGUUUA | 8324 | TAAACTAA GGCTAGCTACAACGA ATTTAGTT | 18094 |
| 7426 | AAAUGUUA G UUUAGCUG | 8325 | CAGCTAAA GGCTAGCTACAACGA TAACATTT | 18095 |
| 7431 | UUAGUUUA G CUGAUUGU | 8326 | ACAATCAG GGCTAGCTACAACGA TAAACTAA | 18096 |
| 7435 | UUUAGCUG A UUGUAUGG | 8327 | CCATACAA GGCTAGCTACAACGA CAGCTAAA | 18097 |
| 7438 | AGCUGAUU G UAUGGGGU | 8328 | ACCCCATA GGCTAGCTACAACGA AATCAGCT | 18098 |
| 7440 | CUGAUUGU A UGGGGUUU | 1338 | AAACCCCA GGCTAGCTACAACGA ACAATCAG | 18099 |
| 7445 | UGUAUGGG G UUUUCGAA | 8329 | TTCGAAAA GGCTAGCTACAACGA CCCATACA | 18100 |
| 7453 | GUUUUCGA A CCUUUCAC | 8330 | GTGAAAGG GGCTAGCTACAACGA TCGAAAAC | 18101 |
| 7460 | AACCUUUC A CUUUUUGU | 5598 | ACAAAAAG GGCTAGCTACAACGA GAAAGGTT | 18102 |
| 7467 | CACUUUUU G UUUGUUUU | 8331 | AAAACAAA GGCTAGCTACAACGA AAAAAGTG | 18103 |
| 7471 | UUUUGUUU G UUUUACCU | 8332 | AGGTAAAA GGCTAGCTACAACGA AAACAAAA | 18104 |
| 7476 | UUUGUUUU A CCUAUUUC | 1355 | GAAATAGG GGCTAGCTACAACGA AAAACAAA | 18105 |
| 7480 | UUUUACCU A UUUCACAA | 1356 | TTGTGAAA GGCTAGCTACAACGA AGGTAAAA | 18106 |
| 7485 | CCUAUUUC A CAACUGUG | 5602 | CACAGTTG GGCTAGCTACAACGA GAAATAGG | 18107 |
| 7488 | AUUUCACA A CUGUGUAA | 8333 | TTACACAG GGCTAGCTACAACGA TGTGAAAT | 18108 |
| 7491 | UCACAACU G UGUAAAUU | 8334 | AATTTACA GGCTAGCTACAACGA AGTTGTGA | 18109 |
| 7493 | ACAACUGU G UAAAUUGC | 8335 | GCAATTTA GGCTAGCTACAACGA ACAGTTGT | 18110 |
| 7497 | CUGUGUAA A UUGCCAAU | 8336 | ATTGGCAA GGCTAGCTACAACGA TTACACAG | 18111 |
| 7500 | UGUAAAUU G CCAAUAAU | 8337 | ATTATTGG GGCTAGCTACAACGA AATTTACA | 18112 |
| 7504 | AAUUGCCA A UAAUUCCU | 8338 | AGGAATTA GGCTAGCTACAACGA TGGCAATT | 18113 |
| 7507 | UGCCAAUA A UUCCUGUC | 8339 | GACAGGAA GGCTAGCTACAACGA TATTGGCA | 18114 |
| 7513 | UAAUUCCU G UCCAUGAA | 8340 | TTCATGGA GGCTAGCTACAACGA AGGAATTA | 18115 |
| 7517 | UCCUGUCC A UGAAAAUG | 5610 | CATTTTCA GGCTAGCTACAACGA GGACAGGA | 18116 |
| 7523 | CCAUGAAA A UGCAAAUU | 8341 | AATTTGCA GGCTAGCTACAACGA TTTCATGG | 18117 |
| 7525 | AUGAAAAU G CAAAUUAU | 8342 | ATAATTTG GGCTAGCTACAACGA ATTTTCAT | 18118 |
| 7529 | AAAUGCAA A UUAUCCAG | 8343 | CTGGATAA GGCTAGCTACAACGA TTGCATTT | 18119 |
| 7532 | UGCAAAUU A UCCAGUGU | 1367 | ACACTGGA GGCTAGCTACAACGA AATTTGCA | 18120 |
| 7537 | AUUAUCCA G UGUAGAUA | 8344 | TATCTACA GGCTAGCTACAACGA TGGATAAT | 18121 |
| 7539 | UAUCCAGU G UAGAUAUA | 8345 | TATATCTA GGCTAGCTACAACGA ACTGGATA | 18122 |
| 7543 | CAGUGUAG A UAUAUUUG | 8346 | CAAATATA GGCTAGCTACAACGA CTACACTG | 18123 |
| 7545 | GUGUAGAU A UAUUUGAC | 1370 | GTCAAATA GGCTAGCTACAACGA ATCTACAC | 18124 |
| 7547 | GUAGAUAU A UUUGACCA | 137 | UGGTCAAA GGCTAGCTACAACGA ATATCTAC | 18125 |
| 7552 | UAUAUUUG A CCAUCACC | 8347 | GGTGATGG GGCTAGCTACAACGA CAAATATA | 18126 |
| 7555 | AUUUGACC A UCACCCUA | 5615 | TAGGGTGA GGCTAGCTACAACGA GGTCAAAT | 18127 |
| 7558 | UGACCAUC A CCCUAUGG | 5616 | CCATAGGG GGCTAGCTACAACGA GATGGTCA | 18128 |
| 7563 | AUCACCCU A UGGAUAUU | 1375 | AATATCCA GGCTAGCTACAACGA AGGGTGAT | 18129 |
| 7567 | CCCUAUGG A UAUUGGCU | 8348 | AGCCAATA GGCTAGCTACAACGA CCATAGGG | 18130 |
| 7569 | CUAUGGAU A UUGGCUAG | 1376 | CTAGCCAA GGCTAGCTACAACGA ATCCATAG | 18131 |
| 7573 | GGAUAUUG G CUAGUUUU | 8349 | AAAACTAG GGCTAGCTACAACGA CAATATCC | 18132 |
| 7577 | AUUGGCUA G UUUUGCCU | 8350 | AGGCAAAA GGCTAGCTACAACGA TAGCCAAT | 18133 |
| 7582 | CUAGUUUU G CCUUUAUU | 8351 | AATAAAGG GGCTAGCTACAACGA AAAACTAG | 18134 |
| 7588 | UUGCCUUU A UUAAGCAA | 1384 | TTGCTTAA GGCTAGCTACAACGA AAAGGCAA | 18135 |
| 7593 | UUUAUUAA G CAAAUUCA | 8352 | TGAATTTG GGCTAGCTACAACGA TTAATAAA | 18136 |
| 7597 | UUAAGCAA A UUCAUUUC | 8353 | GAAATGAA GGCTAGCTACAACGA TTGCTTAA | 18137 |
| 7601 | GCAAAUUC A UUUCAGCC | 5624 | GGCTGAUA GGCTAGCTACAACGA GAATTTGC | 18138 |
| 7607 | UCAUUUCA G CCUGAAUG | 8354 | CATTCAGG GGCTAGCTACAACGA TGAAATGA | 18139 |
| 7613 | CAGGCUGA A UGUCUGCC | 8355 | GGCAGACA GGCTAGCTACAACGA TCAGGCTG | 18140 |
| 7615 | GCCUGAAU G UCUGCCUA | 8356 | TAGGGAGA GGCTAGCTACAACGA ATTCAGGC | 18141 |
| 7619 | GAAUGUCU G CCUAUAUA | 8357 | TATATAGG GGCTAGCTACAACGA AGACATTC | 18142 |
| 7623 | GUCUGCCU A UAUAUUCU | 1393 | AGAATATA GGCTAGCTACAACGA AGGCAGAC | 18143 |
| 7625 | CUGCCUAU A UAUUCUCU | 1394 | AGAGAATA GGCTAGCTACAACGA ATAGGCAG | 18144 |
| 7627 | GCCUAUAU A UUCUCUGC | 1395 | GCAGAGAA GGCTAGCTACAACGA ATATAGGC | 18145 |
| 7634 | UAUUCUCU G CUCUUUGU | 8358 | ACAAAGAG GGCTAGCTACAACGA AGAGAATA | 18146 |
| 7641 | UGCUCUUU G UAUUCUCC | 8359 | GGAGAATA GGCTAGCTACAACGA AAAGAGCA | 18147 |
| 7643 | CUCUUUGU A UUCUCCUU | 1402 | AAGGAGAA GGCTAGCTACAACGA ACAAAGAG | 18148 |
| 7655 | UCCUUUGA A CCCGUUAA | 8360 | TTAACGGG GGCTAGCTACAACGA TCAAAGGA | 18149 |
| 7659 | UUGAACCC G UUAAAACA | 836 | UGTTTTAA GGCTAGCTACAACGA GGGTTCAA | 18150 |
| 7665 | CCGUUAAA A CAUCCUGU | 8362 | ACAGGATG GGCTAGCTACAACGA TTTAACGG | 18151 |
| 7667 | GUUAAAAC A UCCUGUGG | 5640 | CCACAGGA GGCTAGCTACAACGA GTTTTAAC | 18152 |
| 7672 | AACAUCCU G UGGCACUC | 8363 | GAGTGCCA GGCTAGCTACAACGA AGGATGTT | 18153 |

Input Sequence = HSFLT.
Cut Gite = R/Y
Arm Length = 8.
Core Sequence = GGCTAGCTACAACGA
HSFLT (Human flt mRNA for receptor-related tyrosine kinase.; Acc# X51602; 7680 bp)

[0358] TABLE XIX
Human FLT Zinzyme and Substrate Sequence

| | | Seq ID | | Seq ID |
|---|---|---|---|---|
| Pos | Substrate | No | Zinzyme | No |
| 17 | UCCUCUCG G CUCCUCCC | 7143 | GGGAGGAG GCCGAAAGGCGAGUGAGGUCU CGAGAGGA | 18154 |
| 28 | CCUCCCCG G CAGCGGCG | 7144 | CGCCGCUG GCCGAAAGGCGAGUGAGGUCU CGGGGAGG | 18155 |
| 31 | CCCCGGCA G CGGCGGCG | 7145 | CGCCGCCG GCCGAAAGGCGAGUGAGGUCU UGCCGGGG | 18156 |
| 34 | CGGCAGCG G CGGCGGCU | 7146 | AGCCGCCG GCCGAAAGGCGAGUGAGGUCU CGCUGCCG | 18157 |
| 37 | CAGCGGCG G CGGCUCGG | 7147 | CCGAGCCG GCCGAAAGGCGAGUGAGGUCU CGCCGCUG | 18158 |
| 40 | CGGCGGCG G CUCGGAGC | 7148 | GCUCCGAG GCCGAAAGGCGAGUGAGGUCU CGCCGCCG | 18159 |
| 47 | GGCUCGGA G CGGGCUCC | 7149 | GGAGCCCG GCCGAAAGGCGAGUGAGGUCU UCCGAGCC | 18160 |
| 51 | CGGAGCGG G CUCCGGGG | 7150 | CCCCGGAG GCCGAAAGGCGAGUGAGGUCU CCGCUCCG | 18161 |
| 59 | GCUCCGGG G CUCGGGUG | 7151 | CACCCGAG GCCGAAAGGCGAGUGAGGUCU CCCGGAGC | 18162 |
| 65 | GGGCUCGG G UGCAGCGG | 7152 | CCGCUGCA GCCGAAAGGCGAGUGAGGUCU CCGAGCCC | 18163 |
| 67 | GCUCGGGU G CAGCGGCC | 7153 | GGCCGCUG GCCGAAAGGCGAGUGAGGUCU ACCCGAGC | 18164 |
| 70 | CGGGUGCA G CGGCCAGC | 7154 | GCUGGCCG GCCGAAAGGCGAGUGAGGUCU UGCACCCG | 18165 |
| 73 | GUGCAGCG G CCAGCGGG | 7155 | CCCGCUGG GCCGAAAGGCGAGUGAGGUCU CGCUGCAC | 18166 |
| 77 | AGCGGCCA G CGGGCCUG | 7156 | CAGGCCCG GCCGAAAGGCGAGUGAGGUCU UGGCCGCU | 18167 |
| 81 | GCCAGCGG G CCUGGCGG | 7157 | CCGCCAGG GCCGAAAGGCGAGUGAGGUCU CCGCUGGC | 18168 |
| 86 | CGGGCCUG G CGGCGAGG | 7158 | CCUCGCCG GCCGAAAGGCGAGUGAGGUCU CAGGCCCG | 18169 |
| 89 | GCCUGGCG G CGAGGAUU | 7159 | AAUCCUCG GCCGAAAGGCGAGUGAGGUCU CGCCAGGC | 18170 |
| 108 | CCGGGGAA G UGGUUGUC | 7161 | CACAACCA GCCGAAAGGCGAGUGAGGUCU UUCCCCGG | 18171 |
| 111 | GGGAAGUG G UUGUCUCC | 7162 | GGAGACAA GCCGAAAGGCGAGUGAGGUCU CACUUCCC | 18172 |
| 114 | AAGUGGUU G UCUCCUGG | 7163 | CCAGGAGA GCCGAAAGGCGAGUGAGGUCU AACCACUU | 18173 |
| 122 | GUCUCCUG G CUGGAGCC | 7164 | GGCUCCAG GCCGAAAGGCGAGUGAGGUCU CAGGAGAC | 18174 |
| 128 | UGGCUGGA G CCGCGAGA | 7165 | UCUCGCGG GCCGAAAGGCGAGUGAGGUCU UCCAGCCA | 18175 |
| 131 | CUGGAGCC G CGAGACGG | 7166 | CCGUCUCG GCCGAAAGGCGAGUGAGGUCU GGCUCCAG | 18176 |
| 140 | CGAGACGG G CGCUCAGG | 7168 | CCUGAGCG GCCGAAAGGCGAGUGAGGUCU CCGUCUCG | 18177 |
| 142 | AGACGGGC G CUCAGGGC | 7169 | GCCCUGAG GCCGAAAGGCGAGUGAGGUCU GCCCGUCU | 18178 |
| 149 | CGCUCAGG G CGCGGGGC | 7170 | GCCCCGCG GCCGAAAGGCGAGUGAGGUCU CCUGAGCG | 18179 |
| 151 | CUCAGGGC G CGGGGCCG | 7171 | CGGCCCCG GCCGAAAGGCGAGUGAGGUCU GCCCUGAG | 18180 |
| 156 | GGCGCGGG G CCGGCGGC | 7172 | GCCGCCGG GCCGAAAGGCGAGUGAGGUCU CCCGCGCC | 18181 |
| 160 | CGGGGCCG G CGGCGGCG | 7173 | CGCCGCCG GCCGAAAGGCGAGUGAGGUCU CGGCCCCG | 18182 |
| 163 | GGCCGGCG G CGGCGAAC | 7174 | GUUCGCCG GCCGAAAGGCGAGUGAGGUCU CGCCGGCC | 18183 |
| 166 | CGGCGGCG G CGAACGAG | 7175 | CUCGUUCG GCCGAAAGGCGAGUGAGGUCU CGCCGGCC | 18184 |
| 188 | GCAGUCUG G CGGCCGGG | 7179 | CCCGGCCG GCCGAAAGGCGAGUGAGGUCU CAGAGUCC | 18185 |
| 191 | CUCUGGCG G CCGGGUCG | 7180 | CGACCCGG GCCGAAAGGCGAGUGAGGUCU CGCCAGAG | 18186 |
| 196 | GCGGCCGG G UCGUUGGC | 7181 | GCCAACGA GCCGAAAGGCGAGUGAGGUCU CCGGCCGC | 18187 |
| 199 | GCCGGGUC G UUGGCCGG | 7182 | CCGGCCAA GCCGAAAGGCGAGUGAGGUCU GACCCGGC | 18188 |
| 203 | GGUCGUUG G CCGGGGGA | 7183 | UCCCCCGG GCCGAAAGGCGAGUGAGGUCU CAACGACC | 18189 |
| 212 | CCGGGGGA G CGCGGGCA | 7184 | UGCCCGCG GCCGAAAGGCGAGUGAGGUCU UCCCCCGG | 18190 |
| 214 | GGGGGAGC G CGGGCACC | 7185 | GGUGCCCG GCCGAAAGGCGAGUGAGGUCU GCUCCCCC | 18191 |
| 218 | GAGCGCGG G CACCGGGC | 7186 | GCCCGGUG GCCGAAAGGCGAGUGAGGUCU CCGCGCUC | 18192 |
| 225 | GGCACCGG G CGAGCAGG | 7187 | CCUGCUCG GCCGAAAGGCGAGUGAGGUCU CCGGUGCC | 18193 |
| 229 | CCGGGCGA G CAGGCCGC | 7188 | GCGGCCUG GCCGAAAGGCGAGUGAGGUCU UCGCCCGG | 18194 |
| 233 | GCGAGCAG G CCGCGUCG | 7189 | CGACGCGG GCCGAAAGGCGAGUGAGGUCU CUGCUCGC | 18195 |
| 236 | AGCAGGCC G CGUCGCGC | 7190 | GCGCGACG GCCGAAAGGCGAGUGAGGUCU GGCCUGCU | 18196 |
| 238 | CAGGCCGC G UCGCGCUC | 7191 | GAGCGCGA GCCGAAAGGCGAGUGAGGUCU GCGGCCUG | 18197 |
| 241 | GCCGCGUC G CGCUCACC | 7192 | GGUGAGCG GCCGAAAGGCGAGUGAGGUCU GACGCGGC | 18198 |
| 243 | CGCGUCGC G CUCACCAU | 7193 | AUGGUGAG GCCGAAAGGCGAGUGAGGUCU GCGACGCG | 18199 |
| 253 | UCACCAUG G UCAGCUAC | 7194 | GUAGCUGA GCCGAAAGGCGAGUGAGGUCU CAUGGUGA | 18200 |
| 257 | CAUGGUCA G CUACUGGG | 7195 | CCCAGUAG GCCGAAAGGCGAGUGAGGUCU UGACCAUG | 18201 |
| 274 | ACACCGGG G UCCUGCUG | 7197 | CAGCAGGA GCCGAAAGGCGAGUGAGGUCU CCCGGUGU | 18202 |
| 279 | GGGGUCCU G CUGUGCGC | 7198 | GCGCACAG GCCGAAAGGCGAGUGAGGUCU AGGACCCC | 18203 |
| 282 | GUCCUGCU G UGCGCGCU | 7199 | AGCGCGCA GCCGAAAGGCGAGUGAGGUCU AGCAGGAC | 18204 |
| 284 | CCUGCUGU G CGCGCUGC | 7200 | GCAGCGCG GCCGAAAGGCGAGUGAGGUCU ACAGCAGG | 18205 |
| 286 | UGCUGUGC G CGCUGCUC | 7201 | GAGCAGCG GCCGAAAGGCGAGUGAGGUCU GCACAGCA | 18206 |
| 288 | CUGUGCGC G CUGCUCAG | 7202 | CUGAGCAG GCCGAAAGGCGAGUGAGGUCU GCGCACAG | 18207 |
| 291 | UGCGCGCU G CUCAGCUG | 7203 | CAGCUGAG GCCGAAAGGCGAGUGAGGUCU AGCGCGCA | 18208 |
| 296 | GCUGCUCA G CUGUCUGC | 7204 | GCAGACAG GCCGAAAGGCGAGUGAGGUCU UGAGCAGC | 18209 |
| 299 | GCUCAGCU G UCUGCUUC | 7205 | GAAGCAGA GCCGAAAGGCGAGUGAGGUCU AGCUGAGC | 18210 |
| 303 | AGCUGUCU G CUUCUCAC | 7206 | GUGAGAAG GCCGAAAGGCGAGUGAGGUCU AGACAGCU | 18211 |
| 320 | AGGAUCUA G UUCAGGUU | 7208 | AACCUGAA GCCGAAAGGCGAGUGAGGUCU UAGAUCCU | 18212 |
| 326 | UAGUUCAG G UUCAAAAU | 7209 | AUUUUGAA GCCGAAAGGCGACUGAGGUCU CUGAACUA | 18213 |
| 353 | UGAACUGA G UUUAAAAG | 7213 | CUUUUAAA GCCGAAAGGCGAGUGAGGUCU UCAGUUCA | 18214 |
| 362 | UUUAAAAG G CACCCAGC | 7214 | GCUGGGUG GCCGAAAGGCGAGUGAGGUCU CUUUUAAA | 18215 |
| 369 | GGCACCCA G CACAUCAU | 7215 | AUGAUGUG GCCGAAAGGCGAGUGAGGUCU UGGGUGCC | 18216 |
| 378 | CACAUCAU G CAAGCAGG | 7216 | CCUGCUUG GCCGAAAGGCGAGUGAGGUCU AUGAUGUG | 18217 |
| 382 | UCAUGCAA G CAGGCCAG | 7217 | CUGGCCUG GCCGAAAGGCGAGUGAGGUCU UUGCAUGA | 18218 |
| 386 | GCAAGCAG G CCAGACAC | 7218 | GUGUCUGG GCCGAAAGGCGAGUGAGGUCU CUGCUUGC | 18219 |
| 396 | CAGACACU G CAUCUCCA | 7220 | UGGAGAUG GCCGAAAGGCGACUGAGGUCU AGUGUCUG | 18220 |
| 407 | UCUCCAAU G CAGGGGGG | 7222 | CCCCCCUG GCCGAAAGGCGAGUGAGGUCU AUUGGAGA | 18221 |
| 418 | GGGGGGAA G CAGCCCAU | 7223 | AUGGGCUG GCCGAAAGGCGAGUGAGGUCU UUCCCCCC | 18222 |
| 421 | GGGAAGCA G CCCAUAAA | 7224 | UUUAUGGG GCCGAAAGGCGAGUGAGGUCU UGCUUCCC | 18223 |
| 432 | CAUAAAUG G UCUUUGCC | 7226 | GGCAAAGA GCCGAAAGGCGAGUGAGGUCU CAUUUAUG | 18224 |
| 438 | UGGUCUUU G CCUGAAAU | 7227 | AUUUCAGG GCCGAAAGGCGAGUGAGGUCU AAAGACCA | 18225 |
| 448 | CUGAAAUG G UGAGUAAG | 7229 | CUUACUCA GCCGAAAGGCGAGUGAGGUCU CAUUUCAG | 18226 |
| 452 | AAUGGUGA G UAAGGAAA | 7230 | UUUCCUUA GCCGAAAGGCGAGUGAGGUCU UCACCAUU | 18227 |
| 461 | UAAGGAAA G CGAAAGGC | 7231 | GCCUUUCG GCCGAAAGGCGACUGAGGUCU UUUCCUUA | 18228 |
| 468 | AGCGAAAG G CUGAGCAU | 7232 | AUGCUCAG GCCGAAAGGCGAGUGAGGUCU CUUUCGCU | 18229 |
| 473 | AAGGCUGA G CAUAACUA | 7233 | UAGUUAUG GCCGAAAGGCGAGUGAGGUCU UCAGCCUU | 18230 |
| 487 | CUAAAUCU G CCUGUGGA | 7236 | UCCACAGG GCCGAAAGGCGAGUGAGGUCU AGAUUUAG | 18231 |
| 491 | AUCUGCCU G UGGAAGAA | 7237 | UUCUUCCA GCCGAAAGGCGAGUGAGGUCU AGGCAGAU | 18232 |
| 503 | AAGAAAUG G CAAACAAU | 7239 | AUUGUUUG GCCGAAAGGCGAGUGAGGUCU CAUUUCUU | 18233 |
| 515 | ACAAUUCU G CAGUACUU | 7242 | AAGUACUG GCCGAAAGGCGAGUGAGGUCU AGAAUUGU | 18234 |
| 518 | AUUCUGCA G UACUUUAA | 7243 | UUAAAGUA GCCGAAAGGCGAGUGAGGUCU UGCAGAAU | 18235 |
| 538 | UGAACACA G CUCAAGCA | 7246 | UGCUUGAG GCCGAAAGGCGAGUGAGGUCU UGUGUUCA | 18236 |
| 544 | CAGCUCAA G CAAACCAC | 7247 | GUGGUUUG GCCGAAAGGCGAGUGAGGUCU UUGAGCUG | 18237 |
| 557 | CCACACUG G CUUCUACA | 7249 | UGUAGAAG GCCGAAAGGCGAGUGAGGUCU CAGUGUGG | 18238 |
| 566 | CUUCUACA G CUGCAAAU | 7250 | AUUUGCAG GCCGAAAGGCGAGUGAGGUCU UGUAGAAG | 18239 |
| 569 | CUACAGCU G CAAAUAUC | 7251 | GAUAUUUG GCCGAAAGGCGAGUGAGGUCU AGCUGUAG | 18240 |
| 580 | AAUAUCUA G CUGUACCU | 7253 | AGGUACAG GCCGAAAGGCGAGUGAGGUCU UAGAUAUU | 18241 |
| 583 | AUCUAGCU G UACCUACU | 7254 | AGUAGGUA GCCGAAAGGCGAGUGAGGUCU AGCUAGAU | 18242 |
| 616 | CAGAAUCU G CAAUCUAU | 7257 | AUAGAUUG GCCGAAAGGCGAGUGAGGUCU AGAUUCUG | 18243 |
| 635 | AUUUAUUA G UGAUACAG | 7259 | CUGUAUCA GCCGAAAGGCGAGUGAGGUCU UAAUAAAU | 18244 |
| 644 | UGAUACAG G UAGACCUU | 7261 | AAGGUCUA GCCGAAAGGCGAGUGAGGUCU CUGUAUCA | 18245 |
| 855 | GACCUUUC G UAGAGAUG | 7263 | CAUCUCUA GCCGAAAGGCGAGUGAGGUCU GAAAGGUC | 18246 |
| 663 | GUAGAGAU G UACAGUGA | 7265 | UCACUGUA GCCGAAAGGCGAGUGAGGUCU AUCUCUAC | 18247 |
| 668 | GAUGUACA G UGAAAUCC | 7266 | GGAUUUCA GCCGAAAGGCGAGUGAGGUCU UGUACAUC | 18248 |
| 708 | GGAAGGGA G CUCGUCAU | 7270 | AUGACGAG GCCGAAAGGCGAGUGAGGUCU UCCCUUCC | 18249 |
| 712 | GGGAGCUC G UCAUUCCC | 7271 | GGGAAUGA GCCGAAAGGCGAGUGAGGUCU GAGCUCCC | 18250 |
| 722 | CAUUCCCU G CCGGGUUA | 7272 | UAACCCGG GCCGAAAGGCGAGUGAGGUCU AGGGAAUG | 18251 |
| 727 | CCUGCCGG G UUACGUCA | 7273 | UGACGUAA GCCGAAAGGCGAGUGAGGUCU CCGGCAGG | 18252 |
| 732 | CGGGUUAC G UCACCUAA | 7274 | UUAGGUGA GCCGAAAGGCGAGUGAGGUCU GUAACCCG | 18253 |
| 748 | ACAUCACU G UUACUUUA | 7276 | UAAAGUAA GCCGAAAGGCGAGUGAGGUCU AGUGAUGU | 18254 |
| 762 | UUAAAAAA G UUUCCACU | 7277 | AGUGGAAA GCCGAAAGGCGAGUGAGGUCU UUUUUUAA | 18255 |
| 797 | UGGAAAAC G CAUAAUCU | 7282 | AGAUUAUG GCCGAAAGGCGAGUGAGGUCU GUUUUCCA | 18256 |
| 812 | CUGGGACA G UAGAAAGG | 7285 | CCUUUCUA GCCGAAAGGCGAGUGAGGUCU UGUCCCAG | 18257 |
| 821 | UAGAAAGG G CUUCAUCA | 7286 | UGAUGAAG GCCGAAAGGCGAGUGAGGUCU CCUUUCUA | 18258 |
| 838 | UAUCAAAU G CAACGUAC | 7288 | GUACGUUG GCCGAAAGGCGAGUGAGGUCU AUUUGAUA | 18259 |
| 843 | AAUGCAAC G UACAAAGA | 7290 | UCUUUGUA GCCGAAAGGCGAGUGAGGUCU GUUGCAUU | 18260 |
| 858 | GAAAUAGG G CUUCUGAC | 7292 | GUCAGAAG GCCGAAAGCCGAGUGAGGUCU CCUAUUUC | 18261 |
| 869 | UCUGACCU G UGAAGCAA | 7294 | UUGCUUCA GCCGAAAGGCGACUGAGGUCU AGGUCAGA | 18262 |
| 874 | CCUGUGAA G CAACAGUC | 7295 | GACUGUUG GCCGAAAGGCGAGUGAGGUCU UUCACAGG | 18263 |
| 880 | AAGCAACA G UCAAUGGG | 7297 | CCCAUUGA GCCGAAAGGCGAGUGAGGUCU UGUUGCUU | 18264 |
| 888 | GUCAAUGG G CAUUUGUA | 7299 | UACAAAUG GCCGAAAGGCGAGUGAGGUCU CCAUUGAC | 18265 |
| 894 | GGGCAUUU G UAUAAGAC | 7300 | GUCUUAUA GCCGAAAGGCGAGUGAGGUCU AAAUGCCC | 18266 |
| 943 | UCAUAGAU G UCCAAAUA | 7308 | UAUUUGGA GCCGAAAGGCGAGUGAGGUCU AUCUAUGA | 18267 |
| 953 | CCAAAUAA G CACACCAC | 7310 | GUGGUGUG GCCGAAAGGCGAGUGAGGUCU UUAUUUGG | 18268 |
| 962 | CACACCAC G CCCAGUCA | 7311 | UGACUGGG GCCGAAAGGCGAGUGAGGUCU GUGGUGUG | 18269 |
| 967 | CACGCCCA G UCAAAUUA | 7312 | UAAUUUGA GCCGAAAGCCGACUCAGCUCU UGGGCGUG | 18270 |
| 983 | ACUUAGAG G CCAUACUC | 7314 | GAGUAUGG GCCGAAAGGCGAGUGAGGUCU CUCUAAGU | 18271 |
| 994 | AUACUCUU G UCCUCAAU | 7315 | AUUGAGGA GCCGAAAGGCGAGUGAGGUCU AAGAGUAU | 18272 |
| 1004 | CCUCAAUU G UACUGCUA | 7317 | UAGCAGUA GCCGAAAGGCGAGUGAGGUCU AAUUGAGG | 18273 |
| 1009 | AUUGUACU G CUACCACU | 7318 | AGUGGUAG GCCGAAAGGCGAGUGAGGUCU AGUACAAU | 18274 |
| 1033 | ACACGAGA G UUCAAAUG | 7320 | CAUUUGAA GCCGAAAGGCGAGUGAGGUCU UCUCGUGU | 18275 |
| 1049 | GACCUGGA G UUACCCUG | 7323 | CAGGGUAA GCCGAAAGGCGAGUGAGGUCU UCCAGGUC | 18276 |
| 1075 | AUAAGAGA G CUUCCGUA | 7326 | UACGGAAG GCCGAAAGGCGAGUGAGGUCU UCUCUUAU | 18277 |
| 1081 | GAGCUUCC G UAAGGCGA | 7327 | UCGCCUUA GCCGAAAGGCGAGUGAGGUCU GGAAGCUC | 18278 |
| 1086 | UCCGUAAG G CGACGAAU | 7328 | AUUCGUCG GCCGAAAGGCGAGUGAGGUCU CUUACGGA | 18279 |
| 1103 | UGACCAAA G CAAUUCCC | 7332 | GGGAAUUG GCCGAAAGGCGAGUGAGGUCU UUUGGUCA | 18280 |
| 1114 | AUUCCCAU G CCAACAUA | 7334 | UAUGUUGG GCCGAAAGGCGAGUGAGGUCU AUGGGAAU | 18281 |
| 1130 | AUUCUACA G UGUUCUUA | 7336 | UAAGAACA GCCGAAAGGCGAGUGAGGUCU UGUAGAAU | 18282 |
| 1132 | UCUACAGU G UUCUUACU | 7337 | AGUAAGAA GCCGAAAGGCGAGUGAGGUCU ACUGUAGA | 18283 |
| 1152 | GACAAAAU G CAGAACAA | 7340 | UUGUUCUG GCCGAAAGGCGAGUGAGGUCU AUUUUGUC | 18284 |
| 1181 | UUAUACUU G UCGUGUAA | 7344 | UUACACGA GCCGAAAGGCGAGUGAGGUCU AAGUAUAA | 18285 |
| 1184 | UACUUGUC G UGUAAGGA | 7345 | UCCUUACA GCCGAAAGGCGAGUGAGGUCU GACAAGUA | 18286 |
| 1186 | CUUGUCGU G UAAGGAGU | 7346 | ACUCCUUA GCCGAAAGGCGAGUGAGGUCU ACGACAAG | 18287 |
| 1193 | UGUAAGGA G UGGACCAU | 7347 | AUGGUCCA GCCGAAAGGCGAGUGAGGUCU UCCUUACA | 18288 |
| 1213 | UCAAAUCU G UUAACACC | 7350 | GGUGUUAA GCCGAAAGGCGAGUGAGGUCU AGAUUUGA | 18289 |
| 1225 | ACACCUCA G UGCAUAUA | 7352 | UAUAUGCA GCCGAAAGGCGAGUGAGGUCU UGAGGUGU | 18290 |
| 1227 | ACCUCAGU G CAUAUAUA | 7353 | UAUAUAUG GCCGAAAGGCGAGUGAGGUCU ACUGAGGU | 18291 |
| 1243 | AUGAUAAA G CAUUCAUC | 7355 | GAUGAAUG GCCGAAAGGCGAGUGAGGUCU UUUAUCAU | 18292 |
| 1255 | UCAUCACU G UGAAACAU | 7356 | AUGUUUCA GCCGAAAGGCGACUGAGGUCU AGUGAUGA | 18293 |
| 1272 | CGAAAACA G CAGGUGCU | 7359 | AGCACCUG GCCGAAAGGCGAGUGAGGUCU UGUUUUCG | 18294 |
| 1276 | AACAGCAG G UGCUUGAA | 7360 | UUCAAGCA GCCGAAAGGCGAGUGAGGUCU CUGCUGUU | 18295 |
| 1278 | CAGCAGGU G CUUGAAAC | 7361 | GUUUCAAG GCCGAAAGGCGAGUGAGGUCU ACCUGCUG | 18296 |
| 1288 | UUGAAACC G UAGCUGGC | 7363 | GCCAGCUA GCCGAAAGGCGAGUGAGGUCU GGUUUCAA | 18297 |
| 1291 | AAACCGUA G CUGGCAAG | 7364 | CUUGCCAG GCCGAAAGGCGAGUGAGGUCU UACGGUUU | 18298 |
| 1295 | CGUAGCUG G CAAGCGGU | 7365 | ACCGCUUG GCCGAAAGGCGAGUGAGGUCU CAGCUACG | 18299 |
| 1299 | GCUGGCAA G CGGUCUUA | 7366 | UAAGACCG GCCGAAAGGCGAGUGAGGUCU UUGCCAGC | 18300 |
| 1302 | GGCAAGCG G UCUUACCG | 7367 | CGGUAAGA GCCGAAAGGCGAGUGAGGUCU CGCUUGCC | 18301 |
| 1311 | UCUUACCG G CUCUCUAU | 7368 | AUAGAGAG GCCGAAAGGCGAGUGAGGUCU CGGUAAGA | 18302 |
| 1324 | CUAUGAAA G UGAAGGCA | 7369 | UGCCUUCA GCCGAAAGGCGAGUGAGGUCU UUUCAUAG | 18303 |
| 1330 | AAGUGAAG G CAUUUCCC | 7370 | GGGAAAUG GCCGAAAGGCGAGUGAGGUCU CUUCACUU | 18304 |
| 1341 | UUUCCCUC G CCGGAAGU | 7371 | ACUUCCGG GCCGAAAGGCGAGUGAGGUCU GAGGGAAA | 18305 |
| 1348 | CGCCGGAA G UUGUAUGG | 7372 | CCAUACAA GCCGAAAGGCGAGUGAGGUCU UUCCGGCG | 18306 |
| 1351 | CGGAAGUU G UAUGGUUA | 7373 | UAACCAUA GCCGAAAGGCGAGUGAGGUCU AACUUCCG | 18307 |
| 1356 | GUUGUAUG G UUAAAAGA | 7374 | UCUUUUAA GCCGAAAGGCGAGUGAGGUCU CAUACAAC | 18308 |
| 1368 | AAAGAUGG G UUACCUGC | 7376 | GCAGGUAA GCCGAAAGGCGAGUGAGGUCU CCAUCUUU | 18309 |
| 1375 | GGUUACCU G CGACUGAG | 7377 | CUCAGUCG GCCGAAAGGCGAGUGAGGUCU AGGUAACC | 18310 |
| 1390 | AGAAAUCU G CUCGCUAU | 7380 | AUAGCGAG GCCGAAAGGCGAGUGAGGUCU AGAUUUCU | 18311 |
| 1394 | AUCUGCUC G CUAUUUGA | 7381 | UCAAAUAG GCCGAAAGGCGAGUGAGGUCU GAGCAGAU | 18312 |
| 1406 | UUUGACUC G UGGCUACU | 7383 | AGUAGCCA GCCGAAAGGCGAGUGAGGUCU GAGUCAAA | 18313 |
| 1409 | GACUCGUG G CUACUCGU | 7384 | ACGAGUAG GCCGAAAGGCGAGUUAGGUCU CACGAGUC | 18314 |
| 1416 | GGCUACUC G UUAAUUAU | 7385 | AUAAUUAA GCCGAAAGGCGAGUGAGGUCU GAGUAGCC | 18315 |
| 1432 | UCAAGGAC G UAACUGAA | 7388 | UUCAGUUA GCCGAAAGGCGAGUGAUGUCU GUCCUUGA | 18316 |
| 1447 | AAGAGGAU G CAGGGAAU | 7391 | AUUCCCUG GCCGAAAGGCGAGUGAGGUCU AUCCUCUU | 18317 |
| 1467 | ACAAUCUU G CUGAGCAU | 7394 | AUGCUCAG GCCGAAAGGCGAGUGAGGUCU AAGAUUGU | 18318 |
| 1472 | CUUGCUGA G CAUAAAAC | 7395 | GUUUUAUG GCCGAAAGGCGAGUGAGGUCU UCAGCAAG | 18319 |
| 1482 | AUAAAACA G UCAAAUGU | 7397 | ACAUUUGA GCCGAAAGGCGAGUGAGGUCU UGUUUUAU | 18320 |
| 1489 | AGUCAAAU G UGUUUAAA | 7399 | UUUAAACA GCCGAAAGGCGAGUGAGGUCU AUUUGACU | 18321 |
| 1491 | UCAAAUGU G UUUAAAAA | 7400 | UUUUUAAA GCCGAAAGGCGAGUGAGGUCU ACAUUUGA | 18322 |
| 1507 | ACCUCACU G CCACUCUA | 7402 | UAGAGUGG GCCGAAAGGCGAGUGAGGUCU AGUGAGGU | 18323 |
| 1519 | CUCUAAUU G UCAAUGUG | 7404 | CACAUUGA GCCGAAAGGCGAGUGAGGUCU AAUUAGAG | 18324 |
| 1525 | UUGUCAAU G UGAAACCC | 7406 | GGGUUUCA GCCGAAAGGCGAGUGAUGUCU AUUGACAA | 18325 |
| 1549 | ACGAAAAG G CCGUGUCA | 7409 | UGACACGG GCCGAAAGGCGAGUGAGGUCU CUUUUCGU | 18326 |
| 1552 | AAAAGGCC G UGUCAUCG | 7410 | CGAUGACA GCCGAAAGGCGAGUGAGGUCU GGCCUUUU | 18327 |
| 1554 | AAGGCCGU G UCAUCGUU | 7411 | AACGAUGA GCCGAAAGGCGAGUGAGGUCU ACGGCCUU | 18328 |
| 1560 | GUGUCAUC G UUUCCAGA | 7412 | UCUGGAAA GCCGAAAGGCGAGUGAGGUCU GAUGACAC | 18329 |
| 1573 | CAGACCCG G CUCUCUAC | 7414 | GUAGAGAG GCCGAAAGGCGAGUGAGGUCU CGGGUCUG | 18330 |
| 1589 | CCCACUGG G CAGCAGAC | 7415 | GUCUGCUG GCCGAAAGGCGAGUGAGGUCU CCAGUGGG | 18331 |
| 1592 | ACUGGGCA G CAGACAAA | 7416 | UUUGUCUG GCCGAAAGGCGAGUGAGGUCU UGCCCAGU | 18332 |
| 1610 | CCUGACUU G UACCGCAU | 7420 | AUGCGGUA GCCGAAAGGCGAGUGAGGUCU AAGUCAGG | 18333 |
| 1615 | CUUGUACC G CAUAUGGU | 7421 | ACCAUAUG GCCGAAAGGCGAGUGAGGUCU GGUACAAG | 18334 |
| 1622 | CGCAUAUU G UAUCCCUC | 7422 | GAGGGAUA GCCGAAAGGCGAGUGAGGUCU CAUAUGCG | 18335 |
| 1644 | ACAAUCAA G UGGUUCUG | 7425 | CAGAACCA GCCGAAAGGCGAGUGAGGUCU UUGAUUGU | 18336 |
| 1647 | AUCAAGUG G UUCGGUCA | 7426 | UGCCAGAA GCCGAAAGGCGAGUGAGGUCU CACUUGAU | 18337 |
| 1653 | UGGUUCUG G CACCCCUG | 7427 | CAGGGGUG GCCGAAAGGCGAGUGAGGUCU CAGAACCA | 18338 |
| 1661 | GCACCCCU G UAACCAUA | 7428 | UAUGGUUA GCCGAAAGGCGAGUGAGGUCU AGGGGUGC | 18339 |
| 1681 | AUUCCGAA G CAAGGUGU | 7431 | ACACCUUG GCCGAAAGGCGAGUGAGGUCU UUCGGAAU | 18340 |
| 1686 | GAAGCAAG G UGUGACUU | 7432 | AAGUCACA GCCGAAAGGCGAGUGAGGUCU CUUGCUUC | 18341 |
| 1688 | AGCAAGGU G UGACUUUU | 7433 | AAAAGUCA GCCGAAAGGCGAGUGAGGUCU ACCUUGCU | 18342 |
| 1697 | UGACUUUU G UUCCAAUA | 7435 | UAUUGGAA GCCGAAAGGCGAGUGAGGUCU AAAAGUCA | 18343 |
| 1713 | AAUGAAGA G UCCUUUAU | 7438 | AUAAAGGA GCCGAAAGGCGAGUGAGGUCU UCUUCAUU | 18344 |
| 1729 | UCCUGGAU G CUGACAGC | 7440 | GCUGUCAG GCCGAAAGGCGAGUGAGGUCU AUCCAGGA | 18345 |
| 1736 | UGCUGACA G CAACAUGG | 7442 | CCAUGUUG GCCGAAAGGCGAGUGAGGUCU UGUCAGCA | 18346 |
| 1760 | AAUUGAGA G CAUCACUC | 7446 | GAGUGAUG GCCGAAAGGCGAGUGAGGUCU UCUCAAUU | 18347 |
| 1770 | AUCACUCA G CGCAUGGC | 7447 | GCCAUGCG GCCGAAAGGCGAGUGAGGUCU UGAGUGAU | 18348 |
| 1772 | CACUCAGC G CAUGGCAA | 7448 | UUGCCAUG GCCGAAAGGCGAGUGAGGUCU GCUGAGUG | 18349 |
| 1777 | AGCGCAUG G CAAUAAUA | 7449 | UAUUAUUG GCCGAAAGGCGAGUGAGGUCU CAUGCGCU | 18350 |
| 1804 | AUAAGAUG G CUAGCACC | 7454 | GGUGCUAG GCCGAAAGGCGAGUGAGGUCU CAUCUUAU | 18351 |
| 1808 | GAUGGCUA G CACCUUGG | 7455 | CCAAGGUG GCCGAAAGGCGAGUGAGGUCU UAGCCAUC | 18352 |
| 1816 | GCACCUUG G UUGUGGCU | 7456 | AGCCACAA GCCGAAAGGCGAGUGAGGUCU CAAGGUGC | 18353 |
| 1819 | CCUUGGUU G UGGCUGAC | 7457 | GUCAGCCA GCCGAAAGGCGAGUGAGGUCU AACCAAGG | 18354 |
| 1822 | UGGUUGUG G CUGACUCU | 7458 | AGAGUCAG GCCGAAAGGCGAGUGAGGUCU CACAACCA | 18355 |
| 1853 | CUACAUUU G CAUAGCUU | 7462 | AAGCUAUG GCCGAAAGGCGAGUGAGGUCU AAAUGUAG | 18356 |
| 1858 | UUUGCAUA G CUUCCAAU | 7463 | AUUGGAAG GCCGAAAGGCGAGUGAGGUCU UAUGCAAA | 18357 |
| 1870 | CCAAUAAA G UUGGGACU | 7465 | AGUCCCAA GCCGAAAGGCGAGUGAGGUCU UUUAUUGG | 18358 |
| 1879 | UUGGGACU G UGGGAAGA | 7467 | UCUUCCCA GCCGAAAGGCGAGUGAGGUCU AGUCCCAA | 18359 |
| 1895 | AAACAUAA G CUUUUAUA | 7469 | UAUAAAAG GCCGAAAGGCGAGUGAGGUCU UUAUGUUU | 18360 |
| 1912 | UCACAGAU G UGCCAAAU | 7471 | AUUUGGCA GCCGAAAGGCGAGUGAGGUCU AUCUGUGA | 18361 |
| 1914 | ACAGAUGU G CCAAAUGG | 7472 | CCAUUUGG GCCGAAAGGCGAGUGAGGUCU ACAUCUGU | 18362 |
| 1923 | CCAAAUGG G UUUCAUGU | 7474 | ACAUGAAA GCCGAAAGGCGAGUGAGGUCU CCAUUUGG | 18363 |
| 1930 | GGUUUCAU G UUAACUUG | 7475 | CAAGUUAA GCCGAAAGGCGAGUGAGGUCU AUGAAACC | 18364 |
| 1947 | GAAAAAAU G CCGACGGA | 7478 | UCCGUCGG GCCGAAAGGCGAGUGAGGUCU AUUUUUUC | 18365 |
| 1974 | CUGAAACU G UCUUGCAC | 7482 | GUGCAAGA GCCGAAAGGCGAGUGAGGUCU AGUUUCAG | 18366 |
| 1979 | ACUGUCUU G CACAGUUA | 7483 | UAACUGUG GCCGAAAGGCGAGUGAGGUCU AAGACAGU | 18367 |
| 1984 | CUUGCACA G UUAACAAG | 7484 | CUUGUUAA GCCGAAAGGCGAGUGAGGUCU UGUGCAAG | 18368 |
| 1992 | GUUAACAA G UUCUUAUA | 7486 | UAUAAGAA GCCGAAAGGCGAGUGAGGUCU UUGUUAAC | 18369 |
| 2008 | ACAGAGAC G UUACUUGG | 7488 | CCAAGUAA GCCGAAAGGCGAGUGAGGUCU GUCUCUGU | 18370 |
| 2025 | AUUUUACU G CGGACAGU | 7490 | ACUGUCCG GCCGAAAGGCGAGUGAGGUCU AGUAAAAU | 18371 |
| 2032 | UGCGGACA G UUAAUAAC | 7492 | GUUAUUAA GCCGAAAGGCGAGUGAGGUCU UGUCCGCA | 18372 |
| 2049 | AGAACAAU G CACUACAG | 7497 | CUGUAGUG GCCGAAAGGCGAGUGAGGUCU AUUGUUCU | 18373 |
| 2057 | GCACUACA G UAUUAGCA | 7498 | UGCUAAUA GCCGAAAGGCGAGUGAGGUCU UGUAGUGC | 18374 |
| 2063 | CAGUAUUA G CAAGCAAA | 7499 | UUUGCUUG GCCGAAAGGCGAGUGAGGUCU UAAUACUG | 18375 |
| 2067 | AUUAGCAA G CAAAAAAU | 7500 | AUUUUUUG GCCGAAAGGCGAGUGAGGUCU UUGCUAAU | 18376 |
| 2077 | AAAAAAUG G CCAUCACU | 7502 | AGUGAUGG GCCGAAAGGCGAGUGAGGUCU CAUUUUUU | 18377 |
| 2091 | ACUAAGGA G CACUCCAU | 7503 | AUGGAGUG GCCGAAAGGCGAGUGAGGUCU UCCUUAGU | 18378 |
| 2125 | UCAUGAAU G UUUCCCUG | 7506 | CAGGGAAA GCCGAAAGGCGAGUGAGGUCU AUUCAUGA | 18379 |
| 2133 | GUUUCCCU G CAAGAUUC | 7507 | GAAUCUUG GCCGAAAGGCGAGUGAGGUCU AGGGAAAC | 18380 |
| 2144 | AGAUUCAG G CACCUAUG | 7509 | CAUAGGUG GCCGAAAGGCGAGUGAGGUCU CUGAAUCU | 18381 |
| 2152 | GCACCUAU G CCUGCAGA | 7510 | UCUGCAGG GCCGAAAGGCGAGUGAGGUCU AUAGGUGC | 18382 |
| 2156 | CUAUGCCU G CAGAGCCA | 7511 | UGGCUCUG GCCGAAAGGCGAGUGAGGUCU AGGCAUAG | 18383 |
| 2161 | CCUGCAGA G CCAGGAAU | 7512 | AUUCCUGG GCCGAAAGGCGAGUGAGGUCU UCUGCAGG | 18384 |
| 2170 | CCAGGAAU G UAUACACA | 7514 | UGUGUAUA GCCGAAAGGCGAGUGAGGUCU AUUCCUGG | 18385 |
| 2227 | AUCAGGAA G CACCAUAC | 7519 | GUAUGGUG GCCGAAAGGCGAGUGAGGUCU UUCCUGAU | 18386 |
| 2241 | UACCUCCU G CGAAACCU | 7520 | AGGUUUCG GCCGAAAGGCGAGUGAGGUCU AGGAGGUA | 18387 |
| 2252 | AAACCUCA G UGAUCACA | 7522 | UGUGAUCA GCCGAAAGGCGAGUGAGGUCU UGAGGUUU | 18388 |
| 2263 | AUCACACA G UGGCCAUC | 7524 | GAUGGCCA GCCGAAAGGCGAGUGAGGUCU UGUGUGAU | 18389 |
| 2266 | ACACAGUG G CCAUCAGC | 7525 | GCUGAUGG GCCGAAAGGCGAGUGAGGUCU CACUGUGU | 18390 |
| 2273 | GGCCAUCA G CAGUUCCA | 7526 | UGGAACUG GCCGAAAGGCGAGUGAGGUCU UGAUGGCC | 18391 |
| 2276 | CAUCAGCA G UUCCACCA | 7527 | UGGUGGAA GCCGAAAGGCGAGUGAGGUCU UGCUGAUG | 18392 |
| 2294 | UUUAGACU G UCAUGCUA | 7529 | UAGCAUGA GCCGAAAGGCGAGUGAGGUCU AGUCUAAA | 18393 |
| 2299 | ACUGUCAU G CUAAUGGU | 7530 | ACCAUUAG GCCGAAAGGCGAGUGAGGUCU AUGACAGU | 18394 |
| 2306 | UGCUAAUG G UGUCCCCG | 7532 | CGGGGACA GCCGAAAGGCGAGUGAGGUCU CAUUAGCA | 18395 |
| 2308 | CUAAUGGU G UCCCCGAG | 7533 | CUCGGGGA GCCGAAAGGCGAGUGAGGUCU ACCAUUAG | 18396 |
| 2316 | GUCCCCGA G CCUCAGAU | 7534 | AUCUGAGG GCCGAAAGGCGAGUGAGGUCU UCGGGGAC | 18397 |
| 2331 | AUCACUUG G UUUAAAAA | 7536 | UUUUUAAA GCCGAAAGGCGAGUGAGGUCU CAAGUGAU | 18398 |
| 2361 | CAACAAGA G CCUGGAAU | 7541 | AUUCCAGG GCCGAAAGGCGAGUGAGGUCU UCUUGUUG | 18399 |
| 2387 | ACCAGGAA G CAGCACGC | 7544 | GCGUGCUG GCCGAAAGGCGAGUGAGGUCU UUCCUGGU | 18400 |
| 2390 | AGGAAGCA G CACGCUGU | 7545 | ACAGCGUG GCCGAAAGGCGAGUGAGGUCU UGCUUCCU | 18401 |
| 2394 | AGCAGCAC G CUGUUUAU | 7546 | AUAAACAG GCCGAAAGGCGAGUGAGGUCU GUGCUGCU | 18402 |
| 2397 | AGCACGCU G UUUAUUGA | 7547 | UCAAUAAA GCCGAAAGGCGAGUGAGGUCU AGCGUGCU | 18403 |
| 2410 | UUGAAAGA G UCACAGAA | 7548 | UUCUGUGA GCCGAAAGGCGAGUGAGGUCU UCUUUCAA | 18404 |
| 2429 | GGAUGAAG G UGUCUAUC | 7550 | GAUAGACA GCCGAAAGGCGAGUGAGGUCU CUUCAUCC | 18405 |
| 2431 | AUGAAGGU G UCUAUCAC | 7551 | GUGAUAGA GCCGAAAGGCGAGUGAGGUCU ACCUUCAU | 18406 |
| 2441 | CUAUCACU G CAAAGCCA | 7552 | UGGCUUUG GCCGAAAGGCGAGUGAGGUCU AGUGAUAG | 18407 |
| 2446 | ACUGCAAA G CCACCAAC | 7553 | GUUGGUGG GCCGAAAGGCGAGUGAGGUCU UUUGCAGU | 18408 |
| 2462 | CCAGAAGG G CUCUGUGG | 7555 | CCACAGAG GCCGAAAGGCGAGUGAGGUCU CCUUCUGG | 18409 |
| 2467 | AGGGCUCU G UGGAAAGU | 7556 | ACUUUCCA GCCGAAAGGCGAGUGAGGUCU AGAGCCCU | 18410 |
| 2474 | UGUGGAAA G UUCAGCAU | 7557 | AUGCUGAA GCCGAAAGGCGAGUGAGGUCU UUUCCACA | 18411 |
| 2479 | AAAGUUCA G CAUACCUC | 7558 | GAGGUAUG GCCGAAAGGCGAGUGAGGUCU UGAACUUU | 18412 |
| 2491 | ACCUCACU G UUCAAGGA | 7559 | UCCUUGAA GCCGAAAGGCGAGUGAGGUCU AGUGAGGU | 18413 |
| 2511 | UCGGACAA G UCUAAUCU | 7562 | AGAUUAGA GCCGAAAGGCGAGUGAGGUCU UUGUCCGA | 18414 |
| 2523 | AAUCUGGA G CUGAUCAC | 7564 | GUGAUCAG GCCGAAAGGCGAGUGAGGUCU UCCAGAUU | 18415 |
| 2540 | UCUAACAU G CACCUGUG | 7567 | CACAGGUG GCCGAAAGGCGAGUGAGGUCU AUGUUAGA | 18416 |
| 2546 | AUGCACCU G UGUGGCUG | 7568 | CAGCCACA GCCGAAAGGCGAGUGAGGUCU AGGUGCAU | 18417 |
| 2548 | GCACCUGU G UGGCUGCG | 7569 | CGCAGCCA GCCGAAAGGCGAGUGAGGUCU ACAGGUGC | 18418 |
| 2551 | CCUGUGUG G CUGCGACU | 7570 | AGUCGCAG GCCGAAAGGCGAGUGAGGUCU CACACAGG | 18419 |
| 2554 | GUGUGGCU G CGACUCUC | 7571 | GAGAGUCG GCCGAAAGGCGAGUGAGGUCU AGCCACAC | 18420 |
| 2568 | CUCUUCUG G CUCCUAUU | 7573 | AAUAGGAG GCCGAAAGGCGAGUGAGGUCU CAGAAGAG | 18421 |
| 2604 | AUGAAAAG G UCUUCUUC | 7576 | GAAGAAGA GCCGAAAGGCGAGUGAGGUCU CUUUUCAU | 18422 |
| 2659 | CAGAUGAA G UUCCUUUG | 7584 | CAAAGGAA GCCGAAAGGCGAGUGAGGUCU UUCAUCUG | 18423 |
| 2673 | UUGGAUGA G CAGUGUGA | 7586 | UCACACUG GCCGAAAGGCGAGUGAGGUCU UCAUCCAA | 18424 |
| 2676 | GAUGAGCA G UGUGAGCG | 7587 | CGCUCACA GCCGAAAGGCGAGUGAGGUCU UGCUCAUC | 18425 |
| 2678 | UGAGCAGU G UGAGCGGC | 7588 | GCCGCUCA GCCGAAAGGCGAGUGAGGUCU ACUGCUCA | 18426 |
| 2682 | CAGUGUGA G CGGCUCCC | 7589 | GGGACCCG GCCGAAAGGCGAGUGAGGUCU UCACACUG | 18427 |
| 2685 | UGUGAGCG G CUCCCUUA | 7590 | UAAGGGAG GCCGAAAGGCGAGUGAGGUCU CGCUCACA | 18428 |
| 2698 | CUUAUGAU G CCAGCAAG | 7592 | CUUGCUGG GCCGAAAGGCGAGUGAGGUCU AUCAUAAG | 18429 |
| 2702 | UGAUGCCA G CAAGUGGG | 7593 | CCCACUUG GCCGAAAGGCGAGUGAGGUCU UGGCAUCA | 18430 |
| 2706 | GCCAGCAA G UGGGAGUU | 7594 | AACUCCCA GCCGAAAGGCGAGUGAGGUCU UUGCUGGC | 18431 |
| 2712 | AAGUGGGA G UUUGCCCG | 7595 | CGGGCAAA GCCGAAAGGCGAGUGAGGUCU UCCCACUU | 18432 |
| 2716 | GGGAGUUU G CCCGGGAG | 7596 | CUCCCGGG GCCGAAAGGCGAGUGAGGUCU AAACUCCC | 18433 |
| 2738 | UAAACUGG G CAAAUCAC | 7599 | GUGAUUUC GCCGAAAGGCGAGUGAGGUCU CCAGUUUA | 18434 |
| 2758 | GAAGAGGG G CUUUUGGA | 7601 | UCCAAAAG GCCGAAAGGCGAGUGAGGUCU CCCUCUUC | 18435 |
| 2770 | UUGGAAAA G UGGUUCAA | 7602 | UUGAACCA GCCGAAAGGCGAGUGAGGUCU UUUUCCAA | 18436 |
| 2773 | GAAAAGUG G UUCAAGCA | 7603 | UGCUUGAA GCCGAAAGGCGAGUGAGGUCU CACUUUUC | 18437 |
| 2779 | UGGUUCAA G CAUCAGCA | 7604 | UGCUGAUG GCCGAAAGGCGAGUGAGGUCU UUGAACCA | 18438 |
| 2785 | AAGCAUCA G CAUUUGGC | 7605 | GCCAAAUG GCCGAAAGGCGAGUGAGGUCU UGAUGCUU | 18439 |
| 2792 | AGCAUUUG G CAUUAAGA | 7606 | UCUUAAUG GCCGAAAGGCGAGUGAGGUCU CAAAUGCU | 18440 |
| 2811 | UCACCUAC G UGCCGGAC | 7608 | GUCCGGCA GCCGAAAGGCGAGUGAGGUCU GUAGGUGA | 18441 |
| 2813 | ACCUACGU G CCGGACUG | 7609 | CAGUCCGG GCCGAAAGGCGAGUGAGGUCU ACGUAGGU | 18442 |
| 2821 | GCCGGACU G UGGCUGUG | 7611 | CACAGCCA GCCGAAAGGCGAGUGAGGUCU AGUCCGGC | 18443 |
| 2824 | GGACUGUG G CUGUGAAA | 7612 | UUUCACAG GCCGAAAGGCGAGUGAGGUCU CACAGUCC | 18444 |
| 2827 | CUGUGGCU G UGAAAAUG | 7613 | CAUUUUCA GCCGAAAGGCGAGUGAGGUCU AGCCACAG | 18445 |
| 2835 | GUGAAAAU G CUGAAAGA | 7615 | UCUUUCAG GCCGAAAGGCGAGUGAGGUCU AUUUUCAC | 18446 |
| 2848 | AAGAGGGG G CCACGGCC | 7616 | GGCCGUGG GCCGAAAGGCGAGUGAGGUCU CCCCUCUU | 18447 |
| 2854 | GGGCCACG G CCAGCGAG | 7617 | CUCGCUGG GCCGAAAGGCGAGUGAGGUCU CGUGGCCC | 18448 |
| 2858 | CACGGCCA G CGAGUACA | 7618 | UGUACUCG GCCGAAAGGCGAGUGAGGUCU UGGCCGUG | 18449 |
| 2862 | GCCAGCGA G UACAAAGC | 7619 | GCUUUGUA GCCGAAAGGCGAGUGAGGUCU UCGCUGGC | 18450 |
| 2869 | AGUACAAA G CUCUGAUG | 7620 | CAUCAGAG GCCGAAAGGCGAGUGAGGUCU UUUGUACU | 18451 |
| 2883 | AUGACUGA G CUAAAAAU | 7623 | AUUUUUAG GCCGAAAGGCGAGUGAGGUCU UCAGUCAU | 18452 |
| 2906 | CCACAUUG G CCACCAUC | 7626 | GAUGGUGG GCCGAAAGGCGAGUGAGGUCU CAAUGUGG | 18453 |
| 2920 | AUCUGAAC G UGGUUAAC | 7628 | GUUAACCA GCCGAAAGGCGAGUGAGGUCU GUUCAGAU | 18454 |
| 2923 | UGAACGUG G UUAACCUG | 7629 | CAGGUUAA GCCGAAAGGCGAGUGAGGUCU CACGUUCA | 18455 |
| 2931 | GUUAACCU G CUGGGAGC | 7631 | GCUCCCAG GCCGAAAGGCGAGUGAGGUCU AGGUUAAC | 18456 |
| 2938 | UGCUGGGA G CCUGCACC | 7632 | GGUGCAGG GCCGAAAGGCGAGUGAGGUCU UCCCAGCA | 18457 |
| 2942 | GGGAGCCU G CACCAAGC | 7633 | GCUUGGUG GCCGAAAGGCGAGUGAGGUCU AGGCUCCC | 18458 |
| 2949 | UGCACCAA G CAAGGAGG | 7634 | CCUCCUUG GCCGAAAGGCGAGUGAGGUCU UUGGUGCA | 18459 |
| 2958 | CAAGGAGG G CCUCUGAU | 7635 | AUCAGAGG GCCGAAAGGCGAGUGAGGUCU CCUCCUUG | 18460 |
| 2968 | CUCUGAUG G UGAUUGUU | 7637 | AACAAUCA GCCGAAAGGCGAGUGAGGUCU CAUCAGAG | 18461 |
| 2974 | UGGUGAUU G UUGAAUAC | 7639 | GUAUUCAA GCCGAAAGGCGAGUGAGGUCU AAUCACCA | 18462 |
| 2984 | UGAAUACU G CAAAUAUG | 7641 | CAUAUUUG GCCGAAAGGCGAGUGAGGUCU AGUAUUCA | 18463 |
| 3017 | CCUCAAGA G CAAACGUG | 7645 | CACGUUUG GCCGAAAGGCGAGUGAGGUCU UCUUGAGG | 18464 |
| 3023 | GAGCAAAC G UGACUUAU | 7647 | AUAAGUCA GCCGAAAGGCGAGUGAGGUCU GUUUGCUC | 18465 |
| 3049 | ACAAGGAU G CAGCACUA | 7651 | UAGUGCUG GCCGAAAGGCGAGUGAGGUCU AUCCUUGU | 18466 |
| 3052 | AGGAUGCA G CACUACAC | 7652 | GUGUAGUG GCCGAAAGGCGAGUGAGGUCU UGCAUCCU | 18467 |
| 3066 | CACAUGGA G CCUAAGAA | 7653 | UUCUUAGG GCCGAAAGGCGAGUGAGGUCU UCCAUGUG | 18468 |
| 3087 | AAAAUGGA G CCAGGCCU | 7655 | AGGCCUGG GCCGAAAGGCGAGUGAGGUCU UCCAUUUU | 18469 |
| 3092 | GGAGCCAG G CCUGGAAC | 7656 | GUUCCAGG GCCGAAAGGCGAGUGAGGUCU CUGGCUCC | 18470 |
| 3104 | GGAACAAG G CAAGAAAC | 7658 | GUUUCUUG GCCGAAAGGCGAGUGAGGUCU CUUGUUCC | 18471 |
| 3125 | ACUAGAUA G CGUCACCA | 7662 | UGGUGACG GCCGAAAGGCGAGUGAGGUCU UAUCUAGU | 18472 |
| 3127 | UAGAUAGC G UCACCAGC | 7663 | GCUGGUGA GCCGAAAGGCGAGUGAGGUCU GCUAUCUA | 18473 |
| 3134 | CGUCACCA G CAGCGAAA | 7664 | UUUCGCUG GCCGAAAGGCGAGUGAGGUCU UGGUGACG | 18474 |
| 3137 | CACCAGCA G CGAAAGCU | 7665 | AGCUUUCG GCCGAAAGGCGAGUGAGGUCU UGCUGGUG | 18475 |
| 3143 | CAGCGAAA G CUUUGCGA | 7666 | UCGCAAAG GCCGAAAGGCGAGUGAGGUCU UUUCGCUG | 18476 |
| 3148 | AAAGCUUU G CGAGCUCC | 7667 | GGAGCUCG GCCGAAAGGCGAGUGAGGUCU AAAGCUUU | 18477 |
| 3152 | CUUUGCGA G CUCCGGCU | 7668 | AGCCGGAG GCCGAAAGGCGAGUGAGGUCU UCGCAAAG | 18478 |
| 3158 | GAGCUCCG G CUUUCAGG | 7669 | CCUGAAAG GCCGAAAGGCGAGUGAGGUCU CGGAGCUC | 18479 |
| 3176 | AGAUAAAA G UCUGAGUG | 7671 | CACUCAGA GCCGAAAGGCGAGUGAGGUCU UUUUAUCU | 18480 |
| 3182 | AAGUCUGA G UGAUGUUG | 7672 | CAACAUCA GCCGAAAGGCGAGUGAGGUCU UCAGACUU | 18481 |
| 3187 | UGAGUGAU G UUGAGGAA | 7674 | UUCCUCAA GCCGAAAGGCGAGUGAGGUCU AUCACUCA | 18482 |
| 3212 | UUCUGACG G UUUCUACA | 7677 | UGUAGAAA GCCGAAAGGCGAGUGAGGUCU CGUCAGAA | 18483 |
| 3225 | UACAAGGA G CCCAUCAC | 7678 | GUGAUGGG GCCGAAAGGCGAGUGAGGUCU UCCUUGUA | 18484 |
| 3257 | UUCUUACA G UUUUCAAG | 7681 | CUUGAAAA GCCGAAAGGCGAGUGAGGUCU UGUAAGAA | 18485 |
| 3265 | GUUUUCAA G UGGCCAGA | 7682 | UCUGGCCA GCCGAAAGGCGAGUGAGGUCU UUGAAAAC | 18486 |
| 3268 | UUCAAGUG G CCAGAGGC | 7683 | GCCUCUGG GCCGAAAGGCGAGUGAGGUCU CACUUGAA | 18487 |
| 3275 | GGCCAGAG G CAUGGAGU | 7684 | ACUCCAUG GCCGAAAGGCGAGUGAGGUCU CUCUGGCC | 18488 |
| 3282 | GGCAUGGA G UUCCUGUC | 7685 | GACAGGAA GCCGAAAGGCGAGUGAGGUCU UCCAUGCC | 18489 |
| 3288 | GAGUUCCU G UCUUCCAG | 7686 | CUGGAAGA GCCGAAAGGCGAGUGAGGUCU AGGAACUC | 18490 |
| 3300 | UCCAGAAA G UGCAUUCA | 7687 | UGAAUGCA GCCGAAAGGCGAGUGAGGUCU UUUCUGGA | 18491 |
| 3302 | CAGAAAGU G CAUUCAUC | 7688 | GAUGAAUG GCCGAAAGGCGAGUGAGGUCU ACUUUCUG | 18492 |
| 3319 | GGGACCUG G CAGCGAGA | 7690 | UCUCGCUG GCCGAAAGGCGAGUGAGGUCU CAGGUCCC | 18493 |
| 3322 | ACCUGGCA G CGAGAAAC | 7691 | GUUUCUCG GCCGAAAGGCGAGUGAGGUCU UGCCAGGU | 18494 |
| 3352 | AGAACAAC G UGGUGAAG | 7695 | CUUCACCA GCCGAAAGGCGAGUGAGGUCU GUUGUUCU | 18495 |
| 3355 | ACAACGUG G UGAAGAUU | 7696 | AAUCUUCA GCCGAAAGGCGAGUGAGGUCU CACGUUGU | 18496 |
| 3365 | GAAGAUUU G UGAUUUUG | 7698 | CAAAAUCA GCCGAAAGGCGAGUGAGGUCU AAAUCUUC | 18497 |
| 3374 | UGAUUUUG G CCUUGCCC | 7700 | GGGCAAGG GCCGAAAGGCGAGUGAGGUCU CAAAAUCA | 18498 |
| 3379 | UUGGCCUU G CCCGGGAU | 7701 | AUCCCGGG GCCGAAAGGCGAGUGAGGUCU AAGGCCAA | 18499 |
| 3409 | CCGAUUAU G UGAGAAAA | 7705 | UUUUCUCA GCCGAAAGGCGAGUGAGGUCU AUAAUCGG | 18500 |
| 3448 | AAUGGAUG G CUCCCGAA | 7710 | UUCGGGAG GCCGAAAGGCGAGUGAGGUCU CAUCCAUU | 18501 |
| 3479 | AAUCUACA G CACCAAGA | 7714 | UCUUGGUG GCCGAAAGGCGAGUGAGGUCU UGUAGAUU | 18502 |
| 3488 | CACCAAGA G CGACGUGU | 7715 | ACACGUCG GCCGAAAGGCGAGUGAGGUCU UCUUGGUG | 18503 |
| 3493 | AGAGCGAC G UGUGGUCU | 7717 | AGACCACA GCCGAAAGGCGAGUGAGGUCU GUCGCUCU | 18504 |
| 3495 | AGCGACGU G UGGUCUUA | 7718 | UAAGACCA GCCGAAAGGCGAGUGAGGUCU ACGUCGCU | 18505 |
| 3498 | GACGUGUG G UCUUACGG | 7719 | CCGUAAGA GCCGAAAGGCGAGUGAGGUCU CACACGUC | 18506 |
| 3508 | CUUACGGA G UAUUGCUG | 7720 | CAGCAAUA GCCGAAAGGCGAGUGAGGUCU UCCGUAAG | 18507 |
| 3513 | GGAGUAUU G CUGUGGGA | 7721 | UCCCACAG GCCGAAAGGCGAGUGAGGUCU AAUACUCC | 18508 |
| 3516 | GUAUUGCU G UGGGAAAU | 7722 | AUUUCCCA GCCGAAAGGCGAGUGAGGUCU AGCAAUAC | 18509 |
| 3536 | CUCCUUAG G UGGGUCUC | 7724 | GAGACCCA GCCGAAAGGCGAGUGAGGUCU CUAAGGAG | 18510 |
| 3540 | UUAGGUGG G UCUCCAUA | 7725 | UAUGGAGA GCCGAAAGGCGAGUGAGGUCU CCACCUAA | 18511 |
| 3556 | ACCCAGGA G UACAAAUG | 7726 | CAUUUGUA GCCGAAAGGCGAGUGAGGUCU UCCUGGGU | 18512 |
| 3578 | GGACUUUU G CAGUCGCC | 7730 | GGCGACUG GCCGAAAGGCGAGUGAGGUCU AAAAGUCC | 18513 |
| 3581 | CUUUUGCA G UCGCCUGA | 7731 | UCAGGCGA GCCGAAAGGCGAGUGAGGUCU UGCAAAAG | 18514 |
| 3584 | UUGCAGUC G CCUGAGGG | 7732 | CCCUCAGG GCCGAAAGGCGAGUGAGGUCU GACUGCAA | 18515 |
| 3596 | GAGGGAAG G CAUGAGGA | 7733 | UCCUCAUG GCCGAAAGGCGAGUGAGGUCU CUUCCCUC | 18516 |
| 3610 | GGAUGAGA G CUCCUGAG | 7735 | CUCAGGAG GCCGAAAGGCGAGUGAGGUCU UCUCAUCC | 18517 |
| 3618 | GCUCCUGA G UACUCUAC | 7736 | GUAGAGUA GCCGAAAGGCGAGUGAGGUCU UCAGGAGC | 18518 |
| 3648 | CAGAUCAU G CUGGACUG | 7739 | CAGUCCAG GCCGAAAGGCGAGUGAGGUCU AUGAUCUG | 18519 |
| 3656 | GCUGGACU G CUGGCACA | 7741 | UGUGCCAG GCCGAAAGGCGAGUGAGGUCU AGUCCAGC | 18520 |
| 3660 | GACUGCUG G CACAGAGA | 7742 | UCUCUGUG GCCGAAAGGCGAGUGAGGUCU CAGCAGUC | 18521 |
| 3681 | AAAGAAAG G CCAAGAUU | 7744 | AAUCUUGG GCCGAAAGGCGAGUGAGGUCU CUUUCUUU | 18522 |
| 3691 | CAAGAUUU G CAGAACUU | 7746 | AAGUUCUG GCCGAAAGGCGAGUGAGGUCU AAAUCUUG | 18523 |
| 3700 | CAGAACUU G UGGAAAAA | 7748 | UUUUUCCA GCCGAAAGGCGAGUGAGGUCU AAGUUCUG | 18524 |
| 3713 | AAAACUAG G UGAUUUGC | 7750 | GCAAAUCA GCCGAAAGGCGAGUGAGGUCU CUAGUUUU | 18525 |
| 3720 | GGUGAUUU G CUUCAAGC | 7752 | GCUUGAAG GCCGAAAGGCGAGUGAGGUCU AAAUCACC | 18526 |
| 3727 | UGCUUCAA G CAAAUGUA | 7753 | UACAUUUG GCCGAAAGGCGAGUGAGGUCU UUGAAGCA | 18527 |
| 3733 | AAGCAAAU G UACAACAG | 7755 | CUGUUGUA GCCGAAAGGCGAGUGAGGUCU AUUUGCUU | 18528 |
| 3746 | ACAGGAUG G UAAAGACU | 7758 | AGUCUUUA GCCGAAAGGCGAGUGAGGUCU CAUCCUGU | 18529 |
| 3769 | CAAUCAAU G CCAUACUG | 7762 | CAGUAUGG GCCGAAAGGCGAGUGAGGUCU AUUGAUUG | 18530 |
| 3788 | AGGAAAUA G UGGGUUUA | 7765 | UAAACCCA GCCGAAAGGCGAGUGAGGUCU UAUUUCCU | 18531 |
| 3792 | AAUAGUGG G UUUACAUA | 7766 | UAUGUAAA GCCGAAAGGCGAGUGAGGUCU CCACUAUU | 18532 |
| 3811 | CAACUCCU G CCUUCUCU | 7768 | AGAGAAGG GCCGAAAGGCGAGUGAGGUCU AGGAGUUG | 18533 |
| 3839 | CAAGGAAA G UAUUUCAG | 7770 | CUGAAAUA GCCGAAAGGCGAGUGAGGUCU UUUCCUUG | 18534 |
| 3847 | GUAUUUCA G CUCCGAAG | 7771 | CUUCGGAG GCCGAAAGGCGAGUGAGGUCU UGAAAUAC | 18535 |
| 3855 | GCUCCGAA G UUUAAUUC | 7772 | GAAUUAAA GCCGAAAGGCGAGUGAGGUCU UUCGGAGC | 18536 |
| 3869 | UUCAGGAA G CUCUGAUG | 7774 | CAUCAGAG GCCGAAAGGCGAGUGAGGUCU UUCCUGAA | 18537 |
| 3880 | CUGAUGAU G UCAGAUAU | 7777 | AUAUCUGA GCCGAAAGGCGAGUGAGGUCU AUCAUCAG | 18538 |
| 3889 | UCAGAUAU G UAAAUGCU | 7779 | AGCAUUUA GCCGAAAGGCGAGUGAGGUCU AUAUCUGA | 18539 |
| 3895 | AUGUAAAU G CUUUCAAG | 7781 | CUUGAAAG GCCGAAAGGCGAGUGAGGUCU AUUUACAU | 18540 |
| 3903 | GCUUUCAA G UUCAUGAG | 7782 | CUCAUGAA GCCGAAAGGCGAGUGAGGUCU UUGAAAGC | 18541 |
| 3911 | GUUCAUGA G CCUGGAAA | 7783 | UUUCCAGG GCCGAAAGGCGAGUGAGGUCU UCAUGAAC | 18542 |
| 3952 | UACCGAAU G CCACCUCC | 7788 | GGAGGUGG GCCGAAAGGCGAGUGAGGUCU AUUCGGUA | 18543 |
| 3963 | ACCUCCAU G UUUGAUGA | 7789 | UCAUCAAA GCCGAAAGGCGAGUGAGGUCU AUGGAGGU | 18544 |
| 3980 | CUACCAGG G CGACAGCA | 7792 | UGCUGUCG GCCGAAAGGCGAGUGAGGUCU CCUGGUAG | 18545 |
| 3986 | GGGCGACA G CAGCACUC | 7794 | GAGUGCUG GCCGAAAGGCGAGUGAGGUCU UGUCGCCC | 18546 |
| 3989 | CGACAGCA G CACUCUGU | 7795 | ACAGAGUG GCCGAAAGGCGAGUGAGGUCU UGCUGUCG | 18547 |
| 3996 | AGCACUCU G UUGGCCUC | 7796 | GAGGCCAA GCCGAAAGGCGAGUGAGGUCU AGAGUGCU | 18548 |
| 4000 | CUCUGUUG G CCUCUCCC | 7797 | GGGAGAGG GCCGAAAGGCGAGUGAGGUCU CAACAGAG | 18549 |
| 4011 | UCUCCCAU G CUGAAGCG | 7798 | CGCUUCAG GCCGAAAGGCGAGUGAGGUCU AUGGGAGA | 18550 |
| 4017 | AUGCUGAA G CGCUUCAC | 7799 | GUGAAGCG GCCGAAAGGCGAGUGAGGUCU UUCAGCAU | 18551 |
| 4019 | GCUGAAGC G CUUCACCU | 7800 | AGGUGAAG GCCGAAAGGCGAGUGAGGUCU GCUUCAGC | 18552 |
| 4037 | GACUGACA G CAAACCCA | 7803 | UGGGUUUG GCCGAAAGGCGAGUGAGGUCU UGUCAGUC | 18553 |
| 4048 | AACCCAAG G CCUCGCUC | 7805 | GAGCGAGG GCCGAAAGGCGAGUGAGGUCU CUUGGGUU | 18554 |
| 4053 | AAGGCCUC G CUCAAGAU | 7806 | AUCUUGAG GCCGAAAGGCGAGUGAGGUCU GAGGCCUU | 18555 |
| 4072 | ACUUGAGA G UAACCAGU | 7809 | ACUGGUUA GCCGAAAGGCGAGUGAGGUCU UCUCAAGU | 18556 |
| 4079 | AGUAACCA G UAAAAGUA | 7811 | UACUUUUA GCCGAAAGGCGAGUGAGGUCU UGGUUACU | 18557 |
| 4085 | CAGUAAAA G UAAGGAGU | 7812 | ACUCCUUA GCCGAAAGGCGAGUGAGGUCU UUUUACUG | 18558 |
| 4092 | AGUAAGGA G UCGGGGCU | 7813 | AGCCCCGA GCCGAAAGGCGAGUGAGGUCU UCCUUACU | 18559 |
| 4098 | GAGUCGGG G CUGUCUGA | 7814 | UCAGACAG GCCGAAAGGCGAGUGAGGUCU CCCGACUC | 18560 |
| 4101 | UCGGGGCU G UCUGAUGU | 7815 | ACAUCAGA GCCGAAAGGCGAGUGAGGUCU AGCCCCGA | 18561 |
| 4108 | UGUCUGAU G UCAGCAGG | 7817 | CCUGCUGA GCCGAAAGGCGAGUGAGGUCU AUCAGACA | 18562 |
| 4112 | UGAUGUCA G CAGGCCCA | 7818 | UGGGCCUG GCCGAAAGGCGAGUGAGGUCU UGACAUCA | 18563 |
| 4116 | GUCAGCAG G CCCAGUUU | 7819 | AAACUGGG GCCGAAAGGCGAGUGAGGUCU CUGCUGAC | 18564 |
| 4121 | CAGGCCCA G UUUCUGCC | 7820 | GGCAGAAA GCCGAAAGGCGAGUGAGGUCU UGGGCCUG | 18565 |
| 4127 | CAGUUUCU G CCAUUCCA | 7821 | UGGAAUGG GCCGAAAGGCGAGUGAGGUCU AGAAACUG | 18566 |
| 4136 | CCAUUCCA G CUGUGGGC | 7822 | GCCCACAG GCCGAAAGGCGAGUGAGGUCU UGGAAUGG | 18567 |
| 4139 | UUCCAGCU G UGGGCACG | 7823 | CGUGCCCA GCCGAAAGGCGAGUGAGGUCU AGCUGGAA | 18568 |
| 4143 | AGCUGUGG G CACGUCAG | 7824 | CUGACGUG GCCGAAAGGCGAGUGAGGUCU CCACAGCU | 18569 |
| 4147 | GUGGGCAC G UCAGCGAA | 7825 | UUCGCUGA GCCGAAAGGCGAGUGAGGUCU GUGCCCAC | 18570 |
| 4151 | GCACGUCA G CGAAGGCA | 7826 | UGCCUUCG GCCGAAAGGCGAGUGAGGUCU UGACGUGC | 18571 |
| 4157 | CAGCGAAG G CAAGCGCA | 7827 | UGCGCUUG GCCGAAAGGCGAGUGAGGUCU CUUCGCUG | 18572 |
| 4161 | GAAGGCAA G CGCAGGUU | 7828 | AACCUGCG GCCGAAAGGCGAGUGAGGUCU UUGCCUUC | 18573 |
| 4163 | AGGCAAGC G CAGGUUCA | 7829 | UGAACCUG GCCGAAAGGCGAGUGAGGUCU GCUUGCCU | 18574 |
| 4167 | AAGCGCAG G UUCACCUA | 7830 | UAGGUGAA GCCGAAAGGCGAGUGAGGUCU CUGCGCUU | 18575 |
| 4183 | ACGACCAC G CUGAGCUG | 7832 | CAGCUCAG GCCGAAAGGCGAGUGAGGUCU GUGGUCGU | 18576 |
| 4188 | CACGCUGA G CUGGAAAG | 7833 | CUUUCCAG GCCGAAAGGCGAGUGAGGUCU UCAGCGUG | 18577 |
| 4204 | GGAAAAUC G CGUGCUGC | 7835 | GCAGCACG GCCGAAAGGCGAGUGAGGUCU GAUUUUCC | 18578 |
| 4206 | AAAAUCGC G UGCUGCUC | 7836 | GAGCAGCA GCCGAAAGGCGAGUGAGGUCU GCGAUUUU | 18579 |
| 4208 | AAUCGCGU G CUGCUCCC | 7837 | GGGAGCAG GCCGAAAGGCGAGUGAGGUCU ACGCGAUU | 18580 |
| 4211 | CGCGUGCU G CUCCCCGC | 7838 | GCGGGGAG GCCGAAAGGCGAGUGAGGUCU AGCACGCG | 18581 |
| 4218 | UGCUCCCC G CCCCCAGA | 7839 | UCUGGGGG GCCGAAAGGCGAGUGAGGUCU GGGGAGCA | 18582 |
| 4237 | ACAACUCG G UGGUCCUG | 7842 | CAGGACCA GCCGAAAGGCGAGUGAGGUCU CGAGUUGU | 18583 |
| 4240 | ACUCGGUG G UCCUGUAC | 7843 | GUACAGGA GCCGAAAGGCGAGUGAGGUCU CACCGAGU | 18584 |
| 4245 | GUGGUCCU G UACUCCAC | 7844 | GUGGAGUA GCCGAAAGGCGAGUGAGGUCU AGGACCAC | 18585 |
| 4268 | CAUCUAGA G UUUGACAC | 7845 | GUGUCAAA GCCGAAAGGCGAGUGAGGUCU UCUAGAUG | 18586 |
| 4280 | GACACGAA C CCUUAUUU | 7847 | AAAUAAGG GCCGAAAGGCGAGUGAGGUCU UUCGUGUC | 18587 |
| 4295 | UUCUAGAA G CACAUGUG | 7848 | CACAUGUG GCCGAAAGGCGAGUGAGGUCU UUCUAGAA | 18588 |
| 4301 | AAGCACAU G UGUAUUUA | 7849 | UAAAUACA GCCGAAAGGCGAGUGAGGUCU AUGUGCUU | 18589 |
| 4303 | GCACAUGU G UAUUUAUA | 7850 | UAUAAAUA GCCGAAAGGCGAGUGAGGUCU ACAUGUGC | 18590 |
| 4326 | GGAAACUA G CUUUUGCC | 7852 | GGCAAAAG GCCGAAAGGCGAGUGAGGUCU UAGUUUCC | 18591 |
| 4332 | UAGCUUUU G CCAGUAUU | 7853 | AAUACUGG GCCGAAAGGCGAGUGAGGUCU AAAAGCUA | 18592 |
| 4336 | UUUUGCCA G UAUUAUGC | 7854 | GCAUAAUA GCCGAAAGGCGAGUGAGGUCU UGGCAAAA | 18593 |
| 4343 | AGUAUUAU G CAUAUAUA | 7855 | UAUAUAUG GCCGAAAGGCGAGUGAGGUCU AUAAUACU | 18594 |
| 4353 | AUAUAUAA G UUUACACC | 7856 | GGUGUAAA GCCGAAAGGCGAGUGAGGUCU UUAUAUAU | 18595 |
| 4379 | CCAUGGGA G CCAGCUGC | 7857 | GCAGCUGG GCCGAAAGGCGAGUGAGGUCU UCCCAUGG | 18596 |
| 4383 | GGGAGCCA G CUGCUUUU | 7858 | AAAAGCAG GCCGAAAGGCGAGUGAGGUCU UGGCUCCC | 18597 |
| 4386 | AGCCAGCU G CUUUUUGU | 7859 | ACAAAAAG GCCGAAAGGCGAGUGAGGUCU AGCUGGCU | 18598 |
| 4393 | UGCUUUUU G UGAUUUUU | 7860 | AAAAAUCA GCCGAAAGGCGAGUGAGGUCU AAAAAGCA | 18599 |
| 4408 | UUUUAAUA G UGCUUUUU | 7863 | AAAAAGCA GCCGAAAGGCGAGUGAGGUCU UAUUAAAA | 18600 |
| 4410 | UUAAUAGU G CUUUUUUU | 7864 | AAAAAAAG GCCGAAAGGCGAGUGAGGUCU ACUAUUAA | 18601 |
| 4336 | ACAAGAAU G UAACUCCA | 7868 | UGGAGUUA GCCGAAAGGCGAGUGAGGUCU AUUCUUGU | 18602 |
| 4457 | GAGAAAUA G UGACAAGU | 7872 | ACUUGUCA GCCGAAAGGCGAGUGAGGUCU UAUUUCUC | 18603 |
| 4464 | AGUGACAA G UGAAGAAC | 7874 | GUUCUUCA GCCGAAAGGCGAGUGAGGUCU UUGUCACU | 18604 |
| 4479 | ACACUACU G CUAAAUCC | 7876 | GGAUUUAG GCCGAAAGGCGAGUGAGGUCU AGUAGUGU | 18605 |
| 4492 | AUCCUCAU G UUACUCAG | 7878 | CUGAGUAA GCCGAAAGGCGAGUGAGGUCU AUGAGGAU | 18606 |
| 4500 | GUUACUCA G UGUUAGAG | 7879 | CUCUAACA GCCGAAAGGCGAGUGAGGUCU UGAGUAAC | 18607 |
| 4502 | UACUCAGU G UUAGAGAA | 7880 | UUCUCUAA GCCGAAAGGCGACUGAGCUCU ACUGAGUA | 18608 |
| 4538 | ACUUCCCU G CUCCAACC | 7885 | GGUUGGAG GCCGAAAGGCGAGUGAGGUCU AGGGAAGU | 18609 |
| 4550 | CAACCCCC G CCACCUCA | 7887 | UGAGGUGG GCCGAAAGGCGAGUGAGGUCU GGGGGUUG | 18610 |
| 4561 | ACCUCAGG G CACGCAGG | 7888 | CCUGCGUG GCCGAAAGGCGAGUGAGGUCU CCUGAGGU | 18611 |
| 4565 | CAGGGCAC G CAGGACCA | 7889 | UGGUCCUG GCCGAAAGGCGAGUGAGGUCU GUGCCCUG | 18612 |
| 4574 | CAGGACCA G UUUGAUUG | 7891 | CAAUCAAA GCCGAAAGGCGAGUGAGGUCU UGGUCCUG | 18613 |
| 4587 | AUUGAGGA G CUGCACUG | 7893 | CAGUGCAG GCCGAAAGGCGAGUGAGGUCU UCCUCAAU | 18614 |
| 4590 | GAGGAGCU G CACUGAUC | 7894 | GAUCAGUG GCCGAAAGGCGAGUGAGGUCU AGCUCCUC | 18615 |
| 4606 | CACCCAAU G CAUCACGU | 7897 | ACGUGAUG GCCGAAAGGCGAGUGAGGUCU AUUGGGUG | 18616 |
| 4613 | UGCAUCAC G UACCCCAC | 7898 | GUGGGGUA GCCGAAAGGCGAGUGAGGUCU GUGAUGCA | 18617 |
| 4625 | CCCACUGG G CCAGCCCU | 7899 | AGGGCUGG GCCGAAAGGCGAGUGAGGUCU CCAGUGGG | 18618 |
| 4629 | CUGGGCCA G CCCUGCAG | 7900 | CUGCAGGG GCCGAAAGGCGAGUGAGGUCU UGGCCCAG | 18619 |
| 4634 | CCAGCCCU G CAGCCCAA | 7901 | UUGGGCUG GCCGAAAGGCGAGUGAGGUCU AGGGCUGG | 18620 |
| 4637 | GCCCUGCA G CCCAAAAC | 7902 | GUUUUGGG GCCGAAAGGCGAGUGAGGUCU UGCAGGGC | 18621 |
| 4651 | AACCCAGG G CAACAAGC | 7904 | GCUUGUUG GCCGAAAGGCGAGUGAGGUCU CCUGGGUU | 18622 |
| 4658 | GGCAACAA G CCCGUUAG | 7906 | CUAACGGG GCCGAAAGGCGAGUGAGGUCU UUGUUGCC | 18623 |
| 4662 | ACAAGCCC G UUAGCCCC | 7907 | GGGGCUAA GCCGAAAGGCGAGUGAGGUCU GGGCUUGU | 18624 |
| 4666 | GCCCGUUA G CCCCAGGG | 7908 | CCCUGGGG GCCGAAAGGCGAGUGAGGUCU UAACGGGC | 18625 |
| 4683 | GAUCACUG G CUGGCCUG | 7910 | CAGGCCAC GCCGAAAGGCGAGUGAGGUCU CAGUGAUC | 18626 |
| 4687 | ACUGGCUG G CCUGAGCA | 7911 | UGCUCAGG GCCGAAAGGCGAGUGAGGUCU CAGCCAGU | 18627 |
| 4693 | UGGCCUGA G CAACAUCU | 7912 | AGAUGUUG GCCGAAAGGCGAGUGAGGUCU UCAGGCCA | 18628 |
| 4707 | UCUCGGGA G UCCUCUAC | 7914 | CUAGAGGA GCCGAAAGGCGAGUGAGGUCU UCCCGAGA | 18629 |
| 4715 | GUCCUCUA G CAGGCCUA | 7915 | UAGGCCUG GCCGAAAGGCGAGUGAGGUCU UAGAGGAC | 18630 |
| 4719 | UCUAGCAG G CCUAAGAC | 7916 | GUCUUAGG GCCGAAAGGCGAGUGAGGUCU CUGCUAGA | 18631 |
| 4730 | UAAGACAU G UGAGGAGG | 7918 | CCUCCUCA GCCGAAAGGCGAGUGAGGUCU AUGUCUUA | 18632 |
| 4752 | GAAAAAAA G CAAAAAGC | 7919 | GCUUUUUG GCCGAAAGGCGAGUGAGGUCU UUUUUUUC | 18633 |
| 4759 | AGCAAAAA G CAAGGGAG | 7920 | CUCCCUUG GCCGAAAGGCGAGUGAGGUCU UUUUUGCU | 18634 |
| 4788 | GGGAGAAG G CAUGAGAA | 7922 | UUCUCAUG GCCGAAAGGCGAGUGAGGUCU CUUCUCCC | 18635 |
| 4809 | UUUGAGAC G CACCAUGU | 7925 | ACAUGGUG GCCGAAAGGCGAGUGAGGUCU GUCUCAAA | 18636 |
| 4816 | CGCACCAU G UGGGCACG | 7926 | CGUGCCCA GCCGAAAGGCGAGUGAGGUCU AUGGUGCG | 18637 |
| 4820 | CCAUGUGG G CACGGAGG | 7927 | CCUCCGUG GCCGAAAGGCGAGUGAGGUCU CCACAUGG | 18638 |
| 4837 | GGGACGGG G CUCAGCAA | 7929 | UUGCUGAG GCCGAAAGGCGAGUGAGGUCU CCCGUCCC | 18639 |
| 4842 | GGGGCUCA G CAAUGCCA | 7930 | UGGCAUUG GCCGAAAGGCGAGUGAGGUCU UGAGCCCC | 18640 |
| 4847 | UCAGCAAU G CCAUUUCA | 7932 | UGAAAUGG GCCGAAAGGCGAGUGAGGUCU AUUGCUGA | 18641 |
| 4856 | CCAUUUCA G UGGCUUCC | 7933 | GGAAGCCA GCCGAAAGGCGAGUGAGGUCU UGAAAUGG | 18642 |
| 4859 | UUUCAGUG G CUUCCCAG | 7934 | CUGGGAAG GCCGAAAGGCGAGUGAGGUCU CACUGAAA | 18643 |
| 4867 | GCUUCCCA G CUCUGACC | 7935 | GGUCAGAG GCCGAAAGGCGAGUGAGGUCU UGGGAAGC | 18644 |
| 4891 | AUUUGAGG G CCCAGCCA | 7937 | UGGCUGGG GCCGAAAGGCGAGUGAGGUCU CCUCAAAU | 18645 |
| 4896 | AGGGCCCA G CCAGGAGC | 7938 | GCUCCUGG GCCGAAAGGCGAGUGAGGUCU UGGGCCCU | 18646 |
| 4903 | AGCCAGGA G CAGAUGGA | 7939 | UCCAUCUG GCCGAAAGGCGAGUGAGGUCU UCCUGGCU | 18647 |
| 4914 | GAUGGACA G CGAUGAGG | 7942 | CCUCAUCG GCCGAAAGGCGAGUGAGGUCU UGUCCAUC | 18648 |
| 4946 | UCUGGGAG G CAAGAAAA | 7946 | UUUUCUUG GCCGAAAGGCGAGUGAGGUCU CUCCCAGA | 18649 |
| 4981 | GAACUAAA G CAAAUUUU | 7950 | AAAAUUUG GCCGAAAGGCGAGUGAGGUCU UUUAGUUC | 18650 |
| 5008 | CUAUGGAA G UGGUUCUA | 7953 | UAGAACCA GCCGAAAGGCGAGUGAGGUCU UUCCAUAG | 18651 |
| 5011 | UGGAAGUG G UUCUAUGU | 7954 | ACAUAGAA GCCGAAAGGCGAGUGAGGUCU CACUUCCA | 18652 |
| 5018 | GGUUCUAU G UCCAUUCU | 7955 | AGAAUGGA GCCGAAAGGCGAGUGAGGUCU AUAGAACC | 18653 |
| 5032 | UCUCAUUC G UGGCAUGU | 7956 | ACAUGCCA GCCGAAAGGCGAGUGAGGUCU GAAUGAGA | 18654 |
| 5035 | CAUUCGUG G CAUGUUUU | 7957 | AAAACAUG GCCGAAAGGCGAGUGAGGUCU CACGAAUG | 18655 |
| 5039 | CGUGGCAU G UUUUGAUU | 7958 | AAUCAAAA GCCGAAAGGCGAGUGAGGUCU AUGCCACG | 18656 |
| 5049 | UUUGAUUU G UAGCACUG | 7960 | CAGUGCUA GCCGAAAGGCGAGUGAGGUCU AAAUCAAA | 18657 |
| 5052 | GAUUUGUA G CACUGAGG | 7961 | CCUCAGUG GCCGAAAGGCGAGUGAGGUCU UACAAAUC | 18658 |
| 5061 | CACUGAGG G UGGCACUC | 7962 | GAGUGCCA GCCGAAAGGCGAGUGAGGUCU CCUCAGUG | 18659 |
| 5064 | UGAGGGUG G CACUCAAC | 7963 | GUUGAGUG GCCGAAAGGCGAGUGAGGUCU CACCCUCA | 18660 |
| 5078 | AACUCUGA G CCCAUACU | 7965 | AGUAUGGG GCCGAAAGGCGAGUGAGGUCU UCAGAGUU | 18661 |
| 5091 | UACUUUUG G CUCCUCUA | 7966 | UAGAGGAG GCCGAAAGGCGAGUGAGGUCU CAAAAGUA | 18662 |
| 5100 | CUCCUCUA G UAAGAUGC | 7967 | GCAUCUUA GCCGAAAGGCGAGUGAGGUCU UAGAGGAG | 18663 |
| 5107 | AGUAAGAU G CACUGAAA | 7969 | UUUCAGUG GCCGAAAGGCGAGUGAGGUCU AUCUUACU | 18664 |
| 5121 | AAAACUUA G CCAGAGUU | 7971 | AACUCUGG GCCGAAAGGCGAGUGAGGUCU UAAGUUUU | 18665 |
| 5127 | UAGCCAGA G UUAGGUUG | 7972 | CAACCUAA GCCGAAAGGCGAGUGAGGUCU UCUGGCUA | 18666 |
| 5132 | AGAGUUAG G UUGUCUCC | 7973 | GGAGACAA GCCGAAAGGCGAGUGAGGUCU CUAACUCU | 18667 |
| 5135 | GUUAGGUU G UCUCCAGG | 7974 | CCUGGAGA GCCGAAAGGCGAGUGAGGUCU AACCUAAC | 18668 |
| 5143 | GUCUCCAG G CCAUGAUG | 7975 | CAUCAUGG GCCGAAAGGCGAGUGAGGUCU CUGGAGAC | 18669 |
| 5152 | CCAUGAUG G CCUUACAC | 7977 | GUGUAAGG GCCGAAAGGCGAGUGAGGUCU CAUCAUGG | 18670 |
| 5168 | CUGAAAAU G UCACAUUC | 7979 | GAAUGUGA GCCGAAAGGCGAGUGAGGUCU AUUUUCAG | 18671 |
| 5185 | UAUUUUGG G UAUUAAUA | 7980 | UAUUAAUA GCCGAAAGGCGAGUGAGGUCU CCAAAAUA | 18672 |
| 5198 | AAUAUAUA G UCCAGACA | 7982 | UGUCUGGA GCCGAAAGGCGAGUGAGGUCU UAUAUAUU | 18673 |
| 5224 | AUUUCUUG G UAUUAUUC | 7986 | GAAUAAUA GCCGAAAGGCGAGUGAGGUCU CAAGAAAU | 18674 |
| 5234 | AUUAUUCU G UUUUGCAC | 7987 | GUGCAAAA GCCGAAAGGCGAGUGAGGUCU AGAAUAAU | 18675 |
| 5239 | UCUGUUUU G CACAGUUA | 7988 | UAACUGUG GCCGAAAGGCGAGUGAGGUCU AAAACAGA | 18676 |
| 5244 | UUUGCACA G UUAGUUGU | 7989 | ACAACUAA GCCGAAAGGCGAGUGAGGUCU UGUGCAAA | 18677 |
| 5248 | CACAGUUA G UUGUGAAA | 7990 | UUUCACAA GCCGAAAGGCGAGUGAGGUCU UAACUGUG | 18678 |
| 5251 | AGUUAGUU G UGAAAGAA | 7991 | UUCUUUCA GCCGAAAGGCGAGUGAGGUCU AACUAACU | 18679 |
| 5261 | GAAAGAAA G CUGAGAAG | 7992 | CUUCUCAG GCCGAAAGGCGAGUGAGGUCU UUUCUUUC | 18680 |
| 5279 | AUGAAAAU G CAGUCCUG | 7995 | CAGGACUG GCCGAAAGGCGAGUGAGGUCU AUUUUCAU | 18681 |
| 5282 | AAAAUGCA G UCCUGAGG | 7996 | CCUCAGGA GCCGAAAGGCGAGUGAGGUCU UGCAUUUU | 18682 |
| 5294 | UGAGGAGA G UUUUCUCC | 7997 | GGAGAAAA GCCGAAAGGCGAGUGAGGUCU UCUCCUCA | 18683 |
| 5317 | AAACGAGG G CUGAUGGA | 7999 | UCCAUCAG GCCGAAAGGCGAGUGAGGUCU CCUCGUUU | 18684 |
| 5334 | GGAAAAAG G UCAAUAAG | 8001 | CUUAUUGA GCCGAAAGGCGAGUGAGGUCU CUUUUUCC | 18685 |
| 5343 | UCAAUAAG G UCAAGGGA | 8003 | UCCCUUGA GCCGAAAGGCGAGUGAGGUCU CUUAUUGA | 18686 |
| 5359 | AAGACCCC G UCUCUAUA | 8005 | UAUAGAGA GCCGAAAGGCGAGUGAGGUCU GGGGUCUU | 18687 |
| 5393 | CCAACACA G UUGGGACC | 8010 | GGUCCCAA GCCGAAAGGCGAGUGAGGUCU UGUGUUGG | 18688 |
| 5415 | CACAGGAA G UCAGUCAC | 8013 | GUGACUGA GCCGAAAGGCGAGUGAGGUCU UUCCUGUG | 18689 |
| 5419 | GGAAGUCA G UCACGUUU | 8014 | AAACGUGA GCCGAAAGGCGAGUGAGGUCU UGACUUCC | 18690 |
| 5424 | UCAGUCAC G UUUCCUUU | 8015 | AAAGGAAA GCCGAAAGGCGAGUGAGGUCU GUGACUGA | 18691 |
| 5477 | GAAAGGAU G UGGAAGAG | 8020 | CUCUUCCA GCCGAAAGGCGAGUGAGGUCU AUCCUUUC | 18692 |
| 5485 | GUGGAAGA G CAUUAGCU | 8021 | AGCUAAUG GCCGAAAGGCGAGUGAGGUCU UCUUCCAC | 18693 |
| 5491 | GAGCAUUA G CUGGCGCA | 8022 | UGCGCCAG GCCGAAAGGCGAGUGAGGUCU UAAUGCUC | 18694 |
| 5495 | AUUAGCUG G CGCAUAUU | 8023 | AAUAUGCG GCCGAAAGGCGAGUGAGGUCU CAGCUAAU | 18695 |
| 5497 | UAGCUGGC G CAUAUUAA | 8024 | UUAAUAUG GCCGAAAGGCGAGUGAGGUCU GCCAGCUA | 18696 |
| 5506 | CAUAUUAA G CACUUUAA | 8025 | UUAAAGUG GCCGAAAGGCGAGUGAGGUCU UUAAUAUG | 18697 |
| 5515 | CACUUUAA G CUCCUUGA | 8026 | UCAAGGAG GCCGAAAGGCGAGUGAGGUCU UUAAAGUG | 18698 |
| 5524 | CUCCUUGA G UAAAAAGG | 8027 | CCUUUUUA GCCGAAAGGCGAGUGAGGUCU UCAAGGAG | 18699 |
| 5532 | GUAAAAAG G UGGUAUGU | 8028 | ACAUACCA GCCGAAAGGCGAGUGAGGUCU CUUUUUAC | 18700 |
| 5535 | AAAAGGUG G UAUGUAAU | 8029 | AUUACAUA GCCGAAAGGCGAGUGAGGUCU CACCUUUU | 18701 |
| 5539 | GGUGGUAU G UAAUUUAU | 8030 | AUAAAUUA GCCGAAAGGCGAGUGAGGUCU AUACCACC | 18702 |
| 5548 | UAAUUUAU G CAAGGUAU | 8032 | AUACCUUG GCCGAAAGGCGAGUGAGGUCU AUAAAUUA | 18703 |
| 5553 | UAUGCAAG G UAUUUCUC | 8033 | GAGAAAUA GCCGAAAGGCGAGUGAGGUCU CUUGCAUA | 18704 |
| 5564 | UUUCUCCA G UUGGGACU | 8034 | AGUCCCAA GCCGAAAGGCGAGUGAGGUCU UGGAGAAA | 18705 |
| 5583 | GGAUAUUA G UUAAUGAG | 8037 | CUCAUUAA GCCGAAAGGCGAGUGAGGUCU UAAUAUCC | 18706 |
| 5591 | GUUAAUGA G CCAUCACU | 8039 | AGUGAUGG GCCGAAAGGCGAGUGAGGUCU UCAUUAAC | 18707 |
| 5609 | GAAGAAAA G CCCAUUUU | 8040 | AAAAUGGG GCCGAAAGGCGAGUGAGGUCU UUUUCUUC | 18708 |
| 5623 | UUUCAACU G CUUUGAAA | 8042 | UUUCAAAG GCCGAAAGGCGAGUGAGGUCU AGUUGAAA | 18709 |
| 5635 | UGAAACUU G CCUGGGGU | 8044 | ACCCCAGG GCCGAAAGGCGAGUGAGGUCU AAGUUUCA | 18710 |
| 5642 | UGCCUGGG G UCUGAGCA | 8045 | UGCUCAGA GCCGAAAGGCGAGUGAGGUCU CCCAGGCA | 18711 |
| 5648 | GGGUCUGA G CAUGAUGG | 8046 | CCAUCAUG GCCGAAAGGCGAGUGAGGUCU UCAGACCC | 18712 |
| 5672 | GAGACAGG G UAGGAAAG | 8050 | CUUUCCUA GCCGAAAGGCGAGUGAGGUCU CCUGUCUC | 18713 |
| 5682 | AGGAAAGG G CGCCUACU | 8051 | AGUAGGCG GCCGAAAGGCGAGUGAGGUCU CCUUUCCU | 18714 |
| 5684 | GAAAGGGC G CCUACUCU | 8052 | AGAGUAGG GCCGAAAGGCGAGUGAGGUCU GCCCUUUC | 18715 |
| 5698 | UCUUCAGG G UCUAAAGA | 8053 | UCUUUAGA GCCGAAAGGCGAGUGAGGUCU CCUGAAGA | 18716 |
| 5711 | AAGAUCAA G UGGGCCUU | 8055 | AAGGCCCA GCCGAAAGGCGAGUGAGGUCU UUGAUCUU | 18717 |
| 5715 | UCAAGUGG G CCUUGGAU | 8056 | AUCCAAGG GCCGAAAGGCGAGUGAGGUCU CCACUUGA | 18718 |
| 5725 | CUUGGAUC G CUAAGCUG | 8058 | CAGCUUAG GCCGAAAGGCGAGUGAGGUCU GAUCCAAG | 18719 |
| 5730 | AUCGCUAA G CUGGCUCU | 8059 | AGAGCCAG GCCGAAAGGCGAGUGAGGUCU UUAGCGAU | 18720 |
| 5734 | CUAAGCUG G CUCUGUUU | 8060 | AAACAGAG GCCGAAAGGCGAGUGAGGUCU CAGCUUAG | 18721 |
| 5739 | CUGGCUCU G UUUGAUGC | 8061 | GCAUCAAA GCCGAAAGGCGAGUGAGGUCU AGAGCCAG | 18722 |
| 5746 | UGUUUGAU G CUAUUUAU | 8063 | AUAAAUAG GCCGAAAGGCGAGUGAGGUCU AUCAAACA | 18723 |
| 5755 | CUAUUUAU G CAAGUUAG | 8064 | CUAACUUG GCCGAAAGGCGAGUGAGGUCU AUAAAUAG | 18724 |
| 5759 | UUAUGCAA G UUAGGGUC | 8065 | GACCCUAA GCCGAAAGGCGAGUGAGGUCU UUGCAUAA | 18725 |
| 5765 | AAGUUAGG G UCUAUGUA | 8066 | UACAUAGA GCCGAAAGGCGAGUGAGGUCU CCUAACUU | 18726 |
| 5771 | GGGUCUAU G UAUUUAGG | 8067 | CCUAAAUA GCCGAAAGGCGAGUGAGGUCU AUAGACCC | 18727 |
| 5782 | UUUAGGAU G CGCCUACU | 8069 | AGUAGGCG GCCGAAAGGCGAGUGAGGUCU AUCCUAAA | 18728 |
| 5784 | UAGGAUGC G CCUACUCU | 8070 | AGAGUAGG GCCGAAAGGCGAGUGAGGUCU GCAUCCUA | 18729 |
| 5798 | UCUUCAGG G UCUAAAGA | 8053 | UCUUUAGA GCCGAAAGGCGAGUGAGGUCU CCUGAAGA | 18716 |
| 5811 | AAGAUCAA G UGGGCCUU | 8055 | AAGGCCCA GCCGAAAGGCGAGUGAGGUCU UUGAUCUU | 18717 |
| 5815 | UCAAGUGG G CCUUGGAU | 8056 | AUCCAAGG GCCGAAAGGCGAGUGAGGUCU CCACUUGA | 18718 |
| 5825 | CUUGGAUC G CUAAGCUG | 8058 | CAGCUUAG GCCGAAAGGCGAGUGAGGUCU GAUCCAAG | 18719 |
| 5830 | AUCGCUAA G CUGGCUCU | 8059 | AGAGCCAG GCCGAAAGGCGAGUGAGGUCU UUAGCGAU | 18720 |
| 5834 | CUAAGCUG G CUCUGUUU | 8060 | AAACAGAG GCCGAAAGGCGAGUGAGGUCU CAGCUUAG | 18721 |
| 5839 | CUGGCUCU G UUUGAUGC | 8061 | GCAUCAAA GCCGAAAGGCGAGUGAGGUCU AGAGCCAG | 18722 |
| 5846 | UGUUUGAU G CUAUUUAU | 8063 | AUAAAUAG GCCGAAAGGCGAGUGAGGUCU AUCAAACA | 18723 |
| 5855 | CUAUUUAU G CAAGUUAG | 8064 | CUAACUUG GCCGAAAGGCGAGUGAGGUCU AUAAAUAG | 18724 |
| 5859 | UUAUGCAA G UUAGGGUC | 8065 | GACCCUAA GCCGAAAGGCGAGUGAGGUCU UUGCAUAA | 18725 |
| 5865 | AAGUUAGG G UCUAUGUA | 8066 | UACAUAGA GCCGAAAGGCGAGUGAGGUCU CCUAACUU | 18726 |
| 5871 | GGGUCUAU G UAUUUAGG | 8067 | CCUAAAUA GCCGAAAGGCGAGUGAGGUCU AUAGACCC | 18727 |
| 5882 | UUUAGGAU G UCUGCACC | 8072 | GGUGCAGA GCCGAAAGGCGAGUGAGGUCU AUCCUAAA | 18730 |
| 5886 | GGAUGUCU G CACCUUCU | 8073 | AGAAGGUG GCCGAAAGGCGACUGAGGUCU AGACAUCC | 18731 |
| 5895 | CACCUUCU G CAGCCAGU | 8074 | ACUGGCUG GCCGAAAGGCGAGUGAGGUCU AGAAGGUG | 18732 |
| 5898 | CUUCUGCA G CCAGUCAG | 8075 | CUGACUGG GCCGAAAGGCGAGUGAGGUCU UGCAGAAG | 18733 |
| 5902 | UGCAGCCA G UCAGAAGC | 8076 | GCUUCUGA GCCGAAAGGCGAGUGAGGUCU UGGCUGCA | 18734 |
| 5909 | AGUCAGAA G CUGGAGAG | 8077 | CUCUCCAG GCCGAAAGGCGAGUGAGGUCU UUCUGACU | 18735 |
| 5918 | CUGGAGAG G CAACAGUG | 8078 | CACUGUUG GCCGAAAGGCGAGUGAGGUCU CUCUCCAG | 18736 |
| 5924 | AGGCAACA G UGGAUUGC | 8080 | GCAAUCCA GCCGAAAGGCGAGUGAGGUCU UGUUGCCU | 18737 |
| 5931 | AGUGGAUU G CUGCUUCU | 8082 | AGAAGCAG GCCGAAAGGCGAGUGAGGUCU AAUCCACU | 18738 |
| 5934 | GGAUUGCU G CUUCUUGG | 8083 | CCAAGAAG GCCGAAAGGCGAGUGAGGUCU AGCAAUCC | 18739 |
| 5951 | GGAGAAGA G UAUGCUUC | 8084 | GAAGCAUA GCCGAAAGGCGAGUGAGGUCU UCUUCUCC | 18740 |
| 5955 | AAGAGUAU G CUUCCUUU | 8085 | AAAGGAAG GCCGAAAGGCGAGUGAGGUCU AUACUCUU | 18741 |
| 5971 | UUAUCCAU G UAAUUUAA | 8086 | UUAAAUUA GCCGAAAGGCGAGUGAGGUCU AUGGAUAA | 18742 |
| 5982 | AUUUAACU G UAGAACCU | 8089 | AGGUUCUA GCCGAAAGGCGAGUGAGGUCU AGUUAAAU | 18743 |
| 5993 | GAACCUGA G CUCUAAGU | 8091 | ACUUAGAG GCCGAAAGGCGAGUGAGGUCU UCAGGUUC | 18744 |
| 6000 | AGCUCUAA G UAACCGAA | 8092 | UUCGGUUA GCCGAAAGGCGAGUGAGGUCU UUAGAGCU | 18745 |
| 6013 | CGAAGAAU G UAUGCCUC | 8095 | GAGGCAUA GCCGAAAGGCGAGUGAGGUCU AUUCUUCG | 18746 |
| 6017 | GAAUGUAU G CCUCUGUU | 8096 | AACAGAGG GCCGAAAGGCGAGUGAGGUCU AUACAUUC | 18747 |
| 6023 | AUGCCUCU G UUCUUAUG | 8097 | CAUAAGAA GCCGAAAGGCGAGUGAGGUCU AGAGGCAU | 18748 |
| 6031 | GUUCUUAU G UGCCACAU | 8098 | AUGUGGCA GCCGAAAGGCGAGUGAGGUCU AUAAGAAC | 18749 |
| 6033 | UCUUAUGU G CCACAUCC | 8099 | GGAUGUGG GCCGAAAGGCGAGUGAGGUCU ACAUAAGA | 18750 |
| 6044 | ACAUCCUU G UUUAAAGG | 8100 | CCUUUAAA GCCGAAAGGCGAGUGAGGUCU AAGGAUGU | 18751 |
| 6052 | GUUUAAAG G CUCUCUGU | 8101 | ACAGAGAG GCCGAAAGGCGAGUGAGGUCU CUUUAAAC | 18752 |
| 6059 | GGCUCUCU G UAUGAAGA | 8102 | UCUUCAUA GCCGAAAGGCGAGUGAGGUCU AGAGAGCC | 18753 |
| 6077 | AUGGGACC G UCAUCAGC | 8105 | GCUGAUGA GCCGAAAGGCGAGUGAGGUCU GGUCCCAU | 18754 |
| 6084 | CGUCAUCA G CACAUUCC | 8106 | GGAAUGUG GCCGAAAGGCGAGUGAGGUCU UGAUGACG | 18755 |
| 6096 | AUUCCCUA G UGAGCCUA | 8107 | UAGGCUCA GCCGAAAGGCGAGUGAGGUCU UAGGGAAU | 18756 |
| 6100 | CCUAGUGA G CCUACUGG | 8108 | CCAGUAGG GCCGAAAGGCGAGUGAGGUCU UCACUAGG | 18757 |
| 6108 | GCCUACUG G CUCCUGGC | 8109 | GCCAGGAG GCCGAAAGGCGAGUGAGGUCU CAGUAGGC | 18758 |
| 6115 | GGCUCCUG G CAGCGGCU | 8110 | AGCCGCUG GCCGAAAGGCGAGUGAGGUCU CAGGAGCC | 18759 |
| 6118 | UCCUGGCA G CGGCUUUU | 8111 | AAAAGCCG GCCGAAAGGCGAGUGAGGUCU UGCCAGGA | 18760 |
| 6121 | UGGCAGCG G CUUUUGUG | 8112 | CACAAAAG GCCGAAAGGCGAGUGAGGUCU CGCUGCCA | 18761 |
| 6127 | CGGCUUUU G UGGAAGAC | 8113 | GUCUUCCA GCCGAAAGGCGAGUGAGGUCU AAAAGCCG | 18762 |
| 6142 | ACUCACUA G CCAGAAGA | 8115 | UCUUCUGG GCCGAAAGGCGAGUGAGGUCU UAGUGAGU | 18763 |
| 6156 | AGAGAGGA G UGGGACAG | 8116 | CUGUCCCA GCCGAAAGGCGAGUGAGGUCU UCCUCUCU | 18764 |
| 6164 | GUGGGACA G UCCUCUCC | 8118 | GGAGAGGA GCCGAAAGGCGAGUGAGGUCU UGUCCCAC | 18765 |
| 6197 | AAACAAAA G CAGGCUAG | 8122 | CUAGCCUG GCCGAAAGGCGAGUGAGGUCU UUUUGUUU | 18766 |
| 6201 | AAAAGCAG G CUAGAGCC | 8123 | GGCUCUAG GCCGAAAGGCGAGUGAGGUCU CUGCUUUU | 18767 |
| 6207 | AGGCUAGA G CCAGAAGA | 8124 | UCUUCUGG GCCGAAAGGCGAGUGAGGUCU UCUAGCCU | 18768 |
| 6230 | AAAUCUUU G UUGUUCCU | 8127 | AGGAACAA GCCGAAAGGCGAGUGAGGUCU AAAGAUUU | 18769 |
| 6233 | UCUUUGUU G UUCCUCUU | 8128 | AAGAGGAA GCCGAAAGGCGAGUGAGGUCU AACAAAGA | 18770 |
| 6254 | ACACAUAC G CAAACCAC | 8129 | GUGGUUUG GCCGAAAGGCGAGUGAGGUCU GUAUGUGU | 18771 |
| 6265 | AACCACCU G UGACAGCU | 8131 | AGCUGUCA GCCGAAAGGCGAGUGAGGUCU AGGUGGUU | 18772 |
| 6271 | CUGUGACA G CUGGCAAU | 8133 | AUUGCCAG GCCGAAAGGCGAGUGAGGUCU UGUCACAG | 18773 |
| 6275 | GACAGCUG G CAAUUUUA | 8134 | UAAAAUUG GCCGAAAGGCGAGUGAGGUCU CAGCUGUC | 18774 |
| 6292 | UAAAUCAG G UAACUGGA | 8137 | UCCAGUUA GCCGAAAGGCGAGUGAGGUCU CUGAUUUA | 18775 |
| 6306 | GGAAGGAG G UUAAACUC | 8139 | GAGUUUAA GCCGAAAGGCGAGUGAGGUCU CUCCUUCC | 18776 |
| 6333 | AGACCUCA G UCAAUUCU | 8142 | AGAAUUGA GCCGAAAGGCGAGUGAGGUCU UGAGGUCU | 18777 |
| 6377 | AGAUAAUA G CCCAGCAA | 8147 | UUGCUGGG GCCGAAAGGCGAGUGAGGUCU UAUUAUCU | 18778 |
| 6382 | AUAGCCCA G CAAAUAGU | 8148 | ACUAUUUG GCCGAAAGGCGAGUGAGGUCU UGGGCUAU | 18779 |
| 6389 | AGCAAAUA G UGAUAACA | 8150 | UGUUAUCA GCCGAAAGGCGAGUGAGGUCU UAUUUGCU | 18780 |
| 6410 | AAACCUUA G CUGUUCAU | 8155 | AUGAACAG GCCGAAAGGCGAGUGAGGUCU UAAGGUUU | 18781 |
| 6413 | CCUUAGCU G UUCAUGUC | 8156 | GACAUGAA GCCGAAAGGCGAGUGAGGUCU AGCUAAGG | 18782 |
| 6419 | CUGUUCAU G UCUUGAUU | 8157 | AAUCAAGA GCCGAAAGGCGAGUGAGGUCU AUGAACAG | 18783 |
| 6487 | AGAGAAAA G CAAAACCA | 8166 | UGGUUUUG GCCGAAAGGCGAGUGAGGUCU UUUUCUCU | 18784 |
| 6504 | UUAGAAUU G UUACUCAG | 8169 | CUGAGUAA GCCGAAAGGCGAGUGAGGUCU AAUUCUAA | 18785 |
| 6512 | GUUACUCA G CUCCUUCA | 8170 | UGAAGGAG GCCGAAAGGCGAGUGAGGUCU UGAGUAAC | 18786 |
| 6528 | AAACUCAG G UUUGUAGC | 8172 | GCUACAAA GCCGAAAGGCGAGUGAGGUCU CUGAGUUU | 18787 |
| 6532 | UCAGGUUU G UAGCAUAC | 8173 | GUAUGCUA GCCGAAAGGCGAGUGAGGUCU AAACCUGA | 18788 |
| 6535 | GGUUUGUA G CAUACAUG | 8174 | CAUGUAUG GCCGAAAGGCGAGUGAGGUCU UACAAACC | 18789 |
| 6545 | AUACAUGA G UCCAUCCA | 8175 | UGGAUGGA GCCGAAAGGCGAGUGAGGUCU UCAUGUAU | 18790 |
| 6557 | AUCCAUCA G UCAAAGAA | 8176 | UUCUUUGA GCCGAAAGGCGAGUGAGGUCU UGAUGGAU | 18791 |
| 6568 | AAAGAAUG G UUCCAUCU | 8178 | AGAUGGAA GCCGAAAGGCGAGUGAGGUCU CAUUCUUU | 18792 |
| 6580 | CAUCUGGA G UCUUAAUG | 8179 | CAUUAAGA GCCGAAAGGCGAGUGAGGUCU UCCAGAUG | 18793 |
| 6588 | GUCUUAAU G UAGAAAGA | 8181 | UCUUUCUA GCCGAAAGGCGAGUGAGGUCU AUUAAGAC | 18794 |
| 6610 | GGAGACUU G UAAUAAUG | 8184 | CAUUAUUA GCCGAAAGGCGAGUGAGGUCU AAGUCUCC | 18795 |
| 6620 | AAUAAUGA G CUAGUCAC | 8187 | GUAACUAG GCCGAAAGGCGAGUGAGGUCU UCAUUAUU | 18796 |
| 6624 | AUGAGCUA G UUACAAAG | 8188 | CUUUGUAA GCCGAAAGGCGAGUGAGGUCU UAGCUCAU | 18797 |
| 6632 | GUUACAAA G UGCUUGUU | 8189 | AACAAGCA GCCGAAAGGCGAGUGAGGUCU UUUGUAAC | 18798 |
| 6634 | UACAAAGU G CUUGUUCA | 8190 | UGAACAAG GCCGAAAGGCGAGUGAGGUCU ACUUUGUA | 18799 |
| 6638 | AAGUGCUU G UUCAUUAA | 8191 | UUAAUGAA GCCGAAAGGCGAGUGAGGUCU AAGCACUU | 18800 |
| 6651 | UUAAAAUA G CACUGAAA | 8193 | UUUCAGUG GCCGAAAGGCGAGUGAGGUCU UAUUUUAA | 18801 |
| 6698 | AAUCAUUU G CCAUUUAU | 8201 | AUAAAUGG GCCGAAAGGCGAGUGAGGUCU AAAUGAUU | 18802 |
| 6717 | CAAAAAUG G UUGGCACU | 8204 | AGUGCCAA GCCGAAAGGCGAGUGAGGUCU CAUCUUUG | 18803 |
| 6721 | AAUGGUUG G CACUAACA | 8205 | UGUUAGUG GCCGAAAGGCGAGUGAGGUCU CAACCAUU | 18804 |
| 6738 | AAGAACGA G CACUUCCU | 8208 | AGGAAGUG GCCGAAAGGCGAGUGAGGUCU UCGUUCUU | 18805 |
| 6753 | CUUUCAGA G UCUCUGAG | 8209 | CUCAGAAA GCCGAAAGCCGAGUGAGGUCU UCUGAAAG | 18806 |
| 6767 | GAGAUAAU G UACGUGGA | 8212 | UCCACGUA GCCGAAAGGCGAGUGAGGUCU AUUAUCUC | 18807 |
| 6771 | UAAUGUAC G UGGAACAG | 8213 | CUGUUCCA GCCGAAAGGCGAGUGAGGUCU GUACAUUA | 18808 |
| 6779 | GUGGAACA G UCUGGGUG | 8215 | CACCCAGA GCCGAAAGGCGAGUGAGGUCU UGUUCCAC | 18809 |
| 6785 | CAGUCUGG G UGGAAUGG | 8216 | CCAUUCCA GCCGAAAGGCGAGUGAGGUCU CCAGACUG | 18810 |
| 6795 | GGAAUGGG G CUGAAACC | 8218 | GGUUUCAG GCCGAAAGGCGAGUGAGGUCU CCCAUUCC | 18811 |
| 6806 | GAAACCAU G UGCAAGUC | 8220 | GACUUGCA GCCGAAAGGCGAGUGAGGUCU AUGGUUUC | 18812 |
| 6808 | AACCAUGU G CAAGUCUG | 8221 | CAGACUUG GCCGAAAGGCGAGUGAGGUCU ACAUGGUU | 18813 |
| 6812 | AUGUGCAA G UCUGUGUC | 8222 | GACACAGA GCCGAAAGGCGAGUGAGGUCU UUGCACAU | 18814 |
| 6816 | GCAAGUCU G UGUCUUGU | 8223 | ACAAGACA GCCGAAAGGCGAGUGAGGUCU AGACUUGC | 18815 |
| 6818 | AAGUCUGU G UCUUGUCA | 8224 | UGACAAGA GCCGAAAGGCGAGUGAGGUCU ACAGACUU | 18816 |
| 6823 | UGUGUCUU G UCAGUCCA | 8225 | UGGACUGA GCCGAAAGGCGAGUGAGGUCU AAGACACA | 18817 |
| 6827 | UCUUGUCA G UCCAAGAA | 8226 | UUCUUGGA GCCGAAAGGCGAGUGAGGUCU UGACAAGA | 18818 |
| 6836 | UCCAAGAA G UGACACCG | 8227 | CGGUGUCA GCCGAAAGGCGAGUGAGGUCU UUCUUGGA | 18819 |
| 6849 | ACCGAGAU G UUAAUUUU | 8230 | AAAAUUAA GCCGAAAGGCGAGUGAGGUCU AUCUCGGU | 18820 |
| 6866 | AGGGACCC G UGCCUUGU | 8233 | ACAAGGCA GCCGAAAGGCGAGUGAGGUCU GGGUCCCU | 18821 |
| 6868 | GGACCCGU G CCUUGUUU | 8234 | AAACAAGG GCCGAAAGGCGAGUGAGGUCU ACGGGUCC | 18822 |
| 6873 | CGUGCCUU G UUUCCUAG | 8235 | CUAGGAAA GCCGAAAGGCGAGUGAGGUCU AAGGCACG | 18823 |
| 6881 | GUUUCCUA G CCCACAAG | 8236 | CUUGUGGG GCCGAAAGGCGAGUGAGGUCU UAGGAAAC | 18824 |
| 6893 | ACAAGAAU G CAAACAUC | 8238 | GAUGUUUG GCCGAAAGGCGAGUGAGGUCU AUUCUUGU | 18825 |
| 6914 | AGAUACUC G CUAGCCUC | 8242 | GAGGCUAG GCCGAAAGGCGAGUGAGGUCU CAGUAUCU | 18826 |
| 6918 | ACUCGCUA G CCUCAUUU | 8243 | AAAUGAGG GCCGAAAGGCGAGUGAGGUCU UAGCGAGU | 18827 |
| 6945 | AAGGAGGA G UGCAUCUU | 8246 | AAGAUGCA GCCGAAAGGCGAGUGAGGUCU UCCUCCUU | 18828 |
| 6947 | GGAGGAGU G CAUCUUUG | 8247 | CAAAGAUG GCCGAAAGGCGAGUGAGGUCU ACUCCUCC | 18829 |
| 6956 | CAUCUUUG G CCGACAGU | 8248 | ACUGUCGG GCCGAAAGGCGAGUGAGGUCU CAAAGAUG | 18830 |
| 6963 | GGCCGACA G UGGUGUAA | 8250 | UUACACCA GCCGAAAGGCGAGUGAGGUCU UGUCGGCC | 18831 |
| 6966 | CGACAGUG G UGUAACUG | 8251 | CAGUUACA GCCGAAAGGCGAGUGAGGUCU CACUGUCG | 18832 |
| 6968 | ACAGUGGU G UAACUGUG | 8252 | CACAGUUA GCCGAAAGGCGAGUGAGGUCU ACCACUGU | 18833 |
| 6974 | GUGUAACU G UGUGUGUG | 8254 | CACACACA GCCGAAAGGCGAGUGAGGUCU AGUUACAC | 18834 |
| 6976 | GUAACUGU G UGUGUGUG | 8255 | CACACACA GCCGAAAGGCGAGUGAGGUCU ACAGUUAC | 18835 |
| 6978 | AACUGUGU G UGUGUGUG | 8256 | CACACACA GCCGAAAGGCGAGUGAGGUCU ACACAGUU | 18836 |
| 6980 | CUGUGUGU G UGUGUGUG | 8257 | CACACACA GCCGAAAGGCGAGUGAGGUCU ACACACAG | 18837 |
| 6982 | GUGUGUGU G UGUGUGUG | 8258 | CACACACA GCCGAAAGGCGAGUGAGGUCU ACACACAC | 18838 |
| 6984 | GUGUGUGU G UGUGUGUG | 8258 | CACACACA GCCGAAAGGCGAGUGAGGUCU ACACACAC | 18838 |
| 6986 | GUGUGUGU G UGUCUGUG | 8258 | CACACACA GCCGAAAGGCGAGUGAGGUCU ACACACAC | 18838 |
| 6988 | GUGUGUGU G UGUGUGUG | 8258 | CACACACA GCCGAAAGGCGAGUGAGGUCU ACACACAC | 18838 |
| 6990 | GUGUGUGU G UGUGUGUG | 8258 | CACACACA GCCGAAAGGCGAGUGAGGUCU ACACACAC | 18838 |
| 6992 | GUGUGUGU G UGUGUGUG | 8258 | CACACACA GCCGAAAGGCGAGUGAGGUCU ACACACAC | 18838 |
| 6994 | GUGUGUGU G UGUGUGUG | 8258 | CACACACA GCCGAAAGGCGAGUGAGGUCU ACACACAC | 18838 |
| 6996 | GUGUGUGU G UGUGUGUG | 8258 | CACACACA GCCGAAAGGCGAGUGAGGUCU ACACACAC | 18838 |
| 6998 | GUGUGUGU G UGUGUGUG | 8258 | CACACACA GCCGAAAGGCGAGUGAGGUCU ACACACAC | 18838 |
| 7000 | GUCUGUGU G UGUGUGUC | 8258 | CACACACA GCCGAAAGGCGAGUGAGGUCU ACACACAC | 18838 |
| 7002 | GUGUGUGU G UGUGUGUG | 8258 | CACACACA GCCGAAAGGCGAGUGAGGUCU ACACACAC | 18838 |
| 7004 | GUGUGUGU G UGUCUGUG | 8258 | CACACACA GCCGAAAGGCGAGUGAGCUCU ACACACAC | 18838 |
| 7006 | GUGUGUGU G UGUCUGUG | 8258 | CACACACA GCCGAAAGGCGAGUGAGGUCU ACACACAC | 18838 |
| 7008 | GUGUGUGU G UGUGUGGG | 8259 | CCCACACA GCCGAAAGGCGAGUGAGGUCU ACACACAC | 18839 |
| 7010 | GUGUGUGU G UGUGGGUG | 8260 | CACCCACA GCCGAAAGGCGAGUGAGGUCU ACACACAC | 18840 |
| 7012 | GUGUGUGU G UGGGUGUG | 8261 | CACACCCA GCCGAAAGGCGAGUGAGGUCU ACACACAC | 18841 |
| 7016 | GUGUGUGG G UGUGGGUG | 8262 | CACCCACA GCCGAAAGGCGAGUGAGGUCU CCACACAC | 18842 |
| 7018 | GUGUGGGU G UGGGUGUA | 8263 | UACACCCA GCCGAAAGGCGAGUGAGGUCU ACCCACAC | 18843 |
| 7022 | GGGUGUGG G UGUAUGUG | 8264 | CACAUACA GCCGAAAGGCGAGUGAGGUCU CCACACCC | 18844 |
| 7024 | GUGUGGGU G UAUGUGUG | 8265 | CACACAUA GCCGAAAGGCGAGUGAGGUCU ACCCACAC | 18845 |
| 7028 | GGGUGUAU G UGUGUUUU | 8266 | AAAACACA GCCGAAAGGCGAGUGAGGUCU AUACACCC | 18846 |
| 7030 | GUGUAUGU G UGUUUUGU | 8267 | ACAAAACA GCCGAAAGGCGAGUGAGGUCU ACAUACAC | 18847 |
| 7032 | GUAUGUGU G UUUUGUGC | 8268 | GCACAAAA GCCGAAAGGCGAGUGAGGUCU ACACAUAC | 18848 |
| 7037 | UGUGUUUU G UGCAUAAC | 8269 | GUUAUGCA GCCGAAAGGCGAGUGAGGUCU AAAACACA | 18849 |
| 7039 | UGUUUUGU G CAUAACUA | 8270 | UAGUUAUG GCCGAAAGGCGAGUGAGGUCU ACAAAACA | 18850 |
| 7071 | AUUUUAAA G UUACUUUU | 8274 | AAAAGUAA GCCGAAAGGCGAGUGAGGUCU UUUAAAAU | 18851 |
| 7099 | GAAUAUAU G CUACAGAU | 8277 | AUCUGUAG GCCGAAAGGCGAGUGAGGUCU AUAUAUUC | 18852 |
| 7122 | CAGACAUG G UUUGGUCC | 8281 | GGACCAAA GCCGAAAGGCGAGUGAGGUCU CAUGUCUG | 18853 |
| 7127 | AUGGUUUG G UCCUAUAU | 8282 | AUAUAGGA GCCGAAAGGCGAGUGAGGUCU CAAACCAU | 18854 |
| 7141 | UAUUUCUA G UCAUGAUG | 8283 | CAUCAUGA GCCGAAAGGCGAGUGAGGUCU UAGAAAUA | 18855 |
| 7153 | UGAUGAAU G UAUUUUGU | 8286 | ACAAAAUA GCCGAAAGGCGAGUGAGGUCU AUUCAUCA | 18856 |
| 7160 | UGUAUUUU G UAUACCAU | 8287 | AUGGUAUA GCCGAAAGGCGAGUGAGGUCU AAAAUACA | 18857 |
| 7210 | UGGGAUUU G UAAUCGUA | 8292 | UACGAUUA GCCGAAAGGCGAGUGAGGUCU AAAUCCCA | 18858 |
| 7216 | UUGUAAUC G UACCAACU | 8294 | AGUUGGUA GCCGAAAGGCGAGUGAGGUCU GAUUACAA | 18859 |
| 7240 | UAAACUUG G CAACUGCU | 8299 | AGCAGUUG GCCGAAAGGCGAGUGAGGUCU CAAGUUUA | 18860 |
| 7246 | UGGCAACU G CUUUUAUG | 8301 | CAUAAAAG GCCGAAAGGCGAGUGAGGUCU AGUUGCCA | 18861 |
| 7254 | GCUUUUAU G UUCUGUCU | 8302 | AGACAGAA GCCGAAAGGCGAGUGAGGUCU AUAAAAGC | 18862 |
| 7259 | UAUGUUCU G UCUCCUUC | 8303 | GAAGGAGA GCCGAAAGGCGAGUGAGGUCU AGAACAUA | 18863 |
| 7305 | AAGAAAAA G CUCUUUUU | 8308 | AAAAAGAG GCCGAAAGGCGAGUGAGGUCU UUUUUCUU | 18864 |
| 7343 | UUAUCCUU G UUUAGAGC | 8312 | GCUCUAAA GCCGAAAGGCGAGUGAGGUCU AAGGAUAA | 18865 |
| 7350 | UGUUUAGA G CAGAGAAA | 8313 | UUUCUCUG GCCGAAAGGCGAGUGAGGUCU UCUAAACA | 18866 |
| 7381 | UUGAAAUG G UCUCAAAA | 8317 | UUUUGAGA GCCGAAAGGCGAGUGAGGUCU CAUUUCAA | 18867 |
| 7394 | AAAAAAUU G CUAAAUAU | 8319 | AUAUUUAG GCCGAAAGGCGAGUGAGGUCU AAUUUUUU | 18868 |
| 7422 | AACUAAAU G UUAGUUUA | 8324 | UAAACUAA GCCGAAAGGCGAGUGAGGUCU AUUUAGUU | 18869 |
| 7426 | AAAUGUUA G UUUAGCUG | 8325 | CAGCUAAA GCCGAAAGGCGAGUGAGGUCU UAACAUUU | 18870 |
| 7431 | UUAGUUUA G CUGAUUGU | 8326 | ACAAUCAG GCCGAAAGGCGAGUGAGGUCU UAAACUAA | 18871 |
| 7438 | AGCUGAUU G UAUGGGGU | 8328 | ACCCCAUA GCCGAAAGGCGAGUGAGGUCU AAUCAGCU | 18872 |
| 7445 | UGUAUGGG G UUUUCGAA | 8329 | UUCGAAAA GCCGAAAGGCGAGUGAGGUCU CCCAUACA | 18873 |
| 7467 | CACUUUUU G UUUGUUUU | 8331 | AAAACAAA GCCGAAAGGCGAGUGAGGUCU AAAAAGUG | 18874 |
| 7471 | UUUUGUUU G UUUUACCU | 8332 | AGGUAAAA GCCGAAAGGCGAGUGAGGUGU AAACAAAA | 18875 |
| 7491 | UCACAACU G UGUAAAUU | 8334 | AAUUUACA GCCGAAAGGCGAGUGAGGUCU AGUUGUGA | 18876 |
| 7493 | ACAACUGU G UAAAUUGC | 8335 | GCAAUUUA GCCGAAAGGCGAGUGAGGUCU ACAGUUGU | 18877 |
| 7500 | UGUAAAUU G CCAAUAAU | 8337 | AUUAUUGG GCCGAAAGGCGAGUGAGGUCU AAUUUACA | 18878 |
| 7513 | UAAUUCCU G UCCAUGAA | 8340 | UUCAUGGA GCCGAAAGGCGAGUGAGGUCU AGGAAUUA | 18879 |
| 7525 | AUGAAAAU G CAAAUUAU | 8342 | AUAAUUUG GCCGAAAGGCGAGUGAGGUCU AUUUUCAU | 18880 |
| 7537 | AUUAUCCA G UGUAGAUA | 8344 | UAUCUACA GCCGAAAGGCGAGUGAGGUCU UGGAUAAU | 18881 |
| 7539 | UAUCCAGU G UAGAUAUA | 8345 | UAUAUCUA GCCGAAAGGCGAGUGAGGUCU ACUGGAUA | 18882 |
| 7573 | GGAUAUUG G CUAGUUUU | 8349 | AAAACUAG GCCGAAAGGCGAGUGAGGUCU CAAUAUCC | 18883 |
| 7577 | AUUGGCUA G UUUUGCCU | 8350 | AGGCAAAA GCCGAAAGGCGAGUGAGGUCU UAGCCAAU | 18884 |
| 7582 | CUAGUUUU G CCUUUAUU | 8351 | AAUAAAGG GCCGAAAGGCGAGUGAGGUCU AAAACUAG | 18885 |
| 7593 | UUUAUUAA G CAAAUUCA | 8352 | UGAAUUUG GCCGAAAGGCGAGUGAGGUCU UUAAUAAA | 18886 |
| 7607 | UCAUUUCA G CCUGAAUG | 8354 | CAUUCAGG GCCGAAAGGCGAGUGAGGUCU UGAAAUGA | 18887 |
| 7615 | GCCUGAAU G UCUGCCUA | 8356 | UAGGCAGA GCCGAAAGGCGAGUGAGGUCU AUUCAGGC | 18888 |
| 7619 | GAAUGUCU G CCUAUAUA | 8357 | UAUAUAGG GCCGAAAGGCGAGUGAGGUCU AGACAGUC | 18889 |
| 7634 | UAUUCUCU G CUCUUUGU | 8358 | ACAAAGAG GCCGAAAGGCGAGUGAGGUCU AGAGAAUA | 18890 |
| 7641 | UGCUCUUU G UAUUCUCC | 8359 | GGAGAAUA GCCGAAAGGCGAGUGAGGUCU AAAGAGCA | 18891 |
| 7659 | UUGAACCC G UUAAAACA | 8361 | UGUUUUAA GCCGAAAGGCGAGUGAGGUCU GGGUUCAA | 18892 |
| 7672 | AACAUCCU G UGGCACUC | 8363 | GAGUGCCA GCCGAAAGGCGAGUGAGGUCU AGGAUGUU | 18893 |

Input Sequence = HSFLT. Cut Site = G/Y
Arm Length = 8. Core Sequence = GCcgaaagGCGaGuCaaGGuCu
HSFLT (Human flt mRNA for receptor-related tyrosine kinase; Acc# X51602; 7680 bp)

[0359] TABLE XX
Patient Demographics

| Dose | | | | | | |
|---|---|---|---|---|---|---|
| cohort | | | | | | |
| (mg/m²) | Pt# | Age | Sex | Diagnosis | Status | Doses |
| 10 | 1001 | 49 | F | NSC Lung | PD | 29 |
| 10 | 1002 | 65 | F | liposarcoma | PD | 120 |
| 10 | 1003 | 49 | M | nasopharyngeal CA | WD | 109 |
| 30 | 1004* | | | | | |
| 30 | 1005 | 45 | F | melanoma (ocular) | PD | 113 |
| 30 | 1006 | 57 | M | colon | PD | 199 |
| 30 | 1007 | 39 | F | epitheliod | PD | 198 |
| | | | | hemangioendo- | | |
| | | | | thelioma | | |
| 100 | 1008 | 52 | M | adrenal ca | PD | 57 |
| 100 | 1009 | 44 | F | breast | PD | 35 |
| 100 | 1010 | 62 | F | renal | PD | 134 |
| 300 | 1011 | 24 | F | melanoma | PD | 31 |
| 300 | 1012 | 57 | M | renal cell | PD | 178 |
| 300 | 1013 | 53 | M | nasopharyngeal | PD | 29 |
| | | | | SCCA | | |
| 300 | 1014 | 64 | F | peritoneal | stable | 236** |
| | | | | mesothelioma | | |
| 100 | 1015 | 65 | M | melanoma | PD | 140 |
| 100 | 1016 | 77 | F | breast | stable | 231** |
| 100 | 1017 | | F | melanoma | PD | 35 |
| 100 | 1018* | | | | | |
| 100 | 1019 | 69 | F | endometrial sarcoma | stable | 212** |
| 100 | 1020 | 65 | M | carcinoid | PD | 124 |
| 100 | 1021 | 59 | M | gallbladder adeno | PD | 34 |
| | | | | carcinoma | | |
| 100 | 1022* | | | | | |
| 100 | 1023 | 78 | F | breast | PD | 50 |
| 100 | 1024 | 40 | F | parotid | stable | 161** |
| | | | | adenocarcinoma | | |
| 100 | 1025 | 52 | F | breast | WD | 71 |
| 100 | 1026 | 39 | F | breast | PD | 34 |
| 100 | 1027 | 55 | F | breast | PD | 36 |
| 100 | 1028 | 52 | M | melanoma | PD | 29 |
| 100 | 1029 | 38 | M | pancreatic | PD | 36 |
| 100 | 1030 | 83 | M | melanoma | PD | 41 |
| 100 | 1031 | 50 | M | medullary thyroid | WD | 108 |

PD = progressive disease; WD = withdrawal. 4 patients remain on study.
*Inappropriate enrollment, patient withdrawn
**As of Jan. 11, 2000

[0360] TABLE XXI
Pharmacokinetic parameters of ANGIOZYME after bolus
subcutaneous administration.

| | 10 mg/m² | | 30 mg/m² | | 100 mg/m² | | 300 mg/m² | |
|---|---|---|---|---|---|---|---|---|
| | Mean | SD | Mean | SD | Mean | SD | Mean | SD |
| Day 1 | | | | | | | | |
| Cmax | 0.43 | 0.07 | 0.62 | 0.28 | 3.17 | 0.69 | 8.91 | 2.93 |
| (ug/mL) | | | | | | | | |
| AUCt | 2.60 | 1.43 | 6.04 | 2.70 | 34.14 | 2.28 | 89.87 | 21.68 |
| (ug*hr/mL) | | | | | | | | |
| AUCinf | 4.40 | 0.06 | 7.99 | 1.66 | 37.51 | 1.91 | 101.57 | 13.47 |
| (ug*hr/mL) | | | | | | | | |
| t(1/2) (hr) | 3.62 | 0.79 | 7.32 | 6.94 | 4.58 | 0.02 | 9.26 | 6.20 |
| CL/F | 2.24 | 0.08 | 3.73 | 0.92 | 2.96 | 0.61 | 2.99 | 0.43 |
| (L/hr/m²) | | | | | | | | |
| Day 29 | | | | | | | | |
| Cmax | 0.35 | 0.19 | 1.17 | 0.53 | 3.23 | 0.35 | 8.93 | 6.71 |
| (ug/mL) | | | | | | | | |
| AUCt | 2.11 | 1.31 | 7.29 | 1.16 | 31.87 | 1.91 | 119.42 | 65.84 |
| (ug*hr/mL) | | | | | | | | |
| AUCinf | 3.38 | 1.31 | 8.54 | 2.46 | 33.61 | 2.16 | 132.73 | 67.82 |
| (ug*hr/mL) | | | | | | | | |
| t(1/2) (hr) | 4.49 | 1.60 | 3.26 | 1.01 | 4.66 | 0.35 | 7.24 | 0.70 |
| CL/F | 2.49 | 1.48 | 3.69 | 0.94 | 3.21 | 0.56 | 2.72 | 1.40 |
| (L/hr/m²) | | | | | | | | |

[0361] TABLE XXII
Human KDR DNAzyme and Substrate sequence

| | | Seq ID | | Seq ID |
|---|---|---|---|---|
| Pos | Substrate | No | DNAzyme | No |
| 14 | GUCCCGGG A CCCCGGGA | 8364 | TCCCGGGG GGCTAGCTACAACGA CCCGGGAC | 18894 |
| 25 | CCGGGAGA G CGGUCAGU | 8365 | ACTGACCG GGCTAGCTACAACGA TCTCCCGG | 18895 |
| 28 | GGAGAGCG G UCAGUGUG | 8366 | CACACTGA GGCTAGCTACAACGA CGCTCTCC | 18896 |
| 32 | AGCGGUCA G UGUGUGGU | 8367 | ACCACACA GGCTAGCTACAACGA TGACCGCT | 18897 |
| 34 | CGGUCAGU G UGUGGUCG | 8368 | CGACCACA GGCTAGCTACAACGA ACTGACCG | 18898 |
| 36 | GUCAGUGU G UGGUCGCU | 8369 | AGCGACCA GGCTAGCTACAACGA ACACTGAC | 18899 |
| 39 | AGUGUGUG G UCGCUGCG | 8370 | CGCAGCGA GGCTAGCTACAACGA CACACACT | 18900 |
| 42 | GUGUGGUC G CUGCGUUU | 8371 | AAACGCAG GGCTAGCTACAACGA GACCACAC | 18901 |
| 45 | UGGUCGCU G CGUUUCCU | 8372 | AGGAAACG GGCTAGCTACAACGA AGCGACCA | 18902 |
| 47 | GUCGCUGC G UUUCCUCU | 8373 | AGAGGAAA GGCTAGCTACAACGA GCAGCGAC | 18903 |
| 56 | UUUCCUCU G CCUGCGCC | 8374 | GGCGCAGG GGCTAGCTACAACGA AGAGGAAA | 18904 |
| 60 | CUCUGCCU G CGCCGGGC | 8375 | GCCCGGCG GGCTAGCTACAACGA AGGCAGAG | 18905 |
| 62 | CUGCCUGC G CCGGGCAU | 8376 | ATGCCCGG GGCTAGCTACAACGA GCAGGCAG | 18906 |
| 67 | UGCGCCGG G CAUCACUU | 8377 | AAGTGATG GGCTAGCTACAACGA CCGGCGCA | 18907 |
| 69 | CGCCGGGC A UCACUUGC | 8378 | GCAAGTGA GGCTAGCTACAACGA GCCCGGCG | 18908 |
| 72 | CGGGCAUC A CUUGCGCG | 8379 | CGCGCAAG GGCTAGCTACAACGA GATGCCCG | 18909 |
| 76 | CAUCACUU G CGCGCCGC | 8380 | GCGGCGCG GGCTAGCTACAACGA AAGTGATG | 18910 |
| 78 | UCACUUGC G CGCCGCAG | 8381 | CTGCGGCG GGCTAGCTACAACGA GCAAGTGA | 18911 |
| 80 | ACUUGCGC G CCGCAGAA | 8382 | TTCTGCGG GGCTAGCTACAACGA GCGCAAGT | 18912 |
| 83 | UGCGCGCC G CAGAAAGU | 8383 | ACTTTCTG GGCTAGCTACAACGA GGCGCGCA | 18913 |
| 90 | CGCAGAAA G UCCGUCUG | 8384 | CAGACGGA GGCTAGCTACAACGA TTTCTGCG | 18914 |
| 94 | GAAAGUCC G UCUGGCAG | 8385 | CTGCCAGA GGCTAGCTACAACGA GGACTTTC | 18915 |
| 99 | UCCGUCUG G CAGCCUGG | 8386 | CCAGGCTG GGCTAGCTACAACGA CAGACGGA | 18916 |
| 102 | GUCUGGCA G CCUGGAUA | 8387 | TATCCAGG GGCTAGCTACAACGA TGCCAGAC | 18917 |
| 108 | CAGCCUGG A UAUCCUCU | 8388 | AGAGGATA GGCTAGCTACAACGA CCAGGCTG | 18918 |
| 110 | GCCUGGAU A UCCUCUCC | 8389 | GGAGAGGA GGCTAGCTACAACGA ATCCAGGC | 18919 |
| 120 | CCUCUCCU A CCGGCACC | 8390 | GGTGCCGG GGCTAGCTACAACGA AGGAGAGG | 18920 |
| 124 | UCCUACCG G CACCCGCA | 8391 | TGCGGGTG GGCTAGCTACAACGA CGGTAGGA | 18921 |
| 126 | CUACCGGC A CCCGCAGA | 8392 | TCTGCGGG GGCTAGCTACAACGA GCCGGTAG | 18922 |
| 130 | CGGCACCC G CAGACGCC | 8393 | GGCGTCTG GGCTAGCTACAACGA GGGTGCCG | 18923 |
| 134 | ACCCGCAG A CGCCCCUG | 8394 | CAGGGGCG GGCTAGCTACAACGA CTGCGGGT | 18924 |
| 136 | CCGCAGAC G CCCCUGCA | 8395 | TGCAGGGG GGCTAGCTACAACGA GTCTGCGG | 18925 |
| 142 | ACGCCCCU G CAGCCGCC | 8396 | GGCGGCTG GGCTAGCTACAACGA AGGGGCGT | 18926 |
| 145 | CCCCUGCA G CCGCCGGU | 8397 | ACCGGCGG GGCTAGCTACAACGA TGCAGGGG | 18927 |
| 148 | CUGCAGCC G CCGGUCGG | 8398 | CCGACCGG GGCTAGCTACAACGA GGCTGCAG | 18928 |
| 152 | AGCCGCCG G UCGGCGCC | 8399 | GGCGCCGA GGCTAGCTACAACGA CGGCGGCT | 18929 |
| 156 | GCCGGUCG G CGCCCGGG | 8400 | CCCGGGCG GGCTAGCTACAACGA CGACCGGC | 18930 |
| 158 | CGGUCGGC G CCCGGGCU | 8401 | AGCCCGGG GGCTAGCTACAACGA GCCGACCG | 18931 |
| 164 | GCGCCCGG G CUCCCUAG | 8402 | CTAGGGAG GGCTAGCTACAACGA CCGGGCGC | 18932 |
| 172 | GCUCCCUA G CCCUGUGC | 8403 | GCACAGGG GGCTAGCTACAACGA TAGGGAGC | 18933 |
| 177 | CUAGCCCU G UGCGCUCA | 8404 | TGAGCGCA GGCTAGCTACAACGA AGGGCTAG | 18934 |
| 179 | AGCCCUGU G CGCUCAAC | 8405 | GTTGAGCG GGCTAGCTACAACGA ACAGGGCT | 18935 |
| 181 | CCCUGUGC G CUCAACUG | 8406 | CAGTTGAG GGCTAGCTACAACGA GCACAGGG | 18936 |
| 186 | UGCGCUCA A CUGUCCUG | 8407 | CAGGACAG GGCTAGCTACAACGA TGAGCGCA | 18937 |
| 189 | GCUCAACU G UCCUGCGC | 8408 | GCGCAGGA GGCTAGCTACAACGA AGTTGAGC | 18938 |
| 194 | ACUGUCCU G CGCUGCGG | 8409 | CCGCAGCG GGCTAGCTACAACGA AGGACAGT | 18939 |
| 196 | UGUCCUGC G CUGCGGGG | 8410 | CCCCGCAG GGCTAGCTACAACGA GCAGGACA | 18940 |
| 199 | CCUGCGCU G CGGGGUGC | 8411 | GCACCCCG GGCTAGCTACAACGA AGCGCAGG | 18941 |
| 204 | GCUGCGGG G UGCCGCGA | 8412 | TCGCGGCA GGCTAGCTACAACGA CCCGCAGC | 18942 |
| 206 | UGCGGGGU G CCGCGAGU | 8413 | ACTCGCGG GGCTAGCTACAACGA ACCCCGCA | 18943 |
| 209 | GGGGUGCC G CGAGUUCC | 8414 | GGAACTCG GGCTAGCTACAACGA GGCACCCC | 18944 |
| 213 | UGCCGCGA G UUCCACCU | 8415 | AGGTGGAA GGCTAGCTACAACGA TCGCGGCA | 18945 |
| 218 | CGAGUUCC A CCUCCGCG | 8416 | CGCGGAGG GGCTAGCTACAACGA GGAACTCG | 18946 |
| 224 | CCACCUCC G CGCCUCCU | 8417 | AGGAGGCG GGCTAGCTACAACGA GGAGGTGG | 18947 |
| 226 | ACCUCCGC G CCUCCUUC | 8418 | GAAGGAGG GGCTAGCTACAACGA GCGGAGGT | 18948 |
| 240 | UUCUCUAG A CAGGCGCU | 8419 | AGCGCCTG GGCTAGCTACAACGA CTAGAGAA | 18949 |
| 244 | CUAGACAG G CGCUGGGA | 8420 | TCCCAGCG GGCTAGCTACAACGA CTGTCTAG | 18950 |
| 246 | AGACAGGC G CUGGGAGA | 8421 | TCTCCCAG GGCTAGCTACAACGA GCCTGTCT | 18951 |
| 259 | GAGAAAGA A CCGGCUCC | 8422 | GGAGCCGG GGCTAGCTACAACGA TCTTTCTC | 18952 |
| 263 | AAGAACCG G CUCCCGAG | 8423 | CTCGGGAG GGCTAGCTACAACGA CGGTTCTT | 18953 |
| 271 | GCUCCCGA G UUCUGGGC | 8424 | GCCCAGAA GGCTAGCTACAACGA TCGGGAGC | 18954 |
| 278 | AGUUCUGG G CAUUUCGC | 8425 | GCGAAATG GGCTAGCTACAACGA CCAGAACT | 18955 |
| 280 | UUCUGGGC A UUUCGCCC | 8426 | GGGCGAAA GGCTAGCTACAACGA GCCCAGAA | 18956 |
| 285 | GGCAUUUC G CCCGGCUC | 8427 | GAGCCGGG GGCTAGCTACAACGA GAAATGCC | 18957 |
| 290 | UUCGCCCG G CUCGAGGU | 8428 | ACCTCGAG GGCTAGCTACAACGA CGGGCGAA | 18958 |
| 297 | GGCUCGAG G UGCAGGAU | 8429 | ATCCTGCA GGCTAGCTACAACGA CTCGAGCC | 18959 |
| 299 | CUCGAGGU G CAGGAUGC | 8430 | GCATCCTG GGCTAGCTACAACGA ACCTCGAG | 18960 |
| 304 | GGUGCAGG A UGCAGAGC | 8431 | GCTCTGCA GGCTAGCTACAACGA CCTGCACC | 18961 |
| 306 | UGCAGGAU G CAGAGCAA | 8432 | TTGCTCTG GGCTAGCTACAACGA ATCCTGCA | 18962 |
| 311 | GAUGCAGA G CAAGGUGC | 8433 | GCACCTTG GGCTAGCTACAACGA TCTGCATC | 18963 |
| 316 | AGAGCAAG G UGCUGCUG | 8434 | CAGCAGCA GGCTAGCTACAACGA CTTGCTCT | 18964 |
| 318 | AGCAAGGU G CUGCUGGC | 8435 | GCCAGCAG GGCTAGCTACAACGA ACCTTGCT | 18965 |
| 321 | AAGGUGCU G CUGGCCGU | 8436 | ACGGCCAG GGCTAGCTACAACGA AGCACCTT | 18966 |
| 325 | UGCUGCUG G CCGUCGCC | 8437 | GGCGACGG GGCTAGCTACAACGA CAGCAGCA | 18967 |
| 328 | UGCUGGCC G UCGCCCUG | 8438 | CAGGGCGA GGCTAGCTACAACGA GGCCAGCA | 18968 |
| 331 | UGGCCGUC G CCCUGUGG | 8439 | CCACAGGG GGCTAGCTACAACGA GACGGCCA | 18969 |
| 336 | GUCGCCCU G UGGCUCUG | 8440 | CAGAGCCA GGCTAGCTACAACGA AGGGCGAC | 18970 |
| 339 | GCCCUGUG G CUCUGCGU | 8441 | ACGCAGAG GGCTAGCTACAACGA CACAGGGC | 18971 |
| 344 | GUGGCUCU G CGUGGAGA | 8442 | TCTCCACG GGCTAGCTACAACGA AGAGCCAC | 18972 |
| 346 | GGCUCUGC G UGGAGACC | 8443 | GGTCTCCA GGCTAGCTACAACGA GCAGAGCC | 18973 |
| 352 | GCGUGGAG A CCCGGGCC | 8444 | GGCCCGGG GGCTAGCTACAACGA CTCCACGC | 18974 |
| 358 | AGACCCGG G CCGCCUCU | 8445 | AGAGGCGG GGCTAGCTACAACGA CCGGGTCT | 18975 |
| 361 | CCCGGGCC G CCUCUGUG | 8446 | CACAGAGG GGCTAGCTACAACGA GGCCCGGG | 18976 |
| 367 | CCGCCUCU G UGGGUUUG | 8447 | CAAACCCA GGCTAGCTACAACGA AGAGGCGG | 18977 |
| 371 | CUCUGUGG G UUUGCCUA | 8448 | TAGGCAAA GGCTAGCTACAACGA CCACAGAG | 18978 |
| 375 | GUGGGUUU G CCUAGUGU | 8449 | ACACTAGG GGCTAGCTACAACGA AAACCCAC | 18979 |
| 380 | UUUGCCUA G UGUUUCUC | 8450 | GAGAAACA GGCTAGCTACAACGA TAGGCAAA | 18980 |
| 382 | UGCCUAGU G UUUCUCUU | 8451 | AAGAGAAA GGCTAGCTACAACGA ACTAGGCA | 18981 |
| 392 | UUCUCUUG A UCUGCCCA | 8452 | TGGGCAGA GGCTAGCTACAACGA CAAGAGAA | 18982 |
| 396 | CUUGAUCU G CCCAGGCU | 8453 | AGCCTGGG GGCTAGCTACAACGA AGATCAAG | 18983 |
| 402 | CUGCCCAG G CUCAGCAU | 8454 | ATGCTGAG CCCTAGCTACAACGA CTGGGCAG | 18984 |
| 407 | CAGGCUCA G CAUACAAA | 8455 | TTTCTATG GGCTAGCTACAACGA TGAGCCTG | 18985 |
| 409 | GGCUCAGC A UACAAAAU | 6138 | TTTTTGTA GGCTAGCTACAACGA GCTGAGCC | 18986 |
| 411 | CUCAGCAU A CAAAAAGA | 1519 | TCTTTTTG GGCTAGCTACAACGA ATGCTGAG | 18987 |
| 419 | ACAAAAAG A CAUACUUA | 8456 | TAAGTATG GGCTAGCTACAACGA CTTTTTGT | 18988 |
| 421 | AAAAAGAC A UACUUACA | 6140 | TGTAAGTA GGCTAGCTACAACGA GTCTTTTT | 18989 |
| 423 | AAAGACAU A CUUACAAU | 1520 | ATTGTAAG GGCTAGCTACAACGA ATGTCTTT | 18990 |
| 427 | ACAUACUU A CAAUUAAG | 1522 | CTTAATTG GGCTAGCTACAACGA AAGTATGT | 18991 |
| 430 | UACUUACA A UUAAGGCU | 8457 | AGCCTTAA GGCTAGCTACAACGA TGTAAGTA | 18992 |
| 436 | CAAUUAAG G CUAAUACA | 8458 | TGTATTAG GGCTAGCTACAACGA CTTAATTG | 18993 |
| 440 | UAAGGCUA A UACAACUC | 8459 | GAGTTGTA GGCTAGCTACAACGA TAGCCTTA | 18994 |
| 442 | AGGCUAAU A CAACUCUU | 1526 | AAGAGTTG GGCTAGCTACAACGA ATTAGCCT | 18995 |
| 445 | CUAAUACA A CUCUUCAA | 8460 | TTGAAGAG GGCTAGCTACAACGA TGTATTAG | 18996 |
| 454 | CUCUUCAA A UUACUUGC | 8461 | GCAAGTAA GGCTAGCTACAACGA TTGAAGAG | 18997 |
| 457 | UUCAAAUU A CUUGCAGG | 1531 | CCTGCAAG GGCTAGCTACAACGA AATTTGAA | 18998 |
| 461 | AAUUACUU G CAGGGGAC | 8462 | GTCCCCTG GGCTAGCTACAACGA AAGTAATT | 18999 |
| 468 | UGCAGGGG A CAGAGGGA | 8463 | TCCCTCTG GGCTAGCTACAACGA CCCCTGCA | 19000 |
| 476 | ACAGAGGG A CUUGGACU | 8464 | AGTCCAAG GGCTAGCTACAACGA CCCTCTGT | 19001 |
| 482 | GGACUUGG A CUGGCUUU | 8465 | AAAGCCAG GGCTAGCTACAACGA CCAAGTCC | 19002 |
| 486 | UUGGACUG G CUUUGGCC | 8466 | GGCCAAAG GGCTAGCTACAACGA CAGTCCAA | 19003 |
| 492 | UGGCUUUG G CCCAAUAA | 8467 | TTATTGGG GGCTAGCTACAACGA CAAAGCCA | 19004 |
| 497 | UUGGCCCA A UAAUCAGA | 8468 | TCTGATTA GGCTAGCTACAACGA TGGGCCAA | 19005 |
| 500 | GCCCAAUA A UCAGAGUG | 8469 | CACTCTGA GGCTAGCTACAACGA TATTGGGC | 19006 |
| 506 | UAAUCAGA G UGGCAGUG | 8470 | CACTGCCA GGCTAGCTACAACGA TCTGATTA | 19007 |
| 509 | UCAGAGUG G CAGUGAGC | 8471 | GCTCACTG GGCTAGCTACAACGA CACTCTGA | 19008 |
| 512 | GAGUGGCA G UGAGCAAA | 8472 | TTTGCTCA GGCTAGCTACAACGA TGCCACTC | 19009 |
| 516 | GGCAGUGA G CAAAGGGU | 8473 | ACCCTTTG GGCTAGCTACAACGA TCACTGCC | 19010 |
| 523 | AGCAAAGG G UGGAGGUG | 8474 | CACCTCCA GGCTAGCTACAACGA CCTTTGCT | 19011 |
| 529 | GGGUGGAG G UGACUGAG | 8475 | CTCAGTCA GGCTAGCTACAACGA CTCCACCC | 19012 |
| 532 | UGGAGGUG A CUGAGUGC | 8476 | GCACTCAG GGCTAGCTACAACGA CACCTCCA | 19013 |
| 537 | GUGACUGA G UGCAGCGA | 8477 | TCGCTGCA GGCTAGCTACAACGA TCAGTCAC | 19014 |
| 539 | GACUGAGU G CAGCGAUG | 8478 | CATCGCTG GGCTAGCTACAACGA ACTCAGTC | 19015 |
| 542 | UGAGUGCA G CGAUGGCC | 8479 | GGCCATCG GGCTAGCTACAACGA TGCACTCA | 19016 |
| 545 | GUGCAGCG A UGGCCUCU | 8480 | AGAGGCCA GGCTAGCTACAACGA CGCTGCAC | 19017 |
| 548 | CAGCGAUG G CCUCUUCU | 8481 | AGAAGAGG GGCTAGCTACAACGA CATCGCTG | 19018 |
| 557 | CCUCUUCU G UAAGACAC | 8482 | GTGTCTTA GGCTAGCTACAACGA AGAAGAGG | 19019 |
| 562 | UCUGUAAG A CACUCACA | 8483 | TGTGAGTG GGCTAGCTACAACGA CTTACAGA | 19020 |
| 564 | UGUAAGAC A CUCACAAU | 6166 | ATTGTGAG GGCTAGCTACAACGA GTCTTACA | 19021 |
| 568 | AGACACUC A CAAUUCCA | 6168 | TGGAATTG GGCTAGCTACAACGA GAGTGTCT | 19022 |
| 571 | CACUCACA A UUCCAAAA | 8484 | TTTTGGAA GGCTAGCTACAACGA TGTGAGTG | 19023 |
| 580 | UUCCAAAA G UGAUCGGA | 8485 | TCCGATCA GGCTAGCTACAACGA TTTTGGAA | 19024 |
| 583 | CAAAAGUG A UCGGAAAU | 8486 | ATTTCCGA GGCTAGCTACAACGA CACTTTTG | 19025 |
| 590 | GAUCGGAA A UGACACUG | 8487 | CAGTGTCA GGCTAGCTACAACGA TTCCGATC | 19026 |
| 593 | CGGAAAUG A CACUGGAG | 8488 | CTCCAGTG GGCTAGCTACAACGA CATTTCCG | 19027 |
| 595 | GAAAUGAC A CUGGAGCC | 6172 | GGCTCCAG GGCTAGCTACAACGA GTCATTTC | 19028 |
| 601 | ACACUGGA G CCUACAAG | 8489 | CTTGTAGG GGCTAGCTACAACGA TCCAGTGT | 19029 |
| 605 | UGGAGCCU A CAAGUGCU | 1546 | AGCACTTG GGCTAGCTACAACGA AGGCTCCA | 19030 |
| 609 | GCCUACAA G UGCUUCUA | 8490 | TAGAAGCA GGCTAGCTACAACGA TTGTAGGC | 19031 |
| 611 | CUACAAGU G CUUCUACC | 8491 | GGTAGAAG GGCTAGCTACAACGA ACTTGTAG | 19032 |
| 617 | GUGCUUCU A CCGGGAAA | 1549 | TTTCCCGG GGCTAGCTACAACGA AGAAGCAC | 19033 |
| 625 | ACCGGGAA A CUGACUUG | 8492 | CAAGTCAG GGCTAGCTACAACGA TTCCCGGT | 19034 |
| 629 | GGAAACUG A CUUGGCCU | 8493 | AGGCCAAG GGCTAGCTACAACGA CAGTTTCC | 19035 |
| 634 | CUGACUUG G CCUCGGUC | 8494 | GACCGAGG GGCTAGCTACAACGA CAAGTCAG | 19036 |
| 640 | UGGCCUCG G UCAUUUAU | 8495 | ATAAATGA GGCTAGCTACAACGA CGAGGCCA | 19037 |
| 643 | CCUCGGUC A UUUAUGUC | 6184 | GACATAAA GGCTAGCTACAACGA GACCGAGG | 19038 |
| 647 | GGUCAUUU A UGUCUAUG | 1555 | CATAGACA GGCTAGCTACAACGA AAATGACC | 19039 |
| 649 | UCAUUUAU G UCUAUGUU | 8496 | AACATAGA GGCTAGCTACAACGA ATAAATGA | 19040 |
| 653 | UUAUGUCU A UGUUCAAG | 1557 | CTTGAACA GGCTAGCTACAACCA AGACATAA | 19041 |
| 655 | AUGUCUAU G UUCAAGAU | 8497 | ATCTTGAA GGCTAGCTACAACGA ATAGACAT | 19042 |
| 662 | UGUUCAAG A UUACAGAU | 8498 | ATCTGTAA GGCTAGCTACAACGA CTTGAACA | 19043 |
| 665 | UCAAGAUU A CAGAUCUC | 1561 | GAGATCTG GGCTAGCTACAACGA AATCTTGA | 19044 |
| 669 | GAUUACAG A UCUCCAUU | 8499 | AATGGAGA GGCTAGCTACAACGA CTGTAATC | 19045 |
| 675 | AGAUCUCC A UUUAUUGC | 6190 | GCAATAAA GGCTAGCTACAACGA GGAGATCT | 19046 |
| 679 | CUCCAUUU A UUGCUUCU | 1566 | AGAAGCAA GGCTAGCTACAACGA AAATGGAG | 19047 |
| 682 | CAUUUAUU G CUUCUGUU | 8500 | AACAGAAG GGCTAGCTACAACGA AATAAATG | 19048 |
| 688 | UUGCUUCU G UUAGUGAC | 8501 | GTCACTAA GGCTAGCTACAACGA AGAAGCAA | 19049 |
| 692 | UUCUGUUA G UGACCAAC | 8502 | GTTGGTCA GGCTAGCTACAACGA TAACAGAA | 19050 |
| 695 | UGUUAGUG A CCAACAUG | 8503 | CATGTTGG GGCTAGCTACAACGA CACTAACA | 19051 |
| 699 | AGUGACCA A CAUGGAGU | 8504 | ACTCCATG GGCTAGCTACAACGA TGGTCACT | 19052 |
| 701 | UGACCAAC A UGGAGUGG | 6195 | CGACTCCA GGCTAGCTACAACGA GTTGGTCA | 19053 |
| 706 | AACAUGGA G UCGUGUAC | 8505 | GTACACGA GGCTAGCTACAACGA TCCATGTT | 19054 |
| 709 | AUGGAGUC G UGUACAUU | 8506 | AATGTACA GGCTAGCTACAACGA GACTCCAT | 19055 |
| 711 | GGAGUCGU G UACAUUAC | 8507 | GTAATGTA GGCTAGCTACAACGA ACGACTCC | 19056 |
| 713 | AGUCGUGU A CAUUACUG | 1573 | CAGTAATG GGCTAGCTACAACGA ACACGACT | 19057 |
| 715 | UCGUGUAC A UUACUGAG | 6196 | CTCAGTAA GGCTAGCTACAACGA GTACACGA | 19058 |
| 718 | UGUACAUU A CUGAGAAC | 1575 | GTTCTCAG GGCTAGCTACAACGA AATGTACA | 19059 |
| 725 | UACUGAGA A CAAAAACA | 8508 | TGTTTTTG GGCTAGCTACAACGA TCTCAGTA | 19060 |
| 731 | GAACAAAA A CAAAACUG | 8509 | CAGTTTTG GGCTAGCTACAACGA TTTTGTTC | 19061 |
| 736 | AAAACAAA A CUGUGGUG | 8510 | CACCACAG GGCTAGCTACAACGA TTTGTTTT | 19062 |
| 739 | ACAAAACU G UGGUGAUU | 8511 | AATCACCA GGCTAGCTACAACGA AGTTTTGT | 19063 |
| 742 | AAACUGUG G UGAUUCCA | 8512 | TGGAATCA GGCTAGCTACAACGA CACAGTTT | 19064 |
| 745 | CUGUGGUG A UUCCAUGU | 8513 | ACATGGAA GGCTAGCTACAACGA CACCACAG | 19065 |
| 750 | GUGAUUCC A UGUCUCGG | 6202 | CCGAGACA GGCTAGCTACAACGA GGAATCAC | 19066 |
| 752 | GAUUCCAU G UCUCGGGU | 8514 | ACCCGAGA GGCTAGCTACAACGA ATGGAATC | 19067 |
| 759 | UGUCUCGG G UCCAUUUC | 8515 | GAAATGGA GGCTAGCTACAACGA CCGAGACA | 19068 |
| 763 | UCGGGUCC A UUUCAAAU | 6205 | ATTTGAAA GGCTAGCTACAACGA GGACCCGA | 19069 |
| 770 | CAUUUCAA A UCUCAACG | 8516 | CGTTGAGA GGCTAGCTACAACGA TTGAAATG | 19070 |
| 776 | AAAUCUCA A CGUGUCAC | 8517 | GTGACACG GGCTAGCTACAACGA TGAGATTT | 19071 |
| 778 | AUCUCAAC G UGUCACUU | 8518 | AAGTGACA GGCTAGCTACAACGA GTTGAGAT | 19072 |
| 780 | CUCAACGU G UCACUUUG | 8519 | CAAAGTGA GGCTAGCTACAACGA ACGTTGAG | 19073 |
| 783 | AACGUGUC A CUUUGUGC | 6209 | GCACAAAG GGCTAGCTACAACGA GACACGTT | 19074 |
| 788 | GUCACUUU G UGCAAGAU | 8520 | ATCTTGCA GGCTAGCTACAACGA AAAGTGAC | 19075 |
| 790 | CACUUUGU G CAAGAUAC | 8521 | GTATCTTG GGCTAGCTACAACGA ACAAAGTG | 19076 |
| 795 | UGUGCAAG A UACCCAGA | 8522 | TCTGGGTA GGCTAGCTACAACGA CTTGCACA | 19077 |
| 797 | UGCAAGAU A CCCAGAAA | 1589 | TTTCTGGG GGCTAGCTACAACGA ATCTTGCA | 19078 |
| 810 | GAAAAGAG A UUUGUUCC | 8523 | GGAACAAA GGCTAGCTACAACGA CTCTTTTC | 19079 |
| 814 | AGAGAUUU G UUCCUGAU | 8524 | ATCAGGAA GGCTAGCTACAACGA AAATCTCT | 19080 |
| 821 | UGUUCCUG A UGGUAACA | 8525 | TGTTACCA GGCTAGCTACAACGA CAGGAACA | 19081 |
| 824 | UCCUGAUG G UAACAGAA | 8526 | TTCTGTTA GGCTAGCTACAACGA CATCAGGA | 19082 |
| 827 | UGAUGGUA A CAGAAUUU | 8527 | AAATTCTG GGCTAGCTACAACGA TACCATCA | 19083 |
| 832 | GUAACAGA A UUUCCUGG | 8528 | CCAGGAAA GGCTAGCTACAACGA TCTGTTAC | 19084 |
| 842 | UUCCUGGG A CAGCAAGA | 8529 | TCTTGCTG GGCTAGCTACAACGA CCCAGGAA | 19085 |
| 845 | CUGGGACA G CAAGAAGG | 8530 | CCTTCTTG GGCTAGCTACAACGA TGTCCCAG | 19086 |
| 854 | CAAGAAGG G CUUUACUA | 8531 | TAGTAAAG GGCTAGCTACAACGA CCTTCTTG | 19087 |
| 859 | AGGGCUUU A CUAUUCCC | 1600 | GGGAATAG GGCTAGCTACAACGA AAAGCCCT | 19088 |
| 862 | GCUUUACU A UUCCCAGC | 1601 | GCTGGGAA GGCTAGCTACAACGA AGTAAAGC | 19089 |
| 869 | UAUUCCCA G CUACAUGA | 8532 | TCATGTAG GGCTAGCTACAACGA TGGGAATA | 19090 |
| 872 | UCCCAGCU A CAUGAUCA | 1604 | TGATCATG GGCTAGCTACAACGA AGCTGGGA | 19091 |
| 874 | CCAGCUAC A UGAUCAGC | 6228 | GCTGATCA GGCTAGCTACAACGA GTAGCTGG | 19092 |
| 877 | GCUACAUG A UCAGCUAU | 8533 | ATAGCTGA GGCTAGCTACAACGA CATGTAGC | 19093 |
| 881 | CAUGAUCA G CUAUGCUG | 8534 | CAGCATAG GGCTAGCTACAACGA TGATCATG | 19094 |
| 884 | GAUCAGCU A UGCUGGCA | 1606 | TGCCAGCA GGCTAGCTACAACGA AGCTGATC | 19095 |
| 886 | UCAGCUAU G CUGGCAUG | 8535 | CATGCCAG GGCTAGCTACAACGA ATAGCTGA | 19096 |
| 890 | CUAUGCUG G CAUGGUCU | 8536 | AGACCATG GGCTAGCTACAACGA CAGCATAG | 19097 |
| 892 | AUGCUGGC A UGGUCUUC | 6232 | GAAGACCA GGCTAGCTACAACGA GCCAGCAT | 19098 |
| 895 | CUGGCAUG G UCUUCUGU | 8537 | ACAGAAGA GGCTAGCTACAACGA CATGCCAG | 19099 |
| 902 | GGUCUUCU G UGAAGCAA | 8538 | TTGCTTCA GGCTAGCTACAACGA AGAAGACC | 19100 |
| 907 | UCUGUGAA G CAAAAAUU | 8539 | AATTTTTG GGCTAGCTACAACGA TTCACAGA | 19101 |
| 913 | AAGCAAAA A UUAAUGAU | 8540 | ATCATTAA GGCTAGCTACAACGA TTTTGCTT | 19102 |
| 917 | AAAAAUUA A UGAUGAAA | 8541 | TTTCATCA GGCTAGCTACAACGA TAATTTTT | 19103 |
| 920 | AAUUAAUG A UGAAAGUU | 8542 | AACTTTCA GGCTAGCTACAACGA CATTAATT | 19104 |
| 926 | UGAUGAAA G UUACCAGU | 8543 | ACTGGTAA GGCTAGCTACAACGA TTTCATCA | 19105 |
| 929 | UGAAAGUU A CCAGUCUA | 1613 | TAGACTGG GGCTAGCTACAACGA AACTTTCA | 19160 |
| 933 | AGUUACCA G UCUAUUAU | 8544 | ATAATAGA GGCTAGCTACAACGA TGGTAACT | 19107 |
| 937 | ACCAGUCU A UUAUGUAC | 1615 | GTACATAA GGCTAGCTACAACGA AGACTGGT | 19108 |
| 940 | AGUCUAUU A UGUACAUA | 1617 | TATGTACA GGCTAGCTACAACGA AATAGACT | 19109 |
| 942 | UCUAUUAU G UACAUAGU | 8545 | ACTATGTA GGCTAGCTACAACGA ATAATAGA | 19110 |
| 944 | UAUUAUGU A CAUAGUUG | 1618 | CAACTATG GGCTAGCTACAACGA ACATAATA | 19111 |
| 946 | UUAUGUAC A UAGUUGUC | 6239 | GACAACTA GGCTAGCTACAACGA GTACATAA | 19112 |
| 949 | UGUACAUA G UUGUCGUU | 8546 | AACGACAA GGCTAGCTACAACGA TATGTACA | 19113 |
| 952 | ACAUAGUU G UCGUUGUA | 8547 | TACAACGA GGCTAGCTACAACGA AACTATGT | 19114 |
| 955 | UAGUUGUC G UUGUAGGG | 8548 | CCCTACAA GGCTAGCTACAACGA GACAACTA | 19115 |
| 958 | UUGUCGUU G UAGGGUAU | 8549 | ATACCCTA GGCTAGCTACAACGA AACGACAA | 19116 |
| 963 | GUUGUAGG G UAUAGGAU | 8550 | ATCCTATA GGCTAGCTACAACGA CCTACAAC | 19117 |
| 965 | UGUAGGGU A UAGGAUUU | 1624 | AAATCCTA GGCTAGCTACAACGA ACCCTACA | 19118 |
| 970 | GGUAUAGG A UUUAUGAU | 8551 | ATCATAAA GGCTAGCTACAACGA CCTATACC | 19119 |
| 974 | UAGGAUUU A UGAUGUGG | 1628 | CCACATCA GGCTAGCTACAACGA AAATCCTA | 19120 |
| 977 | GAUUUAUG A UGUGGUUC | 8552 | GAACCACA GGCTAGCTACAACGA CATAAATC | 19121 |
| 979 | UUUAUGAU G UGGUUCUG | 8553 | CAGAACCA GGCTAGCTACAACGA ATCATAAA | 19122 |
| 982 | AUGAUGUG G UUCUGAGU | 8554 | ACTCAGAA GGCTAGCTACAACGA CACATCAT | 19123 |
| 989 | GGUUCUGA G UCCGUCUC | 8555 | GAGACGGA GGCTAGCTACAACGA TCAGAACC | 19124 |
| 993 | CUGAGUCC G UCUCAUGG | 8556 | CCATGAGA GGCTAGCTACAACGA GGACTCAG | 19125 |
| 998 | UCCGUCUC A UGGAAUUG | 6243 | CAATTCCA GGCTAGCTACAACGA GAGACGGA | 19126 |
| 1003 | CUCAUGGA A UUGAACUA | 8557 | TAGTTCAA GGCTAGCTACAACGA TCCATGAG | 19127 |
| 1008 | GGAAUUGA A CUAUCUGU | 8558 | ACAGATAG GGCTAGCTACAACGA TCAATTCC | 19128 |
| 1011 | AUUGAACU A UCUGUUGG | 1635 | CCAACAGA GGCTAGCTACAACGA AGTTCAAT | 19129 |
| 1015 | AACUAUCU G UUGGAGAA | 8559 | TTCTCCAA GGCTAGCTACAACGA AGATAGTT | 19130 |
| 1026 | GGAGAAAA G CUUGUCUU | 8560 | AAGACAAG GGCTAGCTACAACGA TTTTCTCC | 19131 |
| 1030 | AAAAGCUU G UCUUAAAU | 8561 | ATTTAAGA GGCTAGCTACAACGA AAGCTTTT | 19132 |
| 1037 | UGUCUUAA A UUGUACAG | 8562 | CTGTACAA GGCTAGCTACAACGA TTAAGACA | 19133 |
| 1040 | CUUAAAUU G UACAGCAA | 8563 | TTGCTGTA GGCTAGCTACAACGA AATTTAAG | 19134 |
| 1042 | UAAAUUGU A CAGCAAGA | 1643 | TCTTGCTG GGCTAGCTACAACGA ACAATTTA | 19135 |
| 1045 | AUUGUACA G CAAGAACU | 8564 | AGTTCTTG GGCTAGCTACAACGA TGTACAAT | 19136 |
| 1051 | CAGCAAGA A CUGAACUA | 8565 | TAGTTCAG GGCTAGCTACAACGA TCTTGCTG | 19137 |
| 1056 | AGAACUGA A CUAAAUGU | 8566 | ACATTTAG GGCTAGCTACAACGA TCAGTTCT | 19138 |
| 1061 | UGAACUAA A UGUGGGGA | 8567 | TCCCCACA GGCTAGCTACAACGA TTAGTTCA | 19139 |
| 1063 | AACUAAAU G UGGGGAUU | 8568 | AATCCCCA GGCTAGCTACAACGA ATTTAGTT | 19140 |
| 1069 | AUGUGGGG A UUGACUUC | 8569 | GAAGTCAA GGCTAGCTACAACGA CCCCACAT | 19141 |
| 1073 | CGGGAUUG A CUUCAACU | 8570 | AGTTGAAG GGCTAGCTACAACGA CAATCCCC | 19142 |
| 1079 | UGACUUCA A CUGGGAAU | 8571 | ATTCCCAG GGCTAGCTACAACGA TGAAGTCA | 19143 |
| 1086 | AACUGGGA A UACCCUUC | 8572 | GAAGGGTA GGCTAGCTACAACGA TCCCAGTT | 19144 |
| 1088 | CUGGGAAU A CCCUUCUU | 1648 | AAGAAGGG GGCTAGCTACAACGA ATTCCCAG | 19145 |
| 1101 | UCUUCGAA G CAUCAGCA | 8573 | TGCTGATG GGCTAGCTACAACGA TTCGAAGA | 19146 |
| 1103 | UUCGAAGC A UCAGCAUA | 6259 | TATGCTGA GGCTAGCTACAACGA GCTTCGAA | 19147 |
| 1107 | AAGCAUCA G CAUAAGAA | 8574 | TTCTTATG GGCTAGCTACAACGA TGATGCTT | 19148 |
| 1109 | GCAUCAGC A UAAGAAAC | 6261 | GTTTCTTA GGCTAGCTACAACGA GCTGATGC | 19149 |
| 1116 | CAUAAGAA A CUUGUAAA | 8575 | TTTACAAG GGCTAGCTACAACGA TTCTTATG | 19150 |
| 1120 | AGAAACUU G UAAACCGA | 8576 | TCGGTTTA GGCTAGCTACAACGA AAGTTTCT | 19151 |
| 1124 | ACUUGUAA A CCGAGACC | 8577 | GGTCTCGG GGCTAGCTACAACGA TTACAAGT | 19152 |
| 1130 | AAACCGAG A CCUAAAAA | 8578 | TTTTTAGG GGCTAGCTACAACGA CTCGGTTT | 19153 |
| 1138 | ACCUAAAA A CCCAGUCU | 8579 | AGACTGGG GGCTAGCTACAACGA TTTTAGGT | 19154 |
| 1143 | AAAACCCA G UCUGGGAG | 8580 | CTCCCAGA GGCTAGCTACAACGA TGGGTTTT | 19155 |
| 1151 | GUCUGGGA G UGAGAUGA | 8581 | TCATCTCA GGCTAGCTACAACGA TCCCAGAC | 19156 |
| 1156 | GGAGUGAG A UGAAGAAA | 8582 | TTTCTTCA GGCTAGCTACAACGA CTCACTCC | 19157 |
| 1164 | AUGAAGAA A UUUUUGAG | 8583 | CTCAAAAA GGCTAGCTACAACGA TTCTTCAT | 19158 |
| 1172 | AUUUUUGA G CACCUUAA | 8584 | TTAAGGTG GGCTAGCTACAACGA TCAAAAAT | 19159 |
| 1174 | UUUUGAGC A CCUUAACU | 6270 | AGTTAAGG GGCTAGCTACAACGA GCTCAAAA | 19160 |
| 1180 | GCACCUUA A CUAUAGAU | 8585 | ATCTATAG GGCTAGCTACAACGA TAAGGTGC | 19161 |
| 1183 | CCUUAACU A UAGAUGGU | 1665 | ACCATCTA GGCTAGCTACAACGA AGTTAAGG | 19162 |
| 1187 | AACUAUAG A UGGUGUAA | 8586 | TTACACCA GGCTAGCTACAACGA CTATAGTT | 19163 |
| 1190 | UAUAGAUG G UGUAACCC | 8587 | GGGTTACA GGCTAGCTACAACGA CATCTATA | 19164 |
| 1192 | UAGAUGGU G UAACCCGG | 8588 | CCGGGTTA GGCTAGCTACAACGA ACCATCTA | 19165 |
| 1195 | AUGGUGUA A CCCGGAGU | 8589 | ACTCCGGG GGCTAGCTACAACGA TACACCAT | 19166 |
| 1202 | AACCCGGA G UGACCAAG | 8590 | CTTGGTCA GGCTAGCTACAACGA TCCGGGTT | 19167 |
| 1205 | CCGGAGUG A CCAAGGAU | 8591 | ATCCTTGG GGCTAGCTACAACGA CACTCCGG | 19168 |
| 1212 | GACCAAGG A UUGUACAC | 8592 | GTGTACAA GGCTAGCTACAACGA CCTTGGTC | 19169 |
| 1215 | CAAGGAUU G UACACCUG | 8593 | CAGGTGTA GGCTAGCTACAACGA AATCCTTG | 19170 |
| 1217 | AGGAUUGU A CACCUGUG | 1669 | CACAGGTG GGCTAGCTACAACGA ACAATCCT | 19171 |
| 1219 | GAUUGUAC A CCUGUGCA | 6278 | TGCACAGG GGCTAGCTACAACGA GTACAATC | 19172 |
| 1223 | GUACACCU G UGCAGCAU | 8594 | ATGCTGCA GGCTAGCTACAACGA AGGTGTAC | 19173 |
| 1225 | ACACCUGU G CAGCAUCC | 8595 | GGATGCTG GGCTAGCTACAACGA ACAGGTGT | 19174 |
| 1228 | CCUGUGCA G CAUCCAGU | 8596 | ACTGGATG GGCTAGCTACAACGA TGCACAGG | 19175 |
| 1230 | UGUGCAGC A UCCAGUGG | 6282 | CCACTGGA GGCTAGCTACAACGA GCTGCACA | 19176 |
| 1235 | AGCAUCCA G UGGGCUGA | 8597 | TCAGCCCA GGCTAGCTACAACGA TGGATGCT | 19177 |
| 1239 | UCCAGUGG G CUGAUGAC | 8598 | GTCATCAG GGCTAGCTACAACGA CCACTGGA | 19178 |
| 1243 | GUGGGCUG A UGACCAAG | 8599 | CTTGGTCA GGCTAGCTACAACGA CAGCCCAC | 19179 |
| 1246 | GGCUGAUG A CCAAGAAG | 8600 | CTTCTTGG GGCTAGCTACAACGA CATCAGCC | 19180 |
| 1256 | CAAGAAGA A CAGCACAU | 8601 | ATGTGCTG GGCTAGCTACAACGA TCTTCTTG | 19181 |
| 1259 | GAAGAACA G CACAUUUG | 8602 | CAAATGTG GGCTAGCTACAACGA TGTTCTTC | 19182 |
| 1261 | AGAACAGC A CAUUUGUC | 6289 | GACAAATG GGCTAGCTACAACGA GCTGTTCT | 19183 |
| 1263 | AACAGCAC A UUUGUCAG | 6290 | CTGACAAA GGCTAGCTACAACGA GTGCTGTT | 19184 |
| 1267 | GCACAUUU G UCAGGGUC | 8603 | GACCCTGA GGCTAGCTACAACGA AAATGTGC | 19185 |
| 1273 | UUGUCAGG G UCCAUGAA | 8604 | TTCATGGA GGCTAGCTACAACGA CCTGACAA | 19186 |
| 1277 | CAGGGUCC A UGAAAAAC | 6293 | GTTTTTCA GGCTAGCTACAACGA GGACCCTG | 19187 |
| 1284 | CAUGAAAA A CCUUUUGU | 8605 | ACAAAAGG GGCTAGCTACAACGA TTTTCATG | 19188 |
| 1291 | AACCUUUU G UUGCUUUU | 8606 | AAAAGCAA GGCTAGCTACAACGA AAAAGGTT | 19189 |
| 1294 | CUUUUGUU G CUUUUGGA | 8607 | TCCAAAAG GGCTAGCTACAACGA AACAAAAG | 19190 |
| 1304 | UUUUGGAA G UGGCAUGG | 8608 | CCATGCCA GGCTAGCTACAACGA TTCCAAAA | 19191 |
| 1307 | UGGAAGUG G CAUGGAAU | 8609 | ATTCCATG GGCTAGCTACAACGA CACTTCCA | 19192 |
| 1309 | GAAGUGGC A UGGAAUCU | 6297 | AGATTCCA GGCTAGCTACAACGA GCCACTTC | 19193 |
| 1314 | GGCAUGGA A UCUCUGGU | 8610 | ACCAGAGA GGCTAGCTACAACGA TCCATGCC | 19194 |
| 1321 | AAUCUCUG G UGGAAGCC | 8611 | GGCTTCCA GCCTAGCTACAACGA CAGAGATT | 19195 |
| 1327 | UGGUGGAA G CCACGGUG | 8612 | CACCGTGG GGCTAGCTACAACGA TTCCACCA | 19196 |
| 1330 | UGGAAGCC A CGGUGGGG | 6301 | CCCCACCG GGCTAGCTACAACGA GGCTTCCA | 19197 |
| 1333 | AAGCCACG G UGGGGGAG | 8613 | CTCCCCCA GGCTAGCTACAACGA CGTGGCTT | 19198 |
| 1341 | GUGGGGGA G CGUGUCAG | 8614 | CTGACACG GGCTAGCTACAACGA TCCCCCAC | 19199 |
| 1343 | GGGGGAGC G UGUCAGAA | 8615 | TTCTGACA GGCTAGCTACAACGA GCTCCCCC | 19200 |
| 1345 | GGGAGCGU G UCAGAAUC | 8616 | GATTCTGA GGCTAGCTACAACGA ACGCTCCC | 19201 |
| 1351 | GUGUCAGA A UCCCUGCG | 8617 | CGCAGGGA GGCTAGCTACAACGA TCTGACAC | 19202 |
| 1357 | GAAUCCCU G CGAAGUAC | 8618 | GTACTTCG GGCTAGCTACAACGA AGGGATTC | 19203 |
| 1362 | CCUGCGAA G UACCUUGG | 8619 | CCAAGGTA GCCTAGCTACAACGA TTCGCAGG | 19204 |
| 1364 | UGCGAAGU A CCUUGGUU | 1686 | AACCAAGG GCCTAGCTACAACGA ACTTCGCA | 19205 |
| 1370 | GUACCUUG G UUACCCAC | 8620 | GTGGGTAA GGCTAGCTACAACGA CAAGGTAC | 19206 |
| 1373 | CCUUGGUU A CCCACCCC | 1689 | GGGGTGGG GGCTAGCTACAACGA AACCAAGG | 19207 |
| 1377 | GGUUACCC A CCCCCAGA | 6310 | TCTGGGGG GGCTAGCTACAACGA GGGTAACC | 19208 |
| 1387 | CCCCAGAA A UAAAAUGG | 8621 | CCATTTTA GGCTAGCTACAACGA TTCTGGGG | 19209 |
| 1392 | GAAAUAAA A UGGUAUAA | 8622 | TTATACCA GGCTAGCTACAACGA TTTATTTC | 19210 |
| 1395 | AUAAAAUG G UAUAAAAA | 8623 | TTTTTATA GGCTAGCTACAACGA CATTTTAT | 19211 |
| 1397 | AAAAUGGU A UAAAAAUG | 1691 | CATTTTTA GGCTAGCTACAACGA ACCATTTT | 19212 |
| 1403 | GUAUAAAA A UGGAAUAC | 8624 | GTATTCCA GGCTAGCTACAACGA TTTTATAC | 19213 |
| 1408 | AAAAUGGA A UACCCCUU | 8625 | AAGGGGTA GGCTAGCTACAACGA TCCATTTT | 19214 |
| 1410 | AAUGGAAU A CCCCUUGA | 1693 | TCAAGGGG GGCTAGCTACAACGA ATTCCATT | 19215 |
| 1419 | CCCCUUGA G UCCAAUCA | 8626 | TGATTGGA GGCTAGCTACAACGA TCAAGGGG | 19216 |
| 1424 | UGAGUCCA A UCACACAA | 8627 | TTGTGTGA GGCTAGCTACAACGA TGGACTCA | 19217 |
| 1427 | GUCCAAUC A CACAAUUA | 6322 | TAATTGTG GGCTAGCTACAACGA GATTGGAC | 19218 |
| 1429 | CCAAUCAC A CAAUUAAA | 6323 | TTTAATTG GGCTAGCTACAACGA GTCATTGG | 19219 |
| 1432 | AUCACACA A UUAAAGCG | 8628 | CGCTTTAA GGCTAGCTACAACGA TGTGTGAT | 19220 |
| 1438 | CAAUUAAA G CGGGGCAU | 8629 | ATGCCCCG GGCTAGCTACAACGA TTTAATTG | 19221 |
| 1443 | AAAGCGGG G CAUGUACU | 8630 | AGTACATG GGCTAGCTACAACGA CCCGCTTT | 19222 |
| 1445 | AGCGGGGC A UGUACUGA | 6325 | TCAGTACA GGCTAGCTACAACGA GCCCCGCT | 19223 |
| 1447 | CGGGGCAU G UACUGACG | 8631 | CGTCAGTA GGCTAGCTACAACGA ATGCCCCG | 19224 |
| 1449 | GGGCAUGU A CUGACGAU | 1699 | ATCGTCAG GGCTAGCTACAACGA ACATGCCC | 19225 |
| 1453 | AUGUACUG A CGAUUAUG | 8632 | CATAATCG GCCTAGCTACAACGA CAGTACAT | 19226 |
| 1456 | UACUGACG A UUAUGGAA | 8633 | TTCCATAA GGCTAGCTACAACGA CGTCAGTA | 19227 |
| 1459 | UGACGAUU A UGGAAGUG | 1701 | CACTTCCA GGCTAGCTACAACGA AATCGTCA | 19228 |
| 1465 | UUAUGGAA G UGAGUGAA | 8634 | TTCACTCA GGCTAGCTACAACGA TTCCATAA | 19229 |
| 1469 | GGAAGUGA G UGAAAGAG | 8635 | CTCTTTCA GGCTAGCTACAACGA TCACTTCC | 19230 |
| 1478 | UGAAAGAG A CACAGGAA | 8636 | TTCCTGTG GCCTAGCTACAACGA CTCTTTCA | 19231 |
| 1480 | AAAGAGAC A CAGGAAAU | 6327 | ATTTCCTG GGCTAGCTACAACGA GTCTCTTT | 19232 |
| 1487 | CACAGGAA A UUACACUG | 8637 | CAGTGTAA GGCTAGCTACAACGA TTCCTGTG | 19233 |
| 1490 | AGGAAAUU A CACUGUCA | 1703 | TGACAGTG GGCTAGCTACAACGA AATTTCCT | 19234 |
| 1492 | GAAAUUAC A CUGUCAUC | 6329 | GATGACAG GGCTAGCTACAACGA GTAATTTC | 19235 |
| 1495 | AUUACACU G UCAUCCUU | 8638 | AAGGATGA GGCTAGCTACAACGA AGTGTAAT | 19236 |
| 1498 | ACACUGUC A UCCUUACC | 6331 | GGTAAGGA GGCTAGCTACAACGA GACAGTGT | 19237 |
| 1504 | UCAUCCUU A CCAAUCCC | 1707 | GGGATTGG GGCTAGCTACAACGA AAGGATGA | 19238 |
| 1508 | CCUUACCA A UCCCAUUU | 8639 | AAATGGGA GGCTAGCTACAACGA TGGTAAGG | 19239 |
| 1513 | CCAAUCCC A UUUCAAAG | 6338 | CTTTGAAA GGCTAGCTACAACGA GGGATTGG | 19240 |
| 1527 | AAGGAGAA G CAGAGCCA | 8640 | TGGCTCTG GGCTAGCTACAACGA TTCTCCTT | 19241 |
| 1532 | GAAGCAGA G CCAUGUGG | 8641 | CCACATGG GGCTAGCTACAACGA TCTGCTTC | 19242 |
| 1535 | GCAGAGCC A UGUGGUCU | 6342 | AGACCACA GGCTAGCTACAACGA GGCTCTGC | 19243 |
| 1537 | AGAGCCAU G UGGUCUCU | 8642 | AGAGACCA GGCTAGCTACAACGA ATGGCTCT | 19244 |
| 1540 | GCCAUGUG G UCUCUCUG | 8643 | CAGAGAGA GGCTAGCTACAACGA CACATGGC | 19245 |
| 1549 | UCUCUCUG G UUGUGUAU | 8644 | ATACACAA GGCTAGCTACAACGA CAGAGAGA | 19246 |
| 1552 | CUCUGGUU G UGUAUGUC | 8645 | GACATACA GGCTAGCTACAACGA AACCAGAG | 19247 |
| 1554 | CUGGUUGU G UAUGUCCC | 8646 | GGGACATA GGCTAGCTACAACGA ACAACCAG | 19248 |
| 1556 | GGUUGUGU A UGUCCCAC | 1716 | GTGGGACA GGCTAGCTACAACGA ACACAACC | 19249 |
| 1558 | UUGUGUAU G UCCCACCC | 8647 | GGGTGGGA GGCTAGCTACAACGA ATACACAA | 19250 |
| 1563 | UAUGUCCC A CCCCAGAU | 6348 | ATCTGGGG GGCTAGCTACAACGA GGGACATA | 19251 |
| 1570 | CACCCCAG A UUGGUGAG | 8648 | CTCACCAA GGCTAGCTACAACGA CTGGGGTG | 19252 |
| 1574 | CCAGAUUG G UGAGAAAU | 8649 | ATTTCTCA GGCTAGCTACAACGA CAATCTGG | 19253 |
| 1581 | GGUGAGAA A UCUCUAAU | 8650 | ATTAGAGA GGCTAGCTACAACGA TTCTCACC | 19254 |
| 1588 | AAUCUCUA A UCUCUCCU | 8651 | AGGAGAGA GGCTAGCTACAACGA TAGAGATT | 19255 |
| 1597 | UCUCUCCU G UGGAUUCC | 8652 | GGAATCCA GGCTAGCTACAACGA AGGAGAGA | 19256 |
| 1601 | UCCUGUGG A UUCCUACC | 8653 | GGTAGGAA GGCTAGCTACAACGA CCACAGGA | 19257 |
| 1607 | GGAUUCCU A CCAGUACG | 1727 | CGTACTGG GGCTAGCTACAACGA AGGAATCC | 19258 |
| 1611 | UCCUACCA G UACGGCAC | 8654 | GTGCCGTA GGCTAGCTACAACGA TGGTAGGA | 19259 |
| 1613 | CUACCAGU A CGGCACCA | 1728 | TGGTGCCG GGCTAGCTACAACGA ACTGGTAG | 19260 |
| 1616 | CCAGUACG G CACCACUC | 8655 | GAGTGGTG GGCTAGCTACAACGA CGTACTGG | 19261 |
| 1618 | AGUACGGC A CCACUCAA | 6363 | TTGAGTGG GGCTAGCTACAACGA GCCGTACT | 19262 |
| 1621 | ACGGCACC A CUCAAACG | 6365 | CGTTTGAG GGCTAGCTACAACGA GGTGCCGT | 19263 |
| 1627 | CCACUCAA A CGCUGACA | 8656 | TGTCAGCG GGCTAGCTACAACGA TTGAGTGG | 19264 |
| 1629 | ACUCAAAC G CUGACAUG | 8657 | CATGTCAG GGCTAGCTACAACGA GTTTGAGT | 19265 |
| 1633 | AAACGCUG A CAUGUACG | 8658 | CGTACATG GGCTAGCTACAACGA CAGCGTTT | 19266 |
| 1635 | ACGCUGAC A UGUACGGU | 6369 | ACCGTACA GGCTAGCTACAACGA GTCAGCGT | 19267 |
| 1637 | GCUGACAU G UACGGUCU | 8659 | AGACCGTA GGCTAGCTACAACGA ATGTCAGC | 19268 |
| 1639 | UGACAUGU A CGGUCUAU | 1730 | ATAGACCG GGCTAGCTACAACGA ACATGTCA | 19269 |
| 1642 | CAUGUACG G UCUAUGCC | 8660 | GGCATAGA GGCTAGCTACAACGA CGTACATG | 19270 |
| 1646 | UACGGUCU A UGCCAUUC | 1732 | GAATGGCA GGCTAGCTACAACGA AGACCGTA | 19271 |
| 1648 | CGGUCUAU G CCAUUCCU | 8661 | AGGAATGG GGCTAGCTACAACGA ATAGACCG | 19272 |
| 1651 | UCUAUGCC A UUCCUCCC | 6372 | GGGAGGAA GGCTAGCTACAACGA GGCATAGA | 19273 |
| 1662 | CCUCCCCC G CAUCACAU | 8662 | ATGTGATG GGCTAGCTACAACGA GGGGGAGG | 19274 |
| 1664 | UCCCCCGC A UCACAUCC | 6379 | GGATGTGA GGCTAGCTACAACGA GCGGGGGA | 19275 |
| 1667 | CCCGCAUC A CAUCCACU | 6380 | AGTGGATG GGCTAGCTACAACGA GATGCGGG | 19276 |
| 1669 | CGCAUCAC A UCCACUGG | 6381 | CCAGTGGA GGCTAGCTACAACGA GTGATGCG | 19277 |
| 1673 | UCACAUCC A CUGGUAUU | 6383 | AATACCAG GGCTAGCTACAACGA GGATGTGA | 19278 |
| 1677 | AUCCACUG G UAUUGGCA | 8663 | TGCCAATA GGCTAGCTACAACGA CAGTGGAT | 19279 |
| 1679 | CCACUGGU A UUGGCAGU | 1738 | ACTGCCAA GGCTAGCTACAACGA ACCAGTGG | 19280 |
| 1683 | UGGUAUUG G CAGUUGGA | 8664 | TCCAACTG GGCTAGCTACAACGA CAATACCA | 19281 |
| 1686 | UAUUGGCA G UUGGAGGA | 8665 | TCCTCCAA GGCTAGCTACAACGA TGCCAATA | 19282 |
| 1698 | GAGGAAGA G UGCGCCAA | 8666 | TTGGCGCA GGCTAGCTACAACGA TCTTCCTC | 19283 |
| 1700 | GGAAGAGU G CGCCAACG | 8667 | CGTTGGCG GGCTAGCTACAACGA ACTCTTCC | 19284 |
| 1702 | AAGAGUGC G CCAACGAG | 8668 | CTCGTTGC GGCTAGCTACAACGA GCACTCTT | 19285 |
| 1706 | GUGCGCCA A CGAGCCCA | 8669 | TGGGCTCG GGCTAGCTACAACGA TGGCGCAC | 19286 |
| 1710 | GCCAACGA G CCCAGCCA | 8670 | TGGCTGGG GGCTAGCTACAACGA TCGTTGGC | 19287 |
| 1715 | CGAGCCCA G CCAAGCUG | 8671 | CAGCTTGG GGCTAGCTACAACGA TGGGCTCG | 19288 |
| 1720 | CCAGCCAA G CUGUCUCA | 8672 | TGAGACAG GGCTAGCTACAACGA TTGGCTGG | 19289 |
| 1723 | GCCAAGCU G UCUCAGUG | 8673 | CACTGAGA GGCTAGCTACAACGA AGCTTGGC | 19290 |
| 1729 | CUGUCUCA G UGACAAAC | 8674 | GTTTGTCA GGCTAGCTACAACGA TGAGACAG | 19291 |
| 1732 | UCUCAGUG A CAAACCCA | 8675 | TGGGTTTG GGCTAGCTACAACGA CACTGAGA | 19292 |
| 1736 | AGUGACAA A CCCAUACC | 8676 | GGTATGGG GGCTAGCTACAACGA TTGTCACT | 19293 |
| 1740 | ACAAACCC A UACCCUUG | 6399 | CAAGGGTA GGCTAGCTACAACGA GGGTTTGT | 19294 |
| 1742 | AAACCCAU A CCCUUGUG | 1743 | CACAAGGG GGCTAGCTACAACGA ATGGGTTT | 19295 |
| 1748 | AUACCCUU G UGAAGAAU | 8677 | ATTCTTCA GGCTAGCTACAACGA AAGGGTAT | 19296 |
| 1755 | UGUGAAGA A UGGAGAAG | 8678 | CTTCTCCA GGCTAGCTACAACGA TCTTCACA | 19297 |
| 1763 | AUGGAGAA G UGUGGAGG | 8679 | CCTCCACA GGCTAGCTACAACGA TTCTCCAT | 19298 |
| 1765 | GGAGAAGU G UGGAGGAC | 8680 | GTCCTCCA GGCTAGCTACAACGA ACTTCTCC | 19299 |
| 1772 | UGUGGAGG A CUUCCAGG | 8681 | CCTGGAAG GGCTAGCTACAACGA CCTCCACA | 19300 |
| 1787 | GGGAGGAA A UAAAAUUG | 8682 | CAATTTTA GGCTAGCTACAACGA TTCCTCCC | 19301 |
| 1792 | GAAAUAAA A UUGAAGUU | 8683 | AACTTCAA GGCTAGCTACAACGA TTTATTTC | 19302 |
| 1798 | AAAUUGAA G UUAAUAAA | 8684 | TTTATTAA GGCTAGCTACAACGA TTCAATTT | 19303 |
| 1802 | UGAAGUUA A UAAAAAUC | 8685 | GATTTTTA GGCTAGCTACAACGA TAACTTCA | 19304 |
| 1808 | UAAUAAAA A UCAAUUUG | 8686 | CAAATTGA GGCTAGCTACAACGA TTTTATTA | 19305 |
| 1812 | AAAAAUCA A UUUGCUCU | 8687 | AGAGCAAA GGCTAGCTACAACGA TGATTTTT | 19306 |
| 1816 | AUCAAUUU G CUCUAAUU | 8688 | AATTAGAG GGCTAGCTACAACGA AAATTGAT | 19307 |
| 1822 | UUGCUCUA A UUGAAGGA | 8689 | TCCTTCAA GGCTAGCTACAACGA TAGAGCAA | 19308 |
| 1835 | AGGAAAAA A CAAAACUG | 8690 | CAGTTTTG GGCTAGCTACAACGA TTTTTCCT | 19309 |
| 1840 | AAAACAAA A CUGUAAGU | 8691 | ACTTACAG GCCTAGCTACAACGA TTTGTTTT | 19310 |
| 1843 | ACAAAACU G UAAGUACC | 8692 | GGTACTTA GGCTAGCTACAACGA AGTTTTGT | 19311 |
| 1847 | AACUGUAA G UACCCUUG | 8693 | CAAGGGTA GGCTAGCTACAACGA TTACAGTT | 19312 |
| 1849 | CUGUAAGU A CCCUUGUU | 1759 | AACAAGGG GGCTAGCTACAACGA ACTTACAG | 19313 |
| 1855 | GUACCCUU G UUAUCCAA | 8694 | TTGGATAA GGCTAGCTACAACGA AAGGGTAC | 19314 |
| 1858 | CCCUUGUU A UCCAAGCG | 1762 | CGCTTGGA GGCTAGCTACAACGA AACAAGGG | 19315 |
| 1864 | UUAUCCAA G CGGCAAAU | 8695 | ATTTGCCG GGCTAGCTACAACGA TTGGATAA | 19316 |
| 1867 | UCCAAGCG G CAAAUGUG | 8696 | CACATTTG GGCTAGCTACAACGA CGCTTGGA | 19317 |
| 1871 | AGCGGCAA A UCUGUCAG | 8697 | CTGACACA GGCTAGCTACAACGA TTGCCGCT | 19318 |
| 1873 | CGGCAAAU G UGUCAGCU | 8698 | AGCTGACA GGCTAGCTACAACGA ATTTGCCG | 19319 |
| 1875 | GCAAAUGU G UCAGCUUU | 8699 | AAAGCTGA GGCTAGCTACAACGA ACATTTGC | 19320 |
| 1879 | AUGUGUCA G CUUUGUAC | 8700 | GTACAAAG GGCTAGCTACAACGA TGACACAT | 19321 |
| 1884 | UCAGCUUU G UACAAAUG | 8701 | CATTTGTA GGCTAGCTACAACGA AAAGCTGA | 19322 |
| 1886 | AGCUUUGU A CAAAUGUG | 1767 | CACATTTG GGCTAGCTACAACGA ACAAAGCT | 19323 |
| 1890 | UUGUACAA A UGUGAAGC | 8702 | GCTTCACA GGCTAGCTACAACGA TTGTACAA | 19324 |
| 1892 | GUACAAAU G UGAAGCGG | 8703 | CCGCTTCA GGCTAGCTACAACGA ATTTGTAC | 19325 |
| 1897 | AAUGUGAA G CGGUCAAC | 8704 | GTTGACCG GGCTAGCTACAACGA TTCACATT | 19326 |
| 1900 | GUGAAGCG G UCAACAAA | 8705 | TTTGTTGA GGCTAGCTACAACGA CGCTTCAC | 19327 |
| 1904 | AGCGGUCA A CAAAGUCG | 8706 | CGACTTTG GCCTAGCTACAACGA TGACCGCT | 19328 |
| 1909 | UCAACAAA G UCGGGAGA | 8707 | TCTCCCGA GGCTACCTACAACGA TTTGTTGA | 19329 |
| 1927 | GAGAGAGG G UGAUCUCC | 8708 | GGAGATCA GGCTAGCTACAACGA CCTCTCTC | 19330 |
| 1930 | AGAGGGUG A UCUCCUUC | 8709 | GAAGGAGA GGCTAGCTACAACGA CACCCTCT | 19331 |
| 1940 | CUCCUUCC A CGUGACCA | 6426 | TGGTCACG GGCTAGCTACAACGA GGAAGGAG | 19332 |
| 1942 | CCUUCCAC G UGACCAGG | 8710 | CCTGGTCA GGCTAGCTACAACGA GTGGAAGG | 19333 |
| 1945 | UCCACGUG A CCAGGGGU | 8711 | ACCCCTGG GGCTAGCTACAACGA CACGTGGA | 19334 |
| 1952 | GACCAGGG G UCCUGAAA | 8712 | TTTCAGGA GGCTAGCTACAACGA CCCTGGTC | 19335 |
| 1960 | GUCCUGAA A UUACUUUG | 8713 | CAAAGTAA GGCTAGCTACAACGA TTCAGGAC | 19336 |
| 1963 | CUGAAAUU A CUUUGCAA | 1776 | TTGCAAAG GGCTAGCTACAACGA AATTTCAG | 19337 |
| 1968 | AUUACUUU G CAACCUGA | 8714 | TCAGGTTG GGCTAGCTACAACGA AAAGTAAT | 19338 |
| 1971 | ACUUUGCA A CCUGACAU | 8715 | ATGTCAGG GGCTAGCTACAACGA TGCAAAGT | 19339 |
| 1976 | GCAACCUG A CAUGCAGC | 8716 | GCTGCATG GGCTAGCTACAACGA CAGGTTGC | 19340 |
| 1978 | AACCUGAC A UGCAGCCC | 6435 | GGGCTGCA GGCTAGCTACAACGA GTCAGGTT | 19341 |
| 1980 | CCUGACAU G CAGCCCAC | 8717 | GTGGGCTG GGCTAGCTACAACGA ATGTCAGG | 19342 |
| 1983 | GACAUGCA G CCCACUGA | 8718 | TCAGTGGG GGCTAGCTACAACGA TGCATGTC | 19343 |
| 1987 | UGCAGCCC A CUGAGCAG | 6439 | CTGCTCAG GGCTAGCTACAACGA GGGCTGCA | 19344 |
| 1992 | CCCACUGA G CAGGAGAG | 8719 | CTCTCCTG GGCTAGCTACAACGA TCAGTGGG | 19345 |
| 2000 | GCAGGAGA G CGUGUCUU | 8720 | AAGACACG GGCTAGCTACAACGA TCTCCTGC | 19346 |
| 2002 | AGGAGAGC G UGUCUUUG | 8721 | CAAAGACA GGCTAGCTACAACGA GCTCTCCT | 19347 |
| 2004 | GAGAGCGU G UCUUUGUG | 8722 | CACAAAGA GGCTAGCTACAACGA ACGCTCTC | 19348 |
| 2010 | GUGUCUUU G UGGUGCAC | 8723 | GTGCACCA GGCTAGCTACAACGA AAAGACAC | 19349 |
| 2013 | UCUUUGUG G UGCACUGC | 8724 | GCAGTGCA GGCTAGCTACAACGA CACAAAGA | 19350 |
| 2015 | UUUGUGGU G CACUGCAG | 8725 | CTGCAGTG GGCTAGCTACAACGA ACCACAAA | 19351 |
| 2017 | UGUGGUGC A CUGCAGAC | 6443 | GTCTGCAG GGCTAGCTACAACGA GCACCACA | 19352 |
| 2020 | GGUGCACU G CAGACAGA | 8726 | TCTGTCTG GGCTAGCTACAACGA AGTGCACC | 19353 |
| 2024 | CACUGCAG A CAGAUCUA | 8727 | TAGATCTG GGCTAGCTACAACGA CTGCAGTG | 19354 |
| 2028 | GCAGACAG A UCUACGUU | 8728 | AACGTAGA GGCTAGCTACAACGA CTGTCTGC | 19355 |
| 2032 | ACAGAUCU A CGUUUGAG | 1783 | CTCAAACG GGCTAGCTACAACGA AGATCTGT | 19356 |
| 2034 | AGAUCUAC G UUUGAGAA | 8729 | TTCTCAAA GGCTAGCTACAACGA GTAGATCT | 19357 |
| 2042 | GUUUGAGA A CCUCACAU | 8730 | ATGTGAGG GGCTAGCTACAACGA TCTCAAAC | 19358 |
| 2047 | AGAACCUC A CAUGGUAC | 6450 | GTACCATG GGCTAGCTACAACGA GAGGTTCT | 19359 |
| 2049 | AACCUCAC A UGGUACAA | 6451 | TTGTACCA GGCTAGCTACAACGA GTGAGGTT | 19360 |
| 2052 | CUCACAUG G UACAAGCU | 8731 | AGCTTGTA GGCTAGCTACAACGA CATGTGAG | 19361 |
| 2054 | CACAUGGU A CAAGCUUG | 1787 | CAAGCTTG GGCTAGCTACAACGA ACCATGTG | 19362 |
| 2058 | UGGUACAA G CUUGGCCC | 8732 | GGGCCAAG GGCTAGCTACAACGA TTGTACCA | 19363 |
| 2063 | CAAGCUUG G CCCACAGC | 8733 | GCTGTGGG GGCTAGCTACAACGA CAAGCTTG | 19364 |
| 2067 | CUUGGCCC A CAGCCUCU | 6456 | AGAGGCTG GGCTAGCTACAACGA GGGCCAAG | 19365 |
| 2070 | GGCCCACA G CCUCUGCC | 8734 | GGCAGAGG GGCTAGCTACAACGA TGTGGGCC | 19366 |
| 2076 | CAGCCUCU G CCAAUCCA | 8735 | TGGATTGG GGCTAGCTACAACGA AGAGGCTG | 19367 |
| 2080 | CUCUGCCA A UCCAUGUG | 8736 | CACATGGA GGCTAGCTACAACGA TGGCAGAG | 19368 |
| 2084 | GCCAAUCC A UGUGGGAG | 6464 | CTCCCACA GGCTAGCTACAACGA GGATTGGC | 19369 |
| 2086 | CAAUCCAU G UGGGAGAG | 8737 | CTCTCCCA GGCTAGCTACAACGA ATGGATTG | 19370 |
| 2094 | GUGGGAGA G UUGCCCAC | 8738 | GTGGGCAA GGCTAGCTACAACGA TCTCCCAC | 19371 |
| 2097 | GGAGAGUU G CCCACACC | 8739 | GGTGTGGG GGCTAGCTACAACGA AACTCTCC | 19372 |
| 2101 | AGUUGCCC A CACCUGUU | 6467 | AACAGGTG GGCTAGCTACAACGA GGGCAACT | 19373 |
| 2103 | UUGCCCAC A CCUGUUUG | 6468 | CAAACAGG GGCTAGCTACAACGA GTGGGCAA | 19374 |
| 2107 | CCACACCU G UUUGCAAG | 8740 | CTTGCAAA GGCTAGCTACAACGA AGGTGTGG | 19375 |
| 2111 | ACCUGUUU G CAAGAACU | 8741 | AGTTCTTG GGCTAGCTACAACGA AAACAGGT | 19376 |
| 2117 | UUGCAAGA A CUUGGAUA | 8742 | TATCCAAG GGCTAGCTACAACGA TCTTGCAA | 19377 |
| 2123 | GAACUUGG A UACUCUUU | 8743 | AAAGAGTA GGCTAGCTACAACGA CCAAGTTC | 19378 |
| 2125 | ACUUGGAU A CUCUUUGG | 1795 | CCAAAGAG GGCTAGCTACAACGA ATCCAAGT | 19379 |
| 2136 | CUUUGGAA A UUGAAUGC | 8744 | GCATTCAA GGCTAGCTACAACGA TTCCAAAG | 19380 |
| 2141 | GAAAUUGA A UGCCACCA | 8745 | TGGTGGCA GGCTAGCTACAACGA TCAATTTC | 19381 |
| 2143 | AAUUGAAU G CCACCAUG | 8746 | CATGGTGG GGCTAGCTACAACGA ATTCAATT | 19382 |
| 2146 | UGAAUGCC A CCAUGUUC | 6476 | GAACATGG GGCTAGCTACAACGA GGCATTCA | 19383 |
| 2149 | AUGCCACC A UGUUCUCU | 6478 | AGAGAACA GGCTAGCTACAACGA GGTGGCAT | 19384 |
| 2151 | GCCACCAU G UUCUCUAA | 8747 | TTAGAGAA GGCTAGCTACAACGA ATGGTGGC | 19385 |
| 2159 | GUUCUCUA A UAGCACAA | 8748 | TTGTGCTA GGCTAGCTACAACGA TAGAGAAC | 19386 |
| 2162 | CUCUAAUA G CACAAAUG | 8749 | CATTTGTG GGCTAGCTACAACGA TATTAGAG | 19387 |
| 2164 | CUAAUAGC A CAAAUGAC | 6481 | GTCATTTG GGCTAGCTACAACGA GCTATTAG | 19388 |
| 2168 | UAGCACAA A UGACAUUU | 8750 | AAATGTCA GGCTAGCTACAACGA TTGTGCTA | 19389 |
| 2171 | CACAAAUG A CAUUUUGA | 8751 | TCAAAATG GGCTAGCTACAACGA CATTTGTG | 19390 |
| 2173 | CAAAUGAC A UUUUGAUC | 6483 | GATCAAAA GGCTAGCTACAACGA GTCATTTG | 19391 |
| 2179 | ACAUUUUG A UCAUGGAG | 8752 | CTCCATGA GGCTAGCTACAACGA CAAAATGT | 19392 |
| 2182 | UUUUGAUC A UGGAGCUU | 6484 | AAGCTCCA GGCTAGCTACAACGA GATCAAAA | 19393 |
| 2187 | AUCAUGGA G CUUAAGAA | 8753 | TTCTTAAG GGCTAGCTACAACGA TCCATGAT | 19394 |
| 2195 | GCUUAAGA A UGCAUCCU | 8754 | AGGATGCA GGCTAGCTACAACGA TCTTAAGC | 19395 |
| 2197 | UUAAGAAU G CAUCCUUG | 8755 | CAAGGATG GGCTAGCTACAACGA ATTCTTAA | 19396 |
| 2199 | AAGAAUGC A UCCUUGCA | 6486 | TGCAAGGA GGCTAGCTACAACGA GCATTCTT | 19397 |
| 2205 | GCAUCCUU G CAGGACCA | 8756 | TGGTCCTG GGCTAGCTACAACGA AAGGATGC | 19398 |
| 2210 | CUUGCAGG A CCAAGGAG | 8757 | CTCCTTGG GGCTAGCTACAACGA CCTGCAAG | 19399 |
| 2219 | CCAAGGAG A CUAUGUCU | 8758 | AGACATAG GGCTAGCTACAACGA CTCCTTGG | 19400 |
| 2222 | AGGAGACU A UGUCUGCC | 1813 | GGCAGACA GGCTAGCTACAACGA AGTCTCCT | 19401 |
| 2224 | GAGACUAU G UCUGCCUU | 8759 | AAGGCAGA GGCTAGCTACAACGA ATAGTCTC | 19402 |
| 2228 | CUAUGUCU G CCUUGCUC | 8760 | GAGCAAGG GGCTAGCTACAACGA AGACATAG | 19403 |
| 2233 | UCUGCCUU G CUCAAGAC | 8761 | GTCTTGAG GGCTAGCTACAACGA AAGGCAGA | 19404 |
| 2240 | UGCUCAAG A CAGGAAGA | 8762 | TCTTCCTG GGCTAGCTACAACGA CTTGAGCA | 19405 |
| 2248 | ACAGGAAG A CCAAGAAA | 8763 | TTTCTTGG GGCTAGCTACAACGA CTTCCTGT | 19406 |
| 2259 | AAGAAAAG A CAUUGCGU | 8764 | ACGCAATG GGCTAGCTACAACGA CTTTTCTT | 19407 |
| 2261 | GAAAAGAC A UUGCGUGG | 6501 | CCACGCAA GGCTAGCTACAACGA GTCTTTTC | 19408 |
| 2264 | AAGACAUU G CGUGGUCA | 8765 | TGACCACG GGCTAGCTACAACGA AATGTCTT | 19409 |
| 2266 | GACAUUGC G UGGUCAGG | 8766 | CCTGACCA GGCTAGCTACAACGA GCAATGTC | 19410 |
| 2269 | AUUGCGUG G UCAGGCAG | 8767 | CTGCCTGA GGCTAGCTACAACGA CACGCAAT | 19411 |
| 2274 | GUGGUCAG G CAGCUCAC | 8768 | GTGAGCTG GGCTAGCTACAACGA CTGACCAC | 19412 |
| 2277 | GUCAGGCA G CUCACAGU | 8769 | ACTGTGAG GGCTAGCTACAACGA TGCCTGAC | 19413 |
| 2281 | GGCAGCUC A CAGUCCUA | 6505 | TAGGACTG GGCTAGCTACAACGA GAGCTGCC | 19414 |
| 2284 | AGCUCACA G UCCUAGAG | 8770 | CTCTAGGA GGCTAGCTACAACGA TGTGAGCT | 19415 |
| 2292 | GUCCUAGA G CGUGUGGC | 8771 | GCCACACG GGCTAGCTACAACGA TCTAGGAC | 19416 |
| 2294 | CCUAGAGC G UGUGGCAC | 8772 | GTGCCACA GGCTAGCTACAACGA GCTCTAGG | 19417 |
| 2296 | UAGAGCGU G UGGCACCC | 8773 | GGGTGCCA GGCTAGCTACAACGA ACGCTCTA | 19418 |
| 2299 | AGCGUGUG G CACCCACG | 8774 | CGTGGGTG GGCTAGCTACAACGA CACACGCT | 19419 |
| 2301 | CGUGUGGC A CCCACGAU | 6509 | ATCGTGGG GGCTAGCTACAACGA GCCACACG | 19420 |
| 2305 | UGGCACCC A CGAUCACA | 6512 | TGTGATCG GGCTAGCTACAACGA GGGTGCCA | 19421 |
| 2308 | CACCCACG A UCACAGGA | 8775 | TCCTGTGA GGCTAGCTACAACGA CGTGGGTG | 19422 |
| 2311 | CCACGAUC A CAGGAAAC | 6513 | GTTTCCTG GGCTAGCTACAACGA GATCGTGG | 19423 |
| 2318 | CACAGGAA A CCUGGAGA | 8776 | TCTCCAGG GGCTAGCTACAACGA TTCCTGTG | 19424 |
| 2327 | CCUGGAGA A UCAGACGA | 8777 | TCGTCTGA GGCTAGCTACAACGA TCTCCAGG | 19425 |
| 2332 | AGAAUCAG A CGACAAGU | 8778 | ACTTGTCG GGCTAGCTACAACGA CTGATTCT | 19426 |
| 2335 | AUCAGACG A CAAGUAUU | 8779 | AATACTTG GGCTAGCTACAACGA CGTCTGAT | 19427 |
| 2339 | GACGACAA G UAUUGGGG | 8780 | CCCCAATA GGCTAGCTACAACGA TTGTCGTC | 19428 |
| 2341 | CGACAAGU A UUGGGGAA | 1824 | TTCCCCAA GGCTAGCTACAACGA ACTTGTCG | 19429 |
| 2351 | UGGGGAAA G CAUCGAAG | 8781 | CTTCGATG GGCTAGCTACAACGA TTTCCCCA | 19430 |
| 2353 | GGGAAAGC A UCGAAGUC | 6519 | GACTTCGA GGCTAGCTACAACGA GCTTTCCC | 19431 |
| 2359 | GCAUCGAA G UCUCAUGC | 8782 | GCATGAGA GGCTAGCTACAACGA TTCGATGC | 19432 |
| 2364 | GAAGUCUC A UGCACGGC | 6521 | GCCGTGCA GGCTAGCTACAACGA GAGACTTC | 19433 |
| 2366 | AGUCUCAU G CACGGCAU | 8783 | ATGCCGTG GGCTAGCTACAACGA ATGAGACT | 19434 |
| 2368 | UCUCAUGC A CGGCAUCU | 6522 | AGATGCCG GGCTAGCTACAACGA GCATGAGA | 19435 |
| 2371 | CAUGCACG G CAUCUGGG | 8784 | CCCAGATG GGCTAGCTACAACGA CGTGCATG | 19436 |
| 2373 | UGCACGGC A UCUGGGAA | 6523 | TTCCCAGA GGCTAGCTACAACGA GCCGTGCA | 19437 |
| 2381 | AUCUGGGA A UCCCCCUC | 8785 | GAGGGGGA GGCTAGCTACAACGA TCCCAGAT | 19438 |
| 2391 | CCCCCUCC A CAGAUCAU | 6531 | ATGATCTG GGCTAGCTACAACGA GGAGGGGG | 19439 |
| 2395 | CUCCACAG A UCAUGUGG | 8786 | CCACATGA GGCTAGCTACAACGA CTGTGGAG | 19440 |
| 2398 | CACAGAUC A UGUGGUUU | 6533 | AAACCACA GGCTAGCTACAACCA GATCTGTG | 19441 |
| 2400 | CAGAUCAU G UGGUUUAA | 8787 | TTAAACCA GGCTAGCTACAACGA ATGATCTG | 19442 |
| 2403 | AUCAUGUG G UGGAAAGA | 8788 | TCTTTAAA GGCTAGCTACAACGA CACATGAT | 19443 |
| 2411 | GUUUAAAG A UAAUGAGA | 8789 | TCTCATTA GGCTAGCTACAACGA CTTTAAAC | 19444 |
| 2414 | UAAAGAUA A UGAGACCC | 8790 | GGGTCTCA GGCTAGCTACAACGA TATCTTTA | 19445 |
| 2419 | AUAAUGAG A CCCUUCUA | 8791 | TACAAGGG GGCTAGCTACAACGA CTCATTAT | 19446 |
| 2425 | AGACCCUU G UAGAAGAC | 8792 | GTCTTCTA GGCTAGCTACAACGA AAGGGTCT | 19447 |
| 2432 | UGUAGAAG A CUCAGGCA | 8793 | TGCCTGAG GGCTAGCTACAACGA CTTCTACA | 19448 |
| 2438 | AGACUCAG G CAUUGUAU | 8794 | ATACAATG GGCTAGCTACAACGA CTGAGTCT | 19449 |
| 2440 | ACUCAGGC A UUGUAUUG | 6539 | CAATACAA GGCTAGCTACAACGA GCCTGACT | 19450 |
| 2443 | CAGGCAUU G UAUUGAAG | 8795 | CTTCAATA GGCTAGCTACAACGA AATGCCTG | 19451 |
| 2445 | GGCAUUGU A UUGAAGGA | 1841 | TCCTTCAA GGCTAGCTACAACGA ACAATGCC | 19452 |
| 2453 | AUUGAAGG A UGGGAACC | 8796 | GGTTCCCA GGCTAGCTACAACGA CCTTCAAT | 19453 |
| 2459 | GGAUGGGA A CCGGAACC | 8797 | GGTTCCGG GGCTAGCTACAACGA TCCCATCC | 19454 |
| 2465 | GAACCGGA A CCUCACUA | 8798 | TAGTGAGG GGCTAGCTACAACGA TCCGGTTC | 19455 |
| 2470 | GGAACCUC A CUAUCCGC | 6543 | GCGGATAG GGCTAGCTACAACGA GAGGTTCC | 19456 |
| 2473 | ACCUCACU A UCCGCAGA | 1844 | TCTGCGGA GGCTAGCTACAACGA AGTGAGGT | 19457 |
| 2477 | CACUAUCC G CAGAGUGA | 8799 | TCACTCTG GGCTAGCTACAACGA GGATAGTG | 19458 |
| 2482 | UCCGCAGA G UGAGGAAG | 8800 | CTTCCTCA GGCTAGCTACAACGA TCTGCGGA | 19459 |
| 2495 | GAAGGAGG A CGAAGGCC | 8801 | GGCCTTCG GGCTAGCTACAACGA CCTCCTTC | 19460 |
| 2501 | GGACGAAG G CCUCUACA | 8802 | TGTAGAGG GGCTAGCTACAACGA CTTCGTCC | 19461 |
| 2507 | AGGCCUCU A CACCUGCC | 1847 | GGCAGGTG GGCTAGCTACAACGA AGAGGCCT | 19462 |
| 2509 | GCCUCUAC A CCUGCCAG | 6550 | CTGGCAGG GGCTAGCTACAACGA GTAGAGGC | 19463 |
| 2513 | CUACACCU G CCAGGCAU | 8803 | ATGCCTGG GGCTAGCTACAACGA AGGTGTAG | 19464 |
| 2518 | CCUGCCAG G CAUGCAGU | 8804 | ACTGCATG GGCTAGCTACAACGA CTGGCAGG | 19465 |
| 2520 | UGCCAGGC A UGCAGUGU | 6555 | ACACTGCA GGCTAGCTACAACGA GCCTGGCA | 19466 |
| 2522 | CCAGGCAU G CAGUGUUC | 8805 | GAACACTG GGCTAGCTACAACGA ATGCCTGG | 19467 |
| 2525 | GGCAUGCA G UGUUCUUG | 8806 | CAAGAACA GGCTAGCTACAACGA TGCATGCC | 19468 |
| 2527 | CAUGCAGU G UUCUUGGC | 8807 | GCCAAGAA GGCTAGCTACAACGA ACTGCATG | 19469 |
| 2534 | UGUUCUUG G CUGUGCAA | 8808 | TTGCACAG GGCTAGCTACAACGA CAAGAACA | 19470 |
| 2537 | UCUUGGCU G UGCAAAAG | 8809 | CTTTTGCA GGCTAGCTACAACGA AGCCAAGA | 19471 |
| 2539 | UUGGCUGU G CAAAAGUG | 8810 | CACTTTTG GGCTAGCTACAACGA ACAGCCAA | 19472 |
| 2545 | GUGCAAAA G UGGAGGCA | 8811 | TGCCTCCA GGCTAGCTACAACGA TTTTGCAC | 19473 |
| 2551 | AAGUGGAG G CAUUUUUC | 8812 | GAAAAATG GGCTAGCTACAACGA CTCCACTT | 19474 |
| 2553 | GUGGAGGC A UUUUUCAU | 6560 | ATGAAAAA GGCTAGCTACAACGA GCCTCCAC | 19475 |
| 2560 | CAUUUUUC A UAAUAGAA | 6561 | TTCTATTA GGCTAGCTACAACGA GAAAAATG | 19476 |
| 2563 | UUUUCAUA A UAGAAGGU | 8813 | ACCTTCTA GGCTAGCTACAACGA TATGAAAA | 19477 |
| 2570 | AAUAGAAG G UGCCCAGG | 8814 | CCTGGGCA GGCTAGCTACAACGA CTTCTATT | 19478 |
| 2572 | UAGAAGGU G CCCAGGAA | 8815 | TTCCTGGG GGCTAGCTACAACGA ACCTTCTA | 19479 |
| 2584 | AGGAAAAG A CGAACUUG | 8818 | CAAGTTCG GGCTAGCTACAACGA CTTTTCCT | 19480 |
| 2588 | AAAGACGA A CUUGGAAA | 8817 | TTTCCAAG GGCTAGCTACAACGA TCGTCTTT | 19481 |
| 2596 | ACUUGGAA A UCAUUAUU | 8818 | AATAATGA GGCTAGCTACAACGA TTCCAAGT | 19482 |
| 2599 | UGGAAAUC A UUAUUCUA | 6568 | TAGAATAA GGCTAGCTACAACGA GATTTCCA | 19483 |
| 2602 | AAAUCAUU A UUCUAGUA | 1861 | TACTAGAA GGCTAGCTACAACGA AATGATTT | 19484 |
| 2608 | UUAUUCUA G UAGGCACG | 8819 | CGTGCCTA GGCTAGCTACAACGA TAGAATAA | 19485 |
| 2612 | UCUAGUAG G CACGGCGG | 8820 | CCGCCGTG GGCTAGCTACAACGA CTACTAGA | 19486 |
| 2614 | UAGUAGGC A CGGCGGUG | 8821 | CACCGCCG GGCTAGCTACAACGA GCCTACTA | 19487 |
| 2617 | UAGGCACG G CGGUGAUU | 8822 | AATCACCG GGCTAGCTACAACGA CGTGCCTA | 19488 |
| 2620 | GCACGGCG G UGAUUGCC | 8823 | GGCAATCA GGCTAGCTACAACGA CGCCGTGC | 19489 |
| 2623 | CGGCGGUG A UUGCCAUG | 8824 | CATGGCAA GGCTAGCTACAACGA CACCGCCG | 19490 |
| 2626 | CGGUGAUU G CCAUGUUC | 8825 | GAACATCG GGCTAGCTACAACGA AATCACCG | 19491 |
| 2629 | UGAUUGCC A UGUUCUUC | 6570 | GAAGAACA GGCTAGCTACAACGA GGCAATCA | 19492 |
| 2631 | AUUGCCAU G UUCUUCUG | 8826 | CAGAAGAA GGCTAGCTACAACGA ATGGCAAT | 19493 |
| 2640 | UUCUUCUG G CUACUUCU | 8827 | ACAAGTAG GGCTAGCTACAACGA CAGAACAA | 19494 |
| 2643 | UUCUGGCU A CUUCUUGU | 1871 | ACAAGAAG GGCTAGCTACAACGA AGCCACAA | 19495 |
| 2650 | UACUUCUU G UCAUCAUC | 8828 | GATGATGA GGCTAGCTACAACGA AAGAACTA | 19496 |
| 2653 | UUCUUGUC A UCAUCCUA | 8576 | TAGGATGA GGCTAGCTACAACGA GACAAGAA | 19497 |
| 2656 | UUGUCAUC A UCCUACGG | 8829 | CCCTAGGA GGCTAGCTACAACGA GATGACAA | 19498 |
| 2661 | AUCAUCCU A CGGACCGU | 8830 | ACGGTCCG GGCTAGCTACAACGA AGGATGAT | 19499 |
| 2665 | UCCUACGG A CCGUUAAG | 8831 | CTTAACGG GGCTAGCTACAACGA CCCTAGGA | 19500 |
| 2668 | UACCCACC G UUAAGCGG | 8832 | CCGCTTAA GGCTAGCTACAACGA CGTCCGTA | 19501 |
| 2673 | ACCCUUAA G CCGGCCAA | 8833 | TTCGCCCG GGCTAGCTACAACGA TTAACGGT | 19502 |
| 2677 | UUAACCCG G CCAAUCGA | 8834 | TCCATTGG GGCTAGCTACAACGA CCGCTTAA | 19503 |
| 2681 | GCGGGCCA A UGGAGGGG | 8835 | CCCCTCCA GGCTAGCTACAACGA TGGCCCGC | 19504 |
| 2691 | GCACGGCA A CUGAACAC | 8836 | GTCTTCAG GGCTAGCTACAACGA TCCCCTCC | 19505 |
| 2698 | AACUGAAG A CAGGCUAC | 8837 | GTAGCCTG GGCTAGCTACAACGA CTTCAGTT | 19506 |
| 2702 | GAAGACAG G CUACUUGU | 8838 | ACAAGTAG GGCTAGCTACAACGA CTCTCTTC | 19507 |
| 2705 | GACAGGCU A CUUGUCCA | 1881 | TGGACAAG GGCTAGCTACAACGA ACCCTGTC | 19508 |
| 2709 | GGCUACUU G UCCAUCGU | 8839 | ACGATGCA GGCTAGCTACAACGA AACTAGCC | 19509 |
| 2713 | ACUUCUCC A UCGUCAUC | 6588 | CATCACCA GGCTAGCTACAACGA GGACAAGT | 19510 |
| 2716 | UCUCCAUC G UCAUGGAU | 8840 | ATCCATCA GGCTAGCTACAACGA GATGGACA | 19511 |
| 2719 | CCAUCGUC A UGGAUCCA | 8589 | TGCATCCA GGCTAGCTACAACGA CACGATGC | 19512 |
| 2723 | CCUCAUCC A UCCACAUG | 8841 | CATCTGCA GGCTAGCTACAACGA CCATCACC | 19513 |
| 2729 | CCAUCCAG A UGAACUCC | 8842 | CGACTTCA GGCTAGCTACAACGA CTGCATCC | 19514 |
| 2733 | CCAGAUGA A CUCCCAUU | 8843 | AATCCCAC GGCTAGCTACAACGA TCATCTGG | 19515 |
| 2739 | GAACUCCC A CUGGAUGA | 8595 | TCATCCAA GGCTAGCTACAACGA CCCAGTTC | 19516 |
| 2744 | CCCAUUGG A UGAACAUU | 8844 | AATCTTCA GGCTAGCTACAACGA CCAATGGC | 19517 |
| 2748 | UUGCAUGA A CACUCUGA | 8845 | TCACAATG GGCTAGCTACAACGA TCATCCAA | 19518 |
| 2750 | GGAUGAAC A UUCUGAAC | 6596 | GTTCACAA GGCTAGCTACAACGA GTTCATCC | 19519 |
| 2753 | UGAACAUU G UGAACCAC | 8848 | GTCCTTCA GGCTAGCTACAACGA AATGTTCA | 19520 |
| 2757 | CAUUGUGA A CCACUGCC | 8847 | CGCACTCC GGCTAGCTACAACGA TCACAATC | 19521 |
| 2760 | UGUCAACG A CUGCCUUA | 8848 | TAAGCCAG GGCTAGCTACAACGA CGTTCACA | 19522 |
| 2763 | CAACGACU G CCUUAUCA | 8849 | TCATAACC GGCTAGCTACAACGA AGTCGTTC | 19523 |
| 2768 | ACUGCCUU A UGAUGCCA | 1891 | TGGCATCA GGCTAGCTACAACGA AAGCCACT | 19524 |
| 2771 | CCCUUAUC A UCCCAGCA | 8850 | TGCTCGCA GGCTAGCTACAACGA CATAACGC | 19525 |
| 2773 | CUUAUGAU G CCAGCAAA | 8851 | TTTCCTGC GGCTAGCTACAACGA ATCATAAG | 19526 |
| 2777 | UGAUGCCA G CAAAUGGG | 8852 | CCCATTTG GGCTAGCTACAACGA TGGCATCA | 19527 |
| 2781 | GCCAGCAA A UGGGAAUU | 8853 | AATTCCCA GGCTAGCTACAACGA TTGCTGGC | 19528 |
| 2787 | AAAUGGGA A UUCCCCAG | 8854 | CTGGGGAA GGCTAGCTACAACGA TCCCATTT | 19529 |
| 2798 | CCCCAGAG A CCGGCUGA | 8855 | TCAGCCGG GGCTAGCTACAACGA CTCTGGGG | 19530 |
| 2802 | AGAGACCG G CUGAAGCU | 8856 | AGCTTCAG GGCTAGCTACAACGA CGGTCTCT | 19531 |
| 2808 | CGGCUGAA G CUAGGUAA | 8857 | TTACCTAG GGCTAGCTACAACGA TTCAGCCG | 19532 |
| 2813 | GAAGCUAG G UAAGCCUC | 8858 | GAGGCTTA GGCTAGCTACAACGA CTAGCTTC | 19533 |
| 2817 | CUAGGUAA G CCUCUUGG | 8859 | CCAAGAGG GGCTAGCTACAACGA TTACCTAG | 19534 |
| 2825 | GCCUCUUG G GCCUGGUG | 8860 | CACCACGG GGCTAGCTACAACGA CAAGAGGC | 19535 |
| 2828 | UCUUGGCC G UGGUGCCU | 8881 | AGGCACCA GGCTAGCTACAACGA GGCCAAGA | 19536 |
| 2831 | UCGCCGUG G UGCCUUUG | 8862 | CAAAGGCA GGCTAGCTACAACGA CACGGCCA | 19537 |
| 2833 | GCCGUGGU G CCUUUGGC | 8863 | GCCAAAGG GGCTAGCTACAACGA ACCACGGC | 19538 |
| 2840 | UGCCUUUG G CCAAGUGA | 8884 | TCACTTGG GGCTAGCTACAACGA CAAAGGCA | 19539 |
| 2845 | UUGGCCAA G UGAUUGAA | 8865 | TTCAATCA GGCTAGCTACAACGA TTGGCCAA | 19540 |
| 2848 | GCCAAGUG A UUGAAGCA | 8866 | TGCTTCAA GGCTAGCTACAACGA CACTTGGC | 19541 |
| 2854 | UGAUUGAA G CAGAUGCC | 8867 | GGCATCTG GGCTAGCTACAACGA TTCAATCA | 19542 |
| 2858 | UGAAGCAG A UGCCUUUG | 8868 | CAAAGGCA GGCTAGCTACAACGA CTCCTTCA | 19543 |
| 2860 | AAGCAGAU G CCUUUGGA | 8869 | TCCAAACG GGCTAGCTACAACGA ATCTCCTT | 19544 |
| 2869 | CCUUUGGA A UUCACAAG | 8870 | CTTCTCAA GGCTAGCTACAACGA TCCAAAGC | 19545 |
| 2873 | UGGAAUUG A CAAGACAG | 8871 | CTGTCTTG GGCTAGCTACAACGA CAATTCCA | 19546 |
| 2878 | UUGACAAG A CAGCAACU | 8872 | AGTTGCTG GGCTAGCTACAACGA CTTGTCAA | 19547 |
| 2881 | ACAAGACA G CAACUUGC | 8873 | GCAAGTTG GGCTAGCTACAACGA TGTCTTGT | 19548 |
| 2884 | ACACACCA A CUUGCAGG | 8874 | CCTCCAAG GGCTAGCTACAACGA TGCTGTCT | 19549 |
| 2888 | ACCAACUU G CAGGACAC | 8875 | CTGTCCTG GGCTAGCTACAACGA AAGTTGCT | 19550 |
| 2893 | CUUGCAGG A CACUAGCA | 8876 | TCCTACTC GGCTAGCTACAACGA CCTCCAAG | 19551 |
| 2896 | GCAGGACA G UAGCAGUC | 8877 | GACTCCTA GGCTAGCTACAACGA TCTCCTGC | 19552 |
| 2899 | GGACAGUA G CAGUCAAA | 8878 | TTTCACTC GGCTAGCTACAACGA TACTGTCC | 19553 |
| 2902 | CACUAGCA G UCAAAAUG | 8879 | CATTTTGA GGCTAGCTACAACGA TGCTACTC | 19554 |
| 2908 | CAGUCAAA A UGUUGAAA | 8880 | TTTCAACA GGCTAGCTACAACGA TTTGACTG | 19555 |
| 2910 | GUCAAAAU G UUGAAAGA | 8881 | TCTTTCAA GGCTAGCTACAACGA ATTTTGAC | 19556 |
| 2923 | AAGAAGGA G CAACACAC | 8882 | CTGTGTTG GGCTAGCTACAACGA TCCTTCTT | 19557 |
| 2926 | AAGGAGCA A CACACAGU | 8883 | ACTGTGTG GGCTAGCTACAACGA TCCTCCTT | 19558 |
| 2928 | GGAGCAAC A CACAGUGA | 6631 | TCACTCTC GGCTAGCTACAACGA GTTGCTCC | 19559 |
| 2930 | AGCAACAC A CAGUGAGC | 6632 | GCTCACTG GGCTAGCTACAACGA GTGTTGCT | 19560 |
| 2933 | AACACACA G UGAGCAUC | 8884 | GATGCTCA GGCTAGCTACAACGA TGTGTGTT | 19561 |
| 2937 | CACAGUGA G CAUCGAGC | 8885 | GCTCGATG GGCTAGCTACAACGA TCACTGTG | 19562 |
| 2939 | CACUGAGC A UCCACCUC | 6634 | GAGCTCGA GGCTAGCTACAACGA GCTCACTG | 19563 |
| 2944 | ACCAUCCA G CUCUCAUG | 8886 | CATGAGAG GGCTAGCTACAACGA TCCATGCT | 19564 |
| 2950 | GACCUCUC A UGUCUGAA | 6637 | TTCAGACA GGCTAGCTACAACGA GACAGCTC | 19565 |
| 2952 | CCUCUCAU G UCUCAACU | 8887 | ACTTCAGA GGCTAGCTACAACGA ATCACAGC | 19566 |
| 2958 | AUGUCUGA A CUCAAGAU | 8888 | ATCTTGAG GGCTAGCTACAACGA TCACACAT | 19567 |
| 2965 | AACUCAAG A UCCUCAUU | 8889 | AATCACGA GGCTAGCTACAACGA CTTCAGTT | 19568 |
| 2971 | ACAUCCUC A UUCAUAUU | 6643 | AATATGAA GGCTAGCTACAACGA GAGGATCT | 19569 |
| 2975 | CCUCAUUC A UAUUCGUC | 6644 | GACCAATA GGCTAGCTACAACGA GAATCACG | 19570 |
| 2977 | UCAUUCAU A UUCCUCAC | 1917 | CTCACCAA GGCTAGCTACAACGA ATGAATGA | 19571 |
| 2981 | UCAUAUUG G UCACCAUC | 8890 | GATCGTGA GGCTAGCTACAACGA CAATATGA | 19572 |
| 2984 | UAUUGGUC A CCAUCUCA | 6645 | TCACATGG GGCTAGCTACAACGA CACCAATA | 19573 |
| 2987 | UCGUCACC A UCUCAAUG | 6647 | CATTCACA GGCTAGCTACAACGA CGTGACCA | 19574 |
| 2993 | CCAUCUCA A UGUGGUCA | 8891 | TGACCACA GGCTAGCTACAACGA TCACATGC | 19575 |
| 2995 | AUCUCAAU G UGGUCAAC | 8892 | GTTGACCA GGCTAGCTACAACGA ATTGAGAT | 19576 |
| 2998 | UCAAUGUG G UCAACCUU | 8893 | AAGGTTGA GGCTAGCTACAACGA CACATTGA | 19577 |
| 3002 | UGUGGUCA A CCUUCUAG | 8894 | CTAGAAGG GGCTAGCTACAACGA TGACCACA | 19578 |
| 3011 | CCUUCUAG G UGCCUGUA | 8895 | TACAGGCA GGCTAGCTACAACGA CTAGAAGG | 19579 |
| 3013 | UUCUAGGU G CCUGUACC | 8896 | GGTACAGG GGCTAGCTACAACGA ACCTAGAA | 19580 |
| 3017 | AGGUGCCU G UACCAAGC | 8897 | GCTTGGTA GGCTAGCTACAACGA AGGCACCT | 19581 |
| 3019 | GUGCCUGU A CCAAGCCA | 1926 | TGGCTTGG GGCTAGCTACAACGA ACAGGCAC | 19582 |
| 3024 | UGUACCAA G CCAGGAGG | 8898 | CCTCCTGG GGCTAGCTACAACGA TTGGTACA | 19583 |
| 3033 | CCAGGAGG G CCACUCAU | 8899 | ATGAGTGG GGCTAGCTACAACGA CCTCCTGG | 19584 |
| 3036 | GGAGGGCC A CUCAUGGU | 6661 | ACCATGAG GGCTAGCTACAACGA GGCCCTCC | 19585 |
| 3040 | GGCCACUC A UGGUGAUU | 6663 | AATCACCA GGCTAGCTACAACGA GAGTGGCC | 19586 |
| 3043 | CACUCAUG G UGAUUGUG | 8900 | CACAATCA GGCTAGCTACAACGA CATGAGTG | 19587 |
| 3046 | UCAUGGUG A UUGUGGAA | 8901 | TTCCACAA GGCTAGCTACAACGA CACCATGA | 19588 |
| 3049 | UGGUGAUU G UGGAAUUC | 8902 | GAATTCCA GGCTAGCTACAACGA AATCACCA | 19589 |
| 3054 | AUUGUGGA A UUCUGCAA | 8903 | TTGCAGAA GGCTAGCTACAACGA TCCACAAT | 19590 |
| 3059 | GGAAUUCU G CAAAUUUG | 8904 | CAAATTTG GGCTAGCTACAACGA AGAATTCC | 19591 |
| 3063 | UUCUGCAA A UUUGGAAA | 8905 | TTTCCAAA GGCTAGCTACAACGA TTGCAGAA | 19592 |
| 3071 | AUUUGGAA A CCUGUCCA | 8906 | TGGACAGG GGCTAGCTACAACGA TTCCAAAT | 19593 |
| 3075 | GGAAACCU G UCCACUUA | 8907 | TAAGTGGA GGCTAGCTACAACGA AGGTTTCC | 19594 |
| 3079 | ACCUGUCC A CUUACCUG | 6669 | CAGGTAAG GGCTAGCTACAACGA GGACAGGT | 19595 |
| 3083 | GUCCACUU A CCUGAGGA | 1935 | TCCTCAGG GGCTAGCTACAACGA AAGTGGAC | 19596 |
| 3092 | CCUGAGGA G CAAGAGAA | 8908 | TTCTCTTG GGCTAGCTACAACGA TCCTCAGG | 19597 |
| 3101 | CAAGAGAA A UGAAUUUG | 8909 | CAAATTCA GGCTAGCTACAACGA TTCTCTTG | 19598 |
| 3105 | AGAAAUGA A UUUGUCCC | 8910 | GGGACAAA GGCTAGCTACAACGA TCATTTCT | 19599 |
| 3109 | AUGAAUUU G UCCCCUAC | 8911 | GTAGGGGA GGCTAGCTACAACGA AAATTCAT | 19600 |
| 3116 | UGUCCCCU A CAAGACCA | 1939 | TGGTCTTG GGCTAGCTACAACGA AGGGGACA | 19601 |
| 3121 | CCUACAAG A CCAAAGGG | 8912 | CCCTTTGG GGCTAGCTACAACGA CTTGTAGG | 19602 |
| 3130 | CCAAAGGG G CACGAUUC | 8913 | GAATCGTG GGCTAGCTACAACGA CCCTTTGG | 19603 |
| 3132 | AAAGGGGC A CGAUUCCG | 6681 | CGGAATCG GGCTAGCTACAACGA GCCCCTTT | 19604 |
| 3135 | GGGGCACG A UUCCGUCA | 8914 | TGACGGAA GGCTAGCTACAACGA CGTGCCCC | 19605 |
| 3140 | ACGAUUCC G UCAAGGGA | 8915 | TCCCTTGA GGCTAGCTACAACGA GGAATCGT | 19606 |
| 3152 | AGGGAAAG A CUACGUUG | 8916 | CAACGTAG GGCTAGCTACAACGA CTTTCCCT | 19607 |
| 3155 | GAAAGACU A CGUUGGAG | 1943 | CTCCAACG GGCTAGCTACAACGA AGTCTTTC | 19608 |
| 3157 | AAGACUAC G UUGGAGCA | 8917 | TGCTCCAA GGCTAGCTACAACGA GTAGTCTT | 19609 |
| 3163 | ACGUUGGA G CAAUCCCU | 8918 | AGGGATTG GGCTAGCTACAACGA TCCAACGT | 19610 |
| 3166 | UUGGAGCA A UCCCUGUG | 8919 | CACAGGGA GGCTAGCTACAACGA TGCTCCAA | 19611 |
| 3172 | CAAUCCCU G UGGAUCUG | 8920 | CAGATCCA GGCTAGCTACAACGA AGGGATTG | 19612 |
| 3176 | CCCUGUGG A UCUGAAAC | 8921 | GTTTCAGA GGCTAGCTACAACGA CCACAGGG | 19613 |
| 3183 | GAUCUGAA A CGGCGCUU | 8922 | AAGCGCCG GGCTAGCTACAACGA TTCAGATC | 19614 |
| 3186 | CUGAAACG G CGCUUGGA | 8923 | TCCAAGCG GGCTAGCTACAACGA CGTTTCAG | 19615 |
| 3188 | GAAACGGC G CUUGGACA | 8924 | TGTCCAAG GGCTAGCTACAACGA GCCGTTTC | 19616 |
| 3194 | GCGCUUGG A CAGCAUCA | 8925 | TGATGCTG GGCTAGCTACAACGA CCAAGCGC | 19617 |
| 3197 | CUUGGACA G CAUCACCA | 8926 | TGGTGATG GGCTAGCTACAACGA TGTCCAAG | 19618 |
| 3199 | UGGACAGC A UCACCAGU | 6692 | ACTGGTGA GGCTAGCTACAACGA GCTGTCCA | 19619 |
| 3202 | ACAGCAUC A CCAGUAGC | 6693 | GCTACTGG GGCTAGCTACAACGA GATGCTGT | 19620 |
| 3206 | CAUCACCA G UAGCCAGA | 8927 | TCTGGCTA GGCTAGCTACAACGA TGGTGATG | 19621 |
| 3209 | CACCAGUA G CCAGAGCU | 8928 | AGCTCTGG GGCTAGCTACAACGA TACTGGTG | 19622 |
| 3215 | UAGCCAGA G CUCAGCCA | 8929 | TGGCTGAG GGCTAGCTACAACGA TCTGGCTA | 19623 |
| 3220 | AGAGCUCA G CCAGCUCU | 8930 | AGAGCTGG GGCTAGCTACAACGA TGAGCTCT | 19624 |
| 3224 | CUCAGCCA G CUCUGGAU | 8931 | ATCCAGAG GGCTAGCTACAACGA TGGCTGAG | 19625 |
| 3231 | AGCUCUGG A UUUGUGGA | 8932 | TCCACAAA GGCTAGCTACAACGA CCAGAGCT | 19626 |
| 3235 | CUGGAUUU G UGGAGGAG | 8933 | CTCCTCCA GGCTAGCTACAACGA AAATCCAG | 19627 |
| 3246 | GAGGAGAA G UCCCUCAG | 8934 | CTGAGGGA GGCTAGCTACAACGA TTCTCCTC | 19628 |
| 3254 | GUCCCUCA G UGAUGUAG | 8935 | CTACATCA GGCTAGCTACAACGA TGAGGGAC | 19629 |
| 3257 | CCUCAGUG A UGUAGAAG | 8936 | CTTCTACA GGCTAGCTACAACGA CACTGAGG | 19630 |
| 3259 | UCAGUGAU G UAGAAGAA | 8937 | TTCTTCTA GGCTAGCTACAACGA ATCACTGA | 19631 |
| 3274 | AAGAGGAA G CUCCUGAA | 8938 | TTCAGGAG GGCTAGCTACAACGA TTCCTCTT | 19632 |
| 3284 | UCCUGAAG A UCUGUAUA | 8939 | TATACAGA GGCTAGCTACAACGA CTTCAGGA | 19633 |
| 3288 | GAAGAUCU G UAUAAGGA | 8940 | TCCTTATA GGCTAGCTACAACGA AGATCTTC | 19634 |
| 3290 | AGAUCUGU A UAAGGACU | 1959 | AGTCCTTA GGCTAGCTACAACGA ACAGATCT | 19635 |
| 3296 | GUAUAAGG A CUUCCUGA | 8941 | TCAGGAAG GGCTAGCTACAACGA CCTTATAC | 19636 |
| 3304 | ACUUCCUG A CCUUGGAG | 8942 | CTCCAAGG GGCTAGCTACAACGA CAGGAAGT | 19637 |
| 3312 | ACCUUGGA G CAUCUCAU | 8943 | ATGAGATG GGCTAGCTACAACGA TCCAAGGT | 19638 |
| 3314 | CUUGGAGC A UCUCAUCU | 6717 | AGATGAGA GGCTAGCTACAACGA GCTCCAAG | 19639 |
| 3319 | AGCAUCUC A UCUGUUAC | 6719 | GTAACAGA GGCTAGCTACAACGA GAGATGCT | 19640 |
| 3323 | UCUCAUCU G UUACAGCU | 8944 | AGCTGTAA GGCTAGCTACAACGA AGATGAGA | 19641 |
| 3326 | CAUCUGUU A CAGCUUCC | 1968 | GGAAGCTG GGCTAGCTACAACGA AACAGATG | 19642 |
| 3329 | CUGUUACA G CUUCCAAG | 8945 | CTTGGAAG GGCTAGCTACAACGA TGTAACAG | 19643 |
| 3337 | GCUUCCAA G UGGCUAAG | 8946 | CTTAGCCA GGCTAGCTACAACGA TTGGAAGC | 19644 |
| 3340 | UCCAAGUG G CUAAGGGC | 8947 | GCCCTTAG GGCTAGCTACAACGA CACTTGGA | 19645 |
| 3347 | GGCUAAGG G CAUGGAGU | 8948 | ACTCCATG GGCTAGCTACAACGA CCTTAGCC | 19646 |
| 3349 | CUAAGGGC A UGGAGUUC | 6726 | GAACTCCA GGCTAGCTACAACGA GCCCTTAG | 19647 |
| 3354 | GGCAUGGA G UUCUUGGC | 8949 | GCCAAGAA GGCTAGCTACAACGA TCCATGCC | 19648 |
| 3361 | AGUUCUUG G CAUCGCGA | 8950 | TCGCGATG GGCTAGCTACAACGA CAAGAACT | 19649 |
| 3363 | UUCUUGGC A UCGCGAAA | 6728 | TTTCGCGA GGCTAGCTACAACGA GCCAAGAA | 19650 |
| 3366 | UUGGCAUC G CGAAAGUG | 8951 | CACTTTCG GGCTAGCTACAACGA GATGCCAA | 19651 |
| 3372 | UCGCGAAA G UGUAUCCA | 8952 | TGGATACA GGCTAGCTACAACGA TTTCGCGA | 19652 |
| 3374 | GCGAAAGU G UAUCCACA | 8953 | TGTGGATA GGCTAGCTACAACGA ACTTTCGC | 19653 |
| 3376 | GAAAGUGU A UCCACAGG | 1976 | CCTGTGGA GGCTAGCTACAACGA ACACTTTC | 19654 |
| 3380 | GUGUAUCC A CAGGGACC | 6730 | GGTCCCTG GGCTAGCTACAACGA GGATACAC | 19655 |
| 3386 | CCACAGGG A CCUGGCGG | 8954 | CCGCCAGG GGCTAGCTACAACGA CCCTGTGG | 19656 |
| 3391 | GGGACCUG G CGGCACGA | 8955 | TCGTGCCG GGCTAGCTACAACGA CAGGTCCC | 19657 |
| 3394 | ACCUGGCG G CACGAAAU | 8956 | ATTTCGTG GGCTAGCTACAACGA CGCCAGGT | 19658 |
| 3396 | CUGGCGGC A CGAAAUAU | 6734 | ATATTTCG GGCTAGCTACAACGA GCCGCCAG | 19659 |
| 3401 | GGCACGAA A UAUCCUCU | 8957 | AGAGGATA GGCTAGCTACAACGA TTCGTGCC | 19660 |
| 3403 | CACGAAAU A UCCUCUUA | 1978 | TAAGAGGA GGCTAGCTACAACGA ATTTCGTG | 19661 |
| 3411 | AUCCUCUU A UCGGAGAA | 1982 | TTCTCCGA GGCTAGCTACAACGA AAGAGGAT | 19662 |
| 3422 | GGAGAAGA A CGUGGUUA | 8958 | TAACCACG GGCTAGCTACAACGA TCTTCTCC | 19663 |
| 3424 | AGAAGAAC G UGGUUAAA | 8959 | TTTAACCA GGCTAGCTACAACGA GTTCTTCT | 19664 |
| 3427 | AGAACGUG G UUAAAAUC | 8960 | GATTTTAA GGCTAGCTACAACGA CACGTTCT | 19665 |
| 3433 | UGGUUAAA A UCUGUGAC | 8961 | GTCACAGA GGCTAGCTACAACGA TTTAACCA | 19666 |
| 3437 | UAAAAUCU G UGACUUUG | 8962 | CAAAGTCA GGCTAGCTACAACGA AGATTTTA | 19667 |
| 3440 | AAUCUGUG A CUUUGGCU | 8963 | AGCCAAAG GGCTAGCTACAACGA CACAGATT | 19668 |
| 3446 | UGACUUUG G CUUGGCCC | 8964 | GGGCCAAG GGCTAGCTACAACGA CAAAGTCA | 19669 |
| 3451 | UUGGCUUG G CCCGGGAU | 8965 | ATCCCGGG GGCTAGCTACAACGA CAAGCCAA | 19670 |
| 3458 | GGCCCGGG A UAUUUAUA | 8966 | TATAAATA GGCTAGCTACAACGA CCCGGGCC | 19671 |
| 3460 | CCCGGGAU A UUUAUAAA | 1990 | TTTATAAA GGCTAGCTACAACGA ATCCCGGG | 19672 |
| 3464 | GGAUAUUU A UAAAGAUC | 1993 | GATCTTTA GGCTAGCTACAACGA AAATATCC | 19673 |
| 3470 | UUAUAAAG A UCCAGAUU | 8967 | AATCTGGA GGCTAGCTACAACGA CTTTATAA | 19674 |
| 3476 | AGAUCCAG A UUAUGUCA | 8968 | TGACATAA GGCTAGCTACAACGA CTGGATCT | 19675 |
| 3479 | UCCAGAUU A UGUCAGAA | 1997 | TTCTGACA GGCTAGCTACAACGA AATCTGGA | 19676 |
| 3481 | CAGAUUAU G UCAGAAAA | 8969 | TTTTCTGA GGCTAGCTACAACGA ATAATCTG | 19677 |
| 3494 | AAAAGGAG A UGCUCGCC | 8970 | GGCGAGCA GGCTAGCTACAACGA CTCCTTTT | 19678 |
| 3496 | AAGGAGAU G CUCGCCUC | 8971 | GAGGCGAG GGCTAGCTACAACGA ATCTCCTT | 19679 |
| 3500 | AGAUGCUC G CCUCCCUU | 8972 | AAGGGAGG GGCTAGCTACAACGA GAGCATCT | 19680 |
| 3513 | CCUUUGAA A UGGAUGGC | 8973 | GCCATCCA GGCTAGCTACAACGA TTCAAAGG | 19681 |
| 3517 | UGAAAUGG A UGGCCCCA | 8974 | TGGGGCCA GGCTAGCTACAACGA CCATTTCA | 19682 |
| 3520 | AAUGGAUG G CCCCAGAA | 8975 | TTCTGGGG GGCTAGCTACAACGA CATCCATT | 19683 |
| 3529 | CCCCAGAA A CAAUUUUU | 8976 | AAAAATTG GGCTAGCTACAACGA TTCTGGGG | 19684 |
| 3532 | CAGAAACA A UUUUUGAC | 8977 | GTCAAAAA GGCTAGCTACAACGA TGTTTCTG | 19685 |
| 3539 | AAUUUUUG A CAGAGUGU | 8978 | ACACTCTG GGCTAGCTACAACGA CAAAAATT | 19686 |
| 3544 | UUGACAGA G UGUACACA | 8979 | TGTGTACA GGCTAGCTACAACGA TCTGTCAA | 19687 |
| 3546 | GACAGAGU G UACACAAU | 8980 | ATTGTGTA GGCTAGCTACAACGA ACTCTGTC | 19688 |
| 3548 | CAGAGUGU A CACAAUCC | 2007 | GGATTGTG GGCTAGCTACAACGA ACACTCTG | 19689 |
| 3550 | GAGUGUAC A CAAUCCAG | 6758 | CTGGATTG GGCTAGCTACAACGA GTACACTC | 19690 |
| 3553 | UGUACACA A UCCAGAGU | 8981 | ACTCTGGA GGCTAGCTACAACGA TGTGTACA | 19691 |
| 3560 | AAUCCAGA G UGACGUCU | 8982 | AGACGTCA GGCTAGCTACAACGA TCTGGATT | 19692 |
| 3563 | CCAGAGUG A CGUCUGGU | 8983 | ACCAGACG GGCTAGCTACAACGA CACTCTGG | 19693 |
| 3565 | AGAGUGAC G UCUGGUCU | 8984 | AGACCAGA GGCTAGCTACAACGA GTCACTCT | 19694 |
| 3570 | GACGUCUG G UCUUUUGG | 8985 | CCAAAAGA GGCTAGCTACAACGA CAGACGTC | 19695 |
| 3578 | GUCUUUUG G UGUUUUGC | 8986 | GCAAAACA GGCTAGCTACAACGA CAAAAGAC | 19696 |
| 3580 | CUUUUGGU G UUUUGCUG | 8987 | CAGCAAAA GGCTAGCTACAACGA ACCAAAAG | 19697 |
| 3585 | GGUGUUUU G CUGUGGGA | 8988 | TCCCACAG GGCTAGCTACAACGA AAAACACC | 19698 |
| 3588 | GUUUUGCU G UGGGAAAU | 8989 | ATTTCCCA GGCTAGCTACAACGA AGCAAAAC | 19699 |
| 3595 | UGUGGGAA A UAUUUUCC | 8990 | GGAAAATA GGCTAGCTACAACGA TTCCCACA | 19700 |
| 3597 | UGGGAAAU A UUUUCCUU | 2017 | AAGGAAAA GGCTAGCTACAACGA ATTTCCCA | 19701 |
| 3608 | UUCCUUAG G UGCUUCUC | 8991 | GAGAAGCA GGCTAGCTACAACGA CTAAGGAA | 19702 |
| 3610 | CCUUAGGU G CUUCUCCA | 8992 | TGGAGAAG GGCTAGCTACAACGA ACCTAAGG | 19703 |
| 3618 | GCUUCUCC A UAUCCUGG | 6770 | CCAGGATA GGCTAGCTACAACGA GGAGAAGC | 19704 |
| 3620 | UUCUCCAU A UCCUGGGG | 2027 | CCCCAGGA GGCTAGCTACAACGA ATGGAGAA | 19705 |
| 3628 | AUCCUGGG G UAAAGAUU | 8993 | AATCTTTA GGCTAGCTACAACGA CCCAGGAT | 19706 |
| 3634 | GGGUAAAG A UUGAUGAA | 8994 | TTCATCAA GGCTAGCTACAACGA CTTTACCC | 19707 |
| 3638 | AAAGAUUG A UGAAGAAU | 8995 | ATTCTTCA GGCTAGCTACAACGA CAATCTTT | 19708 |
| 3645 | GAUGAAGA A UUUUGUAG | 8996 | CTACAAAA GGCTAGCTACAACGA TCTTCATC | 19709 |
| 3650 | AGAAUUUU G UAGGCGAU | 8997 | ATCGCCTA GGCTAGCTACAACGA AAAATTCT | 19710 |
| 3654 | UUUUGUAG G CGAUUGAA | 8998 | TTCAATCG GGCTAGCTACAACGA CTACAAAA | 19711 |
| 3657 | UGUAGGCG A UUGAAAGA | 8999 | TCTTTCAA GGCTAGCTACAACGA CGCCTACA | 19712 |
| 3670 | AAGAAGGA A CUAGAAUG | 9000 | CATTCTAG GGCTAGCTACAACGA TCCTTCTT | 19713 |
| 3676 | GAACUAGA A UGAGGGCC | 9001 | GGCCCTCA GGCTAGCTACAACGA TCTAGTTC | 19714 |
| 3682 | GAAUGAGG G CCCCUGAU | 9002 | ATCAGGGG GGCTAGCTACAACGA CCTCATTC | 19715 |
| 3689 | GGCCCCUG A UUAUACUA | 9003 | TAGTATAA GGCTAGCTACAACGA CAGGGGCC | 19716 |
| 3692 | CCCUGAUU A UACUACAC | 2038 | GTGTAGTA GGCTAGCTACAACGA AATCAGGG | 19717 |
| 3694 | CUGAUUAU A CUACACCA | 2039 | TGGTGTAG GGCTAGCTACAACGA ATAATCAG | 19718 |
| 3697 | AUUAUACU A CACCAGAA | 2040 | TTCTGGTG GGCTAGCTACAACGA AGTATAAT | 19719 |
| 3699 | UAUACUAC A CCAGAAAU | 6779 | ATTTCTGG GGCTAGCTACAACGA GTAGTATA | 19720 |
| 3706 | CACCAGAA A UGUACCAG | 9004 | CTGGTACA GGCTAGCTACAACGA TTCTGGTG | 19721 |
| 3708 | CCAGAAAU G UACCAGAC | 9005 | GTCTGGTA GGCTAGCTACAACGA ATTTCTGG | 19722 |
| 3710 | AGAAAUGU A CCAGACCA | 2041 | TGGTCTGG GGCTAGCTACAACGA ACATTTCT | 19723 |
| 3715 | UGUACCAG A CCAUGCUG | 9006 | CAGCATGG GGCTAGCTACAACGA CTGGTACA | 19724 |
| 3718 | ACCAGACC A UGCUGGAC | 6785 | GTCCAGCA GGCTAGCTACAACGA GGTCTGGT | 19725 |
| 3720 | CAGACCAU G CUGGACUG | 9007 | CAGTCCAG GGCTAGCTACAACGA ATGGTCTG | 19726 |
| 3725 | CAUGCUGG A CUGCUGGC | 7740 | GCCAGCAG GGCTAGCTACAACGA CCAGCATG | 17305 |
| 3728 | GCUGGACU G CUGGCACG | 9008 | CGTGCCAG GGCTAGCTACAACGA AGTCCAGC | 19727 |
| 3732 | GACUGCUG G CACGGGGA | 9009 | TCCCCGTG GGCTAGCTACAACGA CAGCAGTC | 19728 |
| 3734 | CUGCUGGC A CGGGGAGC | 6788 | GCTCCCCG GGCTAGCTACAACGA GCCAGCAG | 19729 |
| 3741 | CACGGGGA G CCCAGUCA | 9010 | TGACTGGG GGCTAGCTACAACGA TCCCCGTG | 19730 |
| 3746 | GGAGCCCA G UCAGAGAC | 9011 | GTCTCTGA GGCTAGCTACAACGA TGGGCTCC | 19731 |
| 3753 | AGUCAGAG A CCCACGUU | 9012 | AACGTGGG GGCTAGCTACAACGA CTCTGACT | 19732 |
| 3757 | AGAGACCC A CGUUUUCA | 6795 | TGAAAACG GGCTAGCTACAACGA GGGTCTCT | 19733 |
| 3759 | AGACCCAC G UUUUCAGA | 9013 | TCTGAAAA GGCTAGCTACAACGA GTGGGTCT | 19734 |
| 3768 | UUUUCAGA G UUGGUGGA | 9014 | TCCACCAA GGCTAGCTACAACGA TCTGAAAA | 19735 |
| 3772 | CAGAGUUG G UGGAACAU | 9015 | ATGTTCCA GGCTAGCTACAACGA CAACTCTG | 19736 |
| 3777 | UUGGUGGA A CAUUUGGG | 9016 | CCCAAATG GGCTAGCTACAACGA TCCACCAA | 19737 |
| 3779 | GGUGGAAC A UUUGGGAA | 6797 | TTCCCAAA GGCTAGCTACAACGA GTTCCACC | 19738 |
| 3788 | UUUGGGAA A UCUCUUGC | 9017 | GCAAGAGA GGCTAGCTACAACGA TTCCCAAA | 19739 |
| 3795 | AAUCUCUU G CAAGCUAA | 9018 | TTAGCTTG GGCTAGCTACAACGA AAGAGATT | 19740 |
| 3799 | UCUUGCAA G CUAAUGCU | 9019 | AGCATTAG GGCTAGCTACAACGA TTGCAAGA | 19741 |
| 3803 | GCAAGCUA A UGCUCAGC | 9020 | GCTGAGCA GGCTAGCTACAACGA TAGCTTGC | 19742 |
| 3805 | AAGCUAAU G CUCAGCAG | 9021 | CTGCTGAG GGCTAGCTACAACGA ATTAGCTT | 19743 |
| 3810 | AAUGCUCA G CAGGAUGG | 9022 | CCATCCTG GGCTAGCTACAACGA TGAGCATT | 19744 |
| 3815 | UCAGCAGG A UGGCAAAG | 9023 | CTTTGCCA GGCTAGCTACAACGA CCTGCTGA | 19745 |
| 3818 | GCAGGAUG G CAAAGACU | 9024 | AGTCTTTG GGCTAGCTACAACGA CATCCTGC | 19746 |
| 3824 | UGGCAAAG A CUACAUUG | 9025 | CAATGTAG GGCTAGCTACAACGA CTTTGCCA | 19747 |
| 3827 | CAAAGACU A CAUUGUUC | 2055 | GAACAATG GGCTAGCTACAACGA AGTCTTTG | 19748 |
| 3829 | AAGACUAC A UUGUUCUU | 6807 | AAGAACAA GGCTAGCTACAACGA GTAGTCTT | 19749 |
| 3832 | ACUACAUU G UUCUUCCG | 9026 | CGGAAGAA GGCTAGCTACAACGA AATGTAGT | 19750 |
| 3841 | UUCUUCCG A UAUCAGAG | 9027 | CTCTGATA GGCTAGCTACAACGA CGGAAGAA | 19751 |
| 3843 | CUUCCGAU A UCAGAGAC | 2061 | GTCTCTGA GGCTAGCTACAACGA ATCGGAAG | 19752 |
| 3850 | UAUCAGAG A CUUUGAGC | 9028 | GCTCAAAG GGCTAGCTACAACGA CTCTGATA | 19753 |
| 3857 | GACUUUGA G CAUGGAAG | 9029 | CTTCCATG GGCTAGCTACAACGA TCAAAGTC | 19754 |
| 3859 | CUUUGAGC A UGGAAGAG | 6812 | CTCTTCCA GGCTAGCTACAACGA GCTCAAAG | 19755 |
| 3869 | GCAAGAGC A UUCUCGAC | 9030 | GTCCAGAA GGCTAGCTACAACGA CCTCTTCC | 19756 |
| 3876 | GAUUCUGG A CUCUCUCU | 9031 | AGAGAGAG GGCTAGCTACAACGA CCAGAATC | 19757 |
| 3885 | CUCUCUCU G CCUACCUC | 9032 | GAGGTACG GGCTAGCTACAACGA ACAGACAG | 19758 |
| 3889 | CUCUGCCU A CCUCACCU | 2070 | AGGTGAGG GGCTAGCTACAACGA AGGCAGAG | 19759 |
| 3894 | CCUACCUC A CCUGUUUC | 6822 | GAAACAGG GGCTAGCTACAACGA GAGGTAGG | 19760 |
| 3898 | CCUCACCU G UUUCCUGU | 9033 | ACAGCAAA GGCTAGCTACAACGA AGCTCAGC | 19761 |
| 3905 | UGUUUCCU G UAUCGAGG | 9034 | CCTCCATA GGCTAGCTACAACGA ACGAAACA | 19762 |
| 3907 | UUUCCUGU A UGGAGGAG | 2075 | CTCCTCCA GGCTAGCTACAACGA ACAGGAAA | 19763 |
| 3922 | AGGACGAA G UAUGUCAC | 9035 | CTCACATA GGCTAGCTACAACGA TTCCTCCT | 19764 |
| 3924 | GAGCAAGU A UGUGACCC | 2076 | CGCTCACA GGCTAGCTACAACGA ACTTCCTC | 19765 |
| 3926 | GCAAGUAU G UGACCCCA | 9036 | TGCGCTCA GGCTAGCTACAACGA ATACTTCC | 19766 |
| 3929 | AGUAUCUG A CCCCAAAU | 9037 | ATTTGCCG GGCTAGCTACAACGA CACATACT | 19767 |
| 3936 | GACCCCAA A UUCCAUUA | 9038 | TAATGCAA GGCTAGCTACAACGA TTGCCGTC | 19768 |
| 3941 | CAAAUUCC A UUAUGACA | 6832 | TGTCATAA GGCTAGCTACAACGA CGAATTTG | 19769 |
| 3944 | AUUCCAUU A UGACAACA | 2080 | TCTTGTCA GGCTAGCTACAACGA AATCCAAT | 19770 |
| 3947 | CCAUUAUG A CAACACAG | 9039 | CTGTGTTG GGCTAGCTACAACGA CATAATGG | 19771 |
| 3950 | UUAUGACA A CACAGCAG | 9040 | CTGCTGTG GGCTAGCTACAACGA TGTCATAA | 19772 |
| 3952 | AUGACAAC A CAGCAGGA | 6834 | TCCTGCTG GGCTAGCTACAACGA GTTGTCAT | 19773 |
| 3955 | ACAACACA G CAGGAAUC | 9041 | GATTCCTG GGCTAGCTACAACGA TGTGTTGT | 19774 |
| 3961 | CAGCAGGA A UCAGUCAG | 9042 | CTGACTGA GGCTAGCTACAACGA TCCTGCTG | 19775 |
| 3965 | AGGAAUCA G UCAGUAUC | 9043 | GATACTGA GGCTAGCTACAACGA TGATTCCT | 19776 |
| 3969 | AUCAGUCA G UAUCUGCA | 9044 | TGCAGATA GGCTAGCTACAACGA TGACTGAT | 19777 |
| 3971 | CAGUCAGU A UCUGCAGA | 2083 | TCTGCAGA GGCTAGCTACAACGA ACTGACTG | 19778 |
| 3975 | CAGUAUCU G CAGAACAG | 9045 | CTGTTCTG GGCTAGCTACAACGA AGATACTG | 19779 |
| 3980 | UCUGCAGA A CAGUAAGC | 9046 | GCTTACTG GGCTAGCTACAACGA TCTGCAGA | 19780 |
| 3983 | GCAGAACA G UAAGCGAA | 9047 | TTCGCTTA GGCTAGCTACAACGA TGTTCTGC | 19781 |
| 3987 | AACAGUAA G CGAAAGAG | 9048 | CTCTTTCG GGCTAGCTACAACGA TTACTGTT | 19782 |
| 3995 | GCGAAAGA G CCGGCCUG | 9049 | CAGGCCGG GGCTAGCTACAACGA TCTTTCGC | 19783 |
| 3999 | AAGAGCCG G CCUGUGAG | 9050 | CTCACAGG GGCTAGCTACAACGA CGGCTCTT | 19784 |
| 4003 | GCCGGCCU G UGAGUGUA | 9051 | TACACTCA GGCTAGCTACAACGA AGGCCGGC | 19785 |
| 4007 | GCCUGUGA G UGUAAAAA | 9052 | TTTTTACA GGCTAGCTACAACGA TCACAGGC | 19786 |
| 4009 | CUGUGAGU G UAAAAACA | 9053 | TGTTTTTA GGCTAGCTACAACGA ACTCACAG | 19787 |
| 4015 | GUGUAAAA A CAUUUGAA | 9054 | TTCAAATG GGCTAGCTACAACGA TTTTACAC | 19788 |
| 4017 | GUAAAAAC A UUUGAAGA | 6845 | TCTTCAAA GGCTAGCTACAACGA GTTTTTAC | 19789 |
| 4025 | AUUUGAAG A UAUCCCGU | 9055 | ACGGGATA GGCTAGCTACAACGA CTTCAAAT | 19790 |
| 4027 | UUGAAGAU A UCCCGUUA | 2089 | TAACGGGA GGCTAGCTACAACGA ATCTTCAA | 19791 |
| 4032 | GAUAUCCC G UUAGAAGA | 9056 | TCTTCTAA GGCTAGCTACAACGA GGGATATC | 19792 |
| 4041 | UUAGAAGA A CCAGAAGU | 9057 | ACTTCTGG GGCTAGCTACAACGA TCTTCTAA | 19793 |
| 4048 | AACCAGAA G UAAAAGUA | 9058 | TACTTTTA GGCTAGCTACAACGA TTCTGGTT | 19794 |
| 4054 | AAGUAAAA G UAAUCCCA | 9059 | TGGGATTA GGCTAGCTACAACGA TTTTACTT | 19795 |
| 4057 | UAAAAGUA A UCCCAGAU | 9060 | ATCTGGGA GGCTAGCTACAACGA TACTTTTA | 19796 |
| 4064 | AAUCCCAG A UGACAACC | 9061 | GGTTGTCA GGCTAGCTACAACGA CTGGGATT | 19797 |
| 4067 | CCCAGAUG A CAACCAGA | 9062 | ACTGGTTG GGCTAGCTACAACGA CATCTGGG | 19798 |
| 4070 | AGAUGACA A CCAGACGG | 9063 | CCGTCTGG GGCTAGCTACAACGA TGTCATCT | 19799 |
| 4075 | ACAACCAG A CGGACAGU | 9064 | ACTGTCCG GGCTAGCTACAACGA CTGGTTGT | 19800 |
| 4079 | CCAGACGG A CAGUGGUA | 9065 | TACCACTG GGCTAGCTACAACGA CCGTCTGG | 19801 |
| 4082 | GACGGACA G UGGUAUGG | 9066 | CCATACCA GGCTAGCTACAACGA TGTCCGTC | 19802 |
| 4085 | GGACAGUG G UAUGGUUC | 9067 | GAACCATA GGCTAGCTACAACGA CACTGTCC | 19803 |
| 4087 | ACAGUGGU A UGGUUCUU | 2096 | AAGAACCA GGCTAGCTACAACGA ACCACTGT | 19804 |
| 4090 | GUGGUAUG G UUCUUGCC | 9068 | GGCAAGAA GGCTAGCTACAACGA CATACCAC | 19805 |
| 4096 | UGGUUCUU G CCUCAGAA | 9069 | TTCTGAGG GGCTAGCTACAACGA AAGAACCA | 19806 |
| 4107 | UCAGAAGA G CUGAAAAC | 9070 | GTTTTCAG GGCTAGCTACAACGA TCTTCTGA | 19807 |
| 4114 | AGCUGAAA A CUUUGGAA | 9071 | TTCCAAAG GGCTAGCTACAACGA TTTCAGCT | 19808 |
| 4124 | UUUGGAAG A CAGAACCA | 9072 | TGGTTCTG GGCTAGCTACAACGA CTTCCAAA | 19809 |
| 4129 | AAGACAGA A CCAAAUUA | 9073 | TAATTTGG GGCTAGCTACAACGA TCTGTCTT | 19810 |
| 4134 | AGAACCAA A UUAUCUCC | 9074 | GGAGATAA GGCTAGCTACAACGA TTGGTTCT | 19811 |
| 4137 | ACCAAAUU A UCUCCAUC | 2104 | GATGGAGA GGCTAGCTACAACGA AATTTGGT | 19812 |
| 4143 | UUAUCUCC A UCUUUUGG | 6868 | CCAAAAGA GGCTAGCTACAACGA GGAGATAA | 19813 |
| 4151 | AUCUUUUG G UGGAAUGG | 9075 | CCATTCCA GGCTAGCTACAACGA CAAAAGAT | 19814 |
| 4156 | UUGGUGGA A UGGUGCCC | 9076 | GGGCACCA GGCTAGCTACAACGA TCCACCAA | 19815 |
| 4159 | GUGGAAUG G UGCCCAGC | 9077 | GCTGGGCA GGCTAGCTACAACGA CATTCCAC | 19816 |
| 4161 | GGAAUGGU G CCCAGCAA | 9078 | TTGCTGGG GGCTAGCTACAACGA ACCATTCC | 19817 |
| 4166 | GGUGCCCA G CAAAAGCA | 9079 | TGCTTTTG GGCTAGCTACAACGA TGGGCACC | 19818 |
| 4172 | CAGCAAAA G CAGGGAGU | 9080 | ACTCCCTG GGCTAGCTACAACGA TTTTGCTG | 19819 |
| 4179 | AGCAGGGA G UCUGUGGC | 9081 | GCCACAGA GGCTAGCTACAACGA TCCCTGCT | 19820 |
| 4183 | GGGAGUCU G UGGCAUCU | 9082 | AGATGCCA GGCTAGCTACAACGA AGACTCCC | 19821 |
| 4186 | AGUCUGUG G CAUCUGAA | 9083 | TTCAGATG GGCTAGCTACAACGA CACAGACT | 19822 |
| 4188 | UCUGUGGC A UCUGAAGG | 6876 | CCTTCAGA GGCTAGCTACAACGA GCCACAGA | 19823 |
| 4196 | AUCUGAAG G CUCAAACC | 9084 | GGTTTGAG GGCTAGCTACAACGA CTTCAGAT | 19824 |
| 4202 | AGGCUCAA A CCAGACAA | 9085 | TTGTCTGG GGCTAGCTACAACGA TTGAGCCT | 19825 |
| 4207 | CAAACCAG A CAAGCGGC | 9086 | GCCGCTTG GGCTAGCTACAACGA CTGGTTTG | 19826 |
| 4211 | CCAGACAA G CGGCUACC | 9087 | GGTAGCCG GGCTAGCTACAACGA TTGTCTGG | 19827 |
| 4214 | GACAAGCG G CUACCAGU | 9088 | ACTGGTAG GGCTAGCTACAACGA CGCTTGTC | 19828 |
| 4217 | AAGCGGCU A CCAGUCCG | 2114 | CGGACTGG GGCTAGCTACAACGA AGCCGCTT | 19829 |
| 4221 | GGCUACCA G UCCGGAUA | 9089 | TATCCGGA GGCTAGCTACAACGA TGGTAGCC | 19830 |
| 4227 | CAGUCCGG A UAUCACUC | 9090 | GAGTGATA GGCTAGCTACAACGA CCGGACTG | 19831 |
| 4229 | GUCCGGAU A UCACUCCG | 2116 | CGGAGTGA GGCTAGCTACAACGA ATCCGGAC | 19832 |
| 4232 | CGGAUAUC A CUCCGAUG | 6887 | CATCGGAG GGCTAGCTACAACGA GATATCCG | 19833 |
| 4238 | UCACUCCG A UGACACAG | 9091 | CTGTGTCA GGCTAGCTACAACGA CGGAGTGA | 19834 |
| 4241 | CUCCGAUG A CACAGACA | 9092 | TGTCTGTG GGCTAGCTACAACGA CATCGGAG | 19835 |
| 4243 | CCGAUGAC A CAGACACC | 6890 | GGTGTCTG GGCTAGCTACAACGA GTCATCGG | 19836 |
| 4247 | UGACACAG A CACCACCG | 9093 | CGGTGGTG GGCTAGCTACAACGA CTGTGTCA | 19837 |
| 4249 | ACACAGAC A CCACCGUG | 6892 | CACGGTGG GGCTAGCTACAACGA GTCTGTGT | 19838 |
| 4252 | CAGACACC A CCGUGUAC | 6894 | GTACACGG GGCTAGCTACAACGA GGTGTCTG | 19839 |
| 4255 | ACACCACC G UGUACUCC | 9094 | GGAGTACA GGCTAGCTACAACGA GGTGGTGT | 19840 |
| 4257 | ACCACCGU G UACUCCAG | 9095 | CTGGAGTA GGCTAGCTACAACGA ACGGTGGT | 19841 |
| 4259 | CACCGUGU A CUCCAGUG | 2119 | CACTGGAG GGCTAGCTACAACGA ACACGGTG | 19842 |
| 4265 | GUACUCCA G UGAGGAAG | 9096 | CTTCCTCA GGCTAGCTACAACGA TGGAGTAC | 19843 |
| 4273 | GUGAGGAA G CAGAACUU | 9097 | AAGTTCTG GGCTAGCTACAACGA TTCCTCAC | 19844 |
| 4278 | GAAGCAGA A CUUUUAAA | 9098 | TTTAAAAG GGCTAGCTACAACGA TCTGCTTC | 19845 |
| 4287 | CUUUUAAA G CUGAUAGA | 9099 | TCTATCAG GGCTAGCTACAACGA TTTAAAAG | 19846 |
| 4291 | UAAAGCUG A UAGAGAUU | 9100 | AATCTCTA GGCTAGCTACAACGA CAGCTTTA | 19847 |
| 4297 | UGAUAGAG A UUGGAGUG | 9101 | CACTCCAA GGCTAGCTACAACGA CTCTATCA | 19848 |
| 4303 | AGAUUGGA G UGCAAACC | 9102 | GGTTTGCA GGCTAGCTACAACGA TCCAATCT | 19849 |
| 4305 | AUUGGAGU G CAAACCGG | 9103 | CCGGTTTG GGCTAGCTACAACGA ACTCCAAT | 19850 |
| 4309 | GAGUGCAA A CCGGUAGC | 9104 | GCTACCGG GGCTAGCTACAACGA TTGCACTC | 19851 |
| 4313 | GCAAACCG G UAGCACAG | 9105 | CTGTGCTA GGCTAGCTACAACGA CGGTTTGC | 19852 |
| 4316 | AACCGGUA G CACAGCCC | 9106 | GGGCTGTG GGCTAGCTACAACGA TACCGGTT | 19853 |
| 4318 | CCGGUAGC A CAGCCCAG | 6904 | CTGGGCTG GGCTAGCTACAACGA GCTACCGG | 19854 |
| 4321 | GUAGCACA G CCCAGAUU | 9107 | AATCTGGG GGCTAGCTACAACGA TGTGCTAC | 19855 |
| 4327 | CAGCCCAG A UUCUCCAG | 9108 | CTGGAGAA GGCTAGCTACAACGA CTGGGCTG | 19856 |
| 4335 | AUUCUCCA G CCUGACUC | 9109 | GAGTCAGG GGCTAGCTACAACGA TGGAGAAT | 19857 |
| 4340 | CCAGCCUG A CUCGGGGA | 9110 | TCCCCGAG GGCTAGCTACAACGA CAGCCTGG | 19858 |
| 4348 | ACUCGGGG A CCACACUG | 9111 | CAGTGTGG GGCTAGCTACAACGA CCCCGAGT | 19859 |
| 4351 | CGGGGACC A CACUGAGC | 6916 | GCTCAGTG GGCTAGCTACAACGA GGTCCCCG | 19860 |
| 4353 | GGGACCAC A CUGAGCUC | 6917 | GAGCTCAG GGCTAGCTACAACGA GTGGTCCC | 19861 |
| 4358 | CACACUGA G CUCUCCUC | 9112 | GAGGAGAG GGCTAGCTACAACGA TCAGTGTG | 19862 |
| 4369 | CUCCUCCU G UUUAAAAG | 9113 | CTTTTAAA GGCTAGCTACAACGA AGGAGGAG | 19863 |
| 4381 | AAAAGGAA G CAUCCACA | 9114 | TGTGGATG GGCTAGCTACAACGA TTCCTTTT | 19864 |
| 4383 | AAGGAAGC A UCCACACC | 6925 | GGTGTGGA GGCTAGCTACAACGA GCTTCCTT | 19865 |
| 4387 | AAGCAUCC A CACCCCAA | 6927 | TTGGGGTG GGCTAGCTACAACGA GGATCCTT | 19866 |
| 4389 | GCAUCCAC A CCCCAACU | 6928 | AGTTGGCG GGCTAGCTACAACGA GTGGATGC | 19867 |
| 4395 | ACACCCCA A CUCCCGGA | 9115 | TCCGGGAG GGCTAGCTACAACGA TGGGGTGT | 19868 |
| 4403 | ACUCCCGG A CAUCACAU | 9116 | ATGTGATG GGCTAGCTACAACGA CCGGGAGT | 19869 |
| 4405 | UCCCGGAC A UCACAUGA | 6936 | TCATGTGA GGCTAGCTACAACGA GTCCGGGA | 19870 |
| 4408 | CGGACAUC A CAUGAGAG | 6937 | CTCTCATG GGCTAGCTACAACGA GATGTCCG | 19871 |
| 4410 | GACAUCAC A UGAGAGGU | 6938 | ACCTCTCA GGCTAGCTACAACGA GTGATGTC | 19872 |
| 4417 | CAUGAGAG G UCUGCUCA | 9117 | TGAGCAGA GGCTAGCTACAACGA CTCTCATG | 19873 |
| 4421 | AGAGGUCU G CUCAGAUU | 9118 | AATCTGAG GGCTAGCTACAACGA AGACCTCT | 19874 |
| 4427 | CUGCUCAG A UUUUGAAG | 9119 | CTTCAAAA GGCTAGCTACAACGA CTGAGCAG | 19875 |
| 4435 | AUUUUGAA G UGUUGUUC | 9120 | GAACAACA GGCTAGCTACAACGA TTCAAAAT | 19876 |
| 4437 | UUUGAAGU G UUGUUCUU | 9121 | AAGAACAA GGCTAGCTACAACGA ACTTCAAA | 19877 |
| 4440 | GAAGUGUU G UUCUUUCC | 9122 | GGAAAGAA GGCTAGCTACAACGA AACACTTC | 19878 |
| 4449 | UUCUUUCC A CCAGCAGG | 6944 | CCTGCTGG GGCTAGCTACAACGA GGAAAGAA | 19879 |
| 4453 | UUCCACCA G CAGGAAGU | 9123 | ACTTCCTG GGCTAGCTACAACGA TGGTGGAA | 19880 |
| 4460 | AGCAGGAA G UAGCCGCA | 9124 | TGCGGCTA GGCTAGCTACAACGA TTCCTGCT | 19881 |
| 4463 | AGGAAGUA G CCGCAUUU | 9125 | AAATGCGG GGCTAGCTACAACGA TACTTCCT | 19882 |
| 4466 | AAGUAGCC G CAUUUGAU | 9126 | ATCAAATG GGCTAGCTACAACGA GGCTACTT | 19883 |
| 4468 | GUAGCCGC A UUUGAUUU | 6949 | AAATCAAA GGCTAGCTACAACGA GCGGCTAC | 19884 |
| 4473 | CGCAUUUG A UUUUCAUU | 9127 | AATGAAAA GGCTAGCTACAACGA CAAATGCG | 19885 |
| 4479 | UGAUUUUC A UUUCGACA | 6950 | TGTCGAAA GGCTAGCTACAACGA GAAAATCA | 19886 |
| 4485 | UCAUUUCG A CAACAGAA | 9128 | TTCTGTTG GGCTAGCTACAACGA CGAAATGA | 19887 |
| 4488 | UUUCGACA A CAGAAAAA | 9129 | TTTTTCTG GGCTAGCTACAACGA TGTCGAAA | 19888 |
| 4499 | GAAAAAGG A CCUCGGAC | 9130 | GTCCGAGG GGCTAGCTACAACGA CCTTTTTC | 19889 |
| 4506 | GACCUCGG A CUGCAGGG | 9131 | CCCTGCAG GGCTAGCTACAACGA CCGAGGTC | 19890 |
| 4509 | CUCGGACU G CAGGGAGC | 9132 | GCTCCCTG GGCTAGCTACAACGA AGTCCGAG | 19891 |
| 4516 | UGCAGGGA G CCAGUCUU | 9133 | AAGACTGG GGCTAGCTACAACGA TCCCTGCA | 19892 |
| 4520 | GGGAGCCA G UCUUCUAG | 9134 | CTAGAAGA GGCTAGCTACAACGA TGGCTCCC | 19893 |
| 4529 | UCUUCUAG G CAUAUCCU | 9135 | AGGATATG GGCTAGCTACAACGA CTAGAAGA | 19894 |
| 4531 | UUCUAGGC A UAUCCUGG | 9136 | CCAGGATA GGCTAGCTACAACGA GCCTAGAA | 19895 |
| 4533 | CUAGGCAU A UCCUGGAA | 9137 | TTCCAGGA GGCTAGCTACAACGA ATGCCTAG | 19896 |
| 4545 | UGGAAGAG G CUUGUGAC | 9138 | GTCACAAG GGCTAGCTACAACGA CTCTTCCA | 19897 |
| 4549 | AGAGGCUU G UGACCCAA | 9139 | TTGGGTCA GGCTAGCTACAACGA AAGCCTCT | 19898 |
| 4552 | GGCUUGUG A CCCAAGAA | 9140 | TTCTTGGG GGCTAGCTACAACGA CACAAGCC | 19899 |
| 4560 | ACCCAAGA A UGUGUCUG | 9141 | CAGACACA GGCTAGCTACAACGA TCTTGGGT | 19900 |
| 4562 | CCAAGAAU G UGUCUGUG | 9142 | CACAGACA GGCTAGCTACAACGA ATTCTTGG | 19901 |
| 4564 | AAGAAUGU G UCUGUGUC | 9143 | GACACAGA GGCTAGCTACAACGA ACATTCTT | 19902 |
| 4568 | AUGUGUCU G UGUCUUCU | 9144 | AGAAGACA GGCTAGCTACAACGA AGACACAT | 19903 |
| 4570 | GUGUCUGU G UCUUCUCC | 9145 | GGAGAAGA GGCTAGCTACAACGA ACAGACAC | 19904 |
| 4581 | UUCUCCCA G UGUUGACC | 9146 | GGTCAACA GGCTAGCTACAACGA TGGGAGAA | 19905 |
| 4583 | CUCCCAGU G UUGACCUG | 9147 | CAGGTCAA GGCTAGCTACAACGA ACTGGGAG | 19906 |
| 4587 | CAGUGUUG A CCUGAUCC | 9148 | GGATCAGG GGCTAGCTACAACGA CAACACTG | 19907 |
| 4592 | UUGACCUG A UCCUCUUU | 9149 | AAAGAGGA GGCTAGCTACAACGA CAGGTCAA | 19908 |
| 4605 | CUUUUUUC A UUCAUUUA | 9150 | TAAATGAA GGCTAGCTACAACGA GAAAAAAG | 19909 |
| 4609 | UUUCAUUC A UUUAAAAA | 9151 | TTTTTAAA GGCTAGCTACAACGA GAATGAAA | 19910 |
| 4618 | UUUAAAAA G CAUUAUCA | 9152 | TGATAATG GGCTAGCTACAACGA TTTTTAAA | 19911 |
| 4620 | UAAAAAGC A UUAUCAUG | 9153 | CATGATAA GGCTAGCTACAACGA GCTTTTTA | 19912 |
| 4623 | AAAGCAUU A UCAUGCCC | 9154 | GGGCATGA GGCTAGCTACAACGA AATGCTTT | 19913 |
| 4626 | GCAUUAUC A UGCCCCUG | 9155 | CAGGGGCA GGCTAGCTACAACGA GATAATGC | 19914 |
| 4628 | AUUAUCAU G CCCCUGCU | 9156 | AGCAGGGG GGCTAGCTACAACGA ATGATAAT | 19915 |
| 4634 | AUGCCCCU G CUGCGGGU | 9157 | ACCCGCAG GGCTAGCTACAACGA AGGGGCAT | 19916 |
| 4637 | CCCCUGCU G CGGGUCUC | 9158 | GAGACCCG GGCTAGCTACAACGA AGCAGGGG | 19917 |
| 4641 | UGCUGCGG G UCUCACCA | 9159 | TGGTGAGA GGCTAGCTACAACGA CCGCAGCA | 19918 |
| 4646 | CGGGUCUC A CCAUGGGU | 9160 | ACCCATGG GGCTAGCTACAACGA GAGACCCG | 19919 |
| 4649 | GUCUCACC A UGGGUUUA | 9161 | TAAACCCA GGCTAGCTACAACGA GGTGAGAC | 19920 |
| 4653 | CACCAUGG G UUUAGAAC | 9162 | GTTCTAAA GGCTAGCTACAACGA CCATGGTG | 19921 |
| 4660 | GGUUUAGA A CAAAGAGC | 9163 | GCTCTTTG GGCTAGCTACAACGA TCTAAACC | 19922 |
| 4667 | AACAAAGA G CUUCAAGC | 9164 | GCTTGAAG GGCTAGCTACAACGA TCTTTGTT | 19923 |
| 4674 | AGCUUCAA G CAAUGGCC | 9165 | GGCCATTG GGCTAGCTACAACGA TTGAAGCT | 19924 |
| 4677 | UUCAACCA A UGGCCCCA | 9166 | TGGGGCCA GGCTAGCTACAACGA TGCTTGAA | 19925 |
| 4680 | AAGCAAUG G CCCCAUCC | 9167 | GGATGGGG GGCTAGCTACAACGA CATTGCTT | 19926 |
| 4685 | AUGGCCCC A UCCUCAAA | 9168 | TTTGAGGA GGCTAGCTACAACGA GGGGCCAT | 19927 |
| 4697 | UCAAAGAA G UAGCAGUA | 9169 | TACTGCTA GGCTAGCTACAACGA TTCTTTGA | 19928 |
| 4700 | AAGAAGUA G CAGUACCU | 9170 | AGGTACTG GGCTAGCTACAACGA TACTTCTT | 19929 |
| 4703 | AAGUAGCA G UACCUGGG | 9171 | CCCAGGTA GGCTAGCTACAACGA TGCTACTT | 19930 |
| 4705 | GUAGCAGU A CCUGGGGA | 9172 | TCCCCAGG GGCTAGCTACAACGA ACTGCTAC | 19931 |
| 4714 | CCUGGGGA G CUGACACU | 9173 | AGTGTCAG GGCTAGCTACAACGA TCCCCAGG | 19932 |
| 4718 | GGGAGCUG A CACUUCUG | 9174 | CAGAAGTG GGCTAGCTACAACGA CAGCTCCC | 19933 |
| 4720 | GAGCUGAC A CUUCUGUA | 9175 | TACAGAAG GGCTAGCTACAACGA GTCACCTC | 19934 |
| 4726 | ACACUUCU G UAAAACUA | 9176 | TAGTTTTA GGCTAGCTACAACGA AGAAGTGT | 19935 |
| 4731 | UCUGUAAA A CUAGAAGA | 9177 | TCTTCTAG GGCTAGCTACAACGA TTTACAGA | 19936 |
| 4739 | ACUAGAAG A UAAACCAG | 9178 | CTGGTTTA GGCTAGCTACAACGA CTTCTAGT | 19937 |
| 4743 | GAAGAUAA A CCAGGCAA | 9179 | TTGCCTGG GGCTAGCTACAACGA TTATCTTC | 19938 |
| 4748 | UAAACCAG G CAACGUAA | 9180 | TTACGTTG GGCTAGCTACAACGA CTGGTTTA | 19939 |
| 4751 | ACCAGGCA A CGUAAGUG | 9181 | CACTTACG GGCTAGCTACAACGA TGCCTGGT | 19940 |
| 4753 | CAGGCAAC G UAAGUGUU | 9182 | AACACTTA GGCTAGCTACAACGA GTTGCCTG | 19941 |
| 4757 | CAACGUAA G UGUUCGAG | 9183 | CTCGAACA GGCTAGCTACAACGA TTACGTTG | 19942 |
| 4759 | ACGUAAGU G UUCGAGGU | 9184 | ACCTCGAA GGCTAGCTACAACGA ACTTACGT | 19943 |
| 4766 | UGUUCGAG G UGUUGAAG | 9185 | CTTCAACA GGCTAGCTACAACGA CTCGAACA | 19944 |
| 4768 | UUCGAGGU G UUGAAGAU | 9186 | ATCTTCAA GGCTAGCTACAACGA ACCTCGAA | 19945 |
| 4775 | UGUUGAAG A UGGGAAGG | 9187 | CCTTCCCA GGCTAGCTACAACGA CTTCAACA | 19946 |
| 4784 | UGGGAAGG A UUUGCAGG | 9188 | CCTGCAAA GGCTAGCTACAACGA CCTTCCCA | 19947 |
| 4788 | AAGGAUUU G CAGGGCUC | 9189 | CAGCCCTG GGCTAGCTACAACGA AAATCCTT | 19948 |
| 4793 | UUUGCAGG G CUGAGUCU | 9190 | AGACTCAG GGCTAGCTACAACGA CCTGCAAA | 19949 |
| 4798 | AGGGCUGA G UCUAUCCA | 9191 | TGGATAGA GGCTAGCTACAACGA TCAGCCCT | 19950 |
| 4802 | CUGACUCU A UCCAAGAG | 9192 | CTCTTGGA GGCTAGCTACAACGA AGACTCAG | 19951 |
| 4811 | UCCAAGAG G CUUUGUUU | 9193 | AAACAAAG GGCTAGCTACAACGA CTCTTGGA | 19952 |
| 4816 | GAGGCUUU G UUUAGGAC | 9194 | GTCCTAAA GGCTAGCTACAACGA AAAGCCTC | 19953 |
| 4823 | UGUUUAGG A CGUGGGUC | 9195 | GACCCACG GGCTAGCTACAACGA CCTAAACA | 19954 |
| 4825 | UUUAGGAC G UGGGUCCC | 9196 | GGGACCCA GGCTAGCTACAACGA GTCCTAAA | 19955 |
| 4829 | CGACGUGG G UCCCAAGC | 9197 | GCTTGGGA GGCTAGCTACAACGA CCACGTCC | 19956 |
| 4836 | GGUCCCAA G CCAAGCCU | 9198 | AGGCTTGG GGCTAGCTACAACGA TTGGGACC | 19957 |
| 4841 | CAACCCAA G CCUUAAGU | 9199 | ACTTAAGG GGCTAGCTACAACGA TTGGCTTG | 19958 |
| 4848 | AGCCUUAA G UGUGGAAU | 9200 | ATTCCACA GGCTAGCTACAACGA TTAAGGCT | 19959 |
| 4850 | CCUUAAGU G UGGAAUUC | 9201 | GAATTCCA GGCTAGCTACAACGA ACTTAAGG | 19960 |
| 4855 | AGUGUCCA A UUCGCAUU | 9202 | AATCCGAA GGCTAGCTACAACGA TCCACACT | 19961 |
| 4861 | GAAUUCGG A UUGAUAGA | 9203 | TCTATCAA GCCTAGCTACAACGA CCGAATTC | 19962 |
| 4865 | UCGGAUUG A UAGAAAGC | 9204 | CCTTTCTA GGCTAGCTACAACGA CAATCCGA | 19963 |
| 4877 | AAAGGAAG A CUAACGUU | 9205 | AACGTTAG GGCTAGCTACAACGA CTTCCTTT | 19964 |
| 4881 | GAAGACUA A CGUUACCU | 9206 | AGGTAACG GGCTAGCTACAACGA TAGTCTTC | 19965 |
| 4883 | AGACUAAC G UUACCUUG | 9207 | CAAGGTAA GCCTAGCTACAACGA GTTAGTCT | 19966 |
| 4886 | CUAACGUU A CCUUGCUU | 9208 | AAGCAAGG GGCTAGCTACAACGA AACGTTAG | 19967 |
| 4891 | GUUACCUU G CUUUGGAG | 9209 | CTCCAAAG GGCTAGCTACAACGA AAGGTAAC | 19968 |
| 4901 | UUUGGAGA G UACUGGAG | 9210 | CTCCAGTA GGCTAGCTACAACGA TCTCCAAA | 19969 |
| 4903 | UGGAGAGU A CUGGAGCC | 9211 | GGCTCCAG GGCTAGCTACAACGA ACTCTCCA | 19970 |
| 4909 | GUACUGGA G CCUGCAAA | 9212 | TTTGCAGG GGCTAGCTACAACGA TCCAGTAC | 19971 |
| 4913 | UCGAGCCU G CAAAUGCA | 9213 | TGCATTTG GGCTAGCTACAACGA AGGCTCCA | 19972 |
| 4917 | GCCUGCAA A UGCAUUGU | 9214 | ACAATGCA GGCTAGCTACAACGA TTGCAGGC | 19973 |
| 4919 | CUGCAAAU G CAUUGUGU | 9215 | ACACAATG GGCTAGCTACAACGA ATTTGCAG | 19974 |
| 4921 | GCAAAUGC A UUGUGUUU | 9216 | AAACACAA GGCTAGCTACAACGA GCATTTGC | 19975 |
| 4924 | AAUGCAUU G UCUUUGCU | 9217 | AGCAAACA GGCTAGCTACAACGA AATGCATT | 19976 |
| 4926 | UGCAUUGU G UUUGCUCU | 9218 | AGAGCAAA GGCTAGCTACAACGA ACAATGCA | 19977 |
| 4930 | UUGUGUUU G CUCUGGUG | 9219 | CACCAGAG GGCTAGCTACAACGA AAACACAA | 19978 |
| 4936 | UUGCUCUG G UGGAGGUG | 9220 | CACCTCCA GGCTAGCTACAACGA CAGAGCAA | 19979 |
| 4942 | UGGUGGAG G UGGGCAUG | 9221 | CATGCCCA GGCTAGCTACAACGA CTCCACCA | 19980 |
| 4946 | GGAGGUGG G CAUGGGGU | 9222 | ACCCCATG GGCTAGCTACAACGA CCACCTCC | 19981 |
| 4948 | AGGUGGGC A UGGGGUCU | 9223 | AGACCCCA GGCTAGCTACAACGA GCCCACCT | 19982 |
| 4953 | GGCAUGGG G UCUGUUCU | 9224 | AGAACAGA GGCTAGCTACAACGA CCCATGCC | 19983 |
| 4957 | UGGGGUCU G UUCUGAAA | 9225 | TTTCAGAA GGCTAGCTACAACGA AGACCCCA | 19984 |
| 4965 | GUUCUGAA A UGUAAAGG | 9226 | CCTTTACA GGCTAGCTACAACGA TTCAGAAC | 19985 |
| 4967 | UCUGAAAU G UAAAGGGU | 9227 | ACCCTTTA GGCTAGCTACAACGA ATTTCAGA | 19986 |
| 4974 | UGUAAAGG G UUCAGACG | 9228 | CGTCTGAA GGCTAGCTACAACGA CCTTTACA | 19987 |
| 4980 | GCGUUCAG A CGGGGUUU | 9229 | AAACCCCG GGCTAGCTACAACGA CTGAACCC | 19988 |
| 4985 | CAGACGGG G UUUCUGGU | 9230 | ACCAGAAA GGCTAGCTACAACGA CCCGTCTG | 19989 |
| 4992 | GGUUUCUG G UUUUAGAA | 9231 | TTCTAAAA GGCTAGCTACAACGA CAGAAACC | 19990 |
| 5002 | UUUAGAAG G UUGCGUGU | 9232 | ACACGCAA GGCTAGCTACAACGA CTTCTAAA | 19991 |
| 5005 | AGAAGGUU G CGUGUUCU | 9233 | ACAACACG GGCTAGCTACAACGA AACCTTCT | 19992 |
| 5007 | AAGGUUGC G UGUUCUUC | 9234 | GAAGAACA GGCTAGCTACAACGA GCAACCTT | 19993 |
| 5009 | GGUUGCGU G UUCUUCGA | 9235 | TCGAAGAA GGCTAGCTACAACGA ACGCAACC | 19994 |
| 5018 | UUCUUCGA G UUGGGCUA | 9236 | TACCCCAA GCCTAGCTACAACGA TCGAAGAA | 19995 |
| 5023 | CGAGUUGG G CUAAAGUA | 9237 | TACTTTAG GGCTAGCTACAACGA CCAACTCG | 19996 |
| 5029 | GGGCUAAA G UAGAGUUC | 9238 | GAACTCTA GGCTAGCTACAACGA TTTAGCCC | 19997 |
| 5034 | AAAGUACA G UUCGUUGU | 9239 | ACAACGAA GGCTAGCTACAACGA TCTACTTT | 19998 |
| 5038 | UAGAGUUC G UUGUGCUG | 9240 | CAGCACAA GGCTAGCTACAACGA GAACTCTA | 19999 |
| 5041 | AGUUCGUU G UGCUGUUU | 9241 | AAACAGCA GGCTAGCTACAACGA AACGAACT | 20000 |
| 5043 | UUCGUUGU G CUGUUUCU | 9242 | AGAAACAG GGCTAGCTACAACGA ACAACGAA | 20001 |
| 5046 | GUUGUGCU G UUUCUCAC | 9243 | GTCAGAAA GGCTAGCTACAACGA AGCACAAC | 20002 |
| 5053 | UGUUUCUG A CUCCUAAU | 9244 | ATTAGGAG GGCTAGCTACAACGA CAGAAACA | 20003 |
| 5060 | GACUCCUA A UGAGAGUU | 9245 | AACTCTCA GGCTAGCTACAACGA TAGGAGTC | 20004 |
| 5066 | UAAUGAGA G UUCCUUCC | 9246 | GGAAGGAA GGCTAGCTACAACGA TCTCATTA | 20005 |
| 5077 | CCUUCCAG A CCCUUACC | 9247 | GCTAACCG GGCTAGCTACAACGA CTGGAAGG | 20006 |
| 5080 | UCCAGACC G UUACCUGU | 9248 | ACAGCTAA GGCTAGCTACAACGA GCTCTGGA | 20007 |
| 5084 | GACCGUUA G CUGUCUCC | 9249 | GGAGACAG GGCTAGCTACAACGA TAACGGTC | 20008 |
| 5087 | CCUUACCU G UCUCCUUG | 9250 | CAAGGACA GGCTAGCTACAACGA AGCTAACG | 20009 |
| 5095 | GUCUCCUU G CCAAGCCC | 9251 | GCGCTTGG GGCTAGCTACAACGA AAGGAGAC | 20010 |
| 5100 | CUUGCCAA G CCCCACGA | 9252 | TCCTGGCG GGCTAGCTACAACGA TTCGCAAG | 20011 |
| 5114 | GGAAGAAA A UGAUCCAG | 9253 | CTGCATCA GGCTAGCTACAACGA TTTCTTCC | 20012 |
| 5117 | AGAAAAUG A UCCACCUC | 9254 | GACCTGCA GGCTAGCTACAACGA CATTTTCT | 20013 |
| 5119 | AAAAUGAU G CACCUCUG | 9255 | CAGACCTG GGCTAGCTACAACGA ATCATTTT | 20014 |
| 5122 | AUGAUCCA G CUCUGGCU | 9256 | ACCCAGAG GGCTAGCTACAACGA TGCATCAT | 20015 |
| 5128 | CAGCUCUG G CUCCUUGU | 9257 | ACAAGGAG GGCTAGCTACAACGA CAGAGCTG | 20016 |
| 5135 | GGCUCCUU G UCUCCCAG | 9258 | CTGGGAGA GGCTAGCTACAACGA AAGGAGCC | 20017 |
| 5144 | UCUCCCAG G CUGAUCCU | 9259 | AGGATCAG GGCTAGCTACAACGA CTGGGAGA | 20018 |
| 5148 | CCAGGCUG A UCCUUUAU | 9260 | ATAAAGGA GGCTAGCTACAACGA CAGCCTGG | 20019 |
| 5155 | GAUCCUUU A UUCAGAAU | 9261 | ATTCTGAA GGCTAGCTACAACGA AAAGGATC | 20020 |
| 5162 | UAUUCAGA A UACCACAA | 9262 | TTGTGGTA GGCTAGCTACAACGA TCTGAATA | 20021 |
| 5164 | UUCAGAAU A CCACAAAG | 9263 | CTTTGTGG GGCTAGCTACAACGA ATTCTGAA | 20022 |
| 5167 | AGAAUACC A CAAAGAAA | 9264 | TTTCTTTG GGCTAGCTACAACGA GGTATTCT | 20023 |
| 5178 | AAGAAAGG A CAUUCAGC | 9265 | GCTGAATG GGCTAGCTACAACGA CCTTTCTT | 20024 |
| 5180 | GAAAGGAC A UUCAGCUC | 9266 | GAGCTGAA GGCTAGCTACAACGA GTCCTTTC | 20025 |
| 5185 | GACAUUCA G CUCAAGGC | 9267 | GCCTTGAG GGCTAGCTACAACGA TGAATGTC | 20026 |
| 5192 | AGCUCAAG G CUCCCUGC | 9268 | GCAGGGAG GGCTAGCTACAACGA CTTGAGCT | 20027 |
| 5199 | GGCUCCCU G CCGUGUUG | 9269 | CAACACGG GGCTAGCTACAACGA AGGGAGCC | 20028 |
| 5202 | UCCCUGCC G UGUUGAAG | 9270 | CTTCAACA GGCTAGCTACAACGA GGCAGGGA | 20029 |
| 5204 | CCUGCCGU G UUGAAGAG | 9271 | CTCTTCAA GGCTAGCTACAACGA ACGGCAGG | 20030 |
| 5212 | GUUGAAGA G UUCUGACU | 9272 | AGTCAGAA GGCTAGCTACAACGA TCTTCAAC | 20031 |
| 5218 | GAGUUCUG A CUGCACAA | 9273 | TTGTGCAG GGCTAGCTACAACGA CAGAACTC | 20032 |
| 5221 | UUCUGACU G CACAAACC | 9274 | GGTTTGTG GGCTAGCTACAACGA AGTCAGAA | 20033 |
| 5223 | CUGACUGC A CAAACCAG | 9275 | CTGGTTTG GGCTAGCTACAACGA GCAGTCAG | 20034 |
| 5227 | CUGCACAA A CCAGCUUC | 9276 | GAAGCTGG GGCTAGCTACAACGA TTGTGCAG | 20035 |
| 5231 | ACAAACCA G CUUCUGGU | 9277 | ACCAGAAG GGCTAGCTACAACGA TGGTTTGT | 20036 |
| 5238 | AGCUUCUG G UUUCUUCU | 9278 | AGAAGAAA GGCTAGCTACAACGA CAGAAGCT | 20037 |
| 5250 | CUUCUGGA A UGAAUACC | 9279 | GCTATTCA GGCTAGCTACAACGA TCCAGAAG | 20038 |
| 5254 | UGGAAUGA A UACCCUCA | 9280 | TGAGGGTA GGCTAGCTACAACGA TCATTCCA | 20039 |
| 5256 | GAAUGAAU A CCCUCAUA | 9281 | TATGAGGG GGCTAGCTACAACGA ATTCATTC | 20040 |
| 5262 | AUACCCUC A UAUCUGUC | 9282 | GACAGATA GGCTAGCTACAACGA GAGGGTAT | 20041 |
| 5264 | ACCCUCAU A UCUGUCCU | 9283 | AGGACAGA GGCTAGCTACAACGA ATGAGGGT | 20042 |
| 5268 | UCAUAUCU G UCCUGAUG | 9284 | CATCAGGA GGCTAGCTACAACGA AGATATGA | 20043 |
| 5274 | CUGUCCUG A UGUGAUAU | 9285 | ATATCACA GGCTAGCTACAACGA CAGGACAG | 20044 |
| 5276 | GUCCUGAU G UGAUAUGU | 9286 | ACATATCA GGCTAGCTACAACGA ATCAGGAC | 20045 |
| 5279 | CUGAUGUG A UAUGUCUG | 9287 | CAGACATA GGCTAGCTACAACGA CACATCAG | 20046 |
| 5281 | GAUGUGAU A UGUCUGAG | 9288 | CTCAGACA GGCTAGCTACAACGA ATCACATC | 20047 |
| 5283 | UGUGAUAU G UCUGAGAC | 9289 | GTCTCAGA GGCTAGCTACAACGA ATATCACA | 20048 |
| 5290 | UGUCUGAG A CUGAAUGC | 9290 | GCATTCAG GGCTAGCTACAACGA CTCAGACA | 20049 |
| 5295 | GAGACUGA A UGCGGGAG | 9291 | CTCCCGCA GGCTAGCTACAACGA TCAGTCTC | 20050 |
| 5297 | GACUGAAU G CGGGAGGU | 9292 | ACCTCCCG GGCTAGCTACAACGA ATTCAGTC | 20051 |
| 5304 | UGCGGGAG G UUCAAUGU | 9293 | ACATTGAA GGCTAGCTACAACGA CTCCCGCA | 20052 |
| 5309 | GAGGUUCA A UGUGAAGC | 9294 | GCTTCACA GGCTAGCTACAACGA TGAACCTC | 20053 |
| 5311 | GGUUCAAU G UGAAGCUG | 9295 | CAGCTTCA GGCTAGCTACAACGA ATTGAACC | 20054 |
| 5316 | AAUGUGAA G CUGUGUGU | 9296 | ACACACAG GGCTAGCTACAACGA TTCACATT | 20055 |
| 5319 | GUGAAGCU G UGUGUGGU | 9297 | ACCACACA GGCTAGCTACAACGA AGCTTCAC | 20056 |
| 5321 | GAAGCUGU G UGUGGUGU | 9298 | ACACCACA GGCTAGCTACAACGA ACAGCTTC | 20057 |
| 5323 | AGCUGUGU G UGGUGUCA | 9299 | TGACACCA GGCTAGCTACAACGA ACACAGCT | 20058 |
| 5326 | UGUGUGUG G UGUCAAAG | 9300 | CTTTGACA GGCTAGCTACAACGA CACACACA | 20059 |
| 5328 | UGUGUGGU G UCAAAGUU | 9301 | AACTTTGA GGCTAGCTACAACGA ACCACACA | 20060 |
| 5334 | GUGUCAAA G UUUCAGGA | 9302 | TCCTGAAA GGCTAGCTACAACGA TTTGACAC | 20061 |
| 5346 | CAGGAAGG A UUUUACCC | 9303 | GGGTAAAA GGCTAGCTACAACGA CCTTCCTG | 20062 |
| 5351 | AGGAUUUU A CCCUUUUG | 9304 | CAAAAGGG GGCTAGCTACAACGA AAAATCCT | 20063 |
| 5359 | ACCCUUUU G UUCUUCCC | 9305 | GGGAAGAA GGCTAGCTACAACGA AAAAGGGT | 20064 |
| 5371 | UUCCCCCU G UCCCCAAC | 9306 | GTTGGGGA GGCTAGCTACAACGA AGGGGGAA | 20065 |
| 5378 | UGUCCCCA A CCCACUCU | 9307 | AGAGTGGG GGCTAGCTACAACGA TGGGGACA | 20066 |
| 5382 | CCCAACCC A CUCUCACC | 9308 | GGTGAGAG GGCTAGCTACAACGA GGGTTGGG | 20067 |
| 5388 | CCACUCUC A CCCCGCAA | 9309 | TTGCGGGG GGCTAGCTACAACGA GAGAGTGG | 20068 |
| 5393 | CUCACCCC G CAACCCAU | 9310 | ATGGGTTG GGCTAGCTACAACGA GGGGTGAG | 20069 |
| 5396 | ACCCCGCA A CCCAUCAG | 9311 | CTGATGGG GGCTAGCTACAACGA TGCGGGGT | 20070 |
| 5400 | CGCAACCC A UCAGUAUU | 9312 | AATACTGA GGCTAGCTACAACGA GGGTTGCG | 20071 |
| 5404 | ACCCAUCA G UAUUUUAG | 9313 | CTAAAATA GGCTAGCTACAACGA TGATGGGT | 20072 |
| 5406 | CCAUCAGU A UUUUAGUU | 9314 | AACTAAAA GGCTAGCTACAACGA ACTGATGG | 20073 |
| 5412 | GUAUUUUA G UUAUUUGG | 9315 | CCAAATAA GGCTAGCTACAACGA TAAAATAC | 20074 |
| 5415 | UUUUAGUU A UUUGGCCU | 9316 | AGGCCAAA GGCTAGCTACAACGA AACTAAAA | 20075 |
| 5420 | GUUAUUUG G CCUCUACU | 9317 | AGTAGAGG GGCTAGCTACAACGA CAAATAAC | 20076 |
| 5426 | UGGCCUCU A CUCCAGUA | 9318 | TACTGGAG GGCTAGCTACAACGA AGAGGCCA | 20077 |
| 5432 | CUACUCCA G UAAACCUG | 9319 | CAGGTTTA GGCTAGCTACAACGA TGGAGTAG | 20078 |
| 5436 | UCCAGUAA A CCUGAUUG | 9320 | CAATCAGG GGCTAGCTACAACGA TTACTGGA | 20079 |
| 5441 | UAAACCUG A UUGGGUUU | 9321 | AAACCCAA GGCTAGCTACAACGA CAGGTTTA | 20080 |
| 5446 | CUGAUUGG G UUUGUUCA | 9322 | TGAACAAA GGCTAGCTACAACGA CCAATCAG | 20081 |
| 5450 | UUGGGUUU G UUCACUCU | 9323 | AGAGTGAA GGCTAGCTACAACGA AAACCCAA | 20082 |
| 5454 | GUUUGUUC A CUCUCUGA | 9324 | TCAGAGAG GGCTAGCTACAACGA GAACAAAC | 20083 |
| 5463 | CUCUCUGA A UGAUUAUU | 9325 | AATAATCA GGCTAGCTACAACGA TCAGAGAG | 20084 |
| 5466 | UCUGAAUG A UUAUUAGC | 9326 | GCTAATAA GGCTAGCTACAACGA CATTCAGA | 20085 |
| 5469 | GAAUGAUU A UUAGCCAG | 9327 | CTGGCTAA GGCTAGCTACAACGA AATCATTC | 20086 |
| 5473 | GAUUAUUA G CCAGACUU | 9328 | AAGTCTGG GGCTAGCTACAACGA TAATAATC | 20087 |
| 5478 | UUAGCCAG A CUUCAAAA | 9329 | TTTTGAAG GGCTAGCTACAACGA CTGGCTAA | 20088 |
| 5486 | ACUUCAAA A UUAUUUUA | 9330 | TAAAATAA GGCTAGCTACAACGA TTTGAAGT | 20089 |
| 5489 | UCAAAAUU A UUUUAUAG | 9331 | CTATAAAA GGCTAGCTACAACGA AATTTTGA | 20090 |
| 5494 | AUUAUUUU A UAGCCCAA | 9332 | TTGGGCTA GGCTAGCTACAACGA AAAATAAT | 20091 |
| 5497 | AUUUUAUA G CCCAAAUU | 9333 | AATTTGGG GGCTAGCTACAACGA TATAAAAT | 20092 |
| 5503 | UAGCCCAA A UUAUAACA | 9334 | TGTTATAA GGCTAGCTACAACGA TTGGGCTA | 20093 |
| 5506 | CCCAAAUU A UAACAUCU | 9335 | AGATGTTA GGCTAGCTACAACGA AATTTGGG | 20094 |
| 5509 | AAAUUAUA A CAUCUAUU | 9336 | AATAGATG GGCTAGCTACAACGA TATAATTT | 20095 |
| 5511 | AUUAUAAC A UCUAUUGU | 9337 | ACAATAGA GGCTAGCTACAACGA GTTATAAT | 20096 |
| 5515 | UAACAUCU A UUGUAUUA | 9338 | TAATACAA GGCTAGCTACAACGA AGATGTTA | 20097 |
| 5518 | CAUCUAUU G UAUUAUUU | 9339 | AAATAATA GGCTAGCTACAACGA AATAGATG | 20098 |
| 5520 | UCUAUUGU A UUAUUUAG | 9340 | CTAAATAA GGCTAGCTACAACGA ACAATAGA | 20099 |
| 5523 | AUUGUAUU A UUUAGACU | 9341 | AGTCTAAA GGCTAGCTACAACGA AATACAAT | 20100 |
| 5529 | UUAUUUAG A CUUUUAAC | 9342 | GTTAAAAG GGCTAGCTACAACGA CTAAATAA | 20101 |
| 5536 | GACUUUUA A CAUAUAGA | 9343 | TCTATATG GGCTAGCTACAACGA TAAAAGTC | 20102 |
| 5538 | CUUUUAAC A UAUAGAGC | 9344 | GCTCTATA GGCTAGCTACAACGA GTTAAAAG | 20103 |
| 5540 | UUUAACAU A UAGAGCUA | 9345 | TAGCTCTA GGCTAGCTACAACGA ATGTTAAA | 20104 |
| 5545 | CAUAUAGA G CUAUUUCU | 9346 | AGAAATAG GGCTAGCTACAACGA TCTATATG | 20105 |
| 5548 | AUAGAGCU A UUUCUACU | 9347 | AGTAGAAA GGCTAGCTACAACGA AGCTCTAT | 20106 |
| 5554 | CUAUUUCU A CUGAUUUU | 9348 | AAAATCAG GGCTAGCTACAACGA AGAAATAG | 20107 |
| 5558 | UUCUACUG A UUUUUGCC | 9349 | GGCAAAAA GGCTAGCTACAACGA CAGTAGAA | 20108 |
| 5564 | UGAUUTUU G CCCUUGUU | 9350 | AACAAGGG GGCTAGCTACAACGA AAAAATCA | 20109 |
| 5570 | UUGCCCUU G UUCUGUCC | 9351 | GGACAGAA GGCTAGCTACAACGA AAGGGCAA | 20110 |
| 5575 | CUUGUUCU G UCCUUUUU | 9352 | AAAAAGGA GGCTAGCTACAACGA AGAACAAG | 20111 |
| 5597 | AAAAGAAA A UGUGUUUU | 9353 | AAAACACA GGCTAGCTACAACGA TTTCTTTT | 20112 |
| 5599 | AAGAAAAU G UGUUUUUU | 9354 | AAAAAACA GGCTAGCTACAACGA ATTTTCTT | 20113 |
| 5601 | GAAAAUGU G UUUUUUGU | 9355 | ACAAAAAA GGCTAGCTACAACGA ACATTTTC | 20114 |
| 5608 | UGUUUUUU G UUUGGUAC | 9356 | GTACCAAA GGCTAGCTACAACGA AAAAAACA | 20115 |
| 5613 | UUUGUUUG G UACCAUAG | 9357 | CTATGGTA GGCTAGCTACAACGA CAAACAAA | 20116 |
| 5615 | UGUUUGGU A CCAUAGUG | 9358 | CACTATGG GGCTAGCTACAACGA ACCAAACA | 20117 |
| 5618 | UUGGUACC A UAGUGUGA | 9359 | TCACACTA GGCTAGCTACAACGA GGTACCAA | 20118 |
| 5621 | GUACCAUA G UGUGAAAU | 9360 | ATTTCACA GGCTAGCTACAACGA TATGGTAC | 20119 |
| 5623 | ACCAUAGU G UGAAAUGC | 9361 | GCATTTCA GGCTAGCTACAACGA ACTATGGT | 20120 |
| 5628 | AGUGUGAA A UGCUGGGA | 9362 | TCCCAGCA GGCTAGCTACAACGA TTCACACT | 20121 |
| 5630 | UGUGAAAU G CUGGGAAC | 9363 | GTTCCCAG GGCTAGCTACAACGA ATTTCACA | 20122 |
| 5637 | UGCUGGGA A CAAUGACU | 9364 | AGTCATTG GGCTAGCTACAACGA TCCCAGCA | 20123 |
| 5640 | UGGGAACA A UGACUAUA | 9365 | TATAGTCA GGCTAGCTACAACGA TGTTCCCA | 20124 |
| 5643 | GAACAAUG A CUAUAAGA | 9366 | TCTTATAG GGCTAGCTACAACGA CATTGTTC | 20125 |
| 5646 | CAAUGACU A UAAGACAU | 9367 | ATGTCTTA GGCTAGCTACAACGA AGTCATTG | 20126 |
| 5651 | ACUAUAAG A CAUGCUAU | 9368 | ATAGCATG GGCTAGCTACAACGA CTTATAGT | 20127 |
| 5653 | UAUAAGAC A UGCUAUGG | 9369 | CCATAGCA GGCTAGCTACAACGA GTCTTATA | 20128 |
| 5655 | UAAGACAU G CUAUGGCA | 9370 | TGCCATAG GGCTAGCTACAACGA ATGTCTTA | 20129 |
| 5658 | GACAUGCU A UGGCACAU | 9371 | ATGTGCCA GGCTAGCTACAACGA AGCATGTC | 20130 |
| 5661 | AUGCUAUG G CACAUAUA | 9372 | TATATGTG GGCTAGCTACAACGA CATAGCAT | 20131 |
| 5663 | GCUAUGGC A CAUAUAUU | 9373 | AATATATG GGCTAGCTACAACGA GCCATAGC | 20132 |
| 5665 | UAUGGCAC A UAUAUUUA | 9374 | TAAATATA GGCTAGCTACAACGA GTGCCATA | 20133 |
| 5667 | UGGCACAU A UAUUUAUA | 9375 | TATAAATA GGCTAGCTACAACGA ATGTGCCA | 20134 |
| 5669 | GCACAUAU A UUUAUAGU | 9376 | ACTATAAA GGCTAGCTACAACGA ATATGTGC | 20135 |
| 5673 | AUAUAUUU A UAGUCUGU | 9377 | ACAGACTA GGCTAGCTACAACGA AAATATAT | 20136 |
| 5676 | UAUUUAUA G UCUGUUUA | 9378 | TAAACAGA GGCTAGCTACAACGA TATAAATA | 20137 |
| 5680 | UAUAGUCU G UUUAUGUA | 9379 | TACATAAA GGCTAGCTACAACGA AGACTATA | 20138 |
| 5684 | GUCUGUUU A UGUAGAAA | 9380 | TTTCTACA GGCTAGCTACAACGA AAACAGAC | 20139 |
| 5686 | CUGUUUAU G UAGAAACA | 9381 | TGTTTCTA GGCTAGCTACAACGA ATAAACAG | 20140 |
| 5692 | AUGUAGAA A CAAAUGUA | 9382 | TACATTTG GGCTAGCTACAACGA TTCTACAT | 20141 |
| 5696 | AGAAACAA A UGUAAUAU | 9383 | ATATTACA GGCTAGCTACAACGA TTGTTTCT | 20142 |
| 5698 | AAACAAAU G UAAUAUAU | 9384 | ATATATTA GGCTAGCTACAACGA ATTTGTTT | 20143 |
| 5701 | CAAAUGUA A UAUAUUAA | 9385 | TTAATATA GGCTAGCTACAACGA TACATTTG | 20144 |
| 5703 | AAUGUAAU A UAUUAAAG | 9386 | CTTTAATA GGCTAGCTACAACGA ATTACATT | 20145 |
| 5705 | UGUAAUAU A UUAAAGCC | 9387 | GGCTTTAA GGCTAGCTACAACGA ATATTACA | 20146 |
| 5711 | AUAUUAAA G CCUUAUAU | 9388 | ATATAAGG GGCTAGCTACAACGA TTTAATAT | 20147 |
| 5716 | AAAGCCUU A UAUAUAAU | 9389 | ATTATATA GGCTAGCTACAACGA AAGGCTTT | 20148 |
| 5718 | AGCCUUAU A UAUAAUGA | 9390 | TCATTATA GGCTAGCTACAACGA ATAAGGCT | 20149 |
| 5720 | CCUUAUAU A UAAUGAAC | 9391 | GTTCATTA GGCTAGCTACAACGA ATATAAGG | 20150 |
| 5723 | UAUAUAUA A UGAACUUU | 9392 | AAAGTTCA GGCTAGCTACAACGA TATATATA | 20151 |
| 5727 | UAUAAUGA A CUUUGUAC | 9393 | GTACAAAG GGCTAGCTACAACGA TCATTATA | 20152 |
| 5732 | UGAACUUU G UACUAUUC | 9394 | GAATAGTA GGCTAGCTACAACGA AAAGTTCA | 20153 |
| 5734 | AACUUUGU A CUAUUCAC | 9395 | GTGAATAG GGCTAGCTACAACGA ACAAAGTT | 20154 |
| 5737 | UUUGUACU A UUCACAUU | 9396 | AATGTGAA GGCTAGCTACAACGA AGTACAAA | 20155 |
| 5741 | UACUAUUC A CAUUUUGU | 9397 | ACAAAATG GGCTAGCTACAACGA GAATAGTA | 20156 |
| 5743 | CUAUUCAC A UUUUGUAU | 9398 | ATACAAAA GGCTAGCTACAACGA GTGAATAG | 20157 |
| 5748 | CACAUUUU G UAUCAGUA | 9399 | TACTGATA GGCTAGCTACAACGA AAAATGTG | 20158 |
| 5750 | CAUUUUGU A UCAGUAUU | 9400 | AATACTGA GGCTAGCTACAACGA ACAAAATG | 20159 |
| 5754 | UUGUAUCA G UAUUAUGU | 9401 | ACATAATA GGCTAGCTACAACGA TGATACAA | 20160 |
| 5756 | GUAUCAGU A UUAUGUAG | 9402 | CTACATAA GGCTAGCTACAACGA ACTGATAC | 20161 |
| 5759 | UCAGUAUU A UGUAGCAU | 9403 | ATGCTACA GGCTAGCTACAACGA AATACTGA | 20162 |
| 5761 | AGUAUUAU G UAGCAUAA | 9404 | TTATGCTA GGCTAGCTACAACGA ATAATACT | 20163 |
| 5764 | AUUAUGUA G CAUAACAA | 9405 | TTGTTATG GGCTAGCTACAACGA TACATAAT | 20164 |
| 5766 | UAUGUAGC A UAACAAAG | 9406 | CTTTGTTA GGCTAGCTACAACGA GCTACATA | 20165 |
| 5769 | GUAGCAUA A CAAAGGUC | 9407 | GACCTTTG GGCTAGCTACAACGA TATGCTAC | 20166 |
| 5775 | UAACAAAG G UCAUAAUG | 9408 | CATTATGA GGCTAGCTACAACGA CTTTGTTA | 20167 |
| 5778 | CAAAGGUC A UAAUGCUU | 9409 | AAGCATTA GGCTAGCTACAACGA GACCTTTG | 20168 |
| 5781 | AGGUCAUA A UGCUUUCA | 9410 | TGAAAGCA GGCTAGCTACAACGA TATGACCT | 20169 |
| 5783 | GUCAUAAU G CUUUCAGC | 9411 | GCTGAAAG GGCTAGCTACAACGA ATTATGAC | 20170 |
| 5790 | UGCUUUCA G CAAUUGAU | 9412 | ATCAATTG GGCTAGCTACAACGA TGAAAGCA | 20171 |
| 5793 | UUUCAGCA A UUGAUGUC | 9413 | GACATCAA GGCTAGCTACAACGA TGCTGAAA | 20172 |
| 5797 | AGCAAUUG A UGUCAUUU | 9414 | AAATGACA GGCTAGCTACAACGA CAATTGCT | 20173 |
| 5799 | CAAUUGAU G UCAUUUUA | 9415 | TAAAATGA GGCTAGCTACAACGA ATCAATTG | 20174 |
| 5802 | UUGAUGUC A UUUUAUUA | 9416 | TAATAAAA GGCTAGCTACAACGA GACATCAA | 20175 |
| 5807 | GUCAUUUU A UUAAAGAA | 9417 | TTCTTTAA GGCTAGCTACAACGA AAAATGAC | 20176 |
| 5815 | AUUAAAGA A CAUUGAAA | 9418 | TTTCAATG GGCTAGCTACAACGA TCTTTAAT | 20177 |
| 5817 | UAAAGAAC A UUGAAAAA | 9419 | TTTTTCAA GGCTAGCTACAACGA GTTCTTTA | 20178 |

Input Sequence= AF035121. Cut Site = R/Y
Arm Length = 8. Core Sequence = GGCTAGCTACAACGA
AF035121 (Homo sapiens KDR/flk-1 protein mRNA, complete cds.; Acc# AF035121; 5830 bp)

[0362] TABLE XXIII

Human KDR Ziuzyme and Substrate Sequence

| | | | | |
|---|---|---|---|---|
| | | Seq ID | | Seq ID |
| Pos | Substrate | No | Zinzyme | No |

| | | | | |
|---|---|---|---|---|
| 25 | CCGGGAGA G CGGUCAGU | 8365 | ACUGACCG GCCGAAAGGCGAGUGAGGUCU UCUCCCGG | 20179 |
| 28 | GGAGAGCG G UCAGUGUG | 8366 | CACACUGA GCCGAAAGGCGAGUGAGGUCU CGCUCUCC | 20180 |
| 32 | AGCGGUCA G UGUGUGGU | 8367 | ACCACACA GCCGAAAGGCGAGUGAGGUCU UGACCGCU | 20181 |
| 34 | CGGUCAGU G UGUGGUCG | 8368 | CGACCACA GCCGAAAGGCGAGUGAGGUCU ACUGACCG | 20182 |
| 36 | GUCAGUGU G UGGUCGCU | 8369 | AGCGACCA GCCGAAAGGCGAGUGAGGUCU ACACUGAC | 20183 |
| 39 | AGUGUGUG G UCGCUGCG | 8370 | CGCAGCGA GCCGAAAGGCGAGUGAGGUCU CACACACU | 20184 |
| 42 | GUGUGGUC G CUGCGUUU | 8371 | AAACGCAG GCCGAAAGGCGAGUGAGGUCU GACCACAC | 20185 |
| 45 | UGGUCGCU G CGUUUCCU | 8372 | AGGAAACG GCCGAAAGGCGAGUGAGGUCU AGCGACCA | 20186 |
| 47 | GUCGCUGC G UUUCCUCU | 8373 | AGAGGAAA GCCGAAAGGCGAGUGAGGUCU GCAGCGAC | 20187 |
| 56 | UUUCCUCU G CCUGCGCC | 8374 | GGCGCAGG GCCGAAAGGCGAGUGAGGUCU AGAGGAAA | 20188 |
| 60 | CUCUGCCU G CGCCGGGC | 8375 | GCCCGGCG GCCGAAAGGCGAGUGAGGUCU AGGCAGAG | 20189 |
| 62 | CUGCCUGC G CCGGGCAU | 8376 | AUGCCCGG GCCGAAAGGCGAGUGAGGUCU GCAGGCAG | 20190 |
| 67 | UGCGCCGG G CAUCACUU | 8377 | AAGUGAUG GCCGAAAGGCGAGUGAGGUCU CCGGCGCA | 20191 |
| 76 | CAUCACUU G CGCGCCGC | 8380 | GCGGCGCG GCCGAAAGGCGAGUGAGGUCU AAGUGAUG | 20192 |
| 78 | UCACUUGC G CGCCGCAG | 8381 | CUGCGGCG GCCGAAAGGCGAGUGAGGUCU GCAAGUGA | 20193 |
| 80 | ACUUGCGC G CCGCAGAA | 8382 | UUCUGCGG GCCGAAAGGCGAGUGAGGUCU GCGCAAGU | 20194 |
| 83 | UGCGCGCC G CAGAAAGU | 8383 | ACUUUCUG GCCGAAAGGCGAGUGAGGUCU GGCGCGCA | 20195 |
| 90 | CGCAGAAA G UCCGUCUG | 8384 | CAGACGGA GCCGAAAGGCGAGUGAGGUCU UUUCUGCG | 20196 |
| 94 | GAAAGUCC G UCUGGCAG | 8385 | CUGCCAGA GCCGAAAGGCGAGUGAGGUCU GGACUUUC | 20197 |
| 99 | UCCGUCUG G CAGCCUGG | 8386 | CCAGGCUG GCCGAAAGGCGAGUGAGGUCU CAGACGGA | 20198 |
| 102 | GUCUGGCA G CCUGGAUA | 8387 | UAUCCAGG GCCGAAAGGCGAGUGAGGUCU UGCCAGAC | 20199 |
| 124 | UCCUACCG G CACCCGCA | 8391 | UGCGGGUG GCCGAAAGGCGAGUGAGGUCU CGGUAGGA | 20200 |
| 130 | CGGCACCC G CAGACGCC | 8393 | GGCGUCUG GCCGAAAGGCGAGUGAGGUCU GGGUGCCG | 20201 |
| 136 | CCGCAGAC G CCCCUGCA | 8395 | UGCAGGGG GCCGAAAGGCGAGUGAGGUCU GUCUGCGG | 20202 |
| 142 | ACGCCCCU G CAGCCGCC | 8396 | GGCGGCUG GCCGAAAGGCGAGUGAGGUCU AGGGGCGU | 20203 |
| 145 | CCCCUGCA G CCGCCGGU | 8397 | ACCGGCGG GCCGAAAGGCGAGUGAGGUCU UGCAGGGG | 20204 |
| 148 | CUGCAGCC G CCGGUCGG | 8398 | CCGACCGG GCCGAAAGGCGAGUGAGGUCU GGCUGCAG | 20205 |
| 152 | AGCCGCCG G UCGGCGCC | 8399 | GGCGCCGA GCCGAAAGGCGAGUGAGGUCU CGGCGGCU | 20206 |
| 156 | GCCGGUCG G CGCCCGGG | 8400 | CCCGGGCG GCCGAAAGGCGAGUGAGGUCU CGACCGGC | 20207 |
| 158 | CGGUCGGC G CCCGGGCU | 8401 | AGCCCGGG GCCGAAAGGCGAGUGAGGUCU GCCGACCG | 20208 |
| 164 | GCGCCCGG G CUCCCUAG | 8402 | CUAGGGAG GCCGAAAGGCGAGUGAGGUCU CCGGGCGC | 20209 |
| 172 | GCUCCCUA G CCCUGUGC | 8403 | GCACAGGG GCCGAAAGGCGAGUGAGGUCU UAGGGAGC | 20210 |
| 177 | CUAGCCCU G UGCGCUCA | 8404 | UGAGCGCA GCCGAAAGGCGAGUGAGGUCU AGGGCUAG | 20211 |
| 179 | AGCCCUGU G CGCUCAAC | 8405 | GUUGAGCG GCCGAAAGGCGAGUGAGGUCU ACAGGGCU | 20212 |
| 181 | CCCUGUGC G CUCAACUG | 8406 | CAGUUGAG GCCGAAAGGCGAGUGAGGUCU GCACAGGG | 20213 |
| 189 | GCUCAACU G UCCUGCGC | 8408 | GCGCAGGA GCCGAAAGGCGAGUGAGGUCU AGUUGAGC | 20214 |
| 194 | ACUGUCCU G CGCUGCGG | 8409 | CCGCAGCG GCCGAAAGGCGAGUGAGGUCU AGGACAGU | 20215 |
| 196 | UGUCCUGC G CUGCGGGG | 8410 | CCCCGCAG GCCGAAAGGCGAGUGAGGUCU GCAGGACA | 20216 |
| 199 | CCUGCGCU G CGGGGUGC | 8411 | GCACCCCG GCCGAAAGGCGAGUGAGGUCU AGCGCAGG | 20217 |
| 204 | GCUGCGGG G UGCCGCGA | 8412 | UCGCGGCA GCCGAAAGGCGAGUGAGGUCU CCCGCAGC | 20218 |
| 206 | UGCGGGGU G CCGCGAGU | 8413 | ACUCGCGG GCCGAAAGGCGAGUGAGGUCU ACCCCGCA | 20219 |
| 209 | GGGGUGCC G CGAGUUCC | 8414 | GGAACUCG GCCGAAAGGCGAGUGAGGUCU GGCACCCC | 20220 |
| 213 | UGCCGCGA G UUCCACCU | 8415 | AGGUGGAA GCCGAAAGGCGAGUGAGGUCU UCGCGGCA | 20221 |
| 224 | CCACCUCC G CGCCUCCU | 8417 | AGGAGGCG GCCGAAAGGCGAGUGAGGUCU GGAGGUGG | 20222 |
| 226 | ACCUCCGC G CCUCCUUC | 8418 | GAAGGAGG GCCGAAAGGCGAGUGAGGUCU GCGGAGGU | 20223 |
| 244 | CUAGACAG G CGCUGGGA | 8420 | UCCCAGCG GCCGAAAGGCGAGUGAGGUCU CUGUCUAG | 20224 |
| 246 | AGACAGGC G CUGGGAGA | 8421 | UCUCCCAG GCCGAAAGGCGAGUGAGGUCU GCCUGUCU | 20223 |
| 263 | AAGAACCG G CUCCCGAG | 8423 | CUCGGGAG GCCGAAAGGCGAGUGAGGUCU CGGUUCUU | 20226 |
| 271 | GCUCCCGA G UUCUGGGC | 8424 | GCCCAGAA GCCGAAAGGCGAGUGAGGUCU UCGGGAGC | 20227 |
| 278 | AGUUCUGG G CAUUUCGC | 8425 | GCGAAAUG GCCGAAAGGCGAGUGAGGUCU CCAGAACU | 20228 |
| 285 | GGCAUUUC G CCCGGCUC | 8427 | GAGCCGGG GCCGAAAGGCGAGUGAGGUCU GATAUGCC | 20229 |
| 290 | UUCGCCCG G CUCGAGGU | 8428 | ACCUCCAG GCCGAAAGGCGAGUGAGGUCU CGGGCGAA | 20230 |
| 297 | GGCUCGAG G UGCAGGAU | 8429 | AUCCUGCA GCCGAAAGGCGAGUGAGGUCU CUCGAGCC | 20231 |
| 299 | CUCGAGGU G CAGGAUGC | 8430 | GCAUCCUG GCCGAAAGGCGAGUGAGGUCU ACCUCGAG | 20232 |
| 306 | UGCAGGAU G CAGAGCAA | 8432 | UUGCUCUG GCCGAAAGGCGAGUGAGGUCU AUCCUGCA | 20233 |
| 311 | GAUGCAGA G CAAGGUGC | 8433 | GCACCUUG GCCGAAAGGCGAGUGAGGUCU UCUGCAUC | 20234 |
| 316 | AGAGCAAG G UGCUGCUG | 8434 | CAGCAGCA GCCGAAAGGCGAGUGAGGUCU CUUGCUCU | 20235 |
| 318 | AGCAAGGU G CUGCUGGC | 8435 | GCCAGCAG GCCGAAAGGCGAGUGAGGUCU ACCUUGCU | 20236 |
| 321 | AAGGUGCU G CUGGCCGU | 8436 | ACGGCCAG GCCGAAAGGCGAGUGAGGUCU AGCACCUU | 20237 |
| 325 | UGCUGCUG G CCGUCGCC | 8437 | GGCGACGG GCCGAAAGGCGAGUGAGGUCU CAGCAGCA | 20238 |
| 328 | UGCUGGCC G UCGCCCUG | 8438 | CAGGGCGA GCCGAAAGGCGAGUGAGGUCU GGCCAGCA | 20239 |
| 331 | UGGCCGUC G CCCUGUGG | 8439 | CCACAGGG GCCGAAAGGCGAGUGAGGUCU GACGGCCA | 20240 |
| 336 | GUCGCCCU G UGGCUCUG | 8440 | CAGAGCCA GCCGAAAGGCGAGUGAGGUCU AGGGCGAC | 20241 |
| 339 | GCCCUGUG G CUCUGCGU | 8441 | ACGCAGAG GCCGAAAGGCGAGUGAGGUCU CACAGGGC | 20242 |
| 344 | GUGGCUCU G CGUGGAGA | 8442 | UCUCCACG GCCGAAAGGCGAGUGAGGUCU AGAGCCAC | 20243 |
| 346 | GGCUCUGC G UGGAGACC | 8443 | GGUCUCCA GCCGAAAGGCGAGUGAGGUCU GCAGAGCC | 20244 |
| 358 | AGACCCGG G CCGCCUCU | 8445 | AGAGGCGG GCCGAAAGGCGAGUGAGGUCU CCGGGUCU | 20245 |
| 361 | CCCGGGCC G CCUCUGUG | 8446 | CACAGAGG GCCGAAAGGCGAGUGAGGUCU GGCCCGGG | 20246 |
| 367 | CCGCCUCU G UGGGUUUG | 8447 | CAAACCCA GCCGAAAGGCGAGUGAGGUCU AGAGGCGG | 20247 |
| 371 | CUCUGUGG G UUUGCCUA | 8448 | UAGGCAAA GCCGAAAGGCGAGUGAGGUCU CCACAGAG | 20248 |
| 375 | GUGGGUUU G CCUAGUGU | 8449 | ACACUAGG GCCGAAAGGCGAGUGAGGUCU AAACCCAC | 20249 |
| 380 | UUUGCCUA G UGUUUCUC | 8450 | GAGAAACA GCCGAAAGGCGAGUGAGGUCU UAGGCAAA | 20250 |
| 382 | UGCCUAGU G UUUCUCUU | 8451 | AAGAGAAA GCCGAAAGGCGAGUGAGGUCU ACUAGGCA | 20251 |
| 396 | CUUGAUCU G CCCAGGCU | 8453 | AGCCUGGG GCCGAAAGGCGAGUGAGGUCU AGAUCAAG | 20252 |
| 402 | CUGCCCAG G CUCAGCAU | 8454 | AUGCUGAG GCCGAAAGGCGAGUGAGGUCU CUGGGCAG | 20253 |
| 407 | CAGGCUCA G CAUACAAA | 8455 | UUUGUAUG GCCGAAAGGCGAGUGAGGUCU UGAGCCUG | 20254 |
| 436 | CAAUUAAG G CUAAUACA | 8458 | UGUAUUAG GCCGAAAGGCGAGUGAGGUCU CUUAAUUG | 20255 |
| 461 | AAUUACUU G CAGGGGAC | 8462 | GUCCCCUG GCCGAAAGGCGAGUGAGGUCU AAGUAAUU | 20256 |
| 486 | UUGGACUG G CUUUGGCC | 8466 | GGCCAAAG GCCGAAAGGCGAGUGAGGUCU CAGUCCAA | 20257 |
| 492 | UGGCUUUG G CCCAAUAA | 8467 | UUAUUGGG GCCGAAAGGCGAGUGAGGUCU CAAAGCCA | 20258 |
| 506 | UAAUCAGA G UGGCAGUG | 8470 | CACUGCCA GCCGAAAGGCGAGUGAGGUCU UCUGAUUA | 20259 |
| 509 | UCAGAGUG G CAGUGAGC | 8471 | GCUCACUG GCCGAAAGGCGAGUGAGGUCU CACUCUGA | 20260 |
| 512 | GAGUGGCA G UGAGCAAA | 8472 | UUUGCUCA GCCGAAAGGCGAGUGAGGUCU UGCCACUC | 20261 |
| 516 | GGCAGUGA G CAAAGGGU | 8473 | ACCCUUUG GCCGAAAGGCGAGUGAGGUCU UCACUGCC | 20262 |
| 523 | AGCAAAGG G UGGAGGUG | 8474 | CACCUCCA GCCGAAAGGCGAGUGAGGUCU CCUUUGCU | 20263 |
| 529 | GGGUGGAG G UGACUGAG | 8475 | CUCAGUCA GCCGAAAGGCGAGUGAGGUCU CUCCACCC | 20264 |
| 537 | GUGACUGA G UGCAGCGA | 8477 | UCGCUGCA GCCGAAAGGCGAGUGAGGUCU UCAGUCAC | 20265 |
| 539 | GACUGAGU G CAGCGAUG | 8478 | CAUCGCUG GCCGAAAGGCGAGUGAGGUCU ACUCAGUC | 20266 |
| 542 | UGAGUGCA G CGAUGGCC | 8479 | GGCCAUCG GCCGAAAGGCGAGUGAGGUCU UGCACUCA | 20267 |
| 548 | CAGCGAUG G CCUCUUCU | 8481 | AGAAGAGG GCCGAAAGGCGAGUGAGGUCU CAUCGCUG | 20268 |
| 557 | CCUCUUCU G UAAGACAC | 8482 | GUGUCUUA GCCGAAAGGCGAGUGAGGUCU AGAAGAGG | 20269 |
| 580 | UUCCAAAA G UGAUCGGA | 8485 | UCCGAUCA GCCGAAAGGCGAGUGAGGUCU UUUUGGAA | 20270 |
| 601 | ACACUGGA G CCUACAAG | 8489 | CUUGUAGG GCCGAAAGGCGAGUGAGGUCU UCCAGUGU | 20271 |
| 609 | GCCUACAA G UGCUUCUA | 8490 | UAGAAGCA GCCGAAAGGCGAGUGAGGUCU UUGUAGGC | 20272 |
| 611 | CUACAAGU G CUUCUACC | 8491 | GGUAGAAG GCCGAAAGGCGAGUGAGGUCU ACUUGUAG | 20273 |
| 634 | CUGACUUG G CCUCGGUC | 8494 | GACCGAGG GCCGAAACGCGAGUGAGGUCU CAAGUCAG | 20274 |
| 640 | UGGCCUCG G UCAUUUAU | 8495 | AUAAAUGA GCCGAAAGGCGAGUGAGGUCU CGAGGCCA | 20275 |
| 649 | UCAUUTUU G UCUAUGUU | 8496 | AACAUAGA GCCGAAAGGCGAGUGAGGUCU AUAAAUGA | 20276 |
| 655 | AUGUCUAU G UUCAAGAU | 8497 | AUCUUGAA GCCGAAAGGCGAGUGAGGUCU AUAGACAU | 20277 |
| 682 | CAUUUAUU G CUUCUGUU | 8500 | AACAGAAG GCCGAAAGGCGAGUGAGGUCU AAUAAAUG | 20278 |
| 688 | UUGCUUCU G UUAGUGAC | 8501 | GUCACUAA GCCGAAAGGCGAGUGAGGUCU AGAAGCAA | 20279 |
| 692 | UUCUGUUA G UGACCAAC | 8502 | GUUGGUCA GCCGAAAGGCGAGUGAGGUCU UAACAGAA | 20280 |
| 706 | AACAUGGA G UCGUGUAC | 8505 | GUACACGA GCCGAAAGGCGAGUGAGGUCU UCCAUGUU | 20281 |
| 709 | AUGGAGUC G UGUACAUU | 8506 | AAUGUACA GCCGAAAGGCGAGUGAGGUCU GACUCCAU | 20282 |
| 711 | GGAGUCGU G UACAUUAC | 8507 | GUAAUGUA GCCGAAAGGCGAGUGAGGUCU ACGACUCC | 20283 |
| 739 | ACAAAACU G UGGUGAUU | 8511 | AAUCACCA GCCGAAAGGCGAGUGAGGUCU AGUUUUGU | 20284 |
| 742 | AAACUGUG G UGAUUCCA | 8512 | UGGAAUCA GCCGAAAGGCGAGUGAGGUCU CACAGUUU | 20285 |
| 752 | GAUUCCAU G UCUCGGGU | 8514 | ACCCGAGA GCCGAAAGGCGAQUGAGGUCU AUGGAAUC | 20286 |
| 759 | UGUCUCGG G UCCAUUUC | 8515 | GAAAUGGA GCCGAAAGGCGAGUGAGGUCU CCGAGACA | 20287 |
| 778 | AUCUCAAC G UGUCACUU | 8518 | AAGUGACA GCCGAAAGGCGAGUGAGGUCU GUUGAGAU | 20288 |
| 780 | CUCAACGU G UCACUUUG | 8519 | CAAAGUGA GCCGAAAGGCGAGUGAGGUCU ACGUUGAG | 20289 |
| 788 | GUCACUUU G UGCAAGAU | 8520 | AUCUUGCA GCCGAAAGGCGAGUGAGGUCU AAAGUGAC | 20290 |
| 790 | CACUUUGU G CAAGAUAC | 8521 | GUAUCUUG GCCGAAAGGCGAGUGAGGUCU ACAAAGUG | 20291 |
| 814 | AGAGAUUU G UUCCUGAU | 8524 | AUCAGGAA GCCGAAAGGCGAGUGAGGUCU AAAUCUCU | 20292 |
| 824 | UCCUGAUG G UAACAGAA | 8526 | UUCUGUUA GCCGAAAGGCGAGUGAGGUCU CAUCAGGA | 20293 |
| 845 | CUGGGACA G CAAGAAGG | 8530 | CCUUCUUG GCCGAAAGGCGAGUGAGGUCU UGUCCCAG | 20294 |
| 854 | CAAGAAGG G CUUUACUA | 8531 | UAGUAAAG GCCGAAAGGCGAGUGAGGUCU CCUUCUUG | 20295 |
| 869 | UAUUCCCA G CUACAUGA | 8532 | UCAUGUAG GCCGAAAGGCGAGUGAGGUCU UGGGAAUA | 20296 |
| 881 | CAUGAUCA G CUAUGCUG | 8534 | CAGCAUAG GCCGAAAGGCGAGUGAGGUCU UGAUCAUG | 20297 |
| 886 | UCAGCUAU G CUGGCAUG | 8535 | CAUGCCAG GCCGAAAGGCGAGUGAGGUCU AUAGCUGA | 20298 |
| 890 | CUAUGCUG G CAUGGUCU | 8536 | AGACCAUG GCCGAAAGGCGAGUGAGGUCU CAGCAUAG | 20299 |
| 895 | CUGGCAUG G UCUUCUGU | 8537 | ACAGAAGA GCCGAAAGGCGAGUGAGGUCU CAUGCCAG | 20300 |
| 902 | GGUCUUCU G UGAAGCAA | 8538 | UUGCUUCA GCCGAAAGGCGAGUGAGGUCU AGAAGACC | 20301 |
| 907 | UCUGUGAA G CAAAAAUU | 8539 | AAUUUUUG GCCGAAAGGCGAGUGAGGUCU UUCACAGA | 20302 |
| 926 | UGAUGAAA G UUACCAGU | 8543 | ACUGGUAA GCCGAAAGGCGAGUGAGGUCU UUUCAUCA | 20303 |
| 933 | AGUUACCA G UCUAUUAU | 8544 | AUAAUAGA GCCGAAAGGCGAGUGAGGUCU UGGUAACU | 20304 |
| 942 | UCUAUUAU G UACAUAGU | 8545 | ACUAUGUA GCCGAAAGGCGAGUGAGGUCU AUAAUAGA | 20305 |
| 949 | UGUACAUA G UUGUCGUU | 8546 | AACGACAA GCCGAAAGGCGAGUGAGGUCU UAUGUACA | 20306 |
| 952 | ACAUAGUU G UCGUUGUA | 8547 | UACAACGA GCCGAAAGGCGAGUGAGGUCU AACUAUGU | 20307 |
| 955 | UAGUUGUC G UUGUAGGG | 8548 | CCCUACAA GCCGAAAGGCGAGUGAGGUCU GACAACUA | 20308 |
| 958 | UUGUCGUU G UAGGGUAU | 8549 | AUACCCUA GCCGAAAGGCGAGUGAGGUCU AACGACAA | 20309 |
| 963 | GUUGUAGG G UAUAGGAU | 8550 | AUCCUAUA GCCGAAAGGCGAGUGAGGUCU CCUACAAC | 20310 |
| 979 | UUUAUGAU G UGGUUCUG | 8553 | CAGAACCA GCCGAAAGGCGAGUGAGGUCU AUCAUAAA | 20311 |
| 982 | AUGAUGUG G UUCUGAGU | 8554 | ACUCAGAA GCCGAAAGGCGAGUGAGGUCU CACAUCAU | 20312 |
| 989 | GGUUCUGA G UCCGUCUC | 8555 | GAGACGGA GCCGAAAGGCGAGUGAGGUCU UCAGAACC | 20313 |
| 993 | CUGAGUCC G UCUCAUGG | 8556 | CCAUGAGA GCCGAAAGGCGAGUGAGGUCU GGACUCAG | 20314 |
| 1015 | AACUAUCU G UUGGAGAA | 8559 | UUCUCCAA GCCGAAAGGCGAGUGAGGUCU AGAUAGUU | 20315 |
| 1026 | GGAGAAAA G CUUGUCUU | 8560 | AAGACAAG GCCGAAAGGCGAGUGAGGUCU UUUUCUCC | 20316 |
| 1030 | AAAAGCUU G UCU1AAAU | 8561 | AUUUAAGA GCCGAAAGGCGAGUGAGGUCU AAGCUUUU | 20317 |
| 1040 | CUUAAAUU G UACAGCAA | 8563 | UUGCUGUA GCCGAAAGGCGAGUGAGGUCU AAUUUAAG | 20318 |
| 1045 | AUUGUACA G CAAGAACU | 8564 | AGUUCUUG GCCGAAAGGCGAGUGAGGUCU UGUACAAU | 20319 |
| 1063 | AACUAAAU G UGGGGAUU | 8568 | AAUCCCCA GCCGAAAGGCGAGUGAGGUCU AUUUAGUU | 20320 |
| 1101 | UCUUCGAA G CAUCAGCA | 8573 | UCCUGAUG GCCGAAAGGCGAGUGAGGUCU UUCGAAGA | 20321 |
| 1107 | AAGCAUCA G CAUAAGAA | 8574 | UUCUUAUG GCCGAAAGGCGAGUGAGGUCU UGAUGCUU | 20322 |
| 1120 | AGAAACUU G UAAACCGA | 8576 | UCGGUUUA GCCGAAAGGCGAGUGAGGUCU AAGUUUCU | 20323 |
| 1143 | AAAACCCA G UCUGGGAG | 8580 | CUCCCAGA GCCGAAAGGCGAGUGAGGUCU UGGGUUUU | 20324 |
| 1151 | GUCUGGGA G UGAGAUGA | 8581 | UCAUCUCA GCCGAAAGGCGAGUGAGGUCU UCCCAGAC | 20325 |
| 1172 | AUUUUUGA G CACCUEUA | 8584 | UUAAGGUG GCCGAAAGGCGAGUGAGGUCU UCAAAAAU | 20326 |
| 1190 | UAUAGAUG G UGUAACCC | 8587 | GGGUUACA GCCGAAAGGCGAGUGAGGUCU CAUCUAUA | 20327 |
| 1192 | UAGAUGGU G UAACCCGG | 8588 | CCGGGUUA GCCGAAAGGCGAGUGAGGUCU ACCAUCUA | 20328 |
| 1202 | AACCCGGA G UGACCAAG | 8590 | CUUGGUCA GCCGAAAGGCGAGUGAGGUCU UCCGGGUU | 20329 |
| 1215 | CAAGGAUU G UACACCUG | 8593 | CAGGUGUA GCCGAAAGGCGAGUGAGGUCU AAUCCUUG | 20330 |
| 1223 | GUACACCU G UGCAGCAU | 8594 | AUGCUGCA GCCGAAAGGCGAGUGAGGUCU AGGUGUAC | 20331 |
| 1225 | ACACCUGU G CAGCAUCC | 8595 | GGAUGCUG GCCGAAAGGCGAGUGAGGUCU ACAGGUGU | 20332 |
| 1228 | CCUGUGCA G CAUCCAGU | 8596 | ACUGGAUG GCCGAAAGGCGAGUGAGGUCU UGCACAGG | 20333 |
| 1235 | AGCAUCCA G UGGGCUGA | 8597 | UCAGCCCA GCCGAAAGGCGAGUGAGGUCU UGGAUGCU | 20334 |
| 1239 | UCCAGUGG G CUGAUGAC | 8598 | GUCAUCAG GCCGAAAGGCGAGUGAG3UCU UCACUGGA | 20335 |
| 1259 | GAAGAACA G CACAUUUG | 8602 | CAAAUGUG GCCGAAAGGCGAGUGAGGUCU UGUUCUUC | 20336 |
| 1267 | GCACAUUU G UCAGGGUC | 8603 | GACCCUGA GCCGAAAGGCGAGUGAGGUCU AAAUGUGC | 20337 |
| 1273 | UUGUCAGG G UCCAUGAA | 8604 | UUCAUGGA GCCGAAAGGCGAGUGAGGUCU CCUGACAA | 20338 |
| 1291 | AACCUUUU G UUGCUUUU | 8606 | AAAAGCAA GCCGAAAGGCGAGUGAGGUCU AAAAGGUU | 20339 |
| 1294 | CUUUUGUU G CUUUUGGA | 8607 | UCCAAAAG GCCGAAAGGCGAGUGAGGUCU AACAAAAG | 20340 |
| 1304 | UUUUGGAA G UGGCAUGG | 8608 | CCAUGCCA GCCGAAAGGCGAGUGAGGUCU UUCCAAAA | 20341 |
| 1307 | UGGAAGUG G CAUGGAAU | 8609 | AUUCCAUG GCCGAAAGGCGAGUGAGGUCU CACUUCCA | 20342 |
| 1321 | AAUCUCUG G UGGAAGCC | 8611 | GGCUUCCA GCCGAAAGGCGAGUGAGGUCU CAGAGAUG | 20343 |
| 1327 | UGGUGGAA G CCACGGUG | 8612 | CACCGUGG GCCGAAAGGCGAGUGAGGUCU UUCCACCA | 20344 |
| 1333 | AAGCCACG G UGGGGGAG | 8613 | CUCCCCCA GCCGAAAGGCGAGUGAGGUCU CGUGGCUU | 20345 |
| 1341 | GUGGGGGA G CGUGUCAG | 8614 | CUGACACG GCCGAAAGGCGAGUGAGGUCU UCCCCCAC | 20346 |
| 1343 | GGGGGAGC G UGUCAGAA | 8615 | UUCUGACA GCCGAAAGGCGAGUGAGGUCU GCUCCCCC | 20347 |
| 1345 | GGGAGCGU G UCAGAAUC | 8616 | GACUCUGA GCCGAAAGGCGAGUGAGGUCU ACGCUCCC | 20348 |
| 1357 | GAAUCCCU G CGAAGUAC | 8618 | GUACUUCG GCCGAAAGGCGAGUGAGGUCU AGGGAUUC | 20349 |
| 1362 | CCUGCGAA G UACCUUGG | 8619 | CCAAGGUA GCCGAAAGGCGAGUGAGGUCU UUCGCAGG | 20350 |
| 1370 | GUACCUUG G UUACCCAC | 8620 | GUGGGUAA GCCGAAAGGCGAGUGAGGUCU CAAGGUAC | 20351 |
| 1395 | AUAAAAUG G UAUAAAAA | 8623 | UUUUUAUA GCCGAAAGGCGAGUGAGGUCU CAUUUUAU | 20352 |
| 1419 | CCCCUUGA G UCCAAUCA | 8626 | UGAUUGGA GCCGAAAGGCGAGUGAGGUCU UCAAGGGG | 20353 |
| 1438 | CAAUEUAA G CGGGGCAU | 8629 | AUGCCCCG GCCGAAAGGCGAGUGAGGUCU UUEUAUUG | 20354 |
| 1443 | AAAGCGGG G CAUGUACU | 8630 | AGUACAUG GCCGA1AGGCGAGUGAGGUCU CCCGCUUU | 20355 |
| 1447 | CGGGGCAU G UACUGACG | 8631 | CGUCAGUA GCCGAAAGGCGAGUGAGGUCU AUGCCCCG | 20356 |
| 1465 | UUAUGGAU G UGAGUGAA | 8634 | UUCACUCA GCCGAAAGGCGAGUGAGGUCU UUCCAUAA | 20357 |
| 1469 | GGAAGUGA G UGAAAGAG | 8635 | CUCUUUCA GCCGAAAGGCGAGUGAGGUCU UCACUUCC | 20358 |
| 1495 | AUUACACU G UCAUCCUG | 8638 | AAGGAUGA GCCGAAAGGCGAGUGAGGUCU AGUGUAAU | 20359 |
| 1527 | AAGGAGAA G CAGAGCCA | 8640 | UGGCUCUG GCCGAAAGGCGAGUGAGGUCU UUCUCCUU | 20360 |
| 1532 | GAAGCAGA G CCAUGUGG | 8641 | CCACAUGG GCCGAAAGGCGAGUGAGGUCU UCUGCUUC | 20361 |
| 1537 | AGAGCCAU G UGGUCUCU | 8642 | AGAGACCA GCCGAAAGGCGAGUGAGGUCU AUGGCUCU | 20362 |
| 1540 | GCCAUGUG G UCUCUCUG | 8643 | CAGAGAGA GCCGAAAGGCGAGUGAGGUCU CACAUGGC | 20363 |
| 1549 | UCUCUCUG G UUGUGUAU | 8644 | AUACACAA GCCGAAAGGCGAGUGAGGUCU CAGAGAGA | 20364 |
| 1552 | CUCUGGUU G UGUAUGUC | 8645 | GACAUACA GCCGAAAGGCGAGUGAGGUCU AACCAGAG | 20365 |
| 1554 | CUGGUUGU G UAUGUCCC | 8646 | GGGACAUA GCCGAAAGGCGAGUGAGGUCU ACAACCAG | 20366 |
| 1558 | UUGUGUAU G UCCCACCC | 8647 | GGCUCGCA GCCGAAACGCGAGUGAGGUCU AUACACAA | 20367 |
| 1574 | CCAGAUUG G UGAGAAAU | 8649 | AUUUCUCA GCCGAAAGGCGAGUGAGGUCU CAAUCUGG | 20368 |
| 1597 | UCUCUCCU G UGGAUUCC | 8652 | GGAAUCCA CCCGAAAGGCGAGUGAGGUCU AGGAGAGA | 20369 |
| 1611 | UCCUACCA G UACGGCAC | 8654 | GUGCCGUA GCCGAAACGCGAGUGAGGUCU UGGUAGGA | 20370 |
| 1616 | CCAGUACG G CACCACUC | 8655 | GAGUGGUG GCCGAAAGGCGAGUGAGGUCU CGUACUGG | 20371 |
| 1629 | ACUCAAAC G CUGACAUG | 8657 | CAUGUCAG GCCGAAAGGCGAGUGAGGUCU GUUUGAGU | 20372 |
| 1637 | GCUGACAU G UACGGUCU | 8659 | AGACCGUA GCCGAAAGGCGAGUGAGGUCU AUGUCAGC | 20373 |
| 1642 | CAUGUACG G UCUAUGCC | 8660 | GGCAUAGA GCCGAAAGGCGAGUGAGGUCU CGUACAUG | 20374 |
| 1648 | CGGUCUAU G CCAUUCCU | 8661 | AGGAAUGG GCCGAAAGGCGAGUGAGGUCU AUAGACCG | 20375 |
| 1662 | CCUCCCCC G CAUCACAU | 8662 | AUGUGAUG GCCGAAAGGCGAGUGAGGUCU GGGGGAGG | 20376 |
| 1677 | AUCCACUG G UAUUGGCA | 8663 | UGCCAAUA GCCGAAAGGCGAGUGAGGUCU CAGUGGAU | 20377 |
| 1683 | UGGUAUUG G CAGUUGGA | 8664 | UCCAACUG GCCGAAAGGCGAGUGAGGUCU CAAUACCA | 20378 |
| 1686 | UAUUGGCA G UUGGAGGA | 8665 | UCCUCCAA GCCGAAAGGCGAGUGAGGUCU UGCCAAUA | 20379 |
| 1698 | GAGGAAGA G UGCGCCAA | 8666 | UUGGCGCA GCCGAAAGGCGAGUGAGGUCU UCUUCCUC | 20380 |
| 1700 | GGAAGAGU G CGCCAACG | 8667 | CGUUGGCG GCCGAAAGGCGAGUGAGGUCU ACUCUUCC | 20381 |
| 1702 | AAGAGUGC G CCAACGAG | 8668 | CUCGUUGG GCCGAAAGGCGAGUGAGGUCU GCACUCUU | 20382 |
| 1710 | GCCAACGA G CCCAGCCA | 8670 | UGGCUGGG GCCGAAAGGCGAGUGAGGUCU UCGUUGGC | 20383 |
| 1715 | CGAGCCCA G CCAAGCUG | 8671 | CAGCUUGG GCCGAAAGGCGAGUGAGGUCU UGGGCUCG | 20384 |
| 1720 | CCAGCCAA G CUGUCUCA | 8672 | UGAGACAG GCCGAAAGGCGAGUGAGGUCU UUGGCUGG | 20385 |
| 1723 | GCCAAGCU G UCUCAGUG | 8673 | CACUGAGA GCCGAAAGGCGAGUGAGGUCU AGCUUGGC | 20386 |
| 1729 | CUGUCUCA G UGACAAAC | 8674 | GUUUGUCA GCCGAAAGGCGAGUGAGGUCU UGAGACAG | 20387 |
| 1748 | AUACCCUU G UGAAGAAU | 8677 | AUUCUUCA GCCGAAAGGCGAGUGAGGUCU AAGGGUAU | 20388 |
| 1763 | AUGGAGAA G UGUGGAGG | 8679 | CCUCCACA GCCGAAAGGCGAGUGAGGUCU UUCUCCAU | 20389 |
| 1765 | GGAGAAGU G UGGAGGAC | 8680 | GUCCUCCA GCCGAAAGGCGAGUGAGGUCU ACUUCUCC | 20390 |
| 1798 | AAAUUGAA G UUAAUAAA | 8684 | UUUAUUAA GCCGAAAGGCGAGUGAGGUCU UUCAAUUU | 20391 |
| 1816 | AUCAAUUU G CUCUAAUU | 8688 | AAUUAGAG GCCGAAAGGCGAGUGAGGUCU AAAUUGAU | 20392 |
| 1843 | ACAAAACU G UAAGUACC | 8692 | GGUACUUA GCCGAAAGGCGAGUGAGGUCU AGUUUUGU | 20393 |
| 1847 | AACUGUAA G UACCCUUG | 8693 | CAAGGGUA GCCGAAAGGCGAGUGAGGUCU UUACAGUU | 20394 |
| 1855 | GUACCCUU G UUAUCCAA | 8694 | UUGGAUAA GCCGAAAGGCGAGUGAGGUCU AAGGGUAC | 20395 |
| 1864 | UUAUCCAA G CGGCAAAU | 8695 | AUUUGCCG GCCGAAAGGCGAGUGAGGUCU UUGGAUAA | 20396 |
| 1867 | UCCAAGCG G CAAAUGUG | 8696 | CACAUUUG GCCGAAAGGCGAGUGAGGUCU CGCUUGGA | 20397 |
| 1873 | CGGCAAAU G UGUCAGCU | 8698 | AGCUGACA GCCGAAAGGCGAGUGAGGUCU AUUUGCCG | 20398 |
| 1875 | GCAAAUGU G UCAGCUUU | 8699 | AAAGCUGA GCCGAAAGGCGAGUGAGGUCU ACAUUUGC | 20399 |
| 1879 | AUGUGUCA G CUUUGUAC | 8700 | GUACAAAG GCCGAAAGGCGAGUGAGGUCU UGACACAU | 20400 |
| 1884 | UCAGCUUU G UACAAAUG | 8701 | CAUUUGUA GCCGAAAGGCGAGUGAGGUCU AAAGCUGA | 20401 |
| 1892 | GUACAAAU G UGAAGCGG | 8703 | CCGCUUCA GCCGAAAGGCGAGUGAGGUCU AUUUGUAC | 20402 |
| 1897 | AAUGUGAA G CGGUCAAC | 8704 | GUUGACCG GCCGAAAGGCGAGUGAGGUCU UUCACAUU | 20403 |
| 1900 | GUGAAGCG G UCAACAAA | 8705 | UUUGUUGA GCCGAAAGGCGAGUGAGGUCU CGCUUCAC | 20404 |
| 1909 | UCAACAAA G UCGGGAGA | 8707 | UCUCCCGA GCCGAAAGGCGAGUGAGGUCU UUUGUUGA | 20405 |
| 1927 | GAGAGAGG G UGAUCUCC | 8708 | GGAGAUCA GCCGAAAGGCGAGUGAGGUCU CCUCUCUC | 20406 |
| 1942 | CCUUCCAC G UGACCAGG | 8710 | CCUGGUCA GCCGAAAGGCGAGUGAGGUCU GUGGAAGG | 20407 |
| 1952 | GACCAGGG G UCCUGAAA | 8712 | UUUCAGGA GCCGAAAGGCGAGUGAGGUCU CCCUGGUC | 20408 |
| 1968 | AUUACUUU G CAACCUGA | 8714 | UCAGGUUG GCCGAAAGGCGAGUGAGGUCU AAAGUAAU | 20409 |
| 1980 | CCUGACAU G CAGCCCAC | 8717 | GUGGGCUG GCCGAAAGGCGAGUGAGGUCU AUGUCAGG | 20410 |
| 1983 | GACAUGCA G CCCACUGA | 8718 | UCAGUGGG GCCGAAAGGCGAGUGAGGUCU UGCAUGUC | 20411 |
| 1992 | CCCACUGA G CAGGAGAG | 8719 | CUCUCCUG GCCGAAAGGCGAGUGAGGUCU UCAGUGGG | 20412 |
| 2000 | GCAGGAGA G CGUGUCUU | 8720 | AAGACACG GCCGAAAGGCGAGUGAGGUCU UCUCCUGC | 20413 |
| 2002 | AGGAGAGC G UGUCUUUG | 8721 | CAAAGACA GCCGAAAGGCGAGUGAGGUCU GCUCUCCU | 20414 |
| 2004 | GAGAGCGU G UCUUUGUG | 8722 | CACAAAGA GCCGAAAGGCGAGUGAGGUCU ACGCUCUC | 20415 |
| 2010 | GUGUCUUU G UGGUGCAC | 8723 | GUGCACCA GCCGAAAGGCGAGUGAGGUCU AAAGACAC | 20416 |
| 2013 | UCUUUGUG G UCCACUGC | 8724 | GCAGUGCA GCCGAAAGGCGAGUGAGGUCU CACAAAGA | 20417 |
| 2015 | UUUGUGGU G CACUGCAG | 8725 | CUGCAGUG GCCGAAAGGCGAGUGAGGUCU ACCACAAA | 20418 |
| 2020 | GGUGCACU G CAGACAGA | 8726 | UCUGUCUG GCCGAAAGGCGAGUGAGGUCU AGUGCACC | 20419 |
| 2034 | AGAUCUAC G UUUGAGAA | 8729 | UUCUCAAA GCCGAAAGGCGAGUGAGGUCU GUAGAUCU | 20420 |
| 2052 | CUCACAUG G UACAAGCU | 8731 | AGCUUGUA GCCGAAAGGCGAGUGAGGUCU CAUGUGAG | 20421 |
| 2058 | UGGUACAA G CUUGGCCC | 8732 | GGGCCAAG GCCGAAAGGCGAGUGAGGUCU UUGUACCA | 20422 |
| 2063 | CAAGCUUG G CCCACAGC | 8733 | GCUGUGGG GCCGAAAGGCGAGUGAGGUCU CAAGCUUG | 20423 |
| 2070 | GGCCCACA G CCUCUGCC | 8734 | GGCAGAGG GCCGAAAGGCGAGUGAGGUCU UGUGGGCC | 20424 |
| 2076 | CAGCCUCU G CCAAUCCA | 8735 | UGGAUUGG GCCGAAAGGCGAGUGAGGUCU AGAGGCUG | 20425 |
| 2086 | CAAUCCAU G UGGGAGAG | 8737 | CUCUCCCA GCCGAAAGGCGAGUGAGGUCU AUGGAUUG | 20426 |
| 2094 | GUGGGAGA G UUGCCCAC | 8738 | GUGGGCAA GCCGAAAGGCGAGUGAGGUCU UCUCCCAC | 20427 |
| 2097 | GGAGAGUU G CCCACACC | 8739 | GGUGUGGG GCCGAAAGGCGAGUGAGGUCU AACUCUCC | 20428 |
| 2107 | CCACACCU G UUUGCAAG | 8740 | CUUGCAAA GCCGAAAGGCGAGUGAGGUCU AGGUGUGG | 20429 |
| 2111 | ACCUGUUU G CAAGAACU | 8741 | AGUUCUUG GCCGAAAGGCGAGUGAGGUCU AAACAGGU | 20430 |
| 2143 | AAUUGAAU G CCACCAUG | 8746 | CAUGGUGG GCCGAAAGGCGAGUGAGGUCU AUUCAAUU | 20431 |
| 2151 | GCCACCAU G UUCUCUAA | 8747 | UUAGAGAA GCCGAAAGGCGAGUGAGGUCU AUGGUGGC | 20432 |
| 2162 | CUCUAAUA G CACAAAUG | 8749 | CAUUUGUG GCCGAAAGGCGAGUGAGGUCU UAUEUGAG | 20433 |
| 2187 | AUCAUGGA G CUUAAGAA | 8753 | UUCUUAAG GCCGAAAGGCGAGUGAGGUCU UCCAUGAU | 20434 |
| 2197 | UUAAGAAU G CAUCCUUG | 8755 | CAAGGAUG GCCGAAAGGCGAGUGAGGUCU AUUCUUAA | 20435 |
| 2205 | GCAUCCUU G CAGGACCA | 8756 | UGGUCCUG GCCGAAAGGCGAGUGAGGUCU AAGGAUGC | 20436 |
| 2224 | GAGACUAU G UCUGCCUU | 8759 | AAGGCAGA GCCGAAAGGCGAGUGAGGUCU AUAGUCUC | 20437 |
| 2228 | CUAUGUCU G CCUUGCUC | 8760 | GAGCAAGG GCCGAAAGGCGAGUGAGGUCU AGACAUAG | 20438 |
| 2233 | UCUGCCUU G CUCAAGAC | 8761 | GUCUUGAG GCCGAAAGGCGAGUGAGGUCU AAGGCAGA | 20439 |
| 2264 | AAGACAUU G CGUGGUCA | 8765 | UGACCACG GCCGAAAGGCGAGUGAGGUCU AAUGUCUU | 20440 |
| 2266 | GACAUUGC G UGGUCAGG | 8766 | CCUGACCA GCCGAAAGGCGAGUGAGGUCU GCAAUGUC | 20441 |
| 2269 | AUUGCGUG G UCAGGCAG | 8767 | CUGCCUGA GCCGAAAGGCGAGUGAGGUCU CACGCAAU | 20442 |
| 2274 | GUGGUCAG G CAGCUCAC | 8768 | GUGAGCUG GCCGAAAGGCGAGUGAGGUCU CUGACCAC | 20443 |
| 2277 | GUCAGGCA G CUCACAGU | 8769 | ACUGUGAG GCCGAAAGGCGAGUGAGGUCU UGCCUGAC | 20444 |
| 2284 | AGCUCACA G UCCUAGAG | 8770 | CUCUAGGA GCCGAAAGGCGAGUGAGGUCU UGUGAGCU | 20445 |
| 2292 | GUCCUAGA G CGUGUGGC | 8771 | GCCACACG GCCGAAAGGCGAGUGAGGUCU UCUAGGAC | 20446 |
| 2294 | CCUAGAGC G UGUGGCAC | 8772 | GUGCCACA GCCGAAAGGCGAGUGAGGUCU GCUCUAGG | 20447 |
| 2296 | UAGAGCGU G UGGCACCC | 8773 | GGGUGCCA GCCGAAAGGCGAGUGAGGUCU ACGCUCUA | 20448 |
| 2299 | AGCGUGUG G CACCCACG | 8774 | CGUGGGUG GCCGAAAGGCGAGUGAGGUCU CACACGCU | 20449 |
| 2339 | GACGACAA G UAUUGGGG | 8780 | CCCCAAUA GCCGAAAGGCGAGUGAGGUCU UUGUCGUC | 20450 |
| 2351 | UGGGGAAA G CAUCGAAG | 8781 | CUUCGAUG GCCGAAAGGCGAGUGAGGUCU UUUCCCCA | 20451 |
| 2359 | GCAUCGAA G UCUCAUGC | 8782 | GCAUGAGA GCCGAAAGGCGAGUGAGGUCU UUCGAUGC | 20452 |
| 2366 | AGUCUCAU G CACGGCAU | 8783 | AUGCCGUG GCCGAAAGGCGAGUGAGGUCU AUGAGACU | 20453 |
| 2371 | CAUGCACG G CAUCUGGG | 8784 | CCCAGAUG GCCGAAAGGCGAGUGAGGUCU CGUGCAUG | 20454 |
| 2400 | CAGAUCAU G UGGUUUAA | 8787 | UUAAACCA GCCGAAAGGCGAGUGAGGUCU AUGAUCUG | 20455 |
| 2403 | AUCAUGUG G UUUAAAGA | 8788 | UCUUUAAA GCCGAAAGGCGAGUGAGGUCU CACAUGAU | 20456 |
| 2425 | AGACCCUU G UAGAAGAC | 8792 | GUCUUCUA GCCGAAAGGCGAGUGAGGUCU AAGGGUCU | 20457 |
| 2438 | AGACUCAG G CAUUGUAU | 8794 | AUACAAUG GCCGAAAGGCGAGUGAGGUCU CUGAGUCU | 20458 |
| 2443 | CAGGCAUU G UAUUGAAG | 8795 | CUUCAAUA GCCGAAAGGCGAGUGAGGUCU AAUGCCUG | 20459 |
| 2477 | CACUAUCC G CAGAGUGA | 8799 | UCACUCUG GCCGAAAGGCGAGUGAGGUCU GGAUAGUG | 20460 |
| 2482 | UCCGCAGA G UGAGGAAG | 8800 | CUUCCUCA GCCGAAAGGCGAGUGAGGUCU UCUGCGGA | 20461 |
| 2501 | GGACGAAG G CCUCUACA | 8802 | UGUAGAGG GCCGAAAGGCGAGUGAGGUCU CUUCGUCC | 20462 |
| 2513 | CUACACCU G CCAGGCAU | 8803 | AUGCCUGG GCCGAAAGGCGAGUGAGGUCU AGGUGUAG | 20463 |
| 2518 | CCUGCCAG G CAUGCAGU | 8804 | ACUGCAUG GCCGAAAGGCGAGUGAGGUCU CUGGCAGG | 20464 |
| 2522 | CCAGGCAU G CAGUGUUC | 8805 | GAACACUG GCCGAAAGGCGAGUGAGGUCU AUGCCUGG | 20465 |
| 2525 | GGCAUGCA G UGUUCUUG | 8806 | CAAGAACA GCCGAAAGGCGAGUGAGGUCU UGCAUGCC | 20466 |
| 2527 | CAUGCAGU G UUCUUGGC | 8807 | GCCAAGAA GCCGAAAGGCGAGUGAGGUCU ACUGCAUG | 20467 |
| 2534 | UGUUCUUG G CUGUGCAA | 8808 | UUGCACAG GCCGAAAGGCGAGUGAGGUCU CAAGAACA | 20468 |
| 2537 | UCUUGGCU G UGCAAAAG | 8809 | CUUUUGCA GCCGAAAGGCGAGUGAGGUCU AGCCAAGA | 20469 |
| 2539 | UUGGCUGU G CAAAAGUG | 8810 | CACUUUUG GCCGAAAGGCGAGUGAGGUCU ACAGCCAA | 20470 |
| 2545 | GUGCAAAA G UGGAGGCA | 8811 | UGCCUCCA GCCGAAAGGCGAGUGAGGUCU UUUUGCAC | 20471 |
| 2551 | AAGUGGAG G CAUUUUUC | 8812 | GAAAAAUG GCCGAAAGGCGAGUGAGGUCU CUCCACUU | 20472 |
| 2570 | AAUAGAAG G UGCCCAGG | 8814 | CCUGGGCA GCCGAAAGGCGAGUGAGGUCU CUUCUAUU | 20473 |
| 2572 | UAGAAGGU G CCCAGGAA | 8815 | UUCCUGGG GCCGAAAGGCGAGUGAGGUCU ACCUUCUA | 20474 |
| 2608 | UUAUUCUA G UAGGCACG | 8819 | CGUGCCUA GCCGAAAGGCGAGUGAGGUCU UAGAAUAA | 20475 |
| 2612 | UCUAGUAG G CACGGCGG | 8820 | CCGCCGUG GCCGAAAGGCGAGUGAGGUCU CUACUAGA | 20476 |
| 2617 | UAGGCACG G CGGUGAUU | 8822 | AAUCACCG GCCGAAAGGCGAGUGAGGUCU CGUGCCUA | 20477 |
| 2620 | GCACGGCG G UGAUUGCC | 8823 | GGCAAUCA GCCGAAAGGCGAGUGAGGUCU CGCCGUGC | 20478 |
| 2626 | CGGUGAUU G CCAUGUUC | 8825 | GAACAUGG GCCGAAAGGCGAGUGAGGUCU AAUCACCG | 20479 |
| 2631 | AUUGCCAU G UUCUUCUG | 8826 | CAGAAGAA GCCGAAAGGCGAGUGAGGUCU AUGGCAAU | 20480 |
| 2640 | UUCUUCUG G CUACUUCU | 8827 | AGAAGUAG GCCGAAAGGCGAGUGAGGUCU CAGAAGAA | 20481 |
| 2650 | UACUUCUU G UCAUCAUC | 8828 | GAUGAUGA GCCGAAAGGCGAGUGAGGUCU AAGAAGUA | 20482 |
| 2668 | UACGGACC G UUAAGCGG | 8832 | CCGCUUAA GCCGAAAGGCGAGUGAGGUCU GGUCCGUA | 20483 |
| 2673 | ACCGUUAA G CGGGCCAA | 8833 | UUGGCCCG GCCGAAAGGCGAGUGAGGUCU UUAACGGU | 20484 |
| 2677 | UUAAGCGG G CCAAUGGA | 8834 | UCCAUUGG GCCGAAAGGCGAGUGAGGUCU CCGCUUAA | 20485 |
| 2702 | GAAGACAG G CUACUUGU | 8838 | ACAAGUAG GCCGAAAGGCGAGUGAGGUCU CUGUCUUC | 20486 |
| 2709 | GGCUACUU G UCCAUCGU | 8839 | ACGAUGGA GCCGAAAGGCGAGUGAGGUCU AAGUAGCC | 20487 |
| 2716 | UGUCCAUC G UCAUGGAU | 8840 | AUCCAUGA GCCGAAAGGCGAGUGAGGUCU GAUGGACA | 20488 |
| 2753 | UGAACAUU G UGAACGAC | 8846 | GUCGUUCA GCCGAAAGGCGAGUGAGGUCU AAUGUUCA | 20489 |
| 2763 | GAACGACU G CCUUAUGA | 8849 | UCAUAAGG GCCGAAAGGCGAGUGAGGUCU AGUCGUUC | 20490 |
| 2773 | CUUAUGAU G CCAGCAAA | 8851 | UUUGCUGG GCCGAAAGGCGAGUGAGGUCU AUCAUAAG | 20491 |
| 2777 | UGAUGCCA G CAAAUGGG | 8852 | CCCAUUUG GCCGAAAGGCGAGUGAGGUCU UGGCAUCA | 20492 |
| 2802 | AGAGACCG G CUGAAGCU | 8856 | AGCUUCAG GCCGAAAGGCGAGUGAGGUCU CGGUCUCU | 20493 |
| 2808 | CGGCUGAA G CUAGGUAA | 8857 | UUACCUAG GCCGAAAGGCGAGUGAGGUCU UUCAGCCG | 20494 |
| 2813 | GAAGCUAG G UAAGCCUC | 8858 | GAGGCUUA GCCGAAAGGCGAGUGAGGUCU CUAGCUUC | 20495 |
| 2817 | CUAGGUAA G CCUCUUGG | 8859 | CCAAGAGG GCCGAAAGGCGAGUGAGGUCU UUACCUAG | 20496 |
| 2825 | GCCUCUUG G CCGUGGUG | 8860 | CACCACGG GCCGAAAGGCGAGUGAGGUCU CAAGAGGC | 20497 |
| 2828 | UCUUGGCC G UGGUGCCU | 8861 | AGGCACCA GCCGAAAGGCGAGUGAGGUCU GGCCAAGA | 20498 |
| 2831 | UGGCCGUG G UGCCUUUG | 8862 | CAAAGGCA GCCGAAAGGCGAGUGAGGUCU CACGGCCA | 20499 |
| 2833 | GCCGUGGU G CCUUUGGC | 8863 | GCCAAAGG GCCGAAAGGCGAGUGAGGUCU ACCACGGC | 20500 |
| 2840 | UGCCUUUG G CCAAGUGA | 8864 | UCACUUGG GCCGAAAGGCGAGUGAGGUCU CAAAGGCA | 20501 |
| 2845 | UUGGCCAA G UGAUUGAA | 8865 | UUCAAUCA GCCGAAAGGCGAGUGAGGUCU UUGGCCAA | 20502 |
| 2854 | UGAUUGAA G CAGAUGCC | 8867 | GGCAUCUG GCCGAAAGGCGAGUGAGGUCU UUCAAUCA | 20503 |
| 2860 | AAGCAGAU G CCUUUGGA | 8869 | UCCAAAGG GCCGAAAGGCGAGUGAGGUCU AUCUGCUU | 20504 |
| 2881 | ACAAGACA G CAACUUGC | 8873 | GCAAGUUG GCCGAAAGGCGAGUGAGGUCU UGUCUUGU | 20505 |
| 2888 | AGCAACUU G CAGGACAG | 8875 | CUGUCCUG CCCGAAAGGCGAGUGAGGUCU AAGUUGCU | 20506 |
| 2896 | GCAGGACA G UAGCAGUC | 8877 | GACUGCUA GCCGAAAGGCGAGUGAGGUCU UGUCCUGC | 20507 |
| 2899 | CGACAGUA G CAGUCAAA | 8878 | UUUGACUG GCCGAAAGGCGAGUGAGGUCU UACUGUCC | 20508 |
| 2902 | CAGUAGCA G UCAAAAUG | 8879 | CAUUUUGA GCCGAAAGGCGAGUGAGGUCU UCCUACUG | 20509 |
| 2910 | GUCAAAAU G UUGAAAGA | 8881 | UCUUUCAA GCCGAAAGGCGAGUGACGUCU AUUUUGAC | 20510 |
| 2923 | AAGAACGA G CAACACAC | 8882 | GUGUGUUG GCCGAAAGGCGAGUGAGGUCU UCCUUCUU | 20511 |
| 2933 | AACACACA G UGAGCAUC | 8884 | GAUGCUCA GCCGAAAGGCGAGUGAGGUCU UGUGUGUU | 20512 |
| 2937 | CACAGUGA G CAUCGAGC | 8885 | GCUCCAUG GCCGAAAGGCGAGUGAGCUCU UCACUGUC | 20513 |
| 2944 | ACCAUCCA G CUCUCAUC | 8886 | CAUGAGAC GCCCAAACGCGACUGACGUCU UCCAUGCU | 20514 |
| 2952 | GCUCUCAU G UCUGAACU | 8887 | AGUUCAGA GCCGAAAGGCGACUGAGGUCU AUGAGAGC | 20515 |
| 2981 | UCAUAUUG G UCACCAUC | 8890 | GAUCCUGA GCCCAAACCCGACUGAGGUCU CAAUAUGA | 20516 |
| 2995 | AUCUCAAU G UGGUCAAC | 8892 | GUUGACCA GCCGAAAGGCGAGUGAGGUCU AUUGAGAU | 20517 |
| 2998 | UCAAUGUG G UCAACCUU | 8893 | AAGGUUGA GCCGAAAGGCGAGUGAGGUCU CACAUUGA | 20518 |
| 3011 | CCUUCUAG G UGCCUGUA | 8895 | UACAGGCA GCCGAAAGGCGAGUGAGGUCU CUAGAAGG | 20519 |
| 3013 | UUCUAGGU G CCUGUACC | 8896 | GGUACAGG GCCGAAAGGCGAGUGAGGUCU ACCUAGAA | 20520 |
| 3017 | AGGUGCCU G UACCAAGC | 8897 | GCUUGGUA GCCGAAAGGCGAGUGAGGUCU AGGCACCU | 20521 |
| 3024 | UGUACCAA G CCAGGAGG | 8898 | CCUCCUGG GCCGAAAGGCGAGUGAGGUCU UUGGUACA | 20522 |
| 3033 | CCAGGAGG G CCACUCAU | 8899 | AUCAGUGG GCCGAAAGGCGAGUCACGUCU CCUCCUGG | 20523 |
| 3043 | CACUCAUG G UGAUUGUG | 8900 | CACAAUCA GCCGAAAGGCGAGUGAGGUCU CAUGAGUG | 20524 |
| 3049 | UGGUGAUU G UGGAAUUC | 8902 | GAAUUCCA GCCGAAAGGCGAGUGAGGUCU AAUCACCA | 20525 |
| 3059 | CGAAUUCU G CAAAUUUG | 8904 | CAAAUUUG GCCGAAAGCCGAGUGAGGUCU AGAAUUCC | 20526 |
| 3075 | GGAAACCU G UCCACUUA | 8907 | UAAGUCGA GCCGAAAGCCGACUGAGGUCU AGGUUUCC | 20527 |
| 3092 | CCUGAGGA G CAACAGAA | 8908 | UUCUCUUG GCCGAAAGGCGAGUGAGGUCU UCCUCAGG | 20528 |
| 3109 | AUGAAUUU G UCCCCUAC | 8911 | GUAGGGGA GCCGAAAGGCGAGUGAGGUCU AAAUUCAU | 20529 |
| 3130 | CCAAAGGG G CACGAUUC | 8913 | GAAUCGUG GCCGAAAGGCCAGUGAGGUCU CCCUUUCG | 20530 |
| 3140 | ACGAUUCC G UCAAGGGA | 8915 | UCCCUUCA GCCGAAAGGCGAGUGAGGUCU GGAAUCGU | 20531 |
| 3157 | AAGACUAC G UUGGAGCA | 8917 | UGCUCCAA GCCGAAAGGCGAGUGAGGUCU GUAGUCUU | 20532 |
| 3163 | ACGUUGGA G CAAUCCCU | 8918 | AGGGAUUG GCCGAAAGGCGAGUGAGCUCU UCCAACGU | 20533 |
| 3172 | CAAUCCCU G UGGAUCUG | 8920 | CAGAUCCA GCCGAAAGGCGACUGAGGUCU AGGGAUUG | 20534 |
| 3186 | CUGAAACG G CGCUUGGA | 8923 | UCCAACCG GCCGAAAGGCGAGUGAGGUCU CGUUUCAG | 20535 |
| 3188 | CAAACGGC G CUUCCACA | 8924 | UGUCCAAG GCCGAAAGGCGAGUGAGGUCU GCCGUUUC | 20536 |
| 3197 | CUUGGACA G CAUCACCA | 8926 | UCCUGAUG GCCGAAAGGCGAGUGAGGUCU UGUCCAAG | 20537 |
| 3206 | CAUCACCA G UAGCCACA | 8927 | UCUGGCUA GCCGAAACGCGAGUGAGGUCU UGCUGAUG | 20538 |
| 3209 | CACCAGUA G CCACAGCU | 8928 | AGCUCUGG CCCGAAAGGCGAGUGAGGUCU UACUGGUG | 20539 |
| 3215 | UAGCCAGA G CUCAGCCA | 8929 | UGGCUCAG GCCGAAAGGCGACUGAGGUCU UCUGGCUA | 20540 |
| 3220 | AGACCUCA G CCACCUCU | 8930 | AGAGCUGG GCCGAAAGGCGAGUGAGGUCU UCAGCUCU | 20541 |
| 3224 | CUCAGCCA G CUCUCCAU | 8931 | AUCCAGAG GCCGAAACGCCAGUGAGGUCU UGGCUGAG | 20542 |
| 3235 | CUGGAUUU G UGGAGGAG | 8933 | CUCCUCCA GCCGAAAGGCGAGUGAGCUCU AAAUCCAC | 20543 |
| 3246 | GAGGAGAA G UCCCUCAG | 8934 | CUGAGGGA CCCGAAAGGCGAGUGAGGUCU UUCUCCUC | 20544 |
| 3254 | GUCCCUCA G UGAUGUAG | 8935 | CUACAUCA GCCGAAAGGCGAGUGAGGUCU UGAGGGAC | 20545 |
| 3259 | UCACUGAU G UAGAAGAA | 8937 | UUCUUCUA CCCCAAAGGCCACUGAGGUCU AUCACUGA | 20546 |
| 3274 | AAGAGGAA G CUCCUGAA | 8938 | UUCAGCAG GCCGAAAGGCGACUGAGGUCU UUCCUCUU | 20547 |
| 3288 | GAAGAUCU G UAUAAGGA | 8940 | UCCUUAUA CCCCAAAGGCCAGUGAGCUCU AGAUCUUC | 20548 |
| 3312 | ACCUUGCA G CAUCUCAU | 8943 | AUGAGAUG GCCGAAAGGCGAGUCAGGUCU UCCAAGCU | 20549 |
| 3323 | UCUCAUCU G UUACAGCU | 8944 | AGCUGUAA GCCGAAAGGCGACUCAGGUCU AGAUCACA | 20550 |
| 3329 | CUGUUACA G CUUCCAAC | 8945 | CUUGGAAG GCCCAAACCCCAGUGACCUCU UCUAACAG | 20551 |
| 3337 | GCUUCCAA G UGGCUAAG | 8946 | CUUAGCCA CCCCAAACGCCACUGACGUCU UUCGAAGC | 20552 |
| 3340 | UCCAAGUC G CUAAGCGC | 8947 | CCCCUUAG GCCCAAAGGCGACUGAGGUCU CACUUGCA | 20553 |
| 3347 | CGCUAAGG G CAUGGAGU | 8948 | ACUCCAUC GCCCAAACCCCACUCACGUCU CCUUACCC | 20554 |
| 3354 | GCCAUCCA G UUCUUCGC | 8949 | CCCAACAA CCCCAAACGCGAGUGAGGUCU UCCAUCCC | 20555 |
| 3361 | AGUUCUUC G CAUCCCCA | 8950 | UCGCCAUC CCCCAAAGGCGAGUGAGGUCU CAACAACU | 20556 |
| 3366 | UUGGCAUC G CGAAAGUC | 8951 | CACUUUCC GCCCAAAGCCGAGUCACCUCU CAUCCCAA | 20557 |
| 3372 | UCCCCAAA G UCUAUCCA | 8952 | UCCAUACA CCCCAAAGCCCACUCACGUCU UUUCCCCA | 20558 |
| 3374 | GCGAAAGU G UAUCCACA | 8953 | UGUCCAUA CCCCAAACGCGAGUCACCUCU ACUUUCGC | 20559 |
| 3391 | CGGACCUC G CGCCACCA | 8955 | UCCUCCCC GCCGAAAGCCGAGUCAGCUCU CACGUCCC | 20560 |
| 3394 | ACCUCCCC G CACCAAAU | 8956 | AUUUCCUG CCCCAAACCCGAGUGACCUCU CGCCAGCU | 20561 |
| 3424 | AGAACAAC G UGGUUAAA | 8959 | UUUAACCA GCCGAAAGGCCAGUGACGUCU CUUCUUCU | 20562 |
| 3427 | ACAACCUG G UUAAAAUC | 8960 | CAUUUUAA CCCCAAACGCCAGUGACGUCU CACCUUCU | 20563 |
| 3437 | UAAAAUCU G UGACUUUC | 8962 | CAAAGUCA GCCGAAAGGCGAGUGAGGUCU ACAUUUUA | 20564 |
| 3446 | UCACUCUC G CUUGCCCC | 8964 | CCGCCAAC CCCCAAACCCCACUCACCUCU CAAACUCA | 20565 |
| 3451 | UUCGCUUG G CCCCCGAU | 8965 | AUCCCCCC GCCGAAAGGCGACUGAGGUCU CAAGCCAA | 20566 |
| 3481 | CAGAUUAU G UCAGAAAA | 8969 | UUUUCUGA GCCGAAAGGCGAGUGAGGUCU AUAAUCUG | 20567 |
| 3496 | AAGGAGAU G CUCGCCUC | 8971 | GAGGCGAG GCCGAAAGGCGAGUGAGGUCU AUCUCCUU | 20568 |
| 3500 | AGAUGCUC G CCUCCCUU | 8972 | AAGGGAGG GCCGAAAGGCGAGUGAGGUCU GAGCAUCU | 20569 |
| 3520 | AAUGGAUG G CCCCAGAA | 8975 | UUCUGGGG GCCGAAAGGCGAGUGAGGUCU CAUCCAUU | 20570 |
| 3544 | UUGACAGA G UGUACACA | 8979 | UGUGUACA GCCGAAAGGCGAGUGAGGUCU UCUGUCAA | 20571 |
| 3546 | GACAGAGU G UACACAAU | 8980 | AUUGUGUA GCCGAAAGGCGAGUGAGGUCU ACUCUGUC | 20572 |
| 3560 | AAUCCAGA G UGACGUCU | 8982 | AGACGUCA GCCGAAAGGCGAGUGAGGUCU UCUGGAUU | 20573 |
| 3565 | AGAGUGAC G UCUGGUCU | 8984 | AGACCAGA GCCGAAAGGCGAGUGAGGUCU GUCACUCU | 20574 |
| 3570 | GACGUCUG G UCUUUUGG | 8985 | CCAAAAGA GCCGAAAGGCGAGUGAGGUCU CAGACGUC | 20575 |
| 3578 | GUCUUUUG G UGUUUUGC | 8986 | GCAAAACA GCCGAAAGGCGAGUGAGGUCU CAAAAGAC | 20576 |
| 3580 | CUUUUGGU G UUUUGCUG | 8987 | CAGCAAAA GCCGAAAGGCGAGUGAGGUCU ACCAAAAG | 20577 |
| 3585 | GGUGUUUU G CUGUGGGA | 8988 | UCCCACAG GCCGAAAGGCGAGUGAGGUCU AAAACACC | 20578 |
| 3588 | GUUUUGCU G UGGGAAAU | 8989 | AUUUCCCA GCCGAAAGGCGAGUGAGGUCU AGCAAAAC | 20579 |
| 3608 | UUCCUUAG G UGCUUCUC | 8991 | GAGAAGCA GCCGAAAGGCGAGUGAGGUCU CUAAGGAA | 20580 |
| 3610 | CCUUAGGU G CUUCUCCA | 8992 | UGGAGAAG GCCGAAAGGCGAGUGAGGUCU ACCUAAGG | 20581 |
| 3628 | AUCCUGGG G UAAAGAUU | 8993 | AAUCUUUA GCCGAAAGGCGAGUGAGGUCU CCCAGGAU | 20582 |
| 3650 | AGAAUUUU G UAGGCGAU | 8997 | AUCGCCUA GCCGAAAGGCGAGUGAGGUCU AAAAUUCU | 20583 |
| 3654 | UUUUGUAG G CGAUUGAA | 8998 | UUCAAUCG GCCGAAAGGCGAGUGAGGUCU CUACAAAA | 20584 |
| 3682 | GAAUGAGG G CCCCUGAU | 9002 | AUCAGGGG GCCGAAAGGCGAGUGAGGUCU CCUCAUUC | 20585 |
| 3708 | CCAGAAAU G UACCAGAC | 9005 | GUCUGGUA GCCGAAAGGCGAGUGAGGUCU AUUUCUGG | 20586 |
| 3720 | CAGACCAU G CUGGACUG | 9007 | CAGUCCAG GCCGAAAGGCGAGUGAGGUCU AUGGUCUG | 20587 |
| 3728 | GCUGGACU G CUGGCACG | 9008 | CGUGCCAG GCCGAAAGGCGAGUGAGGUCU AGUCCAGC | 20588 |
| 3732 | GACUGCUG G CACGGGGA | 9009 | UCCCCGUG GCCGAAAGGCGAGUGAGGUCU CAGCAGUC | 20589 |
| 3741 | CACGGGGA G CCCAGUCA | 9010 | UGACUGGG GCCGAAAGGCGAGUGAGGUCU UCCCCGUG | 20590 |
| 3746 | GGAGCCCA G UCAGAGAC | 9011 | GUCUCUGA GCCGAAAGGCGAGUGAGGUCU UGGGCUCC | 20591 |
| 3759 | AGACCCAC G UUUUCAGA | 9013 | UCUGAAAA GCCGAAAGGCGAGUGAGGUCU GUGGGUCU | 20592 |
| 3768 | UUUUCAGA G UUGGUGGA | 9014 | UCCACCAA GCCGAAAGGCGAGUGAGGUCU UCUGAAAA | 20593 |
| 3772 | CAGAGUUG G UGGAACAU | 9015 | AUGUUCCA GCCGAAAGGCGAGUGAGGUCU CAACUCUG | 20594 |
| 3795 | AAUCUCUU G CAAGCUAA | 9018 | UUAGCUUG GCCGAAAGGCGAGUGAGGUCU AAGAGAUU | 20595 |
| 3799 | UCUUGCAA G CUAAUGCU | 9019 | AGCAUUAG GCCGAAAGGCGAGUGAGGUCU UUGCAAGA | 20596 |
| 3805 | AAGCUAAU G CUCAGCAG | 9021 | CUGCUGAG GCCGAAAGGCGAGUGAGGUCU AUUAGCUU | 20597 |
| 3810 | AAUGCUCA G CAGGAUGG | 9022 | CCAUCCUG GCCGAAAGGCGAGUGAGGUCU UGAGCAUU | 20598 |
| 3818 | GCAGGAUG G CAAAGACU | 9024 | AGUCUUUG GCCGAAAGGCGAGUGAGGUCU CAUCCUGC | 20599 |
| 3832 | ACUACAUU G UUCUUCCG | 9026 | CGGAAGAA GCCGAAAGGCGAGUGAGGUCU AAUGUAGU | 20600 |
| 3857 | GACUUUGA G CAUGGAAG | 9029 | CUUCCAUG GCCGAAAGGCGAGUGAGGUCU UCAAAGUC | 20601 |
| 3885 | CUCUCUCU G CCUACCUC | 9032 | GAGGUAGG GCCGAAAGGCGAGUGAGGUCU AGAGAGAG | 20602 |
| 3898 | CCUCACCU G UUUCCUGU | 9033 | ACAGGAAA GCCGAAAGGCGAGUGAGGUCU AGGUGAGG | 20603 |
| 3905 | UGUUUCCU G UAUGGAGG | 9034 | CCUCCAUA GCCGAAAGGCGAGUGAGGUCU AGGAAACA | 20604 |
| 3922 | AGGAGGAA G UAUGUGAC | 9035 | GUCACAUA GCCGAAAGGCGAGUGAGGUCU UUCCUCCU | 20605 |
| 3926 | GGAAGUAU G UGACCCCA | 9036 | UGGGGUCA GCCGAAAGGCGAGUGAGGUCU AUACUUCC | 20606 |
| 3955 | ACAACACA G CAGGAAUC | 9041 | GAUUCCUG GCCGAAAGGCGAGUGAGGUCU UGUGUUGU | 20607 |
| 3965 | AGGAAUCA G UCAGUAUC | 9043 | GAUACUGA GCCGAAAGGCGAGUGAGGUCU UGAUUCCU | 20608 |
| 3969 | AUCAGUCA G UAUCUGCA | 9044 | UGCAGAUA GCCGAAAGGCGAGUGAGGUCU UGACUGAU | 20609 |
| 3975 | CAGUAUCU G CAGAACAG | 9045 | CUGUUCUG GCCGAAAGGCGAGUGAGGUCU AGAUACUG | 20610 |
| 3983 | GCAGAACA G UAAGCGAA | 9047 | UUCGCUUA GCCGAAAGGCGAGUGAGGUCU UGUUCUGC | 20611 |
| 3987 | AACAGUAA G CGAAAGAG | 9048 | CUCUUUCG GCCGAAAGGCGAGUGAGGUCU UUACUGUU | 20612 |
| 3995 | GCGAAAGA G CCGGCCUG | 9049 | CAGGCCGG GCCGAAAGGCGAGUGAGGUCU UCUUUCGC | 20613 |
| 3999 | AAGAGCCG G CCUGUGAG | 9050 | CUCACAGG GCCGAAAGGCGAGUGAGGUCU CGGCUCUU | 20614 |
| 4003 | GCCGGCCU G UGAGUGUA | 9051 | UACACUCA GCCGAAAGGCGAGUGAGGUCU AGGCCGGC | 20615 |
| 4007 | GCCUGUGA G UGUAAAAA | 9052 | UUUUUACA GCCGAAAGGCGAGUGAGGUCU UCACAGGC | 20616 |
| 4009 | CUGUGAGU G UAAAAACA | 9053 | UGUUUUUA GCCGAAAGGCGAGUGAGGUCU ACUCACAG | 20617 |
| 4032 | GAUAUCCC G UUAGAAGA | 9056 | UCUUCUAA GCCGAAAGGCGAGUGAGGUCU GGGAUAUC | 20618 |
| 4048 | AACCAGAA G UAAAAGUA | 9058 | UACUUUUA GCCGAAAGGCGAGUGAGGUCU UUCUGGUU | 20619 |
| 4054 | AAGUAAAA G UAAUCCCA | 9059 | UGGGAUUA GCCGAAAGGCGAGUGAGGUCU UUUUACUU | 20620 |
| 4082 | GACGGACA G UGGUAUGG | 9066 | CCAUACCA GCCGAAAGGCGAGUGAGGUCU UGUCCGUC | 20621 |
| 4085 | GGACAGUG G UAUGGUUC | 9067 | GAACCAUA GCCGAAAGGCGAGUGAGGUCU CACUGUCC | 20622 |
| 4090 | GUGGUAUG G UUCUUGCC | 9068 | GGCAAGAA GCCGAAAGGCGAGUGAGGUCU CAUACCAC | 20623 |
| 4096 | UGGUUCUU G CCUCAGAA | 9069 | UUCUGAGG GCCGAAAGGCGAGUGAGGUCU AAGAACCA | 20624 |
| 4107 | UCAGAAGA G CUGAAAAC | 9070 | GUUUUCAG GCCGAAAGGCGAGUGAGGUCU UCUUCUGA | 20625 |
| 4151 | AUCUUUUG G UGGAAUGG | 9075 | CCAUUCCA GCCGAAAGGCGAGUGAGGUCU CAAAAGAU | 20626 |
| 4159 | GUGGAAUG G UGCCCAGC | 9077 | GCUGGGCA GCCGAAAGGCGAGUGAGGUCU CAUUCCAC | 20627 |
| 4161 | GGAAUGGU G CCCAGCAA | 9078 | UUGCUGGG GCCGAAAGGCGAGUGAGGUCU ACCAUUCC | 20628 |
| 4166 | GGUGCCCA G CAAAAGCA | 9079 | UGCUUUUG GCCGAAAGGCGAGUGAGGUCU UGGGCACC | 20629 |
| 4172 | CAGCAAAA G CAGGGAGU | 9080 | ACUCCCUG GCCGAAAGGCGAGUGAGGUCU UUUUGCUG | 20630 |
| 4179 | AGCAGGGA G UCUGUGGC | 9081 | GCCACAGA GCCGAAAGGCGAGUGAGGUCU UCCCUGCU | 20631 |
| 4183 | GGGAGUCU G UGGCAUCU | 9082 | AGAUGCCA GCCGAAAGGCGAGUGAGGUCU AGACUCCC | 20632 |
| 4186 | AGUCUGUG G CAUCUGAA | 9083 | UUCAGAUG GCCGAAAGGCGAGUGAGGUCU CACAGACU | 20633 |
| 4196 | AUCUGAAG G CUCAAACC | 9084 | GGUUUGAG GCCGAAAGGCGAGUGAGGUCU CUUCAGAU | 20634 |
| 4211 | CCAGACAA G CGGCUACC | 9087 | GGUAGCCG GCCGAAAGGCGAGUGAGGUCU UUGUCUGG | 20635 |
| 4214 | GACAAGCG G CUACCAGU | 9088 | ACUGGUAG GCCGAAAGGCGAGUGAGGUCU CGCUUGUC | 20636 |
| 4221 | GGCUACCA G UCCGGAUA | 9089 | UAUCCGGA GCCGAAAGGCGAGUGAGGUCU UGGUAGCC | 20637 |
| 4255 | ACACCACC G UGUACUCC | 9094 | GGAGUACA GCCGAAAGGCGAGUGAGGUCU GGUGGUGU | 20638 |
| 4257 | ACCACCGU G UACUCCAG | 9095 | CUGGAGUA GCCGAAAGGCGAGUGAGGUCU ACGGUGGU | 20639 |
| 4265 | GUACUCCA G UGAGGAAG | 9096 | CUUCCUCA GCCGAAAGGCGAGUGAGGUCU UGGAGUAC | 20640 |
| 4273 | GUGAGGAA G CAGAACUU | 9097 | AAGUUCUG GCCGAAAGGCGAGUGAGGUCU UUCCUCAC | 20641 |
| 4287 | CUUUUAAA G CUGAUAGA | 9099 | UCUAUCAG GCCGAAAGGCGAGUGAGGUCU UUUAAAAG | 20642 |
| 4303 | AGAUUGGA G UGCAAACC | 9102 | GGUUUGCA GCCGAAAGGCGAGUGAGGUCU UCCAAUCU | 20643 |
| 4305 | AUUGGAGU G CAAACCGG | 9103 | CCGGUUUG GCCGAAAGGCGAGUGAGGUCU ACUCCAAU | 20644 |
| 4313 | GCAAACCG G UAGCACAG | 9105 | CUGUGCUA GCCGAAAGGCGAGUGAGGUCU CGGUUUGC | 20645 |
| 4316 | AACCGGUA G CACAGCCC | 9106 | GGGCUGUG GCCGAAAGGCGAGUGAGGUCU UACCGGUU | 20646 |
| 4321 | GUAGCACA G CCCAGAUU | 9107 | AAUCUGGG GCCGAAAGGCGAGUGAGGUCU UGUGCUAC | 20647 |
| 4335 | AUUCUCCA G CCUGACUC | 9109 | GAGUCAGG GCCGAAAGGCGAGUGAGGUCU UGGAGAAU | 20648 |
| 4358 | CACACUGA G CUCUCCUC | 9112 | GAGGAGAG GCCGAAAGGCGAGUGAGGUCU UCAGUGUG | 20649 |
| 4369 | CUCCUCCU G UUUAAAAG | 9113 | CUUUUAAA GCCGAAAGGCGAGUGAGGUCU AGGAGGAG | 20650 |
| 4381 | AAAAGGAA G CAUCCACA | 9114 | UGUGGAUG GCCGAAAGGCGAGUGAGGUCU UUCCUUUU | 20651 |
| 4417 | CAUGAGAG G UCUGCUCA | 9117 | UGAGCAGA GCCGAAAGGCGAGUGAGGUCU CUCUCAUG | 20652 |
| 4421 | AGAGGUCU G CUCAGAUU | 9118 | AAUCUGAG GCCGAAAGGCGAGUGAGGUCU AGACCUCU | 20653 |
| 4435 | AUUUUGAA G UGUUGUUC | 9120 | GAACAACA GCCGAAAGGCGAGUGAGGUCU UUCAAAAU | 20654 |
| 4437 | UUUGAAGU G UUGUUCUU | 9121 | AAGAACAA GCCGAAAGGCGAGUGAGGUCU ACUUCAAA | 20655 |
| 4440 | GAAGUGUU G UUCUUUCC | 9122 | GGAAAGAA GCCGAAAGGCGAGUGAGGUCU AACACUUC | 20656 |
| 4453 | UUCCACCA G CAGGAAGU | 9123 | ACUUCCUG GCCGAAAGGCGAGUGAGGUCU UGGUGGAA | 20657 |
| 4460 | AGCAGGAA G UAGCCGCA | 9124 | UGCGGCUA GCCGAAAGGCGAGUGAGGUCU UUCCUGCU | 20658 |
| 4463 | AGGAAGUA G CCGCAUUU | 9125 | AAAUGCGG GCCGAAAGGCGAGUGAGGUCU UACUUCCU | 20659 |
| 4466 | AAGUAGCC G CAUUUGAU | 9126 | AUCAAAUG GCCGAAAGGCGAGUGAGGUCU GGCUACUU | 20660 |
| 4509 | CUCGGACU G CAGGGAGC | 9132 | GCUCCCUG GCCGAAAGGCGAGUGAGGUCU AGUCCGAG | 20661 |
| 4516 | UGCAGGGA G CCAGUCUU | 9133 | AAGACUGG GCCGAAAGGCGAGUGAGGUCU UCCCUGCA | 20662 |
| 4520 | GGGAGCCA G UCUUCUAG | 9134 | CUAGAAGA GCCGAAAGGCGAGUGAGGUCU UGGCUCCC | 20663 |
| 4529 | UCUUCUAG G CAUAUCCU | 9135 | AGGAUAUG GCCGAAAGGCGAGUGAGGUCU CUAGAAGA | 20664 |
| 4545 | UGGAAGAG G CUUGUGAC | 9138 | GUCACAAG GCCGAAAGGCGAGUGAGGUCU CUCUUCCA | 20665 |
| 4549 | AGAGGCUU G UGACCCAA | 9139 | UUGGGUCA GCCGAAAGGCGAGUGAGGUCU AAGCCUCU | 20666 |
| 4562 | CCAAGAAU G UGUCUGUG | 9142 | CACAGACA GCCGAAAGGCGAGUGAGGUCU AUUCUUGG | 20667 |
| 4564 | AAGAAUGU G UCUGUGUC | 9143 | GACACAGA GCCGAAAGGCGAGUGAGGUCU ACAUUCUU | 20668 |
| 4566 | AUGUGUCU G UGUCUUCU | 9144 | AGAAGACA GCCGAAAGGCGAGUGAGGUCU AGACACAU | 20669 |
| 4570 | GUGUCUGU G UCUUCUCC | 9145 | GGAGAAGA GCCGAAAGGCGAGUGAGGUCU ACAGACAC | 20670 |
| 4581 | UUCUCCCA G UGUUGACC | 9146 | GGUCAACA GCCGAAAGGCGAGUGAGGUCU UGGGAGAA | 20671 |
| 4583 | CUCCCAGU G UUGACCUG | 9147 | CAGGUCAA GCCGAAAGGCGAGUGAGGUCU ACUGGGAG | 20672 |
| 4618 | UUUAAAAA G CAUUAUCA | 9152 | UGAUAAUG GCCGAAAGGCGAGUGAGGUCU UUUUUAAA | 20673 |
| 4628 | AUUAUCAU G CCCCUGCU | 9156 | AGCAGGGG GCCGAAAGGCGAGUGAGGUCU AUGAUAAU | 20674 |
| 4634 | AUGCCCCU G CUGCGGGU | 9157 | ACCCGCAG GCCGAAAGGCGAGUGAGGUCU AGGGGCAU | 20675 |
| 4637 | CCCCUGCU G CGGGUCUC | 9158 | GAGACCCG GCCGAAAGGCGAGUGAGGUCU AGCAGGGG | 20676 |
| 4641 | UGCUGCGG G UCUCACCA | 9159 | UGGUGAGA GCCGAAAGGCGAGUGAGGUCU CCGCAGCA | 20677 |
| 4653 | CACCAUGG G UUUAGAAC | 9162 | GUUCUAAA GCCGAAAGGCGAGUGAGGUCU CCAUGGUG | 20678 |
| 4667 | AACAAAGA G CUUCAAGC | 9164 | GCUUGAAG GCCGAAAGGCGAGUGAGGUCU UCUUUGUU | 20679 |
| 4674 | AGCUUCAA G CAAUGGCC | 9165 | GGCCAUUG GCCGAAAGGCGAGUGAGGUCU UUGAAGCU | 20680 |
| 4680 | AAGCAAUG G CCCCAUCC | 9167 | GGAUGGGG GCCGAAAGGCGAGUGAGGUCU CAUUGCUU | 20681 |
| 4697 | UCAAAGAA G UAGCAGUA | 9169 | UACUGCUA GCCGAAAGGCGAGUGAGGUCU UUCUUUGA | 20682 |
| 4700 | AAGAAGUA G CAGUACCU | 9170 | AGGUACUG GCCGAAAGGCGAGUGAGGUCU UACUUCUU | 20683 |
| 4703 | AAGUAGCA G UACCUGGG | 9171 | CCCAGGUA GCCGAAAGGCGAGUGAGGUCU UGCUACUU | 20684 |
| 4714 | CCUGGGGA G CUGACACU | 9173 | AGUGUCAG GCCGAAAGGCGAGUGAGGUCU UCCCCAGG | 20685 |
| 4726 | ACACUUCU G UAAAACUA | 9176 | UAGUUUUA GCCGAAAGGCGAGUGAGGUCU AGAAGUGU | 20686 |
| 4748 | UAAACCAG G CAACGUAA | 9180 | UUACGUUG GCCGAAAGGCGAGUGAGGUCU CUGGUUUA | 20687 |
| 4753 | CAGGCAAC G UAAGUGUU | 9182 | AACACUUA GCCGAAAGGCGAGUGAGGUCU GUUGCCUG | 20688 |
| 4757 | CAACGUAA G UGUUCGAG | 9183 | CUCGAACA GCCGAAAGGCGAGUGAGGUCU UUACGUUG | 20689 |
| 4759 | ACGUAAGU G UUCGAGGU | 9184 | ACCUCGAA GCCGAAAGGCGAGUGAGGUCU ACUUACGU | 20690 |
| 4766 | UGUUCGAG G UGUUGAAG | 9185 | CUUCAACA GCCGAAAGGCGAGUGAGGUCU CUCGAACA | 20691 |
| 4768 | UUCGAGGU G UUGAAGAU | 9186 | AUCUUCAA GCCGAAAGGCGAGUGAGGUCU ACCUCGAA | 20692 |
| 4788 | AAGGAUUU G CAGGGCUG | 9189 | CAGCCCUG GCCGAAAGGCGAGUGAGGUCU AAAUCCUU | 20693 |
| 4793 | UUUGCAGG G CUGAGUCU | 9190 | AGACUCAG GCCGAAAGGCGAGUGAGGUCU CCUGCAAA | 20694 |
| 4798 | AGGGCUGA G UCUAUCCA | 9191 | UGGAUAGA GCCGAAAGGCGAGUGAGGUCU UCAGCCCU | 20695 |
| 4811 | UCCAAGAG G CUUUGUUU | 9193 | AAACAAAG GCCGAAAGGCGAGUGAGGUCU CUCUUGGA | 20696 |
| 4816 | GAGGCUUU G UUUAGGAC | 9194 | GUCCUAAA GCCGAAAGGCGAGUGAGGUCU AAAGCCUC | 20697 |
| 4825 | UUEUGGAC G UGGGUCCC | 9196 | GGGACCCA GCCGAAAGGCGAGUGAGGUCU GUCCUAAA | 20698 |
| 4829 | GGACGUGG G UCCCAAGC | 9197 | GCUUGGGA GCCGAAAGGCGAGUGAGGUCU CCACGUCC | 20699 |
| 4836 | GGUCCCAA G CCAAGCCU | 9198 | AGGCUUGG GCCGAAAGGCGAGUGAGGUCU UUGGGACC | 20700 |
| 4841 | CAAGCCAA G CCUUAAGU | 9199 | ACUUAAGG GCCGAAAGGCGAGUGAGGUCU UUGGCUUG | 20701 |
| 4848 | AGCCUUAA G UGUGGAAU | 9200 | AUUCCACA GCCGAAAGGCGAGUGAGGUCU UUAAGGCU | 20702 |
| 4850 | CCUUAAGU G UGGAAUUC | 9201 | GAAUUCCA GCCGAAAGGCGAGUGAGGUCU ACUUAAGG | 20703 |
| 4883 | AGACUAAC G UUACCUUG | 9207 | CAAGGUAA GCCGAAAGGCGAGUGAGGUCU GUUAGUCU | 20704 |
| 4891 | GUUACCUU G CUUUGGAG | 9209 | CUCCAAAG GCCGAAAGGCGAGUGAGGUCU AAGGUAAC | 20705 |
| 4901 | UUUGGAGA G UACUGGAG | 9210 | CUCCAGUA GCCGAAAGGCGAGUGAGGUCU UCUCCAAA | 20706 |
| 4909 | GUACUGGA G CCUGCAAA | 9212 | UUUGCAGG GCCGAAAGGCGAGUGAGGUCU UCCAGUAC | 20707 |
| 4913 | UGGAGCCU G CAAAUGCA | 9213 | UGCAUUUG GCCGAAAGGCGAGUGAGGUCU AGGCUCCA | 20708 |
| 4919 | CUGCAAAU G CAUUGUGU | 9215 | ACACAAUG GCCGAAAGGCGAGUGAGGUCU AUUUGCAG | 20709 |
| 4924 | AAUGCAUU G UGUUUGCU | 9217 | AGCAAACA GCCGAAAGGCGAGUGAGGUCU AAUGCAUU | 20710 |
| 4926 | UGCAUUGU G UUUGCUCU | 9218 | AGAGCAAA GCCGAAAGGCGAGUGAGGUCU ACAAUGCA | 20711 |
| 4930 | UUGUGUUU G CUCUGGUG | 9219 | CACCAGAG GCCGAAAGGCGAGUGAGGUCU AAACACAA | 20712 |
| 4936 | UUGCUCUG G UGGAGGUG | 9220 | CACCUCCA GCCGAAAGGCGAGUGAGGUCU CAGAGCAA | 20713 |
| 4942 | UGGUGGAG G UGGGCAUG | 9221 | CAUGCCCA GCCGAAAGGCGAGUGAGGUCU CUCCACCA | 20714 |
| 4946 | GGAGGUGG G CAUGGGGU | 9222 | ACCCCAUG GCCGAAAGGCGAGUGAGGUCU CCACCUCC | 20715 |
| 4953 | GGCAUGGG G UCUGUUCU | 9224 | AGAACAGA GCCGAAAGGCGAGUGAGGUCU CCCAUGCC | 20716 |
| 4957 | UGGGGUCU G UUCUGAAA | 9225 | UUUCAGAA GCCGAAAGGCGAGUGAGGUCU AGACCCCA | 20717 |
| 4967 | UCUGAAAU G UAAAGGGU | 9227 | ACCCUUUA GCCGAAAGGCGAGUGAGGUCU AUUUCAGA | 20718 |
| 4974 | UGUAAAGG G UUCAGACG | 9228 | CGUCUGAA GCCGAAAGGCGAGUGAGGUCU CCUUUACA | 20719 |
| 4985 | CAGACGGG G UUUCUGGU | 9230 | ACCAGAAA GCCGAAAGGCGAGUGAGGUCU CCCGUCUG | 20720 |
| 4992 | GGUUUCUG G UUUUAGAA | 9231 | UUCUAAAA GCCGAAAGGCGAGUGAGGUCU CAGAAACC | 20721 |
| 5002 | UUUAGAAG G UUGCGUGU | 9232 | ACACGCAA GCCGAAAGGCGAGUGAGGUCU CUUCUAAA | 20722 |
| 5005 | AGAAGGUU G CGUGUUCU | 9233 | AGAACACG GCCGAAAGGCGAGUGAGGUCU AACCUUCU | 20723 |
| 5007 | AAGGUUGC G UGUUCUUC | 9234 | GAAGAACA GCCGAAAGGCGAGUGAGGUCU GCAACCUU | 20724 |
| 5009 | GGUUGCGU G UUCUUCGA | 9235 | UCGAAGAA GCCGAAAGGCGAGUGAGGUCU ACGCAACC | 20725 |
| 5018 | UUCUUCGA G UUGGGCUA | 9236 | UACCCCAA GCCGAAAGGCGAGUGAGGUCU UCGAAGAA | 20726 |
| 5023 | CGAGUUGG G CUAAAGUA | 9237 | UACUUUAG GCCGAAAGGCGAGUGAGGUCU CCAACUCG | 20727 |
| 5029 | GGGCUAAA G UAGAGUUC | 9238 | GAACUCUA GCCGAAAGGCGAGUGAGGUCU UUUAGCCC | 20728 |
| 5034 | AAAGUAGA G UUCGUUGU | 9239 | ACAACGAA GCCGAAAGGCGAGUGAGGUCU UCUACUUU | 20729 |
| 5038 | UAGAGUUC G UUGUGCUG | 9240 | CAGCACAA GCCGAAAGGCGAGUGAGGUCU GAACUCUA | 20730 |
| 5041 | AGUUCGUU G UGCUGUUU | 9241 | AAACAGCA GCCGAAAGGCGAGUGAGGUCU AACGAACU | 20731 |
| 5043 | UUCGUUGU G CUGUUUCU | 9242 | AGAAACAG GCCGAAAGGCGAGUGAGGUCU ACAACGAA | 20732 |
| 5046 | GUUGUGCU G UUUCUGAC | 9243 | GUCAGAAA GCCGAAAGGCGAGUGAGGUCU AGCACAAC | 20733 |
| 5066 | UAAUGAGA G UUCCUUCC | 9246 | GGAAGGAA GCCGAAAGGCGAGUGAGGUCU UCUCAUUA | 20734 |
| 5080 | UCCAGACC G UUAGCUGU | 9248 | ACAGCUAA GCCGAAAGGCGAGUGAGGUCU GGUCUGGA | 20735 |
| 5084 | GACCGUUA G CUGUCUCC | 9249 | GGAGACAG GCCGAAAGGCGAGUGAGGUCU UAACGGUC | 20736 |
| 5087 | CGUUAGCU G UCUCCUUG | 9250 | CAAGGAGA GCCGAAAGGCGAGUGAGGUCU AGCUAACG | 20737 |
| 5095 | GUCUCCUU G CCAAGCCC | 9251 | GGGCUUGG GCCGAAAGGCGAGUGAGGUCU AAGGAGAC | 20738 |
| 5100 | CUUGCCAA G CCCCAGGA | 9252 | UCCUGGGG GCCGAAAGGCGAGUGAGGUCU UUGGCAAG | 20739 |
| 5119 | AAAAUGAU G CAGCUCUG | 9255 | CAGAGCUG GCCGAAAGGCGAGUGAGGUCU AUCAUUUU | 20740 |
| 5122 | AUGAUGCA G CUCUGGCU | 9256 | AGCCAGAG GCCGAAAGGCGAGUGAGGUCU UGCAUCAU | 20741 |
| 5128 | CAGCUCUG G CUCCUUGU | 9257 | ACAAGGAG GCCGAAAGGCGAGUGAGGUCU CAGAGCUG | 20742 |
| 5135 | GGCUCCUU G UCUCCCAG | 9258 | CUGGGAGA GCCGAAAGGCGAGUGAGGUCU AAGGAGCC | 20743 |
| 5144 | UCUCCCAG G CUGAUCCU | 9259 | AGGAUCAG GCCGAAAGGCGAGUGAGGUCU CUGGGAGA | 20744 |
| 5185 | GACAUUCA G CUCAAGGC | 9267 | GCCUUGAG GCCGAAAGGCGAGUGAGGUCU UGAAUGUC | 20745 |
| 5192 | AGCUCAAG G CUCCCUGC | 9268 | GCAGGGAG GCCGAAAGGCGAGUGAGGUCU CUUGAGCU | 20746 |
| 5199 | GGCUCCCU G CCGUGUUG | 9269 | CAACACGG GCCGAAAGGCGAGUGAGGUCU AGGGAGCC | 20747 |
| 5202 | UCCCUGCC G UGUUGAAG | 9270 | CUUCAACA GCCGAAAGGCGAGUGAGGUCU GGCAGGGA | 20748 |
| 5204 | CCUGCCGU G UUGAAGAG | 9271 | CUCUUCAA GCCGAAAGGCGAGUGAGGUCU ACGGCAGG | 20749 |
| 5212 | GUUGAAGA G UUCUGACU | 9272 | AGUCAGAA GCCGAAAGGCGAGUGAGGUCU UCUUCAAC | 20750 |
| 5221 | UUCUGACU G CACAAACC | 9274 | GGUUUGUG GCCGAAAGGCGAGUGAGGUCU AGUCAGAA | 20751 |
| 5231 | ACAAACCA G CUUCUGGU | 9277 | ACCAGAAG GCCGAAAGGCGAGUGAGGUCU UGGUUUGU | 20752 |
| 5238 | AGCUUCUG G UUUCUUCU | 9278 | AGAAGAAA GCCGAAAGGCGAGUGAGGUCU CAGAAGCU | 20753 |
| 5268 | UCAUAUCU G UCCUGAUG | 9284 | CAUCAGGA GCCGAAAGGCGAGUGAGGUCU AGAUAUGA | 20754 |
| 5276 | GUCCUGAU G UGAUAUGU | 9286 | ACAUAUCA GCCGAAAGGCGAGUGAGGUCU AUCAGGAC | 20755 |
| 5283 | UGUGAUAU G UCUGAGAC | 9289 | GUCUCAGA GCCGAAAGGCGAGUGAGGUCU AUAUCACA | 20756 |
| 5297 | GACUGAAU G CGGGAGGU | 9292 | ACCUCCCG GCCGAAAGGCGAGUGAGGUCU AUUCAGUC | 20757 |
| 5304 | UGCGGGAG G UUCAAUGU | 9293 | ACAUUGAA GCCGAAAGGCGAGUGAGGUCU CUCCCGCA | 20758 |
| 5311 | GGUUCAAU G UGAAGCUG | 9295 | CAGCUUCA GCCGAAAGGCGAGUGAGGUCU AUUGAACC | 20759 |
| 5316 | AAUGUGAA G CUGUGUGU | 9296 | ACACACAG GCCGAAAGGCGAGUGAGGUCU UUCACAUU | 20760 |
| 5319 | GUGAAGCU G UGUGUGGU | 9297 | ACCACACA GCCGAAAGGCGAGUGAGGUCU AGCUUCAC | 20761 |
| 5321 | GAAGCUGU G UGUGGUGU | 9298 | ACACCACA GCCGAAAGGCGAGUGAGGUCU ACAGCUUC | 20762 |
| 5323 | AGCUGUGU G UGGUGUCA | 9299 | UGACACCA GCCGAAAGGCGAGUGAGGUCU ACACAGCU | 20763 |
| 5326 | UGUGUGUG G UGUCAAAG | 9300 | CUUUGACA GCCGAAAGGCGAGUGAGGUCU CACACACA | 20764 |
| 5329 | UGUGUGGU G UCAAAGUU | 9301 | AACUUUGA GCCGAAAGGCGAGUGAGGUCU ACCACACA | 20765 |
| 5334 | GUGUCAAA G UUUCAGGA | 9302 | UCCUGAAA GCCGAAAGGCGAGUGAGGUCU UUUGACAC | 20766 |
| 5359 | ACCCUUUU G UUCUUCCC | 9305 | GGGAAGAA GCCGAAAGGCGAGUGAGGUCU AAAAGGGU | 20767 |
| 5371 | UUCCCCCU G UCCCCAAC | 9306 | GUUGGGGA GCCGAAAGGCGAGUGAGGUCU AGGGGGAA | 20768 |
| 5393 | CUCACCCC G CAACCCAU | 9310 | AUGGGUUG GCCGAAAGGCGAGUGAGGUCU GGGGUGAG | 20769 |
| 5404 | ACCCAUCA G UAUUUUAG | 9313 | CUAAAAUA GCCGAAAGGCGAGUGAGGUCU UGAUGGGU | 20770 |
| 5412 | GUAUUUUA G UUAUUUGG | 9315 | CCAAAUAA GCCGAAAGGCGAGUGAGGUCU UAAAAUAC | 20771 |
| 5420 | GUUAUUUG G CCUCUACU | 9317 | AGUAGAGG GCCGAAAGGCGAGUGAGGUCU CAAAUAAC | 20772 |
| 5432 | CUACUCCA G UAAACCUG | 9319 | CAGGUUUA GCCGAAAGGCGAGUGAGGUCU UGGAGUAG | 20773 |
| 5446 | CUGAUUGG G UUUGUUCA | 9322 | UGAACAAA GCCGAAAGGCGAGUGAGGUCU CCAAUCAG | 20774 |
| 5450 | UUGGGUUU G UUCACUCU | 9323 | AGAGUGAA GCCGAAAGGCGAGUGAGGUCU AAACCCAA | 20775 |
| 5473 | GAUUAUUA G CCAGACUU | 9326 | AAGUCUGG GCCGAAAGGCGAGUGAGGUCU UAAUAAUC | 20776 |
| 5497 | AUUUUAUA G CCCAAAUU | 9333 | AAUUUGGG GCCGAAAGGCGAGUGAGGUCU UAUAAAAU | 20777 |
| 5518 | CAUCUAUU G UAUUAUUU | 9339 | AAAUAAUA GCCGAAAGGCGAGUGAGGUCU AAUAGAUG | 20778 |
| 5545 | CAUAUAGA G CUAUUUCU | 9346 | AGAAAUAG GCCGAAAGGCGAGUGAGGUCU UCUAUAUG | 20779 |
| 5564 | UGAUUUUU G CCCUUGUU | 9350 | AACAAGGG GCCGAAAGGCGAGUGAGGUCU AAAAAUCA | 20780 |
| 5570 | UUGCCCUU G UUCUGUCC | 9351 | GGACAGAA GCCGAAAGGCGAGUGAGGUCU AAGGGCAA | 20781 |
| 5575 | CUUGUUCU G UCCUUUUU | 9352 | AAAAAGGA GCCGAAAGGCGAGUGAGGUCU AGAACAAG | 20782 |
| 5599 | AAGAAAAU G UGUUUUUU | 9354 | AAAAAACA GCCGAAAGGCGAGUGAGGUCU AUUUUCUU | 20783 |
| 5601 | GAAAAUGU G UUUUUUGU | 9355 | ACAAAAAA GCCGAAAGGCGAGUGAGGUCU ACAUUUUC | 20784 |
| 5608 | UGUUUUUU G UUUGGUAC | 9356 | GUACCAAA GCCGAAAGGCGAGUGAGGUCU AAAAAACA | 20785 |
| 5613 | UUUGUUUG G UACCAUAG | 9357 | CUAUGGUA GCCGAAAGGCGAGUGAGGUCU CAAACAAA | 20786 |
| 5621 | GUACCAUA G UGUGAAAU | 9360 | AUUUCACA GCCGAAAGGCGAGUGAGGUCU UAUGGUAC | 20787 |
| 5623 | ACCAUAGU G UGAAAUGC | 9361 | GCAUUUCA GCCGAAAGGCGAGUGAGGUCU ACUAUGGU | 20788 |
| 5630 | UGUGAAAU G CUGGGAAC | 9363 | GUUCCCAG GCCGAAAGGCGAGUGAGGUCU AUUUCACA | 20789 |
| 5655 | UAAGACAU G CUAUGGCA | 9370 | UGCCAUAG GCCGAAAGGCGAGUGAGGUCU AUGUCUCA | 20790 |
| 5661 | AUGCUAUG G CACAUAUA | 9372 | UAUAUGUG GCCGAAAGGCGAGUGAGGUCU CAUAGCAU | 20791 |
| 5676 | UAUUUAUA G UCUGUCCA | 9378 | UAAACAGA GCCGAAAGGCGAGUGAGGUCU UAUAAAUA | 20792 |
| 5680 | UAUAGUCU G UUUAUGUA | 9379 | UACAUAAA GCCGAAAGGCGAGUGAGGUCU AGACUAUA | 20793 |
| 5686 | CUGUUUAU G UAGAAACA | 9381 | UGUUUCUA GCCGAAAGGCGAGUGAGGUCU AUAAACAG | 20794 |
| 5698 | AAACAAAU G UAAUAUAU | 9384 | AUAUAUUA GCCGAAAGGCGAGUGAGGUCU AUUUGUUU | 20795 |
| 5711 | AUAUUAAA G CCUUAUAU | 9388 | AUAUAAGG GCCGAAAGGCGAGUGAGGUCU UUUAAUAU | 20796 |
| 5732 | UGAACUUU G UACUAUUC | 9394 | GAAUAGUA GCCGAAAGGCGAGUGAGGUCU AAAGUUCA | 20797 |
| 5748 | CACAUUUU G UAUCAGUA | 9399 | UACUGAUA GCCGAAAGGCGAGUGAGGUCU AAAAUGUG | 20798 |
| 5754 | UUGUAUCA G UAUUAUGU | 9401 | ACAUAAUA GCCGAAAGGCGAGUGAGGUCU UGAUACAA | 20799 |
| 5761 | AGUAUUAU G UAGCAUAA | 9404 | UUAUGCUA GCCGAAAGGCGAGUGAGGUCU AUAAUACU | 20800 |
| 5764 | AUUAUGUA G CAUAACAA | 9405 | UUGUUAUG GCCGAAAGGCGAGUGAGGUCU UACAUAAU | 20801 |
| 5775 | UAACAAAG G UCAUAAUG | 9408 | CAUUAUGA GCCGAAAGGCGAGUGAGGUCU CUUUGUUA | 20802 |
| 5783 | GUCAUAAU G CUUUCAGC | 9411 | GCUGAAAG GCCGAAAGGCGAGUGAGGUCU AUCAUGAC | 20803 |
| 5790 | UGCUUUCA G CAAUUGAU | 9412 | AUCAAUUG GCCGAAAGGCGAGUGAGGUCU UGAAAGCA | 20804 |
| 5799 | CAAUUGAU G UCAUUUUA | 9415 | UAAAAUGA GCCGAAAGGCGAGUGAGGUCU AUCAAUUG | 20805 |

Input Sequence = AF035121.
Cut Site = G/Y
Arm Length = 8.
Core Sequence = GCcgaaagGCGaGuCaaGGuCu
AF035121 (Homo sapiens KDR/flk-1 protein mRNA, complete cds.; Acc# AF035121; 5830 bp)

1. A compound having Formula II: (SEQ ID NO: 13488)
5′-uₛaₛcₛ aₛau ucU GAu Gag gcg aaa gcc Gaa Aag aca aB-3′
wherein each a is 2′-O-methyl adenosine nucleotide, each g is a 2′-O-methyl guanosine nucleotide, each c is a 2′-O-methyl cytidine nucleotide, each u is a 2′-O-methyl uridine nucleotide, each A is adenosine, each G is guanosine, each s individually represents a phosphorothioate internucleotide linkage, U is 2′-deoxy-2′-C-allyl uridine, and B is an inverted deoxyabasic moiety.

2. A composition comprising the compound of claim 1 and a pharmaceutically acceptable carrier or diluent.

3. A method of administering to a cell the compound of claim 1 comprising contacting said cell with the compound under conditions suitable for said administration.

4. The method of claim 3, wherein said cell is a mammalian cell.

5. The method of claim 3, wherein said cell is a human cell.

6. The method of claim 3, wherein said administration is in the presence of a delivery reagent.

7. The method of claim 6, wherein said delivery reagent is a lipid.

8. The method of claim 7, wherein said lipid is a cationic lipid.

9. The method of claim 7, wherein said lipid is a phospholipid.

10. The method of claim 6, wherein said delivery reagent is a liposome.

11. A method of administering to a cell the compound of claim 1 in conjunction with one or more other known drugs comprising contacting said cell with the compound and the other known drug under conditions suitable for said administration.

12. A method of inhibiting ocular angiogenesis in a patient comprising the step of contacting said patient with the compound of claim 1 under conditions suitable for said inhibition.

13. The method of claim 11, wherein said angiogenesis is associated with diabetic retinopathy.

14. The method of claim 11, wherein said angiogenesis is associated with age related diabetic retinopathy.

15. A method of cleaving RNA comprising a sequence of KDR RNA comprising contacting the compound of claim 1 with said RNA under conditions suitable for the cleavage of said RNA.

16. The method of claim 14, wherein said cleavage is carried out in the presence of a divalent cation.

17. The method of claim 15, wherein said divalent cation is Mg2+.

18. A method of administering to a mammal the compound of claim 1 comprising contacting said mammal with the compound under conditions suitable for said administration.

19. The method of claim 17, wherein said mammal is a human.

20. The method of claim 17 wherein said administration is in the presence of a delivery reagent.

21. The method of claim 17, wherein said delivery reagent is a lipid.

22. The method of claim 20, wherein said lipid is a cationic lipid.

23. The method of claim 20, wherein said lipid is a phospholipid.

24. The method of claim 19, wherein said delivery reagent is a liposome.

The application's sequence listing, which the Patent Office published only in electronic form, follows.

SEQUENCE LISTING (20822 sequences)

SEQ ID NO: 1 - RNA, 17 nt, Homo sapiens
cggacacuccucucggc

SEQ ID NO: 2 - RNA, 17 nt, Homo sapiens
acacuccucucggcucc

SEQ ID NO: 3 - RNA, 17 nt, Homo sapiens
acuccucucggcuccuc

SEQ ID NO: 4 - RNA, 17 nt, Homo sapiens
ucucggcuccuccccgg

SEQ ID NO: 5 - RNA, 17 nt, Homo sapiens
cggcuccuccccggcag

SEQ ID NO: 6 - RNA, 17 nt, Homo sapiens
cggcggcucggagcggg

SEQ ID NO: 7 - RNA, 17 nt, Homo sapiens
agcgggcuccggggcuc

SEQ ID NO: 8 - RNA, 17 nt, Homo sapiens
ccggggcucgggugcag

SEQ ID NO: 9 - RNA, 17 nt, Homo sapiens
gcgaggauuacccgggg

SEQ ID NO: 10 - RNA, 17 nt, Homo sapiens
cgaggauuacccgggga

SEQ ID NO: 11 - RNA, 17 nt, Homo sapiens
gaagugguugucuccug

SEQ ID NO: 12 - RNA, 17 nt, Homo sapiens
gugguugucuccuggcu

SEQ ID NO: 13 - RNA, 17 nt, Homo sapiens
gguugucuccuggcugg

SEQ ID NO: 14 - RNA, 17 nt, Homo sapiens
cgggcgcucagggcgcg

SEQ ID NO: 15 - RNA, 17 nt, Homo sapiens
gacggacucuggcggcc

SEQ ID NO: 16 - RNA, 17 nt, Homo sapiens
ggccgggucguuggccg

SEQ ID NO: 17 - RNA, 17 nt, Homo sapiens
cgggucguuggccgggg

SEQ ID NO: 18 - RNA, 17 nt, Homo sapiens
ggccgcgucgcgcucac

SEQ ID NO: 19 - RNA, 17 nt, Homo sapiens
gucgcgcucaccauggu

SEQ ID NO: 20 - RNA, 17 nt, Homo sapiens
accauggucagcuacug

SEQ ID NO: 21 - RNA, 17 nt, Homo sapiens
ggucagcuacugggaca

SEQ ID NO: 22 - RNA, 17 nt, Homo sapiens
accgggguccugcugug

SEQ ID NO: 23 - RNA, 17 nt, Homo sapiens
gcgcugcucagcugucu

SEQ ID NO: 24 - RNA, 17 nt, Homo sapiens
ucagcugucugcuucuc

SEQ ID NO: 25 - RNA, 17 nt, Homo sapiens
ugucugcuucucacagg

SEQ ID NO: 26 - RNA, 17 nt, Homo sapiens
gucugcuucucacagga

SEQ ID NO: 27 - RNA, 17 nt, Homo sapiens
cugcuucucacaggauc

SEQ ID NO: 28 - RNA, 17 nt, Homo sapiens
cacaggaucuaguucag

SEQ ID NO: 29 - RNA, 17 nt, Homo sapiens
caggaucuaguucaggu

SEQ ID NO: 30 - RNA, 17 nt, Homo sapiens
gaucuaguucagguuca

SEQ ID NO: 31 - RNA, 17 nt, Homo sapiens
aucuaguucagguucaa

SEQ ID NO: 32 - RNA, 17 nt, Homo sapiens
guucagguucaaaauua

SEQ ID NO: 33 - RNA, 17 nt, Homo sapiens
uucagguucaaaauuaa

SEQ ID NO: 34 - RNA, 17 nt, Homo sapiens
uucaaaauuaaaagauc

SEQ ID NO: 35 - RNA, 17 nt, Homo sapiens
ucaaaauuaaaagaucc

SEQ ID NO: 36 - RNA, 17 nt, Homo sapiens
uaaaagauccugaacug

SEQ ID NO: 37 - RNA, 17 nt, Homo sapiens
aacugaguuuaaaaggc

SEQ ID NO: 38 - RNA, 17 nt, Homo sapiens
acugaguuuaaaaggca

SEQ ID NO: 39 - RNA, 17 nt, Homo sapiens
cugaguuuaaaaggcac

SEQ ID NO: 40 - RNA, 17 nt, Homo sapiens
cagcacaucaugcaagc

SEQ ID NO: 41 - RNA, 17 nt, Homo sapiens
cacugcaucuccaaugc

SEQ ID NO: 42 - RNA, 17 nt, Homo sapiens
cugcaucuccaaugcag

SEQ ID NO: 43 - RNA, 17 nt, Homo sapiens
cagcccauaaauggucu

SEQ ID NO: 44 - RNA, 17 nt, Homo sapiens
uaaauggucuuugccug

SEQ ID NO: 45 - RNA, 17 nt, Homo sapiens
aauggucuuugccugaa

SEQ ID NO: 46 - RNA, 17 nt, Homo sapiens
auggucuuugccugaaa

SEQ ID NO: 47 - RNA, 17 nt, Homo sapiens
uggugaguaaggaaagc

SEQ ID NO: 48 - RNA, 17 nt, Homo sapiens
cugagcauaacuaaauc

SEQ ID NO: 49 - RNA, 17 nt, Homo sapiens
gcauaacuaaaucugcc

SEQ ID NO: 50 - RNA, 17 nt, Homo sapiens
aacuaaaucugccugug

SEQ ID NO: 51 - RNA, 17 nt, Homo sapiens
caaacaauucugcagua

SEQ ID NO: 52 - RNA, 17 nt, Homo sapiens
aaacaauucugcaguac

SEQ ID NO: 53 - RNA, 17 nt, Homo sapiens
ucugcaguacuuuaacc

SEQ ID NO: 54 - RNA, 17 nt, Homo sapiens
gcaguacuuuaaccuug

SEQ ID NO: 55 - RNA, 17 nt, Homo sapiens
caguacuuuaaccuuga

SEQ ID NO: 56 - RNA, 17 nt, Homo sapiens
aguacuuuaaccuugaa

SEQ ID NO: 57 - RNA, 17 nt, Homo sapiens
uuuaaccuugaacacag

SEQ ID NO: 58 - RNA, 17 nt, Homo sapiens
acacagcucaagcaaac

SEQ ID NO: 59 - RNA, 17 nt, Homo sapiens
cacuggcuucuacagcu

SEQ ID NO: 60 - RNA, 17 nt, Homo sapiens
acuggcuucuacagcug

SEQ ID NO: 61 - RNA, 17 nt, Homo sapiens
uggcuucuacagcugca

SEQ ID NO: 62 - RNA, 17 nt, Homo sapiens
cugcaaauaucuagcug

SEQ ID NO: 63 - RNA, 17 nt, Homo sapiens
gcaaauaucuagcugua

SEQ ID NO: 64 - RNA, 17 nt, Homo sapiens
aaauaucuagcuguacc

SEQ ID NO: 65 - RNA, 17 nt, Homo sapiens
cuagcuguaccuacuuc

SEQ ID NO: 66 - RNA, 17 nt, Homo sapiens
cuguaccuacuucaaag

SEQ ID NO: 67 - RNA, 17 nt, Homo sapiens
uaccuacuucaaagaag

SEQ ID NO: 68 - RNA, 17 nt, Homo sapiens
accuacuucaaagaaga

SEQ ID NO: 69 - RNA, 17 nt, Homo sapiens
aacagaaucugcaaucu

SEQ ID NO: 70 - RNA, 17 nt, Homo sapiens
ucugcaaucuauauauu

SEQ ID NO: 71 - RNA, 17 nt, Homo sapiens
ugcaaucuauauauuua

SEQ ID NO: 72 - RNA, 17 nt, Homo sapiens
caaucuauauauuuauu

SEQ ID NO: 73 - RNA, 17 nt, Homo sapiens
aucuauauauuuauuag

SEQ ID NO: 74 - RNA, 17 nt, Homo sapiens
cuauauauuuauuagug

SEQ ID NO: 75 - RNA, 17 nt, Homo sapiens
uauauauuuauuaguga

SEQ ID NO: 76 - RNA, 17 nt, Homo sapiens
auauauuuauuagugau

SEQ ID NO: 77 - RNA, 17 nt, Homo sapiens
auauuuauuagugauac

SEQ ID NO: 78 - RNA, 17 nt, Homo sapiens
uauuuauuagugauaca

SEQ ID NO: 79 - RNA, 17 nt, Homo sapiens
uuagugauacagguaga

SEQ ID NO: 80 - RNA, 17 nt, Homo sapiens
auacagguagaccuuuc

SEQ ID NO: 81 - RNA, 17 nt, Homo sapiens
guagaccuuucguagag

SEQ ID NO: 82 - RNA, 17 nt, Homo sapiens
uagaccuuucguagaga

SEQ ID NO: 83 - RNA, 17 nt, Homo sapiens
agaccuuucguagagau

SEQ ID NO: 84 - RNA, 17 nt, Homo sapiens
ccuuucguagagaugua

SEQ ID NO: 85 - RNA, 17 nt, Homo sapiens
agagauguacagugaaa

SEQ ID NO: 86 - RNA, 17 nt, Homo sapiens
agugaaauccccgaaau

SEQ ID NO: 87 - RNA, 17 nt, Homo sapiens
cccgaaauuauacacau

SEQ ID NO: 88 - RNA, 17 nt, Homo sapiens
ccgaaauuauacacaug

SEQ ID NO: 89 - RNA, 17 nt, Homo sapiens
gaaauuauacacaugac

SEQ ID NO: 90 - RNA, 17 nt, Homo sapiens
agggagcucgucauucc

SEQ ID NO: 91 - RNA, 17 nt, Homo sapiens
gagcucgucauucccug

SEQ ID NO: 92 - RNA, 17 nt, Homo sapiens
cucgucauucccugccg

SEQ ID NO: 93 - RNA, 17 nt, Homo sapiens
ucgucauucccugccgg

SEQ ID NO: 94 - RNA, 17 nt, Homo sapiens
ugccggguuacgucacc

SEQ ID NO: 95 - RNA, 17 nt, Homo sapiens
gccggguuacgucaccu

SEQ ID NO: 96 - RNA, 17 nt, Homo sapiens
gguuacgucaccuaaca

SEQ ID NO: 97 - RNA, 17 nt, Homo sapiens
cgucaccuaacaucacu

SEQ ID NO: 98 - RNA, 17 nt, Homo sapiens
ccuaacaucacuguuac

SEQ ID NO: 99 - RNA, 17 nt, Homo sapiens
aucacuguuacuuuaaa

SEQ ID NO: 100 - RNA, 17 nt, Homo sapiens
ucacuguuacuuuaaaa

SEQ ID NO: 101 - RNA, 17 nt, Homo sapiens
cuguuacuuuaaaaaag

SEQ ID NO: 102 - RNA, 17 nt, Homo sapiens
uguuacuuuaaaaaagu

SEQ ID NO: 103 - RNA, 17 nt, Homo sapiens
guuacuuuaaaaaaguu

SEQ ID NO: 104 - RNA, 17 nt, Homo sapiens
aaaaaaguuuccacuug

SEQ ID NO: 105 - RNA, 17 nt, Homo sapiens
aaaaaguuuccacuuga

SEQ ID NO: 106 - RNA, 17 nt, Homo sapiens
aaaaguuuccacuugac

SEQ ID NO: 107 - RNA, 17 nt, Homo sapiens
uuuccacuugacacuuu

SEQ ID NO: 108 - RNA, 17 nt, Homo sapiens
uugacacuuugaucccu

SEQ ID NO: 109 - RNA, 17 nt, Homo sapiens
ugacacuuugaucccug

SEQ ID NO: 110 - RNA, 17 nt, Homo sapiens
acuuugaucccugaugg

SEQ ID NO: 111 - RNA, 17 nt, Homo sapiens
aaacgcauaaucuggga

SEQ ID NO: 112 - RNA, 17 nt, Homo sapiens
cgcauaaucugggacag

SEQ ID NO: 113 - RNA, 17 nt, Homo sapiens
gggacaguagaaagggc

SEQ ID NO: 114 - RNA, 17 nt, Homo sapiens
aaagggcuucaucauau

SEQ ID NO: 115 - RNA, 17 nt, Homo sapiens
aagggcuucaucauauc

SEQ ID NO: 116 - RNA, 17 nt, Homo sapiens
ggcuucaucauaucaaa

SEQ ID NO: 117 - RNA, 17 nt, Homo sapiens
uucaucauaucaaaugc

SEQ ID NO: 118 - RNA, 17 nt, Homo sapiens
caucauaucaaaugcaa

SEQ ID NO: 119 - RNA, 17 nt, Homo sapiens
ugcaacguacaaagaaa

SEQ ID NO: 120 - RNA, 17 nt, Homo sapiens
aaagaaauagggcuucu

SEQ ID NO: 121 - RNA, 17 nt, Homo sapiens
auagggcuucugaccug

SEQ ID NO: 122 - RNA, 17 nt, Homo sapiens
uagggcuucugaccugu

SEQ ID NO: 123 - RNA, 17 nt, Homo sapiens
gcaacagucaaugggca

SEQ ID NO: 124 - RNA, 17 nt, Homo sapiens
augggcauuuguauaag

SEQ ID NO: 125 - RNA, 17 nt, Homo sapiens
ugggcauuuguauaaga

SEQ ID NO: 126 - RNA, 17 nt, Homo sapiens
gcauuuguauaagacaa

SEQ ID NO: 127 - RNA, 17 nt, Homo sapiens
auuuguauaagacaaac

SEQ ID NO: 128 - RNA, 17 nt, Homo sapiens
gacaaacuaucucacac

SEQ ID NO: 129 - RNA, 17 nt, Homo sapiens
caaacuaucucacacau

SEQ ID NO: 130 - RNA, 17 nt, Homo sapiens
aacuaucucacacaucg

SEQ ID NO: 131 - RNA, 17 nt, Homo sapiens
ucacacaucgacaaacc

SEQ ID NO: 132 - RNA, 17 nt, Homo sapiens
aaaccaauacaaucaua

SEQ ID NO: 133 - RNA, 17 nt, Homo sapiens
aauacaaucauagaugu

SEQ ID NO: 134 - RNA, 17 nt, Homo sapiens
acaaucauagaugucca

SEQ ID NO: 135 - RNA, 17 nt, Homo sapiens
auagauguccaaauaag

SEQ ID NO: 136 - RNA, 17 nt, Homo sapiens
guccaaauaagcacacc

SEQ ID NO: 137 - RNA, 17 nt, Homo sapiens
cgcccagucaaauuacu

SEQ ID NO: 138 - RNA, 17 nt, Homo sapiens
agucaaauuacuuagag

SEQ ID NO: 139 - RNA, 17 nt, Homo sapiens
gucaaauuacuuagagg

SEQ ID NO: 140 - RNA, 17 nt, Homo sapiens
aaauuacuuagaggcca

SEQ ID NO: 141 - RNA, 17 nt, Homo sapiens
aauuacuuagaggccau

SEQ ID NO: 142 - RNA, 17 nt, Homo sapiens
gaggccauacucuuguc

SEQ ID NO: 143 - RNA, 17 nt, Homo sapiens
gccauacucuuguccuc

SEQ ID NO: 144 - RNA, 17 nt, Homo sapiens
cauacucuuguccucaa

SEQ ID NO: 145 - RNA, 17 nt, Homo sapiens
acucuuguccucaauug

SEQ ID NO: 146 - RNA, 17 nt, Homo sapiens
cuuguccucaauuguac

SEQ ID NO: 147 - RNA, 17 nt, Homo sapiens
uccucaauuguacugcu

SEQ ID NO: 148 - RNA, 17 nt, Homo sapiens
ucaauuguacugcuacc

SEQ ID NO: 149 - RNA, 17 nt, Homo sapiens
guacugcuaccacuccc

SEQ ID NO: 150 - RNA, 17 nt, Homo sapiens
cuaccacucccuugaac

SEQ ID NO: 151 - RNA, 17 nt, Homo sapiens
cacucccuugaacacga

SEQ ID NO: 152 - RNA, 17 nt, Homo sapiens
acgagaguucaaaugac

SEQ ID NO: 153 - RNA, 17 nt, Homo sapiens
cgagaguucaaaugacc

SEQ ID NO: 154 - RNA, 17 nt, Homo sapiens
ccuggaguuacccugau

SEQ ID NO: 155 - RNA, 17 nt, Homo sapiens
cuggaguuacccugaug

SEQ ID NO: 156 - RNA, 17 nt, Homo sapiens
aaaaaaauaagagagcu

SEQ ID NO: 157 - RNA, 17 nt, Homo sapiens
agagagcuuccguaagg

SEQ ID NO: 158 - RNA, 17 nt, Homo sapiens
gagagcuuccguaaggc

SEQ ID NO: 159 - RNA, 17 nt, Homo sapiens
gcuuccguaaggcgacg

SEQ ID NO: 160 - RNA, 17 nt, Homo sapiens
cgacgaauugaccaaag

SEQ ID NO: 161 - RNA, 17 nt, Homo sapiens
aaagcaauucccaugcc

SEQ ID NO: 162 - RNA, 17 nt, Homo sapiens
aagcaauucccaugcca

SEQ ID NO: 163 - RNA, 17 nt, Homo sapiens
gccaacauauucuacag

SEQ ID NO: 164 - RNA, 17 nt, Homo sapiens
caacauauucuacagug

SEQ ID NO: 165 - RNA, 17 nt, Homo sapiens
aacauauucuacagugu

SEQ ID NO: 166 - RNA, 17 nt, Homo sapiens
cauauucuacaguguuc

SEQ ID NO: 167 - RNA, 17 nt, Homo sapiens
uacaguguucuuacuau

SEQ ID NO: 168 - RNA, 17 nt, Homo sapiens
acaguguucuuacuauu

SEQ ID NO: 169 - RNA, 17 nt, Homo sapiens
aguguucuuacuauuga

SEQ ID NO: 170 - RNA, 17 nt, Homo sapiens
guguucuuacuauugac

SEQ ID NO: 171 - RNA, 17 nt, Homo sapiens
uucuuacuauugacaaa

SEQ ID NO: 172 - RNA, 17 nt, Homo sapiens
cuuacuauugacaaaau

SEQ ID NO: 173 - RNA, 17 nt, Homo sapiens
aaaggacuuuauacuug

SEQ ID NO: 174 - RNA, 17 nt, Homo sapiens
aaggacuuuauacuugu

SEQ ID NO: 175 - RNA, 17 nt, Homo sapiens
aggacuuuauacuuguc

SEQ ID NO: 176 - RNA, 17 nt, Homo sapiens
gacuuuauacuugucgu

SEQ ID NO: 177 - RNA, 17 nt, Homo sapiens
uuuauacuugucgugua

SEQ ID NO: 178 - RNA, 17 nt, Homo sapiens
auacuugucguguaagg

SEQ ID NO: 179 - RNA, 17 nt, Homo sapiens
ugucguguaaggagugg

SEQ ID NO: 180 - RNA, 17 nt, Homo sapiens
uggaccaucauucaaau

SEQ ID NO: 181 - RNA, 17 nt, Homo sapiens
accaucauucaaaucug

SEQ ID NO: 182 - RNA, 17 nt, Homo sapiens
ccaucauucaaaucugu

SEQ ID NO: 183 - RNA, 17 nt, Homo sapiens
auucaaaucuguuaaca

SEQ ID NO: 184 - RNA, 17 nt, Homo sapiens
aaaucuguuaacaccuc

SEQ ID NO: 185 - RNA, 17 nt, Homo sapiens
aaucuguuaacaccuca

SEQ ID NO: 186 - RNA, 17 nt, Homo sapiens
uaacaccucagugcaua

SEQ ID NO: 187 - RNA, 17 nt, Homo sapiens
cagugcauauauaugau

SEQ ID NO: 188 - RNA, 17 nt, Homo sapiens
gugcauauauaugauaa

SEQ ID NO: 189 - RNA, 17 nt, Homo sapiens
gcauauauaugauaaag

SEQ ID NO: 190 - RNA, 17 nt, Homo sapiens
uauaugauaaagcauuc

SEQ ID NO: 191 - RNA, 17 nt, Homo sapiens
uaaagcauucaucacug

SEQ ID NO: 192 - RNA, 17 nt, Homo sapiens
aaagcauucaucacugu

SEQ ID NO: 193 - RNA, 17 nt, Homo sapiens
gcauucaucacugugaa

SEQ ID NO: 194 - RNA, 17 nt, Homo sapiens
ugaaacaucgaaaacag

SEQ ID NO: 195 - RNA, 17 nt, Homo sapiens
caggugcuugaaaccgu

SEQ ID NO: 196 - RNA, 17 nt, Homo sapiens
gaaaccguagcuggcaa

SEQ ID NO: 197 - RNA, 17 nt, Homo sapiens
caagcggucuuaccggc

SEQ ID NO: 198 - RNA, 17 nt, Homo sapiens
agcggucuuaccggcuc

SEQ ID NO: 199 - RNA, 17 nt, Homo sapiens
gcggucuuaccggcucu

SEQ ID NO: 200 - RNA, 17 nt, Homo sapiens
uaccggcucucuaugaa

SEQ ID NO: 201 - RNA, 17 nt, Homo sapiens
ccggcucucuaugaaag

SEQ ID NO: 202 - RNA, 17 nt, Homo sapiens
ggcucucuaugaaagug

SEQ ID NO: 203 - RNA, 17 nt, Homo sapiens
gaaggcauuucccucgc

SEQ ID NO: 204 - RNA, 17 nt, Homo sapiens
aaggcauuucccucgcc

SEQ ID NO: 205 - RNA, 17 nt, Homo sapiens
aggcauuucccucgccg

SEQ ID NO: 206 - RNA, 17 nt, Homo sapiens
auuucccucgccggaag

SEQ ID NO: 207 - RNA, 17 nt, Homo sapiens
ccggaaguuguaugguu

SEQ ID NO: 208 - RNA, 17 nt, Homo sapiens
gaaguuguaugguuaaa

SEQ ID NO: 209 - RNA, 17 nt, Homo sapiens
uguaugguuaaaagaug

SEQ ID NO: 210 - RNA, 17 nt, Homo sapiens
guaugguuaaaagaugg

SEQ ID NO: 211 - RNA, 17 nt, Homo sapiens
agauggguuaccugcga

SEQ ID NO: 212 - RNA, 17 nt, Homo sapiens
gauggguuaccugcgac

SEQ ID NO: 213 - RNA, 17 nt, Homo sapiens
ugagaaaucugcucgcu

SEQ ID NO: 214 - RNA, 17 nt, Homo sapiens
aaucugcucgcuauuug

SEQ ID NO: 215 - RNA, 17 nt, Homo sapiens
ugcucgcuauuugacuc

SEQ ID NO: 216 - RNA, 17 nt, Homo sapiens
cucgcuauuugacucgu

SEQ ID NO: 217 - RNA, 17 nt, Homo sapiens
ucgcuauuugacucgug

SEQ ID NO: 218 - RNA, 17 nt, Homo sapiens
auuugacucguggcuac

SEQ ID NO: 219 - RNA, 17 nt, Homo sapiens
ucguggcuacucguuaa

SEQ ID NO: 220 - RNA, 17 nt, Homo sapiens
uggcuacucguuaauua

SEQ ID NO: 221 - RNA, 17 nt, Homo sapiens
cuacucguuaauuauca

SEQ ID NO: 222 - RNA, 17 nt, Homo sapiens
uacucguuaauuaucaa

SEQ ID NO: 223 - RNA, 17 nt, Homo sapiens
ucguuaauuaucaagga

SEQ ID NO: 224 - RNA, 17 nt, Homo sapiens
cguuaauuaucaaggac

SEQ ID NO: 225 - RNA, 17 nt, Homo sapiens
uuaauuaucaaggacgu

SEQ ID NO: 226 - RNA, 17 nt, Homo sapiens
aaggacguaacugaaga

SEQ ID NO: 227 - RNA, 17 nt, Homo sapiens
cagggaauuauacaauc

SEQ ID NO: 228 - RNA, 17 nt, Homo sapiens
agggaauuauacaaucu

SEQ ID NO: 229 - RNA, 17 nt, Homo sapiens
ggaauuauacaaucuug

SEQ ID NO: 230 - RNA, 17 nt, Homo sapiens
uauacaaucuugcugag

SEQ ID NO: 231 - RNA, 17 nt, Homo sapiens
uacaaucuugcugagca

SEQ ID NO: 232 - RNA, 17 nt, Homo sapiens
cugagcauaaaacaguc

SEQ ID NO: 233 - RNA, 17 nt, Homo sapiens
aaaacagucaaaugugu

SEQ ID NO: 234 - RNA, 17 nt, Homo sapiens
aaauguguuuaaaaacc

SEQ ID NO: 235 - RNA, 17 nt, Homo sapiens
aauguguuuaaaaaccu

SEQ ID NO: 236 - RNA, 17 nt, Homo sapiens
auguguuuaaaaaccuc

SEQ ID NO: 237 - RNA, 17 nt, Homo sapiens
aaaaaccucacugccac

SEQ ID NO: 238 - RNA, 17 nt, Homo sapiens
cugccacucuaauuguc

SEQ ID NO: 239 - RNA, 17 nt, Homo sapiens
gccacucuaauugucaa

SEQ ID NO: 240 - RNA, 17 nt, Homo sapiens
acucuaauugucaaugu

SEQ ID NO: 241 - RNA, 17 nt, Homo sapiens
cuaauugucaaugugaa

SEQ ID NO: 242 - RNA, 17 nt, Homo sapiens
ccccagauuuacgaaaa

SEQ ID NO: 243 - RNA, 17 nt, Homo sapiens
cccagauuuacgaaaag

SEQ ID NO: 244 - RNA, 17 nt, Homo sapiens
ccagauuuacgaaaagg

SEQ ID NO: 245 - RNA, 17 nt, Homo sapiens
ggccgugucaucguuuc

SEQ ID NO: 246 - RNA, 17 nt, Homo sapiens
cgugucaucguuuccag

SEQ ID NO: 247 - RNA, 17 nt, Homo sapiens
gucaucguuuccagacc

SEQ ID NO: 248 - RNA, 17 nt, Homo sapiens
ucaucguuuccagaccc

SEQ ID NO: 249 - RNA, 17 nt, Homo sapiens
caucguuuccagacccg

SEQ ID NO: 250 - RNA, 17 nt, Homo sapiens
acccggcucucuaccca

SEQ ID NO: 251 - RNA, 17 nt, Homo sapiens
ccggcucucuacccacu

SEQ ID NO: 252 - RNA, 17 nt, Homo sapiens
ggcucucuacccacugg

SEQ ID NO: 253 - RNA, 17 nt, Homo sapiens
agacaaauccugacuug

SEQ ID NO: 254 - RNA, 17 nt, Homo sapiens
uccugacuuguaccgca

SEQ ID NO: 255 - RNA, 17 nt, Homo sapiens
ugacuuguaccgcauau

SEQ ID NO: 256 - RNA, 17 nt, Homo sapiens
uaccgcauaugguaucc

SEQ ID NO: 257 - RNA, 17 nt, Homo sapiens
cauaugguaucccucaa

SEQ ID NO: 258 - RNA, 17 nt, Homo sapiens
uaugguaucccucaacc

SEQ ID NO: 259 - RNA, 17 nt, Homo sapiens
guaucccucaaccuaca

SEQ ID NO: 260 - RNA, 17 nt, Homo sapiens
cucaaccuacaaucaag

SEQ ID NO: 261 - RNA, 17 nt, Homo sapiens
ccuacaaucaagugguu

SEQ ID NO: 262 - RNA, 17 nt, Homo sapiens
caagugguucuggcacc

SEQ ID NO: 263 - RNA, 17 nt, Homo sapiens
aagugguucuggcaccc

SEQ ID NO: 264 - RNA, 17 nt, Homo sapiens
accccuguaaccauaau

SEQ ID NO: 265 - RNA, 17 nt, Homo sapiens
guaaccauaaucauucc

SEQ ID NO: 266 - RNA, 17 nt, Homo sapiens
accauaaucauuccgaa

SEQ ID NO: 267 - RNA, 17 nt, Homo sapiens
auaaucauuccgaagca

SEQ ID NO: 268 - RNA, 17 nt, Homo sapiens
uaaucauuccgaagcaa

SEQ ID NO: 269 - RNA, 17 nt, Homo sapiens
gugugacuuuuguucca

SEQ ID NO: 270 - RNA, 17 nt, Homo sapiens
ugugacuuuuguuccaa

SEQ ID NO: 271 - RNA, 17 nt, Homo sapiens
gugacuuuuguuccaau

SEQ ID NO: 272 - RNA, 17 nt, Homo sapiens
acuuuuguuccaauaau

SEQ ID NO: 273 - RNA, 17 nt, Homo sapiens
cuuuuguuccaauaaug

SEQ ID NO: 274 - RNA, 17 nt, Homo sapiens
guuccaauaaugaagag

SEQ ID NO: 275 - RNA, 17 nt, Homo sapiens
ugaagaguccuuuaucc

SEQ ID NO: 276 - RNA, 17 nt, Homo sapiens
agaguccuuuauccugg

SEQ ID NO: 277 - RNA, 17 nt, Homo sapiens
gaguccuuuauccugga

SEQ ID NO: 278 - RNA, 17 nt, Homo sapiens
aguccuuuauccuggau

SEQ ID NO: 279 - RNA, 17 nt, Homo sapiens
uccuuuauccuggaugc

SEQ ID NO: 280 - RNA, 17 nt, Homo sapiens
aacagaauugagagcau

SEQ ID NO: 281 - RNA, 17 nt, Homo sapiens
gagagcaucacucagcg

SEQ ID NO: 282 - RNA, 17 nt, Homo sapiens
gcaucacucagcgcaug

SEQ ID NO: 283 - RNA, 17 nt, Homo sapiens
auggcaauaauagaagg

SEQ ID NO: 284 - RNA, 17 nt, Homo sapiens
gcaauaauagaaggaaa

SEQ ID NO: 285 - RNA, 17 nt, Homo sapiens
gaaagaauaagauggcu

SEQ ID NO: 286 - RNA, 17 nt, Homo sapiens
agauggcuagcaccuug

SEQ ID NO: 287 - RNA, 17 nt, Homo sapiens
uagcaccuugguugugg

SEQ ID NO: 288 - RNA, 17 nt, Homo sapiens
accuugguuguggcuga

SEQ ID NO: 289 - RNA, 17 nt, Homo sapiens
ggcugacucuagaauuu

SEQ ID NO: 290 - RNA, 17 nt, Homo sapiens
cugacucuagaauuucu

SEQ ID NO: 291 - RNA, 17 nt, Homo sapiens
ucuagaauuucuggaau

SEQ ID NO: 292 - RNA, 17 nt, Homo sapiens
cuagaauuucuggaauc

SEQ ID NO: 293 - RNA, 17 nt, Homo sapiens
uagaauuucuggaaucu

SEQ ID NO: 294 - RNA, 17 nt, Homo sapiens
ucuggaaucuacauuug

SEQ ID NO: 295 - RNA, 17 nt, Homo sapiens
uggaaucuacauuugca

SEQ ID NO: 296 - RNA, 17 nt, Homo sapiens
aucuacauuugcauagc

SEQ ID NO: 297 - RNA, 17 nt, Homo sapiens
ucuacauuugcauagcu

SEQ ID NO: 298 - RNA, 17 nt, Homo sapiens
auuugcauagcuuccaa

SEQ ID NO: 299 - RNA, 17 nt, Homo sapiens
gcauagcuuccaauaaa

SEQ ID NO: 300 - RNA, 17 nt, Homo sapiens
cauagcuuccaauaaag

SEQ ID NO: 301 - RNA, 17 nt, Homo sapiens
cuuccaauaaaguuggg

SEQ ID NO: 302 - RNA, 17 nt, Homo sapiens
aauaaaguugggacugu

SEQ ID NO: 303 - RNA, 17 nt, Homo sapiens
agaaacauaagcuuuua

SEQ ID NO: 304 - RNA, 17 nt, Homo sapiens
cauaagcuuuuauauca

SEQ ID NO: 305 - RNA, 17 nt, Homo sapiens
auaagcuuuuauaucac

SEQ ID NO: 306 - RNA, 17 nt, Homo sapiens
uaagcuuuuauaucaca

SEQ ID NO: 307 - RNA, 17 nt, Homo sapiens
aagcuuuuauaucacag

SEQ ID NO: 308 - RNA, 17 nt, Homo sapiens
gcuuuuauaucacagau

SEQ ID NO: 309 - RNA, 17 nt, Homo sapiens
uuuuauaucacagaugu

SEQ ID NO: 310 - RNA, 17 nt, Homo sapiens
aaauggguuucauguua

SEQ ID NO: 311 - RNA, 17 nt, Homo sapiens
aauggguuucauguuaa

SEQ ID NO: 312 - RNA, 17 nt, Homo sapiens
auggguuucauguuaac

SEQ ID NO: 313 - RNA, 17 nt, Homo sapiens
uuucauguuaacuugga

SEQ ID NO: 314 - RNA, 17 nt, Homo sapiens
uucauguuaacuuggaa

SEQ ID NO: 315 - RNA, 17 nt, Homo sapiens
uguuaacuuggaaaaaa

SEQ ID NO: 316 - RNA, 17 nt, Homo sapiens
gaaacugucuugcacag

SEQ ID NO: 317 - RNA, 17 nt, Homo sapiens
aacugucuugcacaguu

SEQ ID NO: 318 - RNA, 17 nt, Homo sapiens
ugcacaguuaacaaguu

SEQ ID NO: 319 - RNA, 17 nt, Homo sapiens
gcacaguuaacaaguuc

SEQ ID NO: 320 - RNA, 17 nt, Homo sapiens
uaacaaguucuuauaca

SEQ ID NO: 321 - RNA, 17 nt, Homo sapiens
aacaaguucuuauacag

SEQ ID NO: 322 - RNA, 17 nt, Homo sapiens
caaguucuuauacagag

SEQ ID NO: 323 - RNA, 17 nt, Homo sapiens
aaguucuuauacagaga

SEQ ID NO: 324 - RNA, 17 nt, Homo sapiens
guucuuauacagagacg

SEQ ID NO: 325 - RNA, 17 nt, Homo sapiens
agagacguuacuuggau

SEQ ID NO: 326 - RNA, 17 nt, Homo sapiens
gagacguuacuuggauu

SEQ ID NO: 327 - RNA, 17 nt, Homo sapiens
acguuacuuggauuuua

SEQ ID NO: 328 - RNA, 17 nt, Homo sapiens
acuuggauuuuacugcg

SEQ ID NO: 329 - RNA, 17 nt, Homo sapiens
cuuggauuuuacugcgg

SEQ ID NO: 330 - RNA, 17 nt, Homo sapiens
uuggauuuuacugcgga

SEQ ID NO: 331 - RNA, 17 nt, Homo sapiens
uggauuuuacugcggac

SEQ ID NO: 332 - RNA, 17 nt, Homo sapiens
cggacaguuaauaacag

SEQ ID NO: 333 - RNA, 17 nt, Homo sapiens
ggacaguuaauaacaga

SEQ ID NO: 334 - RNA, 17 nt, Homo sapiens
caguuaauaacagaaca

SEQ ID NO: 335 - RNA, 17 nt, Homo sapiens
aaugcacuacaguauua

SEQ ID NO: 336 - RNA, 17 nt, Homo sapiens
acuacaguauuagcaag

SEQ ID NO: 337 - RNA, 17 nt, Homo sapiens
uacaguauuagcaagca

SEQ ID NO: 338 - RNA, 17 nt, Homo sapiens
acaguauuagcaagcaa

SEQ ID NO: 339 - RNA, 17 nt, Homo sapiens
auggccaucacuaagga

SEQ ID NO: 340 - RNA, 17 nt, Homo sapiens
ccaucacuaaggagcac

SEQ ID NO: 341 - RNA, 17 nt, Homo sapiens
ggagcacuccaucacuc

SEQ ID NO: 342 - RNA, 17 nt, Homo sapiens
cacuccaucacucuuaa

SEQ ID NO: 343 - RNA, 17 nt, Homo sapiens
ccaucacucuuaaucuu

SEQ ID NO: 344 - RNA, 17 nt, Homo sapiens
aucacucuuaaucuuac

SEQ ID NO: 345 - RNA, 17 nt, Homo sapiens
ucacucuuaaucuuacc

SEQ ID NO: 346 - RNA, 17 nt, Homo sapiens
cucuuaaucuuaccauc

SEQ ID NO: 347 - RNA, 17 nt, Homo sapiens
cuuaaucuuaccaucau

SEQ ID NO: 348 - RNA, 17 nt, Homo sapiens
uuaaucuuaccaucaug

SEQ ID NO: 349 - RNA, 17 nt, Homo sapiens
cuuaccaucaugaaugu

SEQ ID NO: 350 - RNA, 17 nt, Homo sapiens
augaauguuucccugca

SEQ ID NO: 351 - RNA, 17 nt, Homo sapiens
ugaauguuucccugcaa

SEQ ID NO: 352 - RNA, 17 nt, Homo sapiens
gaauguuucccugcaag

SEQ ID NO: 353 - RNA, 17 nt, Homo sapiens
ugcaagauucaggcacc

SEQ ID NO: 354 - RNA, 17 nt, Homo sapiens
gcaagauucaggcaccu

SEQ ID NO: 355 - RNA, 17 nt, Homo sapiens
aggcaccuaugccugca

SEQ ID NO: 356 - RNA, 17 nt, Homo sapiens
aggaauguauacacagg

SEQ ID NO: 357 - RNA, 17 nt, Homo sapiens
gaauguauacacagggg

SEQ ID NO: 358 - RNA, 17 nt, Homo sapiens
gaagaaauccuccagaa

SEQ ID NO: 359 - RNA, 17 nt, Homo sapiens
gaaauccuccagaagaa

SEQ ID NO: 360 - RNA, 17 nt, Homo sapiens
aaagaaauuacaaucag

SEQ ID NO: 361 - RNA, 17 nt, Homo sapiens
aagaaauuacaaucaga

SEQ ID NO: 362 - RNA, 17 nt, Homo sapiens
auuacaaucagagauca

SEQ ID NO: 363 - RNA, 17 nt, Homo sapiens
ucagagaucaggaagca

SEQ ID NO: 364 - RNA, 17 nt, Homo sapiens
agcaccauaccuccugc

SEQ ID NO: 365 - RNA, 17 nt, Homo sapiens
ccauaccuccugcgaaa

SEQ ID NO: 366 - RNA, 17 nt, Homo sapiens
cgaaaccucagugauca

SEQ ID NO: 367 - RNA, 17 nt, Homo sapiens
ucagugaucacacagug

SEQ ID NO: 368 - RNA, 17 nt, Homo sapiens
guggccaucagcaguuc

SEQ ID NO: 369 - RNA, 17 nt, Homo sapiens
ucagcaguuccaccacu

SEQ ID NO: 370 - RNA, 17 nt, Homo sapiens
cagcaguuccaccacuu

SEQ ID NO: 371 - RNA, 17 nt, Homo sapiens
ccaccacuuuagacugu

SEQ ID NO: 372 - RNA, 17 nt, Homo sapiens
caccacuuuagacuguc

SEQ ID NO: 373 - RNA, 17 nt, Homo sapiens
accacuuuagacuguca

SEQ ID NO: 374 - RNA, 17 nt, Homo sapiens
uagacugucaugcuaau

SEQ ID NO: 375 - RNA, 17 nt, Homo sapiens
gucaugcuaaugguguc

SEQ ID NO: 376 - RNA, 17 nt, Homo sapiens
aaugguguccccgagcc

SEQ ID NO: 377 - RNA, 17 nt, Homo sapiens
ccgagccucagaucacu

SEQ ID NO: 378 - RNA, 17 nt, Homo sapiens
ccucagaucacuugguu

SEQ ID NO: 379 - RNA, 17 nt, Homo sapiens
agaucacuugguuuaaa

SEQ ID NO: 380 - RNA, 17 nt, Homo sapiens
cacuugguuuaaaaaca

SEQ ID NO: 381 - RNA, 17 nt, Homo sapiens
acuugguuuaaaaacaa

SEQ ID NO: 382 - RNA, 17 nt, Homo sapiens
cuugguuuaaaaacaac

SEQ ID NO: 383 - RNA, 17 nt, Homo sapiens
cacaaaauacaacaaga

SEQ ID NO: 384 - RNA, 17 nt, Homo sapiens
ccuggaauuauuuuagg

SEQ ID NO: 385 - RNA, 17 nt, Homo sapiens
cuggaauuauuuuagga

SEQ ID NO: 386 - RNA, 17 nt, Homo sapiens
ggaauuauuuuaggacc

SEQ ID NO: 387 - RNA, 17 nt, Homo sapiens
gaauuauuuuaggacca

SEQ ID NO: 388 - RNA, 17 nt, Homo sapiens
aauuauuuuaggaccag

SEQ ID NO: 389 - RNA, 17 nt, Homo sapiens
auuauuuuaggaccagg

SEQ ID NO: 390 - RNA, 17 nt, Homo sapiens
cacgcuguuuauugaaa

SEQ ID NO: 391 - RNA, 17 nt, Homo sapiens
acgcuguuuauugaaag

SEQ ID NO: 392 - RNA, 17 nt, Homo sapiens
cgcuguuuauugaaaga

SEQ ID NO: 393 - RNA, 17 nt, Homo sapiens
cuguuuauugaaagagu

SEQ ID NO: 394 - RNA, 17 nt, Homo sapiens
gaaagagucacagaaga

SEQ ID NO: 395 - RNA, 17 nt, Homo sapiens
gaaggugucuaucacug

SEQ ID NO: 396 - RNA, 17 nt, Homo sapiens
aggugucuaucacugca

SEQ ID NO: 397 - RNA, 17 nt, Homo sapiens
gugucuaucacugcaaa

SEQ ID NO: 398 - RNA, 17 nt, Homo sapiens
gaagggcucuguggaaa

SEQ ID NO: 399 - RNA, 17 nt, Homo sapiens
uggaaaguucagcauac

SEQ ID NO: 400 - RNA, 17 nt, Homo sapiens
ggaaaguucagcauacc

SEQ ID NO: 401 - RNA, 17 nt, Homo sapiens
uucagcauaccucacug

SEQ ID NO: 402 - RNA, 17 nt, Homo sapiens
gcauaccucacuguuca

SEQ ID NO: 403 - RNA, 17 nt, Homo sapiens
cucacuguucaaggaac

SEQ ID NO: 404 - RNA, 17 nt, Homo sapiens
ucacuguucaaggaacc

SEQ ID NO: 405 - RNA, 17 nt, Homo sapiens
aggaaccucggacaagu

SEQ ID NO: 406 - RNA, 17 nt, Homo sapiens
ggacaagucuaaucugg

SEQ ID NO: 407 - RNA, 17 nt, Homo sapiens
acaagucuaaucuggag

SEQ ID NO: 408 - RNA, 17 nt, Homo sapiens
agucuaaucuggagcug

SEQ ID NO: 409 - RNA, 17 nt, Homo sapiens
gagcugaucacucuaac

SEQ ID NO: 410 - RNA, 17 nt, Homo sapiens
ugaucacucuaacaugc

SEQ ID NO: 411 - RNA, 17 nt, Homo sapiens
aucacucuaacaugcac

SEQ ID NO: 412 - RNA, 17 nt, Homo sapiens
cugcgacucucuucugg

SEQ ID NO: 413 - RNA, 17 nt, Homo sapiens
gcgacucucuucuggcu

SEQ ID NO: 414 - RNA, 17 nt, Homo sapiens
gacucucuucuggcucc

SEQ ID NO: 415 - RNA, 17 nt, Homo sapiens
acucucuucuggcuccu

SEQ ID NO: 416 - RNA, 17 nt, Homo sapiens
uucuggcuccuauuaac

SEQ ID NO: 417 - RNA, 17 nt, Homo sapiens
uggcuccuauuaacccu

SEQ ID NO: 418 - RNA, 17 nt, Homo sapiens
gcuccuauuaacccucc

SEQ ID NO: 419 - RNA, 17 nt, Homo sapiens
cuccuauuaacccuccu

SEQ ID NO: 420 - RNA, 17 nt, Homo sapiens
uuaacccuccuuauccg

SEQ ID NO: 421 - RNA, 17 nt, Homo sapiens
acccuccuuauccgaaa

SEQ ID NO: 422 - RNA, 17 nt, Homo sapiens
cccuccuuauccgaaaa

SEQ ID NO: 423 - RNA, 17 nt, Homo sapiens
cuccuuauccgaaaaau

SEQ ID NO: 424 - RNA, 17 nt, Homo sapiens
gaaaaggucuucuucug

SEQ ID NO: 425 - RNA, 17 nt, Homo sapiens
aaaggucuucuucugaa

SEQ ID NO: 426 - RNA, 17 nt, Homo sapiens
aaggucuucuucugaaa

SEQ ID NO: 427 - RNA, 17 nt, Homo sapiens
ggucuucuucugaaaua

SEQ ID NO: 428 - RNA, 17 nt, Homo sapiens
gucuucuucugaaauaa

SEQ ID NO: 429 - RNA, 17 nt, Homo sapiens
ucugaaauaaagacuga

SEQ ID NO: 430 - RNA, 17 nt, Homo sapiens
gacugacuaccuaucaa

SEQ ID NO: 431 - RNA, 17 nt, Homo sapiens
gacuaccuaucaauuau

SEQ ID NO: 432 - RNA, 17 nt, Homo sapiens
cuaccuaucaauuauaa

SEQ ID NO: 433 - RNA, 17 nt, Homo sapiens
cuaucaauuauaaugga

SEQ ID NO: 434 - RNA, 17 nt, Homo sapiens
uaucaauuauaauggac

SEQ ID NO: 435 - RNA, 17 nt, Homo sapiens
ucaauuauaauggaccc

SEQ ID NO: 436 - RNA, 17 nt, Homo sapiens
gaugaaguuccuuugga

SEQ ID NO: 437 - RNA, 17 nt, Homo sapiens
augaaguuccuuuggau

SEQ ID NO: 438 - RNA, 17 nt, Homo sapiens
aaguuccuuuggaugag

SEQ ID NO: 439 - RNA, 17 nt, Homo sapiens
aguuccuuuggaugagc

SEQ ID NO: 440 - RNA, 17 nt, Homo sapiens
gagcggcucccuuauga

SEQ ID NO: 441 - RNA, 17 nt, Homo sapiens
ggcucccuuaugaugcc

SEQ ID NO: 442 - RNA, 17 nt, Homo sapiens
gcucccuuaugaugcca

SEQ ID NO: 443 - RNA, 17 nt, Homo sapiens
gugggaguuugcccggg

SEQ ID NO: 444 - RNA, 17 nt, Homo sapiens
ugggaguuugcccggga

SEQ ID NO: 445 - RNA, 17 nt, Homo sapiens
gagagacuuaaacuggg

SEQ ID NO: 446 - RNA, 17 nt, Homo sapiens
agagacuuaaacugggc

SEQ ID NO: 447 - RNA, 17 nt, Homo sapiens
gggcaaaucacuuggaa

SEQ ID NO: 448 - RNA, 17 nt, Homo sapiens
aaaucacuuggaagagg

SEQ ID NO: 449 - RNA, 17 nt, Homo sapiens
gaggggcuuuuggaaaa

SEQ ID NO: 450 - RNA, 17 nt, Homo sapiens
aggggcuuuuggaaaag

SEQ ID NO: 451 - RNA, 17 nt, Homo sapiens
ggggcuuuuggaaaagu

SEQ ID NO: 452 - RNA, 17 nt, Homo sapiens
aaagugguucaagcauc

SEQ ID NO: 453 - RNA, 17 nt, Homo sapiens
aagugguucaagcauca

SEQ ID NO: 454 - RNA, 17 nt, Homo sapiens
ucaagcaucagcauuug

SEQ ID NO: 455 - RNA, 17 nt, Homo sapiens
aucagcauuuggcauua

SEQ ID NO: 456 - RNA, 17 nt, Homo sapiens
ucagcauuuggcauuaa

SEQ ID NO: 457 - RNA, 17 nt, Homo sapiens
uuuggcauuaagaaauc

SEQ ID NO: 458 - RNA, 17 nt, Homo sapiens
uuggcauuaagaaauca

SEQ ID NO: 459 - RNA, 17 nt, Homo sapiens
uaagaaaucaccuacgu

SEQ ID NO: 460 - RNA, 17 nt, Homo sapiens
aaucaccuacgugccgg

SEQ ID NO: 461 - RNA, 17 nt, Homo sapiens
cagcgaguacaaagcuc

SEQ ID NO: 462 - RNA, 17 nt, Homo sapiens
acaaagcucugaugacu

SEQ ID NO: 463 - RNA, 17 nt, Homo sapiens
acugagcuaaaaaucuu

SEQ ID NO: 464 - RNA, 17 nt, Homo sapiens
cuaaaaaucuugaccca

SEQ ID NO: 465 - RNA, 17 nt, Homo sapiens
aaaaaucuugacccaca

SEQ ID NO: 466 - RNA, 17 nt, Homo sapiens
acccacauuggccacca

SEQ ID NO: 467 - RNA, 17 nt, Homo sapiens
gccaccaucugaacgug

SEQ ID NO: 468 - RNA, 17 nt, Homo sapiens
aacgugguuaaccugcu

SEQ ID NO: 469 - RNA, 17 nt, Homo sapiens
acgugguuaaccugcug

SEQ ID NO: 470 - RNA, 17 nt, Homo sapiens
gagggccucugauggug

SEQ ID NO: 471 - RNA, 17 nt, Homo sapiens
auggugauuguugaaua

SEQ ID NO: 472 - RNA, 17 nt, Homo sapiens
gugauuguugaauacug

SEQ ID NO: 473 - RNA, 17 nt, Homo sapiens
uguugaauacugcaaau

SEQ ID NO: 474 - RNA, 17 nt, Homo sapiens
cugcaaauauggaaauc

SEQ ID NO: 475 - RNA, 17 nt, Homo sapiens
auggaaaucucuccaac

SEQ ID NO: 476 - RNA, 17 nt, Homo sapiens
ggaaaucucuccaacua

SEQ ID NO: 477 - RNA, 17 nt, Homo sapiens
aaaucucuccaacuacc

SEQ ID NO: 478 - RNA, 17 nt, Homo sapiens
cuccaacuaccucaaga

SEQ ID NO: 479 - RNA, 17 nt, Homo sapiens
aacuaccucaagagcaa

SEQ ID NO: 480 - RNA, 17 nt, Homo sapiens
acgugacuuauuuuuuc

SEQ ID NO: 481 - RNA, 17 nt, Homo sapiens
cgugacuuauuuuuucu

SEQ ID NO: 482 - RNA, 17 nt, Homo sapiens
ugacuuauuuuuucuca

SEQ ID NO: 483 - RNA, 17 nt, Homo sapiens
gacuuauuuuuucucaa

SEQ ID NO: 484 - RNA, 17 nt, Homo sapiens
acuuauuuuuucucaac

SEQ ID NO: 485 - RNA, 17 nt, Homo sapiens
cuuauuuuuucucaaca

SEQ ID NO: 486 - RNA, 17 nt, Homo sapiens
uuauuuuuucucaacaa

SEQ ID NO: 487 - RNA, 17 nt, Homo sapiens
uauuuuuucucaacaag

SEQ ID NO: 488 - RNA, 17 nt, Homo sapiens
uuuuuucucaacaagga

SEQ ID NO: 489 - RNA, 17 nt, Homo sapiens
gcagcacuacacaugga

SEQ ID NO: 490 - RNA, 17 nt, Homo sapiens
uggagccuaagaaagaa

SEQ ID NO: 491 - RNA, 17 nt, Homo sapiens
ccaagacuagauagcgu

SEQ ID NO: 492 - RNA, 17 nt, Homo sapiens
gacuagauagcgucacc

SEQ ID NO: 493 - RNA, 17 nt, Homo sapiens
gauagcgucaccagcag

SEQ ID NO: 494 - RNA, 17 nt, Homo sapiens
cgaaagcuuugcgagcu

SEQ ID NO: 495 - RNA, 17 nt, Homo sapiens
gaaagcuuugcgagcuc

SEQ ID NO: 496 - RNA, 17 nt, Homo sapiens
ugcgagcuccggcuuuc

SEQ ID NO: 497 - RNA, 17 nt, Homo sapiens
cuccggcuuucaggaag

SEQ ID NO: 498 - RNA, 17 nt, Homo sapiens
uccggcuuucaggaaga

SEQ ID NO: 499 - RNA, 17 nt, Homo sapiens
ccggcuuucaggaagau

SEQ ID NO: 500 - RNA, 17 nt, Homo sapiens
aggaagauaaaagucug

SEQ ID NO: 501 - RNA, 17 nt, Homo sapiens
auaaaagucugagugau

SEQ ID NO: 502 - RNA, 17 nt, Homo sapiens
agugauguugaggaaga

SEQ ID NO: 503 - RNA, 17 nt, Homo sapiens
aggaggauucugacggu

SEQ ID NO: 504 - RNA, 17 nt, Homo sapiens
ggaggauucugacgguu

SEQ ID NO: 505 - RNA, 17 nt, Homo sapiens
cugacgguuucuacaag

SEQ ID NO: 506 - RNA, 17 nt, Homo sapiens
ugacgguuucuacaagg

SEQ ID NO: 507 - RNA, 17 nt, Homo sapiens
gacgguuucuacaagga

SEQ ID NO: 508 - RNA, 17 nt, Homo sapiens
cgguuucuacaaggagc

SEQ ID NO: 509 - RNA, 17 nt, Homo sapiens
gagcccaucacuaugga

SEQ ID NO: 510 - RNA, 17 nt, Homo sapiens
ccaucacuauggaagau

SEQ ID NO: 511 - RNA, 17 nt, Homo sapiens
uggaagaucugauuucu

SEQ ID NO: 512 - RNA, 17 nt, Homo sapiens
gaucugauuucuuacag

SEQ ID NO: 513 - RNA, 17 nt, Homo sapiens
aucugauuucuuacagu

SEQ ID NO: 514 - RNA, 17 nt, Homo sapiens
ucugauuucuuacaguu

SEQ ID NO: 515 - RNA, 17 nt, Homo sapiens
ugauuucuuacaguuuu

SEQ ID NO: 516 - RNA, 17 nt, Homo sapiens
gauuucuuacaguuuuc

SEQ ID NO: 517 - RNA, 17 nt, Homo sapiens
cuuacaguuuucaagug

SEQ ID NO: 518 - RNA, 17 nt, Homo sapiens
uuacaguuuucaagugg

SEQ ID NO: 519 - RNA, 17 nt, Homo sapiens
uacaguuuucaaguggc

SEQ ID NO: 520 - RNA, 17 nt, Homo sapiens
acaguuuucaaguggcc

SEQ ID NO: 521 - RNA, 17 nt, Homo sapiens
cauggaguuccugucuu

SEQ ID NO: 522 - RNA, 17 nt, Homo sapiens
auggaguuccugucuuc

SEQ ID NO: 523 - RNA, 17 nt, Homo sapiens
guuccugucuuccagaa

SEQ ID NO: 524 - RNA, 17 nt, Homo sapiens
uccugucuuccagaaag

SEQ ID NO: 525 - RNA, 17 nt, Homo sapiens
ccugucuuccagaaagu

SEQ ID NO: 526 - RNA, 17 nt, Homo sapiens
aagugcauucaucggga

SEQ ID NO: 527 - RNA, 17 nt, Homo sapiens
agugcauucaucgggac

SEQ ID NO: 528 - RNA, 17 nt, Homo sapiens
gcauucaucgggaccug

SEQ ID NO: 529 - RNA, 17 nt, Homo sapiens
agaaacauucuuuuauc

SEQ ID NO: 530 - RNA, 17 nt, Homo sapiens
gaaacauucuuuuaucu

SEQ ID NO: 531 - RNA, 17 nt, Homo sapiens
aacauucuuuuaucuga

SEQ ID NO: 532 - RNA, 17 nt, Homo sapiens
acauucuuuuaucugag

SEQ ID NO: 533 - RNA, 17 nt, Homo sapiens
cauucuuuuaucugaga

SEQ ID NO: 534 - RNA, 17 nt, Homo sapiens
auucuuuuaucugagaa

SEQ ID NO: 535 - RNA, 17 nt, Homo sapiens
ucuuuuaucugagaaca

SEQ ID NO: 536 - RNA, 17 nt, Homo sapiens
gugaagauuugugauuu

SEQ ID NO: 537 - RNA, 17 nt, Homo sapiens
ugaagauuugugauuuu

SEQ ID NO: 538 - RNA, 17 nt, Homo sapiens
uuugugauuuuggccuu

SEQ ID NO: 539 - RNA, 17 nt, Homo sapiens
uugugauuuuggccuug

SEQ ID NO: 540 - RNA, 17 nt, Homo sapiens
ugugauuuuggccuugc

SEQ ID NO: 541 - RNA, 17 nt, Homo sapiens
uuuggccuugcccggga

SEQ ID NO: 542 - RNA, 17 nt, Homo sapiens
cccgggauauuuauaag

SEQ ID NO: 543 - RNA, 17 nt, Homo sapiens
cgggauauuuauaagaa

SEQ ID NO: 544 - RNA, 17 nt, Homo sapiens
gggauauuuauaagaac

SEQ ID NO: 545 - RNA, 17 nt, Homo sapiens
ggauauuuauaagaacc

SEQ ID NO: 546 - RNA, 17 nt, Homo sapiens
auauuuauaagaacccc

SEQ ID NO: 547 - RNA, 17 nt, Homo sapiens
accccgauuaugugaga

SEQ ID NO: 548 - RNA, 17 nt, Homo sapiens
ccccgauuaugugagaa

SEQ ID NO: 549 - RNA, 17 nt, Homo sapiens
aaggagauacucgacuu

SEQ ID NO: 550 - RNA, 17 nt, Homo sapiens
gagauacucgacuuccu

SEQ ID NO: 551 - RNA, 17 nt, Homo sapiens
acucgacuuccucugaa

SEQ ID NO: 552 - RNA, 17 nt, Homo sapiens
cucgacuuccucugaaa

SEQ ID NO: 553 - RNA, 17 nt, Homo sapiens
gacuuccucugaaaugg

SEQ ID NO: 554 - RNA, 17 nt, Homo sapiens
ggauggcucccgaaucu

SEQ ID NO: 555 - RNA, 17 nt, Homo sapiens
ucccgaaucuaucuuug

SEQ ID NO: 556 - RNA, 17 nt, Homo sapiens
ccgaaucuaucuuugac

SEQ ID NO: 557 - RNA, 17 nt, Homo sapiens
gaaucuaucuuugacaa

SEQ ID NO: 558 - RNA, 17 nt, Homo sapiens
aucuaucuuugacaaaa

SEQ ID NO: 559 - RNA, 17 nt, Homo sapiens
ucuaucuuugacaaaau

SEQ ID NO: 560 - RNA, 17 nt, Homo sapiens
gacaaaaucuacagcac

SEQ ID NO: 561 - RNA, 17 nt, Homo sapiens
caaaaucuacagcacca

SEQ ID NO: 562 - RNA, 17 nt, Homo sapiens
cguguggucuuacggag

SEQ ID NO: 563 - RNA, 17 nt, Homo sapiens
uguggucuuacggagua

SEQ ID NO: 564 - RNA, 17 nt, Homo sapiens
guggucuuacggaguau

SEQ ID NO: 565 - RNA, 17 nt, Homo sapiens
uacggaguauugcugug

SEQ ID NO: 566 - RNA, 17 nt, Homo sapiens
cggaguauugcuguggg

SEQ ID NO: 567 - RNA, 17 nt, Homo sapiens
ugggaaaucuucuccuu

SEQ ID NO: 568 - RNA, 17 nt, Homo sapiens
ggaaaucuucuccuuag

SEQ ID NO: 569 - RNA, 17 nt, Homo sapiens
gaaaucuucuccuuagg

SEQ ID NO: 570 - RNA, 17 nt, Homo sapiens
aaucuucuccuuaggug

SEQ ID NO: 571 - RNA, 17 nt, Homo sapiens
cuucuccuuaggugggu

SEQ ID NO: 572 - RNA, 17 nt, Homo sapiens
uucuccuuagguggguc

SEQ ID NO: 573 - RNA, 17 nt, Homo sapiens
aggugggucuccauacc

SEQ ID NO: 574 - RNA, 17 nt, Homo sapiens
gugggucuccauaccca

SEQ ID NO: 575 - RNA, 17 nt, Homo sapiens
gucuccauacccaggag

SEQ ID NO: 576 - RNA, 17 nt, Homo sapiens
ccaggaguacaaaugga

SEQ ID NO: 577 - RNA, 17 nt, Homo sapiens
ugaggacuuuugcaguc

SEQ ID NO: 578 - RNA, 17 nt, Homo sapiens
gaggacuuuugcagucg

SEQ ID NO: 579 - RNA, 17 nt, Homo sapiens
aggacuuuugcagucgc

SEQ ID NO: 580 - RNA, 17 nt, Homo sapiens
uuugcagucgccugagg

SEQ ID NO: 581 - RNA, 17 nt, Homo sapiens
ugagagcuccugaguac

SEQ ID NO: 582 - RNA, 17 nt, Homo sapiens
uccugaguacucuacuc

SEQ ID NO: 583 - RNA, 17 nt, Homo sapiens
ugaguacucuacuccug

SEQ ID NO: 584 - RNA, 17 nt, Homo sapiens
aguacucuacuccugaa

SEQ ID NO: 585 - RNA, 17 nt, Homo sapiens
acucuacuccugaaauc

SEQ ID NO: 586 - RNA, 17 nt, Homo sapiens
ccugaaaucuaucagau

SEQ ID NO: 587 - RNA, 17 nt, Homo sapiens
ugaaaucuaucagauca

SEQ ID NO: 588 - RNA, 17 nt, Homo sapiens
aaaucuaucagaucaug

SEQ ID NO: 589 - RNA, 17 nt, Homo sapiens
uaucagaucaugcugga

SEQ ID NO: 590 - RNA, 17 nt, Homo sapiens
gccaagauuugcagaac

SEQ ID NO: 591 - RNA, 17 nt, Homo sapiens
ccaagauuugcagaacu

SEQ ID NO: 592 - RNA, 17 nt, Homo sapiens
gcagaacuuguggaaaa

SEQ ID NO: 593 - RNA, 17 nt, Homo sapiens
gaaaaacuaggugauuu

SEQ ID NO: 594 - RNA, 17 nt, Homo sapiens
uaggugauuugcuucaa

SEQ ID NO: 595 - RNA, 17 nt, Homo sapiens
aggugauuugcuucaag

SEQ ID NO: 596 - RNA, 17 nt, Homo sapiens
gauuugcuucaagcaaa

SEQ ID NO: 597 - RNA, 17 nt, Homo sapiens
auuugcuucaagcaaau

SEQ ID NO: 598 - RNA, 17 nt, Homo sapiens
gcaaauguacaacagga

SEQ ID NO: 599 - RNA, 17 nt, Homo sapiens
aggaugguaaagacuac

SEQ ID NO: 600 - RNA, 17 nt, Homo sapiens
uaaagacuacaucccaa

SEQ ID NO: 601 - RNA, 17 nt, Homo sapiens
gacuacaucccaaucaa

SEQ ID NO: 602 - RNA, 17 nt, Homo sapiens
aucccaaucaaugccau

SEQ ID NO: 603 - RNA, 17 nt, Homo sapiens
aaugccauacugacagg

SEQ ID NO: 604 - RNA, 17 nt, Homo sapiens
caggaaauaguggguuu

SEQ ID NO: 605 - RNA, 17 nt, Homo sapiens
uaguggguuuacauacu

SEQ ID NO: 606 - RNA, 17 nt, Homo sapiens
aguggguuuacauacuc

SEQ ID NO: 607 - RNA, 17 nt, Homo sapiens
guggguuuacauacuca

SEQ ID NO: 608 - RNA, 17 nt, Homo sapiens
guuuacauacucaacuc

SEQ ID NO: 609 - RNA, 17 nt, Homo sapiens
uacauacucaacuccug

SEQ ID NO: 610 - RNA, 17 nt, Homo sapiens
acucaacuccugccuuc

SEQ ID NO: 611 - RNA, 17 nt, Homo sapiens
uccugccuucucugagg

SEQ ID NO: 612 - RNA, 17 nt, Homo sapiens
ccugccuucucugagga

SEQ ID NO: 613 - RNA, 17 nt, Homo sapiens
ugccuucucugaggacu

SEQ ID NO: 614 - RNA, 17 nt, Homo sapiens
ugaggacuucuucaagg

SEQ ID NO: 615 - RNA, 17 nt, Homo sapiens
gaggacuucuucaagga

SEQ ID NO: 616 - RNA, 17 nt, Homo sapiens
ggacuucuucaaggaaa

SEQ ID NO: 617 - RNA, 17 nt, Homo sapiens
gacuucuucaaggaaag

SEQ ID NO: 618 - RNA, 17 nt, Homo sapiens
aggaaaguauuucagcu

SEQ ID NO: 619 - RNA, 17 nt, Homo sapiens
gaaaguauuucagcucc

SEQ ID NO: 620 - RNA, 17 nt, Homo sapiens
aaaguauuucagcuccg

SEQ ID NO: 621 - RNA, 17 nt, Homo sapiens
aaguauuucagcuccga

SEQ ID NO: 622 - RNA, 17 nt, Homo sapiens
uuucagcuccgaaguuu

SEQ ID NO: 623 - RNA, 17 nt, Homo sapiens
uccgaaguuuaauucag

SEQ ID NO: 624 - RNA, 17 nt, Homo sapiens
ccgaaguuuaauucagg

SEQ ID NO: 625 - RNA, 17 nt, Homo sapiens
cgaaguuuaauucagga

SEQ ID NO: 626 - RNA, 17 nt, Homo sapiens
aguuuaauucaggaagc

SEQ ID NO: 627 - RNA, 17 nt, Homo sapiens
guuuaauucaggaagcu

SEQ ID NO: 628 - RNA, 17 nt, Homo sapiens
aggaagcucugaugaug

SEQ ID NO: 629 - RNA, 17 nt, Homo sapiens
gaugaugucagauaugu

SEQ ID NO: 630 - RNA, 17 nt, Homo sapiens
ugucagauauguaaaug

SEQ ID NO: 631 - RNA, 17 nt, Homo sapiens
agauauguaaaugcuuu

SEQ ID NO: 632 - RNA, 17 nt, Homo sapiens
uaaaugcuuucaaguuc

SEQ ID NO: 633 - RNA, 17 nt, Homo sapiens
aaaugcuuucaaguuca

SEQ ID NO: 634 - RNA, 17 nt, Homo sapiens
aaugcuuucaaguucau

SEQ ID NO: 635 - RNA, 17 nt, Homo sapiens
uuucaaguucaugagcc

SEQ ID NO: 636 - RNA, 17 nt, Homo sapiens
uucaaguucaugagccu

SEQ ID NO: 637 - RNA, 17 nt, Homo sapiens
gaaagaaucaaaaccuu

SEQ ID NO: 638 - RNA, 17 nt, Homo sapiens
caaaaccuuugaagaac

SEQ ID NO: 639 - RNA, 17 nt, Homo sapiens
aaaaccuuugaagaacu

SEQ ID NO: 640 - RNA, 17 nt, Homo sapiens
gaagaacuuuuaccgaa

SEQ ID NO: 641 - RNA, 17 nt, Homo sapiens
aagaacuuuuaccgaau

SEQ ID NO: 642 - RNA, 17 nt, Homo sapiens
agaacuuuuaccgaaug

SEQ ID NO: 643 - RNA, 17 nt, Homo sapiens
gaacuuuuaccgaaugc

SEQ ID NO: 644 - RNA, 17 nt, Homo sapiens
ugccaccuccauguuug

SEQ ID NO: 645 - RNA, 17 nt, Homo sapiens
cuccauguuugaugacu

SEQ ID NO: 646 - RNA, 17 nt, Homo sapiens
uccauguuugaugacua

SEQ ID NO: 647 - RNA, 17 nt, Homo sapiens
ugaugacuaccagggcg

SEQ ID NO: 648 - RNA, 17 nt, Homo sapiens
gcagcacucuguuggcc

SEQ ID NO: 649 - RNA, 17 nt, Homo sapiens
cacucuguuggccucuc

SEQ ID NO: 650 - RNA, 17 nt, Homo sapiens
guuggccucucccaugc

SEQ ID NO: 651 - RNA, 17 nt, Homo sapiens
uggccucucccaugcug

SEQ ID NO: 652 - RNA, 17 nt, Homo sapiens
gaagcgcuucaccugga

SEQ ID NO: 653 - RNA, 17 nt, Homo sapiens
aagcgcuucaccuggac

SEQ ID NO: 654 - RNA, 17 nt, Homo sapiens
caaggccucgcucaaga

SEQ ID NO: 655 - RNA, 17 nt, Homo sapiens
gccucgcucaagauuga

SEQ ID NO: 656 - RNA, 17 nt, Homo sapiens
cucaagauugacuugag

SEQ ID NO: 657 - RNA, 17 nt, Homo sapiens
gauugacuugagaguaa

SEQ ID NO: 658 - RNA, 17 nt, Homo sapiens
uugagaguaaccaguaa

SEQ ID NO: 659 - RNA, 17 nt, Homo sapiens
uaaccaguaaaaguaag

SEQ ID NO: 660 - RNA, 17 nt, Homo sapiens
guaaaaguaaggagucg

SEQ ID NO: 661 - RNA, 17 nt, Homo sapiens
uaaggagucggggcugu

SEQ ID NO: 662 - RNA, 17 nt, Homo sapiens
ggggcugucugauguca

SEQ ID NO: 663 - RNA, 17 nt, Homo sapiens
ucugaugucagcaggcc

SEQ ID NO: 664 - RNA, 17 nt, Homo sapiens
ggcccaguuucugccau

SEQ ID NO: 665 - RNA, 17 nt, Homo sapiens
gcccaguuucugccauu

SEQ ID NO: 666 - RNA, 17 nt, Homo sapiens
cccaguuucugccauuc

SEQ ID NO: 667 - RNA, 17 nt, Homo sapiens
ucugccauuccagcugu

SEQ ID NO: 668 - RNA, 17 nt, Homo sapiens
cugccauuccagcugug

SEQ ID NO: 669 - RNA, 17 nt, Homo sapiens
gggcacgucagcgaagg

SEQ ID NO: 670 - RNA, 17 nt, Homo sapiens
gcgcagguucaccuacg

SEQ ID NO: 671 - RNA, 17 nt, Homo sapiens
cgcagguucaccuacga

SEQ ID NO: 672 - RNA, 17 nt, Homo sapiens
guucaccuacgaccacg

SEQ ID NO: 673 - RNA, 17 nt, Homo sapiens
aggaaaaucgcgugcug

SEQ ID NO: 674 - RNA, 17 nt, Homo sapiens
gugcugcuccccgcccc

SEQ ID NO: 675 - RNA, 17 nt, Homo sapiens
cccagacuacaacucgg

SEQ ID NO: 676 - RNA, 17 nt, Homo sapiens
cuacaacucgguggucc

SEQ ID NO: 677 - RNA, 17 nt, Homo sapiens
ucggugguccuguacuc

SEQ ID NO: 678 - RNA, 17 nt, Homo sapiens
gguccuguacuccaccc

SEQ ID NO: 679 - RNA, 17 nt, Homo sapiens
ccuguacuccaccccac

SEQ ID NO: 680 - RNA, 17 nt, Homo sapiens
ccacccaucuagaguuu

SEQ ID NO: 681 - RNA, 17 nt, Homo sapiens
acccaucuagaguuuga

SEQ ID NO: 682 - RNA, 17 nt, Homo sapiens
ucuagaguuugacacga

SEQ ID NO: 683 - RNA, 17 nt, Homo sapiens
cuagaguuugacacgaa

SEQ ID NO: 684 - RNA, 17 nt, Homo sapiens
cgaagccuuauuucuag

SEQ ID NO: 685 - RNA, 17 nt, Homo sapiens
gaagccuuauuucuaga

SEQ ID NO: 686 - RNA, 17 nt, Homo sapiens
agccuuauuucuagaag

SEQ ID NO: 687 - RNA, 17 nt, Homo sapiens
gccuuauuucuagaagc

SEQ ID NO: 688 - RNA, 17 nt, Homo sapiens
ccuuauuucuagaagca

SEQ ID NO: 689 - RNA, 17 nt, Homo sapiens
uuauuucuagaagcaca

SEQ ID NO: 690 - RNA, 17 nt, Homo sapiens
acauguguauuuauacc

SEQ ID NO: 691 - RNA, 17 nt, Homo sapiens
auguguauuuauacccc

SEQ ID NO: 692 - RNA, 17 nt, Homo sapiens
uguguauuuauaccccc

SEQ ID NO: 693 - RNA, 17 nt, Homo sapiens
guguauuuauaccccca

SEQ ID NO: 694 - RNA, 17 nt, Homo sapiens
guauuuauacccccagg

SEQ ID NO: 695 - RNA, 17 nt, Homo sapiens
aggaaacuagcuuuugc

SEQ ID NO: 696 - RNA, 17 nt, Homo sapiens
aacuagcuuuugccagu

SEQ ID NO: 697 - RNA, 17 nt, Homo sapiens
acuagcuuuugccagua

SEQ ID NO: 698 - RNA, 17 nt, Homo sapiens
cuagcuuuugccaguau

SEQ ID NO: 699 - RNA, 17 nt, Homo sapiens
uugccaguauuaugcau

SEQ ID NO: 700 - RNA, 17 nt, Homo sapiens
gccaguauuaugcauau

SEQ ID NO: 701 - RNA, 17 nt, Homo sapiens
ccaguauuaugcauaua

SEQ ID NO: 702 - RNA, 17 nt, Homo sapiens
uuaugcauauauaaguu

SEQ ID NO: 703 - RNA, 17 nt, Homo sapiens
augcauauauaaguuua

SEQ ID NO: 704 - RNA, 17 nt, Homo sapiens
gcauauauaaguuuaca

SEQ ID NO: 705 - RNA, 17 nt, Homo sapiens
auauaaguuuacaccuu

SEQ ID NO: 706 - RNA, 17 nt, Homo sapiens
uauaaguuuacaccuuu

SEQ ID NO: 707 - RNA, 17 nt, Homo sapiens
auaaguuuacaccuuua

SEQ ID NO: 708 - RNA, 17 nt, Homo sapiens
uuacaccuuuaucuuuc

SEQ ID NO: 709 - RNA, 17 nt, Homo sapiens
uacaccuuuaucuuucc

SEQ ID NO: 710 - RNA, 17 nt, Homo sapiens
acaccuuuaucuuucca

SEQ ID NO: 711 - RNA, 17 nt, Homo sapiens
accuuuaucuuuccaug

SEQ ID NO: 712 - RNA, 17 nt, Homo sapiens
cuuuaucuuuccauggg

SEQ ID NO: 713 - RNA, 17 nt, Homo sapiens
uuuaucuuuccauggga

SEQ ID NO: 714 - RNA, 17 nt, Homo sapiens
uuaucuuuccaugggag

SEQ ID NO: 715 - RNA, 17 nt, Homo sapiens
cagcugcuuuuugugau

SEQ ID NO: 716 - RNA, 17 nt, Homo sapiens
agcugcuuuuugugauu

SEQ ID NO: 717 - RNA, 17 nt, Homo sapiens
gcugcuuuuugugauuu

SEQ ID NO: 718 - RNA, 17 nt, Homo sapiens
cugcuuuuugugauuuu

SEQ ID NO: 719 - RNA, 17 nt, Homo sapiens
uuugugauuuuuuuaau

SEQ ID NO: 720 - RNA, 17 nt, Homo sapiens
uugugauuuuuuuaaua

SEQ ID NO: 721 - RNA, 17 nt, Homo sapiens
ugugauuuuuuuaauag

SEQ ID NO: 722 - RNA, 17 nt, Homo sapiens
gugauuuuuuuaauagu

SEQ ID NO: 723 - RNA, 17 nt, Homo sapiens
ugauuuuuuuaauagug

SEQ ID NO: 724 - RNA, 17 nt, Homo sapiens
gauuuuuuuaauagugc

SEQ ID NO: 725 - RNA, 17 nt, Homo sapiens
auuuuuuuaauagugcu

SEQ ID NO: 726 - RNA, 17 nt, Homo sapiens
uuuuuaauagugcuuuu

SEQ ID NO: 727 - RNA, 17 nt, Homo sapiens
auagugcuuuuuuuuuu

SEQ ID NO: 728 - RNA, 17 nt, Homo sapiens
uagugcuuuuuuuuuuu

SEQ ID NO: 729 - RNA, 17 nt, Homo sapiens
agugcuuuuuuuuuuug

SEQ ID NO: 730 - RNA, 17 nt, Homo sapiens
gugcuuuuuuuuuuuga

SEQ ID NO: 731 - RNA, 17 nt, Homo sapiens
ugcuuuuuuuuuuugac

SEQ ID NO: 732 - RNA, 17 nt, Homo sapiens
gcuuuuuuuuuuugacu

SEQ ID NO: 733 - RNA, 17 nt, Homo sapiens
cuuuuuuuuuuugacua

SEQ ID NO: 734 - RNA, 17 nt, Homo sapiens
uuuuuuuuuuugacuaa

SEQ ID NO: 735 - RNA, 17 nt, Homo sapiens
uuuuuuuuuugacuaac

SEQ ID NO: 736 - RNA, 17 nt, Homo sapiens
uuuuuuuuugacuaaca

SEQ ID NO: 737 - RNA, 17 nt, Homo sapiens
uuuugacuaacaagaau

SEQ ID NO: 738 - RNA, 17 nt, Homo sapiens
aagaauguaacuccaga

SEQ ID NO: 739 - RNA, 17 nt, Homo sapiens
auguaacuccagauaga

SEQ ID NO: 740 - RNA, 17 nt, Homo sapiens
cuccagauagagaaaua

SEQ ID NO: 741 - RNA, 17 nt, Homo sapiens
agagaaauagugacaag

SEQ ID NO: 742 - RNA, 17 nt, Homo sapiens
agaacacuacugcuaaa

SEQ ID NO: 743 - RNA, 17 nt, Homo sapiens
cuacugcuaaauccuca

SEQ ID NO: 744 - RNA, 17 nt, Homo sapiens
ugcuaaauccucauguu

SEQ ID NO: 745 - RNA, 17 nt, Homo sapiens
uaaauccucauguuacu

SEQ ID NO: 746 - RNA, 17 nt, Homo sapiens
ccucauguuacucagug

SEQ ID NO: 747 - RNA, 17 nt, Homo sapiens
cucauguuacucagugu

SEQ ID NO: 748 - RNA, 17 nt, Homo sapiens
auguuacucaguguuag

SEQ ID NO: 749 - RNA, 17 nt, Homo sapiens
cucaguguuagagaaau

SEQ ID NO: 750 - RNA, 17 nt, Homo sapiens
ucaguguuagagaaauc

SEQ ID NO: 751 - RNA, 17 nt, Homo sapiens
agagaaauccuuccuaa

SEQ ID NO: 752 - RNA, 17 nt, Homo sapiens
gaaauccuuccuaaacc

SEQ ID NO: 753 - RNA, 17 nt, Homo sapiens
aaauccuuccuaaaccc

SEQ ID NO: 754 - RNA, 17 nt, Homo sapiens
uccuuccuaaacccaau

SEQ ID NO: 755 - RNA, 17 nt, Homo sapiens
caaugacuucccugcuc

SEQ ID NO: 756 - RNA, 17 nt, Homo sapiens
aaugacuucccugcucc

SEQ ID NO: 757 - RNA, 17 nt, Homo sapiens
ucccugcuccaaccccc

SEQ ID NO: 758 - RNA, 17 nt, Homo sapiens
cgccaccucagggcacg

SEQ ID NO: 759 - RNA, 17 nt, Homo sapiens
ggaccaguuugauugag

SEQ ID NO: 760 - RNA, 17 nt, Homo sapiens
gaccaguuugauugagg

SEQ ID NO: 761 - RNA, 17 nt, Homo sapiens
aguuugauugaggagcu

SEQ ID NO: 762 - RNA, 17 nt, Homo sapiens
gcacugaucacccaaug

SEQ ID NO: 763 - RNA, 17 nt, Homo sapiens
caaugcaucacguaccc

SEQ ID NO: 764 - RNA, 17 nt, Homo sapiens
caucacguaccccacug

SEQ ID NO: 765 - RNA, 17 nt, Homo sapiens
aagcccguuagccccag

SEQ ID NO: 766 - RNA, 17 nt, Homo sapiens
agcccguuagccccagg

SEQ ID NO: 767 - RNA, 17 nt, Homo sapiens
caggggaucacuggcug

SEQ ID NO: 768 - RNA, 17 nt, Homo sapiens
agcaacaucucgggagu

SEQ ID NO: 769 - RNA, 17 nt, Homo sapiens
caacaucucgggagucc

SEQ ID NO: 770 - RNA, 17 nt, Homo sapiens
ucgggaguccucuagca

SEQ ID NO: 771 - RNA, 17 nt, Homo sapiens
ggaguccucuagcaggc

SEQ ID NO: 772 - RNA, 17 nt, Homo sapiens
aguccucuagcaggccu

SEQ ID NO: 773 - RNA, 17 nt, Homo sapiens
gcaggccuaagacaugu

SEQ ID NO: 774 - RNA, 17 nt, Homo sapiens
gaaagaauuugagacgc

SEQ ID NO: 775 - RNA, 17 nt, Homo sapiens
aaagaauuugagacgca

SEQ ID NO: 776 - RNA, 17 nt, Homo sapiens
acggggcucagcaaugc

SEQ ID NO: 777 - RNA, 17 nt, Homo sapiens
aaugccauuucaguggc

SEQ ID NO: 778 - RNA, 17 nt, Homo sapiens
augccauuucaguggcu

SEQ ID NO: 779 - RNA, 17 nt, Homo sapiens
ugccauuucaguggcuu

SEQ ID NO: 780 - RNA, 17 nt, Homo sapiens
caguggcuucccagcuc

SEQ ID NO: 781 - RNA, 17 nt, Homo sapiens
aguggcuucccagcucu

SEQ ID NO: 782 - RNA, 17 nt, Homo sapiens
ucccagcucugacccuu

SEQ ID NO: 783 - RNA, 17 nt, Homo sapiens
cugacccuucuacauuu

SEQ ID NO: 784 - RNA, 17 nt, Homo sapiens
ugacccuucuacauuug

SEQ ID NO: 785 - RNA, 17 nt, Homo sapiens
acccuucuacauuugag

SEQ ID NO: 786 - RNA, 17 nt, Homo sapiens
uucuacauuugagggcc

SEQ ID NO: 787 - RNA, 17 nt, Homo sapiens
ucuacauuugagggccc

SEQ ID NO: 788 - RNA, 17 nt, Homo sapiens
ggggacauuuucuggau

SEQ ID NO: 789 - RNA, 17 nt, Homo sapiens
gggacauuuucuggauu

SEQ ID NO: 790 - RNA, 17 nt, Homo sapiens
ggacauuuucuggauuc

SEQ ID NO: 791 - RNA, 17 nt, Homo sapiens
gacauuuucuggauucu

SEQ ID NO: 792 - RNA, 17 nt, Homo sapiens
uucuggauucugggagg

SEQ ID NO: 793 - RNA, 17 nt, Homo sapiens
ucuggauucugggaggc

SEQ ID NO: 794 - RNA, 17 nt, Homo sapiens
ggacaaauaucuuuuuu

SEQ ID NO: 795 - RNA, 17 nt, Homo sapiens
acaaauaucuuuuuugg

SEQ ID NO: 796 - RNA, 17 nt, Homo sapiens
aaauaucuuuuuuggaa

SEQ ID NO: 797 - RNA, 17 nt, Homo sapiens
aauaucuuuuuuggaac

SEQ ID NO: 798 - RNA, 17 nt, Homo sapiens
auaucuuuuuuggaacu

SEQ ID NO: 799 - RNA, 17 nt, Homo sapiens
uaucuuuuuuggaacua

SEQ ID NO: 800 - RNA, 17 nt, Homo sapiens
aucuuuuuuggaacuaa

SEQ ID NO: 801 - RNA, 17 nt, Homo sapiens
uuggaacuaaagcaaau

SEQ ID NO: 802 - RNA, 17 nt, Homo sapiens
aagcaaauuuuagaccu

SEQ ID NO: 803 - RNA, 17 nt, Homo sapiens
agcaaauuuuagaccuu

SEQ ID NO: 804 - RNA, 17 nt, Homo sapiens
gcaaauuuuagaccuuu

SEQ ID NO: 805 - RNA, 17 nt, Homo sapiens
caaauuuuagaccuuua

SEQ ID NO: 806 - RNA, 17 nt, Homo sapiens
uuagaccuuuaccuaug

SEQ ID NO: 807 - RNA, 17 nt, Homo sapiens
uagaccuuuaccuaugg

SEQ ID NO: 808 - RNA, 17 nt, Homo sapiens
agaccuuuaccuaugga

SEQ ID NO: 809 - RNA, 17 nt, Homo sapiens
cuuuaccuauggaagug

SEQ ID NO: 810 - RNA, 17 nt, Homo sapiens
gaagugguucuaugucc

SEQ ID NO: 811 - RNA, 17 nt, Homo sapiens
aagugguucuaugucca

SEQ ID NO: 812 - RNA, 17 nt, Homo sapiens
gugguucuauguccauu

SEQ ID NO: 813 - RNA, 17 nt, Homo sapiens
uucuauguccauucuca

SEQ ID NO: 814 - RNA, 17 nt, Homo sapiens
auguccauucucauucg

SEQ ID NO: 815 - RNA, 17 nt, Homo sapiens
uguccauucucauucgu

SEQ ID NO: 816 - RNA, 17 nt, Homo sapiens
uccauucucauucgugg

SEQ ID NO: 817 - RNA, 17 nt, Homo sapiens
auucucauucguggcau

SEQ ID NO: 818 - RNA, 17 nt, Homo sapiens
uucucauucguggcaug

SEQ ID NO: 819 - RNA, 17 nt, Homo sapiens
uggcauguuuugauuug

SEQ ID NO: 820 - RNA, 17 nt, Homo sapiens
ggcauguuuugauuugu

SEQ ID NO: 821 - RNA, 17 nt, Homo sapiens
gcauguuuugauuugua

SEQ ID NO: 822 - RNA, 17 nt, Homo sapiens
guuuugauuuguagcac

SEQ ID NO: 823 - RNA, 17 nt, Homo sapiens
uuuugauuuguagcacu

SEQ ID NO: 824 - RNA, 17 nt, Homo sapiens
ugauuuguagcacugag

SEQ ID NO: 825 - RNA, 17 nt, Homo sapiens
guggcacucaacucuga

SEQ ID NO: 826 - RNA, 17 nt, Homo sapiens
acucaacucugagccca

SEQ ID NO: 827 - RNA, 17 nt, Homo sapiens
gagcccauacuuuuggc

SEQ ID NO: 828 - RNA, 17 nt, Homo sapiens
cccauacuuuuggcucc

SEQ ID NO: 829 - RNA, 17 nt, Homo sapiens
ccauacuuuuggcuccu

SEQ ID NO: 830 - RNA, 17 nt, Homo sapiens
cauacuuuuggcuccuc

SEQ ID NO: 831 - RNA, 17 nt, Homo sapiens
uuuuggcuccucuagua

SEQ ID NO: 832 - RNA, 17 nt, Homo sapiens
uggcuccucuaguaaga

SEQ ID NO: 833 - RNA, 17 nt, Homo sapiens
gcuccucuaguaagaug

SEQ ID NO: 834 - RNA, 17 nt, Homo sapiens
ccucuaguaagaugcac

SEQ ID NO: 835 - RNA, 17 nt, Homo sapiens
ugaaaacuuagccagag

SEQ ID NO: 836 - RNA, 17 nt, Homo sapiens
gaaaacuuagccagagu

SEQ ID NO: 837 - RNA, 17 nt, Homo sapiens
gccagaguuagguuguc

SEQ ID NO: 838 - RNA, 17 nt, Homo sapiens
ccagaguuagguugucu

SEQ ID NO: 839 - RNA, 17 nt, Homo sapiens
aguuagguugucuccag

SEQ ID NO: 840 - RNA, 17 nt, Homo sapiens
uagguugucuccaggcc

SEQ ID NO: 841 - RNA, 17 nt, Homo sapiens
gguugucuccaggccau

SEQ ID NO: 842 - RNA, 17 nt, Homo sapiens
gauggccuuacacugaa

SEQ ID NO: 843 - RNA, 17 nt, Homo sapiens
auggccuuacacugaaa

SEQ ID NO: 844 - RNA, 17 nt, Homo sapiens
gaaaaugucacauucua

SEQ ID NO: 845 - RNA, 17 nt, Homo sapiens
ugucacauucuauuuug

SEQ ID NO: 846 - RNA, 17 nt, Homo sapiens
gucacauucuauuuugg

SEQ ID NO: 847 - RNA, 17 nt, Homo sapiens
cacauucuauuuugggu

SEQ ID NO: 848 - RNA, 17 nt, Homo sapiens
cauucuauuuuggguau

SEQ ID NO: 849 - RNA, 17 nt, Homo sapiens
auucuauuuuggguauu

SEQ ID NO: 850 - RNA, 17 nt, Homo sapiens
uucuauuuuggguauua

SEQ ID NO: 851 - RNA, 17 nt, Homo sapiens
uuuuggguauuaauaua

SEQ ID NO: 852 - RNA, 17 nt, Homo sapiens
uuggguauuaauauaua

SEQ ID NO: 853 - RNA, 17 nt, Homo sapiens
uggguauuaauauauag

SEQ ID NO: 854 - RNA, 17 nt, Homo sapiens
guauuaauauauagucc

SEQ ID NO: 855 - RNA, 17 nt, Homo sapiens
auuaauauauaguccag

SEQ ID NO: 856 - RNA, 17 nt, Homo sapiens
uaauauauaguccagac

SEQ ID NO: 857 - RNA, 17 nt, Homo sapiens
uauauaguccagacacu

SEQ ID NO: 858 - RNA, 17 nt, Homo sapiens
cagacacuuaacucaau

SEQ ID NO: 859 - RNA, 17 nt, Homo sapiens
agacacuuaacucaauu

SEQ ID NO: 860 - RNA, 17 nt, Homo sapiens
acuuaacucaauuucuu

SEQ ID NO: 861 - RNA, 17 nt, Homo sapiens
aacucaauuucuuggua

SEQ ID NO: 862 - RNA, 17 nt, Homo sapiens
acucaauuucuugguau

SEQ ID NO: 863 - RNA, 17 nt, Homo sapiens
cucaauuucuugguauu

SEQ ID NO: 864 - RNA, 17 nt, Homo sapiens
caauuucuugguauuau

SEQ ID NO: 865 - RNA, 17 nt, Homo sapiens
uucuugguauuauucug

SEQ ID NO: 866 - RNA, 17 nt, Homo sapiens
cuugguauuauucuguu

SEQ ID NO: 867 - RNA, 17 nt, Homo sapiens
uugguauuauucuguuu

SEQ ID NO: 868 - RNA, 17 nt, Homo sapiens
gguauuauucuguuuug

SEQ ID NO: 869 - RNA, 17 nt, Homo sapiens
guauuauucuguuuugc

SEQ ID NO: 870 - RNA, 17 nt, Homo sapiens
uauucuguuuugcacag

SEQ ID NO: 871 - RNA, 17 nt, Homo sapiens
auucuguuuugcacagu

SEQ ID NO: 872 - RNA, 17 nt, Homo sapiens
uucuguuuugcacaguu

SEQ ID NO: 873 - RNA, 17 nt, Homo sapiens
ugcacaguuaguuguga

SEQ ID NO: 874 - RNA, 17 nt, Homo sapiens
gcacaguuaguugugaa

SEQ ID NO: 875 - RNA, 17 nt, Homo sapiens
caguuaguugugaaaga

SEQ ID NO: 876 - RNA, 17 nt, Homo sapiens
aaugcaguccugaggag

SEQ ID NO: 877 - RNA, 17 nt, Homo sapiens
aggagaguuuucuccau

SEQ ID NO: 878 - RNA, 17 nt, Homo sapiens
ggagaguuuucuccaua

SEQ ID NO: 879 - RNA, 17 nt, Homo sapiens
gagaguuuucuccauau

SEQ ID NO: 880 - RNA, 17 nt, Homo sapiens
agaguuuucuccauauc

SEQ ID NO: 881 - RNA, 17 nt, Homo sapiens
aguuuucuccauaucaa

SEQ ID NO: 882 - RNA, 17 nt, Homo sapiens
uucuccauaucaaaacg

SEQ ID NO: 883 - RNA, 17 nt, Homo sapiens
cuccauaucaaaacgag

SEQ ID NO: 884 - RNA, 17 nt, Homo sapiens
aaaaaggucaauaaggu

SEQ ID NO: 885 - RNA, 17 nt, Homo sapiens
aggucaauaaggucaag

SEQ ID NO: 886 - RNA, 17 nt, Homo sapiens
aauaaggucaagggaag

SEQ ID NO: 887 - RNA, 17 nt, Homo sapiens
gaccccgucucuauacc

SEQ ID NO: 888 - RNA, 17 nt, Homo sapiens
ccccgucucuauaccaa

SEQ ID NO: 889 - RNA, 17 nt, Homo sapiens
ccgucucuauaccaacc

SEQ ID NO: 890 - RNA, 17 nt, Homo sapiens
gucucuauaccaaccaa

SEQ ID NO: 891 - RNA, 17 nt, Homo sapiens
aaaccaauucaccaaca

SEQ ID NO: 892 - RNA, 17 nt, Homo sapiens
aaccaauucaccaacac

SEQ ID NO: 893 - RNA, 17 nt, Homo sapiens
aacacaguugggaccca

SEQ ID NO: 894 - RNA, 17 nt, Homo sapiens
caggaagucagucacgu

SEQ ID NO: 895 - RNA, 17 nt, Homo sapiens
aagucagucacguuucc

SEQ ID NO: 896 - RNA, 17 nt, Homo sapiens
agucacguuuccuuuuc

SEQ ID NO: 897 - RNA, 17 nt, Homo sapiens
gucacguuuccuuuuca

SEQ ID NO: 898 - RNA, 17 nt, Homo sapiens
ucacguuuccuuuucau

SEQ ID NO: 899 - RNA, 17 nt, Homo sapiens
cguuuccuuuucauuua

SEQ ID NO: 900 - RNA, 17 nt, Homo sapiens
guuuccuuuucauuuaa

SEQ ID NO: 901 - RNA, 17 nt, Homo sapiens
uuuccuuuucauuuaau

SEQ ID NO: 902 - RNA, 17 nt, Homo sapiens
uuccuuuucauuuaaug

SEQ ID NO: 903 - RNA, 17 nt, Homo sapiens
cuuuucauuuaaugggg

SEQ ID NO: 904 - RNA, 17 nt, Homo sapiens
uuuucauuuaaugggga

SEQ ID NO: 905 - RNA, 17 nt, Homo sapiens
uuucauuuaauggggau

SEQ ID NO: 906 - RNA, 17 nt, Homo sapiens
auggggauuccacuauc

SEQ ID NO: 907 - RNA, 17 nt, Homo sapiens
uggggauuccacuaucu

SEQ ID NO: 908 - RNA, 17 nt, Homo sapiens
auuccacuaucucacac

SEQ ID NO: 909 - RNA, 17 nt, Homo sapiens
uccacuaucucacacua

SEQ ID NO: 910 - RNA, 17 nt, Homo sapiens
cacuaucucacacuaau

SEQ ID NO: 911 - RNA, 17 nt, Homo sapiens
cucacacuaaucugaaa

SEQ ID NO: 912 - RNA, 17 nt, Homo sapiens
acacuaaucugaaagga

SEQ ID NO: 913 - RNA, 17 nt, Homo sapiens
aagagcauuagcuggcg

SEQ ID NO: 914 - RNA, 17 nt, Homo sapiens
agagcauuagcuggcgc

SEQ ID NO: 915 - RNA, 17 nt, Homo sapiens
uggcgcauauuaagcac

SEQ ID NO: 916 - RNA, 17 nt, Homo sapiens
gcgcauauuaagcacuu

SEQ ID NO: 917 - RNA, 17 nt, Homo sapiens
cgcauauuaagcacuuu

SEQ ID NO: 918 - RNA, 17 nt, Homo sapiens
uaagcacuuuaagcucc

SEQ ID NO: 919 - RNA, 17 nt, Homo sapiens
aagcacuuuaagcuccu

SEQ ID NO: 920 - RNA, 17 nt, Homo sapiens
agcacuuuaagcuccuu

SEQ ID NO: 921 - RNA, 17 nt, Homo sapiens
uuuaagcuccuugagua

SEQ ID NO: 922 - RNA, 17 nt, Homo sapiens
aagcuccuugaguaaaa

SEQ ID NO: 923 - RNA, 17 nt, Homo sapiens
ccuugaguaaaaaggug

SEQ ID NO: 924 - RNA, 17 nt, Homo sapiens
aaggugguauguaauuu

SEQ ID NO: 925 - RNA, 17 nt, Homo sapiens
ugguauguaauuuaugc

SEQ ID NO: 926 - RNA, 17 nt, Homo sapiens
uauguaauuuaugcaag

SEQ ID NO: 927 - RNA, 17 nt, Homo sapiens
auguaauuuaugcaagg

SEQ ID NO: 928 - RNA, 17 nt, Homo sapiens
uguaauuuaugcaaggu

SEQ ID NO: 929 - RNA, 17 nt, Homo sapiens
ugcaagguauuucucca

SEQ ID NO: 930 - RNA, 17 nt, Homo sapiens
caagguauuucuccagu

SEQ ID NO: 931 - RNA, 17 nt, Homo sapiens
aagguauuucuccaguu

SEQ ID NO: 932 - RNA, 17 nt, Homo sapiens
agguauuucuccaguug

SEQ ID NO: 933 - RNA, 17 nt, Homo sapiens
guauuucuccaguuggg

SEQ ID NO: 934 - RNA, 17 nt, Homo sapiens
ucuccaguugggacuca

SEQ ID NO: 935 - RNA, 17 nt, Homo sapiens
uugggacucaggauauu

SEQ ID NO: 936 - RNA, 17 nt, Homo sapiens
cucaggauauuaguuaa

SEQ ID NO: 937 - RNA, 17 nt, Homo sapiens
caggauauuaguuaaug

SEQ ID NO: 938 - RNA, 17 nt, Homo sapiens
aggauauuaguuaauga

SEQ ID NO: 939 - RNA, 17 nt, Homo sapiens
auauuaguuaaugagcc

SEQ ID NO: 940 - RNA, 17 nt, Homo sapiens
uauuaguuaaugagcca

SEQ ID NO: 941 - RNA, 17 nt, Homo sapiens
ugagccaucacuagaag

SEQ ID NO: 942 - RNA, 17 nt, Homo sapiens
ccaucacuagaagaaaa

SEQ ID NO: 943 - RNA, 17 nt, Homo sapiens
aagcccauuuucaacug

SEQ ID NO: 944 - RNA, 17 nt, Homo sapiens
agcccauuuucaacugc

SEQ ID NO: 945 - RNA, 17 nt, Homo sapiens
gcccauuuucaacugcu

SEQ ID NO: 946 - RNA, 17 nt, Homo sapiens
cccauuuucaacugcuu

SEQ ID NO: 947 - RNA, 17 nt, Homo sapiens
caacugcuuugaaacuu

SEQ ID NO: 948 - RNA, 17 nt, Homo sapiens
aacugcuuugaaacuug

SEQ ID NO: 949 - RNA, 17 nt, Homo sapiens
uugaaacuugccugggg

SEQ ID NO: 950 - RNA, 17 nt, Homo sapiens
ccuggggucugagcaug

SEQ ID NO: 951 - RNA, 17 nt, Homo sapiens
augggaauagggagaca

SEQ ID NO: 952 - RNA, 17 nt, Homo sapiens
gacaggguaggaaaggg

SEQ ID NO: 953 - RNA, 17 nt, Homo sapiens
gggcgccuacucuucag

SEQ ID NO: 954 - RNA, 17 nt, Homo sapiens
cgccuacucuucagggu

SEQ ID NO: 955 - RNA, 17 nt, Homo sapiens
ccuacucuucagggucu

SEQ ID NO: 956 - RNA, 17 nt, Homo sapiens
cuacucuucagggucua

SEQ ID NO: 957 - RNA, 17 nt, Homo sapiens
uucagggucuaaagauc

SEQ ID NO: 958 - RNA, 17 nt, Homo sapiens
cagggucuaaagaucaa

SEQ ID NO: 959 - RNA, 17 nt, Homo sapiens
cuaaagaucaagugggc

SEQ ID NO: 960 - RNA, 17 nt, Homo sapiens
gugggccuuggaucgcu

SEQ ID NO: 961 - RNA, 17 nt, Homo sapiens
ccuuggaucgcuaagcu

SEQ ID NO: 962 - RNA, 17 nt, Homo sapiens
ggaucgcuaagcuggcu

SEQ ID NO: 963 - RNA, 17 nt, Homo sapiens
agcuggcucuguuugau

SEQ ID NO: 964 - RNA, 17 nt, Homo sapiens
ggcucuguuugaugcua

SEQ ID NO: 965 - RNA, 17 nt, Homo sapiens
gcucuguuugaugcuau

SEQ ID NO: 966 - RNA, 17 nt, Homo sapiens
uugaugcuauuuaugca

SEQ ID NO: 967 - RNA, 17 nt, Homo sapiens
gaugcuauuuaugcaag

SEQ ID NO: 968 - RNA, 17 nt, Homo sapiens
augcuauuuaugcaagu

SEQ ID NO: 969 - RNA, 17 nt, Homo sapiens
ugcuauuuaugcaaguu

SEQ ID NO: 970 - RNA, 17 nt, Homo sapiens
augcaaguuagggucua

SEQ ID NO: 971 - RNA, 17 nt, Homo sapiens
ugcaaguuagggucuau

SEQ ID NO: 972 - RNA, 17 nt, Homo sapiens
guuagggucuauguauu

SEQ ID NO: 973 - RNA, 17 nt, Homo sapiens
uagggucuauguauuua

SEQ ID NO: 974 - RNA, 17 nt, Homo sapiens
gucuauguauuuaggau

SEQ ID NO: 975 - RNA, 17 nt, Homo sapiens
cuauguauuuaggaugc

SEQ ID NO: 976 - RNA, 17 nt, Homo sapiens
uauguauuuaggaugcg

SEQ ID NO: 977 - RNA, 17 nt, Homo sapiens
auguauuuaggaugcgc

SEQ ID NO: 978 - RNA, 17 nt, Homo sapiens
augcgccuacucuucag

SEQ ID NO: 979 - RNA, 17 nt, Homo sapiens
cuauguauuuaggaugu

SEQ ID NO: 980 - RNA, 17 nt, Homo sapiens
uauguauuuaggauguc

SEQ ID NO: 981 - RNA, 17 nt, Homo sapiens
auguauuuaggaugucu

SEQ ID NO: 982 - RNA, 17 nt, Homo sapiens
uaggaugucugcaccuu

SEQ ID NO: 983 - RNA, 17 nt, Homo sapiens
cugcaccuucugcagcc

SEQ ID NO: 984 - RNA, 17 nt, Homo sapiens
ugcaccuucugcagcca

SEQ ID NO: 985 - RNA, 17 nt, Homo sapiens
cagccagucagaagcug

SEQ ID NO: 986 - RNA, 17 nt, Homo sapiens
caguggauugcugcuuc

SEQ ID NO: 987 - RNA, 17 nt, Homo sapiens
uugcugcuucuugggga

SEQ ID NO: 988 - RNA, 17 nt, Homo sapiens
ugcugcuucuuggggag

SEQ ID NO: 989 - RNA, 17 nt, Homo sapiens
cugcuucuuggggagaa

SEQ ID NO: 990 - RNA, 17 nt, Homo sapiens
agaagaguaugcuuccu

SEQ ID NO: 991 - RNA, 17 nt, Homo sapiens
aguaugcuuccuuuuau

SEQ ID NO: 992 - RNA, 17 nt, Homo sapiens
guaugcuuccuuuuauc

SEQ ID NO: 993 - RNA, 17 nt, Homo sapiens
ugcuuccuuuuauccau

SEQ ID NO: 994 - RNA, 17 nt, Homo sapiens
gcuuccuuuuauccaug

SEQ ID NO: 995 - RNA, 17 nt, Homo sapiens
cuuccuuuuauccaugu

SEQ ID NO: 996 - RNA, 17 nt, Homo sapiens
uuccuuuuauccaugua

SEQ ID NO: 997 - RNA, 17 nt, Homo sapiens
ccuuuuauccauguaau

SEQ ID NO: 998 - RNA, 17 nt, Homo sapiens
auccauguaauuuaacu

SEQ ID NO: 999 - RNA, 17 nt, Homo sapiens
cauguaauuuaacugua

SEQ ID NO: 1000 - RNA, 17 nt, Homo sapiens
auguaauuuaacuguag

SEQ ID NO: 1001 - RNA, 17 nt, Homo sapiens
uguaauuuaacuguaga

SEQ ID NO: 1002 - RNA, 17 nt, Homo sapiens
uuaacuguagaaccuga

SEQ ID NO: 1003 - RNA, 17 nt, Homo sapiens
ccugagcucuaaguaac

SEQ ID NO: 1004 - RNA, 17 nt, Homo sapiens
ugagcucuaaguaaccg

SEQ ID NO: 1005 - RNA, 17 nt, Homo sapiens
cucuaaguaaccgaaga

SEQ ID NO: 1006 - RNA, 17 nt, Homo sapiens
aagaauguaugccucug

SEQ ID NO: 1007 - RNA, 17 nt, Homo sapiens
guaugccucuguucuua

SEQ ID NO: 1008 - RNA, 17 nt, Homo sapiens
gccucuguucuuaugug

SEQ ID NO: 1009 - RNA, 17 nt, Homo sapiens
ccucuguucuuaugugc

SEQ ID NO: 1010 - RNA, 17 nt, Homo sapiens
ucuguucuuaugugcca

SEQ ID NO: 1011 - RNA, 17 nt, Homo sapiens
cuguucuuaugugccac

SEQ ID NO: 1012 - RNA, 17 nt, Homo sapiens
ugccacauccuuguuua

SEQ ID NO: 1013 - RNA, 17 nt, Homo sapiens
cacauccuuguuuaaag

SEQ ID NO: 1014 - RNA, 17 nt, Homo sapiens
auccuuguuuaaaggcu

SEQ ID NO: 1015 - RNA, 17 nt, Homo sapiens
uccuuguuuaaaggcuc

SEQ ID NO: 1016 - RNA, 17 nt, Homo sapiens
ccuuguuuaaaggcucu

SEQ ID NO: 1017 - RNA, 17 nt, Homo sapiens
uaaaggcucucuguaug

SEQ ID NO: 1018 - RNA, 17 nt, Homo sapiens
aaggcucucuguaugaa

SEQ ID NO: 1019 - RNA, 17 nt, Homo sapiens
cucucuguaugaagaga

SEQ ID NO: 1020 - RNA, 17 nt, Homo sapiens
gggaccgucaucagcac

SEQ ID NO: 1021 - RNA, 17 nt, Homo sapiens
accgucaucagcacauu

SEQ ID NO: 1022 - RNA, 17 nt, Homo sapiens
cagcacauucccuagug

SEQ ID NO: 1023 - RNA, 17 nt, Homo sapiens
agcacauucccuaguga

SEQ ID NO: 1024 - RNA, 17 nt, Homo sapiens
cauucccuagugagccu

SEQ ID NO: 1025 - RNA, 17 nt, Homo sapiens
gugagccuacuggcucc

SEQ ID NO: 1026 - RNA, 17 nt, Homo sapiens
uacuggcuccuggcagc

SEQ ID NO: 1027 - RNA, 17 nt, Homo sapiens
cagcggcuuuuguggaa

SEQ ID NO: 1028 - RNA, 17 nt, Homo sapiens
agcggcuuuuguggaag

SEQ ID NO: 1029 - RNA, 17 nt, Homo sapiens
gcggcuuuuguggaaga

SEQ ID NO: 1030 - RNA, 17 nt, Homo sapiens
ggaagacucacuagcca

SEQ ID NO: 1031 - RNA, 17 nt, Homo sapiens
gacucacuagccagaag

SEQ ID NO: 1032 - RNA, 17 nt, Homo sapiens
gggacaguccucuccac

SEQ ID NO: 1033 - RNA, 17 nt, Homo sapiens
acaguccucuccaccaa

SEQ ID NO: 1034 - RNA, 17 nt, Homo sapiens
aguccucuccaccaaga

SEQ ID NO: 1035 - RNA, 17 nt, Homo sapiens
accaagaucuaaaucca

SEQ ID NO: 1036 - RNA, 17 nt, Homo sapiens
caagaucuaaauccaaa

SEQ ID NO: 1037 - RNA, 17 nt, Homo sapiens
aucuaaauccaaacaaa

SEQ ID NO: 1038 - RNA, 17 nt, Homo sapiens
agcaggcuagagccaga

SEQ ID NO: 1039 - RNA, 17 nt, Homo sapiens
ggacaaaucuuuguugu

SEQ ID NO: 1040 - RNA, 17 nt, Homo sapiens
acaaaucuuuguuguuc

SEQ ID NO: 1041 - RNA, 17 nt, Homo sapiens
caaaucuuuguuguucc

SEQ ID NO: 1042 - RNA, 17 nt, Homo sapiens
aucuuuguuguuccucu

SEQ ID NO: 1043 - RNA, 17 nt, Homo sapiens
uuuguuguuccucuucu

SEQ ID NO: 1044 - RNA, 17 nt, Homo sapiens
uuguuguuccucuucuu

SEQ ID NO: 1045 - RNA, 17 nt, Homo sapiens
uuguuccucuucuuuac

SEQ ID NO: 1046 - RNA, 17 nt, Homo sapiens
guuccucuucuuuacac

SEQ ID NO: 1047 - RNA, 17 nt, Homo sapiens
uuccucuucuuuacaca

SEQ ID NO: 1048 - RNA, 17 nt, Homo sapiens
ccucuucuuuacacaua

SEQ ID NO: 1049 - RNA, 17 nt, Homo sapiens
cucuucuuuacacauac

SEQ ID NO: 1050 - RNA, 17 nt, Homo sapiens
ucuucuuuacacauacg

SEQ ID NO: 1051 - RNA, 17 nt, Homo sapiens
uuacacauacgcaaacc

SEQ ID NO: 1052 - RNA, 17 nt, Homo sapiens
cuggcaauuuuauaaau

SEQ ID NO: 1053 - RNA, 17 nt, Homo sapiens
uggcaauuuuauaaauc

SEQ ID NO: 1054 - RNA, 17 nt, Homo sapiens
ggcaauuuuauaaauca

SEQ ID NO: 1055 - RNA, 17 nt, Homo sapiens
gcaauuuuauaaaucag

SEQ ID NO: 1056 - RNA, 17 nt, Homo sapiens
aauuuuauaaaucaggu

SEQ ID NO: 1057 - RNA, 17 nt, Homo sapiens
uuauaaaucagguaacu

SEQ ID NO: 1058 - RNA, 17 nt, Homo sapiens
aaucagguaacuggaag

SEQ ID NO: 1059 - RNA, 17 nt, Homo sapiens
aaggagguuaaacucag

SEQ ID NO: 1060 - RNA, 17 nt, Homo sapiens
aggagguuaaacucaga

SEQ ID NO: 1061 - RNA, 17 nt, Homo sapiens
guuaaacucagaaaaaa

SEQ ID NO: 1062 - RNA, 17 nt, Homo sapiens
gaagaccucagucaauu

SEQ ID NO: 1063 - RNA, 17 nt, Homo sapiens
accucagucaauucucu

SEQ ID NO: 1064 - RNA, 17 nt, Homo sapiens
cagucaauucucuacuu

SEQ ID NO: 1065 - RNA, 17 nt, Homo sapiens
agucaauucucuacuuu

SEQ ID NO: 1066 - RNA, 17 nt, Homo sapiens
ucaauucucuacuuuuu

SEQ ID NO: 1067 - RNA, 17 nt, Homo sapiens
aauucucuacuuuuuuu

SEQ ID NO: 1068 - RNA, 17 nt, Homo sapiens
ucucuacuuuuuuuuuu

SEQ ID NO: 1069 - RNA, 17 nt, Homo sapiens
cucuacuuuuuuuuuuu

SEQ ID NO: 1070 - RNA, 17 nt, Homo sapiens
ucuacuuuuuuuuuuuu

SEQ ID NO: 1071 - RNA, 17 nt, Homo sapiens
cuacuuuuuuuuuuuuu

SEQ ID NO: 1072 - RNA, 17 nt, Homo sapiens
uacuuuuuuuuuuuuuu

SEQ ID NO: 1073 - RNA, 17 nt, Homo sapiens
acuuuuuuuuuuuuuuu

SEQ ID NO: 1074 - RNA, 17 nt, Homo sapiens
cuuuuuuuuuuuuuuuu

SEQ ID NO: 1075 - RNA, 17 nt, Homo sapiens
uuuuuuuuuuuuuuuuc

SEQ ID NO: 1076 - RNA, 17 nt, Homo sapiens
uuuuuuuuuuuuuuucc

SEQ ID NO: 1077 - RNA, 17 nt, Homo sapiens
uuuuuuuuuuuuuucca

SEQ ID NO: 1078 - RNA, 17 nt, Homo sapiens
uuuuuuuuuuuuuccaa

SEQ ID NO: 1079 - RNA, 17 nt, Homo sapiens
uuuuuuuuuuuuccaaa

SEQ ID NO: 1080 - RNA, 17 nt, Homo sapiens
uuuuuuuuuuuccaaau

SEQ ID NO: 1081 - RNA, 17 nt, Homo sapiens
uuuuuuuuuuccaaauc

SEQ ID NO: 1082 - RNA, 17 nt, Homo sapiens
uuuuuuuuuccaaauca

SEQ ID NO: 1083 - RNA, 17 nt, Homo sapiens
uuuuuuuuccaaaucag

SEQ ID NO: 1084 - RNA, 17 nt, Homo sapiens
uuccaaaucagauaaua

SEQ ID NO: 1085 - RNA, 17 nt, Homo sapiens
aaucagauaauagccca

SEQ ID NO: 1086 - RNA, 17 nt, Homo sapiens
cagauaauagcccagca

SEQ ID NO: 1087 - RNA, 17 nt, Homo sapiens
cagcaaauagugauaac

SEQ ID NO: 1088 - RNA, 17 nt, Homo sapiens
auagugauaacaaauaa

SEQ ID NO: 1089 - RNA, 17 nt, Homo sapiens
uaacaaauaaaaccuua

SEQ ID NO: 1090 - RNA, 17 nt, Homo sapiens
uaaaaccuuagcuguuc

SEQ ID NO: 1091 - RNA, 17 nt, Homo sapiens
aaaaccuuagcuguuca

SEQ ID NO: 1092 - RNA, 17 nt, Homo sapiens
uuagcuguucaugucuu

SEQ ID NO: 1093 - RNA, 17 nt, Homo sapiens
uagcuguucaugucuug

SEQ ID NO: 1094 - RNA, 17 nt, Homo sapiens
guucaugucuugauuuc

SEQ ID NO: 1095 - RNA, 17 nt, Homo sapiens
ucaugucuugauuucaa

SEQ ID NO: 1096 - RNA, 17 nt, Homo sapiens
gucuugauuucaauaau

SEQ ID NO: 1097 - RNA, 17 nt, Homo sapiens
ucuugauuucaauaauu

SEQ ID NO: 1098 - RNA, 17 nt, Homo sapiens
cuugauuucaauaauua

SEQ ID NO: 1099 - RNA, 17 nt, Homo sapiens
auuucaauaauuaauuc

SEQ ID NO: 1100 - RNA, 17 nt, Homo sapiens
ucaauaauuaauucuua

SEQ ID NO: 1101 - RNA, 17 nt, Homo sapiens
caauaauuaauucuuaa

SEQ ID NO: 1102 - RNA, 17 nt, Homo sapiens
uaauuaauucuuaauca

SEQ ID NO: 1103 - RNA, 17 nt, Homo sapiens
aauuaauucuuaaucau

SEQ ID NO: 1104 - RNA, 17 nt, Homo sapiens
uuaauucuuaaucauua

SEQ ID NO: 1105 - RNA, 17 nt, Homo sapiens
uaauucuuaaucauuaa

SEQ ID NO: 1106 - RNA, 17 nt, Homo sapiens
uucuuaaucauuaagag

SEQ ID NO: 1107 - RNA, 17 nt, Homo sapiens
uuaaucauuaagagacc

SEQ ID NO: 1108 - RNA, 17 nt, Homo sapiens
uaaucauuaagagacca

SEQ ID NO: 1109 - RNA, 17 nt, Homo sapiens
gagaccauaauaaauac

SEQ ID NO: 1110 - RNA, 17 nt, Homo sapiens
accauaauaaauacucc

SEQ ID NO: 1111 - RNA, 17 nt, Homo sapiens
uaauaaauacuccuuuu

SEQ ID NO: 1112 - RNA, 17 nt, Homo sapiens
uaaauacuccuuuucaa

SEQ ID NO: 1113 - RNA, 17 nt, Homo sapiens
auacuccuuuucaagag

SEQ ID NO: 1114 - RNA, 17 nt, Homo sapiens
uacuccuuuucaagaga

SEQ ID NO: 1115 - RNA, 17 nt, Homo sapiens
acuccuuuucaagagaa

SEQ ID NO: 1116 - RNA, 17 nt, Homo sapiens
cuccuuuucaagagaaa

SEQ ID NO: 1117 - RNA, 17 nt, Homo sapiens
aaaaccauuagaauugu

SEQ ID NO: 1118 - RNA, 17 nt, Homo sapiens
aaaccauuagaauuguu

SEQ ID NO: 1119 - RNA, 17 nt, Homo sapiens
auuagaauuguuacuca

SEQ ID NO: 1120 - RNA, 17 nt, Homo sapiens
agaauuguuacucagcu

SEQ ID NO: 1121 - RNA, 17 nt, Homo sapiens
gaauuguuacucagcuc

SEQ ID NO: 1122 - RNA, 17 nt, Homo sapiens
uuguuacucagcuccuu

SEQ ID NO: 1123 - RNA, 17 nt, Homo sapiens
acucagcuccuucaaac

SEQ ID NO: 1124 - RNA, 17 nt, Homo sapiens
cagcuccuucaaacuca

SEQ ID NO: 1125 - RNA, 17 nt, Homo sapiens
agcuccuucaaacucag

SEQ ID NO: 1126 - RNA, 17 nt, Homo sapiens
uucaaacucagguuugu

SEQ ID NO: 1127 - RNA, 17 nt, Homo sapiens
acucagguuuguagcau

SEQ ID NO: 1128 - RNA, 17 nt, Homo sapiens
cucagguuuguagcaua

SEQ ID NO: 1129 - RNA, 17 nt, Homo sapiens
agguuuguagcauacau

SEQ ID NO: 1130 - RNA, 17 nt, Homo sapiens
uguagcauacaugaguc

SEQ ID NO: 1131 - RNA, 17 nt, Homo sapiens
acaugaguccauccauc

SEQ ID NO: 1132 - RNA, 17 nt, Homo sapiens
gaguccauccaucaguc

SEQ ID NO: 1133 - RNA, 17 nt, Homo sapiens
ccauccaucagucaaag

SEQ ID NO: 1134 - RNA, 17 nt, Homo sapiens
ccaucagucaaagaaug

SEQ ID NO: 1135 - RNA, 17 nt, Homo sapiens
agaaugguuccaucugg

SEQ ID NO: 1136 - RNA, 17 nt, Homo sapiens
gaaugguuccaucugga

SEQ ID NO: 1137 - RNA, 17 nt, Homo sapiens
gguuccaucuggagucu

SEQ ID NO: 1138 - RNA, 17 nt, Homo sapiens
ucuggagucuuaaugua

SEQ ID NO: 1139 - RNA, 17 nt, Homo sapiens
uggagucuuaauguaga

SEQ ID NO: 1140 - RNA, 17 nt, Homo sapiens
ggagucuuaauguagaa

SEQ ID NO: 1141 - RNA, 17 nt, Homo sapiens
cuuaauguagaaagaaa

SEQ ID NO: 1142 - RNA, 17 nt, Homo sapiens
uggagacuuguaauaau

SEQ ID NO: 1143 - RNA, 17 nt, Homo sapiens
agacuuguaauaaugag

SEQ ID NO: 1144 - RNA, 17 nt, Homo sapiens
cuuguaauaaugagcua

SEQ ID NO: 1145 - RNA, 17 nt, Homo sapiens
aaugagcuaguuacaaa

SEQ ID NO: 1146 - RNA, 17 nt, Homo sapiens
gagcuaguuacaaagug

SEQ ID NO: 1147 - RNA, 17 nt, Homo sapiens
agcuaguuacaaagugc

SEQ ID NO: 1148 - RNA, 17 nt, Homo sapiens
aaagugcuuguucauua

SEQ ID NO: 1149 - RNA, 17 nt, Homo sapiens
gugcuuguucauuaaaa

SEQ ID NO: 1150 - RNA, 17 nt, Homo sapiens
ugcuuguucauuaaaau

SEQ ID NO: 1151 - RNA, 17 nt, Homo sapiens
uuguucauuaaaauagc

SEQ ID NO: 1152 - RNA, 17 nt, Homo sapiens
uguucauuaaaauagca

SEQ ID NO: 1153 - RNA, 17 nt, Homo sapiens
auuaaaauagcacugaa

SEQ ID NO: 1154 - RNA, 17 nt, Homo sapiens
cugaaaauugaaacaug

SEQ ID NO: 1155 - RNA, 17 nt, Homo sapiens
acaugaauuaacugaua

SEQ ID NO: 1156 - RNA, 17 nt, Homo sapiens
caugaauuaacugauaa

SEQ ID NO: 1157 - RNA, 17 nt, Homo sapiens
uaacugauaauauucca

SEQ ID NO: 1158 - RNA, 17 nt, Homo sapiens
cugauaauauuccaauc

SEQ ID NO: 1159 - RNA, 17 nt, Homo sapiens
gauaauauuccaaucau

SEQ ID NO: 1160 - RNA, 17 nt, Homo sapiens
auaauauuccaaucauu

SEQ ID NO: 1161 - RNA, 17 nt, Homo sapiens
auuccaaucauuugcca

SEQ ID NO: 1162 - RNA, 17 nt, Homo sapiens
ccaaucauuugccauuu

SEQ ID NO: 1163 - RNA, 17 nt, Homo sapiens
caaucauuugccauuua

SEQ ID NO: 1164 - RNA, 17 nt, Homo sapiens
uuugccauuuaugacaa

SEQ ID NO: 1165 - RNA, 17 nt, Homo sapiens
uugccauuuaugacaaa

SEQ ID NO: 1166 - RNA, 17 nt, Homo sapiens
ugccauuuaugacaaaa

SEQ ID NO: 1167 - RNA, 17 nt, Homo sapiens
aaaaugguuggcacuaa

SEQ ID NO: 1168 - RNA, 17 nt, Homo sapiens
uuggcacuaacaaagaa

SEQ ID NO: 1169 - RNA, 17 nt, Homo sapiens
cgagcacuuccuuucag

SEQ ID NO: 1170 - RNA, 17 nt, Homo sapiens
gagcacuuccuuucaga

SEQ ID NO: 1171 - RNA, 17 nt, Homo sapiens
cacuuccuuucagaguu

SEQ ID NO: 1172 - RNA, 17 nt, Homo sapiens
acuuccuuucagaguuu

SEQ ID NO: 1173 - RNA, 17 nt, Homo sapiens
cuuccuuucagaguuuc

SEQ ID NO: 1174 - RNA, 17 nt, Homo sapiens
uucagaguuucugagau

SEQ ID NO: 1175 - RNA, 17 nt, Homo sapiens
ucagaguuucugagaua

SEQ ID NO: 1176 - RNA, 17 nt, Homo sapiens
cagaguuucugagauaa

SEQ ID NO: 1177 - RNA, 17 nt, Homo sapiens
ucugagauaauguacgu

SEQ ID NO: 1178 - RNA, 17 nt, Homo sapiens
gauaauguacguggaac

SEQ ID NO: 1179 - RNA, 17 nt, Homo sapiens
ggaacagucugggugga

SEQ ID NO: 1180 - RNA, 17 nt, Homo sapiens
gugcaagucugugucuu

SEQ ID NO: 1181 - RNA, 17 nt, Homo sapiens
gucugugucuugucagu

SEQ ID NO: 1182 - RNA, 17 nt, Homo sapiens
cugugucuugucagucc

SEQ ID NO: 1183 - RNA, 17 nt, Homo sapiens
ugucuugucaguccaag

SEQ ID NO: 1184 - RNA, 17 nt, Homo sapiens
uugucaguccaagaagu

SEQ ID NO: 1185 - RNA, 17 nt, Homo sapiens
cgagauguuaauuuuag

SEQ ID NO: 1186 - RNA, 17 nt, Homo sapiens
gagauguuaauuuuagg

SEQ ID NO: 1187 - RNA, 17 nt, Homo sapiens
auguuaauuuuagggac

SEQ ID NO: 1188 - RNA, 17 nt, Homo sapiens
uguuaauuuuagggacc

SEQ ID NO: 1189 - RNA, 17 nt, Homo sapiens
guuaauuuuagggaccc

SEQ ID NO: 1190 - RNA, 17 nt, Homo sapiens
uuaauuuuagggacccg

SEQ ID NO: 1191 - RNA, 17 nt, Homo sapiens
ccgugccuuguuuccua

SEQ ID NO: 1192 - RNA, 17 nt, Homo sapiens
ugccuuguuuccuagcc

SEQ ID NO: 1193 - RNA, 17 nt, Homo sapiens
gccuuguuuccuagccc

SEQ ID NO: 1194 - RNA, 17 nt, Homo sapiens
ccuuguuuccuagccca

SEQ ID NO: 1195 - RNA, 17 nt, Homo sapiens
uguuuccuagcccacaa

SEQ ID NO: 1196 - RNA, 17 nt, Homo sapiens
gcaaacaucaaacagau

SEQ ID NO: 1197 - RNA, 17 nt, Homo sapiens
aaacagauacucgcuag

SEQ ID NO: 1198 - RNA, 17 nt, Homo sapiens
cagauacucgcuagccu

SEQ ID NO: 1199 - RNA, 17 nt, Homo sapiens
uacucgcuagccucauu

SEQ ID NO: 1200 - RNA, 17 nt, Homo sapiens
gcuagccucauuuaaau

SEQ ID NO: 1201 - RNA, 17 nt, Homo sapiens
agccucauuuaaauuga

SEQ ID NO: 1202 - RNA, 17 nt, Homo sapiens
gccucauuuaaauugau

SEQ ID NO: 1203 - RNA, 17 nt, Homo sapiens
ccucauuuaaauugauu

SEQ ID NO: 1204 - RNA, 17 nt, Homo sapiens
auuuaaauugauuaaag

SEQ ID NO: 1205 - RNA, 17 nt, Homo sapiens
aaauugauuaaaggagg

SEQ ID NO: 1206 - RNA, 17 nt, Homo sapiens
aauugauuaaaggagga

SEQ ID NO: 1207 - RNA, 17 nt, Homo sapiens
gagugcaucuuuggccg

SEQ ID NO: 1208 - RNA, 17 nt, Homo sapiens
gugcaucuuuggccgac

SEQ ID NO: 1209 - RNA, 17 nt, Homo sapiens
ugcaucuuuggccgaca

SEQ ID NO: 1210 - RNA, 17 nt, Homo sapiens
agugguguaacugugug

SEQ ID NO: 1211 - RNA, 17 nt, Homo sapiens
guggguguauguguguu

SEQ ID NO: 1212 - RNA, 17 nt, Homo sapiens
auguguguuuugugcau

SEQ ID NO: 1213 - RNA, 17 nt, Homo sapiens
uguguguuuugugcaua

SEQ ID NO: 1214 - RNA, 17 nt, Homo sapiens
guguguuuugugcauaa

SEQ ID NO: 1215 - RNA, 17 nt, Homo sapiens
uugugcauaacuauuua

SEQ ID NO: 1216 - RNA, 17 nt, Homo sapiens
gcauaacuauuuaagga

SEQ ID NO: 1217 - RNA, 17 nt, Homo sapiens
auaacuauuuaaggaaa

SEQ ID NO: 1218 - RNA, 17 nt, Homo sapiens
uaacuauuuaaggaaac

SEQ ID NO: 1219 - RNA, 17 nt, Homo sapiens
aacuauuuaaggaaacu

SEQ ID NO: 1220 - RNA, 17 nt, Homo sapiens
acuggaauuuuaaaguu

SEQ ID NO: 1221 - RNA, 17 nt, Homo sapiens
cuggaauuuuaaaguua

SEQ ID NO: 1222 - RNA, 17 nt, Homo sapiens
uggaauuuuaaaguuac

SEQ ID NO: 1223 - RNA, 17 nt, Homo sapiens
ggaauuuuaaaguuacu

SEQ ID NO: 1224 - RNA, 17 nt, Homo sapiens
uuuaaaguuacuuuuau

SEQ ID NO: 1225 - RNA, 17 nt, Homo sapiens
uuaaaguuacuuuuaua

SEQ ID NO: 1226 - RNA, 17 nt, Homo sapiens
aaguuacuuuuauacaa

SEQ ID NO: 1227 - RNA, 17 nt, Homo sapiens
aguuacuuuuauacaaa

SEQ ID NO: 1228 - RNA, 17 nt, Homo sapiens
guuacuuuuauacaaac

SEQ ID NO: 1229 - RNA, 17 nt, Homo sapiens
uuacuuuuauacaaacc

SEQ ID NO: 1230 - RNA, 17 nt, Homo sapiens
acuuuuauacaaaccaa

SEQ ID NO: 1231 - RNA, 17 nt, Homo sapiens
ccaagaauauaugcuac

SEQ ID NO: 1232 - RNA, 17 nt, Homo sapiens
aagaauauaugcuacag

SEQ ID NO: 1233 - RNA, 17 nt, Homo sapiens
uauaugcuacagauaua

SEQ ID NO: 1234 - RNA, 17 nt, Homo sapiens
cuacagauauaagacag

SEQ ID NO: 1235 - RNA, 17 nt, Homo sapiens
acagauauaagacagac

SEQ ID NO: 1236 - RNA, 17 nt, Homo sapiens
gacaugguuugguccua

SEQ ID NO: 1237 - RNA, 17 nt, Homo sapiens
acaugguuugguccuau

SEQ ID NO: 1238 - RNA, 17 nt, Homo sapiens
gguuugguccuauauuu

SEQ ID NO: 1239 - RNA, 17 nt, Homo sapiens
uugguccuauauuucua

SEQ ID NO: 1240 - RNA, 17 nt, Homo sapiens
gguccuauauuucuagu

SEQ ID NO: 1241 - RNA, 17 nt, Homo sapiens
uccuauauuucuaguca

SEQ ID NO: 1242 - RNA, 17 nt, Homo sapiens
ccuauauuucuagucau

SEQ ID NO: 1243 - RNA, 17 nt, Homo sapiens
cuauauuucuagucaug

SEQ ID NO: 1244 - RNA, 17 nt, Homo sapiens
auauuucuagucaugau

SEQ ID NO: 1245 - RNA, 17 nt, Homo sapiens
uuucuagucaugaugaa

SEQ ID NO: 1246 - RNA, 17 nt, Homo sapiens
augaauguauuuuguau

SEQ ID NO: 1247 - RNA, 17 nt, Homo sapiens
gaauguauuuuguauac

SEQ ID NO: 1248 - RNA, 17 nt, Homo sapiens
aauguauuuuguauacc

SEQ ID NO: 1249 - RNA, 17 nt, Homo sapiens
auguauuuuguauacca

SEQ ID NO: 1250 - RNA, 17 nt, Homo sapiens
uauuuuguauaccaucu

SEQ ID NO: 1251 - RNA, 17 nt, Homo sapiens
uuuuguauaccaucuuc

SEQ ID NO: 1252 - RNA, 17 nt, Homo sapiens
uauaccaucuucauaua

SEQ ID NO: 1253 - RNA, 17 nt, Homo sapiens
uaccaucuucauauaau

SEQ ID NO: 1254 - RNA, 17 nt, Homo sapiens
accaucuucauauaaua

SEQ ID NO: 1255 - RNA, 17 nt, Homo sapiens
aucuucauauaauauac

SEQ ID NO: 1256 - RNA, 17 nt, Homo sapiens
cuucauauaauauacuu

SEQ ID NO: 1257 - RNA, 17 nt, Homo sapiens
cauauaauauacuuaaa

SEQ ID NO: 1258 - RNA, 17 nt, Homo sapiens
uauaauauacuuaaaaa

SEQ ID NO: 1259 - RNA, 17 nt, Homo sapiens
aauauacuuaaaaauau

SEQ ID NO: 1260 - RNA, 17 nt, Homo sapiens
auauacuuaaaaauauu

SEQ ID NO: 1261 - RNA, 17 nt, Homo sapiens
uuaaaaauauuucuuaa

SEQ ID NO: 1262 - RNA, 17 nt, Homo sapiens
aaaaauauuucuuaauu

SEQ ID NO: 1263 - RNA, 17 nt, Homo sapiens
aaaauauuucuuaauug

SEQ ID NO: 1264 - RNA, 17 nt, Homo sapiens
aaauauuucuuaauugg

SEQ ID NO: 1265 - RNA, 17 nt, Homo sapiens
auauuucuuaauuggga

SEQ ID NO: 1266 - RNA, 17 nt, Homo sapiens
uauuucuuaauugggau

SEQ ID NO: 1267 - RNA, 17 nt, Homo sapiens
uucuuaauugggauuug

SEQ ID NO: 1268 - RNA, 17 nt, Homo sapiens
auugggauuuguaaucg

SEQ ID NO: 1269 - RNA, 17 nt, Homo sapiens
uugggauuuguaaucgu

SEQ ID NO: 1270 - RNA, 17 nt, Homo sapiens
ggauuuguaaucguacc

SEQ ID NO: 1271 - RNA, 17 nt, Homo sapiens
uuuguaaucguaccaac

SEQ ID NO: 1272 - RNA, 17 nt, Homo sapiens
guaaucguaccaacuua

SEQ ID NO: 1273 - RNA, 17 nt, Homo sapiens
uaccaacuuaauugaua

SEQ ID NO: 1274 - RNA, 17 nt, Homo sapiens
accaacuuaauugauaa

SEQ ID NO: 1275 - RNA, 17 nt, Homo sapiens
aacuuaauugauaaacu

SEQ ID NO: 1276 - RNA, 17 nt, Homo sapiens
uaauugauaaacuuggc

SEQ ID NO: 1277 - RNA, 17 nt, Homo sapiens
gauaaacuuggcaacug

SEQ ID NO: 1278 - RNA, 17 nt, Homo sapiens
caacugcuuuuauguuc

SEQ ID NO: 1279 - RNA, 17 nt, Homo sapiens
aacugcuuuuauguucu

SEQ ID NO: 1280 - RNA, 17 nt, Homo sapiens
acugcuuuuauguucug

SEQ ID NO: 1281 - RNA, 17 nt, Homo sapiens
cugcuuuuauguucugu

SEQ ID NO: 1282 - RNA, 17 nt, Homo sapiens
uuuuauguucugucucc

SEQ ID NO: 1283 - RNA, 17 nt, Homo sapiens
uuuauguucugucuccu

SEQ ID NO: 1284 - RNA, 17 nt, Homo sapiens
uguucugucuccuucca

SEQ ID NO: 1285 - RNA, 17 nt, Homo sapiens
uucugucuccuuccaua

SEQ ID NO: 1286 - RNA, 17 nt, Homo sapiens
ugucuccuuccauaaau

SEQ ID NO: 1287 - RNA, 17 nt, Homo sapiens
gucuccuuccauaaauu

SEQ ID NO: 1288 - RNA, 17 nt, Homo sapiens
ccuuccauaaauuuuuc

SEQ ID NO: 1289 - RNA, 17 nt, Homo sapiens
ccauaaauuuuucaaaa

SEQ ID NO: 1290 - RNA, 17 nt, Homo sapiens
cauaaauuuuucaaaau

SEQ ID NO: 1291 - RNA, 17 nt, Homo sapiens
auaaauuuuucaaaaua

SEQ ID NO: 1292 - RNA, 17 nt, Homo sapiens
uaaauuuuucaaaauac

SEQ ID NO: 1293 - RNA, 17 nt, Homo sapiens
aaauuuuucaaaauacu

SEQ ID NO: 1294 - RNA, 17 nt, Homo sapiens
uucaaaauacuaauuca

SEQ ID NO: 1295 - RNA, 17 nt, Homo sapiens
aaaauacuaauucaaca

SEQ ID NO: 1296 - RNA, 17 nt, Homo sapiens
auacuaauucaacaaag

SEQ ID NO: 1297 - RNA, 17 nt, Homo sapiens
uacuaauucaacaaaga

SEQ ID NO: 1298 - RNA, 17 nt, Homo sapiens
aaaaagcucuuuuuuuu

SEQ ID NO: 1299 - RNA, 17 nt, Homo sapiens
aaagcucuuuuuuuucc

SEQ ID NO: 1300 - RNA, 17 nt, Homo sapiens
aagcucuuuuuuuuccu

SEQ ID NO: 1301 - RNA, 17 nt, Homo sapiens
agcucuuuuuuuuccua

SEQ ID NO: 1302 - RNA, 17 nt, Homo sapiens
gcucuuuuuuuuccuaa

SEQ ID NO: 1303 - RNA, 17 nt, Homo sapiens
cucuuuuuuuuccuaaa

SEQ ID NO: 1304 - RNA, 17 nt, Homo sapiens
ucuuuuuuuuccuaaaa

SEQ ID NO: 1305 - RNA, 17 nt, Homo sapiens
cuuuuuuuuccuaaaau

SEQ ID NO: 1306 - RNA, 17 nt, Homo sapiens
uuuuuuuuccuaaaaua

SEQ ID NO: 1307 - RNA, 17 nt, Homo sapiens
uuuuuccuaaaauaaac

SEQ ID NO: 1308 - RNA, 17 nt, Homo sapiens
ccuaaaauaaacucaaa

SEQ ID NO: 1309 - RNA, 17 nt, Homo sapiens
aauaaacucaaauuuau

SEQ ID NO: 1310 - RNA, 17 nt, Homo sapiens
acucaaauuuauccuug

SEQ ID NO: 1311 - RNA, 17 nt, Homo sapiens
cucaaauuuauccuugu

SEQ ID NO: 1312 - RNA, 17 nt, Homo sapiens
ucaaauuuauccuuguu

SEQ ID NO: 1313 - RNA, 17 nt, Homo sapiens
aaauuuauccuuguuua

SEQ ID NO: 1314 - RNA, 17 nt, Homo sapiens
uuuauccuuguuuagag

SEQ ID NO: 1315 - RNA, 17 nt, Homo sapiens
auccuuguuuagagcag

SEQ ID NO: 1316 - RNA, 17 nt, Homo sapiens
uccuuguuuagagcaga

SEQ ID NO: 1317 - RNA, 17 nt, Homo sapiens
ccuuguuuagagcagag

SEQ ID NO: 1318 - RNA, 17 nt, Homo sapiens
agaaaaauuaagaaaaa

SEQ ID NO: 1319 - RNA, 17 nt, Homo sapiens
gaaaaauuaagaaaaac

SEQ ID NO: 1320 - RNA, 17 nt, Homo sapiens
gaaaaacuuugaaaugg

SEQ ID NO: 1321 - RNA, 17 nt, Homo sapiens
aaaaacuuugaaauggu

SEQ ID NO: 1322 - RNA, 17 nt, Homo sapiens
gaaauggucucaaaaaa

SEQ ID NO: 1323 - RNA, 17 nt, Homo sapiens
aauggucucaaaaaauu

SEQ ID NO: 1324 - RNA, 17 nt, Homo sapiens
caaaaaauugcuaaaua

SEQ ID NO: 1325 - RNA, 17 nt, Homo sapiens
aaauugcuaaauauuuu

SEQ ID NO: 1326 - RNA, 17 nt, Homo sapiens
ugcuaaauauuuucaau

SEQ ID NO: 1327 - RNA, 17 nt, Homo sapiens
cuaaauauuuucaaugg

SEQ ID NO: 1328 - RNA, 17 nt, Homo sapiens
uaaauauuuucaaugga

SEQ ID NO: 1329 - RNA, 17 nt, Homo sapiens
aaauauuuucaauggaa

SEQ ID NO: 1330 - RNA, 17 nt, Homo sapiens
aauauuuucaauggaaa

SEQ ID NO: 1331 - RNA, 17 nt, Homo sapiens
ggaaaacuaaauguuag

SEQ ID NO: 1332 - RNA, 17 nt, Homo sapiens
cuaaauguuaguuuagc

SEQ ID NO: 1333 - RNA, 17 nt, Homo sapiens
uaaauguuaguuuagcu

SEQ ID NO: 1334 - RNA, 17 nt, Homo sapiens
auguuaguuuagcugau

SEQ ID NO: 1335 - RNA, 17 nt, Homo sapiens
uguuaguuuagcugauu

SEQ ID NO: 1336 - RNA, 17 nt, Homo sapiens
guuaguuuagcugauug

SEQ ID NO: 1337 - RNA, 17 nt, Homo sapiens
uagcugauuguaugggg

SEQ ID NO: 1338 - RNA, 17 nt, Homo sapiens
cugauuguaugggguuu

SEQ ID NO: 1339 - RNA, 17 nt, Homo sapiens
uaugggguuuucgaacc

SEQ ID NO: 1340 - RNA, 17 nt, Homo sapiens
augggguuuucgaaccu

SEQ ID NO: 1341 - RNA, 17 nt, Homo sapiens
ugggguuuucgaaccuu

SEQ ID NO: 1342 - RNA, 17 nt, Homo sapiens
gggguuuucgaaccuuu

SEQ ID NO: 1343 - RNA, 17 nt, Homo sapiens
ucgaaccuuucacuuuu

SEQ ID NO: 1344 - RNA, 17 nt, Homo sapiens
cgaaccuuucacuuuuu

SEQ ID NO: 1345 - RNA, 17 nt, Homo sapiens
gaaccuuucacuuuuug

SEQ ID NO: 1346 - RNA, 17 nt, Homo sapiens
cuuucacuuuuuguuug

SEQ ID NO: 1347 - RNA, 17 nt, Homo sapiens
uuucacuuuuuguuugu

SEQ ID NO: 1348 - RNA, 17 nt, Homo sapiens
uucacuuuuuguuuguu

SEQ ID NO: 1349 - RNA, 17 nt, Homo sapiens
ucacuuuuuguuuguuu

SEQ ID NO: 1350 - RNA, 17 nt, Homo sapiens
cuuuuuguuuguuuuac

SEQ ID NO: 1351 - RNA, 17 nt, Homo sapiens
uuuuuguuuguuuuacc

SEQ ID NO: 1352 - RNA, 17 nt, Homo sapiens
uuguuuguuuuaccuau

SEQ ID NO: 1353 - RNA, 17 nt, Homo sapiens
uguuuguuuuaccuauu

SEQ ID NO: 1354 - RNA, 17 nt, Homo sapiens
guuuguuuuaccuauuu

SEQ ID NO: 1355 - RNA, 17 nt, Homo sapiens
uuuguuuuaccuauuuc

SEQ ID NO: 1356 - RNA, 17 nt, Homo sapiens
uuuuaccuauuucacaa

SEQ ID NO: 1357 - RNA, 17 nt, Homo sapiens
uuaccuauuucacaacu

SEQ ID NO: 1358 - RNA, 17 nt, Homo sapiens
uaccuauuucacaacug

SEQ ID NO: 1359 - RNA, 17 nt, Homo sapiens
accuauuucacaacugu

SEQ ID NO: 1360 - RNA, 17 nt, Homo sapiens
aacuguguaaauugcca

SEQ ID NO: 1361 - RNA, 17 nt, Homo sapiens
guguaaauugccaauaa

SEQ ID NO: 1362 - RNA, 17 nt, Homo sapiens
uugccaauaauuccugu

SEQ ID NO: 1363 - RNA, 17 nt, Homo sapiens
ccaauaauuccugucca

SEQ ID NO: 1364 - RNA, 17 nt, Homo sapiens
caauaauuccuguccau

SEQ ID NO: 1365 - RNA, 17 nt, Homo sapiens
auuccuguccaugaaaa

SEQ ID NO: 1366 - RNA, 17 nt, Homo sapiens
augcaaauuauccagug

SEQ ID NO: 1367 - RNA, 17 nt, Homo sapiens
ugcaaauuauccagugu

SEQ ID NO: 1368 - RNA, 17 nt, Homo sapiens
caaauuauccaguguag

SEQ ID NO: 1369 - RNA, 17 nt, Homo sapiens
uccaguguagauauauu

SEQ ID NO: 1370 - RNA, 17 nt, Homo sapiens
guguagauauauuugac

SEQ ID NO: 1371 - RNA, 17 nt, Homo sapiens
guagauauauuugacca

SEQ ID NO: 1372 - RNA, 17 nt, Homo sapiens
agauauauuugaccauc

SEQ ID NO: 1373 - RNA, 17 nt, Homo sapiens
gauauauuugaccauca

SEQ ID NO: 1374 - RNA, 17 nt, Homo sapiens
uugaccaucacccuaug

SEQ ID NO: 1375 - RNA, 17 nt, Homo sapiens
aucacccuauggauauu

SEQ ID NO: 1376 - RNA, 17 nt, Homo sapiens
cuauggauauuggcuag

SEQ ID NO: 1377 - RNA, 17 nt, Homo sapiens
auggauauuggcuaguu

SEQ ID NO: 1378 - RNA, 17 nt, Homo sapiens
uauuggcuaguuuugcc

SEQ ID NO: 1379 - RNA, 17 nt, Homo sapiens
uggcuaguuuugccuuu

SEQ ID NO: 1380 - RNA, 17 nt, Homo sapiens
ggcuaguuuugccuuua

SEQ ID NO: 1381 - RNA, 17 nt, Homo sapiens
gcuaguuuugccuuuau

SEQ ID NO: 1382 - RNA, 17 nt, Homo sapiens
uuuugccuuuauuaagc

SEQ ID NO: 1383 - RNA, 17 nt, Homo sapiens
uuugccuuuauuaagca

SEQ ID NO: 1384 - RNA, 17 nt, Homo sapiens
uugccuuuauuaagcaa

SEQ ID NO: 1385 - RNA, 17 nt, Homo sapiens
gccuuuauuaagcaaau

SEQ ID NO: 1386 - RNA, 17 nt, Homo sapiens
ccuuuauuaagcaaauu

SEQ ID NO: 1387 - RNA, 17 nt, Homo sapiens
aagcaaauucauuucag

SEQ ID NO: 1388 - RNA, 17 nt, Homo sapiens
agcaaauucauuucagc

SEQ ID NO: 1389 - RNA, 17 nt, Homo sapiens
aaauucauuucagccug

SEQ ID NO: 1390 - RNA, 17 nt, Homo sapiens
aauucauuucagccuga

SEQ ID NO: 1391 - RNA, 17 nt, Homo sapiens
auucauuucagccugaa

SEQ ID NO: 1392 - RNA, 17 nt, Homo sapiens
cugaaugucugccuaua

SEQ ID NO: 1393 - RNA, 17 nt, Homo sapiens
gucugccuauauauucu

SEQ ID NO: 1394 - RNA, 17 nt, Homo sapiens
cugccuauauauucucu

SEQ ID NO: 1395 - RNA, 17 nt, Homo sapiens
gccuauauauucucugc

SEQ ID NO: 1396 - RNA, 17 nt, Homo sapiens
cuauauauucucugcuc

SEQ ID NO: 1397 - RNA, 17 nt, Homo sapiens
uauauauucucugcucu

SEQ ID NO: 1398 - RNA, 17 nt, Homo sapiens
uauauucucugcucuuu

SEQ ID NO: 1399 - RNA, 17 nt, Homo sapiens
ucucugcucuuuguauu

SEQ ID NO: 1400 - RNA, 17 nt, Homo sapiens
ucugcucuuuguauucu

SEQ ID NO: 1401 - RNA, 17 nt, Homo sapiens
cugcucuuuguauucuc

SEQ ID NO: 1402 - RNA, 17 nt, Homo sapiens
cucuuuguauucuccuu

SEQ ID NO: 1403 - RNA, 17 nt, Homo sapiens
cuuuguauucuccuuug

SEQ ID NO: 1404 - RNA, 17 nt, Homo sapiens
uuuguauucuccuuuga

SEQ ID NO: 1405 - RNA, 17 nt, Homo sapiens
uguauucuccuuugaac

SEQ ID NO: 1406 - RNA, 17 nt, Homo sapiens
auucuccuuugaacccg

SEQ ID NO: 1407 - RNA, 17 nt, Homo sapiens
uucuccuuugaacccgu

SEQ ID NO: 1408 - RNA, 17 nt, Homo sapiens
gaacccguuaaaacauc

SEQ ID NO: 1409 - RNA, 17 nt, Homo sapiens
aacccguuaaaacaucc

SEQ ID NO: 1410 - RNA, 17 nt, Homo sapiens
uaaaacauccuguggca

SEQ ID NO: 1411 - RNA, 18 nt, Homo sapiens
ccucucggcuccuccccg

SEQ ID NO: 1412 - RNA, 18 nt, Homo sapiens
ggcggcggcucggagcgg

SEQ ID NO: 1413 - RNA, 18 nt, Homo sapiens
gaggacggacucuggcgg

SEQ ID NO: 1414 - RNA, 18 nt, Homo sapiens
ucuggcggccgggucguu

SEQ ID NO: 1415 - RNA, 18 nt, Homo sapiens
ggguccugcugugcgcgc

SEQ ID NO: 1416 - RNA, 18 nt, Homo sapiens
gcgcgcugcucagcuguc

SEQ ID NO: 1417 - RNA, 18 nt, Homo sapiens
cugcucagcugucugcuu

SEQ ID NO: 1418 - RNA, 18 nt, Homo sapiens
cucagcugucugcuucuc

SEQ ID NO: 1419 - RNA, 18 nt, Homo sapiens
gcugucugcuucucacag

SEQ ID NO: 1420 - RNA, 18 nt, Homo sapiens
ggaagcagcccauaaaug

SEQ ID NO: 1421 - RNA, 18 nt, Homo sapiens
uaaaucugccuguggaag

SEQ ID NO: 1422 - RNA, 18 nt, Homo sapiens
gaacacagcucaagcaaa

SEQ ID NO: 1423 - RNA, 18 nt, Homo sapiens
uucuacagcugcaaauau

SEQ ID NO: 1424 - RNA, 18 nt, Homo sapiens
auucccugccggguuacg

SEQ ID NO: 1425 - RNA, 18 nt, Homo sapiens
gaucccugauggaaaacg

SEQ ID NO: 1426 - RNA, 18 nt, Homo sapiens
ggcuucugaccugugaag

SEQ ID NO: 1427 - RNA, 18 nt, Homo sapiens
uuacccugaugaaaaaaa

SEQ ID NO: 1428 - RNA, 18 nt, Homo sapiens
gcaagcggucuuaccggc

SEQ ID NO: 1429 - RNA, 18 nt, Homo sapiens
cuuaccggcucucuauga

SEQ ID NO: 1430 - RNA, 18 nt, Homo sapiens
gaaaucugcucgcuauuu

SEQ ID NO: 1431 - RNA, 18 nt, Homo sapiens
aaccccagauuuacgaaa

SEQ ID NO: 1432 - RNA, 18 nt, Homo sapiens
guuuccagacccggcucu

SEQ ID NO: 1433 - RNA, 18 nt, Homo sapiens
agacccggcucucuaccc

SEQ ID NO: 1434 - RNA, 18 nt, Homo sapiens
aaauccugacuuguaccg

SEQ ID NO: 1435 - RNA, 18 nt, Homo sapiens
uguggcugacucuagaau

SEQ ID NO: 1436 - RNA, 18 nt, Homo sapiens
uaucacagaugugccaaa

SEQ ID NO: 1437 - RNA, 18 nt, Homo sapiens
aaaugccgacggaaggag

SEQ ID NO: 1438 - RNA, 18 nt, Homo sapiens
ugaaacugucuugcacag

SEQ ID NO: 1439 - RNA, 18 nt, Homo sapiens
aucagcaguuccaccacu

SEQ ID NO: 1440 - RNA, 18 nt, Homo sapiens
agccucagaucacuuggu

SEQ ID NO: 1441 - RNA, 18 nt, Homo sapiens
gcacgcuguuuauugaaa

SEQ ID NO: 1442 - RNA, 18 nt, Homo sapiens
ccucacuguucaaggaac

SEQ ID NO: 1443 - RNA, 18 nt, Homo sapiens
uggagcugaucacucuaa

SEQ ID NO: 1444 - RNA, 18 nt, Homo sapiens
aaagacugacuaccuauc

SEQ ID NO: 1445 - RNA, 18 nt, Homo sapiens
ggacccagaugaaguucc

SEQ ID NO: 1446 - RNA, 18 nt, Homo sapiens
gugagcggcucccuuaug

SEQ ID NO: 1447 - RNA, 18 nt, Homo sapiens
cgugccggacuguggcug

SEQ ID NO: 1448 - RNA, 18 nt, Homo sapiens
aagcucugaugacugagc

SEQ ID NO: 1449 - RNA, 18 nt, Homo sapiens
uuaaccugcugggagccu

SEQ ID NO: 1450 - RNA, 18 nt, Homo sapiens
ggccucugauggugauug

SEQ ID NO: 1451 - RNA, 18 nt, Homo sapiens
agcuccggcuuucaggaa

SEQ ID NO: 1452 - RNA, 18 nt, Homo sapiens
ggauucugacgguuucua

SEQ ID NO: 1453 - RNA, 18 nt, Homo sapiens
ucugacgguuucuacaag

SEQ ID NO: 1454 - RNA, 18 nt, Homo sapiens
aagaucugauuucuuaca

SEQ ID NO: 1455 - RNA, 18 nt, Homo sapiens
ucuuacaguuuucaagug

SEQ ID NO: 1456 - RNA, 18 nt, Homo sapiens
aguuccugucuuccagaa

SEQ ID NO: 1457 - RNA, 18 nt, Homo sapiens
gaaccccgauuaugugag

SEQ ID NO: 1458 - RNA, 18 nt, Homo sapiens
uuuugcagucgccugagg

SEQ ID NO: 1459 - RNA, 18 nt, Homo sapiens
ucuaucagaucaugcugg

SEQ ID NO: 1460 - RNA, 18 nt, Homo sapiens
cuggacugcuggcacaga

SEQ ID NO: 1461 - RNA, 18 nt, Homo sapiens
aacuccugccuucucuga

SEQ ID NO: 1462 - RNA, 18 nt, Homo sapiens
uauuucagcuccgaaguu

SEQ ID NO: 1463 - RNA, 18 nt, Homo sapiens
aagcucugaugaugucag

SEQ ID NO: 1464 - RNA, 18 nt, Homo sapiens
gcacucuguuggccucuc

SEQ ID NO: 1465 - RNA, 18 nt, Homo sapiens
cggggcugucugauguca

SEQ ID NO: 1466 - RNA, 18 nt, Homo sapiens
gcugucugaugucagcag

SEQ ID NO: 1467 - RNA, 18 nt, Homo sapiens
aggcccaguuucugccau

SEQ ID NO: 1468 - RNA, 18 nt, Homo sapiens
cauuccagcugugggcac

SEQ ID NO: 1469 - RNA, 18 nt, Homo sapiens
gcgugcugcuccccgccc

SEQ ID NO: 1470 - RNA, 18 nt, Homo sapiens
gcuccccgcccccagacu

SEQ ID NO: 1471 - RNA, 18 nt, Homo sapiens
gcccccagacuacaacuc

SEQ ID NO: 1472 - RNA, 18 nt, Homo sapiens
ggagccagcugcuuuuug

SEQ ID NO: 1473 - RNA, 18 nt, Homo sapiens
gccagcugcuuuuuguga

SEQ ID NO: 1474 - RNA, 18 nt, Homo sapiens
cuucccugcuccaacccc

SEQ ID NO: 1475 - RNA, 18 nt, Homo sapiens
aggaccaguuugauugag

SEQ ID NO: 1476 - RNA, 18 nt, Homo sapiens
cugcacugaucacccaau

SEQ ID NO: 1477 - RNA, 18 nt, Homo sapiens
ugggccagcccugcagcc

SEQ ID NO: 1478 - RNA, 18 nt, Homo sapiens
cccugcagcccaaaaccc

SEQ ID NO: 1479 - RNA, 18 nt, Homo sapiens
cuucccagcucugacccu

SEQ ID NO: 1480 - RNA, 18 nt, Homo sapiens
cagcucugacccuucuac

SEQ ID NO: 1481 - RNA, 18 nt, Homo sapiens
aggagcagauggacagcg

SEQ ID NO: 1482 - RNA, 18 nt, Homo sapiens
uuauucuguuuugcacag

SEQ ID NO: 1483 - RNA, 18 nt, Homo sapiens
aaaugcaguccugaggag

SEQ ID NO: 1484 - RNA, 18 nt, Homo sapiens
gagggcugauggaggaaa

SEQ ID NO: 1485 - RNA, 18 nt, Homo sapiens
agaccccgucucuauacc

SEQ ID NO: 1486 - RNA, 18 nt, Homo sapiens
caacacaguugggaccca

SEQ ID NO: 1487 - RNA, 18 nt, Homo sapiens
uucuccaguugggacuca

SEQ ID NO: 1488 - RNA, 18 nt, Homo sapiens
uucaacugcuuugaaacu

SEQ ID NO: 1489 - RNA, 18 nt, Homo sapiens
uggcucuguuugaugcua

SEQ ID NO: 1490 - RNA, 18 nt, Homo sapiens
gauugcugcuucuugggg

SEQ ID NO: 1491 - RNA, 18 nt, Homo sapiens
ugccucuguucuuaugug

SEQ ID NO: 1492 - RNA, 18 nt, Homo sapiens
ggcagcggcuuuugugga

SEQ ID NO: 1493 - RNA, 18 nt, Homo sapiens
ugggacaguccucuccac

SEQ ID NO: 1494 - RNA, 18 nt, Homo sapiens
ugugacagcuggcaauuu

SEQ ID NO: 1495 - RNA, 18 nt, Homo sapiens
cuuagcuguucaugucuu

SEQ ID NO: 1496 - RNA, 18 nt, Homo sapiens
uuacucagcuccuucaaa

SEQ ID NO: 1497 - RNA, 18 nt, Homo sapiens
uggaacagucugggugga

SEQ ID NO: 1498 - RNA, 18 nt, Homo sapiens
cuugucaguccaagaagu

SEQ ID NO: 1499 - RNA, 18 nt, Homo sapiens
ggcaacugcuuuuauguu

SEQ ID NO: 1500 - RNA, 18 nt, Homo sapiens
auguucugucuccuucca

SEQ ID NO: 1501 - RNA, 18 nt, Homo sapiens
uuuagcugauuguauggg

SEQ ID NO: 1502 - RNA, 18 nt, Homo sapiens
aauuccuguccaugaaaa

SEQ ID NO: 1503 - RNA, 18 nt, Homo sapiens
cauuucagccugaauguc

SEQ ID NO: 1504 - RNA, 18 nt, Homo sapiens
aaugucugccuauauauu

SEQ ID NO: 1505 - RNA, 18 nt, Homo sapiens
auucucugcucuuuguau

SEQ ID NO: 1506 - RNA, 17 nt, Homo sapiens
cuggccgucgcccugug

SEQ ID NO: 1507 - RNA, 17 nt, Homo sapiens
cuguggcucugcgugga

SEQ ID NO: 1508 - RNA, 17 nt, Homo sapiens
ggccgccucuguggguu

SEQ ID NO: 1509 - RNA, 17 nt, Homo sapiens
cuguggguuugccuagu

SEQ ID NO: 1510 - RNA, 17 nt, Homo sapiens
uguggguuugccuagug

SEQ ID NO: 1511 - RNA, 17 nt, Homo sapiens
guuugccuaguguuucu

SEQ ID NO: 1512 - RNA, 17 nt, Homo sapiens
ccuaguguuucucuuga

SEQ ID NO: 1513 - RNA, 17 nt, Homo sapiens
cuaguguuucucuugau

SEQ ID NO: 1514 - RNA, 17 nt, Homo sapiens
uaguguuucucuugauc

SEQ ID NO: 1515 - RNA, 17 nt, Homo sapiens
guguuucucuugaucug

SEQ ID NO: 1516 - RNA, 17 nt, Homo sapiens
guuucucuugaucugcc

SEQ ID NO: 1517 - RNA, 17 nt, Homo sapiens
cucuugaucugcccagg

SEQ ID NO: 1518 - RNA, 17 nt, Homo sapiens
cccaggcucagcauaca

SEQ ID NO: 1519 - RNA, 17 nt, Homo sapiens
cucagcauacaaaaaga

SEQ ID NO: 1520 - RNA, 17 nt, Homo sapiens
aaagacauacuuacaau

SEQ ID NO: 1521 - RNA, 17 nt, Homo sapiens
gacauacuuacaauuaa

SEQ ID NO: 1522 - RNA, 17 nt, Homo sapiens
acauacuuacaauuaag

SEQ ID NO: 1523 - RNA, 17 nt, Homo sapiens
cuuacaauuaaggcuaa

SEQ ID NO: 1524 - RNA, 17 nt, Homo sapiens
uuacaauuaaggcuaau

SEQ ID NO: 1525 - RNA, 17 nt, Homo sapiens
uuaaggcuaauacaacu

SEQ ID NO: 1526 - RNA, 17 nt, Homo sapiens
aggcuaauacaacucuu

SEQ ID NO: 1527 - RNA, 17 nt, Homo sapiens
auacaacucuucaaauu

SEQ ID NO: 1528 - RNA, 17 nt, Homo sapiens
acaacucuucaaauuac

SEQ ID NO: 1529 - RNA, 17 nt, Homo sapiens
caacucuucaaauuacu

SEQ ID NO: 1530 - RNA, 17 nt, Homo sapiens
cuucaaauuacuugcag

SEQ ID NO: 1531 - RNA, 17 nt, Homo sapiens
uucaaauuacuugcagg

SEQ ID NO: 1532 - RNA, 17 nt, Homo sapiens
aaauuacuugcagggga

SEQ ID NO: 1533 - RNA, 17 nt, Homo sapiens
gagggacuuggacuggc

SEQ ID NO: 1534 - RNA, 17 nt, Homo sapiens
gacuggcuuuggcccaa

SEQ ID NO: 1535 - RNA, 17 nt, Homo sapiens
acuggcuuuggcccaau

SEQ ID NO: 1536 - RNA, 17 nt, Homo sapiens
ggcccaauaaucagagu

SEQ ID NO: 1537 - RNA, 17 nt, Homo sapiens
ccaauaaucagaguggc

SEQ ID NO: 1538 - RNA, 17 nt, Homo sapiens
gauggccucuucuguaa

SEQ ID NO: 1539 - RNA, 17 nt, Homo sapiens
uggccucuucuguaaga

SEQ ID NO: 1540 - RNA, 17 nt, Homo sapiens
ggccucuucuguaagac

SEQ ID NO: 1541 - RNA, 17 nt, Homo sapiens
ucuucuguaagacacuc

SEQ ID NO: 1542 - RNA, 17 nt, Homo sapiens
aagacacucacaauucc

SEQ ID NO: 1543 - RNA, 17 nt, Homo sapiens
cucacaauuccaaaagu

SEQ ID NO: 1544 - RNA, 17 nt, Homo sapiens
ucacaauuccaaaagug

SEQ ID NO: 1545 - RNA, 17 nt, Homo sapiens
aaagugaucggaaauga

SEQ ID NO: 1546 - RNA, 17 nt, Homo sapiens
uggagccuacaagugcu

SEQ ID NO: 1547 - RNA, 17 nt, Homo sapiens
caagugcuucuaccggg

SEQ ID NO: 1548 - RNA, 17 nt, Homo sapiens
aagugcuucuaccggga

SEQ ID NO: 1549 - RNA, 17 nt, Homo sapiens
gugcuucuaccgggaaa

SEQ ID NO: 1550 - RNA, 17 nt, Homo sapiens
aacugacuuggccucgg

SEQ ID NO: 1551 - RNA, 17 nt, Homo sapiens
cuuggccucggucauuu

SEQ ID NO: 1552 - RNA, 17 nt, Homo sapiens
gccucggucauuuaugu

SEQ ID NO: 1553 - RNA, 17 nt, Homo sapiens
ucggucauuuaugucua

SEQ ID NO: 1554 - RNA, 17 nt, Homo sapiens
cggucauuuaugucuau

SEQ ID NO: 1555 - RNA, 17 nt, Homo sapiens
ggucauuuaugucuaug

SEQ ID NO: 1556 - RNA, 17 nt, Homo sapiens
auuuaugucuauguuca

SEQ ID NO: 1557 - RNA, 17 nt, Homo sapiens
uuaugucuauguucaag

SEQ ID NO: 1558 - RNA, 17 nt, Homo sapiens
gucuauguucaagauua

SEQ ID NO: 1559 - RNA, 17 nt, Homo sapiens
ucuauguucaagauuac

SEQ ID NO: 1560 - RNA, 17 nt, Homo sapiens
uucaagauuacagaucu

SEQ ID NO: 1561 - RNA, 17 nt, Homo sapiens
ucaagauuacagaucuc

SEQ ID NO: 1562 - RNA, 17 nt, Homo sapiens
uuacagaucuccauuua

SEQ ID NO: 1563 - RNA, 17 nt, Homo sapiens
acagaucuccauuuauu

SEQ ID NO: 1564 - RNA, 17 nt, Homo sapiens
aucuccauuuauugcuu

SEQ ID NO: 1565 - RNA, 17 nt, Homo sapiens
ucuccauuuauugcuuc

SEQ ID NO: 1566 - RNA, 17 nt, Homo sapiens
cuccauuuauugcuucu

SEQ ID NO: 1567 - RNA, 17 nt, Homo sapiens
ccauuuauugcuucugu

SEQ ID NO: 1568 - RNA, 17 nt, Homo sapiens
uuauugcuucuguuagu

SEQ ID NO: 1569 - RNA, 17 nt, Homo sapiens
uauugcuucuguuagug

SEQ ID NO: 1570 - RNA, 17 nt, Homo sapiens
gcuucuguuagugacca

SEQ ID NO: 1571 - RNA, 17 nt, Homo sapiens
cuucuguuagugaccaa

SEQ ID NO: 1572 - RNA, 17 nt, Homo sapiens
cauggagucguguacau

SEQ ID NO: 1573 - RNA, 17 nt, Homo sapiens
agucguguacauuacug

SEQ ID NO: 1574 - RNA, 17 nt, Homo sapiens
guguacauuacugagaa

SEQ ID NO: 1575 - RNA, 17 nt, Homo sapiens
uguacauuacugagaac

SEQ ID NO: 1576 - RNA, 17 nt, Homo sapiens
guggugauuccaugucu

SEQ ID NO: 1577 - RNA, 17 nt, Homo sapiens
uggugauuccaugucuc

SEQ ID NO: 1578 - RNA, 17 nt, Homo sapiens
uuccaugucucgggucc

SEQ ID NO: 1579 - RNA, 17 nt, Homo sapiens
ccaugucucggguccau

SEQ ID NO: 1580 - RNA, 17 nt, Homo sapiens
ucucggguccauuucaa

SEQ ID NO: 1581 - RNA, 17 nt, Homo sapiens
ggguccauuucaaaucu

SEQ ID NO: 1582 - RNA, 17 nt, Homo sapiens
gguccauuucaaaucuc

SEQ ID NO: 1583 - RNA, 17 nt, Homo sapiens
guccauuucaaaucuca

SEQ ID NO: 1584 - RNA, 17 nt, Homo sapiens
uuucaaaucucaacgug

SEQ ID NO: 1585 - RNA, 17 nt, Homo sapiens
ucaaaucucaacguguc

SEQ ID NO: 1586 - RNA, 17 nt, Homo sapiens
caacgugucacuuugug

SEQ ID NO: 1587 - RNA, 17 nt, Homo sapiens
gugucacuuugugcaag

SEQ ID NO: 1588 - RNA, 17 nt, Homo sapiens
ugucacuuugugcaaga

SEQ ID NO: 1589 - RNA, 17 nt, Homo sapiens
ugcaagauacccagaaa

SEQ ID NO: 1590 - RNA, 17 nt, Homo sapiens
aaagagauuuguuccug

SEQ ID NO: 1591 - RNA, 17 nt, Homo sapiens
aagagauuuguuccuga

SEQ ID NO: 1592 - RNA, 17 nt, Homo sapiens
agauuuguuccugaugg

SEQ ID NO: 1593 - RNA, 17 nt, Homo sapiens
gauuuguuccugauggu

SEQ ID NO: 1594 - RNA, 17 nt, Homo sapiens
cugaugguaacagaauu

SEQ ID NO: 1595 - RNA, 17 nt, Homo sapiens
aacagaauuuccuggga

SEQ ID NO: 1596 - RNA, 17 nt, Homo sapiens
acagaauuuccugggac

SEQ ID NO: 1597 - RNA, 17 nt, Homo sapiens
cagaauuuccugggaca

SEQ ID NO: 1598 - RNA, 17 nt, Homo sapiens
gaagggcuuuacuauuc

SEQ ID NO: 1599 - RNA, 17 nt, Homo sapiens
aagggcuuuacuauucc

SEQ ID NO: 1600 - RNA, 17 nt, Homo sapiens
agggcuuuacuauuccc

SEQ ID NO: 1601 - RNA, 17 nt, Homo sapiens
gcuuuacuauucccagc

SEQ ID NO: 1602 - RNA, 17 nt, Homo sapiens
uuuacuauucccagcua

SEQ ID NO: 1603 - RNA, 17 nt, Homo sapiens
uuacuauucccagcuac

SEQ ID NO: 1604 - RNA, 17 nt, Homo sapiens
ucccagcuacaugauca

SEQ ID NO: 1605 - RNA, 17 nt, Homo sapiens
uacaugaucagcuaugc

SEQ ID NO: 1606 - RNA, 17 nt, Homo sapiens
gaucagcuaugcuggca

SEQ ID NO: 1607 - RNA, 17 nt, Homo sapiens
ggcauggucuucuguga

SEQ ID NO: 1608 - RNA, 17 nt, Homo sapiens
cauggucuucugugaag

SEQ ID NO: 1609 - RNA, 17 nt, Homo sapiens
auggucuucugugaagc

SEQ ID NO: 1610 - RNA, 17 nt, Homo sapiens
gcaaaaauuaaugauga

SEQ ID NO: 1611 - RNA, 17 nt, Homo sapiens
caaaaauuaaugaugaa

SEQ ID NO: 1612 - RNA, 17 nt, Homo sapiens
augaaaguuaccagucu

SEQ ID NO: 1613 - RNA, 17 nt, Homo sapiens
ugaaaguuaccagucua

SEQ ID NO: 1614 - RNA, 17 nt, Homo sapiens
uuaccagucuauuaugu

SEQ ID NO: 1615 - RNA, 17 nt, Homo sapiens
accagucuauuauguac

SEQ ID NO: 1616 - RNA, 17 nt, Homo sapiens
cagucuauuauguacau

SEQ ID NO: 1617 - RNA, 17 nt, Homo sapiens
agucuauuauguacaua

SEQ ID NO: 1618 - RNA, 17 nt, Homo sapiens
uauuauguacauaguug

SEQ ID NO: 1619 - RNA, 17 nt, Homo sapiens
auguacauaguugucgu

SEQ ID NO: 1620 - RNA, 17 nt, Homo sapiens
uacauaguugucguugu

SEQ ID NO: 1621 - RNA, 17 nt, Homo sapiens
auaguugucguuguagg

SEQ ID NO: 1622 - RNA, 17 nt, Homo sapiens
guugucguuguagggua

SEQ ID NO: 1623 - RNA, 17 nt, Homo sapiens
gucguuguaggguauag

SEQ ID NO: 1624 - RNA, 17 nt, Homo sapiens
uguaggguauaggauuu

SEQ ID NO: 1625 - RNA, 17 nt, Homo sapiens
uaggguauaggauuuau

SEQ ID NO: 1626 - RNA, 17 nt, Homo sapiens
uauaggauuuaugaugu

SEQ ID NO: 1627 - RNA, 17 nt, Homo sapiens
auaggauuuaugaugug

SEQ ID NO: 1628 - RNA, 17 nt, Homo sapiens
uaggauuuaugaugugg

SEQ ID NO: 1629 - RNA, 17 nt, Homo sapiens
gaugugguucugagucc

SEQ ID NO: 1630 - RNA, 17 nt, Homo sapiens
augugguucugaguccg

SEQ ID NO: 1631 - RNA, 17 nt, Homo sapiens
uucugaguccgucucau

SEQ ID NO: 1632 - RNA, 17 nt, Homo sapiens
gaguccgucucauggaa

SEQ ID NO: 1633 - RNA, 17 nt, Homo sapiens
guccgucucauggaauu

SEQ ID NO: 1634 - RNA, 17 nt, Homo sapiens
cauggaauugaacuauc

SEQ ID NO: 1635 - RNA, 17 nt, Homo sapiens
auugaacuaucuguugg

SEQ ID NO: 1636 - RNA, 17 nt, Homo sapiens
ugaacuaucuguuggag

SEQ ID NO: 1637 - RNA, 17 nt, Homo sapiens
cuaucuguuggagaaaa

SEQ ID NO: 1638 - RNA, 17 nt, Homo sapiens
gaaaagcuugucuuaaa

SEQ ID NO: 1639 - RNA, 17 nt, Homo sapiens
aagcuugucuuaaauug

SEQ ID NO: 1640 - RNA, 17 nt, Homo sapiens
gcuugucuuaaauugua

SEQ ID NO: 1641 - RNA, 17 nt, Homo sapiens
cuugucuuaaauuguac

SEQ ID NO: 1642 - RNA, 17 nt, Homo sapiens
ucuuaaauuguacagca

SEQ ID NO: 1643 - RNA, 17 nt, Homo sapiens
uaaauuguacagcaaga

SEQ ID NO: 1644 - RNA, 17 nt, Homo sapiens
acugaacuaaauguggg

SEQ ID NO: 1645 - RNA, 17 nt, Homo sapiens
guggggauugacuucaa

SEQ ID NO: 1646 - RNA, 17 nt, Homo sapiens
gauugacuucaacuggg

SEQ ID NO: 1647 - RNA, 17 nt, Homo sapiens
auugacuucaacuggga

SEQ ID NO: 1648 - RNA, 17 nt, Homo sapiens
cugggaauacccuucuu

SEQ ID NO: 1649 - RNA, 17 nt, Homo sapiens
aauacccuucuucgaag

SEQ ID NO: 1650 - RNA, 17 nt, Homo sapiens
auacccuucuucgaagc

SEQ ID NO: 1651 - RNA, 17 nt, Homo sapiens
acccuucuucgaagcau

SEQ ID NO: 1652 - RNA, 17 nt, Homo sapiens
cccuucuucgaagcauc

SEQ ID NO: 1653 - RNA, 17 nt, Homo sapiens
cgaagcaucagcauaag

SEQ ID NO: 1654 - RNA, 17 nt, Homo sapiens
aucagcauaagaaacuu

SEQ ID NO: 1655 - RNA, 17 nt, Homo sapiens
aagaaacuuguaaaccg

SEQ ID NO: 1656 - RNA, 17 nt, Homo sapiens
aaacuuguaaaccgaga

SEQ ID NO: 1657 - RNA, 17 nt, Homo sapiens
cgagaccuaaaaaccca

SEQ ID NO: 1658 - RNA, 17 nt, Homo sapiens
aacccagucugggagug

SEQ ID NO: 1659 - RNA, 17 nt, Homo sapiens
gaagaaauuuuugagca

SEQ ID NO: 1660 - RNA, 17 nt, Homo sapiens
aagaaauuuuugagcac

SEQ ID NO: 1661 - RNA, 17 nt, Homo sapiens
agaaauuuuugagcacc

SEQ ID NO: 1662 - RNA, 17 nt, Homo sapiens
gaaauuuuugagcaccu

SEQ ID NO: 1663 - RNA, 17 nt, Homo sapiens
gagcaccuuaacuauag

SEQ ID NO: 1664 - RNA, 17 nt, Homo sapiens
agcaccuuaacuauaga

SEQ ID NO: 1665 - RNA, 17 nt, Homo sapiens
ccuuaacuauagauggu

SEQ ID NO: 1666 - RNA, 17 nt, Homo sapiens
uuaacuauagauggugu

SEQ ID NO: 1667 - RNA, 17 nt, Homo sapiens
gaugguguaacccggag

SEQ ID NO: 1668 - RNA, 17 nt, Homo sapiens
ccaaggauuguacaccu

SEQ ID NO: 1669 - RNA, 17 nt, Homo sapiens
aggauuguacaccugug

SEQ ID NO: 1670 - RNA, 17 nt, Homo sapiens
ugcagcauccagugggc

SEQ ID NO: 1671 - RNA, 17 nt, Homo sapiens
cagcacauuugucaggg

SEQ ID NO: 1672 - RNA, 17 nt, Homo sapiens
agcacauuugucagggu

SEQ ID NO: 1673 - RNA, 17 nt, Homo sapiens
acauuugucagggucca

SEQ ID NO: 1674 - RNA, 17 nt, Homo sapiens
gucaggguccaugaaaa

SEQ ID NO: 1675 - RNA, 17 nt, Homo sapiens
aaaaaccuuuuguugcu

SEQ ID NO: 1676 - RNA, 17 nt, Homo sapiens
aaaaccuuuuguugcuu

SEQ ID NO: 1677 - RNA, 17 nt, Homo sapiens
aaaccuuuuguugcuuu

SEQ ID NO: 1678 - RNA, 17 nt, Homo sapiens
ccuuuuguugcuuuugg

SEQ ID NO: 1679 - RNA, 17 nt, Homo sapiens
uuguugcuuuuggaagu

SEQ ID NO: 1680 - RNA, 17 nt, Homo sapiens
uguugcuuuuggaagug

SEQ ID NO: 1681 - RNA, 17 nt, Homo sapiens
guugcuuuuggaagugg

SEQ ID NO: 1682 - RNA, 17 nt, Homo sapiens
cauggaaucucuggugg

SEQ ID NO: 1683 - RNA, 17 nt, Homo sapiens
uggaaucucugguggaa

SEQ ID NO: 1684 - RNA, 17 nt, Homo sapiens
gagcgugucagaauccc

SEQ ID NO: 1685 - RNA, 17 nt, Homo sapiens
gucagaaucccugcgaa

SEQ ID NO: 1686 - RNA, 17 nt, Homo sapiens
ugcgaaguaccuugguu

SEQ ID NO: 1687 - RNA, 17 nt, Homo sapiens
aaguaccuugguuaccc

SEQ ID NO: 1688 - RNA, 17 nt, Homo sapiens
accuugguuacccaccc

SEQ ID NO: 1689 - RNA, 17 nt, Homo sapiens
ccuugguuacccacccc

SEQ ID NO: 1690 - RNA, 17 nt, Homo sapiens
ccagaaauaaaauggua

SEQ ID NO: 1691 - RNA, 17 nt, Homo sapiens
aaaaugguauaaaaaug

SEQ ID NO: 1692 - RNA, 17 nt, Homo sapiens
aaugguauaaaaaugga

SEQ ID NO: 1693 - RNA, 17 nt, Homo sapiens
aauggaauaccccuuga

SEQ ID NO: 1694 - RNA, 17 nt, Homo sapiens
auaccccuugaguccaa

SEQ ID NO: 1695 - RNA, 17 nt, Homo sapiens
ccuugaguccaaucaca

SEQ ID NO: 1696 - RNA, 17 nt, Homo sapiens
aguccaaucacacaauu

SEQ ID NO: 1697 - RNA, 17 nt, Homo sapiens
cacacaauuaaagcggg

SEQ ID NO: 1698 - RNA, 17 nt, Homo sapiens
acacaauuaaagcgggg

SEQ ID NO: 1699 - RNA, 17 nt, Homo sapiens
gggcauguacugacgau

SEQ ID NO: 1700 - RNA, 17 nt, Homo sapiens
cugacgauuauggaagu

SEQ ID NO: 1701 - RNA, 17 nt, Homo sapiens
ugacgauuauggaagug

SEQ ID NO: 1702 - RNA, 17 nt, Homo sapiens
caggaaauuacacuguc

SEQ ID NO: 1703 - RNA, 17 nt, Homo sapiens
aggaaauuacacuguca

SEQ ID NO: 1704 - RNA, 17 nt, Homo sapiens
uacacugucauccuuac

SEQ ID NO: 1705 - RNA, 17 nt, Homo sapiens
acugucauccuuaccaa

SEQ ID NO: 1706 - RNA, 17 nt, Homo sapiens
gucauccuuaccaaucc

SEQ ID NO: 1707 - RNA, 17 nt, Homo sapiens
ucauccuuaccaauccc

SEQ ID NO: 1708 - RNA, 17 nt, Homo sapiens
uuaccaaucccauuuca

SEQ ID NO: 1709 - RNA, 17 nt, Homo sapiens
aaucccauuucaaagga

SEQ ID NO: 1710 - RNA, 17 nt, Homo sapiens
aucccauuucaaaggag

SEQ ID NO: 1711 - RNA, 17 nt, Homo sapiens
ucccauuucaaaggaga

SEQ ID NO: 1712 - RNA, 17 nt, Homo sapiens
cauguggucucucuggu

SEQ ID NO: 1713 - RNA, 17 nt, Homo sapiens
uguggucucucugguug

SEQ ID NO: 1714 - RNA, 17 nt, Homo sapiens
uggucucucugguugug

SEQ ID NO: 1715 - RNA, 17 nt, Homo sapiens
ucucugguuguguaugu

SEQ ID NO: 1716 - RNA, 17 nt, Homo sapiens
gguuguguaugucccac

SEQ ID NO: 1717 - RNA, 17 nt, Homo sapiens
guguaugucccacccca

SEQ ID NO: 1718 - RNA, 17 nt, Homo sapiens
ccccagauuggugagaa

SEQ ID NO: 1719 - RNA, 17 nt, Homo sapiens
ugagaaaucucuaaucu

SEQ ID NO: 1720 - RNA, 17 nt, Homo sapiens
agaaaucucuaaucucu

SEQ ID NO: 1721 - RNA, 17 nt, Homo sapiens
aaaucucuaaucucucc

SEQ ID NO: 1722 - RNA, 17 nt, Homo sapiens
ucucuaaucucuccugu

SEQ ID NO: 1723 - RNA, 17 nt, Homo sapiens
ucuaaucucuccugugg

SEQ ID NO: 1724 - RNA, 17 nt, Homo sapiens
uaaucucuccuguggau

SEQ ID NO: 1725 - RNA, 17 nt, Homo sapiens
cuguggauuccuaccag

SEQ ID NO: 1726 - RNA, 17 nt, Homo sapiens
uguggauuccuaccagu

SEQ ID NO: 1727 - RNA, 17 nt, Homo sapiens
ggauuccuaccaguacg

SEQ ID NO: 1728 - RNA, 17 nt, Homo sapiens
cuaccaguacggcacca

SEQ ID NO: 1729 - RNA, 17 nt, Homo sapiens
gcaccacucaaacgcug

SEQ ID NO: 1730 - RNA, 17 nt, Homo sapiens
ugacauguacggucuau

SEQ ID NO: 1731 - RNA, 17 nt, Homo sapiens
uguacggucuaugccau

SEQ ID NO: 1732 - RNA, 17 nt, Homo sapiens
uacggucuaugccauuc

SEQ ID NO: 1733 - RNA, 17 nt, Homo sapiens
uaugccauuccuccccc

SEQ ID NO: 1734 - RNA, 17 nt, Homo sapiens
augccauuccucccccg

SEQ ID NO: 1735 - RNA, 17 nt, Homo sapiens
ccauuccucccccgcau

SEQ ID NO: 1736 - RNA, 17 nt, Homo sapiens
ccccgcaucacauccac

SEQ ID NO: 1737 - RNA, 17 nt, Homo sapiens
caucacauccacuggua

SEQ ID NO: 1738 - RNA, 17 nt, Homo sapiens
ccacugguauuggcagu

SEQ ID NO: 1739 - RNA, 17 nt, Homo sapiens
acugguauuggcaguug

SEQ ID NO: 1740 - RNA, 17 nt, Homo sapiens
uuggcaguuggaggaag

SEQ ID NO: 1741 - RNA, 17 nt, Homo sapiens
caagcugucucagugac

SEQ ID NO: 1742 - RNA, 17 nt, Homo sapiens
agcugucucagugacaa

SEQ ID NO: 1743 - RNA, 17 nt, Homo sapiens
aaacccauacccuugug

SEQ ID NO: 1744 - RNA, 17 nt, Homo sapiens
cauacccuugugaagaa

SEQ ID NO: 1745 - RNA, 17 nt, Homo sapiens
ggaggacuuccagggag

SEQ ID NO: 1746 - RNA, 17 nt, Homo sapiens
gaggacuuccagggagg

SEQ ID NO: 1747 - RNA, 17 nt, Homo sapiens
gaggaaauaaaauugaa

SEQ ID NO: 1748 - RNA, 17 nt, Homo sapiens
aauaaaauugaaguuaa

SEQ ID NO: 1749 - RNA, 17 nt, Homo sapiens
auugaaguuaauaaaaa

SEQ ID NO: 1750 - RNA, 17 nt, Homo sapiens
uugaaguuaauaaaaau

SEQ ID NO: 1751 - RNA, 17 nt, Homo sapiens
aaguuaauaaaaaucaa

SEQ ID NO: 1752 - RNA, 17 nt, Homo sapiens
auaaaaaucaauuugcu

SEQ ID NO: 1753 - RNA, 17 nt, Homo sapiens
aaaucaauuugcucuaa

SEQ ID NO: 1754 - RNA, 17 nt, Homo sapiens
aaucaauuugcucuaau

SEQ ID NO: 1755 - RNA, 17 nt, Homo sapiens
aauuugcucuaauugaa

SEQ ID NO: 1756 - RNA, 17 nt, Homo sapiens
uuugcucuaauugaagg

SEQ ID NO: 1757 - RNA, 17 nt, Homo sapiens
gcucuaauugaaggaaa

SEQ ID NO: 1758 - RNA, 17 nt, Homo sapiens
aaaacuguaaguacccu

SEQ ID NO: 1759 - RNA, 17 nt, Homo sapiens
cuguaaguacccuuguu

SEQ ID NO: 1760 - RNA, 17 nt, Homo sapiens
aguacccuuguuaucca

SEQ ID NO: 1761 - RNA, 17 nt, Homo sapiens
acccuuguuauccaagc

SEQ ID NO: 1762 - RNA, 17 nt, Homo sapiens
cccuuguuauccaagcg

SEQ ID NO: 1763 - RNA, 17 nt, Homo sapiens
cuuguuauccaagcggc

SEQ ID NO: 1764 - RNA, 17 nt, Homo sapiens
aaaugugucagcuuugu

SEQ ID NO: 1765 - RNA, 17 nt, Homo sapiens
ugucagcuuuguacaaa

SEQ ID NO: 1766 - RNA, 17 nt, Homo sapiens
gucagcuuuguacaaau

SEQ ID NO: 1767 - RNA, 17 nt, Homo sapiens
agcuuuguacaaaugug

SEQ ID NO: 1768 - RNA, 17 nt, Homo sapiens
gaagcggucaacaaagu

SEQ ID NO: 1769 - RNA, 17 nt, Homo sapiens
aacaaagucgggagagg

SEQ ID NO: 1770 - RNA, 17 nt, Homo sapiens
agggugaucuccuucca

SEQ ID NO: 1771 - RNA, 17 nt, Homo sapiens
ggugaucuccuuccacg

SEQ ID NO: 1772 - RNA, 17 nt, Homo sapiens
gaucuccuuccacguga

SEQ ID NO: 1773 - RNA, 17 nt, Homo sapiens
aucuccuuccacgugac

SEQ ID NO: 1774 - RNA, 17 nt, Homo sapiens
ccagggguccugaaauu

SEQ ID NO: 1775 - RNA, 17 nt, Homo sapiens
ccugaaauuacuuugca

SEQ ID NO: 1776 - RNA, 17 nt, Homo sapiens
cugaaauuacuuugcaa

SEQ ID NO: 1777 - RNA, 17 nt, Homo sapiens
aaauuacuuugcaaccu

SEQ ID NO: 1778 - RNA, 17 nt, Homo sapiens
aauuacuuugcaaccug

SEQ ID NO: 1779 - RNA, 17 nt, Homo sapiens
gagcgugucuuuguggu

SEQ ID NO: 1780 - RNA, 17 nt, Homo sapiens
gcgugucuuuguggugc

SEQ ID NO: 1781 - RNA, 17 nt, Homo sapiens
cgugucuuuguggugca

SEQ ID NO: 1782 - RNA, 17 nt, Homo sapiens
agacagaucuacguuug

SEQ ID NO: 1783 - RNA, 17 nt, Homo sapiens
acagaucuacguuugag

SEQ ID NO: 1784 - RNA, 17 nt, Homo sapiens
aucuacguuugagaacc

SEQ ID NO: 1785 - RNA, 17 nt, Homo sapiens
ucuacguuugagaaccu

SEQ ID NO: 1786 - RNA, 17 nt, Homo sapiens
gagaaccucacauggua

SEQ ID NO: 1787 - RNA, 17 nt, Homo sapiens
cacaugguacaagcuug

SEQ ID NO: 1788 - RNA, 17 nt, Homo sapiens
uacaagcuuggcccaca

SEQ ID NO: 1789 - RNA, 17 nt, Homo sapiens
cacagccucugccaauc

SEQ ID NO: 1790 - RNA, 17 nt, Homo sapiens
cugccaauccauguggg

SEQ ID NO: 1791 - RNA, 17 nt, Homo sapiens
gggagaguugcccacac

SEQ ID NO: 1792 - RNA, 17 nt, Homo sapiens
acaccuguuugcaagaa

SEQ ID NO: 1793 - RNA, 17 nt, Homo sapiens
caccuguuugcaagaac

SEQ ID NO: 1794 - RNA, 17 nt, Homo sapiens
caagaacuuggauacuc

SEQ ID NO: 1795 - RNA, 17 nt, Homo sapiens
acuuggauacucuuugg

SEQ ID NO: 1796 - RNA, 17 nt, Homo sapiens
uggauacucuuuggaaa

SEQ ID NO: 1797 - RNA, 17 nt, Homo sapiens
gauacucuuuggaaauu

SEQ ID NO: 1798 - RNA, 17 nt, Homo sapiens
auacucuuuggaaauug

SEQ ID NO: 1799 - RNA, 17 nt, Homo sapiens
uuggaaauugaaugcca

SEQ ID NO: 1800 - RNA, 17 nt, Homo sapiens
caccauguucucuaaua

SEQ ID NO: 1801 - RNA, 17 nt, Homo sapiens
accauguucucuaauag

SEQ ID NO: 1802 - RNA, 17 nt, Homo sapiens
cauguucucuaauagca

SEQ ID NO: 1803 - RNA, 17 nt, Homo sapiens
uguucucuaauagcaca

SEQ ID NO: 1804 - RNA, 17 nt, Homo sapiens
ucucuaauagcacaaau

SEQ ID NO: 1805 - RNA, 17 nt, Homo sapiens
aaugacauuuugaucau

SEQ ID NO: 1806 - RNA, 17 nt, Homo sapiens
augacauuuugaucaug

SEQ ID NO: 1807 - RNA, 17 nt, Homo sapiens
ugacauuuugaucaugg

SEQ ID NO: 1808 - RNA, 17 nt, Homo sapiens
auuuugaucauggagcu

SEQ ID NO: 1809 - RNA, 17 nt, Homo sapiens
auggagcuuaagaaugc

SEQ ID NO: 1810 - RNA, 17 nt, Homo sapiens
uggagcuuaagaaugca

SEQ ID NO: 1811 - RNA, 17 nt, Homo sapiens
gaaugcauccuugcagg

SEQ ID NO: 1812 - RNA, 17 nt, Homo sapiens
ugcauccuugcaggacc

SEQ ID NO: 1813 - RNA, 17 nt, Homo sapiens
aggagacuaugucugcc

SEQ ID NO: 1814 - RNA, 17 nt, Homo sapiens
gacuaugucugccuugc

SEQ ID NO: 1815 - RNA, 17 nt, Homo sapiens
gucugccuugcucaaga

SEQ ID NO: 1816 - RNA, 17 nt, Homo sapiens
gccuugcucaagacagg

SEQ ID NO: 1817 - RNA, 17 nt, Homo sapiens
aaagacauugcgugguc

SEQ ID NO: 1818 - RNA, 17 nt, Homo sapiens
ugcguggucaggcagcu

SEQ ID NO: 1819 - RNA, 17 nt, Homo sapiens
aggcagcucacaguccu

SEQ ID NO: 1820 - RNA, 17 nt, Homo sapiens
cucacaguccuagagcg

SEQ ID NO: 1821 - RNA, 17 nt, Homo sapiens
acaguccuagagcgugu

SEQ ID NO: 1822 - RNA, 17 nt, Homo sapiens
cccacgaucacaggaaa

SEQ ID NO: 1823 - RNA, 17 nt, Homo sapiens
uggagaaucagacgaca

SEQ ID NO: 1824 - RNA, 17 nt, Homo sapiens
cgacaaguauuggggaa

SEQ ID NO: 1825 - RNA, 17 nt, Homo sapiens
acaaguauuggggaaag

SEQ ID NO: 1826 - RNA, 17 nt, Homo sapiens
gaaagcaucgaagucuc

SEQ ID NO: 1827 - RNA, 17 nt, Homo sapiens
aucgaagucucaugcac

SEQ ID NO: 1828 - RNA, 17 nt, Homo sapiens
cgaagucucaugcacgg

SEQ ID NO: 1829 - RNA, 17 nt, Homo sapiens
cacggcaucugggaauc

SEQ ID NO: 1830 - RNA, 17 nt, Homo sapiens
cugggaaucccccucca

SEQ ID NO: 1831 - RNA, 17 nt, Homo sapiens
aucccccuccacagauc

SEQ ID NO: 1832 - RNA, 17 nt, Homo sapiens
ccacagaucaugugguu

SEQ ID NO: 1833 - RNA, 17 nt, Homo sapiens
caugugguuuaaagaua

SEQ ID NO: 1834 - RNA, 17 nt, Homo sapiens
augugguuuaaagauaa

SEQ ID NO: 1835 - RNA, 17 nt, Homo sapiens
ugugguuuaaagauaau

SEQ ID NO: 1836 - RNA, 17 nt, Homo sapiens
uuaaagauaaugagacc

SEQ ID NO: 1837 - RNA, 17 nt, Homo sapiens
gagacccuuguagaaga

SEQ ID NO: 1838 - RNA, 17 nt, Homo sapiens
acccuuguagaagacuc

SEQ ID NO: 1839 - RNA, 17 nt, Homo sapiens
agaagacucaggcauug

SEQ ID NO: 1840 - RNA, 17 nt, Homo sapiens
ucaggcauuguauugaa

SEQ ID NO: 1841 - RNA, 17 nt, Homo sapiens
ggcauuguauugaagga

SEQ ID NO: 1842 - RNA, 17 nt, Homo sapiens
cauuguauugaaggaug

SEQ ID NO: 1843 - RNA, 17 nt, Homo sapiens
cggaaccucacuauccg

SEQ ID NO: 1844 - RNA, 17 nt, Homo sapiens
accucacuauccgcaga

SEQ ID NO: 1845 - RNA, 17 nt, Homo sapiens
cucacuauccgcagagu

SEQ ID NO: 1846 - RNA, 17 nt, Homo sapiens
gaaggccucuacaccug

SEQ ID NO: 1847 - RNA, 17 nt, Homo sapiens
aggccucuacaccugcc

SEQ ID NO: 1848 - RNA, 17 nt, Homo sapiens
ugcaguguucuuggcug

SEQ ID NO: 1849 - RNA, 17 nt, Homo sapiens
gcaguguucuuggcugu

SEQ ID NO: 1850 - RNA, 17 nt, Homo sapiens
aguguucuuggcugugc

SEQ ID NO: 1851 - RNA, 17 nt, Homo sapiens
ggaggcauuuuucauaa

SEQ ID NO: 1852 - RNA, 17 nt, Homo sapiens
gaggcauuuuucauaau

SEQ ID NO: 1853 - RNA, 17 nt, Homo sapiens
aggcauuuuucauaaua

SEQ ID NO: 1854 - RNA, 17 nt, Homo sapiens
ggcauuuuucauaauag

SEQ ID NO: 1855 - RNA, 17 nt, Homo sapiens
gcauuuuucauaauaga

SEQ ID NO: 1856 - RNA, 17 nt, Homo sapiens
uuuuucauaauagaagg

SEQ ID NO: 1857 - RNA, 17 nt, Homo sapiens
uucauaauagaaggugc

SEQ ID NO: 1858 - RNA, 17 nt, Homo sapiens
gacgaacuuggaaauca

SEQ ID NO: 1859 - RNA, 17 nt, Homo sapiens
uuggaaaucauuauucu

SEQ ID NO: 1860 - RNA, 17 nt, Homo sapiens
gaaaucauuauucuagu

SEQ ID NO: 1861 - RNA, 17 nt, Homo sapiens
aaaucauuauucuagua

SEQ ID NO: 1862 - RNA, 17 nt, Homo sapiens
aucauuauucuaguagg

SEQ ID NO: 1863 - RNA, 17 nt, Homo sapiens
ucauuauucuaguaggc

SEQ ID NO: 1864 - RNA, 17 nt, Homo sapiens
auuauucuaguaggcac

SEQ ID NO: 1865 - RNA, 17 nt, Homo sapiens
auucuaguaggcacgac

SEQ ID NO: 1866 - RNA, 17 nt, Homo sapiens
acggugauugccauguu

SEQ ID NO: 1867 - RNA, 17 nt, Homo sapiens
ugccauguucuucuggc

SEQ ID NO: 1868 - RNA, 17 nt, Homo sapiens
gccauguucuucuggcu

SEQ ID NO: 1869 - RNA, 17 nt, Homo sapiens
cauguucuucuggcuac

SEQ ID NO: 1870 - RNA, 17 nt, Homo sapiens
auguucuucuggcuacu

SEQ ID NO: 1871 - RNA, 17 nt, Homo sapiens
uucuggcuacuucuugu

SEQ ID NO: 1872 - RNA, 17 nt, Homo sapiens
uggcuacuucuugucau

SEQ ID NO: 1873 - RNA, 17 nt, Homo sapiens
ggcuacuucuugucauc

SEQ ID NO: 1874 - RNA, 17 nt, Homo sapiens
cuacuucuugucaucau

SEQ ID NO: 1875 - RNA, 17 nt, Homo sapiens
cuucuugucaucauccu

SEQ ID NO: 1876 - RNA, 17 nt, Homo sapiens
cuugucaucauccuagg

SEQ ID NO: 1877 - RNA, 17 nt, Homo sapiens
gucaucauccuagggac

SEQ ID NO: 1878 - RNA, 17 nt, Homo sapiens
aucauccuagggaccgu

SEQ ID NO: 1879 - RNA, 17 nt, Homo sapiens
gggaccguuaagcgggc

SEQ ID NO: 1880 - RNA, 17 nt, Homo sapiens
ggaccguuaagcgggcc

SEQ ID NO: 1881 - RNA, 17 nt, Homo sapiens
gacaggcuacuugucca

SEQ ID NO: 1882 - RNA, 17 nt, Homo sapiens
aggcuacuuguccaucg

SEQ ID NO: 1883 - RNA, 17 nt, Homo sapiens
cuacuuguccaucguca

SEQ ID NO: 1884 - RNA, 17 nt, Homo sapiens
uuguccaucgucaugga

SEQ ID NO: 1885 - RNA, 17 nt, Homo sapiens
uccaucgucauggaucc

SEQ ID NO: 1886 - RNA, 17 nt, Homo sapiens
ucauggauccagaugaa

SEQ ID NO: 1887 - RNA, 17 nt, Homo sapiens
gaugaacucccauugga

SEQ ID NO: 1888 - RNA, 17 nt, Homo sapiens
acucccauuggaugaac

SEQ ID NO: 1889 - RNA, 17 nt, Homo sapiens
augaacauugugaacga

SEQ ID NO: 1890 - RNA, 17 nt, Homo sapiens
gacugccuuaugaugcc

SEQ ID NO: 1891 - RNA, 17 nt, Homo sapiens
acugccuuaugaugcca

SEQ ID NO: 1892 - RNA, 17 nt, Homo sapiens
augggaauuccccagag

SEQ ID NO: 1893 - RNA, 17 nt, Homo sapiens
ugggaauuccccagaga

SEQ ID NO: 1894 - RNA, 17 nt, Homo sapiens
cugaaccuagguaagcc

SEQ ID NO: 1895 - RNA, 17 nt, Homo sapiens
accuagguaagccucuu

SEQ ID NO: 1896 - RNA, 17 nt, Homo sapiens
guaagccucuuggccgu

SEQ ID NO: 1897 - RNA, 17 nt, Homo sapiens
aagccucuuggccgugg

SEQ ID NO: 1898 - RNA, 17 nt, Homo sapiens
uggugccuuuggccaag

SEQ ID NO: 1899 - RNA, 17 nt, Homo sapiens
ggugccuuuggccaaga

SEQ ID NO: 1900 - RNA, 17 nt, Homo sapiens
caagagauugaagcaga

SEQ ID NO: 1901 - RNA, 17 nt, Homo sapiens
agaugccuuuggaauug

SEQ ID NO: 1902 - RNA, 17 nt, Homo sapiens
gaugccuuuggaauuga

SEQ ID NO: 1903 - RNA, 17 nt, Homo sapiens
uuuggaauugacaagac

SEQ ID NO: 1904 - RNA, 17 nt, Homo sapiens
cagcaacuugcaggaca

SEQ ID NO: 1905 - RNA, 17 nt, Homo sapiens
aggacaguagcagucaa

SEQ ID NO: 1906 - RNA, 17 nt, Homo sapiens
guagcagucaaaauguu

SEQ ID NO: 1907 - RNA, 17 nt, Homo sapiens
caaaauguugaaagaag

SEQ ID NO: 1908 - RNA, 17 nt, Homo sapiens
gugagcaucgagcucuc

SEQ ID NO: 1909 - RNA, 17 nt, Homo sapiens
aucgagcucucaugucu

SEQ ID NO: 1910 - RNA, 17 nt, Homo sapiens
cgagcucucaugucuga

SEQ ID NO: 1911 - RNA, 17 nt, Homo sapiens
ucucaugucugaacuca

SEQ ID NO: 1912 - RNA, 17 nt, Homo sapiens
ucugaacucaagauccu

SEQ ID NO: 1913 - RNA, 17 nt, Homo sapiens
cucaagauccucauuca

SEQ ID NO: 1914 - RNA, 17 nt, Homo sapiens
aagauccucauucauau

SEQ ID NO: 1915 - RNA, 17 nt, Homo sapiens
auccucauucauauugg

SEQ ID NO: 1916 - RNA, 17 nt, Homo sapiens
uccucauucauauuggu

SEQ ID NO: 1917 - RNA, 17 nt, Homo sapiens
ucauucauauuggucac

SEQ ID NO: 1918 - RNA, 17 nt, Homo sapiens
auucauauuggucacca

SEQ ID NO: 1919 - RNA, 17 nt, Homo sapiens
auauuggucaccaucuc

SEQ ID NO: 1920 - RNA, 17 nt, Homo sapiens
gucaccaucucaaugug

SEQ ID NO: 1921 - RNA, 17 nt, Homo sapiens
caccaucucaauguggu

SEQ ID NO: 1922 - RNA, 17 nt, Homo sapiens
aauguggucaaccuucu

SEQ ID NO: 1923 - RNA, 17 nt, Homo sapiens
gucaaccuucuaggugc

SEQ ID NO: 1924 - RNA, 17 nt, Homo sapiens
ucaaccuucuaggugcc

SEQ ID NO: 1925 - RNA, 17 nt, Homo sapiens
aaccuucuaggugccug

SEQ ID NO: 1926 - RNA, 17 nt, Homo sapiens
gugccuguaccaagcca

SEQ ID NO: 1927 - RNA, 17 nt, Homo sapiens
gggccacucauggugau

SEQ ID NO: 1928 - RNA, 17 nt, Homo sapiens
auggugauuguggaauu

SEQ ID NO: 1929 - RNA, 17 nt, Homo sapiens
uguggaauucugcaaau

SEQ ID NO: 1930 - RNA, 17 nt, Homo sapiens
guggaauucugcaaauu

SEQ ID NO: 1931 - RNA, 17 nt, Homo sapiens
cugcaaauuuggaaacc

SEQ ID NO: 1932 - RNA, 17 nt, Homo sapiens
ugcaaauuuggaaaccu

SEQ ID NO: 1933 - RNA, 17 nt, Homo sapiens
aaaccuguccacuuacc

SEQ ID NO: 1934 - RNA, 17 nt, Homo sapiens
uguccacuuaccugagg

SEQ ID NO: 1935 - RNA, 17 nt, Homo sapiens
guccacuuaccugagga

SEQ ID NO: 1936 - RNA, 17 nt, Homo sapiens
aaaugaauuuguccccu

SEQ ID NO: 1937 - RNA, 17 nt, Homo sapiens
aaugaauuuguccccua

SEQ ID NO: 1938 - RNA, 17 nt, Homo sapiens
gaauuuguccccuacaa

SEQ ID NO: 1939 - RNA, 17 nt, Homo sapiens
uguccccuacaagacca

SEQ ID NO: 1940 - RNA, 17 nt, Homo sapiens
ggcacgauuccgucaag

SEQ ID NO: 1941 - RNA, 17 nt, Homo sapiens
gcacgauuccgucaagg

SEQ ID NO: 1942 - RNA, 17 nt, Homo sapiens
gauuccgucaagggaaa

SEQ ID NO: 1943 - RNA, 17 nt, Homo sapiens
gaaagacuacguuggag

SEQ ID NO: 1944 - RNA, 17 nt, Homo sapiens
gacuacguuggagcaau

SEQ ID NO: 1945 - RNA, 17 nt, Homo sapiens
ggagcaaucccugugga

SEQ ID NO: 1946 - RNA, 17 nt, Homo sapiens
cuguggaucugaaacgg

SEQ ID NO: 1947 - RNA, 17 nt, Homo sapiens
acggcgcuuggacagca

SEQ ID NO: 1948 - RNA, 17 nt, Homo sapiens
gacagcaucaccaguag

SEQ ID NO: 1949 - RNA, 17 nt, Homo sapiens
ucaccaguagccagagc

SEQ ID NO: 1950 - RNA, 17 nt, Homo sapiens
ccagagcucagccagcu

SEQ ID NO: 1951 - RNA, 17 nt, Homo sapiens
agccagcucuggauuug

SEQ ID NO: 1952 - RNA, 17 nt, Homo sapiens
cucuggauuuguggagg

SEQ ID NO: 1953 - RNA, 17 nt, Homo sapiens
ucuggauuuguggagga

SEQ ID NO: 1954 - RNA, 17 nt, Homo sapiens
ggagaagucccucagug

SEQ ID NO: 1955 - RNA, 17 nt, Homo sapiens
aagucccucagugaugu

SEQ ID NO: 1956 - RNA, 17 nt, Homo sapiens
agugauguagaagaaga

SEQ ID NO: 1957 - RNA, 17 nt, Homo sapiens
aggaagcuccugaagau

SEQ ID NO: 1958 - RNA, 17 nt, Homo sapiens
cugaagaucuguauaag

SEQ ID NO: 1959 - RNA, 17 nt, Homo sapiens
agaucuguauaaggacu

SEQ ID NO: 1960 - RNA, 17 nt, Homo sapiens
aucuguauaaggacuuc

SEQ ID NO: 1961 - RNA, 17 nt, Homo sapiens
uaaggacuuccugaccu

SEQ ID NO: 1962 - RNA, 17 nt, Homo sapiens
aaggacuuccugaccuu

SEQ ID NO: 1963 - RNA, 17 nt, Homo sapiens
ccugaccuuggagcauc

SEQ ID NO: 1964 - RNA, 17 nt, Homo sapiens
uggagcaucucaucugu

SEQ ID NO: 1965 - RNA, 17 nt, Homo sapiens
gagcaucucaucuguua

SEQ ID NO: 1966 - RNA, 17 nt, Homo sapiens
caucucaucuguuacag

SEQ ID NO: 1967 - RNA, 17 nt, Homo sapiens
ucaucuguuacagcuuc

SEQ ID NO: 1968 - RNA, 17 nt, Homo sapiens
caucuguuacagcuucc

SEQ ID NO: 1969 - RNA, 17 nt, Homo sapiens
uuacagcuuccaagugg

SEQ ID NO: 1970 - RNA, 17 nt, Homo sapiens
uacagcuuccaaguggc

SEQ ID NO: 1971 - RNA, 17 nt, Homo sapiens
aaguggcuaagggcaug

SEQ ID NO: 1972 - RNA, 17 nt, Homo sapiens
cauggaguucuuggcau

SEQ ID NO: 1973 - RNA, 17 nt, Homo sapiens
auggaguucuuggcauc

SEQ ID NO: 1974 - RNA, 17 nt, Homo sapiens
ggaguucuuggcaucgc

SEQ ID NO: 1975 - RNA, 17 nt, Homo sapiens
cuuggcaucgcgaaagu

SEQ ID NO: 1976 - RNA, 17 nt, Homo sapiens
gaaaguguauccacagg

SEQ ID NO: 1977 - RNA, 17 nt, Homo sapiens
aaguguauccacaggga

SEQ ID NO: 1978 - RNA, 17 nt, Homo sapiens
cacgaaauauccucuua

SEQ ID NO: 1979 - RNA, 17 nt, Homo sapiens
cgaaauauccucuuauc

SEQ ID NO: 1980 - RNA, 17 nt, Homo sapiens
aauauccucuuaucgga

SEQ ID NO: 1981 - RNA, 17 nt, Homo sapiens
uauccucuuaucggaga

SEQ ID NO: 1982 - RNA, 17 nt, Homo sapiens
auccucuuaucggagaa

SEQ ID NO: 1983 - RNA, 17 nt, Homo sapiens
ccucuuaucggagaaga

SEQ ID NO: 1984 - RNA, 17 nt, Homo sapiens
aacgugguuaaaaucug

SEQ ID NO: 1985 - RNA, 17 nt, Homo sapiens
acgugguuaaaaucugu

SEQ ID NO: 1986 - RNA, 17 nt, Homo sapiens
guuaaaaucugugacuu

SEQ ID NO: 1987 - RNA, 17 nt, Homo sapiens
cugugacuuuggcuugg

SEQ ID NO: 1988 - RNA, 17 nt, Homo sapiens
ugugacuuuggcuuggc

SEQ ID NO: 1989 - RNA, 17 nt, Homo sapiens
cuuuggcuuggcccggg

SEQ ID NO: 1990 - RNA, 17 nt, Homo sapiens
cccgggauauuuauaaa

SEQ ID NO: 1991 - RNA, 17 nt, Homo sapiens
cgggauauuuauaaaga

SEQ ID NO: 1992 - RNA, 17 nt, Homo sapiens
gggauauuuauaaagau

SEQ ID NO: 1993 - RNA, 17 nt, Homo sapiens
ggauauuuauaaagauc

SEQ ID NO: 1994 - RNA, 17 nt, Homo sapiens
auauuuauaaagaucca

SEQ ID NO: 1995 - RNA, 17 nt, Homo sapiens
auaaagauccagauuau

SEQ ID NO: 1996 - RNA, 17 nt, Homo sapiens
auccagauuaugucaga

SEQ ID NO: 1997 - RNA, 17 nt, Homo sapiens
uccagauuaugucagaa

SEQ ID NO: 1998 - RNA, 17 nt, Homo sapiens
gauuaugucagaaaagg

SEQ ID NO: 1999 - RNA, 17 nt, Homo sapiens
gagaugcucgccucccu

SEQ ID NO: 2000 - RNA, 17 nt, Homo sapiens
gcucgccucccuuugaa

SEQ ID NO: 2001 - RNA, 17 nt, Homo sapiens
gccucccuuugaaaugg

SEQ ID NO: 2002 - RNA, 17 nt, Homo sapiens
ccucccuuugaaaugga

SEQ ID NO: 2003 - RNA, 17 nt, Homo sapiens
gaaacaauuuuugacag

SEQ ID NO: 2004 - RNA, 17 nt, Homo sapiens
aaacaauuuuugacaga

SEQ ID NO: 2005 - RNA, 17 nt, Homo sapiens
aacaauuuuugacagag

SEQ ID NO: 2006 - RNA, 17 nt, Homo sapiens
acaauuuuugacagagu

SEQ ID NO: 2007 - RNA, 17 nt, Homo sapiens
cagaguguacacaaucc

SEQ ID NO: 2008 - RNA, 17 nt, Homo sapiens
uacacaauccagaguga

SEQ ID NO: 2009 - RNA, 17 nt, Homo sapiens
agugacgucuggucuuu

SEQ ID NO: 2010 - RNA, 17 nt, Homo sapiens
cgucuggucuuuuggug

SEQ ID NO: 2011 - RNA, 17 nt, Homo sapiens
ucuggucuuuugguguu

SEQ ID NO: 2012 - RNA, 17 nt, Homo sapiens
cuggucuuuugguguuu

SEQ ID NO: 2013 - RNA, 17 nt, Homo sapiens
uggucuuuugguguuuu

SEQ ID NO: 2014 - RNA, 17 nt, Homo sapiens
uuugguguuuugcugug

SEQ ID NO: 2015 - RNA, 17 nt, Homo sapiens
uugguguuuugcugugg

SEQ ID NO: 2016 - RNA, 17 nt, Homo sapiens
ugguguuuugcuguggg

SEQ ID NO: 2017 - RNA, 17 nt, Homo sapiens
ugggaaauauuuuccuu

SEQ ID NO: 2018 - RNA, 17 nt, Homo sapiens
ggaaauauuuuccuuag

SEQ ID NO: 2019 - RNA, 17 nt, Homo sapiens
gaaauauuuuccuuagg

SEQ ID NO: 2020 - RNA, 17 nt, Homo sapiens
aaauauuuuccuuaggu

SEQ ID NO: 2021 - RNA, 17 nt, Homo sapiens
aauauuuuccuuaggug

SEQ ID NO: 2022 - RNA, 17 nt, Homo sapiens
auuuuccuuaggugcuu

SEQ ID NO: 2023 - RNA, 17 nt, Homo sapiens
uuuuccuuaggugcuuc

SEQ ID NO: 2024 - RNA, 17 nt, Homo sapiens
uaggugcuucuccauau

SEQ ID NO: 2025 - RNA, 17 nt, Homo sapiens
aggugcuucuccauauc

SEQ ID NO: 2026 - RNA, 17 nt, Homo sapiens
gugcuucuccauauccu

SEQ ID NO: 2027 - RNA, 17 nt, Homo sapiens
uucuccauauccugggg

SEQ ID NO: 2028 - RNA, 17 nt, Homo sapiens
cuccauauccuggggua

SEQ ID NO: 2029 - RNA, 17 nt, Homo sapiens
ccugggguaaagauuga

SEQ ID NO: 2030 - RNA, 17 nt, Homo sapiens
guaaagauugaugaaga

SEQ ID NO: 2031 - RNA, 17 nt, Homo sapiens
ugaagaauuuuguaggc

SEQ ID NO: 2032 - RNA, 17 nt, Homo sapiens
gaagaauuuuguaggcg

SEQ ID NO: 2033 - RNA, 17 nt, Homo sapiens
aagaauuuuguaggcga

SEQ ID NO: 2034 - RNA, 17 nt, Homo sapiens
aauuuuguaggcgauug

SEQ ID NO: 2035 - RNA, 17 nt, Homo sapiens
uaggcgauugaaagaag

SEQ ID NO: 2036 - RNA, 17 nt, Homo sapiens
aaggaacuagaaugagg

SEQ ID NO: 2037 - RNA, 17 nt, Homo sapiens
ccccugauuauacuaca

SEQ ID NO: 2038 - RNA, 17 nt, Homo sapiens
cccugauuauacuacac

SEQ ID NO: 2039 - RNA, 17 nt, Homo sapiens
cugauuauacuacacca

SEQ ID NO: 2040 - RNA, 17 nt, Homo sapiens
auuauacuacaccagaa

SEQ ID NO: 2041 - RNA, 17 nt, Homo sapiens
agaaauguaccagacca

SEQ ID NO: 2042 - RNA, 17 nt, Homo sapiens
agcccagucagagaccc

SEQ ID NO: 2043 - RNA, 17 nt, Homo sapiens
acccacguuuucagagu

SEQ ID NO: 2044 - RNA, 17 nt, Homo sapiens
cccacguuuucagaguu

SEQ ID NO: 2045 - RNA, 17 nt, Homo sapiens
ccacguuuucagaguug

SEQ ID NO: 2046 - RNA, 17 nt, Homo sapiens
cacguuuucagaguugg

SEQ ID NO: 2047 - RNA, 17 nt, Homo sapiens
uucagaguugguggaac

SEQ ID NO: 2048 - RNA, 17 nt, Homo sapiens
uggaacauuugggaaau

SEQ ID NO: 2049 - RNA, 17 nt, Homo sapiens
ggaacauuugggaaauc

SEQ ID NO: 2050 - RNA, 17 nt, Homo sapiens
ugggaaaucucuugcaa

SEQ ID NO: 2051 - RNA, 17 nt, Homo sapiens
ggaaaucucuugcaagc

SEQ ID NO: 2052 - RNA, 17 nt, Homo sapiens
aaaucucuugcaagcua

SEQ ID NO: 2053 - RNA, 17 nt, Homo sapiens
ugcaagcuaaugcucag

SEQ ID NO: 2054 - RNA, 17 nt, Homo sapiens
cuaaugcucagcaggau

SEQ ID NO: 2055 - RNA, 17 nt, Homo sapiens
caaagacuacauuguuc

SEQ ID NO: 2056 - RNA, 17 nt, Homo sapiens
gacuacauuguucuucc

SEQ ID NO: 2057 - RNA, 17 nt, Homo sapiens
uacauuguucuuccgau

SEQ ID NO: 2058 - RNA, 17 nt, Homo sapiens
acauuguucuuccgaua

SEQ ID NO: 2059 - RNA, 17 nt, Homo sapiens
auuguucuuccgauauc

SEQ ID NO: 2060 - RNA, 17 nt, Homo sapiens
uuguucuuccgauauca

SEQ ID NO: 2061 - RNA, 17 nt, Homo sapiens
cuuccgauaucagagac

SEQ ID NO: 2062 - RNA, 17 nt, Homo sapiens
uccgauaucagagacuu

SEQ ID NO: 2063 - RNA, 17 nt, Homo sapiens
cagagacuuugagcaug

SEQ ID NO: 2064 - RNA, 17 nt, Homo sapiens
agagacuuugagcaugg

SEQ ID NO: 2065 - RNA, 17 nt, Homo sapiens
aagaggauucuggacuc

SEQ ID NO: 2066 - RNA, 17 nt, Homo sapiens
agaggauucuggacucu

SEQ ID NO: 2067 - RNA, 17 nt, Homo sapiens
ucuggacucucucugcc

SEQ ID NO: 2068 - RNA, 17 nt, Homo sapiens
uggacucucucugccua

SEQ ID NO: 2069 - RNA, 17 nt, Homo sapiens
gacucucucugccuacc

SEQ ID NO: 2070 - RNA, 17 nt, Homo sapiens
cucugccuaccucaccu

SEQ ID NO: 2071 - RNA, 17 nt, Homo sapiens
gccuaccucaccuguuu

SEQ ID NO: 2072 - RNA, 17 nt, Homo sapiens
ucaccuguuuccuguau

SEQ ID NO: 2073 - RNA, 17 nt, Homo sapiens
caccuguuuccuguaug

SEQ ID NO: 2074 - RNA, 17 nt, Homo sapiens
accuguuuccuguaugg

SEQ ID NO: 2075 - RNA, 17 nt, Homo sapiens
uuuccuguauggaggag

SEQ ID NO: 2076 - RNA, 17 nt, Homo sapiens
gaggaaguaugugaccc

SEQ ID NO: 2077 - RNA, 17 nt, Homo sapiens
ccccaaauuccauuaug

SEQ ID NO: 2078 - RNA, 17 nt, Homo sapiens
cccaaauuccauuauga

SEQ ID NO: 2079 - RNA, 17 nt, Homo sapiens
aauuccauuaugacaac

SEQ ID NO: 2080 - RNA, 17 nt, Homo sapiens
auuccauuaugacaaca

SEQ ID NO: 2081 - RNA, 17 nt, Homo sapiens
gcaggaaucagucagua

SEQ ID NO: 2082 - RNA, 17 nt, Homo sapiens
gaaucagucaguaucug

SEQ ID NO: 2083 - RNA, 17 nt, Homo sapiens
cagucaguaucugcaga

SEQ ID NO: 2084 - RNA, 17 nt, Homo sapiens
gucaguaucugcagaac

SEQ ID NO: 2085 - RNA, 17 nt, Homo sapiens
agaacaguaagcgaaag

SEQ ID NO: 2086 - RNA, 17 nt, Homo sapiens
gugaguguaaaaacauu

SEQ ID NO: 2087 - RNA, 17 nt, Homo sapiens
aaaaacauuugaagaua

SEQ ID NO: 2088 - RNA, 17 nt, Homo sapiens
aaaacauuugaagauau

SEQ ID NO: 2089 - RNA, 17 nt, Homo sapiens
uugaagauaucccguua

SEQ ID NO: 2090 - RNA, 17 nt, Homo sapiens
gaagauaucccguuaga

SEQ ID NO: 2091 - RNA, 17 nt, Homo sapiens
uaucccguuagaagaac

SEQ ID NO: 2092 - RNA, 17 nt, Homo sapiens
aucccguuagaagaacc

SEQ ID NO: 2093 - RNA, 17 nt, Homo sapiens
ccagaaguaaaaguaau

SEQ ID NO: 2094 - RNA, 17 nt, Homo sapiens
guaaaaguaaucccaga

SEQ ID NO: 2095 - RNA, 17 nt, Homo sapiens
aaaguaaucccagauga

SEQ ID NO: 2096 - RNA, 17 nt, Homo sapiens
acagugguaugguucuu

SEQ ID NO: 2097 - RNA, 17 nt, Homo sapiens
gguaugguucuugccuc

SEQ ID NO: 2098 - RNA, 17 nt, Homo sapiens
guaugguucuugccuca

SEQ ID NO: 2099 - RNA, 17 nt, Homo sapiens
augguucuugccucaga

SEQ ID NO: 2100 - RNA, 17 nt, Homo sapiens
ucuugccucagaagagc

SEQ ID NO: 2101 - RNA, 17 nt, Homo sapiens
ugaaaacuuuggaagac

SEQ ID NO: 2102 - RNA, 17 nt, Homo sapiens
gaaaacuuuggaagaca

SEQ ID NO: 2103 - RNA, 17 nt, Homo sapiens
aaccaaauuaucuccau

SEQ ID NO: 2104 - RNA, 17 nt, Homo sapiens
accaaauuaucuccauc

SEQ ID NO: 2105 - RNA, 17 nt, Homo sapiens
caaauuaucuccaucuu

SEQ ID NO: 2106 - RNA, 17 nt, Homo sapiens
aauuaucuccaucuuuu

SEQ ID NO: 2107 - RNA, 17 nt, Homo sapiens
aucuccaucuuuuggug

SEQ ID NO: 2108 - RNA, 17 nt, Homo sapiens
cuccaucuuuuggugga

SEQ ID NO: 2109 - RNA, 17 nt, Homo sapiens
uccaucuuuugguggaa

SEQ ID NO: 2110 - RNA, 17 nt, Homo sapiens
ccaucuuuugguggaau

SEQ ID NO: 2111 - RNA, 17 nt, Homo sapiens
cagggagucuguggcau

SEQ ID NO: 2112 - RNA, 17 nt, Homo sapiens
uguggcaucugaaggcu

SEQ ID NO: 2113 - RNA, 17 nt, Homo sapiens
ugaaggcucaaaccaga

SEQ ID NO: 2114 - RNA, 17 nt, Homo sapiens
aagcggcuaccaguccg

SEQ ID NO: 2115 - RNA, 17 nt, Homo sapiens
cuaccaguccggauauc

SEQ ID NO: 2116 - RNA, 17 nt, Homo sapiens
guccggauaucacuccg

SEQ ID NO: 2117 - RNA, 17 nt, Homo sapiens
ccggauaucacuccgau

SEQ ID NO: 2118 - RNA, 17 nt, Homo sapiens
auaucacuccgaugaca

SEQ ID NO: 2119 - RNA, 17 nt, Homo sapiens
caccguguacuccagug

SEQ ID NO: 2120 - RNA, 17 nt, Homo sapiens
cguguacuccagugagg

SEQ ID NO: 2121 - RNA, 17 nt, Homo sapiens
gcagaacuuuuaaagcu

SEQ ID NO: 2122 - RNA, 17 nt, Homo sapiens
cagaacuuuuaaagcug

SEQ ID NO: 2123 - RNA, 17 nt, Homo sapiens
agaacuuuuaaagcuga

SEQ ID NO: 2124 - RNA, 17 nt, Homo sapiens
gaacuuuuaaagcugau

SEQ ID NO: 2125 - RNA, 17 nt, Homo sapiens
aagcugauagagauugg

SEQ ID NO: 2126 - RNA, 17 nt, Homo sapiens
auagagauuggagugca

SEQ ID NO: 2127 - RNA, 17 nt, Homo sapiens
aaaccgguagcacagcc

SEQ ID NO: 2128 - RNA, 17 nt, Homo sapiens
gcccagauucuccagcc

SEQ ID NO: 2129 - RNA, 17 nt, Homo sapiens
cccagauucuccagccu

SEQ ID NO: 2130 - RNA, 17 nt, Homo sapiens
cagauucuccagccuga

SEQ ID NO: 2131 - RNA, 17 nt, Homo sapiens
acugagcucuccuccug

SEQ ID NO: 2132 - RNA, 17 nt, Homo sapiens
ugagcucuccuccuguu

SEQ ID NO: 2133 - RNA, 17 nt, Homo sapiens
gcucuccuccuguuuaa

SEQ ID NO: 2134 - RNA, 17 nt, Homo sapiens
ccuccuguuuaaaagga

SEQ ID NO: 2135 - RNA, 17 nt, Homo sapiens
cuccuguuuaaaaggaa

SEQ ID NO: 2136 - RNA, 17 nt, Homo sapiens
uccuguuuaaaaggaag

SEQ ID NO: 2137 - RNA, 17 nt, Homo sapiens
ggaagcauccacacccc

SEQ ID NO: 2138 - RNA, 17 nt, Homo sapiens
ccccaacucccggacau

SEQ ID NO: 2139 - RNA, 17 nt, Homo sapiens
ccggacaucacaugaga

SEQ ID NO: 2140 - RNA, 17 nt, Homo sapiens
ugagaggucugcucaga

SEQ ID NO: 2141 - RNA, 17 nt, Homo sapiens
ggucugcucagauuuug

SEQ ID NO: 2142 - RNA, 17 nt, Homo sapiens
gcucagauuuugaagug

SEQ ID NO: 2143 - RNA, 17 nt, Homo sapiens
cucagauuuugaagugu

SEQ ID NO: 2144 - RNA, 17 nt, Homo sapiens
ucagauuuugaaguguu

SEQ ID NO: 2145 - RNA, 17 nt, Homo sapiens
ugaaguguuguucuuuc

SEQ ID NO: 2146 - RNA, 17 nt, Homo sapiens
aguguuguucuuuccac

SEQ ID NO: 2147 - RNA, 17 nt, Homo sapiens
guguuguucuuuccacc

SEQ ID NO: 2148 - RNA, 17 nt, Homo sapiens
guuguucuuuccaccag

SEQ ID NO: 2149 - RNA, 17 nt, Homo sapiens
uuguucuuuccaccagc

SEQ ID NO: 2150 - RNA, 17 nt, Homo sapiens
uguucuuuccaccagca

SEQ ID NO: 2151 - RNA, 17 nt, Homo sapiens
caggaaguagccgcauu

SEQ ID NO: 2152 - RNA, 17 nt, Homo sapiens
agccgcauuugauuuuc

SEQ ID NO: 2153 - RNA, 17 nt, Homo sapiens
gccgcauuugauuuuca

SEQ ID NO: 2154 - RNA, 17 nt, Homo sapiens
cauuugauuuucauuuc

SEQ ID NO: 2155 - RNA, 17 nt, Homo sapiens
auuugauuuucauuucg

SEQ ID NO: 2156 - RNA, 17 nt, Homo sapiens
uuugauuuucauuucga

SEQ ID NO: 2157 - RNA, 17 nt, Homo sapiens
uugauuuucauuucgac

SEQ ID NO: 2158 - RNA, 17 nt, Homo sapiens
auuuucauuucgacaac

SEQ ID NO: 2159 - RNA, 17 nt, Homo sapiens
uuuucauuucgacaaca

SEQ ID NO: 2160 - RNA, 17 nt, Homo sapiens
uuucauuucgacaacag

SEQ ID NO: 2161 - RNA, 17 nt, Homo sapiens
aaggaccucggacugca

SEQ ID NO: 2162 - RNA, 17 nt, Homo sapiens
agccagcucuucuaggc

SEQ ID NO: 2163 - RNA, 17 nt, Homo sapiens
ccagcucuucuaggcuu

SEQ ID NO: 2164 - RNA, 17 nt, Homo sapiens
cagcucuucuaggcuug

SEQ ID NO: 2165 - RNA, 17 nt, Homo sapiens
gcucuucuaggcuugug

SEQ ID NO: 2166 - RNA, 18 nt, Homo sapiens
aggugcugcuggccgucg

SEQ ID NO: 2167 - RNA, 18 nt, Homo sapiens
gcuggccgucgcccugug

SEQ ID NO: 2168 - RNA, 18 nt, Homo sapiens
ccgggccgccucuguggg

SEQ ID NO: 2169 - RNA, 18 nt, Homo sapiens
uugaucugcccaggcuca

SEQ ID NO: 2170 - RNA, 18 nt, Homo sapiens
ggaaacugacuuggccuc

SEQ ID NO: 2171 - RNA, 18 nt, Homo sapiens
gauuacagaucuccauuu

SEQ ID NO: 2172 - RNA, 18 nt, Homo sapiens
uguuccugaugguaacag

SEQ ID NO: 2173 - RNA, 18 nt, Homo sapiens
guuaccagucuauuaugu

SEQ ID NO: 2174 - RNA, 18 nt, Homo sapiens
ugaguccgucucauggaa

SEQ ID NO: 2175 - RNA, 18 nt, Homo sapiens
acuaucuguuggagaaaa

SEQ ID NO: 2176 - RNA, 18 nt, Homo sapiens
aaacccagucugggagug

SEQ ID NO: 2177 - RNA, 18 nt, Homo sapiens
gugggcugaugaccaaga

SEQ ID NO: 2178 - RNA, 18 nt, Homo sapiens
auguacugacgauuaugg

SEQ ID NO: 2179 - RNA, 18 nt, Homo sapiens
caccccagauuggugaga

SEQ ID NO: 2180 - RNA, 18 nt, Homo sapiens
auguacggucuaugccau

SEQ ID NO: 2181 - RNA, 18 nt, Homo sapiens
auuggcaguuggaggaag

SEQ ID NO: 2182 - RNA, 18 nt, Homo sapiens
ccaagcugucucagugac

SEQ ID NO: 2183 - RNA, 18 nt, Homo sapiens
ugugucagcuuuguacaa

SEQ ID NO: 2184 - RNA, 18 nt, Homo sapiens
acaugcagcccacugagc

SEQ ID NO: 2185 - RNA, 18 nt, Homo sapiens
gcagacagaucuacguuu

SEQ ID NO: 2186 - RNA, 18 nt, Homo sapiens
gcccacagccucugccaa

SEQ ID NO: 2187 - RNA, 18 nt, Homo sapiens
cacaccuguuugcaagaa

SEQ ID NO: 2188 - RNA, 18 nt, Homo sapiens
uaugucugccuugcucaa

SEQ ID NO: 2189 - RNA, 18 nt, Homo sapiens
ucaggcagcucacagucc

SEQ ID NO: 2190 - RNA, 18 nt, Homo sapiens
gcucacaguccuagagcg

SEQ ID NO: 2191 - RNA, 18 nt, Homo sapiens
agaaucagacgacaagua

SEQ ID NO: 2192 - RNA, 18 nt, Homo sapiens
cuccacagaucauguggu

SEQ ID NO: 2193 - RNA, 18 nt, Homo sapiens
ggauccagaugaacuccc

SEQ ID NO: 2194 - RNA, 18 nt, Homo sapiens
aacgacugccuuaugaug

SEQ ID NO: 2195 - RNA, 18 nt, Homo sapiens
gagaccggcugaaccuag

SEQ ID NO: 2196 - RNA, 18 nt, Homo sapiens
ugaagcagaugccuuugg

SEQ ID NO: 2197 - RNA, 18 nt, Homo sapiens
gaaaccuguccacuuacc

SEQ ID NO: 2198 - RNA, 18 nt, Homo sapiens
ucagccagcucuggauuu

SEQ ID NO: 2199 - RNA, 18 nt, Homo sapiens
acuuccugaccuuggagc

SEQ ID NO: 2200 - RNA, 18 nt, Homo sapiens
uguuacagcuuccaagug

SEQ ID NO: 2201 - RNA, 18 nt, Homo sapiens
agauccagauuaugucag

SEQ ID NO: 2202 - RNA, 18 nt, Homo sapiens
ggccccugauuauacuac

SEQ ID NO: 2203 - RNA, 18 nt, Homo sapiens
uguaccagaccaugcugg

SEQ ID NO: 2204 - RNA, 18 nt, Homo sapiens
cuggacugcuggcacggg

SEQ ID NO: 2205 - RNA, 18 nt, Homo sapiens
ucucucugccuaccucac

SEQ ID NO: 2206 - RNA, 18 nt, Homo sapiens
cucaccuguuuccuguau

SEQ ID NO: 2207 - RNA, 18 nt, Homo sapiens
agagccggccugugagug

SEQ ID NO: 2208 - RNA, 18 nt, Homo sapiens
aaucccagaugacaacca

SEQ ID NO: 2209 - RNA, 18 nt, Homo sapiens
acaaccagacggacagug

SEQ ID NO: 2210 - RNA, 18 nt, Homo sapiens
gcuaccaguccggauauc

SEQ ID NO: 2211 - RNA, 18 nt, Homo sapiens
ucacuccgaugacacaga

SEQ ID NO: 2212 - RNA, 18 nt, Homo sapiens
uagcacagcccagauucu

SEQ ID NO: 2213 - RNA, 18 nt, Homo sapiens
cagcccagauucuccagc

SEQ ID NO: 2214 - RNA, 18 nt, Homo sapiens
uucuccagccugacacgg

SEQ ID NO: 2215 - RNA, 18 nt, Homo sapiens
uccuccuguuuaaaagga

SEQ ID NO: 2216 - RNA, 18 nt, Homo sapiens
gaggucugcucagauuuu

SEQ ID NO: 2217 - RNA, 18 nt, Homo sapiens
cugcucagauuuugaagu

SEQ ID NO: 2218 - RNA, 18 nt, Homo sapiens
gaccucggacugcaggga

SEQ ID NO: 2219 - RNA, 18 nt, Homo sapiens
ggagccagcucuucuagg

SEQ ID NO: 2220 - RNA, 17 nt, Mus musculus
gggcgaauuggguacgg

SEQ ID NO: 2221 - RNA, 17 nt, Mus musculus
aauuggguacgggaccc

SEQ ID NO: 2222 - RNA, 17 nt, Mus musculus
accccccucgaggucga

SEQ ID NO: 2223 - RNA, 17 nt, Mus musculus
cucgaggucgacgguau

SEQ ID NO: 2224 - RNA, 17 nt, Mus musculus
ucgacgguaucgauaag

SEQ ID NO: 2225 - RNA, 17 nt, Mus musculus
gacgguaucgauaagcu

SEQ ID NO: 2226 - RNA, 17 nt, Mus musculus
guaucgauaagcuugau

SEQ ID NO: 2227 - RNA, 17 nt, Mus musculus
gauaagcuugauaucga

SEQ ID NO: 2228 - RNA, 17 nt, Mus musculus
agcuugauaucgaauuc

SEQ ID NO: 2229 - RNA, 17 nt, Mus musculus
cuugauaucgaauucgg

SEQ ID NO: 2230 - RNA, 17 nt, Mus musculus
uaucgaauucgggccca

SEQ ID NO: 2231 - RNA, 17 nt, Mus musculus
aucgaauucgggcccag

SEQ ID NO: 2232 - RNA, 17 nt, Mus musculus
gacugugucccgcagcc

SEQ ID NO: 2233 - RNA, 17 nt, Mus musculus
gccgggauaaccuggcu

SEQ ID NO: 2234 - RNA, 17 nt, Mus musculus
gacccgauuccgcggac

SEQ ID NO: 2235 - RNA, 17 nt, Mus musculus
acccgauuccgcggaca

SEQ ID NO: 2236 - RNA, 17 nt, Mus musculus
cccgcgcucuccccggu

SEQ ID NO: 2237 - RNA, 17 nt, Mus musculus
cgcgcucuccccggucu

SEQ ID NO: 2238 - RNA, 17 nt, Mus musculus
uccccggucuugcgcug

SEQ ID NO: 2239 - RNA, 17 nt, Mus musculus
cccggucuugcgcugcg

SEQ ID NO: 2240 - RNA, 17 nt, Mus musculus
ggggccauaccgccucu

SEQ ID NO: 2241 - RNA, 17 nt, Mus musculus
uaccgccucugugacuu

SEQ ID NO: 2242 - RNA, 17 nt, Mus musculus
cugugacuucuuugcgg

SEQ ID NO: 2243 - RNA, 17 nt, Mus musculus
ugugacuucuuugcggg

SEQ ID NO: 2244 - RNA, 17 nt, Mus musculus
ugacuucuuugcgggcc

SEQ ID NO: 2245 - RNA, 17 nt, Mus musculus
gacuucuuugcgggcca

SEQ ID NO: 2246 - RNA, 17 nt, Mus musculus
gaaggagucugugccug

SEQ ID NO: 2247 - RNA, 17 nt, Mus musculus
acugggcucugugccca

SEQ ID NO: 2248 - RNA, 17 nt, Mus musculus
gcgcugcuagcugucgc

SEQ ID NO: 2249 - RNA, 17 nt, Mus musculus
cuagcugucgcucugug

SEQ ID NO: 2250 - RNA, 17 nt, Mus musculus
cugucgcucugugguuc

SEQ ID NO: 2251 - RNA, 17 nt, Mus musculus
ucugugguucugcgugg

SEQ ID NO: 2252 - RNA, 17 nt, Mus musculus
cugugguucugcgugga

SEQ ID NO: 2253 - RNA, 17 nt, Mus musculus
agccgccucuguggguu

SEQ ID NO: 2254 - RNA, 17 nt, Mus musculus
cuguggguuugacuggc

SEQ ID NO: 2255 - RNA, 17 nt, Mus musculus
uguggguuugacuggcg

SEQ ID NO: 2256 - RNA, 17 nt, Mus musculus
cuggcgauuuucuccau

SEQ ID NO: 2257 - RNA, 17 nt, Mus musculus
uggcgauuuucuccauc

SEQ ID NO: 2258 - RNA, 17 nt, Mus musculus
ggcgauuuucuccaucc

SEQ ID NO: 2259 - RNA, 17 nt, Mus musculus
gcgauuuucuccauccc

SEQ ID NO: 2260 - RNA, 17 nt, Mus musculus
gauuuucuccauccccc

SEQ ID NO: 2261 - RNA, 17 nt, Mus musculus
uucuccauccccccaag

SEQ ID NO: 2262 - RNA, 17 nt, Mus musculus
cccaagcucagcacaca

SEQ ID NO: 2263 - RNA, 17 nt, Mus musculus
aaagacauacugacaau

SEQ ID NO: 2264 - RNA, 17 nt, Mus musculus
cugacaauuuuggcaaa

SEQ ID NO: 2265 - RNA, 17 nt, Mus musculus
ugacaauuuuggcaaau

SEQ ID NO: 2266 - RNA, 17 nt, Mus musculus
gacaauuuuggcaaaua

SEQ ID NO: 2267 - RNA, 17 nt, Mus musculus
uggcaaauacaacccuu

SEQ ID NO: 2268 - RNA, 17 nt, Mus musculus
acaacccuucagauuac

SEQ ID NO: 2269 - RNA, 17 nt, Mus musculus
caacccuucagauuacu

SEQ ID NO: 2270 - RNA, 17 nt, Mus musculus
cuucagauuacuugcag

SEQ ID NO: 2271 - RNA, 17 nt, Mus musculus
uucagauuacuugcagg

SEQ ID NO: 2272 - RNA, 17 nt, Mus musculus
agauuacuugcagggga

SEQ ID NO: 2273 - RNA, 17 nt, Mus musculus
ccaaugcucagcgugau

SEQ ID NO: 2274 - RNA, 17 nt, Mus musculus
agcgugauucugaggaa

SEQ ID NO: 2275 - RNA, 17 nt, Mus musculus
gcgugauucugaggaaa

SEQ ID NO: 2276 - RNA, 17 nt, Mus musculus
gaaaggguauuggugac

SEQ ID NO: 2277 - RNA, 17 nt, Mus musculus
aaggguauuggugacug

SEQ ID NO: 2278 - RNA, 17 nt, Mus musculus
gugacaguaucuucugc

SEQ ID NO: 2279 - RNA, 17 nt, Mus musculus
gacaguaucuucugcaa

SEQ ID NO: 2280 - RNA, 17 nt, Mus musculus
caguaucuucugcaaaa

SEQ ID NO: 2281 - RNA, 17 nt, Mus musculus
aguaucuucugcaaaac

SEQ ID NO: 2282 - RNA, 17 nt, Mus musculus
aaaacacucaccauucc

SEQ ID NO: 2283 - RNA, 17 nt, Mus musculus
cucaccauucccagggu

SEQ ID NO: 2284 - RNA, 17 nt, Mus musculus
ucaccauucccagggug

SEQ ID NO: 2285 - RNA, 17 nt, Mus musculus
agggugguuggaaauga

SEQ ID NO: 2286 - RNA, 17 nt, Mus musculus
gaaaugauacuggagcc

SEQ ID NO: 2287 - RNA, 17 nt, Mus musculus
caagugcucguaccggg

SEQ ID NO: 2288 - RNA, 17 nt, Mus musculus
gugcucguaccgggacg

SEQ ID NO: 2289 - RNA, 17 nt, Mus musculus
cgggacgucgacauagc

SEQ ID NO: 2290 - RNA, 17 nt, Mus musculus
gucgacauagccuccac

SEQ ID NO: 2291 - RNA, 17 nt, Mus musculus
cauagccuccacuguuu

SEQ ID NO: 2292 - RNA, 17 nt, Mus musculus
uccacuguuuaugucua

SEQ ID NO: 2293 - RNA, 17 nt, Mus musculus
ccacuguuuaugucuau

SEQ ID NO: 2294 - RNA, 17 nt, Mus musculus
cacuguuuaugucuaug

SEQ ID NO: 2295 - RNA, 17 nt, Mus musculus
guuuaugucuauguucg

SEQ ID NO: 2296 - RNA, 17 nt, Mus musculus
uuaugucuauguucgag

SEQ ID NO: 2297 - RNA, 17 nt, Mus musculus
gucuauguucgagauua

SEQ ID NO: 2298 - RNA, 17 nt, Mus musculus
ucuauguucgagauuac

SEQ ID NO: 2299 - RNA, 17 nt, Mus musculus
uucgagauuacagauca

SEQ ID NO: 2300 - RNA, 17 nt, Mus musculus
ucgagauuacagaucac

SEQ ID NO: 2301 - RNA, 17 nt, Mus musculus
uuacagaucaccauuca

SEQ ID NO: 2302 - RNA, 17 nt, Mus musculus
aucaccauucaucgccu

SEQ ID NO: 2303 - RNA, 17 nt, Mus musculus
ucaccauucaucgccuc

SEQ ID NO: 2304 - RNA, 17 nt, Mus musculus
ccauucaucgccucugu

SEQ ID NO: 2305 - RNA, 17 nt, Mus musculus
caucgccucugucagug

SEQ ID NO: 2306 - RNA, 17 nt, Mus musculus
gccucugucagugacca

SEQ ID NO: 2307 - RNA, 17 nt, Mus musculus
cauggcaucguguacau

SEQ ID NO: 2308 - RNA, 17 nt, Mus musculus
caucguguacaucaccg

SEQ ID NO: 2309 - RNA, 17 nt, Mus musculus
guguacaucaccgagaa

SEQ ID NO: 2310 - RNA, 17 nt, Mus musculus
guggugauccccugccg

SEQ ID NO: 2311 - RNA, 17 nt, Mus musculus
ccgagggucgauuucaa

SEQ ID NO: 2312 - RNA, 17 nt, Mus musculus
gggucgauuucaaaccu

SEQ ID NO: 2313 - RNA, 17 nt, Mus musculus
ggucgauuucaaaccuc

SEQ ID NO: 2314 - RNA, 17 nt, Mus musculus
gucgauuucaaaccuca

SEQ ID NO: 2315 - RNA, 17 nt, Mus musculus
ucaaaccucaauguguc

SEQ ID NO: 2316 - RNA, 17 nt, Mus musculus
caaugugucucuuugcg

SEQ ID NO: 2317 - RNA, 17 nt, Mus musculus
augugucucuuugcgcu

SEQ ID NO: 2318 - RNA, 17 nt, Mus musculus
gugucucuuugcgcuag

SEQ ID NO: 2319 - RNA, 17 nt, Mus musculus
ugucucuuugcgcuagg

SEQ ID NO: 2320 - RNA, 17 nt, Mus musculus
uuugcgcuagguaucca

SEQ ID NO: 2321 - RNA, 17 nt, Mus musculus
cgcuagguauccagaaa

SEQ ID NO: 2322 - RNA, 17 nt, Mus musculus
cuagguauccagaaaag

SEQ ID NO: 2323 - RNA, 17 nt, Mus musculus
aaagagauuuguuccgg

SEQ ID NO: 2324 - RNA, 17 nt, Mus musculus
aagagauuuguuccgga

SEQ ID NO: 2325 - RNA, 17 nt, Mus musculus
agauuuguuccggaugg

SEQ ID NO: 2326 - RNA, 17 nt, Mus musculus
gauuuguuccggaugga

SEQ ID NO: 2327 - RNA, 17 nt, Mus musculus
agcgagauaggcuuuac

SEQ ID NO: 2328 - RNA, 17 nt, Mus musculus
gauaggcuuuacucucc

SEQ ID NO: 2329 - RNA, 17 nt, Mus musculus
auaggcuuuacucuccc

SEQ ID NO: 2330 - RNA, 17 nt, Mus musculus
uaggcuuuacucucccc

SEQ ID NO: 2331 - RNA, 17 nt, Mus musculus
gcuuuacucuccccagu

SEQ ID NO: 2332 - RNA, 17 nt, Mus musculus
uuuacucuccccaguua

SEQ ID NO: 2333 - RNA, 17 nt, Mus musculus
uccccaguuacaugauc

SEQ ID NO: 2334 - RNA, 17 nt, Mus musculus
ccccaguuacaugauca

SEQ ID NO: 2335 - RNA, 17 nt, Mus musculus
gaucagcuaugccggca

SEQ ID NO: 2336 - RNA, 17 nt, Mus musculus
cauggucuucugugagg

SEQ ID NO: 2337 - RNA, 17 nt, Mus musculus
auggucuucugugaggc

SEQ ID NO: 2338 - RNA, 17 nt, Mus musculus
gcaaagaucaaugauga

SEQ ID NO: 2339 - RNA, 17 nt, Mus musculus
ugaaaccuaucagucua

SEQ ID NO: 2340 - RNA, 17 nt, Mus musculus
aaaccuaucagucuauc

SEQ ID NO: 2341 - RNA, 17 nt, Mus musculus
cuaucagucuaucaugu

SEQ ID NO: 2342 - RNA, 17 nt, Mus musculus
aucagucuaucauguac

SEQ ID NO: 2343 - RNA, 17 nt, Mus musculus
cagucuaucauguacau

SEQ ID NO: 2344 - RNA, 17 nt, Mus musculus
uaucauguacauaguug

SEQ ID NO: 2345 - RNA, 17 nt, Mus musculus
auguacauaguuguggu

SEQ ID NO: 2346 - RNA, 17 nt, Mus musculus
uacauaguugugguugu

SEQ ID NO: 2347 - RNA, 17 nt, Mus musculus
guugugguuguaggaua

SEQ ID NO: 2348 - RNA, 17 nt, Mus musculus
gugguuguaggauauag

SEQ ID NO: 2349 - RNA, 17 nt, Mus musculus
uguaggauauaggauuu

SEQ ID NO: 2350 - RNA, 17 nt, Mus musculus
uaggauauaggauuuau

SEQ ID NO: 2351 - RNA, 17 nt, Mus musculus
uaggauuuaugauguga

SEQ ID NO: 2352 - RNA, 17 nt, Mus musculus
gaugugauucugagccc

SEQ ID NO: 2353 - RNA, 17 nt, Mus musculus
augugauucugagcccc

SEQ ID NO: 2354 - RNA, 17 nt, Mus musculus
caugaaauugagcuauc

SEQ ID NO: 2355 - RNA, 17 nt, Mus musculus
auugagcuaucugccgg

SEQ ID NO: 2356 - RNA, 17 nt, Mus musculus
ugagcuaucugccggag

SEQ ID NO: 2357 - RNA, 17 nt, Mus musculus
gaaaaacuugucuuaaa

SEQ ID NO: 2358 - RNA, 17 nt, Mus musculus
aaacuugucuuaaauug

SEQ ID NO: 2359 - RNA, 17 nt, Mus musculus
acuugucuuaaauugua

SEQ ID NO: 2360 - RNA, 17 nt, Mus musculus
ucuuaaauuguacagcg

SEQ ID NO: 2361 - RNA, 17 nt, Mus musculus
uaaauuguacagcgaga

SEQ ID NO: 2362 - RNA, 17 nt, Mus musculus
acagagcucaauguggg

SEQ ID NO: 2363 - RNA, 17 nt, Mus musculus
guggggcuugauuucac

SEQ ID NO: 2364 - RNA, 17 nt, Mus musculus
ggcuugauuucaccugg

SEQ ID NO: 2365 - RNA, 17 nt, Mus musculus
gcuugauuucaccuggc

SEQ ID NO: 2366 - RNA, 17 nt, Mus musculus
cuugauuucaccuggca

SEQ ID NO: 2367 - RNA, 17 nt, Mus musculus
cuggcacucuccaccuu

SEQ ID NO: 2368 - RNA, 17 nt, Mus musculus
ggcacucuccaccuuca

SEQ ID NO: 2369 - RNA, 17 nt, Mus musculus
cuccaccuucaaagucu

SEQ ID NO: 2370 - RNA, 17 nt, Mus musculus
uccaccuucaaagucuc

SEQ ID NO: 2371 - RNA, 17 nt, Mus musculus
uucaaagucucaucaua

SEQ ID NO: 2372 - RNA, 17 nt, Mus musculus
caaagucucaucauaag

SEQ ID NO: 2373 - RNA, 17 nt, Mus musculus
agucucaucauaagaag

SEQ ID NO: 2374 - RNA, 17 nt, Mus musculus
cucaucauaagaagauu

SEQ ID NO: 2375 - RNA, 17 nt, Mus musculus
aagaagauuguaaaccg

SEQ ID NO: 2376 - RNA, 17 nt, Mus musculus
aagauuguaaaccggga

SEQ ID NO: 2377 - RNA, 17 nt, Mus musculus
gaaacccuuuccuggga

SEQ ID NO: 2378 - RNA, 17 nt, Mus musculus
aaacccuuuccugggac

SEQ ID NO: 2379 - RNA, 17 nt, Mus musculus
aacccuuuccugggacu

SEQ ID NO: 2380 - RNA, 17 nt, Mus musculus
gaagauguuuuugagca

SEQ ID NO: 2381 - RNA, 17 nt, Mus musculus
aagauguuuuugagcac

SEQ ID NO: 2382 - RNA, 17 nt, Mus musculus
agauguuuuugagcacc

SEQ ID NO: 2383 - RNA, 17 nt, Mus musculus
gauguuuuugagcaccu

SEQ ID NO: 2384 - RNA, 17 nt, Mus musculus
gagcaccuugacaauag

SEQ ID NO: 2385 - RNA, 17 nt, Mus musculus
uugacaauagaaagugu

SEQ ID NO: 2386 - RNA, 17 nt, Mus musculus
aggggaauacaccugug

SEQ ID NO: 2387 - RNA, 17 nt, Mus musculus
accuguguagcguccag

SEQ ID NO: 2388 - RNA, 17 nt, Mus musculus
uguagcguccaguggac

SEQ ID NO: 2389 - RNA, 17 nt, Mus musculus
cggaugaucaagagaaa

SEQ ID NO: 2390 - RNA, 17 nt, Mus musculus
agagaaauagaacauuu

SEQ ID NO: 2391 - RNA, 17 nt, Mus musculus
uagaacauuuguccgag

SEQ ID NO: 2392 - RNA, 17 nt, Mus musculus
agaacauuuguccgagu

SEQ ID NO: 2393 - RNA, 17 nt, Mus musculus
acauuuguccgaguuca

SEQ ID NO: 2394 - RNA, 17 nt, Mus musculus
guccgaguucacacaaa

SEQ ID NO: 2395 - RNA, 17 nt, Mus musculus
uccgaguucacacaaag

SEQ ID NO: 2396 - RNA, 17 nt, Mus musculus
caaagccuuuuauugcu

SEQ ID NO: 2397 - RNA, 17 nt, Mus musculus
aaagccuuuuauugcuu

SEQ ID NO: 2398 - RNA, 17 nt, Mus musculus
aagccuuuuauugcuuu

SEQ ID NO: 2399 - RNA, 17 nt, Mus musculus
agccuuuuauugcuuuc

SEQ ID NO: 2400 - RNA, 17 nt, Mus musculus
ccuuuuauugcuuucgg

SEQ ID NO: 2401 - RNA, 17 nt, Mus musculus
uuauugcuuucgguagu

SEQ ID NO: 2402 - RNA, 17 nt, Mus musculus
uauugcuuucgguagug

SEQ ID NO: 2403 - RNA, 17 nt, Mus musculus
auugcuuucgguagugg

SEQ ID NO: 2404 - RNA, 17 nt, Mus musculus
cuuucgguagugggaug

SEQ ID NO: 2405 - RNA, 17 nt, Mus musculus
gaugaaaucuuuggugg

SEQ ID NO: 2406 - RNA, 17 nt, Mus musculus
ugaaaucuuugguggaa

SEQ ID NO: 2407 - RNA, 17 nt, Mus musculus
gaaaucuuugguggaag

SEQ ID NO: 2408 - RNA, 17 nt, Mus musculus
ugggcagucaaguccga

SEQ ID NO: 2409 - RNA, 17 nt, Mus musculus
agucaaguccgaauccc

SEQ ID NO: 2410 - RNA, 17 nt, Mus musculus
guccgaaucccugugaa

SEQ ID NO: 2411 - RNA, 17 nt, Mus musculus
ugugaaguaucucaguu

SEQ ID NO: 2412 - RNA, 17 nt, Mus musculus
ugaaguaucucaguuac

SEQ ID NO: 2413 - RNA, 17 nt, Mus musculus
aaguaucucaguuaccc

SEQ ID NO: 2414 - RNA, 17 nt, Mus musculus
aucucaguuacccagcu

SEQ ID NO: 2415 - RNA, 17 nt, Mus musculus
ucucaguuacccagcuc

SEQ ID NO: 2416 - RNA, 17 nt, Mus musculus
acccagcuccugauauc

SEQ ID NO: 2417 - RNA, 17 nt, Mus musculus
cuccugauaucaaaugg

SEQ ID NO: 2418 - RNA, 17 nt, Mus musculus
ccugauaucaaauggua

SEQ ID NO: 2419 - RNA, 17 nt, Mus musculus
caaaugguacagaaaug

SEQ ID NO: 2420 - RNA, 17 nt, Mus musculus
aggcccauugaguccaa

SEQ ID NO: 2421 - RNA, 17 nt, Mus musculus
cauugaguccaacuaca

SEQ ID NO: 2422 - RNA, 17 nt, Mus musculus
guccaacuacacaauga

SEQ ID NO: 2423 - RNA, 17 nt, Mus musculus
acaaugauuguuggcga

SEQ ID NO: 2424 - RNA, 17 nt, Mus musculus
augauuguuggcgauga

SEQ ID NO: 2425 - RNA, 17 nt, Mus musculus
gaugaacucaccaucau

SEQ ID NO: 2426 - RNA, 17 nt, Mus musculus
cucaccaucauggaagu

SEQ ID NO: 2427 - RNA, 17 nt, Mus musculus
aggaaacuacacgguca

SEQ ID NO: 2428 - RNA, 17 nt, Mus musculus
uacacggucauccucac

SEQ ID NO: 2429 - RNA, 17 nt, Mus musculus
acggucauccucaccaa

SEQ ID NO: 2430 - RNA, 17 nt, Mus musculus
gucauccucaccaaccc

SEQ ID NO: 2431 - RNA, 17 nt, Mus musculus
aaccccauuucaaugga

SEQ ID NO: 2432 - RNA, 17 nt, Mus musculus
accccauuucaauggag

SEQ ID NO: 2433 - RNA, 17 nt, Mus musculus
ccccauuucaauggaga

SEQ ID NO: 2434 - RNA, 17 nt, Mus musculus
cacauggucucucuggu

SEQ ID NO: 2435 - RNA, 17 nt, Mus musculus
cauggucucucugguug

SEQ ID NO: 2436 - RNA, 17 nt, Mus musculus
ucucugguugugaaugu

SEQ ID NO: 2437 - RNA, 17 nt, Mus musculus
gugaaugucccacccca

SEQ ID NO: 2438 - RNA, 17 nt, Mus musculus
ccccagaucggugagaa

SEQ ID NO: 2439 - RNA, 17 nt, Mus musculus
gaaagccuugaucucgc

SEQ ID NO: 2440 - RNA, 17 nt, Mus musculus
gccuugaucucgccuau

SEQ ID NO: 2441 - RNA, 17 nt, Mus musculus
cuugaucucgccuaugg

SEQ ID NO: 2442 - RNA, 17 nt, Mus musculus
ucucgccuauggauucc

SEQ ID NO: 2443 - RNA, 17 nt, Mus musculus
cuauggauuccuaccag

SEQ ID NO: 2444 - RNA, 17 nt, Mus musculus
uauggauuccuaccagu

SEQ ID NO: 2445 - RNA, 17 nt, Mus musculus
ggauuccuaccaguaug

SEQ ID NO: 2446 - RNA, 17 nt, Mus musculus
cuaccaguaugggacca

SEQ ID NO: 2447 - RNA, 17 nt, Mus musculus
gcagacauugacaugca

SEQ ID NO: 2448 - RNA, 17 nt, Mus musculus
ugcacagucuacgccaa

SEQ ID NO: 2449 - RNA, 17 nt, Mus musculus
cacagucuacgccaacc

SEQ ID NO: 2450 - RNA, 17 nt, Mus musculus
ccaacccuccccugcac

SEQ ID NO: 2451 - RNA, 17 nt, Mus musculus
caccacauccaguggua

SEQ ID NO: 2452 - RNA, 17 nt, Mus musculus
ccagugguacuggcagc

SEQ ID NO: 2453 - RNA, 17 nt, Mus musculus
uggcagcuagaagaagc

SEQ ID NO: 2454 - RNA, 17 nt, Mus musculus
agccugcuccuacagac

SEQ ID NO: 2455 - RNA, 17 nt, Mus musculus
cugcuccuacagacccg

SEQ ID NO: 2456 - RNA, 17 nt, Mus musculus
aagcccguaugcuugua

SEQ ID NO: 2457 - RNA, 17 nt, Mus musculus
cguaugcuuguaaagaa

SEQ ID NO: 2458 - RNA, 17 nt, Mus musculus
augcuuguaaagaaugg

SEQ ID NO: 2459 - RNA, 17 nt, Mus musculus
uggaggauuuccagggg

SEQ ID NO: 2460 - RNA, 17 nt, Mus musculus
ggaggauuuccaggggg

SEQ ID NO: 2461 - RNA, 17 nt, Mus musculus
gaggauuuccagggggg

SEQ ID NO: 2462 - RNA, 17 nt, Mus musculus
aacaagaucgaagucac

SEQ ID NO: 2463 - RNA, 17 nt, Mus musculus
aucgaagucaccaaaaa

SEQ ID NO: 2464 - RNA, 17 nt, Mus musculus
aaaccaauaugcccuga

SEQ ID NO: 2465 - RNA, 17 nt, Mus musculus
gcccugauugaaggaaa

SEQ ID NO: 2466 - RNA, 17 nt, Mus musculus
aaaacuguaaguacgcu

SEQ ID NO: 2467 - RNA, 17 nt, Mus musculus
cuguaaguacgcugguc

SEQ ID NO: 2468 - RNA, 17 nt, Mus musculus
acgcuggucauccaagc

SEQ ID NO: 2469 - RNA, 17 nt, Mus musculus
cuggucauccaagcugc

SEQ ID NO: 2470 - RNA, 17 nt, Mus musculus
caacgugucagcguugu

SEQ ID NO: 2471 - RNA, 17 nt, Mus musculus
gucagcguuguacaaau

SEQ ID NO: 2472 - RNA, 17 nt, Mus musculus
agcguuguacaaaugug

SEQ ID NO: 2473 - RNA, 17 nt, Mus musculus
gaagccaucaacaaagc

SEQ ID NO: 2474 - RNA, 17 nt, Mus musculus
gagagggucaucuccuu

SEQ ID NO: 2475 - RNA, 17 nt, Mus musculus
agggucaucuccuucca

SEQ ID NO: 2476 - RNA, 17 nt, Mus musculus
ggucaucuccuuccaug

SEQ ID NO: 2477 - RNA, 17 nt, Mus musculus
caucuccuuccauguga

SEQ ID NO: 2478 - RNA, 17 nt, Mus musculus
aucuccuuccaugugau

SEQ ID NO: 2479 - RNA, 17 nt, Mus musculus
caugugaucaggggucc

SEQ ID NO: 2480 - RNA, 17 nt, Mus musculus
ucagggguccugaaauu

SEQ ID NO: 2481 - RNA, 17 nt, Mus musculus
ccugaaauuacugugca

SEQ ID NO: 2482 - RNA, 17 nt, Mus musculus
cugaaauuacugugcaa

SEQ ID NO: 2483 - RNA, 17 nt, Mus musculus
gagugugucccuguugu

SEQ ID NO: 2484 - RNA, 17 nt, Mus musculus
gucccuguugugcacug

SEQ ID NO: 2485 - RNA, 17 nt, Mus musculus
acagaaauacguuugag

SEQ ID NO: 2486 - RNA, 17 nt, Mus musculus
aaauacguuugagaacc

SEQ ID NO: 2487 - RNA, 17 nt, Mus musculus
aauacguuugagaaccu

SEQ ID NO: 2488 - RNA, 17 nt, Mus musculus
gagaaccucacguggua

SEQ ID NO: 2489 - RNA, 17 nt, Mus musculus
cacgugguacaagcuug

SEQ ID NO: 2490 - RNA, 17 nt, Mus musculus
uacaagcuuggcucaca

SEQ ID NO: 2491 - RNA, 17 nt, Mus musculus
gcuuggcucacaggcaa

SEQ ID NO: 2492 - RNA, 17 nt, Mus musculus
ggcaacaucgguccaca

SEQ ID NO: 2493 - RNA, 17 nt, Mus musculus
acaucgguccacauggg

SEQ ID NO: 2494 - RNA, 17 nt, Mus musculus
gggcgaaucacucacac

SEQ ID NO: 2495 - RNA, 17 nt, Mus musculus
gaaucacucacaccagu

SEQ ID NO: 2496 - RNA, 17 nt, Mus musculus
acaccaguuugcaagaa

SEQ ID NO: 2497 - RNA, 17 nt, Mus musculus
caccaguuugcaagaac

SEQ ID NO: 2498 - RNA, 17 nt, Mus musculus
caagaacuuggaugcuc

SEQ ID NO: 2499 - RNA, 17 nt, Mus musculus
uggaugcucuuuggaaa

SEQ ID NO: 2500 - RNA, 17 nt, Mus musculus
gaugcucuuuggaaacu

SEQ ID NO: 2501 - RNA, 17 nt, Mus musculus
augcucuuuggaaacug

SEQ ID NO: 2502 - RNA, 17 nt, Mus musculus
caccauguuuucuaaca

SEQ ID NO: 2503 - RNA, 17 nt, Mus musculus
accauguuuucuaacag

SEQ ID NO: 2504 - RNA, 17 nt, Mus musculus
ccauguuuucuaacagc

SEQ ID NO: 2505 - RNA, 17 nt, Mus musculus
cauguuuucuaacagca

SEQ ID NO: 2506 - RNA, 17 nt, Mus musculus
uguuuucuaacagcaca

SEQ ID NO: 2507 - RNA, 17 nt, Mus musculus
aaugacaucuugauugu

SEQ ID NO: 2508 - RNA, 17 nt, Mus musculus
ugacaucuugauugugg

SEQ ID NO: 2509 - RNA, 17 nt, Mus musculus
aucuugauuguggcauu

SEQ ID NO: 2510 - RNA, 17 nt, Mus musculus
uguggcauuucagaaug

SEQ ID NO: 2511 - RNA, 17 nt, Mus musculus
guggcauuucagaaugc

SEQ ID NO: 2512 - RNA, 17 nt, Mus musculus
uggcauuucagaaugcc

SEQ ID NO: 2513 - RNA, 17 nt, Mus musculus
gaaugccucucugcagg

SEQ ID NO: 2514 - RNA, 17 nt, Mus musculus
augccucucugcaggac

SEQ ID NO: 2515 - RNA, 17 nt, Mus musculus
aggcgacuauguuugcu

SEQ ID NO: 2516 - RNA, 17 nt, Mus musculus
gacuauguuugcucugc

SEQ ID NO: 2517 - RNA, 17 nt, Mus musculus
acuauguuugcucugcu

SEQ ID NO: 2518 - RNA, 17 nt, Mus musculus
uguuugcucugcucaag

SEQ ID NO: 2519 - RNA, 17 nt, Mus musculus
gcucugcucaagauaag

SEQ ID NO: 2520 - RNA, 17 nt, Mus musculus
cucaagauaagaagacc

SEQ ID NO: 2521 - RNA, 17 nt, Mus musculus
aaagacauugccugguc

SEQ ID NO: 2522 - RNA, 17 nt, Mus musculus
ugccuggucaaacagcu

SEQ ID NO: 2523 - RNA, 17 nt, Mus musculus
aaacagcucaucauccu

SEQ ID NO: 2524 - RNA, 17 nt, Mus musculus
cagcucaucauccuaga

SEQ ID NO: 2525 - RNA, 17 nt, Mus musculus
cucaucauccuagagcg

SEQ ID NO: 2526 - RNA, 17 nt, Mus musculus
aucauccuagagcgcau

SEQ ID NO: 2527 - RNA, 17 nt, Mus musculus
cccaugaucaccggaaa

SEQ ID NO: 2528 - RNA, 17 nt, Mus musculus
ccggaaaucuggagaau

SEQ ID NO: 2529 - RNA, 17 nt, Mus musculus
uggagaaucagacaaca

SEQ ID NO: 2530 - RNA, 17 nt, Mus musculus
acaaccauuggcgagac

SEQ ID NO: 2531 - RNA, 17 nt, Mus musculus
gagaccauugaagugac

SEQ ID NO: 2532 - RNA, 17 nt, Mus musculus
aagugacuugcccagca

SEQ ID NO: 2533 - RNA, 17 nt, Mus musculus
cccagcaucuggaaauc

SEQ ID NO: 2534 - RNA, 17 nt, Mus musculus
cuggaaauccuacccca

SEQ ID NO: 2535 - RNA, 17 nt, Mus musculus
gaaauccuaccccacac

SEQ ID NO: 2536 - RNA, 17 nt, Mus musculus
ccacacauuacaugguu

SEQ ID NO: 2537 - RNA, 17 nt, Mus musculus
cacacauuacaugguuc

SEQ ID NO: 2538 - RNA, 17 nt, Mus musculus
uacaugguucaaagaca

SEQ ID NO: 2539 - RNA, 17 nt, Mus musculus
acaugguucaaagacaa

SEQ ID NO: 2540 - RNA, 17 nt, Mus musculus
acccugguagaagauuc

SEQ ID NO: 2541 - RNA, 17 nt, Mus musculus
uagaagauucaggcauu

SEQ ID NO: 2542 - RNA, 17 nt, Mus musculus
agaagauucaggcauug

SEQ ID NO: 2543 - RNA, 17 nt, Mus musculus
ucaggcauuguacugag

SEQ ID NO: 2544 - RNA, 17 nt, Mus musculus
ggcauuguacugagaga

SEQ ID NO: 2545 - RNA, 17 nt, Mus musculus
accugacuauccgcagg

SEQ ID NO: 2546 - RNA, 17 nt, Mus musculus
cugacuauccgcagggu

SEQ ID NO: 2547 - RNA, 17 nt, Mus musculus
ggaggccucuacaccug

SEQ ID NO: 2548 - RNA, 17 nt, Mus musculus
ugcaauguccuuggcug

SEQ ID NO: 2549 - RNA, 17 nt, Mus musculus
aauguccuuggcugugc

SEQ ID NO: 2550 - RNA, 17 nt, Mus musculus
gagacgcucuucauaau

SEQ ID NO: 2551 - RNA, 17 nt, Mus musculus
gacgcucuucauaauag

SEQ ID NO: 2552 - RNA, 17 nt, Mus musculus
acgcucuucauaauaga

SEQ ID NO: 2553 - RNA, 17 nt, Mus musculus
cucuucauaauagaagg

SEQ ID NO: 2554 - RNA, 17 nt, Mus musculus
gaccaacuuggaaguca

SEQ ID NO: 2555 - RNA, 17 nt, Mus musculus
uuggaagucauuauccu

SEQ ID NO: 2556 - RNA, 17 nt, Mus musculus
gaagucauuauccucgu

SEQ ID NO: 2557 - RNA, 17 nt, Mus musculus
aagucauuauccucguc

SEQ ID NO: 2558 - RNA, 17 nt, Mus musculus
gucauuauccucgucgg

SEQ ID NO: 2559 - RNA, 17 nt, Mus musculus
auuauccucgucggcac

SEQ ID NO: 2560 - RNA, 17 nt, Mus musculus
auccucgucggcacugc

SEQ ID NO: 2561 - RNA, 17 nt, Mus musculus
gcagugauugccauguu

SEQ ID NO: 2562 - RNA, 17 nt, Mus musculus
cauguucuucuggcucc

SEQ ID NO: 2563 - RNA, 17 nt, Mus musculus
auguucuucuggcuccu

SEQ ID NO: 2564 - RNA, 17 nt, Mus musculus
uucuggcuccuucuugu

SEQ ID NO: 2565 - RNA, 17 nt, Mus musculus
uggcuccuucuugucau

SEQ ID NO: 2566 - RNA, 17 nt, Mus musculus
ggcuccuucuugucauu

SEQ ID NO: 2567 - RNA, 17 nt, Mus musculus
cuccuucuugucauugu

SEQ ID NO: 2568 - RNA, 17 nt, Mus musculus
cuucuugucauuguccu

SEQ ID NO: 2569 - RNA, 17 nt, Mus musculus
cuugucauuguccuacg

SEQ ID NO: 2570 - RNA, 17 nt, Mus musculus
gucauuguccuacggac

SEQ ID NO: 2571 - RNA, 17 nt, Mus musculus
auuguccuacggaccgu

SEQ ID NO: 2572 - RNA, 17 nt, Mus musculus
cggaccguuaagcgggc

SEQ ID NO: 2573 - RNA, 17 nt, Mus musculus
gacaggcuacuugucua

SEQ ID NO: 2574 - RNA, 17 nt, Mus musculus
aggcuacuugucuauug

SEQ ID NO: 2575 - RNA, 17 nt, Mus musculus
cuacuugucuauuguca

SEQ ID NO: 2576 - RNA, 17 nt, Mus musculus
acuugucuauugucaug

SEQ ID NO: 2577 - RNA, 17 nt, Mus musculus
uugucuauugucaugga

SEQ ID NO: 2578 - RNA, 17 nt, Mus musculus
ucuauugucauggaucc

SEQ ID NO: 2579 - RNA, 17 nt, Mus musculus
agaugaauugcccuugg

SEQ ID NO: 2580 - RNA, 17 nt, Mus musculus
auugcccuuggaugagc

SEQ ID NO: 2581 - RNA, 17 nt, Mus musculus
ugaacgcuugccuuaug

SEQ ID NO: 2582 - RNA, 17 nt, Mus musculus
gcuugccuuaugaugcc

SEQ ID NO: 2583 - RNA, 17 nt, Mus musculus
cuugccuuaugaugcca

SEQ ID NO: 2584 - RNA, 17 nt, Mus musculus
gugggaauuccccaggg

SEQ ID NO: 2585 - RNA, 17 nt, Mus musculus
ugggaauuccccaggga

SEQ ID NO: 2586 - RNA, 17 nt, Mus musculus
cugaaacuaggaaaacc

SEQ ID NO: 2587 - RNA, 17 nt, Mus musculus
gaaaaccucuuggccgc

SEQ ID NO: 2588 - RNA, 17 nt, Mus musculus
aaaccucuuggccgcgg

SEQ ID NO: 2589 - RNA, 17 nt, Mus musculus
cggugccuucggccaag

SEQ ID NO: 2590 - RNA, 17 nt, Mus musculus
ggugccuucggccaagu

SEQ ID NO: 2591 - RNA, 17 nt, Mus musculus
caagugauugaggcaga

SEQ ID NO: 2592 - RNA, 17 nt, Mus musculus
cagacgcuuuuggaauu

SEQ ID NO: 2593 - RNA, 17 nt, Mus musculus
agacgcuuuuggaauug

SEQ ID NO: 2594 - RNA, 17 nt, Mus musculus
gacgcuuuuggaauuga

SEQ ID NO: 2595 - RNA, 17 nt, Mus musculus
cagcgacuugcaaaaca

SEQ ID NO: 2596 - RNA, 17 nt, Mus musculus
aaaacaguagccgucaa

SEQ ID NO: 2597 - RNA, 17 nt, Mus musculus
guagccgucaagauguu

SEQ ID NO: 2598 - RNA, 17 nt, Mus musculus
caagauguugaaagaag

SEQ ID NO: 2599 - RNA, 17 nt, Mus musculus
gcgagcaucgagcccuc

SEQ ID NO: 2600 - RNA, 17 nt, Mus musculus
cgagcccucaugucuga

SEQ ID NO: 2601 - RNA, 17 nt, Mus musculus
ccucaugucugaacuca

SEQ ID NO: 2602 - RNA, 17 nt, Mus musculus
cucaagauccucaucca

SEQ ID NO: 2603 - RNA, 17 nt, Mus musculus
aagauccucauccacau

SEQ ID NO: 2604 - RNA, 17 nt, Mus musculus
auccucauccacauugg

SEQ ID NO: 2605 - RNA, 17 nt, Mus musculus
auccacauuggucacca

SEQ ID NO: 2606 - RNA, 17 nt, Mus musculus
acauuggucaccaucuc

SEQ ID NO: 2607 - RNA, 17 nt, Mus musculus
gugaaccuccuaggcgc

SEQ ID NO: 2608 - RNA, 17 nt, Mus musculus
aaccuccuaggcgccug

SEQ ID NO: 2609 - RNA, 17 nt, Mus musculus
gagggccucucauggug

SEQ ID NO: 2610 - RNA, 17 nt, Mus musculus
gggccucucauggugau

SEQ ID NO: 2611 - RNA, 17 nt, Mus musculus
uguggaauucugcaagu

SEQ ID NO: 2612 - RNA, 17 nt, Mus musculus
guggaauucugcaaguu

SEQ ID NO: 2613 - RNA, 17 nt, Mus musculus
cugcaaguuuggaaacc

SEQ ID NO: 2614 - RNA, 17 nt, Mus musculus
ugcaaguuuggaaaccu

SEQ ID NO: 2615 - RNA, 17 nt, Mus musculus
ggaaaccuaucaacuua

SEQ ID NO: 2616 - RNA, 17 nt, Mus musculus
aaaccuaucaacuuacu

SEQ ID NO: 2617 - RNA, 17 nt, Mus musculus
uaucaacuuacuuacgg

SEQ ID NO: 2618 - RNA, 17 nt, Mus musculus
aucaacuuacuuacggg

SEQ ID NO: 2619 - RNA, 17 nt, Mus musculus
aacuuacuuacggggca

SEQ ID NO: 2620 - RNA, 17 nt, Mus musculus
acuuacuuacggggcaa

SEQ ID NO: 2621 - RNA, 17 nt, Mus musculus
aaaugaauuuguucccu

SEQ ID NO: 2622 - RNA, 17 nt, Mus musculus
aaugaauuuguucccua

SEQ ID NO: 2623 - RNA, 17 nt, Mus musculus
gaauuuguucccuauaa

SEQ ID NO: 2624 - RNA, 17 nt, Mus musculus
aauuuguucccuauaag

SEQ ID NO: 2625 - RNA, 17 nt, Mus musculus
uguucccuauaagagca

SEQ ID NO: 2626 - RNA, 17 nt, Mus musculus
uucccuauaagagcaaa

SEQ ID NO: 2627 - RNA, 17 nt, Mus musculus
ggcacgcuuccgccagg

SEQ ID NO: 2628 - RNA, 17 nt, Mus musculus
gcacgcuuccgccaggg

SEQ ID NO: 2629 - RNA, 17 nt, Mus musculus
caaggacuacguugggg

SEQ ID NO: 2630 - RNA, 17 nt, Mus musculus
gacuacguuggggagcu

SEQ ID NO: 2631 - RNA, 17 nt, Mus musculus
ggggagcucuccgugga

SEQ ID NO: 2632 - RNA, 17 nt, Mus musculus
ggagcucuccguggauc

SEQ ID NO: 2633 - RNA, 17 nt, Mus musculus
ccguggaucugaaaaga

SEQ ID NO: 2634 - RNA, 17 nt, Mus musculus
aagacgcuuggacagca

SEQ ID NO: 2635 - RNA, 17 nt, Mus musculus
gacagcaucaccagcag

SEQ ID NO: 2636 - RNA, 17 nt, Mus musculus
ccagagcucugccagcu

SEQ ID NO: 2637 - RNA, 17 nt, Mus musculus
ugccagcucaggcuuug

SEQ ID NO: 2638 - RNA, 17 nt, Mus musculus
cucaggcuuuguugagg

SEQ ID NO: 2639 - RNA, 17 nt, Mus musculus
ucaggcuuuguugagga

SEQ ID NO: 2640 - RNA, 17 nt, Mus musculus
ggcuuuguugaggagaa

SEQ ID NO: 2641 - RNA, 17 nt, Mus musculus
ggagaaaucgcucagug

SEQ ID NO: 2642 - RNA, 17 nt, Mus musculus
aaaucgcucagugaugu

SEQ ID NO: 2643 - RNA, 17 nt, Mus musculus
agugauguagaggaaga

SEQ ID NO: 2644 - RNA, 17 nt, Mus musculus
aagaagcuucugaagaa

SEQ ID NO: 2645 - RNA, 17 nt, Mus musculus
agaagcuucugaagaac

SEQ ID NO: 2646 - RNA, 17 nt, Mus musculus
agaacuguacaaggacu

SEQ ID NO: 2647 - RNA, 17 nt, Mus musculus
caaggacuuccugaccu

SEQ ID NO: 2648 - RNA, 17 nt, Mus musculus
ggaguucuuggcaucaa

SEQ ID NO: 2649 - RNA, 17 nt, Mus musculus
cuuggcaucaaggaagu

SEQ ID NO: 2650 - RNA, 17 nt, Mus musculus
ggaaguguauccacagg

SEQ ID NO: 2651 - RNA, 17 nt, Mus musculus
cgaaacauucuccuauc

SEQ ID NO: 2652 - RNA, 17 nt, Mus musculus
gaaacauucuccuaucg

SEQ ID NO: 2653 - RNA, 17 nt, Mus musculus
aacauucuccuaucgga

SEQ ID NO: 2654 - RNA, 17 nt, Mus musculus
auucuccuaucggagaa

SEQ ID NO: 2655 - RNA, 17 nt, Mus musculus
ucuccuaucggagaaga

SEQ ID NO: 2656 - RNA, 17 nt, Mus musculus
aaugugguuaagaucug

SEQ ID NO: 2657 - RNA, 17 nt, Mus musculus
augugguuaagaucugu

SEQ ID NO: 2658 - RNA, 17 nt, Mus musculus
guuaagaucugugacuu

SEQ ID NO: 2659 - RNA, 17 nt, Mus musculus
cugugacuucggcuugg

SEQ ID NO: 2660 - RNA, 17 nt, Mus musculus
ugugacuucggcuuggc

SEQ ID NO: 2661 - RNA, 17 nt, Mus musculus
cuucggcuuggcccggg

SEQ ID NO: 2662 - RNA, 17 nt, Mus musculus
cgggacauuuauaaaga

SEQ ID NO: 2663 - RNA, 17 nt, Mus musculus
gggacauuuauaaagac

SEQ ID NO: 2664 - RNA, 17 nt, Mus musculus
ggacauuuauaaagacc

SEQ ID NO: 2665 - RNA, 17 nt, Mus musculus
acauuuauaaagacccg

SEQ ID NO: 2666 - RNA, 17 nt, Mus musculus
acccggauuaugucaga

SEQ ID NO: 2667 - RNA, 17 nt, Mus musculus
cccggauuaugucagaa

SEQ ID NO: 2668 - RNA, 17 nt, Mus musculus
gcccgacucccuuugaa

SEQ ID NO: 2669 - RNA, 17 nt, Mus musculus
gacucccuuugaagugg

SEQ ID NO: 2670 - RNA, 17 nt, Mus musculus
acucccuuugaagugga

SEQ ID NO: 2671 - RNA, 17 nt, Mus musculus
gaaaccauuuuugacag

SEQ ID NO: 2672 - RNA, 17 nt, Mus musculus
aaaccauuuuugacaga

SEQ ID NO: 2673 - RNA, 17 nt, Mus musculus
aaccauuuuugacagag

SEQ ID NO: 2674 - RNA, 17 nt, Mus musculus
accauuuuugacagagu

SEQ ID NO: 2675 - RNA, 17 nt, Mus musculus
gacagaguauacacaau

SEQ ID NO: 2676 - RNA, 17 nt, Mus musculus
cagaguauacacaauuc

SEQ ID NO: 2677 - RNA, 17 nt, Mus musculus
uacacaauucagagcga

SEQ ID NO: 2678 - RNA, 17 nt, Mus musculus
acacaauucagagcgau

SEQ ID NO: 2679 - RNA, 17 nt, Mus musculus
uguguggucuuucggug

SEQ ID NO: 2680 - RNA, 17 nt, Mus musculus
uguggucuuucggugug

SEQ ID NO: 2681 - RNA, 17 nt, Mus musculus
guggucuuucggugugu

SEQ ID NO: 2682 - RNA, 17 nt, Mus musculus
uggucuuucgguguguu

SEQ ID NO: 2683 - RNA, 17 nt, Mus musculus
cgguguguugcucuggg

SEQ ID NO: 2684 - RNA, 17 nt, Mus musculus
guguugcucugggaaau

SEQ ID NO: 2685 - RNA, 17 nt, Mus musculus
auuuuccuuaggugccu

SEQ ID NO: 2686 - RNA, 17 nt, Mus musculus
uuuuccuuaggugccuc

SEQ ID NO: 2687 - RNA, 17 nt, Mus musculus
aggugccuccccauacc

SEQ ID NO: 2688 - RNA, 17 nt, Mus musculus
cuccccauacccugggg

SEQ ID NO: 2689 - RNA, 17 nt, Mus musculus
ccuggggucaagauuga

SEQ ID NO: 2690 - RNA, 17 nt, Mus musculus
gucaagauugaugaaga

SEQ ID NO: 2691 - RNA, 17 nt, Mus musculus
ugaagaauuuuguagga

SEQ ID NO: 2692 - RNA, 17 nt, Mus musculus
gaagaauuuuguaggag

SEQ ID NO: 2693 - RNA, 17 nt, Mus musculus
aagaauuuuguaggaga

SEQ ID NO: 2694 - RNA, 17 nt, Mus musculus
aauuuuguaggagauug

SEQ ID NO: 2695 - RNA, 17 nt, Mus musculus
uaggagauugaaagaag

SEQ ID NO: 2696 - RNA, 17 nt, Mus musculus
aaggaacuagaaugcgg

SEQ ID NO: 2697 - RNA, 17 nt, Mus musculus
ugcgggcuccugacuac

SEQ ID NO: 2698 - RNA, 17 nt, Mus musculus
uccugacuacacuaccc

SEQ ID NO: 2699 - RNA, 17 nt, Mus musculus
acuacacuaccccagaa

SEQ ID NO: 2700 - RNA, 17 nt, Mus musculus
gagacccucguuuucag

SEQ ID NO: 2701 - RNA, 17 nt, Mus musculus
acccucguuuucagagu

SEQ ID NO: 2702 - RNA, 17 nt, Mus musculus
cccucguuuucagaguu

SEQ ID NO: 2703 - RNA, 17 nt, Mus musculus
ccucguuuucagaguug

SEQ ID NO: 2704 - RNA, 17 nt, Mus musculus
cucguuuucagaguugg

SEQ ID NO: 2705 - RNA, 17 nt, Mus musculus
uucagaguugguggagc

SEQ ID NO: 2706 - RNA, 17 nt, Mus musculus
uggagcauuugggaaac

SEQ ID NO: 2707 - RNA, 17 nt, Mus musculus
ggagcauuugggaaacc

SEQ ID NO: 2708 - RNA, 17 nt, Mus musculus
ggaaaccuccugcaagc

SEQ ID NO: 2709 - RNA, 17 nt, Mus musculus
caaagacuauauuguuc

SEQ ID NO: 2710 - RNA, 17 nt, Mus musculus
aagacuauauuguucuu

SEQ ID NO: 2711 - RNA, 17 nt, Mus musculus
gacuauauuguucuucc

SEQ ID NO: 2712 - RNA, 17 nt, Mus musculus
uauauuguucuuccaau

SEQ ID NO: 2713 - RNA, 17 nt, Mus musculus
auauuguucuuccaaug

SEQ ID NO: 2714 - RNA, 17 nt, Mus musculus
auuguucuuccaauguc

SEQ ID NO: 2715 - RNA, 17 nt, Mus musculus
uuguucuuccaauguca

SEQ ID NO: 2716 - RNA, 17 nt, Mus musculus
uccaaugucagagacac

SEQ ID NO: 2717 - RNA, 17 nt, Mus musculus
ucuggacucucccugcc

SEQ ID NO: 2718 - RNA, 17 nt, Mus musculus
uggacucucccugccua

SEQ ID NO: 2719 - RNA, 17 nt, Mus musculus
cccugccuaccucaccu

SEQ ID NO: 2720 - RNA, 17 nt, Mus musculus
uuuccuguauggaggaa

SEQ ID NO: 2721 - RNA, 17 nt, Mus musculus
gcaggaaucagucauua

SEQ ID NO: 2722 - RNA, 17 nt, Mus musculus
gaaucagucauuaucuc

SEQ ID NO: 2723 - RNA, 17 nt, Mus musculus
ucagucauuaucuccag

SEQ ID NO: 2724 - RNA, 17 nt, Mus musculus
cagucauuaucuccaga

SEQ ID NO: 2725 - RNA, 17 nt, Mus musculus
gucauuaucuccagaac

SEQ ID NO: 2726 - RNA, 17 nt, Mus musculus
cauuaucuccagaacag

SEQ ID NO: 2727 - RNA, 17 nt, Mus musculus
uugaagauaucccauug

SEQ ID NO: 2728 - RNA, 17 nt, Mus musculus
gaagauaucccauugga

SEQ ID NO: 2729 - RNA, 17 nt, Mus musculus
uaucccauuggaggaac

SEQ ID NO: 2730 - RNA, 17 nt, Mus musculus
ccagaaguaaaagugau

SEQ ID NO: 2731 - RNA, 17 nt, Mus musculus
aaagugaucccagauga

SEQ ID NO: 2732 - RNA, 17 nt, Mus musculus
gggaugguccuugcauc

SEQ ID NO: 2733 - RNA, 17 nt, Mus musculus
augguccuugcaucaga

SEQ ID NO: 2734 - RNA, 17 nt, Mus musculus
ccuugcaucagaagagc

SEQ ID NO: 2735 - RNA, 17 nt, Mus musculus
ugaaaacucuggaagac

SEQ ID NO: 2736 - RNA, 17 nt, Mus musculus
gaacaaauuaucuccau

SEQ ID NO: 2737 - RNA, 17 nt, Mus musculus
aacaaauuaucuccauc

SEQ ID NO: 2738 - RNA, 17 nt, Mus musculus
ugcccaguaaaagcagg

SEQ ID NO: 2739 - RNA, 17 nt, Mus musculus
cagggagucuguggccu

SEQ ID NO: 2740 - RNA, 17 nt, Mus musculus
uguggccucggaaggcu

SEQ ID NO: 2741 - RNA, 17 nt, Mus musculus
ggaaggcuccaaccaga

SEQ ID NO: 2742 - RNA, 17 nt, Mus musculus
caguggcuaccagucug

SEQ ID NO: 2743 - RNA, 17 nt, Mus musculus
cuaccagucuggguauc

SEQ ID NO: 2744 - RNA, 17 nt, Mus musculus
gucuggguaucacucag

SEQ ID NO: 2745 - RNA, 17 nt, Mus musculus
cuggguaucacucagau

SEQ ID NO: 2746 - RNA, 17 nt, Mus musculus
guaucacucagaugaca

SEQ ID NO: 2747 - RNA, 17 nt, Mus musculus
caccguguacuccagcg

SEQ ID NO: 2748 - RNA, 17 nt, Mus musculus
cguguacuccagcgacg

SEQ ID NO: 2749 - RNA, 17 nt, Mus musculus
gcaggacuuuuaaagau

SEQ ID NO: 2750 - RNA, 17 nt, Mus musculus
caggacuuuuaaagaug

SEQ ID NO: 2751 - RNA, 17 nt, Mus musculus
aggacuuuuaaagaugg

SEQ ID NO: 2752 - RNA, 17 nt, Mus musculus
ggacuuuuaaagauggu

SEQ ID NO: 2753 - RNA, 17 nt, Mus musculus
gcugcaguucacgcuga

SEQ ID NO: 2754 - RNA, 17 nt, Mus musculus
cugcaguucacgcugac

SEQ ID NO: 2755 - RNA, 17 nt, Mus musculus
cgcugacucagggacca

SEQ ID NO: 2756 - RNA, 17 nt, Mus musculus
cugcagcucaccuccug

SEQ ID NO: 2757 - RNA, 17 nt, Mus musculus
gcucaccuccuguuuaa

SEQ ID NO: 2758 - RNA, 17 nt, Mus musculus
ccuccuguuuaaaugga

SEQ ID NO: 2759 - RNA, 17 nt, Mus musculus
cuccuguuuaaauggaa

SEQ ID NO: 2760 - RNA, 17 nt, Mus musculus
uccuguuuaaauggaag

SEQ ID NO: 2761 - RNA, 17 nt, Mus musculus
gaagugguccugucccg

SEQ ID NO: 2762 - RNA, 17 nt, Mus musculus
gguccugucccggcucc

SEQ ID NO: 2763 - RNA, 17 nt, Mus musculus
ucccggcuccgccccca

SEQ ID NO: 2764 - RNA, 17 nt, Mus musculus
ccccaacuccuggaaau

SEQ ID NO: 2765 - RNA, 17 nt, Mus musculus
cuggaaaucacgagaga

SEQ ID NO: 2766 - RNA, 17 nt, Mus musculus
gugcugcuuagauuuuc

SEQ ID NO: 2767 - RNA, 17 nt, Mus musculus
ugcugcuuagauuuuca

SEQ ID NO: 2768 - RNA, 17 nt, Mus musculus
gcuuagauuuucaagug

SEQ ID NO: 2769 - RNA, 17 nt, Mus musculus
cuuagauuuucaagugu

SEQ ID NO: 2770 - RNA, 17 nt, Mus musculus
uuagauuuucaaguguu

SEQ ID NO: 2771 - RNA, 17 nt, Mus musculus
uagauuuucaaguguug

SEQ ID NO: 2772 - RNA, 17 nt, Mus musculus
ucaaguguuguucuuuc

SEQ ID NO: 2773 - RNA, 17 nt, Mus musculus
guuguucuuuccaccac

SEQ ID NO: 2774 - RNA, 17 nt, Mus musculus
uuguucuuuccaccacc

SEQ ID NO: 2775 - RNA, 17 nt, Mus musculus
uguucuuuccaccaccc

SEQ ID NO: 2776 - RNA, 17 nt, Mus musculus
ccggaaguagccacauu

SEQ ID NO: 2777 - RNA, 17 nt, Mus musculus
agccacauuugauuuuc

SEQ ID NO: 2778 - RNA, 17 nt, Mus musculus
gccacauuugauuuuca

SEQ ID NO: 2779 - RNA, 17 nt, Mus musculus
cauuugauuuucauuuu

SEQ ID NO: 2780 - RNA, 17 nt, Mus musculus
auuugauuuucauuuuu

SEQ ID NO: 2781 - RNA, 17 nt, Mus musculus
uuugauuuucauuuuug

SEQ ID NO: 2782 - RNA, 17 nt, Mus musculus
uugauuuucauuuuugg

SEQ ID NO: 2783 - RNA, 17 nt, Mus musculus
auuuucauuuuuggagg

SEQ ID NO: 2784 - RNA, 17 nt, Mus musculus
uuuucauuuuuggagga

SEQ ID NO: 2785 - RNA, 17 nt, Mus musculus
uuucauuuuuggaggag

SEQ ID NO: 2786 - RNA, 17 nt, Mus musculus
uucauuuuuggaggagg

SEQ ID NO: 2787 - RNA, 17 nt, Mus musculus
agggaccucagacugca

SEQ ID NO: 2788 - RNA, 17 nt, Mus musculus
aaggagcuuguccucag

SEQ ID NO: 2789 - RNA, 17 nt, Mus musculus
gagcuuguccucagggc

SEQ ID NO: 2790 - RNA, 17 nt, Mus musculus
cuuguccucagggcauu

SEQ ID NO: 2791 - RNA, 17 nt, Mus musculus
cagggcauuuccagaga

SEQ ID NO: 2792 - RNA, 17 nt, Mus musculus
agggcauuuccagagaa

SEQ ID NO: 2793 - RNA, 17 nt, Mus musculus
gggcauuuccagagaag

SEQ ID NO: 2794 - RNA, 17 nt, Mus musculus
gaauguguugacucuac

SEQ ID NO: 2795 - RNA, 17 nt, Mus musculus
uguugacucuacucucu

SEQ ID NO: 2796 - RNA, 17 nt, Mus musculus
uugacucuacucucuuu

SEQ ID NO: 2797 - RNA, 17 nt, Mus musculus
acucuacucucuuuucc

SEQ ID NO: 2798 - RNA, 17 nt, Mus musculus
ucuacucucuuuuccau

SEQ ID NO: 2799 - RNA, 17 nt, Mus musculus
uacucucuuuuccauuc

SEQ ID NO: 2800 - RNA, 17 nt, Mus musculus
acucucuuuuccauuca

SEQ ID NO: 2801 - RNA, 17 nt, Mus musculus
cucucuuuuccauucau

SEQ ID NO: 2802 - RNA, 17 nt, Mus musculus
ucucuuuuccauucauu

SEQ ID NO: 2803 - RNA, 17 nt, Mus musculus
uuuuccauucauuuaaa

SEQ ID NO: 2804 - RNA, 17 nt, Mus musculus
uuuccauucauuuaaaa

SEQ ID NO: 2805 - RNA, 17 nt, Mus musculus
ccauucauuuaaaaguc

SEQ ID NO: 2806 - RNA, 17 nt, Mus musculus
cauucauuuaaaagucc

SEQ ID NO: 2807 - RNA, 17 nt, Mus musculus
auucauuuaaaaguccu

SEQ ID NO: 2808 - RNA, 17 nt, Mus musculus
uuaaaaguccuauauaa

SEQ ID NO: 2809 - RNA, 17 nt, Mus musculus
aaaguccuauauaaugu

SEQ ID NO: 2810 - RNA, 17 nt, Mus musculus
aguccuauauaaugugc

SEQ ID NO: 2811 - RNA, 17 nt, Mus musculus
uccuauauaaugugccc

SEQ ID NO: 2812 - RNA, 17 nt, Mus musculus
gcuguggucucacuacc

SEQ ID NO: 2813 - RNA, 17 nt, Mus musculus
uguggucucacuaccag

SEQ ID NO: 2814 - RNA, 17 nt, Mus musculus
gucucacuaccaguuaa

SEQ ID NO: 2815 - RNA, 17 nt, Mus musculus
cuaccaguuaaagcaaa

SEQ ID NO: 2816 - RNA, 17 nt, Mus musculus
uaccaguuaaagcaaaa

SEQ ID NO: 2817 - RNA, 17 nt, Mus musculus
aaaagacuuucaaacac

SEQ ID NO: 2818 - RNA, 17 nt, Mus musculus
aaagacuuucaaacacg

SEQ ID NO: 2819 - RNA, 17 nt, Mus musculus
aagacuuucaaacacgu

SEQ ID NO: 2820 - RNA, 17 nt, Mus musculus
cguggacucuguccucc

SEQ ID NO: 2821 - RNA, 17 nt, Mus musculus
gacucuguccuccaaga

SEQ ID NO: 2822 - RNA, 17 nt, Mus musculus
ucuguccuccaagaagu

SEQ ID NO: 2823 - RNA, 17 nt, Mus musculus
cggcaccucugugaaac

SEQ ID NO: 2824 - RNA, 17 nt, Mus musculus
aacuggaucgaaugggc

SEQ ID NO: 2825 - RNA, 17 nt, Mus musculus
gcaaugcuuuguguguu

SEQ ID NO: 2826 - RNA, 17 nt, Mus musculus
caaugcuuuguguguug

SEQ ID NO: 2827 - RNA, 17 nt, Mus musculus
uuguguguugaggaugg

SEQ ID NO: 2828 - RNA, 17 nt, Mus musculus
ugagaugucccagggcc

SEQ ID NO: 2829 - RNA, 17 nt, Mus musculus
ggccgagucugucuacc

SEQ ID NO: 2830 - RNA, 17 nt, Mus musculus
gagucugucuaccuugg

SEQ ID NO: 2831 - RNA, 17 nt, Mus musculus
gucugucuaccuuggag

SEQ ID NO: 2832 - RNA, 17 nt, Mus musculus
gucuaccuuggaggcuu

SEQ ID NO: 2833 - RNA, 17 nt, Mus musculus
uggaggcuuuguggagg

SEQ ID NO: 2834 - RNA, 17 nt, Mus musculus
ggaggcuuuguggagga

SEQ ID NO: 2835 - RNA, 17 nt, Mus musculus
ugcgggcuaugagccaa

SEQ ID NO: 2836 - RNA, 17 nt, Mus musculus
ccaaguguuaagugugg

SEQ ID NO: 2837 - RNA, 17 nt, Mus musculus
caaguguuaaguguggg

SEQ ID NO: 2838 - RNA, 17 nt, Mus musculus
gcgcaagucgcucggag

SEQ ID NO: 2839 - RNA, 17 nt, Mus musculus
aagucgcucggagagcg

SEQ ID NO: 2840 - RNA, 17 nt, Mus musculus
agagcgguuggagccug

SEQ ID NO: 2841 - RNA, 17 nt, Mus musculus
agaugcauugugcuggc

SEQ ID NO: 2842 - RNA, 17 nt, Mus musculus
ugcuggcucugguggag

SEQ ID NO: 2843 - RNA, 17 nt, Mus musculus
ggugggcuuguggccug

SEQ ID NO: 2844 - RNA, 17 nt, Mus musculus
uggccugucaggaaacg

SEQ ID NO: 2845 - RNA, 17 nt, Mus musculus
ggcaggguuugguuuug

SEQ ID NO: 2846 - RNA, 17 nt, Mus musculus
gcaggguuugguuuugg

SEQ ID NO: 2847 - RNA, 17 nt, Mus musculus
gguuugguuuuggaagg

SEQ ID NO: 2848 - RNA, 17 nt, Mus musculus
guuugguuuuggaaggu

SEQ ID NO: 2849 - RNA, 17 nt, Mus musculus
uuugguuuuggaagguu

SEQ ID NO: 2850 - RNA, 17 nt, Mus musculus
uggaagguuugcgugcu

SEQ ID NO: 2851 - RNA, 17 nt, Mus musculus
ggaagguuugcgugcuc

SEQ ID NO: 2852 - RNA, 17 nt, Mus musculus
ugcgugcucuucacagu

SEQ ID NO: 2853 - RNA, 17 nt, Mus musculus
cgugcucuucacagucg

SEQ ID NO: 2854 - RNA, 17 nt, Mus musculus
gugcucuucacagucgg

SEQ ID NO: 2855 - RNA, 17 nt, Mus musculus
uucacagucggguuaca

SEQ ID NO: 2856 - RNA, 17 nt, Mus musculus
agucggguuacaggcga

SEQ ID NO: 2857 - RNA, 17 nt, Mus musculus
gucggguuacaggcgag

SEQ ID NO: 2858 - RNA, 17 nt, Mus musculus
aggcgaguucccugugg

SEQ ID NO: 2859 - RNA, 17 nt, Mus musculus
ggcgaguucccuguggc

SEQ ID NO: 2860 - RNA, 17 nt, Mus musculus
uguggcguuuccuacuc

SEQ ID NO: 2861 - RNA, 17 nt, Mus musculus
guggcguuuccuacucc

SEQ ID NO: 2862 - RNA, 17 nt, Mus musculus
uggcguuuccuacuccu

SEQ ID NO: 2863 - RNA, 17 nt, Mus musculus
cguuuccuacuccuaau

SEQ ID NO: 2864 - RNA, 17 nt, Mus musculus
uuccuacuccuaaugag

SEQ ID NO: 2865 - RNA, 17 nt, Mus musculus
cuacuccuaaugagagu

SEQ ID NO: 2866 - RNA, 17 nt, Mus musculus
augagaguuccuuccgg

SEQ ID NO: 2867 - RNA, 17 nt, Mus musculus
ugagaguuccuuccgga

SEQ ID NO: 2868 - RNA, 17 nt, Mus musculus
gaguuccuuccggacuc

SEQ ID NO: 2869 - RNA, 17 nt, Mus musculus
aguuccuuccggacucu

SEQ ID NO: 2870 - RNA, 17 nt, Mus musculus
uccggacucuuacgugu

SEQ ID NO: 2871 - RNA, 17 nt, Mus musculus
cggacucuuacgugucu

SEQ ID NO: 2872 - RNA, 17 nt, Mus musculus
ggacucuuacgugucuc

SEQ ID NO: 2873 - RNA, 17 nt, Mus musculus
uuacgugucuccuggcc

SEQ ID NO: 2874 - RNA, 17 nt, Mus musculus
acgugucuccuggccug

SEQ ID NO: 2875 - RNA, 17 nt, Mus musculus
augcagcuugcuccuuc

SEQ ID NO: 2876 - RNA, 17 nt, Mus musculus
agcuugcuccuuccuca

SEQ ID NO: 2877 - RNA, 17 nt, Mus musculus
uugcuccuuccucaucu

SEQ ID NO: 2878 - RNA, 17 nt, Mus musculus
ugcuccuuccucaucuc

SEQ ID NO: 2879 - RNA, 17 nt, Mus musculus
uccuuccucaucucuca

SEQ ID NO: 2880 - RNA, 17 nt, Mus musculus
uuccucaucucucaggc

SEQ ID NO: 2881 - RNA, 17 nt, Mus musculus
ccucaucucucaggcug

SEQ ID NO: 2882 - RNA, 17 nt, Mus musculus
ucaucucucaggcugug

SEQ ID NO: 2883 - RNA, 17 nt, Mus musculus
cugugccuuaauucaga

SEQ ID NO: 2884 - RNA, 17 nt, Mus musculus
ugugccuuaauucagaa

SEQ ID NO: 2885 - RNA, 17 nt, Mus musculus
gccuuaauucagaacac

SEQ ID NO: 2886 - RNA, 17 nt, Mus musculus
ccuuaauucagaacacc

SEQ ID NO: 2887 - RNA, 17 nt, Mus musculus
aggaacgucggcagagg

SEQ ID NO: 2888 - RNA, 17 nt, Mus musculus
cagaggcuccugacggg

SEQ ID NO: 2889 - RNA, 17 nt, Mus musculus
cgaagaauugugagaac

SEQ ID NO: 2890 - RNA, 17 nt, Mus musculus
cagaaacucaggguuuc

SEQ ID NO: 2891 - RNA, 17 nt, Mus musculus
cucaggguuucugcugg

SEQ ID NO: 2892 - RNA, 17 nt, Mus musculus
ucaggguuucugcuggg

SEQ ID NO: 2893 - RNA, 17 nt, Mus musculus
caggguuucugcugggu

SEQ ID NO: 2894 - RNA, 17 nt, Mus musculus
uggcaggucugaggguu

SEQ ID NO: 2895 - RNA, 17 nt, Mus musculus
cugaggguucucuguca

SEQ ID NO: 2896 - RNA, 17 nt, Mus musculus
ugaggguucucugucaa

SEQ ID NO: 2897 - RNA, 17 nt, Mus musculus
aggguucucugucaagu

SEQ ID NO: 2898 - RNA, 17 nt, Mus musculus
uucucugucaaguggcg

SEQ ID NO: 2899 - RNA, 17 nt, Mus musculus
guggcgguaaaggcuca

SEQ ID NO: 2900 - RNA, 17 nt, Mus musculus
uaaaggcucaggcuggu

SEQ ID NO: 2901 - RNA, 17 nt, Mus musculus
gcugguguucuuccucu

SEQ ID NO: 2902 - RNA, 17 nt, Mus musculus
cugguguucuuccucua

SEQ ID NO: 2903 - RNA, 17 nt, Mus musculus
gguguucuuccucuauc

SEQ ID NO: 2904 - RNA, 17 nt, Mus musculus
guguucuuccucuaucu

SEQ ID NO: 2905 - RNA, 17 nt, Mus musculus
uucuuccucuaucucca

SEQ ID NO: 2906 - RNA, 17 nt, Mus musculus
cuuccucuaucuccacu

SEQ ID NO: 2907 - RNA, 17 nt, Mus musculus
uccucuaucuccacucc

SEQ ID NO: 2908 - RNA, 17 nt, Mus musculus
cucuaucuccacuccug

SEQ ID NO: 2909 - RNA, 17 nt, Mus musculus
ucuccacuccugucagg

SEQ ID NO: 2910 - RNA, 17 nt, Mus musculus
acuccugucaggccccc

SEQ ID NO: 2911 - RNA, 17 nt, Mus musculus
ccccaaguccucaguau

SEQ ID NO: 2912 - RNA, 17 nt, Mus musculus
caaguccucaguauuuu

SEQ ID NO: 2913 - RNA, 17 nt, Mus musculus
uccucaguauuuuagcu

SEQ ID NO: 2914 - RNA, 17 nt, Mus musculus
cucaguauuuuagcuuu

SEQ ID NO: 2915 - RNA, 17 nt, Mus musculus
ucaguauuuuagcuuug

SEQ ID NO: 2916 - RNA, 17 nt, Mus musculus
caguauuuuagcuuugu

SEQ ID NO: 2917 - RNA, 17 nt, Mus musculus
aguauuuuagcuuugug

SEQ ID NO: 2918 - RNA, 17 nt, Mus musculus
uuuuagcuuuguggcuu

SEQ ID NO: 2919 - RNA, 17 nt, Mus musculus
uuuagcuuuguggcuuc

SEQ ID NO: 2920 - RNA, 17 nt, Mus musculus
uuguggcuuccugaugg

SEQ ID NO: 2921 - RNA, 17 nt, Mus musculus
uguggcuuccugauggc

SEQ ID NO: 2922 - RNA, 17 nt, Mus musculus
agaaaaaucuuaauugg

SEQ ID NO: 2923 - RNA, 17 nt, Mus musculus
aaaaaucuuaauugguu

SEQ ID NO: 2924 - RNA, 17 nt, Mus musculus
aaaaucuuaauugguug

SEQ ID NO: 2925 - RNA, 17 nt, Mus musculus
aucuuaauugguugguu

SEQ ID NO: 2926 - RNA, 17 nt, Mus musculus
uaauugguugguuugcu

SEQ ID NO: 2927 - RNA, 17 nt, Mus musculus
ugguugguuugcucucc

SEQ ID NO: 2928 - RNA, 17 nt, Mus musculus
gguugguuugcucucca

SEQ ID NO: 2929 - RNA, 17 nt, Mus musculus
gguuugcucuccagaua

SEQ ID NO: 2930 - RNA, 17 nt, Mus musculus
uuugcucuccagauaau

SEQ ID NO: 2931 - RNA, 17 nt, Mus musculus
cuccagauaaucacuag

SEQ ID NO: 2932 - RNA, 17 nt, Mus musculus
cagauaaucacuagcca

SEQ ID NO: 2933 - RNA, 17 nt, Mus musculus
uaaucacuagccagauu

SEQ ID NO: 2934 - RNA, 17 nt, Mus musculus
agccagauuucgaaauu

SEQ ID NO: 2935 - RNA, 17 nt, Mus musculus
gccagauuucgaaauua

SEQ ID NO: 2936 - RNA, 17 nt, Mus musculus
ccagauuucgaaauuac

SEQ ID NO: 2937 - RNA, 17 nt, Mus musculus
uucgaaauuacuuuuua

SEQ ID NO: 2938 - RNA, 17 nt, Mus musculus
ucgaaauuacuuuuuag

SEQ ID NO: 2939 - RNA, 17 nt, Mus musculus
aaauuacuuuuuagccg

SEQ ID NO: 2940 - RNA, 17 nt, Mus musculus
aauuacuuuuuagccga

SEQ ID NO: 2941 - RNA, 17 nt, Mus musculus
auuacuuuuuagccgag

SEQ ID NO: 2942 - RNA, 17 nt, Mus musculus
uuacuuuuuagccgagg

SEQ ID NO: 2943 - RNA, 17 nt, Mus musculus
uacuuuuuagccgaggu

SEQ ID NO: 2944 - RNA, 17 nt, Mus musculus
gccgagguuaugauaac

SEQ ID NO: 2945 - RNA, 17 nt, Mus musculus
ccgagguuaugauaaca

SEQ ID NO: 2946 - RNA, 17 nt, Mus musculus
guuaugauaacaucuac

SEQ ID NO: 2947 - RNA, 17 nt, Mus musculus
gauaacaucuacuguau

SEQ ID NO: 2948 - RNA, 17 nt, Mus musculus
uaacaucuacuguaucc

SEQ ID NO: 2949 - RNA, 17 nt, Mus musculus
ucuacuguauccuuuag

SEQ ID NO: 2950 - RNA, 17 nt, Mus musculus
uacuguauccuuuagaa

SEQ ID NO: 2951 - RNA, 17 nt, Mus musculus
uguauccuuuagaauuu

SEQ ID NO: 2952 - RNA, 17 nt, Mus musculus
guauccuuuagaauuuu

SEQ ID NO: 2953 - RNA, 17 nt, Mus musculus
uauccuuuagaauuuua

SEQ ID NO: 2954 - RNA, 17 nt, Mus musculus
uuuagaauuuuaaccua

SEQ ID NO: 2955 - RNA, 17 nt, Mus musculus
uuagaauuuuaaccuau

SEQ ID NO: 2956 - RNA, 17 nt, Mus musculus
uagaauuuuaaccuaua

SEQ ID NO: 2957 - RNA, 17 nt, Mus musculus
agaauuuuaaccuauaa

SEQ ID NO: 2958 - RNA, 17 nt, Mus musculus
uuuaaccuauaaaacua

SEQ ID NO: 2959 - RNA, 17 nt, Mus musculus
uaaccuauaaaacuaug

SEQ ID NO: 2960 - RNA, 17 nt, Mus musculus
auaaaacuaugucuacu

SEQ ID NO: 2961 - RNA, 17 nt, Mus musculus
aacuaugucuacugguu

SEQ ID NO: 2962 - RNA, 17 nt, Mus musculus
cuaugucuacugguuuc

SEQ ID NO: 2963 - RNA, 17 nt, Mus musculus
cuacugguuucugccug

SEQ ID NO: 2964 - RNA, 17 nt, Mus musculus
uacugguuucugccugu

SEQ ID NO: 2965 - RNA, 17 nt, Mus musculus
acugguuucugccugug

SEQ ID NO: 2966 - RNA, 18 nt, Mus musculus
gggcccagacuguguccc

SEQ ID NO: 2967 - RNA, 18 nt, Mus musculus
ucccgcagccgggauaac

SEQ ID NO: 2968 - RNA, 18 nt, Mus musculus
ccuggcugacccgauucc

SEQ ID NO: 2969 - RNA, 18 nt, Mus musculus
cugacccgauuccgcgga

SEQ ID NO: 2970 - RNA, 18 nt, Mus musculus
ggacaccgcugacagccg

SEQ ID NO: 2971 - RNA, 18 nt, Mus musculus
gcugacagccgcggcugg

SEQ ID NO: 2972 - RNA, 18 nt, Mus musculus
agccgcggcuggagccag

SEQ ID NO: 2973 - RNA, 18 nt, Mus musculus
cuccccggucuugcgcug

SEQ ID NO: 2974 - RNA, 18 nt, Mus musculus
ccauaccgccucugugac

SEQ ID NO: 2975 - RNA, 18 nt, Mus musculus
gcuagcugucgcucugug

SEQ ID NO: 2976 - RNA, 18 nt, Mus musculus
ccgagccgccucuguggg

SEQ ID NO: 2977 - RNA, 18 nt, Mus musculus
cccuucagauuacuugca

SEQ ID NO: 2978 - RNA, 18 nt, Mus musculus
cuccacuguuuaugucua

SEQ ID NO: 2979 - RNA, 18 nt, Mus musculus
gauuacagaucaccauuc

SEQ ID NO: 2980 - RNA, 18 nt, Mus musculus
auccccugccgagggucg

SEQ ID NO: 2981 - RNA, 18 nt, Mus musculus
uguuccggauggaaacag

SEQ ID NO: 2982 - RNA, 18 nt, Mus musculus
ccuaucagucuaucaugu

SEQ ID NO: 2983 - RNA, 18 nt, Mus musculus
gcuaucugccggagaaaa

SEQ ID NO: 2984 - RNA, 18 nt, Mus musculus
guggacggaugaucaaga

SEQ ID NO: 2985 - RNA, 18 nt, Mus musculus
uuacccagcuccugauau

SEQ ID NO: 2986 - RNA, 18 nt, Mus musculus
caccccagaucggugaga

SEQ ID NO: 2987 - RNA, 18 nt, Mus musculus
augcacagucuacgccaa

SEQ ID NO: 2988 - RNA, 18 nt, Mus musculus
gaagccugcuccuacaga

SEQ ID NO: 2989 - RNA, 18 nt, Mus musculus
uccuacagacccggccaa

SEQ ID NO: 2990 - RNA, 18 nt, Mus musculus
augcccugauugaaggaa

SEQ ID NO: 2991 - RNA, 18 nt, Mus musculus
gcaaccugcugcccagcc

SEQ ID NO: 2992 - RNA, 18 nt, Mus musculus
accugcugcccagccaac

SEQ ID NO: 2993 - RNA, 18 nt, Mus musculus
ugucccuguugugcacug

SEQ ID NO: 2994 - RNA, 18 nt, Mus musculus
aacaucgguccacauggg

SEQ ID NO: 2995 - RNA, 18 nt, Mus musculus
cacaccaguuugcaagaa

SEQ ID NO: 2996 - RNA, 18 nt, Mus musculus
uugcucugcucaagauaa

SEQ ID NO: 2997 - RNA, 18 nt, Mus musculus
ucaaacagcucaucaucc

SEQ ID NO: 2998 - RNA, 18 nt, Mus musculus
ggaaccugacuauccgca

SEQ ID NO: 2999 - RNA, 18 nt, Mus musculus
uccuacggaccguuaagc

SEQ ID NO: 3000 - RNA, 18 nt, Mus musculus
ggauccagaugaauugcc

SEQ ID NO: 3001 - RNA, 18 nt, Mus musculus
gggaccggcugaaacuag

SEQ ID NO: 3002 - RNA, 18 nt, Mus musculus
ugaggcagacgcuuuugg

SEQ ID NO: 3003 - RNA, 18 nt, Mus musculus
ucugccagcucaggcuuu

SEQ ID NO: 3004 - RNA, 18 nt, Mus musculus
gacuucggcuuggcccgg

SEQ ID NO: 3005 - RNA, 18 nt, Mus musculus
agacccggauuaugucag

SEQ ID NO: 3006 - RNA, 18 nt, Mus musculus
gaugcccgacucccuuug

SEQ ID NO: 3007 - RNA, 18 nt, Mus musculus
ggcuccugacuacacuac

SEQ ID NO: 3008 - RNA, 18 nt, Mus musculus
cuggacugcuggcaugag

SEQ ID NO: 3009 - RNA, 18 nt, Mus musculus
ucucccugccuaccucac

SEQ ID NO: 3010 - RNA, 18 nt, Mus musculus
gaucccagaugacagcca

SEQ ID NO: 3011 - RNA, 18 nt, Mus musculus
ccaaccagaccaguggcu

SEQ ID NO: 3012 - RNA, 18 nt, Mus musculus
gcuaccagucuggguauc

SEQ ID NO: 3013 - RNA, 18 nt, Mus musculus
ucacucagaugacacaga

SEQ ID NO: 3014 - RNA, 18 nt, Mus musculus
ugcugcaguucacgcuga

SEQ ID NO: 3015 - RNA, 18 nt, Mus musculus
ucacgcugacucagggac

SEQ ID NO: 3016 - RNA, 18 nt, Mus musculus
cacugcagcucaccuccu

SEQ ID NO: 3017 - RNA, 18 nt, Mus musculus
accuccuguuuaaaugga

SEQ ID NO: 3018 - RNA, 18 nt, Mus musculus
ugguccugucccggcucc

SEQ ID NO: 3019 - RNA, 18 nt, Mus musculus
ugucccggcuccgccccc

SEQ ID NO: 3020 - RNA, 18 nt, Mus musculus
cggcuccgcccccaacuc

SEQ ID NO: 3021 - RNA, 18 nt, Mus musculus
aggugcugcuuagauuuu

SEQ ID NO: 3022 - RNA, 18 nt, Mus musculus
gaccucagacugcaagga

SEQ ID NO: 3023 - RNA, 18 nt, Mus musculus
gugcccugcuguggucuc

SEQ ID NO: 3024 - RNA, 18 nt, Mus musculus
ggacucuguccuccaaga

SEQ ID NO: 3025 - RNA, 18 nt, Mus musculus
cgagucugucuaccuugg

SEQ ID NO: 3026 - RNA, 18 nt, Mus musculus
gagagcgguuggagccug

SEQ ID NO: 3027 - RNA, 18 nt, Mus musculus
gccugcagaugcauugug

SEQ ID NO: 3028 - RNA, 18 nt, Mus musculus
aaaggcggccggcagggu

SEQ ID NO: 3029 - RNA, 18 nt, Mus musculus
cuucacagucggguuaca

SEQ ID NO: 3030 - RNA, 18 nt, Mus musculus
ccuuccggacucuuacgu

SEQ ID NO: 3031 - RNA, 18 nt, Mus musculus
ugaugcagcuugcuccuu

SEQ ID NO: 3032 - RNA, 18 nt, Mus musculus
ggcuccugacggggccga

SEQ ID NO: 3033 - RNA, 18 nt, Mus musculus
gguuucugcuggguggag

SEQ ID NO: 3034 - RNA, 18 nt, Mus musculus
gcuuccugauggcagaaa

SEQ ID NO: 3035 - RNA, 18 nt, Mus musculus
cuagccagauuucgaaau

SEQ ID NO: 3036 - RNA, 18 nt, Mus musculus
gguuucugccugugugcu

SEQ ID NO: 3037 - RNA, 17 nt, Mus musculus
ggccgcgucuugcucac

SEQ ID NO: 3038 - RNA, 17 nt, Mus musculus
ccgcgucuugcucacca

SEQ ID NO: 3039 - RNA, 17 nt, Mus musculus
gucuugcucaccauggu

SEQ ID NO: 3040 - RNA, 17 nt, Mus musculus
accauggucagcugcug

SEQ ID NO: 3041 - RNA, 17 nt, Mus musculus
accgcggucuugccuua

SEQ ID NO: 3042 - RNA, 17 nt, Mus musculus
cgcggucuugccuuacg

SEQ ID NO: 3043 - RNA, 17 nt, Mus musculus
ucuugccuuacgcgcug

SEQ ID NO: 3044 - RNA, 17 nt, Mus musculus
cuugccuuacgcgcugc

SEQ ID NO: 3045 - RNA, 17 nt, Mus musculus
gcgcugcucgggugucu

SEQ ID NO: 3046 - RNA, 17 nt, Mus musculus
ucgggugucugcuucuc

SEQ ID NO: 3047 - RNA, 17 nt, Mus musculus
cugcuucucacaggaua

SEQ ID NO: 3048 - RNA, 17 nt, Mus musculus
cacaggauauggcucag

SEQ ID NO: 3049 - RNA, 17 nt, Mus musculus
auauggcucagggucga

SEQ ID NO: 3050 - RNA, 17 nt, Mus musculus
cucagggucgaaguuaa

SEQ ID NO: 3051 - RNA, 17 nt, Mus musculus
gucgaaguuaaaagugc

SEQ ID NO: 3052 - RNA, 17 nt, Mus musculus
ucgaaguuaaaagugcc

SEQ ID NO: 3053 - RNA, 17 nt, Mus musculus
cagcaugucaugcaagc

SEQ ID NO: 3054 - RNA, 17 nt, Mus musculus
gccagacucucuuucuc

SEQ ID NO: 3055 - RNA, 17 nt, Mus musculus
cagacucucuuucucaa

SEQ ID NO: 3056 - RNA, 17 nt, Mus musculus
gacucucuuucucaagu

SEQ ID NO: 3057 - RNA, 17 nt, Mus musculus
acucucuuucucaagug

SEQ ID NO: 3058 - RNA, 17 nt, Mus musculus
cucucuuucucaagugc

SEQ ID NO: 3059 - RNA, 17 nt, Mus musculus
cucuuucucaagugcag

SEQ ID NO: 3060 - RNA, 17 nt, Mus musculus
agcccacucauggucuc

SEQ ID NO: 3061 - RNA, 17 nt, Mus musculus
cucauggucucugccca

SEQ ID NO: 3062 - RNA, 17 nt, Mus musculus
cauggucucugcccacg

SEQ ID NO: 3063 - RNA, 17 nt, Mus musculus
cugagcaucacuccccc

SEQ ID NO: 3064 - RNA, 17 nt, Mus musculus
gcaucacucccccaucg

SEQ ID NO: 3065 - RNA, 17 nt, Mus musculus
ucccccaucggccugug

SEQ ID NO: 3066 - RNA, 17 nt, Mus musculus
ggagggauaacaggcaa

SEQ ID NO: 3067 - RNA, 17 nt, Mus musculus
caggcaauucugcagca

SEQ ID NO: 3068 - RNA, 17 nt, Mus musculus
aggcaauucugcagcac

SEQ ID NO: 3069 - RNA, 17 nt, Mus musculus
cagcaccuugaccuugg

SEQ ID NO: 3070 - RNA, 17 nt, Mus musculus
cuugaccuuggacacgg

SEQ ID NO: 3071 - RNA, 17 nt, Mus musculus
acgggccucuacaccug

SEQ ID NO: 3072 - RNA, 17 nt, Mus musculus
gggccucuacaccugua

SEQ ID NO: 3073 - RNA, 17 nt, Mus musculus
acaccuguagauaccuc

SEQ ID NO: 3074 - RNA, 17 nt, Mus musculus
cuguagauaccucccua

SEQ ID NO: 3075 - RNA, 17 nt, Mus musculus
agauaccucccuacauc

SEQ ID NO: 3076 - RNA, 17 nt, Mus musculus
accucccuacaucuacu

SEQ ID NO: 3077 - RNA, 17 nt, Mus musculus
cccuacaucuacuucga

SEQ ID NO: 3078 - RNA, 17 nt, Mus musculus
cuacaucuacuucgaag

SEQ ID NO: 3079 - RNA, 17 nt, Mus musculus
caucuacuucgaagaaa

SEQ ID NO: 3080 - RNA, 17 nt, Mus musculus
aucuacuucgaagaaaa

SEQ ID NO: 3081 - RNA, 17 nt, Mus musculus
agcggaaucuucaaucu

SEQ ID NO: 3082 - RNA, 17 nt, Mus musculus
cggaaucuucaaucuac

SEQ ID NO: 3083 - RNA, 17 nt, Mus musculus
ggaaucuucaaucuaca

SEQ ID NO: 3084 - RNA, 17 nt, Mus musculus
ucuucaaucuacauauu

SEQ ID NO: 3085 - RNA, 17 nt, Mus musculus
uucaaucuacauauuug

SEQ ID NO: 3086 - RNA, 17 nt, Mus musculus
aucuacauauuuguuag

SEQ ID NO: 3087 - RNA, 17 nt, Mus musculus
cuacauauuuguuagug

SEQ ID NO: 3088 - RNA, 17 nt, Mus musculus
uacauauuuguuaguga

SEQ ID NO: 3089 - RNA, 17 nt, Mus musculus
auauuuguuagugaugc

SEQ ID NO: 3090 - RNA, 17 nt, Mus musculus
uauuuguuagugaugca

SEQ ID NO: 3091 - RNA, 17 nt, Mus musculus
cagggaguccuuucaua

SEQ ID NO: 3092 - RNA, 17 nt, Mus musculus
ggaguccuuucauagag

SEQ ID NO: 3093 - RNA, 17 nt, Mus musculus
gaguccuuucauagaga

SEQ ID NO: 3094 - RNA, 17 nt, Mus musculus
aguccuuucauagagau

SEQ ID NO: 3095 - RNA, 17 nt, Mus musculus
ccuuucauagagaugca

SEQ ID NO: 3096 - RNA, 17 nt, Mus musculus
acugacauacccaaacu

SEQ ID NO: 3097 - RNA, 17 nt, Mus musculus
cccaaacuugugcacau

SEQ ID NO: 3098 - RNA, 17 nt, Mus musculus
agacagcucaucauccc

SEQ ID NO: 3099 - RNA, 17 nt, Mus musculus
cagcucaucauccccug

SEQ ID NO: 3100 - RNA, 17 nt, Mus musculus
cucaucauccccugccg

SEQ ID NO: 3101 - RNA, 17 nt, Mus musculus
ggugacgucacccaacg

SEQ ID NO: 3102 - RNA, 17 nt, Mus musculus
cccaacgucacagucac

SEQ ID NO: 3103 - RNA, 17 nt, Mus musculus
gucacagucacccuaaa

SEQ ID NO: 3104 - RNA, 17 nt, Mus musculus
gucacccuaaaaaaguu

SEQ ID NO: 3105 - RNA, 17 nt, Mus musculus
aaaaaaguuuccauuug

SEQ ID NO: 3106 - RNA, 17 nt, Mus musculus
aaaaaguuuccauuuga

SEQ ID NO: 3107 - RNA, 17 nt, Mus musculus
aaaaguuuccauuugau

SEQ ID NO: 3108 - RNA, 17 nt, Mus musculus
guuuccauuugauacuc

SEQ ID NO: 3109 - RNA, 17 nt, Mus musculus
uuuccauuugauacucu

SEQ ID NO: 3110 - RNA, 17 nt, Mus musculus
cauuugauacucuuacc

SEQ ID NO: 3111 - RNA, 17 nt, Mus musculus
uugauacucuuaccccu

SEQ ID NO: 3112 - RNA, 17 nt, Mus musculus
gauacucuuaccccuga

SEQ ID NO: 3113 - RNA, 17 nt, Mus musculus
auacucuuaccccugau

SEQ ID NO: 3114 - RNA, 17 nt, Mus musculus
caaagaauaacauggga

SEQ ID NO: 3115 - RNA, 17 nt, Mus musculus
gggacaguaggagaggc

SEQ ID NO: 3116 - RNA, 17 nt, Mus musculus
gagaggcuuuauaauag

SEQ ID NO: 3117 - RNA, 17 nt, Mus musculus
agaggcuuuauaauagc

SEQ ID NO: 3118 - RNA, 17 nt, Mus musculus
gaggcuuuauaauagca

SEQ ID NO: 3119 - RNA, 17 nt, Mus musculus
ggcuuuauaauagcaaa

SEQ ID NO: 3120 - RNA, 17 nt, Mus musculus
uuuauaauagcaaaugc

SEQ ID NO: 3121 - RNA, 17 nt, Mus musculus
ugcaacguacaaagaga

SEQ ID NO: 3122 - RNA, 17 nt, Mus musculus
aaagagauaggacugcu

SEQ ID NO: 3123 - RNA, 17 nt, Mus musculus
gccaccgucaacgggca

SEQ ID NO: 3124 - RNA, 17 nt, Mus musculus
gcaccuguaccagacaa

SEQ ID NO: 3125 - RNA, 17 nt, Mus musculus
gacaaacuaucugaccc

SEQ ID NO: 3126 - RNA, 17 nt, Mus musculus
caaacuaucugacccau

SEQ ID NO: 3127 - RNA, 17 nt, Mus musculus
ugacccaucggcagacc

SEQ ID NO: 3128 - RNA, 17 nt, Mus musculus
agaccaauacaauccua

SEQ ID NO: 3129 - RNA, 17 nt, Mus musculus
aauacaauccuagaugu

SEQ ID NO: 3130 - RNA, 17 nt, Mus musculus
acaauccuagaugucca

SEQ ID NO: 3131 - RNA, 17 nt, Mus musculus
cuagauguccaaauacg

SEQ ID NO: 3132 - RNA, 17 nt, Mus musculus
guccaaauacgcccgcc

SEQ ID NO: 3133 - RNA, 17 nt, Mus musculus
agacugcuccacgggca

SEQ ID NO: 3134 - RNA, 17 nt, Mus musculus
ggcagacucuuguccuc

SEQ ID NO: 3135 - RNA, 17 nt, Mus musculus
cagacucuuguccucaa

SEQ ID NO: 3136 - RNA, 17 nt, Mus musculus
acucuuguccucaacug

SEQ ID NO: 3137 - RNA, 17 nt, Mus musculus
cuuguccucaacugcac

SEQ ID NO: 3138 - RNA, 17 nt, Mus musculus
acggagcucaauacgag

SEQ ID NO: 3139 - RNA, 17 nt, Mus musculus
agcucaauacgagggug

SEQ ID NO: 3140 - RNA, 17 nt, Mus musculus
gcuggaauuacccuggu

SEQ ID NO: 3141 - RNA, 17 nt, Mus musculus
cuggaauuacccuggua

SEQ ID NO: 3142 - RNA, 17 nt, Mus musculus
acccugguaaagcaacu

SEQ ID NO: 3143 - RNA, 17 nt, Mus musculus
aagcaacuaagagagca

SEQ ID NO: 3144 - RNA, 17 nt, Mus musculus
gagagcaucuauaaggc

SEQ ID NO: 3145 - RNA, 17 nt, Mus musculus
gagcaucuauaaggcag

SEQ ID NO: 3146 - RNA, 17 nt, Mus musculus
gcaucuauaaggcagcg

SEQ ID NO: 3147 - RNA, 17 nt, Mus musculus
cagcggauugaccggag

SEQ ID NO: 3148 - RNA, 17 nt, Mus musculus
ggagccauucccacaac

SEQ ID NO: 3149 - RNA, 17 nt, Mus musculus
gagccauucccacaaca

SEQ ID NO: 3150 - RNA, 17 nt, Mus musculus
caauguguuccacagug

SEQ ID NO: 3151 - RNA, 17 nt, Mus musculus
aauguguuccacagugu

SEQ ID NO: 3152 - RNA, 17 nt, Mus musculus
cacaguguucuuaagau

SEQ ID NO: 3153 - RNA, 17 nt, Mus musculus
acaguguucuuaagauc

SEQ ID NO: 3154 - RNA, 17 nt, Mus musculus
aguguucuuaagaucaa

SEQ ID NO: 3155 - RNA, 17 nt, Mus musculus
guguucuuaagaucaac

SEQ ID NO: 3156 - RNA, 17 nt, Mus musculus
cuuaagaucaacaaugu

SEQ ID NO: 3157 - RNA, 17 nt, Mus musculus
aaggggcucuacaccug

SEQ ID NO: 3158 - RNA, 17 nt, Mus musculus
ggggcucuacaccuguc

SEQ ID NO: 3159 - RNA, 17 nt, Mus musculus
acaccugucgcgugaag

SEQ ID NO: 3160 - RNA, 17 nt, Mus musculus
gaguggguccucguucc

SEQ ID NO: 3161 - RNA, 17 nt, Mus musculus
uggguccucguuccagu

SEQ ID NO: 3162 - RNA, 17 nt, Mus musculus
guccucguuccagucuu

SEQ ID NO: 3163 - RNA, 17 nt, Mus musculus
uccucguuccagucuuu

SEQ ID NO: 3164 - RNA, 17 nt, Mus musculus
guuccagucuuucaaca

SEQ ID NO: 3165 - RNA, 17 nt, Mus musculus
uccagucuuucaacacc

SEQ ID NO: 3166 - RNA, 17 nt, Mus musculus
ccagucuuucaacaccu

SEQ ID NO: 3167 - RNA, 17 nt, Mus musculus
cagucuuucaacaccuc

SEQ ID NO: 3168 - RNA, 17 nt, Mus musculus
caacaccuccgugcaug

SEQ ID NO: 3169 - RNA, 17 nt, Mus musculus
gcauguguaugaaaaag

SEQ ID NO: 3170 - RNA, 17 nt, Mus musculus
aaaaggauucaucagug

SEQ ID NO: 3171 - RNA, 17 nt, Mus musculus
aaaggauucaucagugu

SEQ ID NO: 3172 - RNA, 17 nt, Mus musculus
ggauucaucagugugaa

SEQ ID NO: 3173 - RNA, 17 nt, Mus musculus
ugaaacaucggaagcag

SEQ ID NO: 3174 - RNA, 17 nt, Mus musculus
aagacgguccuaucggc

SEQ ID NO: 3175 - RNA, 17 nt, Mus musculus
acgguccuaucggcugu

SEQ ID NO: 3176 - RNA, 17 nt, Mus musculus
gguccuaucggcugucc

SEQ ID NO: 3177 - RNA, 17 nt, Mus musculus
ucggcuguccaugaaag

SEQ ID NO: 3178 - RNA, 17 nt, Mus musculus
gaaggccuuccccuccc

SEQ ID NO: 3179 - RNA, 17 nt, Mus musculus
aaggccuuccccucccc

SEQ ID NO: 3180 - RNA, 17 nt, Mus musculus
cuuccccuccccagaaa

SEQ ID NO: 3181 - RNA, 17 nt, Mus musculus
ccagaaaucguaugguu

SEQ ID NO: 3182 - RNA, 17 nt, Mus musculus
gaaaucguaugguuaaa

SEQ ID NO: 3183 - RNA, 17 nt, Mus musculus
cguaugguuaaaagaug

SEQ ID NO: 3184 - RNA, 17 nt, Mus musculus
agauggcucgccugcaa

SEQ ID NO: 3185 - RNA, 17 nt, Mus musculus
ugcaacauugaagucug

SEQ ID NO: 3186 - RNA, 17 nt, Mus musculus
auugaagucugcucgcu

SEQ ID NO: 3187 - RNA, 17 nt, Mus musculus
agucugcucgcuauuug

SEQ ID NO: 3188 - RNA, 17 nt, Mus musculus
ugcucgcuauuugguac

SEQ ID NO: 3189 - RNA, 17 nt, Mus musculus
cucgcuauuugguacau

SEQ ID NO: 3190 - RNA, 17 nt, Mus musculus
ucgcuauuugguacaug

SEQ ID NO: 3191 - RNA, 17 nt, Mus musculus
uauuugguacauggcua

SEQ ID NO: 3192 - RNA, 17 nt, Mus musculus
acauggcuacucauuaa

SEQ ID NO: 3193 - RNA, 17 nt, Mus musculus
uggcuacucauuaauua

SEQ ID NO: 3194 - RNA, 17 nt, Mus musculus
cuacucauuaauuauca

SEQ ID NO: 3195 - RNA, 17 nt, Mus musculus
uacucauuaauuaucaa

SEQ ID NO: 3196 - RNA, 17 nt, Mus musculus
ucauuaauuaucaaaga

SEQ ID NO: 3197 - RNA, 17 nt, Mus musculus
cauuaauuaucaaagau

SEQ ID NO: 3198 - RNA, 17 nt, Mus musculus
uuaauuaucaaagaugu

SEQ ID NO: 3199 - RNA, 17 nt, Mus musculus
aggggacuauacgaucu

SEQ ID NO: 3200 - RNA, 17 nt, Mus musculus
gggacuauacgaucuug

SEQ ID NO: 3201 - RNA, 17 nt, Mus musculus
uauacgaucuugcuggg

SEQ ID NO: 3202 - RNA, 17 nt, Mus musculus
uacgaucuugcugggca

SEQ ID NO: 3203 - RNA, 17 nt, Mus musculus
cugggcauaaagcaguc

SEQ ID NO: 3204 - RNA, 17 nt, Mus musculus
aaagcagucaaggcuau

SEQ ID NO: 3205 - RNA, 17 nt, Mus musculus
ucaaggcuauuuaaaaa

SEQ ID NO: 3206 - RNA, 17 nt, Mus musculus
aaggcuauuuaaaaacc

SEQ ID NO: 3207 - RNA, 17 nt, Mus musculus
aggcuauuuaaaaaccu

SEQ ID NO: 3208 - RNA, 17 nt, Mus musculus
ggcuauuuaaaaaccuc

SEQ ID NO: 3209 - RNA, 17 nt, Mus musculus
cugccacucucauugua

SEQ ID NO: 3210 - RNA, 17 nt, Mus musculus
gccacucucauuguaaa

SEQ ID NO: 3211 - RNA, 17 nt, Mus musculus
acucucauuguaaacgu

SEQ ID NO: 3212 - RNA, 17 nt, Mus musculus
cucauuguaaacgugaa

SEQ ID NO: 3213 - RNA, 17 nt, Mus musculus
ugaaaccucagaucuac

SEQ ID NO: 3214 - RNA, 17 nt, Mus musculus
ccucagaucuacgaaaa

SEQ ID NO: 3215 - RNA, 17 nt, Mus musculus
ucagaucuacgaaaagu

SEQ ID NO: 3216 - RNA, 17 nt, Mus musculus
cgaaaaguccguguccu

SEQ ID NO: 3217 - RNA, 17 nt, Mus musculus
guccguguccucgcuuc

SEQ ID NO: 3218 - RNA, 17 nt, Mus musculus
cguguccucgcuuccaa

SEQ ID NO: 3219 - RNA, 17 nt, Mus musculus
uccucgcuuccaagccc

SEQ ID NO: 3220 - RNA, 17 nt, Mus musculus
ccucgcuuccaagccca

SEQ ID NO: 3221 - RNA, 17 nt, Mus musculus
gcccaccucucuauccg

SEQ ID NO: 3222 - RNA, 17 nt, Mus musculus
ccaccucucuauccgcu

SEQ ID NO: 3223 - RNA, 17 nt, Mus musculus
accucucuauccgcugg

SEQ ID NO: 3224 - RNA, 17 nt, Mus musculus
cucucuauccgcugggc

SEQ ID NO: 3225 - RNA, 17 nt, Mus musculus
agacaaguccucacuug

SEQ ID NO: 3226 - RNA, 17 nt, Mus musculus
caaguccucacuugcac

SEQ ID NO: 3227 - RNA, 17 nt, Mus musculus
uccucacuugcaccgug

SEQ ID NO: 3228 - RNA, 17 nt, Mus musculus
caccguguauggcaucc

SEQ ID NO: 3229 - RNA, 17 nt, Mus musculus
uauggcaucccucggcc

SEQ ID NO: 3230 - RNA, 17 nt, Mus musculus
gcaucccucggccaaca

SEQ ID NO: 3231 - RNA, 17 nt, Mus musculus
ccaacaaucacguggcu

SEQ ID NO: 3232 - RNA, 17 nt, Mus musculus
acguggcucuggcaccc

SEQ ID NO: 3233 - RNA, 17 nt, Mus musculus
accccugucaccacaau

SEQ ID NO: 3234 - RNA, 17 nt, Mus musculus
accacaaucacuccaaa

SEQ ID NO: 3235 - RNA, 17 nt, Mus musculus
caaucacuccaaagaaa

SEQ ID NO: 3236 - RNA, 17 nt, Mus musculus
agaaagguaugacuucu

SEQ ID NO: 3237 - RNA, 17 nt, Mus musculus
guaugacuucugcacug

SEQ ID NO: 3238 - RNA, 17 nt, Mus musculus
uaugacuucugcacuga

SEQ ID NO: 3239 - RNA, 17 nt, Mus musculus
ugaagaauccuuuaucc

SEQ ID NO: 3240 - RNA, 17 nt, Mus musculus
agaauccuuuauccugg

SEQ ID NO: 3241 - RNA, 17 nt, Mus musculus
gaauccuuuauccugga

SEQ ID NO: 3242 - RNA, 17 nt, Mus musculus
aauccuuuauccuggau

SEQ ID NO: 3243 - RNA, 17 nt, Mus musculus
uccuuuauccuggaucc

SEQ ID NO: 3244 - RNA, 17 nt, Mus musculus
uccuggaucccagcagc

SEQ ID NO: 3245 - RNA, 17 nt, Mus musculus
cagcaacuuaggaaaca

SEQ ID NO: 3246 - RNA, 17 nt, Mus musculus
agcaacuuaggaaacag

SEQ ID NO: 3247 - RNA, 17 nt, Mus musculus
gagagcaucucucagcg

SEQ ID NO: 3248 - RNA, 17 nt, Mus musculus
gagcaucucucagcgca

SEQ ID NO: 3249 - RNA, 17 nt, Mus musculus
gcaucucucagcgcaug

SEQ ID NO: 3250 - RNA, 17 nt, Mus musculus
augacggucauagaagg

SEQ ID NO: 3251 - RNA, 17 nt, Mus musculus
acggucauagaaggaac

SEQ ID NO: 3252 - RNA, 17 nt, Mus musculus
gaacaaauaagacgguu

SEQ ID NO: 3253 - RNA, 17 nt, Mus musculus
aagacgguuagcacauu

SEQ ID NO: 3254 - RNA, 17 nt, Mus musculus
agacgguuagcacauug

SEQ ID NO: 3255 - RNA, 17 nt, Mus musculus
uagcacauugguggugg

SEQ ID NO: 3256 - RNA, 17 nt, Mus musculus
ggcugacucucagaccc

SEQ ID NO: 3257 - RNA, 17 nt, Mus musculus
cugacucucagaccccu

SEQ ID NO: 3258 - RNA, 17 nt, Mus musculus
ccuggaaucuacagcug

SEQ ID NO: 3259 - RNA, 17 nt, Mus musculus
uggaaucuacagcugcc

SEQ ID NO: 3260 - RNA, 17 nt, Mus musculus
ccgggccuucaauaaaa

SEQ ID NO: 3261 - RNA, 17 nt, Mus musculus
cgggccuucaauaaaau

SEQ ID NO: 3262 - RNA, 17 nt, Mus musculus
ccuucaauaaaauaggg

SEQ ID NO: 3263 - RNA, 17 nt, Mus musculus
aauaaaauagggacugu

SEQ ID NO: 3264 - RNA, 17 nt, Mus musculus
agaaacauaaaauuuua

SEQ ID NO: 3265 - RNA, 17 nt, Mus musculus
cauaaaauuuuauguca

SEQ ID NO: 3266 - RNA, 17 nt, Mus musculus
auaaaauuuuaugucac

SEQ ID NO: 3267 - RNA, 17 nt, Mus musculus
uaaaauuuuaugucaca

SEQ ID NO: 3268 - RNA, 17 nt, Mus musculus
aaaauuuuaugucacag

SEQ ID NO: 3269 - RNA, 17 nt, Mus musculus
uuuuaugucacagaugu

SEQ ID NO: 3270 - RNA, 17 nt, Mus musculus
gaauggcuuucacguuu

SEQ ID NO: 3271 - RNA, 17 nt, Mus musculus
aauggcuuucacguuuc

SEQ ID NO: 3272 - RNA, 17 nt, Mus musculus
auggcuuucacguuucc

SEQ ID NO: 3273 - RNA, 17 nt, Mus musculus
uuucacguuuccuugga

SEQ ID NO: 3274 - RNA, 17 nt, Mus musculus
uucacguuuccuuggaa

SEQ ID NO: 3275 - RNA, 17 nt, Mus musculus
ucacguuuccuuggaaa

SEQ ID NO: 3276 - RNA, 17 nt, Mus musculus
cguuuccuuggaaaaga

SEQ ID NO: 3277 - RNA, 17 nt, Mus musculus
gaaacuguccugugugg

SEQ ID NO: 3278 - RNA, 17 nt, Mus musculus
uguguggucaauaaauu

SEQ ID NO: 3279 - RNA, 17 nt, Mus musculus
uggucaauaaauuccug

SEQ ID NO: 3280 - RNA, 17 nt, Mus musculus
caauaaauuccuguaca

SEQ ID NO: 3281 - RNA, 17 nt, Mus musculus
aauaaauuccuguacag

SEQ ID NO: 3282 - RNA, 17 nt, Mus musculus
auuccuguacagagaca

SEQ ID NO: 3283 - RNA, 17 nt, Mus musculus
agagacauuaccuggau

SEQ ID NO: 3284 - RNA, 17 nt, Mus musculus
gagacauuaccuggauu

SEQ ID NO: 3285 - RNA, 17 nt, Mus musculus
accuggauucugcuacg

SEQ ID NO: 3286 - RNA, 17 nt, Mus musculus
ccuggauucugcuacgg

SEQ ID NO: 3287 - RNA, 17 nt, Mus musculus
auucugcuacggacagu

SEQ ID NO: 3288 - RNA, 17 nt, Mus musculus
cggacaguuaacaacag

SEQ ID NO: 3289 - RNA, 17 nt, Mus musculus
ggacaguuaacaacaga

SEQ ID NO: 3290 - RNA, 17 nt, Mus musculus
ugcaccauaguaucagc

SEQ ID NO: 3291 - RNA, 17 nt, Mus musculus
accauaguaucagcaag

SEQ ID NO: 3292 - RNA, 17 nt, Mus musculus
cauaguaucagcaagca

SEQ ID NO: 3293 - RNA, 17 nt, Mus musculus
ccaccacucaagauuac

SEQ ID NO: 3294 - RNA, 17 nt, Mus musculus
cucaagauuacuccauc

SEQ ID NO: 3295 - RNA, 17 nt, Mus musculus
ucaagauuacuccauca

SEQ ID NO: 3296 - RNA, 17 nt, Mus musculus
agauuacuccaucacuc

SEQ ID NO: 3297 - RNA, 17 nt, Mus musculus
uacuccaucacucugaa

SEQ ID NO: 3298 - RNA, 17 nt, Mus musculus
ccaucacucugaaccuu

SEQ ID NO: 3299 - RNA, 17 nt, Mus musculus
cugaaccuugucaucaa

SEQ ID NO: 3300 - RNA, 17 nt, Mus musculus
aaccuugucaucaagaa

SEQ ID NO: 3301 - RNA, 17 nt, Mus musculus
cuugucaucaagaacgu

SEQ ID NO: 3302 - RNA, 17 nt, Mus musculus
gaacgugucucuagaag

SEQ ID NO: 3303 - RNA, 17 nt, Mus musculus
acgugucucuagaagac

SEQ ID NO: 3304 - RNA, 17 nt, Mus musculus
gugucucuagaagacuc

SEQ ID NO: 3305 - RNA, 17 nt, Mus musculus
agaagacucgggcaccu

SEQ ID NO: 3306 - RNA, 17 nt, Mus musculus
gggcaccuaugcgugca

SEQ ID NO: 3307 - RNA, 17 nt, Mus musculus
aggaacauauacacagg

SEQ ID NO: 3308 - RNA, 17 nt, Mus musculus
gaacauauacacagggg

SEQ ID NO: 3309 - RNA, 17 nt, Mus musculus
gaagacauccuucggaa

SEQ ID NO: 3310 - RNA, 17 nt, Mus musculus
gacauccuucggaagac

SEQ ID NO: 3311 - RNA, 17 nt, Mus musculus
acauccuucggaagaca

SEQ ID NO: 3312 - RNA, 17 nt, Mus musculus
acagaaguucucguuag

SEQ ID NO: 3313 - RNA, 17 nt, Mus musculus
cagaaguucucguuaga

SEQ ID NO: 3314 - RNA, 17 nt, Mus musculus
gaaguucucguuagaga

SEQ ID NO: 3315 - RNA, 17 nt, Mus musculus
guucucguuagagauuc

SEQ ID NO: 3316 - RNA, 17 nt, Mus musculus
uucucguuagagauucg

SEQ ID NO: 3317 - RNA, 17 nt, Mus musculus
uuagagauucggaagcg

SEQ ID NO: 3318 - RNA, 17 nt, Mus musculus
uagagauucggaagcgc

SEQ ID NO: 3319 - RNA, 17 nt, Mus musculus
caccugcuucaaaaccu

SEQ ID NO: 3320 - RNA, 17 nt, Mus musculus
accugcuucaaaaccuc

SEQ ID NO: 3321 - RNA, 17 nt, Mus musculus
caaaaccucagugacua

SEQ ID NO: 3322 - RNA, 17 nt, Mus musculus
cagugacuacgaggucu

SEQ ID NO: 3323 - RNA, 17 nt, Mus musculus
uacgaggucuccaucag

SEQ ID NO: 3324 - RNA, 17 nt, Mus musculus
cgaggucuccaucagug

SEQ ID NO: 3325 - RNA, 17 nt, Mus musculus
gucuccaucaguggcuc

SEQ ID NO: 3326 - RNA, 17 nt, Mus musculus
caguggcucuacgaccu

SEQ ID NO: 3327 - RNA, 17 nt, Mus musculus
guggcucuacgaccuua

SEQ ID NO: 3328 - RNA, 17 nt, Mus musculus
uacgaccuuagacuguc

SEQ ID NO: 3329 - RNA, 17 nt, Mus musculus
acgaccuuagacuguca

SEQ ID NO: 3330 - RNA, 17 nt, Mus musculus
uagacugucaagcuaga

SEQ ID NO: 3331 - RNA, 17 nt, Mus musculus
gucaagcuagagguguc

SEQ ID NO: 3332 - RNA, 17 nt, Mus musculus
agagguguccccgcgcc

SEQ ID NO: 3333 - RNA, 17 nt, Mus musculus
ccgcgccucagaucacu

SEQ ID NO: 3334 - RNA, 17 nt, Mus musculus
agaucacuugguucaaa

SEQ ID NO: 3335 - RNA, 17 nt, Mus musculus
cacuugguucaaaaaca

SEQ ID NO: 3336 - RNA, 17 nt, Mus musculus
acuugguucaaaaacaa

SEQ ID NO: 3337 - RNA, 17 nt, Mus musculus
ccgggaauuauuuuagg

SEQ ID NO: 3338 - RNA, 17 nt, Mus musculus
cgggaauuauuuuagga

SEQ ID NO: 3339 - RNA, 17 nt, Mus musculus
gaaagagucacagagga

SEQ ID NO: 3340 - RNA, 17 nt, Mus musculus
gagggugucuauaggug

SEQ ID NO: 3341 - RNA, 17 nt, Mus musculus
gggugucuauaggugcc

SEQ ID NO: 3342 - RNA, 17 nt, Mus musculus
gugucuauaggugccga

SEQ ID NO: 3343 - RNA, 17 nt, Mus musculus
cgcagccuaccucaccg

SEQ ID NO: 3344 - RNA, 17 nt, Mus musculus
gccuaccucaccgugca

SEQ ID NO: 3345 - RNA, 17 nt, Mus musculus
aggaaccucagacaagu

SEQ ID NO: 3346 - RNA, 17 nt, Mus musculus
agacaagucaaaccugg

SEQ ID NO: 3347 - RNA, 17 nt, Mus musculus
gagcugaucacgcucac

SEQ ID NO: 3348 - RNA, 17 nt, Mus musculus
aucacgcucacgugcac

SEQ ID NO: 3349 - RNA, 17 nt, Mus musculus
gcgacccucuuuuggcu

SEQ ID NO: 3350 - RNA, 17 nt, Mus musculus
gacccucuuuuggcucc

SEQ ID NO: 3351 - RNA, 17 nt, Mus musculus
acccucuuuuggcuccu

SEQ ID NO: 3352 - RNA, 17 nt, Mus musculus
cccucuuuuggcuccuu

SEQ ID NO: 3353 - RNA, 17 nt, Mus musculus
uuuuggcuccuucuaac

SEQ ID NO: 3354 - RNA, 17 nt, Mus musculus
uggcuccuucuaacucu

SEQ ID NO: 3355 - RNA, 17 nt, Mus musculus
ggcuccuucuaacucuc

SEQ ID NO: 3356 - RNA, 17 nt, Mus musculus
cuccuucuaacucucuu

SEQ ID NO: 3357 - RNA, 17 nt, Mus musculus
uucuaacucucuucauc

SEQ ID NO: 3358 - RNA, 17 nt, Mus musculus
cuaacucucuucaucag

SEQ ID NO: 3359 - RNA, 17 nt, Mus musculus
aacucucuucaucagaa

SEQ ID NO: 3360 - RNA, 17 nt, Mus musculus
acucucuucaucagaaa

SEQ ID NO: 3361 - RNA, 17 nt, Mus musculus
cucuucaucagaaaacu

SEQ ID NO: 3362 - RNA, 17 nt, Mus musculus
gaagcggucuucuuccg

SEQ ID NO: 3363 - RNA, 17 nt, Mus musculus
agcggucuucuuccgaa

SEQ ID NO: 3364 - RNA, 17 nt, Mus musculus
gcggucuucuuccgaag

SEQ ID NO: 3365 - RNA, 17 nt, Mus musculus
ggucuucuuccgaagua

SEQ ID NO: 3366 - RNA, 17 nt, Mus musculus
gucuucuuccgaaguaa

SEQ ID NO: 3367 - RNA, 17 nt, Mus musculus
uccgaaguaaagacaga

SEQ ID NO: 3368 - RNA, 17 nt, Mus musculus
gacagacuaccugucaa

SEQ ID NO: 3369 - RNA, 17 nt, Mus musculus
cuaccugucaaucauua

SEQ ID NO: 3370 - RNA, 17 nt, Mus musculus
cugucaaucauuaugga

SEQ ID NO: 3371 - RNA, 17 nt, Mus musculus
ucaaucauuauggaccc

SEQ ID NO: 3372 - RNA, 17 nt, Mus musculus
caaucauuauggaccca

SEQ ID NO: 3373 - RNA, 17 nt, Mus musculus
gaugaaguuccccugga

SEQ ID NO: 3374 - RNA, 17 nt, Mus musculus
augaaguuccccuggau

SEQ ID NO: 3375 - RNA, 17 nt, Mus musculus
gcugcccuaugaugcca

SEQ ID NO: 3376 - RNA, 17 nt, Mus musculus
gugggaguuugcacggg

SEQ ID NO: 3377 - RNA, 17 nt, Mus musculus
ugggaguuugcacggga

SEQ ID NO: 3378 - RNA, 17 nt, Mus musculus
cugaaacuaggcaaauc

SEQ ID NO: 3379 - RNA, 17 nt, Mus musculus
aggcaaaucgcucggaa

SEQ ID NO: 3380 - RNA, 17 nt, Mus musculus
aaaucgcucggaagagg

SEQ ID NO: 3381 - RNA, 17 nt, Mus musculus
gaggggcuuuugggaaa

SEQ ID NO: 3382 - RNA, 17 nt, Mus musculus
aggggcuuuugggaaag

SEQ ID NO: 3383 - RNA, 17 nt, Mus musculus
ggggcuuuugggaaagu

SEQ ID NO: 3384 - RNA, 17 nt, Mus musculus
gggaaagucguucaagc

SEQ ID NO: 3385 - RNA, 17 nt, Mus musculus
aaagucguucaagccuc

SEQ ID NO: 3386 - RNA, 17 nt, Mus musculus
aagucguucaagccucu

SEQ ID NO: 3387 - RNA, 17 nt, Mus musculus
ucaagccucugcauuug

SEQ ID NO: 3388 - RNA, 17 nt, Mus musculus
cucugcauuuggcauua

SEQ ID NO: 3389 - RNA, 17 nt, Mus musculus
ucugcauuuggcauuaa

SEQ ID NO: 3390 - RNA, 17 nt, Mus musculus
uaagaaaucacccaccu

SEQ ID NO: 3391 - RNA, 17 nt, Mus musculus
gaagauguugaaagagg

SEQ ID NO: 3392 - RNA, 17 nt, Mus musculus
cagugaguacaaagcuc

SEQ ID NO: 3393 - RNA, 17 nt, Mus musculus
acaaagcucugaugacc

SEQ ID NO: 3394 - RNA, 17 nt, Mus musculus
accgaacucaagaucuu

SEQ ID NO: 3395 - RNA, 17 nt, Mus musculus
cucaagaucuugaccca

SEQ ID NO: 3396 - RNA, 17 nt, Mus musculus
caagaucuugacccaca

SEQ ID NO: 3397 - RNA, 17 nt, Mus musculus
acccacaucggccauca

SEQ ID NO: 3398 - RNA, 17 nt, Mus musculus
ucggccaucaucugaau

SEQ ID NO: 3399 - RNA, 17 nt, Mus musculus
gccaucaucugaaugug

SEQ ID NO: 3400 - RNA, 17 nt, Mus musculus
aaugugguuaaccuccu

SEQ ID NO: 3401 - RNA, 17 nt, Mus musculus
augugguuaaccuccug

SEQ ID NO: 3402 - RNA, 17 nt, Mus musculus
guuaaccuccugggagc

SEQ ID NO: 3403 - RNA, 17 nt, Mus musculus
auggugaucguggaaua

SEQ ID NO: 3404 - RNA, 17 nt, Mus musculus
cguggaauacugcaaau

SEQ ID NO: 3405 - RNA, 17 nt, Mus musculus
cugcaaauacggaaacc

SEQ ID NO: 3406 - RNA, 17 nt, Mus musculus
aaaccuguccaacuacc

SEQ ID NO: 3407 - RNA, 17 nt, Mus musculus
guccaacuaccucaaga

SEQ ID NO: 3408 - RNA, 17 nt, Mus musculus
acgugacuuauucuguc

SEQ ID NO: 3409 - RNA, 17 nt, Mus musculus
cgugacuuauucugucu

SEQ ID NO: 3410 - RNA, 17 nt, Mus musculus
ugacuuauucugucuca

SEQ ID NO: 3411 - RNA, 17 nt, Mus musculus
gacuuauucugucucaa

SEQ ID NO: 3412 - RNA, 17 nt, Mus musculus
uauucugucucaacaag

SEQ ID NO: 3413 - RNA, 17 nt, Mus musculus
uucugucucaacaagga

SEQ ID NO: 3414 - RNA, 17 nt, Mus musculus
cgcagccuugcauaugg

SEQ ID NO: 3415 - RNA, 17 nt, Mus musculus
ccuugcauauggagcuc

SEQ ID NO: 3416 - RNA, 17 nt, Mus musculus
auggagcucaagaaaga

SEQ ID NO: 3417 - RNA, 17 nt, Mus musculus
ccccgccuagacagugu

SEQ ID NO: 3418 - RNA, 17 nt, Mus musculus
gacagugucagcagcuc

SEQ ID NO: 3419 - RNA, 17 nt, Mus musculus
cagcagcucaaguguca

SEQ ID NO: 3420 - RNA, 17 nt, Mus musculus
ucaagugucaccagcuc

SEQ ID NO: 3421 - RNA, 17 nt, Mus musculus
caccagcuccagcuucc

SEQ ID NO: 3422 - RNA, 17 nt, Mus musculus
cuccagcuucccugaag

SEQ ID NO: 3423 - RNA, 17 nt, Mus musculus
uccagcuucccugaaga

SEQ ID NO: 3424 - RNA, 17 nt, Mus musculus
acgaggauuacagugag

SEQ ID NO: 3425 - RNA, 17 nt, Mus musculus
cgaggauuacagugaga

SEQ ID NO: 3426 - RNA, 17 nt, Mus musculus
agugagaucuccaagca

SEQ ID NO: 3427 - RNA, 17 nt, Mus musculus
ugagaucuccaagcagc

SEQ ID NO: 3428 - RNA, 17 nt, Mus musculus
cagccccucaccaugga

SEQ ID NO: 3429 - RNA, 17 nt, Mus musculus
gaccugauuuccuacag

SEQ ID NO: 3430 - RNA, 17 nt, Mus musculus
accugauuuccuacagu

SEQ ID NO: 3431 - RNA, 17 nt, Mus musculus
ccugauuuccuacaguu

SEQ ID NO: 3432 - RNA, 17 nt, Mus musculus
gauuuccuacaguuucc

SEQ ID NO: 3433 - RNA, 17 nt, Mus musculus
ccuacaguuuccaagug

SEQ ID NO: 3434 - RNA, 17 nt, Mus musculus
cuacaguuuccaagugg

SEQ ID NO: 3435 - RNA, 17 nt, Mus musculus
uacaguuuccaaguggc

SEQ ID NO: 3436 - RNA, 17 nt, Mus musculus
cauggaguuucuguccu

SEQ ID NO: 3437 - RNA, 17 nt, Mus musculus
auggaguuucuguccuc

SEQ ID NO: 3438 - RNA, 17 nt, Mus musculus
uggaguuucuguccucc

SEQ ID NO: 3439 - RNA, 17 nt, Mus musculus
guuucuguccuccagaa

SEQ ID NO: 3440 - RNA, 17 nt, Mus musculus
ucuguccuccagaaagu

SEQ ID NO: 3441 - RNA, 17 nt, Mus musculus
agaaacauccuuuuauc

SEQ ID NO: 3442 - RNA, 17 nt, Mus musculus
aacauccuuuuaucuga

SEQ ID NO: 3443 - RNA, 17 nt, Mus musculus
acauccuuuuaucugag

SEQ ID NO: 3444 - RNA, 17 nt, Mus musculus
cauccuuuuaucugaga

SEQ ID NO: 3445 - RNA, 17 nt, Mus musculus
auccuuuuaucugagaa

SEQ ID NO: 3446 - RNA, 17 nt, Mus musculus
ccuuuuaucugagaaca

SEQ ID NO: 3447 - RNA, 17 nt, Mus musculus
gugaagauuugcgacuu

SEQ ID NO: 3448 - RNA, 17 nt, Mus musculus
ugaagauuugcgacuuu

SEQ ID NO: 3449 - RNA, 17 nt, Mus musculus
uugcgacuuuggccugg

SEQ ID NO: 3450 - RNA, 17 nt, Mus musculus
ugcgacuuuggccuggc

SEQ ID NO: 3451 - RNA, 17 nt, Mus musculus
auauuuauaagaacccu

SEQ ID NO: 3452 - RNA, 17 nt, Mus musculus
acccugauuaugugagg

SEQ ID NO: 3453 - RNA, 17 nt, Mus musculus
cccugauuaugugagga

SEQ ID NO: 3454 - RNA, 17 nt, Mus musculus
gaggagauacucgacuu

SEQ ID NO: 3455 - RNA, 17 nt, Mus musculus
gagauacucgacuuccc

SEQ ID NO: 3456 - RNA, 17 nt, Mus musculus
acucgacuuccccuaaa

SEQ ID NO: 3457 - RNA, 17 nt, Mus musculus
cucgacuuccccuaaaa

SEQ ID NO: 3458 - RNA, 17 nt, Mus musculus
cuuccccuaaaauggau

SEQ ID NO: 3459 - RNA, 17 nt, Mus musculus
ggauggcuccugaaucc

SEQ ID NO: 3460 - RNA, 17 nt, Mus musculus
uccugaauccaucuuug

SEQ ID NO: 3461 - RNA, 17 nt, Mus musculus
gaauccaucuuugacaa

SEQ ID NO: 3462 - RNA, 17 nt, Mus musculus
auccaucuuugacaagg

SEQ ID NO: 3463 - RNA, 17 nt, Mus musculus
uccaucuuugacaaggu

SEQ ID NO: 3464 - RNA, 17 nt, Mus musculus
gacaaggucuacagcac

SEQ ID NO: 3465 - RNA, 17 nt, Mus musculus
caaggucuacagcacca

SEQ ID NO: 3466 - RNA, 17 nt, Mus musculus
ugugugguccuauggcg

SEQ ID NO: 3467 - RNA, 17 nt, Mus musculus
gugguccuauggcgugu

SEQ ID NO: 3468 - RNA, 17 nt, Mus musculus
uggcguguugcuguggg

SEQ ID NO: 3469 - RNA, 17 nt, Mus musculus
ugggagaucuucuccuu

SEQ ID NO: 3470 - RNA, 17 nt, Mus musculus
ggagaucuucuccuuag

SEQ ID NO: 3471 - RNA, 17 nt, Mus musculus
gagaucuucuccuuagg

SEQ ID NO: 3472 - RNA, 17 nt, Mus musculus
gaucuucuccuuagggg

SEQ ID NO: 3473 - RNA, 17 nt, Mus musculus
cuucuccuuaggggguu

SEQ ID NO: 3474 - RNA, 17 nt, Mus musculus
uucuccuuaggggguuc

SEQ ID NO: 3475 - RNA, 17 nt, Mus musculus
uaggggguucuccauac

SEQ ID NO: 3476 - RNA, 17 nt, Mus musculus
aggggguucuccauacc

SEQ ID NO: 3477 - RNA, 17 nt, Mus musculus
gggguucuccauaccca

SEQ ID NO: 3478 - RNA, 17 nt, Mus musculus
uucuccauacccaggag

SEQ ID NO: 3479 - RNA, 17 nt, Mus musculus
ugaagacuucugcagcc

SEQ ID NO: 3480 - RNA, 17 nt, Mus musculus
gaagacuucugcagccg

SEQ ID NO: 3481 - RNA, 17 nt, Mus musculus
cccggaguaugccacac

SEQ ID NO: 3482 - RNA, 17 nt, Mus musculus
ccugaaaucuaccaaau

SEQ ID NO: 3483 - RNA, 17 nt, Mus musculus
ugaaaucuaccaaauca

SEQ ID NO: 3484 - RNA, 17 nt, Mus musculus
uaccaaaucauguugga

SEQ ID NO: 3485 - RNA, 17 nt, Mus musculus
aaucauguuggauugcu

SEQ ID NO: 3486 - RNA, 17 nt, Mus musculus
uguuggauugcuggcac

SEQ ID NO: 3487 - RNA, 17 nt, Mus musculus
gccccgguuugcugaac

SEQ ID NO: 3488 - RNA, 17 nt, Mus musculus
ccccgguuugcugaacu

SEQ ID NO: 3489 - RNA, 17 nt, Mus musculus
gcugaacuuguggagaa

SEQ ID NO: 3490 - RNA, 17 nt, Mus musculus
gagaaacuuggugaccu

SEQ ID NO: 3491 - RNA, 17 nt, Mus musculus
gaccugcuucaagccaa

SEQ ID NO: 3492 - RNA, 17 nt, Mus musculus
accugcuucaagccaac

SEQ ID NO: 3493 - RNA, 17 nt, Mus musculus
gccaacguccaacagga

SEQ ID NO: 3494 - RNA, 17 nt, Mus musculus
ggaaagauuacaucccc

SEQ ID NO: 3495 - RNA, 17 nt, Mus musculus
gaaagauuacauccccc

SEQ ID NO: 3496 - RNA, 17 nt, Mus musculus
gauuacaucccccucaa

SEQ ID NO: 3497 - RNA, 17 nt, Mus musculus
aucccccucaaugccau

SEQ ID NO: 3498 - RNA, 17 nt, Mus musculus
aaugccauacugacuag

SEQ ID NO: 3499 - RNA, 17 nt, Mus musculus
uacugacuagaaacagu

SEQ ID NO: 3500 - RNA, 17 nt, Mus musculus
gaaacaguagcuucaca

SEQ ID NO: 3501 - RNA, 17 nt, Mus musculus
caguagcuucacauacu

SEQ ID NO: 3502 - RNA, 17 nt, Mus musculus
aguagcuucacauacuc

SEQ ID NO: 3503 - RNA, 17 nt, Mus musculus
cuucacauacucgaccc

SEQ ID NO: 3504 - RNA, 17 nt, Mus musculus
cacauacucgaccccca

SEQ ID NO: 3505 - RNA, 17 nt, Mus musculus
ccccaccuucucugagg

SEQ ID NO: 3506 - RNA, 17 nt, Mus musculus
cccaccuucucugagga

SEQ ID NO: 3507 - RNA, 17 nt, Mus musculus
caccuucucugaggacc

SEQ ID NO: 3508 - RNA, 17 nt, Mus musculus
gaggaccuuuucaagga

SEQ ID NO: 3509 - RNA, 17 nt, Mus musculus
aggaccuuuucaaggac

SEQ ID NO: 3510 - RNA, 17 nt, Mus musculus
ggaccuuuucaaggacg

SEQ ID NO: 3511 - RNA, 17 nt, Mus musculus
gaccuuuucaaggacgg

SEQ ID NO: 3512 - RNA, 17 nt, Mus musculus
ggacggcuuugcagauc

SEQ ID NO: 3513 - RNA, 17 nt, Mus musculus
gacggcuuugcagaucc

SEQ ID NO: 3514 - RNA, 17 nt, Mus musculus
uugcagauccacauuuu

SEQ ID NO: 3515 - RNA, 17 nt, Mus musculus
auccacauuuucauucc

SEQ ID NO: 3516 - RNA, 17 nt, Mus musculus
uccacauuuucauuccg

SEQ ID NO: 3517 - RNA, 17 nt, Mus musculus
ccacauuuucauuccgg

SEQ ID NO: 3518 - RNA, 17 nt, Mus musculus
cacauuuucauuccgga

SEQ ID NO: 3519 - RNA, 17 nt, Mus musculus
auuuucauuccggaagc

SEQ ID NO: 3520 - RNA, 17 nt, Mus musculus
uuuucauuccggaagcu

SEQ ID NO: 3521 - RNA, 17 nt, Mus musculus
cggaagcucugaugaug

SEQ ID NO: 3522 - RNA, 17 nt, Mus musculus
ugugagauauguaaacg

SEQ ID NO: 3523 - RNA, 17 nt, Mus musculus
agauauguaaacgcuuu

SEQ ID NO: 3524 - RNA, 17 nt, Mus musculus
uaaacgcuuucaaauuc

SEQ ID NO: 3525 - RNA, 17 nt, Mus musculus
aaacgcuuucaaauuca

SEQ ID NO: 3526 - RNA, 17 nt, Mus musculus
aacgcuuucaaauucau

SEQ ID NO: 3527 - RNA, 17 nt, Mus musculus
uuucaaauucaugagcc

SEQ ID NO: 3528 - RNA, 17 nt, Mus musculus
uucaaauucaugagccu

SEQ ID NO: 3529 - RNA, 17 nt, Mus musculus
caaaaccuuugaggagc

SEQ ID NO: 3530 - RNA, 17 nt, Mus musculus
aaaaccuuugaggagcu

SEQ ID NO: 3531 - RNA, 17 nt, Mus musculus
gaggagcuuucaccgaa

SEQ ID NO: 3532 - RNA, 17 nt, Mus musculus
aggagcuuucaccgaac

SEQ ID NO: 3533 - RNA, 17 nt, Mus musculus
ggagcuuucaccgaacu

SEQ ID NO: 3534 - RNA, 17 nt, Mus musculus
accgaacuccaccucca

SEQ ID NO: 3535 - RNA, 17 nt, Mus musculus
cuccaccuccauguuug

SEQ ID NO: 3536 - RNA, 17 nt, Mus musculus
cuccauguuugaggacu

SEQ ID NO: 3537 - RNA, 17 nt, Mus musculus
uccauguuugaggacua

SEQ ID NO: 3538 - RNA, 17 nt, Mus musculus
ugaggacuaucagcugg

SEQ ID NO: 3539 - RNA, 17 nt, Mus musculus
aggacuaucagcuggac

SEQ ID NO: 3540 - RNA, 17 nt, Mus musculus
uggacacuagcacucug

SEQ ID NO: 3541 - RNA, 17 nt, Mus musculus
cuagcacucugcugggc

SEQ ID NO: 3542 - RNA, 17 nt, Mus musculus
gcugggcucccccuugc

SEQ ID NO: 3543 - RNA, 17 nt, Mus musculus
cucccccuugcugaagc

SEQ ID NO: 3544 - RNA, 17 nt, Mus musculus
gaagcgguucaccugga

SEQ ID NO: 3545 - RNA, 17 nt, Mus musculus
aagcgguucaccuggac

SEQ ID NO: 3546 - RNA, 17 nt, Mus musculus
caaggccuccaugaaga

SEQ ID NO: 3547 - RNA, 17 nt, Mus musculus
augaagauagacuugag

SEQ ID NO: 3548 - RNA, 17 nt, Mus musculus
gauagacuugagaauag

SEQ ID NO: 3549 - RNA, 17 nt, Mus musculus
uugagaauagcgaguaa

SEQ ID NO: 3550 - RNA, 17 nt, Mus musculus
uagcgaguaaaagcaag

SEQ ID NO: 3551 - RNA, 17 nt, Mus musculus
gcgggacuuuccgaucu

SEQ ID NO: 3552 - RNA, 17 nt, Mus musculus
cgggacuuuccgaucug

SEQ ID NO: 3553 - RNA, 17 nt, Mus musculus
gggacuuuccgaucugc

SEQ ID NO: 3554 - RNA, 17 nt, Mus musculus
uuuccgaucugccgagg

SEQ ID NO: 3555 - RNA, 17 nt, Mus musculus
gcccagcuucugcuucu

SEQ ID NO: 3556 - RNA, 17 nt, Mus musculus
cccagcuucugcuucuc

SEQ ID NO: 3557 - RNA, 17 nt, Mus musculus
cuucugcuucuccagcu

SEQ ID NO: 3558 - RNA, 17 nt, Mus musculus
uucugcuucuccagcug

SEQ ID NO: 3559 - RNA, 17 nt, Mus musculus
cugcuucuccagcugug

SEQ ID NO: 3560 - RNA, 17 nt, Mus musculus
ggccacaucaggcccgu

SEQ ID NO: 3561 - RNA, 17 nt, Mus musculus
cgaugaaucugagcugg

SEQ ID NO: 3562 - RNA, 17 nt, Mus musculus
aaaggaguccugcuguu

SEQ ID NO: 3563 - RNA, 17 nt, Mus musculus
ccugcuguucuccaccc

SEQ ID NO: 3564 - RNA, 17 nt, Mus musculus
cugcuguucuccacccc

SEQ ID NO: 3565 - RNA, 17 nt, Mus musculus
gcuguucuccaccccca

SEQ ID NO: 3566 - RNA, 17 nt, Mus musculus
cccagacuacaacuccg

SEQ ID NO: 3567 - RNA, 17 nt, Mus musculus
cuacaacuccguggugu

SEQ ID NO: 3568 - RNA, 17 nt, Mus musculus
cgugguguuguacuccu

SEQ ID NO: 3569 - RNA, 17 nt, Mus musculus
gguguuguacuccuccc

SEQ ID NO: 3570 - RNA, 17 nt, Mus musculus
guuguacuccuccccgc

SEQ ID NO: 3571 - RNA, 17 nt, Mus musculus
guacuccuccccgcccg

SEQ ID NO: 3572 - RNA, 17 nt, Mus musculus
gcccgccuaaagcuucu

SEQ ID NO: 3573 - RNA, 17 nt, Mus musculus
cuaaagcuucucaccag

SEQ ID NO: 3574 - RNA, 17 nt, Mus musculus
uaaagcuucucaccagc

SEQ ID NO: 3575 - RNA, 17 nt, Mus musculus
aagcuucucaccagccc

SEQ ID NO: 3576 - RNA, 17 nt, Mus musculus
cugacaguauuauacau

SEQ ID NO: 3577 - RNA, 17 nt, Mus musculus
gacaguauuauacaucu

SEQ ID NO: 3578 - RNA, 17 nt, Mus musculus
acaguauuauacaucua

SEQ ID NO: 3579 - RNA, 17 nt, Mus musculus
aguauuauacaucuaug

SEQ ID NO: 3580 - RNA, 17 nt, Mus musculus
uuauacaucuaugaguu

SEQ ID NO: 3581 - RNA, 17 nt, Mus musculus
auacaucuaugaguuua

SEQ ID NO: 3582 - RNA, 17 nt, Mus musculus
cuaugaguuuacaccua

SEQ ID NO: 3583 - RNA, 17 nt, Mus musculus
uaugaguuuacaccuau

SEQ ID NO: 3584 - RNA, 17 nt, Mus musculus
augaguuuacaccuauu

SEQ ID NO: 3585 - RNA, 17 nt, Mus musculus
uuacaccuauuccgcuc

SEQ ID NO: 3586 - RNA, 17 nt, Mus musculus
acaccuauuccgcucca

SEQ ID NO: 3587 - RNA, 17 nt, Mus musculus
caccuauuccgcuccac

SEQ ID NO: 3588 - RNA, 17 nt, Mus musculus
auuccgcuccacaggag

SEQ ID NO: 3589 - RNA, 17 nt, Mus musculus
cagcugcuuuucgugac

SEQ ID NO: 3590 - RNA, 17 nt, Mus musculus
agcugcuuuucgugacc

SEQ ID NO: 3591 - RNA, 17 nt, Mus musculus
gcugcuuuucgugaccu

SEQ ID NO: 3592 - RNA, 17 nt, Mus musculus
cugcuuuucgugaccuu

SEQ ID NO: 3593 - RNA, 17 nt, Mus musculus
cgugaccuuuaaucgug

SEQ ID NO: 3594 - RNA, 17 nt, Mus musculus
gugaccuuuaaucgugc

SEQ ID NO: 3595 - RNA, 17 nt, Mus musculus
ugaccuuuaaucgugcu

SEQ ID NO: 3596 - RNA, 17 nt, Mus musculus
ccuuuaaucgugcuuuu

SEQ ID NO: 3597 - RNA, 17 nt, Mus musculus
aucgugcuuuuuuguuu

SEQ ID NO: 3598 - RNA, 17 nt, Mus musculus
ucgugcuuuuuuguuuu

SEQ ID NO: 3599 - RNA, 17 nt, Mus musculus
cgugcuuuuuuguuuuu

SEQ ID NO: 3600 - RNA, 17 nt, Mus musculus
gugcuuuuuuguuuuuu

SEQ ID NO: 3601 - RNA, 17 nt, Mus musculus
ugcuuuuuuguuuuuug

SEQ ID NO: 3602 - RNA, 17 nt, Mus musculus
uuuuuuguuuuuuguuu

SEQ ID NO: 3603 - RNA, 17 nt, Mus musculus
uuuuuguuuuuuguuuu

SEQ ID NO: 3604 - RNA, 17 nt, Mus musculus
uuuuguuuuuuguuuug

SEQ ID NO: 3605 - RNA, 17 nt, Mus musculus
uuuguuuuuuguuuugu

SEQ ID NO: 3606 - RNA, 17 nt, Mus musculus
uuguuuuuuguuuuguu

SEQ ID NO: 3607 - RNA, 17 nt, Mus musculus
uuuuuuguuuuguuugu

SEQ ID NO: 3608 - RNA, 17 nt, Mus musculus
uuuuuguuuuguuuguu

SEQ ID NO: 3609 - RNA, 17 nt, Mus musculus
uuuuguuuuguuuguug

SEQ ID NO: 3610 - RNA, 17 nt, Mus musculus
uguuuuguuuguuguug

SEQ ID NO: 3611 - RNA, 17 nt, Mus musculus
guuuuguuuguuguugc

SEQ ID NO: 3612 - RNA, 17 nt, Mus musculus
uuguuuguuguugcugu

SEQ ID NO: 3613 - RNA, 17 nt, Mus musculus
uuuguuguugcuguuuu

SEQ ID NO: 3614 - RNA, 17 nt, Mus musculus
guugcuguuuugacuaa

SEQ ID NO: 3615 - RNA, 17 nt, Mus musculus
uugcuguuuugacuaac

SEQ ID NO: 3616 - RNA, 17 nt, Mus musculus
ugcuguuuugacuaaca

SEQ ID NO: 3617 - RNA, 17 nt, Mus musculus
aagaauguaaccccagu

SEQ ID NO: 3618 - RNA, 17 nt, Mus musculus
accccaguuagugacgu

SEQ ID NO: 3619 - RNA, 17 nt, Mus musculus
ccccaguuagugacgug

SEQ ID NO: 3620 - RNA, 17 nt, Mus musculus
ugaagaauacuauuguu

SEQ ID NO: 3621 - RNA, 17 nt, Mus musculus
agaauacuauuguuaga

SEQ ID NO: 3622 - RNA, 17 nt, Mus musculus
aauacuauuguuagaga

SEQ ID NO: 3623 - RNA, 17 nt, Mus musculus
acuauuguuagagaaau

SEQ ID NO: 3624 - RNA, 17 nt, Mus musculus
cuauuguuagagaaauc

SEQ ID NO: 3625 - RNA, 17 nt, Mus musculus
agagaaaucccccccgc

SEQ ID NO: 3626 - RNA, 17 nt, Mus musculus
caaagccucaggguaac

SEQ ID NO: 3627 - RNA, 17 nt, Mus musculus
cucaggguaaccuggac

SEQ ID NO: 3628 - RNA, 17 nt, Mus musculus
aggugccucuggcgacc

SEQ ID NO: 3629 - RNA, 17 nt, Mus musculus
cccacccucccugcagc

SEQ ID NO: 3630 - RNA, 17 nt, Mus musculus
gugggacuagaggcagu

SEQ ID NO: 3631 - RNA, 17 nt, Mus musculus
gaggcaguaagcccauu

SEQ ID NO: 3632 - RNA, 17 nt, Mus musculus
aagcccauuagcucaug

SEQ ID NO: 3633 - RNA, 17 nt, Mus musculus
agcccauuagcucaugg

SEQ ID NO: 3634 - RNA, 17 nt, Mus musculus
cauuagcucauggcugc

SEQ ID NO: 3635 - RNA, 17 nt, Mus musculus
gaccugcucugucucuc

SEQ ID NO: 3636 - RNA, 17 nt, Mus musculus
ugcucugucucucuuau

SEQ ID NO: 3637 - RNA, 17 nt, Mus musculus
cucugucucucuuaugg

SEQ ID NO: 3638 - RNA, 17 nt, Mus musculus
cugucucucuuauggag

SEQ ID NO: 3639 - RNA, 17 nt, Mus musculus
gucucucuuauggagga

SEQ ID NO: 3640 - RNA, 17 nt, Mus musculus
ucucucuuauggaggaa

SEQ ID NO: 3641 - RNA, 17 nt, Mus musculus
aaaaggcuuugggaugc

SEQ ID NO: 3642 - RNA, 17 nt, Mus musculus
aaaggcuuugggaugcg

SEQ ID NO: 3643 - RNA, 17 nt, Mus musculus
ggaugcguccguccugu

SEQ ID NO: 3644 - RNA, 17 nt, Mus musculus
gcguccguccuguggag

SEQ ID NO: 3645 - RNA, 17 nt, Mus musculus
agggggcuccgcuaugc

SEQ ID NO: 3646 - RNA, 17 nt, Mus musculus
gcuccgcuaugccacuu

SEQ ID NO: 3647 - RNA, 17 nt, Mus musculus
augccacuucagugacu

SEQ ID NO: 3648 - RNA, 17 nt, Mus musculus
ugccacuucagugacuu

SEQ ID NO: 3649 - RNA, 17 nt, Mus musculus
cagugacuucucacucc

SEQ ID NO: 3650 - RNA, 17 nt, Mus musculus
agugacuucucacuccu

SEQ ID NO: 3651 - RNA, 17 nt, Mus musculus
ugacuucucacuccugg

SEQ ID NO: 3652 - RNA, 17 nt, Mus musculus
uucucacuccuggccuc

SEQ ID NO: 3653 - RNA, 17 nt, Mus musculus
ccuggccuccgcuguuu

SEQ ID NO: 3654 - RNA, 17 nt, Mus musculus
uccgcuguuucgggccc

SEQ ID NO: 3655 - RNA, 17 nt, Mus musculus
ccgcuguuucgggcccc

SEQ ID NO: 3656 - RNA, 17 nt, Mus musculus
cgcuguuucgggccccc

SEQ ID NO: 3657 - RNA, 17 nt, Mus musculus
ggcccccuuccaagagg

SEQ ID NO: 3658 - RNA, 17 nt, Mus musculus
gcccccuuccaagaggu

SEQ ID NO: 3659 - RNA, 17 nt, Mus musculus
caagagguaucagagca

SEQ ID NO: 3660 - RNA, 17 nt, Mus musculus
agagguaucagagcaga

SEQ ID NO: 3661 - RNA, 17 nt, Mus musculus
agggacguuuccuagac

SEQ ID NO: 3662 - RNA, 17 nt, Mus musculus
gggacguuuccuagacc

SEQ ID NO: 3663 - RNA, 17 nt, Mus musculus
ggacguuuccuagacca

SEQ ID NO: 3664 - RNA, 17 nt, Mus musculus
cguuuccuagaccaggg

SEQ ID NO: 3665 - RNA, 17 nt, Mus musculus
gcacauguucucgggaa

SEQ ID NO: 3666 - RNA, 17 nt, Mus musculus
cacauguucucgggaac

SEQ ID NO: 3667 - RNA, 17 nt, Mus musculus
cauguucucgggaacca

SEQ ID NO: 3668 - RNA, 17 nt, Mus musculus
accacaguuaaucuuaa

SEQ ID NO: 3669 - RNA, 17 nt, Mus musculus
ccacaguuaaucuuaaa

SEQ ID NO: 3670 - RNA, 17 nt, Mus musculus
caguuaaucuuaaaucu

SEQ ID NO: 3671 - RNA, 17 nt, Mus musculus
guuaaucuuaaaucuuu

SEQ ID NO: 3672 - RNA, 17 nt, Mus musculus
uuaaucuuaaaucuuuu

SEQ ID NO: 3673 - RNA, 17 nt, Mus musculus
ucuuaaaucuuuucccg

SEQ ID NO: 3674 - RNA, 17 nt, Mus musculus
uuaaaucuuuucccggg

SEQ ID NO: 3675 - RNA, 17 nt, Mus musculus
uaaaucuuuucccggga

SEQ ID NO: 3676 - RNA, 17 nt, Mus musculus
aaaucuuuucccgggag

SEQ ID NO: 3677 - RNA, 17 nt, Mus musculus
aaucuuuucccgggagu

SEQ ID NO: 3678 - RNA, 17 nt, Mus musculus
ccgggagucuucuguug

SEQ ID NO: 3679 - RNA, 17 nt, Mus musculus
gggagucuucuguuguc

SEQ ID NO: 3680 - RNA, 17 nt, Mus musculus
ggagucuucuguugucu

SEQ ID NO: 3681 - RNA, 17 nt, Mus musculus
ucuucuguugucuguuu

SEQ ID NO: 3682 - RNA, 17 nt, Mus musculus
ucuguugucuguuuacc

SEQ ID NO: 3683 - RNA, 17 nt, Mus musculus
uugucuguuuaccaucc

SEQ ID NO: 3684 - RNA, 17 nt, Mus musculus
ugucuguuuaccaucca

SEQ ID NO: 3685 - RNA, 17 nt, Mus musculus
gucuguuuaccauccaa

SEQ ID NO: 3686 - RNA, 17 nt, Mus musculus
uuuaccauccaaagcau

SEQ ID NO: 3687 - RNA, 17 nt, Mus musculus
caaagcauauuuaacau

SEQ ID NO: 3688 - RNA, 17 nt, Mus musculus
aagcauauuuaacaugu

SEQ ID NO: 3689 - RNA, 17 nt, Mus musculus
agcauauuuaacaugug

SEQ ID NO: 3690 - RNA, 17 nt, Mus musculus
gcauauuuaacaugugu

SEQ ID NO: 3691 - RNA, 17 nt, Mus musculus
acaugugucaguggggg

SEQ ID NO: 3692 - RNA, 17 nt, Mus musculus
guggcgcuuggcuucug

SEQ ID NO: 3693 - RNA, 17 nt, Mus musculus
gcuuggcuucugaggcc

SEQ ID NO: 3694 - RNA, 17 nt, Mus musculus
cuuggcuucugaggcca

SEQ ID NO: 3695 - RNA, 17 nt, Mus musculus
agagccaucaucaguuc

SEQ ID NO: 3696 - RNA, 17 nt, Mus musculus
gccaucaucaguuccuc

SEQ ID NO: 3697 - RNA, 17 nt, Mus musculus
ucaucaguuccucuagu

SEQ ID NO: 3698 - RNA, 17 nt, Mus musculus
caucaguuccucuagug

SEQ ID NO: 3699 - RNA, 17 nt, Mus musculus
caguuccucuagugaga

SEQ ID NO: 3700 - RNA, 17 nt, Mus musculus
guuccucuagugagaug

SEQ ID NO: 3701 - RNA, 17 nt, Mus musculus
agaugcauugaggucau

SEQ ID NO: 3702 - RNA, 17 nt, Mus musculus
auugaggucauacccaa

SEQ ID NO: 3703 - RNA, 17 nt, Mus musculus
gaggucauacccaagcu

SEQ ID NO: 3704 - RNA, 17 nt, Mus musculus
cccaagcuugcaggccu

SEQ ID NO: 3705 - RNA, 17 nt, Mus musculus
ccugaccuucgcauacu

SEQ ID NO: 3706 - RNA, 17 nt, Mus musculus
cugaccuucgcauacug

SEQ ID NO: 3707 - RNA, 17 nt, Mus musculus
cuucgcauacugcucac

SEQ ID NO: 3708 - RNA, 17 nt, Mus musculus
auacugcucacggggag

SEQ ID NO: 3709 - RNA, 17 nt, Mus musculus
cggggaguuaagugguc

SEQ ID NO: 3710 - RNA, 17 nt, Mus musculus
ggggaguuaaguggucc

SEQ ID NO: 3711 - RNA, 17 nt, Mus musculus
uaagugguccaguuugg

SEQ ID NO: 3712 - RNA, 17 nt, Mus musculus
gguccaguuuggccuag

SEQ ID NO: 3713 - RNA, 17 nt, Mus musculus
guccaguuuggccuagu

SEQ ID NO: 3714 - RNA, 17 nt, Mus musculus
uuuggccuaguaagguu

SEQ ID NO: 3715 - RNA, 17 nt, Mus musculus
ggccuaguaagguugcc

SEQ ID NO: 3716 - RNA, 17 nt, Mus musculus
aguaagguugccuacug

SEQ ID NO: 3717 - RNA, 17 nt, Mus musculus
gguugccuacugauggg

SEQ ID NO: 3718 - RNA, 17 nt, Mus musculus
gaugggcucaaaagcca

SEQ ID NO: 3719 - RNA, 17 nt, Mus musculus
agccacauuuuaaacag

SEQ ID NO: 3720 - RNA, 17 nt, Mus musculus
gccacauuuuaaacagg

SEQ ID NO: 3721 - RNA, 17 nt, Mus musculus
ccacauuuuaaacaggu

SEQ ID NO: 3722 - RNA, 17 nt, Mus musculus
cacauuuuaaacagguu

SEQ ID NO: 3723 - RNA, 17 nt, Mus musculus
aaacagguuuuaucuca

SEQ ID NO: 3724 - RNA, 17 nt, Mus musculus
aacagguuuuaucucaa

SEQ ID NO: 3725 - RNA, 17 nt, Mus musculus
acagguuuuaucucaag

SEQ ID NO: 3726 - RNA, 17 nt, Mus musculus
cagguuuuaucucaagu

SEQ ID NO: 3727 - RNA, 17 nt, Mus musculus
gguuuuaucucaaguau

SEQ ID NO: 3728 - RNA, 17 nt, Mus musculus
uuuuaucucaaguauua

SEQ ID NO: 3729 - RNA, 17 nt, Mus musculus
ucucaaguauuaauaua

SEQ ID NO: 3730 - RNA, 17 nt, Mus musculus
ucaaguauuaauauaua

SEQ ID NO: 3731 - RNA, 17 nt, Mus musculus
caaguauuaauauauag

SEQ ID NO: 3732 - RNA, 17 nt, Mus musculus
guauuaauauauagaca

SEQ ID NO: 3733 - RNA, 17 nt, Mus musculus
auuaauauauagacaag

SEQ ID NO: 3734 - RNA, 17 nt, Mus musculus
uaauauauagacaagac

SEQ ID NO: 3735 - RNA, 17 nt, Mus musculus
aagacacuuaugcauua

SEQ ID NO: 3736 - RNA, 17 nt, Mus musculus
agacacuuaugcauuau

SEQ ID NO: 3737 - RNA, 17 nt, Mus musculus
uuaugcauuauccuguu

SEQ ID NO: 3738 - RNA, 17 nt, Mus musculus
uaugcauuauccuguuu

SEQ ID NO: 3739 - RNA, 17 nt, Mus musculus
ugcauuauccuguuuua

SEQ ID NO: 3740 - RNA, 17 nt, Mus musculus
uauccuguuuuauauau

SEQ ID NO: 3741 - RNA, 17 nt, Mus musculus
auccuguuuuauauauc

SEQ ID NO: 3742 - RNA, 17 nt, Mus musculus
uccuguuuuauauaucc

SEQ ID NO: 3743 - RNA, 17 nt, Mus musculus
ccuguuuuauauaucca

SEQ ID NO: 3744 - RNA, 17 nt, Mus musculus
uguuuuauauauccaau

SEQ ID NO: 3745 - RNA, 17 nt, Mus musculus
uuuuauauauccaauga

SEQ ID NO: 3746 - RNA, 17 nt, Mus musculus
uuauauauccaaugaau

SEQ ID NO: 3747 - RNA, 17 nt, Mus musculus
caaugaauauaacuggg

SEQ ID NO: 3748 - RNA, 17 nt, Mus musculus
augaauauaacuggggc

SEQ ID NO: 3749 - RNA, 17 nt, Mus musculus
gggcgaguuaagaguca

SEQ ID NO: 3750 - RNA, 17 nt, Mus musculus
ggcgaguuaagagucau

SEQ ID NO: 3751 - RNA, 17 nt, Mus musculus
uuaagagucauggucua

SEQ ID NO: 3752 - RNA, 17 nt, Mus musculus
gucauggucuagaaaag

SEQ ID NO: 3753 - RNA, 17 nt, Mus musculus
cauggucuagaaaaggg

SEQ ID NO: 3754 - RNA, 17 nt, Mus musculus
aaagggguuucucugua

SEQ ID NO: 3755 - RNA, 17 nt, Mus musculus
aagggguuucucuguac

SEQ ID NO: 3756 - RNA, 17 nt, Mus musculus
agggguuucucuguacc

SEQ ID NO: 3757 - RNA, 17 nt, Mus musculus
ggguuucucuguaccca

SEQ ID NO: 3758 - RNA, 17 nt, Mus musculus
uucucuguacccaaauc

SEQ ID NO: 3759 - RNA, 17 nt, Mus musculus
acccaaaucgggcuggu

SEQ ID NO: 3760 - RNA, 17 nt, Mus musculus
gggcugguuggaccaag

SEQ ID NO: 3761 - RNA, 17 nt, Mus musculus
agagugguugucccagc

SEQ ID NO: 3762 - RNA, 17 nt, Mus musculus
gugguugucccagcuau

SEQ ID NO: 3763 - RNA, 17 nt, Mus musculus
ucccagcuauaguuacu

SEQ ID NO: 3764 - RNA, 17 nt, Mus musculus
ccagcuauaguuacuaa

SEQ ID NO: 3765 - RNA, 17 nt, Mus musculus
gcuauaguuacuaaacu

SEQ ID NO: 3766 - RNA, 17 nt, Mus musculus
cuauaguuacuaaacua

SEQ ID NO: 3767 - RNA, 17 nt, Mus musculus
uaguuacuaaacuacuc

SEQ ID NO: 3768 - RNA, 17 nt, Mus musculus
acuaaacuacucaccca

SEQ ID NO: 3769 - RNA, 17 nt, Mus musculus
aaacuacucacccaaag

SEQ ID NO: 3770 - RNA, 17 nt, Mus musculus
cccaaaguugggaccuc

SEQ ID NO: 3771 - RNA, 17 nt, Mus musculus
ugggaccucacuggcuu

SEQ ID NO: 3772 - RNA, 17 nt, Mus musculus
cacuggcuucucuuuac

SEQ ID NO: 3773 - RNA, 17 nt, Mus musculus
acuggcuucucuuuacu

SEQ ID NO: 3774 - RNA, 17 nt, Mus musculus
uggcuucucuuuacuuc

SEQ ID NO: 3775 - RNA, 17 nt, Mus musculus
gcuucucuuuacuucau

SEQ ID NO: 3776 - RNA, 17 nt, Mus musculus
cuucucuuuacuucauc

SEQ ID NO: 3777 - RNA, 17 nt, Mus musculus
uucucuuuacuucauca

SEQ ID NO: 3778 - RNA, 17 nt, Mus musculus
ucuuuacuucaucaugg

SEQ ID NO: 3779 - RNA, 17 nt, Mus musculus
cuuuacuucaucaugga

SEQ ID NO: 3780 - RNA, 17 nt, Mus musculus
uacuucaucauggauuu

SEQ ID NO: 3781 - RNA, 17 nt, Mus musculus
ucauggauuucaccauc

SEQ ID NO: 3782 - RNA, 17 nt, Mus musculus
cauggauuucaccaucc

SEQ ID NO: 3783 - RNA, 17 nt, Mus musculus
auggauuucaccauccc

SEQ ID NO: 3784 - RNA, 17 nt, Mus musculus
uucaccaucccaaggca

SEQ ID NO: 3785 - RNA, 17 nt, Mus musculus
aaggcagucugagagga

SEQ ID NO: 3786 - RNA, 17 nt, Mus musculus
gaggagcuaaagaguau

SEQ ID NO: 3787 - RNA, 17 nt, Mus musculus
uaaagaguaucagccca

SEQ ID NO: 3788 - RNA, 17 nt, Mus musculus
aagaguaucagcccaua

SEQ ID NO: 3789 - RNA, 17 nt, Mus musculus
cagcccauauuuauuaa

SEQ ID NO: 3790 - RNA, 17 nt, Mus musculus
gcccauauuuauuaagc

SEQ ID NO: 3791 - RNA, 17 nt, Mus musculus
cccauauuuauuaagca

SEQ ID NO: 3792 - RNA, 17 nt, Mus musculus
ccauauuuauuaagcac

SEQ ID NO: 3793 - RNA, 17 nt, Mus musculus
auauuuauuaagcacuu

SEQ ID NO: 3794 - RNA, 17 nt, Mus musculus
uauuuauuaagcacuuu

SEQ ID NO: 3795 - RNA, 17 nt, Mus musculus
uaagcacuuuaugcucc

SEQ ID NO: 3796 - RNA, 17 nt, Mus musculus
aagcacuuuaugcuccu

SEQ ID NO: 3797 - RNA, 17 nt, Mus musculus
agcacuuuaugcuccuu

SEQ ID NO: 3798 - RNA, 17 nt, Mus musculus
uuuaugcuccuuggcac

SEQ ID NO: 3799 - RNA, 17 nt, Mus musculus
augcuccuuggcacagc

SEQ ID NO: 3800 - RNA, 17 nt, Mus musculus
ugauguguaauuuaugc

SEQ ID NO: 3801 - RNA, 17 nt, Mus musculus
uguguaauuuaugcaag

SEQ ID NO: 3802 - RNA, 17 nt, Mus musculus
guguaauuuaugcaagc

SEQ ID NO: 3803 - RNA, 17 nt, Mus musculus
uguaauuuaugcaagcu

SEQ ID NO: 3804 - RNA, 17 nt, Mus musculus
ugcaagcucccucucca

SEQ ID NO: 3805 - RNA, 17 nt, Mus musculus
agcucccucuccagcua

SEQ ID NO: 3806 - RNA, 17 nt, Mus musculus
cucccucuccagcuagg

SEQ ID NO: 3807 - RNA, 17 nt, Mus musculus
cuccagcuaggacucag

SEQ ID NO: 3808 - RNA, 17 nt, Mus musculus
cuaggacucaggauauu

SEQ ID NO: 3809 - RNA, 17 nt, Mus musculus
cucaggauauuagucaa

SEQ ID NO: 3810 - RNA, 17 nt, Mus musculus
caggauauuagucaaug

SEQ ID NO: 3811 - RNA, 17 nt, Mus musculus
aggauauuagucaauga

SEQ ID NO: 3812 - RNA, 17 nt, Mus musculus
auauuagucaaugagcc

SEQ ID NO: 3813 - RNA, 17 nt, Mus musculus
ugagccaucaaaaggaa

SEQ ID NO: 3814 - RNA, 17 nt, Mus musculus
aaaaaccuaucuuauuu

SEQ ID NO: 3815 - RNA, 17 nt, Mus musculus
aaaccuaucuuauuuuc

SEQ ID NO: 3816 - RNA, 17 nt, Mus musculus
accuaucuuauuuucau

SEQ ID NO: 3817 - RNA, 17 nt, Mus musculus
ccuaucuuauuuucauc

SEQ ID NO: 3818 - RNA, 17 nt, Mus musculus
uaucuuauuuucaucug

SEQ ID NO: 3819 - RNA, 17 nt, Mus musculus
aucuuauuuucaucugu

SEQ ID NO: 3820 - RNA, 17 nt, Mus musculus
ucuuauuuucaucuguu

SEQ ID NO: 3821 - RNA, 17 nt, Mus musculus
cuuauuuucaucuguuu

SEQ ID NO: 3822 - RNA, 17 nt, Mus musculus
auuuucaucuguuucau

SEQ ID NO: 3823 - RNA, 17 nt, Mus musculus
ucaucuguuucauaccu

SEQ ID NO: 3824 - RNA, 17 nt, Mus musculus
caucuguuucauaccuu

SEQ ID NO: 3825 - RNA, 17 nt, Mus musculus
aucuguuucauaccuug

SEQ ID NO: 3826 - RNA, 17 nt, Mus musculus
uguuucauaccuugucu

SEQ ID NO: 3827 - RNA, 17 nt, Mus musculus
ucauaccuugucugggg

SEQ ID NO: 3828 - RNA, 17 nt, Mus musculus
uaccuugucuggggucu

SEQ ID NO: 3829 - RNA, 17 nt, Mus musculus
ucuggggucuaaugacg

SEQ ID NO: 3830 - RNA, 17 nt, Mus musculus
uggggucuaaugacgau

SEQ ID NO: 3831 - RNA, 17 nt, Mus musculus
aacaggguagacauggg

SEQ ID NO: 3832 - RNA, 17 nt, Mus musculus
gacaggguagaaaaggg

SEQ ID NO: 3833 - RNA, 17 nt, Mus musculus
ugcccgcucuuuggggu

SEQ ID NO: 3834 - RNA, 17 nt, Mus musculus
cccgcucuuuggggucu

SEQ ID NO: 3835 - RNA, 17 nt, Mus musculus
ccgcucuuuggggucua

SEQ ID NO: 3836 - RNA, 17 nt, Mus musculus
uuuggggucuagagaug

SEQ ID NO: 3837 - RNA, 17 nt, Mus musculus
uggggucuagagaugag

SEQ ID NO: 3838 - RNA, 17 nt, Mus musculus
cccugggucucuaaaau

SEQ ID NO: 3839 - RNA, 17 nt, Mus musculus
cugggucucuaaaaugg

SEQ ID NO: 3840 - RNA, 17 nt, Mus musculus
gggucucuaaaauggcu

SEQ ID NO: 3841 - RNA, 17 nt, Mus musculus
aaauggcucucuuagaa

SEQ ID NO: 3842 - RNA, 17 nt, Mus musculus
auggcucucuuagaagu

SEQ ID NO: 3843 - RNA, 17 nt, Mus musculus
ggcucucuuagaaguug

SEQ ID NO: 3844 - RNA, 17 nt, Mus musculus
gcucucuuagaaguugu

SEQ ID NO: 3845 - RNA, 17 nt, Mus musculus
uuagaaguuguaugugc

SEQ ID NO: 3846 - RNA, 17 nt, Mus musculus
gaaguuguaugugcaaa

SEQ ID NO: 3847 - RNA, 17 nt, Mus musculus
gugcaaauuauggucug

SEQ ID NO: 3848 - RNA, 17 nt, Mus musculus
ugcaaauuauggucugu

SEQ ID NO: 3849 - RNA, 17 nt, Mus musculus
auuauggucugugugcu

SEQ ID NO: 3850 - RNA, 17 nt, Mus musculus
ugugugcuuaggucgug

SEQ ID NO: 3851 - RNA, 17 nt, Mus musculus
gugugcuuaggucgugc

SEQ ID NO: 3852 - RNA, 17 nt, Mus musculus
gcuuaggucgugcacac

SEQ ID NO: 3853 - RNA, 17 nt, Mus musculus
gagccggucacagcugg

SEQ ID NO: 3854 - RNA, 17 nt, Mus musculus
cgaugaauagcugcuuu

SEQ ID NO: 3855 - RNA, 17 nt, Mus musculus
uagcugcuuugggagag

SEQ ID NO: 3856 - RNA, 17 nt, Mus musculus
agcugcuuugggagagc

SEQ ID NO: 3857 - RNA, 17 nt, Mus musculus
agcaugcuagccacuua

SEQ ID NO: 3858 - RNA, 17 nt, Mus musculus
uagccacuuaauucucu

SEQ ID NO: 3859 - RNA, 17 nt, Mus musculus
agccacuuaauucucug

SEQ ID NO: 3860 - RNA, 17 nt, Mus musculus
cacuuaauucucugacc

SEQ ID NO: 3861 - RNA, 17 nt, Mus musculus
acuuaauucucugaccg

SEQ ID NO: 3862 - RNA, 17 nt, Mus musculus
uuaauucucugaccggg

SEQ ID NO: 3863 - RNA, 17 nt, Mus musculus
gccagcaucauggguac

SEQ ID NO: 3864 - RNA, 17 nt, Mus musculus
ucauggguaccugcucc

SEQ ID NO: 3865 - RNA, 17 nt, Mus musculus
uaccugcuccccugugu

SEQ ID NO: 3866 - RNA, 17 nt, Mus musculus
cccuguguaccccaucc

SEQ ID NO: 3867 - RNA, 17 nt, Mus musculus
uaccccauccuuaaggu

SEQ ID NO: 3868 - RNA, 17 nt, Mus musculus
cccauccuuaagguuuu

SEQ ID NO: 3869 - RNA, 17 nt, Mus musculus
ccauccuuaagguuuuc

SEQ ID NO: 3870 - RNA, 17 nt, Mus musculus
cuuaagguuuucugucu

SEQ ID NO: 3871 - RNA, 17 nt, Mus musculus
uuaagguuuucugucug

SEQ ID NO: 3872 - RNA, 17 nt, Mus musculus
uaagguuuucugucuga

SEQ ID NO: 3873 - RNA, 17 nt, Mus musculus
aagguuuucugucugau

SEQ ID NO: 3874 - RNA, 17 nt, Mus musculus
uuuucugucugaugaga

SEQ ID NO: 3875 - RNA, 17 nt, Mus musculus
agugcaauccccacuga

SEQ ID NO: 3876 - RNA, 17 nt, Mus musculus
cuguggcucuuggugca

SEQ ID NO: 3877 - RNA, 17 nt, Mus musculus
guggcucuuggugcacu

SEQ ID NO: 3878 - RNA, 17 nt, Mus musculus
ggugcacucaccagcca

SEQ ID NO: 3879 - RNA, 17 nt, Mus musculus
ccaggacuagacaagua

SEQ ID NO: 3880 - RNA, 17 nt, Mus musculus
agacaaguaggaaaggg

SEQ ID NO: 3881 - RNA, 17 nt, Mus musculus
aaagggcuucuagccac

SEQ ID NO: 3882 - RNA, 17 nt, Mus musculus
aagggcuucuagccaca

SEQ ID NO: 3883 - RNA, 17 nt, Mus musculus
gggcuucuagccacacu

SEQ ID NO: 3884 - RNA, 17 nt, Mus musculus
aagaaaaucagguaggg

SEQ ID NO: 3885 - RNA, 17 nt, Mus musculus
aaucagguagggcuggc

SEQ ID NO: 3886 - RNA, 17 nt, Mus musculus
aaagacaucuuugucca

SEQ ID NO: 3887 - RNA, 17 nt, Mus musculus
agacaucuuuguccauu

SEQ ID NO: 3888 - RNA, 17 nt, Mus musculus
gacaucuuuguccauuc

SEQ ID NO: 3889 - RNA, 17 nt, Mus musculus
aucuuuguccauucgca

SEQ ID NO: 3890 - RNA, 17 nt, Mus musculus
uuguccauucgcaaaag

SEQ ID NO: 3891 - RNA, 17 nt, Mus musculus
uguccauucgcaaaagc

SEQ ID NO: 3892 - RNA, 17 nt, Mus musculus
caaaagcucuugucggc

SEQ ID NO: 3893 - RNA, 17 nt, Mus musculus
aaagcucuugucggcug

SEQ ID NO: 3894 - RNA, 17 nt, Mus musculus
gcucuugucggcugcag

SEQ ID NO: 3895 - RNA, 17 nt, Mus musculus
caguguguaagucaggc

SEQ ID NO: 3896 - RNA, 17 nt, Mus musculus
guguaagucaggcgaug

SEQ ID NO: 3897 - RNA, 17 nt, Mus musculus
cagaggcuaccagagaa

SEQ ID NO: 3898 - RNA, 17 nt, Mus musculus
ccugagguuucucaucc

SEQ ID NO: 3899 - RNA, 17 nt, Mus musculus
cugagguuucucaucca

SEQ ID NO: 3900 - RNA, 17 nt, Mus musculus
ugagguuucucauccag

SEQ ID NO: 3901 - RNA, 17 nt, Mus musculus
agguuucucauccagau

SEQ ID NO: 3902 - RNA, 17 nt, Mus musculus
uuucucauccagauauc

SEQ ID NO: 3903 - RNA, 17 nt, Mus musculus
auccagauauccagcaa

SEQ ID NO: 3904 - RNA, 17 nt, Mus musculus
ccagauauccagcaauu

SEQ ID NO: 3905 - RNA, 17 nt, Mus musculus
ccagcaauuggggggug

SEQ ID NO: 3906 - RNA, 17 nt, Mus musculus
aagaccauagauggucc

SEQ ID NO: 3907 - RNA, 17 nt, Mus musculus
uagaugguccuguauua

SEQ ID NO: 3908 - RNA, 17 nt, Mus musculus
gguccuguauuauuccg

SEQ ID NO: 3909 - RNA, 17 nt, Mus musculus
uccuguauuauuccgau

SEQ ID NO: 3910 - RNA, 17 nt, Mus musculus
ccuguauuauuccgauu

SEQ ID NO: 3911 - RNA, 17 nt, Mus musculus
uguauuauuccgauuuu

SEQ ID NO: 3912 - RNA, 17 nt, Mus musculus
guauuauuccgauuuua

SEQ ID NO: 3913 - RNA, 17 nt, Mus musculus
auuccgauuuuaauaau

SEQ ID NO: 3914 - RNA, 17 nt, Mus musculus
uuccgauuuuaauaauc

SEQ ID NO: 3915 - RNA, 17 nt, Mus musculus
uccgauuuuaauaaucu

SEQ ID NO: 3916 - RNA, 17 nt, Mus musculus
ccgauuuuaauaaucua

SEQ ID NO: 3917 - RNA, 17 nt, Mus musculus
auuuuaauaaucuaauu

SEQ ID NO: 3918 - RNA, 17 nt, Mus musculus
uuaauaaucuaauucgu

SEQ ID NO: 3919 - RNA, 17 nt, Mus musculus
aauaaucuaauucguga

SEQ ID NO: 3920 - RNA, 17 nt, Mus musculus
aaucuaauucgugauca

SEQ ID NO: 3921 - RNA, 17 nt, Mus musculus
aucuaauucgugaucau

SEQ ID NO: 3922 - RNA, 17 nt, Mus musculus
uucgugaucauuaagag

SEQ ID NO: 3923 - RNA, 17 nt, Mus musculus
gugaucauuaagagacu

SEQ ID NO: 3924 - RNA, 17 nt, Mus musculus
ugaucauuaagagacuu

SEQ ID NO: 3925 - RNA, 17 nt, Mus musculus
aagagacuuuaguaaau

SEQ ID NO: 3926 - RNA, 17 nt, Mus musculus
agagacuuuaguaaaug

SEQ ID NO: 3927 - RNA, 17 nt, Mus musculus
gagacuuuaguaaaugu

SEQ ID NO: 3928 - RNA, 17 nt, Mus musculus
acuuuaguaaauguccc

SEQ ID NO: 3929 - RNA, 17 nt, Mus musculus
guaaaugucccuuuucc

SEQ ID NO: 3930 - RNA, 17 nt, Mus musculus
augucccuuuucccaca

SEQ ID NO: 3931 - RNA, 17 nt, Mus musculus
ugucccuuuucccacaa

SEQ ID NO: 3932 - RNA, 17 nt, Mus musculus
gucccuuuucccacaaa

SEQ ID NO: 3933 - RNA, 17 nt, Mus musculus
ucccuuuucccacaaaa

SEQ ID NO: 3934 - RNA, 17 nt, Mus musculus
acaaaaguaaagaaaag

SEQ ID NO: 3935 - RNA, 17 nt, Mus musculus
gaaaagcuaucgggauu

SEQ ID NO: 3936 - RNA, 17 nt, Mus musculus
aaagcuaucgggauucu

SEQ ID NO: 3937 - RNA, 17 nt, Mus musculus
aucgggauucucugguu

SEQ ID NO: 3938 - RNA, 17 nt, Mus musculus
ucgggauucucugguuc

SEQ ID NO: 3939 - RNA, 17 nt, Mus musculus
gggauucucugguucug

SEQ ID NO: 3940 - RNA, 17 nt, Mus musculus
ucucugguucugcuuaa

SEQ ID NO: 3941 - RNA, 17 nt, Mus musculus
cucugguucugcuuaaa

SEQ ID NO: 3942 - RNA, 17 nt, Mus musculus
guucugcuuaaagacuu

SEQ ID NO: 3943 - RNA, 17 nt, Mus musculus
uucugcuuaaagacuua

SEQ ID NO: 3944 - RNA, 17 nt, Mus musculus
uaaagacuuagcuuugg

SEQ ID NO: 3945 - RNA, 17 nt, Mus musculus
aaagacuuagcuuugga

SEQ ID NO: 3946 - RNA, 17 nt, Mus musculus
acuuagcuuuggagccu

SEQ ID NO: 3947 - RNA, 17 nt, Mus musculus
cuuagcuuuggagccua

SEQ ID NO: 3948 - RNA, 17 nt, Mus musculus
uggagccuaugaaaguu

SEQ ID NO: 3949 - RNA, 17 nt, Mus musculus
augaaaguugaucagcc

SEQ ID NO: 3950 - RNA, 18 nt, Mus musculus
auggucagcugcugggac

SEQ ID NO: 3951 - RNA, 18 nt, Mus musculus
gucagcugcugggacacc

SEQ ID NO: 3952 - RNA, 18 nt, Mus musculus
caccgcggucuugccuua

SEQ ID NO: 3953 - RNA, 18 nt, Mus musculus
acgcgcugcucggguguc

SEQ ID NO: 3954 - RNA, 18 nt, Mus musculus
ggugucugcuucucacag

SEQ ID NO: 3955 - RNA, 18 nt, Mus musculus
caggccagacucucuuuc

SEQ ID NO: 3956 - RNA, 18 nt, Mus musculus
ggaggcagcccacucaug

SEQ ID NO: 3957 - RNA, 18 nt, Mus musculus
ggucucugcccacgaccg

SEQ ID NO: 3958 - RNA, 18 nt, Mus musculus
cccaucggccugugggag

SEQ ID NO: 3959 - RNA, 18 nt, Mus musculus
gaagacagcucaucaucc

SEQ ID NO: 3960 - RNA, 18 nt, Mus musculus
auccccugccgggugacg

SEQ ID NO: 3961 - RNA, 18 nt, Mus musculus
uaccccugaugggcaaag

SEQ ID NO: 3962 - RNA, 18 nt, Mus musculus
uaggacugcugaacugcg

SEQ ID NO: 3963 - RNA, 18 nt, Mus musculus
acuaucugacccaucggc

SEQ ID NO: 3964 - RNA, 18 nt, Mus musculus
aucggcagaccaauacaa

SEQ ID NO: 3965 - RNA, 18 nt, Mus musculus
uacgcccgccgagcccag

SEQ ID NO: 3966 - RNA, 18 nt, Mus musculus
ugagacugcuccacgggc

SEQ ID NO: 3967 - RNA, 18 nt, Mus musculus
acgggcagacucuugucc

SEQ ID NO: 3968 - RNA, 18 nt, Mus musculus
ggcagcggauugaccgga

SEQ ID NO: 3969 - RNA, 18 nt, Mus musculus
uacaccugucgcgugaag

SEQ ID NO: 3970 - RNA, 18 nt, Mus musculus
cguuccagucuuucaaca

SEQ ID NO: 3971 - RNA, 18 nt, Mus musculus
ggaagcagccggugcagg

SEQ ID NO: 3972 - RNA, 18 nt, Mus musculus
gaagacgguccuaucggc

SEQ ID NO: 3973 - RNA, 18 nt, Mus musculus
ccuaucggcuguccauga

SEQ ID NO: 3974 - RNA, 18 nt, Mus musculus
aucggcuguccaugaaag

SEQ ID NO: 3975 - RNA, 18 nt, Mus musculus
gaagucugcucgcuauuu

SEQ ID NO: 3976 - RNA, 18 nt, Mus musculus
aaccucagaucuacgaaa

SEQ ID NO: 3977 - RNA, 18 nt, Mus musculus
ucuauccgcugggcagca

SEQ ID NO: 3978 - RNA, 18 nt, Mus musculus
gguggcugacucucagac

SEQ ID NO: 3979 - RNA, 18 nt, Mus musculus
acucucagaccccuggaa

SEQ ID NO: 3980 - RNA, 18 nt, Mus musculus
aucuacagcugccgggcc

SEQ ID NO: 3981 - RNA, 18 nt, Mus musculus
uacagcugccgggccuuc

SEQ ID NO: 3982 - RNA, 18 nt, Mus musculus
ugucacagaugugccgaa

SEQ ID NO: 3983 - RNA, 18 nt, Mus musculus
gaugccagccgaaggaga

SEQ ID NO: 3984 - RNA, 18 nt, Mus musculus
ugaaacuguccugugugg

SEQ ID NO: 3985 - RNA, 18 nt, Mus musculus
cacaccugcuucaaaacc

SEQ ID NO: 3986 - RNA, 18 nt, Mus musculus
cgccucagaucacuuggu

SEQ ID NO: 3987 - RNA, 18 nt, Mus musculus
aagcgcagccuaccucac

SEQ ID NO: 3988 - RNA, 18 nt, Mus musculus
uggagcugaucacgcuca

SEQ ID NO: 3989 - RNA, 18 nt, Mus musculus
ugaagcggucuucuuccg

SEQ ID NO: 3990 - RNA, 18 nt, Mus musculus
aaagacagacuaccuguc

SEQ ID NO: 3991 - RNA, 18 nt, Mus musculus
gugaacggcugcccuaug

SEQ ID NO: 3992 - RNA, 18 nt, Mus musculus
aacggcugcccuaugaug

SEQ ID NO: 3993 - RNA, 18 nt, Mus musculus
cccaccugccggacugug

SEQ ID NO: 3994 - RNA, 18 nt, Mus musculus
ccugccggacuguggcug

SEQ ID NO: 3995 - RNA, 18 nt, Mus musculus
aagcucugaugaccgaac

SEQ ID NO: 3996 - RNA, 18 nt, Mus musculus
ggccucugauggugaucg

SEQ ID NO: 3997 - RNA, 18 nt, Mus musculus
gaaaccuguccaacuacc

SEQ ID NO: 3998 - RNA, 18 nt, Mus musculus
uuauucugucucaacaag

SEQ ID NO: 3999 - RNA, 18 nt, Mus musculus
ggacgcagccuugcauau

SEQ ID NO: 4000 - RNA, 18 nt, Mus musculus
aagccccgccuagacagu

SEQ ID NO: 4001 - RNA, 18 nt, Mus musculus
gucagcagcucaaguguc

SEQ ID NO: 4002 - RNA, 18 nt, Mus musculus
gucaccagcuccagcuuc

SEQ ID NO: 4003 - RNA, 18 nt, Mus musculus
agcuccagcuucccugaa

SEQ ID NO: 4004 - RNA, 18 nt, Mus musculus
ccaagcagccccucacca

SEQ ID NO: 4005 - RNA, 18 nt, Mus musculus
aagaccugauuuccuaca

SEQ ID NO: 4006 - RNA, 18 nt, Mus musculus
uccuacaguuuccaagug

SEQ ID NO: 4007 - RNA, 18 nt, Mus musculus
aguuucuguccuccagaa

SEQ ID NO: 4008 - RNA, 18 nt, Mus musculus
gaacccugauuaugugag

SEQ ID NO: 4009 - RNA, 18 nt, Mus musculus
uucugcagccgccugaag

SEQ ID NO: 4010 - RNA, 18 nt, Mus musculus
ugcagccgccugaaggaa

SEQ ID NO: 4011 - RNA, 18 nt, Mus musculus
gcaugcggaugagaaccc

SEQ ID NO: 4012 - RNA, 18 nt, Mus musculus
ggccccgguuugcugaac

SEQ ID NO: 4013 - RNA, 18 nt, Mus musculus
gugaccugcuucaagcca

SEQ ID NO: 4014 - RNA, 18 nt, Mus musculus
ccauacugacuagaaaca

SEQ ID NO: 4015 - RNA, 18 nt, Mus musculus
aaggacggcuuugcagau

SEQ ID NO: 4016 - RNA, 18 nt, Mus musculus
cuuugcagauccacauuu

SEQ ID NO: 4017 - RNA, 18 nt, Mus musculus
aagcucugaugaugugag

SEQ ID NO: 4018 - RNA, 18 nt, Mus musculus
acuaucagcuggacacua

SEQ ID NO: 4019 - RNA, 18 nt, Mus musculus
gcacucugcugggcuccc

SEQ ID NO: 4020 - RNA, 18 nt, Mus musculus
ugaagcgguucaccugga

SEQ ID NO: 4021 - RNA, 18 nt, Mus musculus
acuuuccgaucugccgag

SEQ ID NO: 4022 - RNA, 18 nt, Mus musculus
ccgaucugccgaggccca

SEQ ID NO: 4023 - RNA, 18 nt, Mus musculus
aggcccagcuucugcuuc

SEQ ID NO: 4024 - RNA, 18 nt, Mus musculus
agcuucugcuucuccagc

SEQ ID NO: 4025 - RNA, 18 nt, Mus musculus
uucuccagcuguggccac

SEQ ID NO: 4026 - RNA, 18 nt, Mus musculus
gaguccugcuguucucca

SEQ ID NO: 4027 - RNA, 18 nt, Mus musculus
uccugcuguucuccaccc

SEQ ID NO: 4028 - RNA, 18 nt, Mus musculus
acccccagacuacaacuc

SEQ ID NO: 4029 - RNA, 18 nt, Mus musculus
ccuccccgcccgccuaaa

SEQ ID NO: 4030 - RNA, 18 nt, Mus musculus
cccgcccgccuaaagcuu

SEQ ID NO: 4031 - RNA, 18 nt, Mus musculus
cucaccagccccgacaac

SEQ ID NO: 4032 - RNA, 18 nt, Mus musculus
acaaccagccccugacag

SEQ ID NO: 4033 - RNA, 18 nt, Mus musculus
cuauuccgcuccacagga

SEQ ID NO: 4034 - RNA, 18 nt, Mus musculus
ggagccagcugcuuuucg

SEQ ID NO: 4035 - RNA, 18 nt, Mus musculus
gccagcugcuuuucguga

SEQ ID NO: 4036 - RNA, 18 nt, Mus musculus
uguugcuguuuugacuaa

SEQ ID NO: 4037 - RNA, 18 nt, Mus musculus
ggcgaccgcccgcccacc

SEQ ID NO: 4038 - RNA, 18 nt, Mus musculus
accgcccgcccaccggcc

SEQ ID NO: 4039 - RNA, 18 nt, Mus musculus
cccugcagcugugggacu

SEQ ID NO: 4040 - RNA, 18 nt, Mus musculus
augcacugaccugcucug

SEQ ID NO: 4041 - RNA, 18 nt, Mus musculus
cugaccugcucugucucu

SEQ ID NO: 4042 - RNA, 18 nt, Mus musculus
cugcucugucucucuuau

SEQ ID NO: 4043 - RNA, 18 nt, Mus musculus
ugcguccguccuguggag

SEQ ID NO: 4044 - RNA, 18 nt, Mus musculus
ggccuccgcuguuucggg

SEQ ID NO: 4045 - RNA, 18 nt, Mus musculus
cuccgcuguuucgggccc

SEQ ID NO: 4046 - RNA, 18 nt, Mus musculus
gucuucuguugucuguuu

SEQ ID NO: 4047 - RNA, 18 nt, Mus musculus
guugucuguuuaccaucc

SEQ ID NO: 4048 - RNA, 18 nt, Mus musculus
aucaucaguuccucuagu

SEQ ID NO: 4049 - RNA, 18 nt, Mus musculus
caggccugaccuucgcau

SEQ ID NO: 4050 - RNA, 18 nt, Mus musculus
gcauacugcucacgggga

SEQ ID NO: 4051 - RNA, 18 nt, Mus musculus
ugguccaguuuggccuag

SEQ ID NO: 4052 - RNA, 18 nt, Mus musculus
gccuacugaugggcucaa

SEQ ID NO: 4053 - RNA, 18 nt, Mus musculus
uuauccuguuuuauauau

SEQ ID NO: 4054 - RNA, 18 nt, Mus musculus
caaggcagucugagagga

SEQ ID NO: 4055 - RNA, 18 nt, Mus musculus
aguaucagcccauauuua

SEQ ID NO: 4056 - RNA, 18 nt, Mus musculus
uucaucuguuucauaccu

SEQ ID NO: 4057 - RNA, 18 nt, Mus musculus
ggugcccgcucuuugggg

SEQ ID NO: 4058 - RNA, 18 nt, Mus musculus
cacaccugccggagccgg

SEQ ID NO: 4059 - RNA, 18 nt, Mus musculus
ggucacagcugggcagac

SEQ ID NO: 4060 - RNA, 18 nt, Mus musculus
cugggcagacgaugaaua

SEQ ID NO: 4061 - RNA, 18 nt, Mus musculus
aauagcugcuuugggaga

SEQ ID NO: 4062 - RNA, 18 nt, Mus musculus
auucucugaccgggccag

SEQ ID NO: 4063 - RNA, 18 nt, Mus musculus
gguaccugcuccccugug

SEQ ID NO: 4064 - RNA, 18 nt, Mus musculus
guuuucugucugaugaga

SEQ ID NO: 4065 - RNA, 18 nt, Mus musculus
ucugucugaugagacugg

SEQ ID NO: 4066 - RNA, 18 nt, Mus musculus
ugagacagccugcagccc

SEQ ID NO: 4067 - RNA, 18 nt, Mus musculus
gccugcagcccacugugg

SEQ ID NO: 4068 - RNA, 18 nt, Mus musculus
cuugucggcugcagugug

SEQ ID NO: 4069 - RNA, 18 nt, Mus musculus
agaaacggaugagaacag

SEQ ID NO: 4070 - RNA, 18 nt, Mus musculus
aacagcagccugagguuu

SEQ ID NO: 4071 - RNA, 18 nt, Mus musculus
uuauuccgauuuuaauaa

SEQ ID NO: 4072 - RNA, 18 nt, Mus musculus
ugguucugcuuaaagacu

SEQ ID NO: 4073 - RNA, 15 nt, Homo sapiens
ccgggauauuuauaa

SEQ ID NO: 4074 - RNA, 15 nt, Homo sapiens
aauguauacacaggg

SEQ ID NO: 4075 - RNA, 15 nt, Homo sapiens
ugcaaauauggaaau

SEQ ID NO: 4076 - RNA, 15 nt, Homo sapiens
cucccuuaugaugcc

SEQ ID NO: 4077 - RNA, 15 nt, Homo sapiens
guugaauacugcaaa

SEQ ID NO: 4078 - RNA, 15 nt, Homo sapiens
uaugguuaaaagaug

SEQ ID NO: 4079 - RNA, 15 nt, Homo sapiens
gggauauuuauaaga

SEQ ID NO: 4080 - RNA, 15 nt, Homo sapiens
ggauauuuauaagaa

SEQ ID NO: 4081 - RNA, 15 nt, Homo sapiens
acgugguuaaccugc

SEQ ID NO: 4082 - RNA, 15 nt, Homo sapiens
uauuucuagucauga

SEQ ID NO: 4083 - RNA, 15 nt, Homo sapiens
caauaauagaaggaa

SEQ ID NO: 4084 - RNA, 15 nt, Homo sapiens
gagacuuaaacuggg

SEQ ID NO: 4085 - RNA, 15 nt, Homo sapiens
gaugacuaccagggc

SEQ ID NO: 4086 - RNA, 15 nt, Homo sapiens
uuaauguagaaagaa

SEQ ID NO: 4087 - RNA, 15 nt, Homo sapiens
gccauuuaugacaaa

SEQ ID NO: 4088 - RNA, 15 nt, Homo sapiens
gucaaauuacuuaga

SEQ ID NO: 4089 - RNA, 15 nt, Homo sapiens
auaaaguugggacug

SEQ ID NO: 4090 - RNA, 15 nt, Homo sapiens
acuugguuuaaaaac

SEQ ID NO: 4091 - RNA, 15 nt, Homo sapiens
aagugguucaagcau

SEQ ID NO: 4092 - RNA, 15 nt, Homo sapiens
uucuccuuagguggg

SEQ ID NO: 4093 - RNA, 15 nt, Homo sapiens
ucuccuuaggugggu

SEQ ID NO: 4094 - RNA, 15 nt, Homo sapiens
guacucuacuccuga

SEQ ID NO: 4095 - RNA, 15 nt, Homo sapiens
agcaccuugguugug

SEQ ID NO: 4096 - RNA, 15 nt, Homo sapiens
ggcaaaucacuugga

SEQ ID NO: 4097 - RNA, 15 nt, Homo sapiens
caagcaucagcauuu

SEQ ID NO: 4098 - RNA, 15 nt, Homo sapiens
gagagcuccugagua

SEQ ID NO: 4099 - RNA, 15 nt, Homo sapiens
aaggccucgcucaag

SEQ ID NO: 4100 - RNA, 15 nt, Homo sapiens
ucuccauaucaaaac

SEQ ID NO: 4101 - RNA, 15 nt, Homo sapiens
auguauuuuguauac

SEQ ID NO: 4102 - RNA, 15 nt, Homo sapiens
cuagaauuucuggaa

SEQ ID NO: 4103 - RNA, 15 nt, Homo sapiens
cucucuucuggcucc

SEQ ID NO: 4104 - RNA, 15 nt, Homo sapiens
cuguacuccacccca

SEQ ID NO: 4105 - RNA, 15 nt, Homo sapiens
acaugguuugguccu

SEQ ID NO: 4106 - RNA, 15 nt, Homo sapiens
auggucuuugccuga

SEQ ID NO: 4107 - RNA, 15 nt, Homo sapiens
gcaccauaccuccug

SEQ ID NO: 4108 - RNA, 15 nt, Homo sapiens
gggcuuuuggaaaag

SEQ ID NO: 4109 - RNA, 15 nt, Homo sapiens
ccagacuacaacucg

SEQ ID NO: 4110 - RNA, 15 nt, Homo sapiens
guuuucuccauauca

SEQ ID NO: 4111 - RNA, 15 nt, Homo sapiens
agaauguaugccucu

SEQ ID NO: 4112 - RNA, 15 nt, Homo sapiens
auucccuagugagcc

SEQ ID NO: 4113 - RNA, 15 nt, Homo sapiens
uguuguuccucuucu

SEQ ID NO: 4114 - RNA, 15 nt, Homo sapiens
gcuuccuuuuaucca

SEQ ID NO: 4115 - RNA, 15 nt, Homo sapiens
uauauauucucugcu

SEQ ID NO: 4116 - RNA, 15 nt, Homo sapiens
aguguauccacaggg

SEQ ID NO: 4117 - RNA, 15 nt, Homo sapiens
ugcaaauuuggaaac

SEQ ID NO: 4118 - RNA, 15 nt, Homo sapiens
cugccuuaugaugcc

SEQ ID NO: 4119 - RNA, 15 nt, Homo sapiens
guggaauucugcaaa

SEQ ID NO: 4120 - RNA, 15 nt, Homo sapiens
ugugguuuaaagaua

SEQ ID NO: 4121 - RNA, 15 nt, Homo sapiens
gggauauuuauaaag

SEQ ID NO: 4122 - RNA, 15 nt, Homo sapiens
ggauauuuauaaaga

SEQ ID NO: 4123 - RNA, 15 nt, Homo sapiens
auguggucaaccuuc

SEQ ID NO: 4124 - RNA, 15 nt, Homo sapiens
uacuucuugucauca

SEQ ID NO: 4125 - RNA, 15 nt, Homo sapiens
cucuaauugaaggaa

SEQ ID NO: 4126 - RNA, 15 nt, Homo sapiens
uugacuucaacuggg

SEQ ID NO: 4127 - RNA, 15 nt, Homo sapiens
gaggacuuccaggga

SEQ ID NO: 4128 - RNA, 15 nt, Homo sapiens
aaaauguugaaagaa

SEQ ID NO: 4129 - RNA, 15 nt, Homo sapiens
acaauuuuugacaga

SEQ ID NO: 4130 - RNA, 15 nt, Homo sapiens
uucaaauuacuugca

SEQ ID NO: 4131 - RNA, 15 nt, Homo sapiens
acaaagucgggagag

SEQ ID NO: 4132 - RNA, 15 nt, Homo sapiens
aaaugguauaaaaau

SEQ ID NO: 4133 - RNA, 15 nt, Homo sapiens
acaugguacaagcuu

SEQ ID NO: 4134 - RNA, 15 nt, Homo sapiens
uuuuccuuaggugcu

SEQ ID NO: 4135 - RNA, 15 nt, Homo sapiens
uuuccuuaggugcuu

SEQ ID NO: 4136 - RNA, 15 nt, Homo sapiens
gagcucuccuccugu

SEQ ID NO: 4137 - RNA, 15 nt, Homo sapiens
aguaccuugguuacc

SEQ ID NO: 4138 - RNA, 15 nt, Homo sapiens
gaagcaucagcauaa

SEQ ID NO: 4139 - RNA, 15 nt, Homo sapiens
ggaagcuccugaaga

SEQ ID NO: 4140 - RNA, 15 nt, Homo sapiens
ucugccuugcucaag

SEQ ID NO: 4141 - RNA, 15 nt, Homo sapiens
gguccauuucaaauc

SEQ ID NO: 4142 - RNA, 15 nt, Homo sapiens
gucuauuauguacau

SEQ ID NO: 4143 - RNA, 15 nt, Homo sapiens
auggaaucucuggug

SEQ ID NO: 4144 - RNA, 15 nt, Homo sapiens
uguucuucuggcuac

SEQ ID NO: 4145 - RNA, 15 nt, Homo sapiens
uuauacuacaccaga

SEQ ID NO: 4146 - RNA, 15 nt, Homo sapiens
cagugguaugguucu

SEQ ID NO: 4147 - RNA, 15 nt, Homo sapiens
acggucuaugccauu

SEQ ID NO: 4148 - RNA, 15 nt, Homo sapiens
augccauuccucccc

SEQ ID NO: 4149 - RNA, 15 nt, Homo sapiens
uugcuuuuggaagug

SEQ ID NO: 4150 - RNA, 15 nt, Homo sapiens
auugacuucaacugg

SEQ ID NO: 4151 - RNA, 15 nt, Homo sapiens
ugcuucuccauaucc

SEQ ID NO: 4152 - RNA, 15 nt, Homo sapiens
acuaugucugccuug

SEQ ID NO: 4153 - RNA, 15 nt, Homo sapiens
auacccuugugaaga

SEQ ID NO: 4154 - RNA, 15 nt, Homo sapiens
uaguguuucucuuga

SEQ ID NO: 4155 - RNA, 15 nt, Homo sapiens
auauccucuuaucgg

SEQ ID NO: 4156 - RNA, 15 nt, Homo sapiens
gaaauauccucuuau

SEQ ID NO: 4157 - RNA, 17 nt, Homo sapiens
gcggacacuccucucgg

SEQ ID NO: 4158 - RNA, 17 nt, Homo sapiens
ggacacuccucucggcu

SEQ ID NO: 4159 - RNA, 17 nt, Homo sapiens
gacacuccucucggcuc

SEQ ID NO: 4160 - RNA, 17 nt, Homo sapiens
cacuccucucggcuccu

SEQ ID NO: 4161 - RNA, 17 nt, Homo sapiens
cucucggcuccuccccg

SEQ ID NO: 4162 - RNA, 17 nt, Homo sapiens
cucggcuccuccccggc

SEQ ID NO: 4163 - RNA, 17 nt, Homo sapiens
ucggcuccuccccggca

SEQ ID NO: 4164 - RNA, 17 nt, Homo sapiens
ggcuccuccccggcagc

SEQ ID NO: 4165 - RNA, 17 nt, Homo sapiens
gcuccuccccggcagcg

SEQ ID NO: 4166 - RNA, 17 nt, Homo sapiens
cuccuccccggcagcgg

SEQ ID NO: 4167 - RNA, 17 nt, Homo sapiens
uccccggcagcggcggc

SEQ ID NO: 4168 - RNA, 17 nt, Homo sapiens
gcggcggcucggagcgg

SEQ ID NO: 4169 - RNA, 17 nt, Homo sapiens
gagcgggcuccggggcu

SEQ ID NO: 4170 - RNA, 17 nt, Homo sapiens
gcgggcuccggggcucg

SEQ ID NO: 4171 - RNA, 17 nt, Homo sapiens
uccggggcucgggugca

SEQ ID NO: 4172 - RNA, 17 nt, Homo sapiens
ucgggugcagcggccag

SEQ ID NO: 4173 - RNA, 17 nt, Homo sapiens
gcagcggccagcgggcc

SEQ ID NO: 4174 - RNA, 17 nt, Homo sapiens
cagcggccagcgggccu

SEQ ID NO: 4175 - RNA, 17 nt, Homo sapiens
cagcgggccuggcggcg

SEQ ID NO: 4176 - RNA, 17 nt, Homo sapiens
agcgggccuggcggcga

SEQ ID NO: 4177 - RNA, 17 nt, Homo sapiens
aggauuacccggggaag

SEQ ID NO: 4178 - RNA, 17 nt, Homo sapiens
ggauuacccggggaagu

SEQ ID NO: 4179 - RNA, 17 nt, Homo sapiens
ugguugucuccuggcug

SEQ ID NO: 4180 - RNA, 17 nt, Homo sapiens
guugucuccuggcugga

SEQ ID NO: 4181 - RNA, 17 nt, Homo sapiens
uugucuccuggcuggag

SEQ ID NO: 4182 - RNA, 17 nt, Homo sapiens
cuccuggcuggagccgc

SEQ ID NO: 4183 - RNA, 17 nt, Homo sapiens
gcuggagccgcgagacg

SEQ ID NO: 4184 - RNA, 17 nt, Homo sapiens
acgggcgcucagggcgc

SEQ ID NO: 4185 - RNA, 17 nt, Homo sapiens
gggcgcucagggcgcgg

SEQ ID NO: 4186 - RNA, 17 nt, Homo sapiens
cgcggggccggcggcgg

SEQ ID NO: 4187 - RNA, 17 nt, Homo sapiens
ggacggacucuggcggc

SEQ ID NO: 4188 - RNA, 17 nt, Homo sapiens
acggacucuggcggccg

SEQ ID NO: 4189 - RNA, 17 nt, Homo sapiens
cuggcggccgggucguu

SEQ ID NO: 4190 - RNA, 17 nt, Homo sapiens
ucguuggccgggggagc

SEQ ID NO: 4191 - RNA, 17 nt, Homo sapiens
gcgcgggcaccgggcga

SEQ ID NO: 4192 - RNA, 17 nt, Homo sapiens
gcgggcaccgggcgagc

SEQ ID NO: 4193 - RNA, 17 nt, Homo sapiens
gggcgagcaggccgcgu

SEQ ID NO: 4194 - RNA, 17 nt, Homo sapiens
gagcaggccgcgucgcg

SEQ ID NO: 4195 - RNA, 17 nt, Homo sapiens
cgucgcgcucaccaugg

SEQ ID NO: 4196 - RNA, 17 nt, Homo sapiens
ucgcgcucaccaugguc

SEQ ID NO: 4197 - RNA, 17 nt, Homo sapiens
gcgcucaccauggucag

SEQ ID NO: 4198 - RNA, 17 nt, Homo sapiens
cgcucaccauggucagc

SEQ ID NO: 4199 - RNA, 17 nt, Homo sapiens
ccauggucagcuacugg

SEQ ID NO: 4200 - RNA, 17 nt, Homo sapiens
uggucagcuacugggac

SEQ ID NO: 4201 - RNA, 17 nt, Homo sapiens
ucagcuacugggacacc

SEQ ID NO: 4202 - RNA, 17 nt, Homo sapiens
acugggacaccgggguc

SEQ ID NO: 4203 - RNA, 17 nt, Homo sapiens
ugggacaccgggguccu

SEQ ID NO: 4204 - RNA, 17 nt, Homo sapiens
ccgggguccugcugugc

SEQ ID NO: 4205 - RNA, 17 nt, Homo sapiens
cgggguccugcugugcg

SEQ ID NO: 4206 - RNA, 17 nt, Homo sapiens
gguccugcugugcgcgc

SEQ ID NO: 4207 - RNA, 17 nt, Homo sapiens
gugcgcgcugcucagcu

SEQ ID NO: 4208 - RNA, 17 nt, Homo sapiens
cgcgcugcucagcuguc

SEQ ID NO: 4209 - RNA, 17 nt, Homo sapiens
cgcugcucagcugucug

SEQ ID NO: 4210 - RNA, 17 nt, Homo sapiens
ugcucagcugucugcuu

SEQ ID NO: 4211 - RNA, 17 nt, Homo sapiens
cagcugucugcuucuca

SEQ ID NO: 4212 - RNA, 17 nt, Homo sapiens
cugucugcuucucacag

SEQ ID NO: 4213 - RNA, 17 nt, Homo sapiens
ucugcuucucacaggau

SEQ ID NO: 4214 - RNA, 17 nt, Homo sapiens
ugcuucucacaggaucu

SEQ ID NO: 4215 - RNA, 17 nt, Homo sapiens
cuucucacaggaucuag

SEQ ID NO: 4216 - RNA, 17 nt, Homo sapiens
acaggaucuaguucagg

SEQ ID NO: 4217 - RNA, 17 nt, Homo sapiens
ucuaguucagguucaaa

SEQ ID NO: 4218 - RNA, 17 nt, Homo sapiens
ucagguucaaaauuaaa

SEQ ID NO: 4219 - RNA, 17 nt, Homo sapiens
aaaagauccugaacuga

SEQ ID NO: 4220 - RNA, 17 nt, Homo sapiens
aaagauccugaacugag

SEQ ID NO: 4221 - RNA, 17 nt, Homo sapiens
uccugaacugaguuuaa

SEQ ID NO: 4222 - RNA, 17 nt, Homo sapiens
uaaaaggcacccagcac

SEQ ID NO: 4223 - RNA, 17 nt, Homo sapiens
aaaggcacccagcacau

SEQ ID NO: 4224 - RNA, 17 nt, Homo sapiens
aaggcacccagcacauc

SEQ ID NO: 4225 - RNA, 17 nt, Homo sapiens
aggcacccagcacauca

SEQ ID NO: 4226 - RNA, 17 nt, Homo sapiens
cacccagcacaucaugc

SEQ ID NO: 4227 - RNA, 17 nt, Homo sapiens
cccagcacaucaugcaa

SEQ ID NO: 4228 - RNA, 17 nt, Homo sapiens
agcacaucaugcaagca

SEQ ID NO: 4229 - RNA, 17 nt, Homo sapiens
caucaugcaagcaggcc

SEQ ID NO: 4230 - RNA, 17 nt, Homo sapiens
augcaagcaggccagac

SEQ ID NO: 4231 - RNA, 17 nt, Homo sapiens
aagcaggccagacacug

SEQ ID NO: 4232 - RNA, 17 nt, Homo sapiens
agcaggccagacacugc

SEQ ID NO: 4233 - RNA, 17 nt, Homo sapiens
ggccagacacugcaucu

SEQ ID NO: 4234 - RNA, 17 nt, Homo sapiens
ccagacacugcaucucc

SEQ ID NO: 4235 - RNA, 17 nt, Homo sapiens
gacacugcaucuccaau

SEQ ID NO: 4236 - RNA, 17 nt, Homo sapiens
acugcaucuccaaugca

SEQ ID NO: 4237 - RNA, 17 nt, Homo sapiens
ugcaucuccaaugcagg

SEQ ID NO: 4238 - RNA, 17 nt, Homo sapiens
gcaucuccaaugcaggg

SEQ ID NO: 4239 - RNA, 17 nt, Homo sapiens
uccaaugcaggggggaa

SEQ ID NO: 4240 - RNA, 17 nt, Homo sapiens
ggggaagcagcccauaa

SEQ ID NO: 4241 - RNA, 17 nt, Homo sapiens
gaagcagcccauaaaug

SEQ ID NO: 4242 - RNA, 17 nt, Homo sapiens
aagcagcccauaaaugg

SEQ ID NO: 4243 - RNA, 17 nt, Homo sapiens
agcagcccauaaauggu

SEQ ID NO: 4244 - RNA, 17 nt, Homo sapiens
aaauggucuuugccuga

SEQ ID NO: 4245 - RNA, 17 nt, Homo sapiens
gucuuugccugaaaugg

SEQ ID NO: 4246 - RNA, 17 nt, Homo sapiens
ucuuugccugaaauggu

SEQ ID NO: 4247 - RNA, 17 nt, Homo sapiens
cgaaaggcugagcauaa

SEQ ID NO: 4248 - RNA, 17 nt, Homo sapiens
ggcugagcauaacuaaa

SEQ ID NO: 4249 - RNA, 17 nt, Homo sapiens
agcauaacuaaaucugc

SEQ ID NO: 4250 - RNA, 17 nt, Homo sapiens
acuaaaucugccugugg

SEQ ID NO: 4251 - RNA, 17 nt, Homo sapiens
aaaucugccuguggaag

SEQ ID NO: 4252 - RNA, 17 nt, Homo sapiens
aaucugccuguggaaga

SEQ ID NO: 4253 - RNA, 17 nt, Homo sapiens
gaaauggcaaacaauuc

SEQ ID NO: 4254 - RNA, 17 nt, Homo sapiens
uggcaaacaauucugca

SEQ ID NO: 4255 - RNA, 17 nt, Homo sapiens
aacaauucugcaguacu

SEQ ID NO: 4256 - RNA, 17 nt, Homo sapiens
aauucugcaguacuuua

SEQ ID NO: 4257 - RNA, 17 nt, Homo sapiens
ugcaguacuuuaaccuu

SEQ ID NO: 4258 - RNA, 17 nt, Homo sapiens
acuuuaaccuugaacac

SEQ ID NO: 4259 - RNA, 17 nt, Homo sapiens
cuuuaaccuugaacaca

SEQ ID NO: 4260 - RNA, 17 nt, Homo sapiens
ccuugaacacagcucaa

SEQ ID NO: 4261 - RNA, 17 nt, Homo sapiens
uugaacacagcucaagc

SEQ ID NO: 4262 - RNA, 17 nt, Homo sapiens
aacacagcucaagcaaa

SEQ ID NO: 4263 - RNA, 17 nt, Homo sapiens
cacagcucaagcaaacc

SEQ ID NO: 4264 - RNA, 17 nt, Homo sapiens
gcucaagcaaaccacac

SEQ ID NO: 4265 - RNA, 17 nt, Homo sapiens
aagcaaaccacacuggc

SEQ ID NO: 4266 - RNA, 17 nt, Homo sapiens
agcaaaccacacuggcu

SEQ ID NO: 4267 - RNA, 17 nt, Homo sapiens
caaaccacacuggcuuc

SEQ ID NO: 4268 - RNA, 17 nt, Homo sapiens
aaccacacuggcuucua

SEQ ID NO: 4269 - RNA, 17 nt, Homo sapiens
acacuggcuucuacagc

SEQ ID NO: 4270 - RNA, 17 nt, Homo sapiens
cuggcuucuacagcugc

SEQ ID NO: 4271 - RNA, 17 nt, Homo sapiens
gcuucuacagcugcaaa

SEQ ID NO: 4272 - RNA, 17 nt, Homo sapiens
ucuacagcugcaaauau

SEQ ID NO: 4273 - RNA, 17 nt, Homo sapiens
acagcugcaaauaucua

SEQ ID NO: 4274 - RNA, 17 nt, Homo sapiens
caaauaucuagcuguac

SEQ ID NO: 4275 - RNA, 17 nt, Homo sapiens
uaucuagcuguaccuac

SEQ ID NO: 4276 - RNA, 17 nt, Homo sapiens
agcuguaccuacuucaa

SEQ ID NO: 4277 - RNA, 17 nt, Homo sapiens
gcuguaccuacuucaaa

SEQ ID NO: 4278 - RNA, 17 nt, Homo sapiens
guaccuacuucaaagaa

SEQ ID NO: 4279 - RNA, 17 nt, Homo sapiens
ccuacuucaaagaagaa

SEQ ID NO: 4280 - RNA, 17 nt, Homo sapiens
aaggaaacagaaucugc

SEQ ID NO: 4281 - RNA, 17 nt, Homo sapiens
acagaaucugcaaucua

SEQ ID NO: 4282 - RNA, 17 nt, Homo sapiens
gaaucugcaaucuauau

SEQ ID NO: 4283 - RNA, 17 nt, Homo sapiens
cugcaaucuauauauuu

SEQ ID NO: 4284 - RNA, 17 nt, Homo sapiens
agugauacagguagacc

SEQ ID NO: 4285 - RNA, 17 nt, Homo sapiens
agguagaccuuucguag

SEQ ID NO: 4286 - RNA, 17 nt, Homo sapiens
gguagaccuuucguaga

SEQ ID NO: 4287 - RNA, 17 nt, Homo sapiens
agauguacagugaaauc

SEQ ID NO: 4288 - RNA, 17 nt, Homo sapiens
gugaaauccccgaaauu

SEQ ID NO: 4289 - RNA, 17 nt, Homo sapiens
ugaaauccccgaaauua

SEQ ID NO: 4290 - RNA, 17 nt, Homo sapiens
gaaauccccgaaauuau

SEQ ID NO: 4291 - RNA, 17 nt, Homo sapiens
aauuauacacaugacug

SEQ ID NO: 4292 - RNA, 17 nt, Homo sapiens
uuauacacaugacugaa

SEQ ID NO: 4293 - RNA, 17 nt, Homo sapiens
cacaugacugaaggaag

SEQ ID NO: 4294 - RNA, 17 nt, Homo sapiens
aagggagcucgucauuc

SEQ ID NO: 4295 - RNA, 17 nt, Homo sapiens
agcucgucauucccugc

SEQ ID NO: 4296 - RNA, 17 nt, Homo sapiens
cgucauucccugccggg

SEQ ID NO: 4297 - RNA, 17 nt, Homo sapiens
gucauucccugccgggu

SEQ ID NO: 4298 - RNA, 17 nt, Homo sapiens
ucauucccugccggguu

SEQ ID NO: 4299 - RNA, 17 nt, Homo sapiens
uucccugccggguuacg

SEQ ID NO: 4300 - RNA, 17 nt, Homo sapiens
guuacgucaccuaacau

SEQ ID NO: 4301 - RNA, 17 nt, Homo sapiens
uacgucaccuaacauca

SEQ ID NO: 4302 - RNA, 17 nt, Homo sapiens
acgucaccuaacaucac

SEQ ID NO: 4303 - RNA, 17 nt, Homo sapiens
caccuaacaucacuguu

SEQ ID NO: 4304 - RNA, 17 nt, Homo sapiens
cuaacaucacuguuacu

SEQ ID NO: 4305 - RNA, 17 nt, Homo sapiens
aacaucacuguuacuuu

SEQ ID NO: 4306 - RNA, 17 nt, Homo sapiens
acuguuacuuuaaaaaa

SEQ ID NO: 4307 - RNA, 17 nt, Homo sapiens
aaaguuuccacuugaca

SEQ ID NO: 4308 - RNA, 17 nt, Homo sapiens
aaguuuccacuugacac

SEQ ID NO: 4309 - RNA, 17 nt, Homo sapiens
guuuccacuugacacuu

SEQ ID NO: 4310 - RNA, 17 nt, Homo sapiens
cacuugacacuuugauc

SEQ ID NO: 4311 - RNA, 17 nt, Homo sapiens
cuugacacuuugauccc

SEQ ID NO: 4312 - RNA, 17 nt, Homo sapiens
cuuugaucccugaugga

SEQ ID NO: 4313 - RNA, 17 nt, Homo sapiens
uuugaucccugauggaa

SEQ ID NO: 4314 - RNA, 17 nt, Homo sapiens
uugaucccugauggaaa

SEQ ID NO: 4315 - RNA, 17 nt, Homo sapiens
gaaaacgcauaaucugg

SEQ ID NO: 4316 - RNA, 17 nt, Homo sapiens
gcauaaucugggacagu

SEQ ID NO: 4317 - RNA, 17 nt, Homo sapiens
ucugggacaguagaaag

SEQ ID NO: 4318 - RNA, 17 nt, Homo sapiens
gaaagggcuucaucaua

SEQ ID NO: 4319 - RNA, 17 nt, Homo sapiens
agggcuucaucauauca

SEQ ID NO: 4320 - RNA, 17 nt, Homo sapiens
gcuucaucauaucaaau

SEQ ID NO: 4321 - RNA, 17 nt, Homo sapiens
aucauaucaaaugcaac

SEQ ID NO: 4322 - RNA, 17 nt, Homo sapiens
ucaaaugcaacguacaa

SEQ ID NO: 4323 - RNA, 17 nt, Homo sapiens
caacguacaaagaaaua

SEQ ID NO: 4324 - RNA, 17 nt, Homo sapiens
aauagggcuucugaccu

SEQ ID NO: 4325 - RNA, 17 nt, Homo sapiens
agggcuucugaccugug

SEQ ID NO: 4326 - RNA, 17 nt, Homo sapiens
cuucugaccugugaagc

SEQ ID NO: 4327 - RNA, 17 nt, Homo sapiens
uucugaccugugaagca

SEQ ID NO: 4328 - RNA, 17 nt, Homo sapiens
ugugaagcaacagucaa

SEQ ID NO: 4329 - RNA, 17 nt, Homo sapiens
gaagcaacagucaaugg

SEQ ID NO: 4330 - RNA, 17 nt, Homo sapiens
caacagucaaugggcau

SEQ ID NO: 4331 - RNA, 17 nt, Homo sapiens
caaugggcauuuguaua

SEQ ID NO: 4332 - RNA, 17 nt, Homo sapiens
uauaagacaaacuaucu

SEQ ID NO: 4333 - RNA, 17 nt, Homo sapiens
agacaaacuaucucaca

SEQ ID NO: 4334 - RNA, 17 nt, Homo sapiens
aaacuaucucacacauc

SEQ ID NO: 4335 - RNA, 17 nt, Homo sapiens
acuaucucacacaucga

SEQ ID NO: 4336 - RNA, 17 nt, Homo sapiens
uaucucacacaucgaca

SEQ ID NO: 4337 - RNA, 17 nt, Homo sapiens
ucucacacaucgacaaa

SEQ ID NO: 4338 - RNA, 17 nt, Homo sapiens
acaucgacaaaccaaua

SEQ ID NO: 4339 - RNA, 17 nt, Homo sapiens
cgacaaaccaauacaau

SEQ ID NO: 4340 - RNA, 17 nt, Homo sapiens
gacaaaccaauacaauc

SEQ ID NO: 4341 - RNA, 17 nt, Homo sapiens
accaauacaaucauaga

SEQ ID NO: 4342 - RNA, 17 nt, Homo sapiens
auacaaucauagauguc

SEQ ID NO: 4343 - RNA, 17 nt, Homo sapiens
uagauguccaaauaagc

SEQ ID NO: 4344 - RNA, 17 nt, Homo sapiens
agauguccaaauaagca

SEQ ID NO: 4345 - RNA, 17 nt, Homo sapiens
aaauaagcacaccacgc

SEQ ID NO: 4346 - RNA, 17 nt, Homo sapiens
auaagcacaccacgccc

SEQ ID NO: 4347 - RNA, 17 nt, Homo sapiens
aagcacaccacgcccag

SEQ ID NO: 4348 - RNA, 17 nt, Homo sapiens
agcacaccacgcccagu

SEQ ID NO: 4349 - RNA, 17 nt, Homo sapiens
caccacgcccagucaaa

SEQ ID NO: 4350 - RNA, 17 nt, Homo sapiens
accacgcccagucaaau

SEQ ID NO: 4351 - RNA, 17 nt, Homo sapiens
ccacgcccagucaaauu

SEQ ID NO: 4352 - RNA, 17 nt, Homo sapiens
gcccagucaaauuacuu

SEQ ID NO: 4353 - RNA, 17 nt, Homo sapiens
caaauuacuuagaggcc

SEQ ID NO: 4354 - RNA, 17 nt, Homo sapiens
uuagaggccauacucuu

SEQ ID NO: 4355 - RNA, 17 nt, Homo sapiens
uagaggccauacucuug

SEQ ID NO: 4356 - RNA, 17 nt, Homo sapiens
ggccauacucuuguccu

SEQ ID NO: 4357 - RNA, 17 nt, Homo sapiens
ccauacucuuguccuca

SEQ ID NO: 4358 - RNA, 17 nt, Homo sapiens
cucuuguccucaauugu

SEQ ID NO: 4359 - RNA, 17 nt, Homo sapiens
ucuuguccucaauugua

SEQ ID NO: 4360 - RNA, 17 nt, Homo sapiens
uuguccucaauuguacu

SEQ ID NO: 4361 - RNA, 17 nt, Homo sapiens
aauuguacugcuaccac

SEQ ID NO: 4362 - RNA, 17 nt, Homo sapiens
uguacugcuaccacucc

SEQ ID NO: 4363 - RNA, 17 nt, Homo sapiens
acugcuaccacucccuu

SEQ ID NO: 4364 - RNA, 17 nt, Homo sapiens
cugcuaccacucccuug

SEQ ID NO: 4365 - RNA, 17 nt, Homo sapiens
gcuaccacucccuugaa

SEQ ID NO: 4366 - RNA, 17 nt, Homo sapiens
uaccacucccuugaaca

SEQ ID NO: 4367 - RNA, 17 nt, Homo sapiens
accacucccuugaacac

SEQ ID NO: 4368 - RNA, 17 nt, Homo sapiens
ccacucccuugaacacg

SEQ ID NO: 4369 - RNA, 17 nt, Homo sapiens
ccuugaacacgagaguu

SEQ ID NO: 4370 - RNA, 17 nt, Homo sapiens
gagaguucaaaugaccu

SEQ ID NO: 4371 - RNA, 17 nt, Homo sapiens
caaaugaccuggaguua

SEQ ID NO: 4372 - RNA, 17 nt, Homo sapiens
aaaugaccuggaguuac

SEQ ID NO: 4373 - RNA, 17 nt, Homo sapiens
ggaguuacccugaugaa

SEQ ID NO: 4374 - RNA, 17 nt, Homo sapiens
gaguuacccugaugaaa

SEQ ID NO: 4375 - RNA, 17 nt, Homo sapiens
aguuacccugaugaaaa

SEQ ID NO: 4376 - RNA, 17 nt, Homo sapiens
aagagagcuuccguaag

SEQ ID NO: 4377 - RNA, 17 nt, Homo sapiens
agagcuuccguaaggcg

SEQ ID NO: 4378 - RNA, 17 nt, Homo sapiens
gaauugaccaaagcaau

SEQ ID NO: 4379 - RNA, 17 nt, Homo sapiens
aauugaccaaagcaauu

SEQ ID NO: 4380 - RNA, 17 nt, Homo sapiens
accaaagcaauucccau

SEQ ID NO: 4381 - RNA, 17 nt, Homo sapiens
agcaauucccaugccaa

SEQ ID NO: 4382 - RNA, 17 nt, Homo sapiens
gcaauucccaugccaac

SEQ ID NO: 4383 - RNA, 17 nt, Homo sapiens
caauucccaugccaaca

SEQ ID NO: 4384 - RNA, 17 nt, Homo sapiens
ucccaugccaacauauu

SEQ ID NO: 4385 - RNA, 17 nt, Homo sapiens
cccaugccaacauauuc

SEQ ID NO: 4386 - RNA, 17 nt, Homo sapiens
augccaacauauucuac

SEQ ID NO: 4387 - RNA, 17 nt, Homo sapiens
acauauucuacaguguu

SEQ ID NO: 4388 - RNA, 17 nt, Homo sapiens
uauucuacaguguucuu

SEQ ID NO: 4389 - RNA, 17 nt, Homo sapiens
caguguucuuacuauug

SEQ ID NO: 4390 - RNA, 17 nt, Homo sapiens
guucuuacuauugacaa

SEQ ID NO: 4391 - RNA, 17 nt, Homo sapiens
cuauugacaaaaugcag

SEQ ID NO: 4392 - RNA, 17 nt, Homo sapiens
caaaaugcagaacaaag

SEQ ID NO: 4393 - RNA, 17 nt, Homo sapiens
ugcagaacaaagacaaa

SEQ ID NO: 4394 - RNA, 17 nt, Homo sapiens
acaaagacaaaggacuu

SEQ ID NO: 4395 - RNA, 17 nt, Homo sapiens
caaaggacuuuauacuu

SEQ ID NO: 4396 - RNA, 17 nt, Homo sapiens
cuuuauacuugucgugu

SEQ ID NO: 4397 - RNA, 17 nt, Homo sapiens
gaguggaccaucauuca

SEQ ID NO: 4398 - RNA, 17 nt, Homo sapiens
aguggaccaucauucaa

SEQ ID NO: 4399 - RNA, 17 nt, Homo sapiens
ggaccaucauucaaauc

SEQ ID NO: 4400 - RNA, 17 nt, Homo sapiens
caucauucaaaucuguu

SEQ ID NO: 4401 - RNA, 17 nt, Homo sapiens
uucaaaucuguuaacac

SEQ ID NO: 4402 - RNA, 17 nt, Homo sapiens
cuguuaacaccucagug

SEQ ID NO: 4403 - RNA, 17 nt, Homo sapiens
guuaacaccucagugca

SEQ ID NO: 4404 - RNA, 17 nt, Homo sapiens
uuaacaccucagugcau

SEQ ID NO: 4405 - RNA, 17 nt, Homo sapiens
aacaccucagugcauau

SEQ ID NO: 4406 - RNA, 17 nt, Homo sapiens
cucagugcauauauaug

SEQ ID NO: 4407 - RNA, 17 nt, Homo sapiens
gauaaagcauucaucac

SEQ ID NO: 4408 - RNA, 17 nt, Homo sapiens
aagcauucaucacugug

SEQ ID NO: 4409 - RNA, 17 nt, Homo sapiens
cauucaucacugugaaa

SEQ ID NO: 4410 - RNA, 17 nt, Homo sapiens
uucaucacugugaaaca

SEQ ID NO: 4411 - RNA, 17 nt, Homo sapiens
ugugaaacaucgaaaac

SEQ ID NO: 4412 - RNA, 17 nt, Homo sapiens
ucgaaaacagcaggugc

SEQ ID NO: 4413 - RNA, 17 nt, Homo sapiens
aaaacagcaggugcuug

SEQ ID NO: 4414 - RNA, 17 nt, Homo sapiens
gcaggugcuugaaaccg

SEQ ID NO: 4415 - RNA, 17 nt, Homo sapiens
cuugaaaccguagcugg

SEQ ID NO: 4416 - RNA, 17 nt, Homo sapiens
accguagcuggcaagcg

SEQ ID NO: 4417 - RNA, 17 nt, Homo sapiens
uagcuggcaagcggucu

SEQ ID NO: 4418 - RNA, 17 nt, Homo sapiens
aagcggucuuaccggcu

SEQ ID NO: 4419 - RNA, 17 nt, Homo sapiens
ggucuuaccggcucucu

SEQ ID NO: 4420 - RNA, 17 nt, Homo sapiens
uuaccggcucucuauga

SEQ ID NO: 4421 - RNA, 17 nt, Homo sapiens
accggcucucuaugaaa

SEQ ID NO: 4422 - RNA, 17 nt, Homo sapiens
cggcucucuaugaaagu

SEQ ID NO: 4423 - RNA, 17 nt, Homo sapiens
gugaaggcauuucccuc

SEQ ID NO: 4424 - RNA, 17 nt, Homo sapiens
ggcauuucccucgccgg

SEQ ID NO: 4425 - RNA, 17 nt, Homo sapiens
gcauuucccucgccgga

SEQ ID NO: 4426 - RNA, 17 nt, Homo sapiens
cauuucccucgccggaa

SEQ ID NO: 4427 - RNA, 17 nt, Homo sapiens
ucccucgccggaaguug

SEQ ID NO: 4428 - RNA, 17 nt, Homo sapiens
uggguuaccugcgacug

SEQ ID NO: 4429 - RNA, 17 nt, Homo sapiens
ggguuaccugcgacuga

SEQ ID NO: 4430 - RNA, 17 nt, Homo sapiens
ccugcgacugagaaauc

SEQ ID NO: 4431 - RNA, 17 nt, Homo sapiens
gagaaaucugcucgcua

SEQ ID NO: 4432 - RNA, 17 nt, Homo sapiens
aaaucugcucgcuauuu

SEQ ID NO: 4433 - RNA, 17 nt, Homo sapiens
cugcucgcuauuugacu

SEQ ID NO: 4434 - RNA, 17 nt, Homo sapiens
uauuugacucguggcua

SEQ ID NO: 4435 - RNA, 17 nt, Homo sapiens
cucguggcuacucguua

SEQ ID NO: 4436 - RNA, 17 nt, Homo sapiens
guggcuacucguuaauu

SEQ ID NO: 4437 - RNA, 17 nt, Homo sapiens
uaauuaucaaggacgua

SEQ ID NO: 4438 - RNA, 17 nt, Homo sapiens
gacguaacugaagagga

SEQ ID NO: 4439 - RNA, 17 nt, Homo sapiens
gaggaugcagggaauua

SEQ ID NO: 4440 - RNA, 17 nt, Homo sapiens
aauuauacaaucuugcu

SEQ ID NO: 4441 - RNA, 17 nt, Homo sapiens
auacaaucuugcugagc

SEQ ID NO: 4442 - RNA, 17 nt, Homo sapiens
aaucuugcugagcauaa

SEQ ID NO: 4443 - RNA, 17 nt, Homo sapiens
ugcugagcauaaaacag

SEQ ID NO: 4444 - RNA, 17 nt, Homo sapiens
cauaaaacagucaaaug

SEQ ID NO: 4445 - RNA, 17 nt, Homo sapiens
aaacagucaaauguguu

SEQ ID NO: 4446 - RNA, 17 nt, Homo sapiens
uuaaaaaccucacugcc

SEQ ID NO: 4447 - RNA, 17 nt, Homo sapiens
uaaaaaccucacugcca

SEQ ID NO: 4448 - RNA, 17 nt, Homo sapiens
aaaaccucacugccacu

SEQ ID NO: 4449 - RNA, 17 nt, Homo sapiens
aaccucacugccacucu

SEQ ID NO: 4450 - RNA, 17 nt, Homo sapiens
cucacugccacucuaau

SEQ ID NO: 4451 - RNA, 17 nt, Homo sapiens
ucacugccacucuaauu

SEQ ID NO: 4452 - RNA, 17 nt, Homo sapiens
acugccacucuaauugu

SEQ ID NO: 4453 - RNA, 17 nt, Homo sapiens
ugccacucuaauuguca

SEQ ID NO: 4454 - RNA, 17 nt, Homo sapiens
uaauugucaaugugaaa

SEQ ID NO: 4455 - RNA, 17 nt, Homo sapiens
ugugaaaccccagauuu

SEQ ID NO: 4456 - RNA, 17 nt, Homo sapiens
gugaaaccccagauuua

SEQ ID NO: 4457 - RNA, 17 nt, Homo sapiens
ugaaaccccagauuuac

SEQ ID NO: 4458 - RNA, 17 nt, Homo sapiens
gaaaccccagauuuacg

SEQ ID NO: 4459 - RNA, 17 nt, Homo sapiens
gaaaaggccgugucauc

SEQ ID NO: 4460 - RNA, 17 nt, Homo sapiens
gccgugucaucguuucc

SEQ ID NO: 4461 - RNA, 17 nt, Homo sapiens
aucguuuccagacccgg

SEQ ID NO: 4462 - RNA, 17 nt, Homo sapiens
ucguuuccagacccggc

SEQ ID NO: 4463 - RNA, 17 nt, Homo sapiens
uuccagacccggcucuc

SEQ ID NO: 4464 - RNA, 17 nt, Homo sapiens
uccagacccggcucucu

SEQ ID NO: 4465 - RNA, 17 nt, Homo sapiens
gacccggcucucuaccc

SEQ ID NO: 4466 - RNA, 17 nt, Homo sapiens
cccggcucucuacccac

SEQ ID NO: 4467 - RNA, 17 nt, Homo sapiens
cggcucucuacccacug

SEQ ID NO: 4468 - RNA, 17 nt, Homo sapiens
cucucuacccacugggc

SEQ ID NO: 4469 - RNA, 17 nt, Homo sapiens
ucucuacccacugggca

SEQ ID NO: 4470 - RNA, 17 nt, Homo sapiens
cucuacccacugggcag

SEQ ID NO: 4471 - RNA, 17 nt, Homo sapiens
cuacccacugggcagca

SEQ ID NO: 4472 - RNA, 17 nt, Homo sapiens
cacugggcagcagacaa

SEQ ID NO: 4473 - RNA, 17 nt, Homo sapiens
ugggcagcagacaaauc

SEQ ID NO: 4474 - RNA, 17 nt, Homo sapiens
cagcagacaaauccuga

SEQ ID NO: 4475 - RNA, 17 nt, Homo sapiens
gacaaauccugacuugu

SEQ ID NO: 4476 - RNA, 17 nt, Homo sapiens
acaaauccugacuugua

SEQ ID NO: 4477 - RNA, 17 nt, Homo sapiens
auccugacuuguaccgc

SEQ ID NO: 4478 - RNA, 17 nt, Homo sapiens
acuuguaccgcauaugg

SEQ ID NO: 4479 - RNA, 17 nt, Homo sapiens
uguaccgcauaugguau

SEQ ID NO: 4480 - RNA, 17 nt, Homo sapiens
augguaucccucaaccu

SEQ ID NO: 4481 - RNA, 17 nt, Homo sapiens
ugguaucccucaaccua

SEQ ID NO: 4482 - RNA, 17 nt, Homo sapiens
gguaucccucaaccuac

SEQ ID NO: 4483 - RNA, 17 nt, Homo sapiens
uaucccucaaccuacaa

SEQ ID NO: 4484 - RNA, 17 nt, Homo sapiens
cccucaaccuacaauca

SEQ ID NO: 4485 - RNA, 17 nt, Homo sapiens
ccucaaccuacaaucaa

SEQ ID NO: 4486 - RNA, 17 nt, Homo sapiens
caaccuacaaucaagug

SEQ ID NO: 4487 - RNA, 17 nt, Homo sapiens
cuacaaucaagugguuc

SEQ ID NO: 4488 - RNA, 17 nt, Homo sapiens
agugguucuggcacccc

SEQ ID NO: 4489 - RNA, 17 nt, Homo sapiens
guucuggcaccccugua

SEQ ID NO: 4490 - RNA, 17 nt, Homo sapiens
ucuggcaccccuguaac

SEQ ID NO: 4491 - RNA, 17 nt, Homo sapiens
cuggcaccccuguaacc

SEQ ID NO: 4492 - RNA, 17 nt, Homo sapiens
uggcaccccuguaacca

SEQ ID NO: 4493 - RNA, 17 nt, Homo sapiens
ggcaccccuguaaccau

SEQ ID NO: 4494 - RNA, 17 nt, Homo sapiens
ccuguaaccauaaucau

SEQ ID NO: 4495 - RNA, 17 nt, Homo sapiens
cuguaaccauaaucauu

SEQ ID NO: 4496 - RNA, 17 nt, Homo sapiens
ccauaaucauuccgaag

SEQ ID NO: 4497 - RNA, 17 nt, Homo sapiens
aaucauuccgaagcaag

SEQ ID NO: 4498 - RNA, 17 nt, Homo sapiens
uccgaagcaagguguga

SEQ ID NO: 4499 - RNA, 17 nt, Homo sapiens
ggugugacuuuuguucc

SEQ ID NO: 4500 - RNA, 17 nt, Homo sapiens
uuuuguuccaauaauga

SEQ ID NO: 4501 - RNA, 17 nt, Homo sapiens
uuuguuccaauaaugaa

SEQ ID NO: 4502 - RNA, 17 nt, Homo sapiens
gaagaguccuuuauccu

SEQ ID NO: 4503 - RNA, 17 nt, Homo sapiens
aagaguccuuuauccug

SEQ ID NO: 4504 - RNA, 17 nt, Homo sapiens
ccuuuauccuggaugcu

SEQ ID NO: 4505 - RNA, 17 nt, Homo sapiens
cuuuauccuggaugcug

SEQ ID NO: 4506 - RNA, 17 nt, Homo sapiens
cuggaugcugacagcaa

SEQ ID NO: 4507 - RNA, 17 nt, Homo sapiens
augcugacagcaacaug

SEQ ID NO: 4508 - RNA, 17 nt, Homo sapiens
cugacagcaacauggga

SEQ ID NO: 4509 - RNA, 17 nt, Homo sapiens
acagcaacaugggaaac

SEQ ID NO: 4510 - RNA, 17 nt, Homo sapiens
ugggaaacagaauugag

SEQ ID NO: 4511 - RNA, 17 nt, Homo sapiens
uugagagcaucacucag

SEQ ID NO: 4512 - RNA, 17 nt, Homo sapiens
agagcaucacucagcgc

SEQ ID NO: 4513 - RNA, 17 nt, Homo sapiens
agcaucacucagcgcau

SEQ ID NO: 4514 - RNA, 17 nt, Homo sapiens
caucacucagcgcaugg

SEQ ID NO: 4515 - RNA, 17 nt, Homo sapiens
cucagcgcauggcaaua

SEQ ID NO: 4516 - RNA, 17 nt, Homo sapiens
cgcauggcaauaauaga

SEQ ID NO: 4517 - RNA, 17 nt, Homo sapiens
aagauggcuagcaccuu

SEQ ID NO: 4518 - RNA, 17 nt, Homo sapiens
uggcuagcaccuugguu

SEQ ID NO: 4519 - RNA, 17 nt, Homo sapiens
gcuagcaccuugguugu

SEQ ID NO: 4520 - RNA, 17 nt, Homo sapiens
cuagcaccuugguugug

SEQ ID NO: 4521 - RNA, 17 nt, Homo sapiens
guuguggcugacucuag

SEQ ID NO: 4522 - RNA, 17 nt, Homo sapiens
uggcugacucuagaauu

SEQ ID NO: 4523 - RNA, 17 nt, Homo sapiens
gcugacucuagaauuuc

SEQ ID NO: 4524 - RNA, 17 nt, Homo sapiens
agaauuucuggaaucua

SEQ ID NO: 4525 - RNA, 17 nt, Homo sapiens
cuggaaucuacauuugc

SEQ ID NO: 4526 - RNA, 17 nt, Homo sapiens
gaaucuacauuugcaua

SEQ ID NO: 4527 - RNA, 17 nt, Homo sapiens
acauuugcauagcuucc

SEQ ID NO: 4528 - RNA, 17 nt, Homo sapiens
ugcauagcuuccaauaa

SEQ ID NO: 4529 - RNA, 17 nt, Homo sapiens
auagcuuccaauaaagu

SEQ ID NO: 4530 - RNA, 17 nt, Homo sapiens
uagcuuccaauaaaguu

SEQ ID NO: 4531 - RNA, 17 nt, Homo sapiens
guugggacugugggaag

SEQ ID NO: 4532 - RNA, 17 nt, Homo sapiens
gaagaaacauaagcuuu

SEQ ID NO: 4533 - RNA, 17 nt, Homo sapiens
acauaagcuuuuauauc

SEQ ID NO: 4534 - RNA, 17 nt, Homo sapiens
uuuauaucacagaugug

SEQ ID NO: 4535 - RNA, 17 nt, Homo sapiens
uauaucacagaugugcc

SEQ ID NO: 4536 - RNA, 17 nt, Homo sapiens
agaugugccaaaugggu

SEQ ID NO: 4537 - RNA, 17 nt, Homo sapiens
gaugugccaaauggguu

SEQ ID NO: 4538 - RNA, 17 nt, Homo sapiens
uggguuucauguuaacu

SEQ ID NO: 4539 - RNA, 17 nt, Homo sapiens
auguuaacuuggaaaaa

SEQ ID NO: 4540 - RNA, 17 nt, Homo sapiens
aaaaaugccgacggaag

SEQ ID NO: 4541 - RNA, 17 nt, Homo sapiens
gagaggaccugaaacug

SEQ ID NO: 4542 - RNA, 17 nt, Homo sapiens
agaggaccugaaacugu

SEQ ID NO: 4543 - RNA, 17 nt, Homo sapiens
ccugaaacugucuugca

SEQ ID NO: 4544 - RNA, 17 nt, Homo sapiens
aaacugucuugcacagu

SEQ ID NO: 4545 - RNA, 17 nt, Homo sapiens
ugucuugcacaguuaac

SEQ ID NO: 4546 - RNA, 17 nt, Homo sapiens
ucuugcacaguuaacaa

SEQ ID NO: 4547 - RNA, 17 nt, Homo sapiens
caguuaacaaguucuua

SEQ ID NO: 4548 - RNA, 17 nt, Homo sapiens
acaaguucuuauacaga

SEQ ID NO: 4549 - RNA, 17 nt, Homo sapiens
ucuuauacagagacguu

SEQ ID NO: 4550 - RNA, 17 nt, Homo sapiens
gacguuacuuggauuuu

SEQ ID NO: 4551 - RNA, 17 nt, Homo sapiens
gauuuuacugcggacag

SEQ ID NO: 4552 - RNA, 17 nt, Homo sapiens
cugcggacaguuaauaa

SEQ ID NO: 4553 - RNA, 17 nt, Homo sapiens
uuaauaacagaacaaug

SEQ ID NO: 4554 - RNA, 17 nt, Homo sapiens
aacagaacaaugcacua

SEQ ID NO: 4555 - RNA, 17 nt, Homo sapiens
aacaaugcacuacagua

SEQ ID NO: 4556 - RNA, 17 nt, Homo sapiens
caaugcacuacaguauu

SEQ ID NO: 4557 - RNA, 17 nt, Homo sapiens
ugcacuacaguauuagc

SEQ ID NO: 4558 - RNA, 17 nt, Homo sapiens
guauuagcaagcaaaaa

SEQ ID NO: 4559 - RNA, 17 nt, Homo sapiens
uagcaagcaaaaaaugg

SEQ ID NO: 4560 - RNA, 17 nt, Homo sapiens
aaaauggccaucacuaa

SEQ ID NO: 4561 - RNA, 17 nt, Homo sapiens
aaauggccaucacuaag

SEQ ID NO: 4562 - RNA, 17 nt, Homo sapiens
uggccaucacuaaggag

SEQ ID NO: 4563 - RNA, 17 nt, Homo sapiens
gccaucacuaaggagca

SEQ ID NO: 4564 - RNA, 17 nt, Homo sapiens
uaaggagcacuccauca

SEQ ID NO: 4565 - RNA, 17 nt, Homo sapiens
aggagcacuccaucacu

SEQ ID NO: 4566 - RNA, 17 nt, Homo sapiens
gagcacuccaucacucu

SEQ ID NO: 4567 - RNA, 17 nt, Homo sapiens
agcacuccaucacucuu

SEQ ID NO: 4568 - RNA, 17 nt, Homo sapiens
acuccaucacucuuaau

SEQ ID NO: 4569 - RNA, 17 nt, Homo sapiens
uccaucacucuuaaucu

SEQ ID NO: 4570 - RNA, 17 nt, Homo sapiens
caucacucuuaaucuua

SEQ ID NO: 4571 - RNA, 17 nt, Homo sapiens
ucuuaaucuuaccauca

SEQ ID NO: 4572 - RNA, 17 nt, Homo sapiens
aaucuuaccaucaugaa

SEQ ID NO: 4573 - RNA, 17 nt, Homo sapiens
aucuuaccaucaugaau

SEQ ID NO: 4574 - RNA, 17 nt, Homo sapiens
uuaccaucaugaauguu

SEQ ID NO: 4575 - RNA, 17 nt, Homo sapiens
aauguuucccugcaaga

SEQ ID NO: 4576 - RNA, 17 nt, Homo sapiens
auguuucccugcaagau

SEQ ID NO: 4577 - RNA, 17 nt, Homo sapiens
uguuucccugcaagauu

SEQ ID NO: 4578 - RNA, 17 nt, Homo sapiens
uucccugcaagauucag

SEQ ID NO: 4579 - RNA, 17 nt, Homo sapiens
caagauucaggcaccua

SEQ ID NO: 4580 - RNA, 17 nt, Homo sapiens
auucaggcaccuaugcc

SEQ ID NO: 4581 - RNA, 17 nt, Homo sapiens
ucaggcaccuaugccug

SEQ ID NO: 4582 - RNA, 17 nt, Homo sapiens
caggcaccuaugccugc

SEQ ID NO: 4583 - RNA, 17 nt, Homo sapiens
accuaugccugcagagc

SEQ ID NO: 4584 - RNA, 17 nt, Homo sapiens
ccuaugccugcagagcc

SEQ ID NO: 4585 - RNA, 17 nt, Homo sapiens
augccugcagagccagg

SEQ ID NO: 4586 - RNA, 17 nt, Homo sapiens
ugcagagccaggaaugu

SEQ ID NO: 4587 - RNA, 17 nt, Homo sapiens
gcagagccaggaaugua

SEQ ID NO: 4588 - RNA, 17 nt, Homo sapiens
auguauacacaggggaa

SEQ ID NO: 4589 - RNA, 17 nt, Homo sapiens
guauacacaggggaaga

SEQ ID NO: 4590 - RNA, 17 nt, Homo sapiens
aagaaauccuccagaag

SEQ ID NO: 4591 - RNA, 17 nt, Homo sapiens
agaaauccuccagaaga

SEQ ID NO: 4592 - RNA, 17 nt, Homo sapiens
aaauccuccagaagaaa

SEQ ID NO: 4593 - RNA, 17 nt, Homo sapiens
aauccuccagaagaaag

SEQ ID NO: 4594 - RNA, 17 nt, Homo sapiens
gaaauuacaaucagaga

SEQ ID NO: 4595 - RNA, 17 nt, Homo sapiens
uuacaaucagagaucag

SEQ ID NO: 4596 - RNA, 17 nt, Homo sapiens
cagagaucaggaagcac

SEQ ID NO: 4597 - RNA, 17 nt, Homo sapiens
caggaagcaccauaccu

SEQ ID NO: 4598 - RNA, 17 nt, Homo sapiens
ggaagcaccauaccucc

SEQ ID NO: 4599 - RNA, 17 nt, Homo sapiens
gaagcaccauaccuccu

SEQ ID NO: 4600 - RNA, 17 nt, Homo sapiens
caccauaccuccugcga

SEQ ID NO: 4601 - RNA, 17 nt, Homo sapiens
accauaccuccugcgaa

SEQ ID NO: 4602 - RNA, 17 nt, Homo sapiens
cauaccuccugcgaaac

SEQ ID NO: 4603 - RNA, 17 nt, Homo sapiens
auaccuccugcgaaacc

SEQ ID NO: 4604 - RNA, 17 nt, Homo sapiens
ugcgaaaccucagugau

SEQ ID NO: 4605 - RNA, 17 nt, Homo sapiens
gcgaaaccucagugauc

SEQ ID NO: 4606 - RNA, 17 nt, Homo sapiens
gaaaccucagugaucac

SEQ ID NO: 4607 - RNA, 17 nt, Homo sapiens
cagugaucacacagugg

SEQ ID NO: 4608 - RNA, 17 nt, Homo sapiens
gugaucacacaguggcc

SEQ ID NO: 4609 - RNA, 17 nt, Homo sapiens
gaucacacaguggccau

SEQ ID NO: 4610 - RNA, 17 nt, Homo sapiens
acaguggccaucagcag

SEQ ID NO: 4611 - RNA, 17 nt, Homo sapiens
caguggccaucagcagu

SEQ ID NO: 4612 - RNA, 17 nt, Homo sapiens
uggccaucagcaguucc

SEQ ID NO: 4613 - RNA, 17 nt, Homo sapiens
ccaucagcaguuccacc

SEQ ID NO: 4614 - RNA, 17 nt, Homo sapiens
agcaguuccaccacuuu

SEQ ID NO: 4615 - RNA, 17 nt, Homo sapiens
gcaguuccaccacuuua

SEQ ID NO: 4616 - RNA, 17 nt, Homo sapiens
aguuccaccacuuuaga

SEQ ID NO: 4617 - RNA, 17 nt, Homo sapiens
guuccaccacuuuagac

SEQ ID NO: 4618 - RNA, 17 nt, Homo sapiens
uccaccacuuuagacug

SEQ ID NO: 4619 - RNA, 17 nt, Homo sapiens
cuuuagacugucaugcu

SEQ ID NO: 4620 - RNA, 17 nt, Homo sapiens
agacugucaugcuaaug

SEQ ID NO: 4621 - RNA, 17 nt, Homo sapiens
ugucaugcuaauggugu

SEQ ID NO: 4622 - RNA, 17 nt, Homo sapiens
augguguccccgagccu

SEQ ID NO: 4623 - RNA, 17 nt, Homo sapiens
ugguguccccgagccuc

SEQ ID NO: 4624 - RNA, 17 nt, Homo sapiens
gguguccccgagccuca

SEQ ID NO: 4625 - RNA, 17 nt, Homo sapiens
ccccgagccucagauca

SEQ ID NO: 4626 - RNA, 17 nt, Homo sapiens
cccgagccucagaucac

SEQ ID NO: 4627 - RNA, 17 nt, Homo sapiens
cgagccucagaucacuu

SEQ ID NO: 4628 - RNA, 17 nt, Homo sapiens
cucagaucacuugguuu

SEQ ID NO: 4629 - RNA, 17 nt, Homo sapiens
cagaucacuugguuuaa

SEQ ID NO: 4630 - RNA, 17 nt, Homo sapiens
uuaaaaacaaccacaaa

SEQ ID NO: 4631 - RNA, 17 nt, Homo sapiens
aaaacaaccacaaaaua

SEQ ID NO: 4632 - RNA, 17 nt, Homo sapiens
aaacaaccacaaaauac

SEQ ID NO: 4633 - RNA, 17 nt, Homo sapiens
acaaccacaaaauacaa

SEQ ID NO: 4634 - RNA, 17 nt, Homo sapiens
caaaauacaacaagagc

SEQ ID NO: 4635 - RNA, 17 nt, Homo sapiens
aauacaacaagagccug

SEQ ID NO: 4636 - RNA, 17 nt, Homo sapiens
acaagagccuggaauua

SEQ ID NO: 4637 - RNA, 17 nt, Homo sapiens
caagagccuggaauuau

SEQ ID NO: 4638 - RNA, 17 nt, Homo sapiens
uuuaggaccaggaagca

SEQ ID NO: 4639 - RNA, 17 nt, Homo sapiens
uuaggaccaggaagcag

SEQ ID NO: 4640 - RNA, 17 nt, Homo sapiens
caggaagcagcacgcug

SEQ ID NO: 4641 - RNA, 17 nt, Homo sapiens
gaagcagcacgcuguuu

SEQ ID NO: 4642 - RNA, 17 nt, Homo sapiens
cagcacgcuguuuauug

SEQ ID NO: 4643 - RNA, 17 nt, Homo sapiens
aaagagucacagaagag

SEQ ID NO: 4644 - RNA, 17 nt, Homo sapiens
agagucacagaagagga

SEQ ID NO: 4645 - RNA, 17 nt, Homo sapiens
aaggugucuaucacugc

SEQ ID NO: 4646 - RNA, 17 nt, Homo sapiens
ugucuaucacugcaaag

SEQ ID NO: 4647 - RNA, 17 nt, Homo sapiens
ucuaucacugcaaagcc

SEQ ID NO: 4648 - RNA, 17 nt, Homo sapiens
aucacugcaaagccacc

SEQ ID NO: 4649 - RNA, 17 nt, Homo sapiens
ugcaaagccaccaacca

SEQ ID NO: 4650 - RNA, 17 nt, Homo sapiens
gcaaagccaccaaccag

SEQ ID NO: 4651 - RNA, 17 nt, Homo sapiens
aaagccaccaaccagaa

SEQ ID NO: 4652 - RNA, 17 nt, Homo sapiens
aagccaccaaccagaag

SEQ ID NO: 4653 - RNA, 17 nt, Homo sapiens
ccaccaaccagaagggc

SEQ ID NO: 4654 - RNA, 17 nt, Homo sapiens
caccaaccagaagggcu

SEQ ID NO: 4655 - RNA, 17 nt, Homo sapiens
agaagggcucuguggaa

SEQ ID NO: 4656 - RNA, 17 nt, Homo sapiens
aagggcucuguggaaag

SEQ ID NO: 4657 - RNA, 17 nt, Homo sapiens
gaaaguucagcauaccu

SEQ ID NO: 4658 - RNA, 17 nt, Homo sapiens
aguucagcauaccucac

SEQ ID NO: 4659 - RNA, 17 nt, Homo sapiens
cagcauaccucacuguu

SEQ ID NO: 4660 - RNA, 17 nt, Homo sapiens
agcauaccucacuguuc

SEQ ID NO: 4661 - RNA, 17 nt, Homo sapiens
cauaccucacuguucaa

SEQ ID NO: 4662 - RNA, 17 nt, Homo sapiens
uaccucacuguucaagg

SEQ ID NO: 4663 - RNA, 17 nt, Homo sapiens
cacuguucaaggaaccu

SEQ ID NO: 4664 - RNA, 17 nt, Homo sapiens
caaggaaccucggacaa

SEQ ID NO: 4665 - RNA, 17 nt, Homo sapiens
aaggaaccucggacaag

SEQ ID NO: 4666 - RNA, 17 nt, Homo sapiens
ccucggacaagucuaau

SEQ ID NO: 4667 - RNA, 17 nt, Homo sapiens
gacaagucuaaucugga

SEQ ID NO: 4668 - RNA, 17 nt, Homo sapiens
gucuaaucuggagcuga

SEQ ID NO: 4669 - RNA, 17 nt, Homo sapiens
ucuggagcugaucacuc

SEQ ID NO: 4670 - RNA, 17 nt, Homo sapiens
agcugaucacucuaaca

SEQ ID NO: 4671 - RNA, 17 nt, Homo sapiens
cugaucacucuaacaug

SEQ ID NO: 4672 - RNA, 17 nt, Homo sapiens
gaucacucuaacaugca

SEQ ID NO: 4673 - RNA, 17 nt, Homo sapiens
acucuaacaugcaccug

SEQ ID NO: 4674 - RNA, 17 nt, Homo sapiens
uaacaugcaccugugug

SEQ ID NO: 4675 - RNA, 17 nt, Homo sapiens
acaugcaccuguguggc

SEQ ID NO: 4676 - RNA, 17 nt, Homo sapiens
caugcaccuguguggcu

SEQ ID NO: 4677 - RNA, 17 nt, Homo sapiens
uguguggcugcgacucu

SEQ ID NO: 4678 - RNA, 17 nt, Homo sapiens
gcugcgacucucuucug

SEQ ID NO: 4679 - RNA, 17 nt, Homo sapiens
ugcgacucucuucuggc

SEQ ID NO: 4680 - RNA, 17 nt, Homo sapiens
cgacucucuucuggcuc

SEQ ID NO: 4681 - RNA, 17 nt, Homo sapiens
cucucuucuggcuccua

SEQ ID NO: 4682 - RNA, 17 nt, Homo sapiens
cuucuggcuccuauuaa

SEQ ID NO: 4683 - RNA, 17 nt, Homo sapiens
ucuggcuccuauuaacc

SEQ ID NO: 4684 - RNA, 17 nt, Homo sapiens
cuggcuccuauuaaccc

SEQ ID NO: 4685 - RNA, 17 nt, Homo sapiens
cuauuaacccuccuuau

SEQ ID NO: 4686 - RNA, 17 nt, Homo sapiens
uauuaacccuccuuauc

SEQ ID NO: 4687 - RNA, 17 nt, Homo sapiens
auuaacccuccuuaucc

SEQ ID NO: 4688 - RNA, 17 nt, Homo sapiens
uaacccuccuuauccga

SEQ ID NO: 4689 - RNA, 17 nt, Homo sapiens
aacccuccuuauccgaa

SEQ ID NO: 4690 - RNA, 17 nt, Homo sapiens
uccuuauccgaaaaaug

SEQ ID NO: 4691 - RNA, 17 nt, Homo sapiens
aaaaggucuucuucuga

SEQ ID NO: 4692 - RNA, 17 nt, Homo sapiens
aggucuucuucugaaau

SEQ ID NO: 4693 - RNA, 17 nt, Homo sapiens
ucuucuucugaaauaaa

SEQ ID NO: 4694 - RNA, 17 nt, Homo sapiens
auaaagacugacuaccu

SEQ ID NO: 4695 - RNA, 17 nt, Homo sapiens
agacugacuaccuauca

SEQ ID NO: 4696 - RNA, 17 nt, Homo sapiens
cugacuaccuaucaauu

SEQ ID NO: 4697 - RNA, 17 nt, Homo sapiens
ugacuaccuaucaauua

SEQ ID NO: 4698 - RNA, 17 nt, Homo sapiens
uaccuaucaauuauaau

SEQ ID NO: 4699 - RNA, 17 nt, Homo sapiens
uaauggacccagaugaa

SEQ ID NO: 4700 - RNA, 17 nt, Homo sapiens
aauggacccagaugaag

SEQ ID NO: 4701 - RNA, 17 nt, Homo sapiens
auggacccagaugaagu

SEQ ID NO: 4702 - RNA, 17 nt, Homo sapiens
ugaaguuccuuuggaug

SEQ ID NO: 4703 - RNA, 17 nt, Homo sapiens
gaaguuccuuuggauga

SEQ ID NO: 4704 - RNA, 17 nt, Homo sapiens
ggaugagcagugugagc

SEQ ID NO: 4705 - RNA, 17 nt, Homo sapiens
ugagcggcucccuuaug

SEQ ID NO: 4706 - RNA, 17 nt, Homo sapiens
agcggcucccuuaugau

SEQ ID NO: 4707 - RNA, 17 nt, Homo sapiens
gcggcucccuuaugaug

SEQ ID NO: 4708 - RNA, 17 nt, Homo sapiens
cggcucccuuaugaugc

SEQ ID NO: 4709 - RNA, 17 nt, Homo sapiens
uaugaugccagcaagug

SEQ ID NO: 4710 - RNA, 17 nt, Homo sapiens
augaugccagcaagugg

SEQ ID NO: 4711 - RNA, 17 nt, Homo sapiens
augccagcaagugggag

SEQ ID NO: 4712 - RNA, 17 nt, Homo sapiens
gaguuugcccgggagag

SEQ ID NO: 4713 - RNA, 17 nt, Homo sapiens
aguuugcccgggagaga

SEQ ID NO: 4714 - RNA, 17 nt, Homo sapiens
ggagagacuuaaacugg

SEQ ID NO: 4715 - RNA, 17 nt, Homo sapiens
acuuaaacugggcaaau

SEQ ID NO: 4716 - RNA, 17 nt, Homo sapiens
aacugggcaaaucacuu

SEQ ID NO: 4717 - RNA, 17 nt, Homo sapiens
ggcaaaucacuuggaag

SEQ ID NO: 4718 - RNA, 17 nt, Homo sapiens
caaaucacuuggaagag

SEQ ID NO: 4719 - RNA, 17 nt, Homo sapiens
agaggggcuuuuggaaa

SEQ ID NO: 4720 - RNA, 17 nt, Homo sapiens
agugguucaagcaucag

SEQ ID NO: 4721 - RNA, 17 nt, Homo sapiens
guucaagcaucagcauu

SEQ ID NO: 4722 - RNA, 17 nt, Homo sapiens
caagcaucagcauuugg

SEQ ID NO: 4723 - RNA, 17 nt, Homo sapiens
gcaucagcauuuggcau

SEQ ID NO: 4724 - RNA, 17 nt, Homo sapiens
cauuuggcauuaagaaa

SEQ ID NO: 4725 - RNA, 17 nt, Homo sapiens
aagaaaucaccuacgug

SEQ ID NO: 4726 - RNA, 17 nt, Homo sapiens
gaaaucaccuacgugcc

SEQ ID NO: 4727 - RNA, 17 nt, Homo sapiens
aaaucaccuacgugccg

SEQ ID NO: 4728 - RNA, 17 nt, Homo sapiens
cuacgugccggacugug

SEQ ID NO: 4729 - RNA, 17 nt, Homo sapiens
ugccggacuguggcugu

SEQ ID NO: 4730 - RNA, 17 nt, Homo sapiens
acuguggcugugaaaau

SEQ ID NO: 4731 - RNA, 17 nt, Homo sapiens
gaaaaugcugaaagagg

SEQ ID NO: 4732 - RNA, 17 nt, Homo sapiens
gagggggccacggccag

SEQ ID NO: 4733 - RNA, 17 nt, Homo sapiens
agggggccacggccagc

SEQ ID NO: 4734 - RNA, 17 nt, Homo sapiens
gccacggccagcgagua

SEQ ID NO: 4735 - RNA, 17 nt, Homo sapiens
ccacggccagcgaguac

SEQ ID NO: 4736 - RNA, 17 nt, Homo sapiens
gcgaguacaaagcucug

SEQ ID NO: 4737 - RNA, 17 nt, Homo sapiens
uacaaagcucugaugac

SEQ ID NO: 4738 - RNA, 17 nt, Homo sapiens
caaagcucugaugacug

SEQ ID NO: 4739 - RNA, 17 nt, Homo sapiens
cugaugacugagcuaaa

SEQ ID NO: 4740 - RNA, 17 nt, Homo sapiens
gacugagcuaaaaaucu

SEQ ID NO: 4741 - RNA, 17 nt, Homo sapiens
uaaaaaucuugacccac

SEQ ID NO: 4742 - RNA, 17 nt, Homo sapiens
aucuugacccacauugg

SEQ ID NO: 4743 - RNA, 17 nt, Homo sapiens
ucuugacccacauuggc

SEQ ID NO: 4744 - RNA, 17 nt, Homo sapiens
cuugacccacauuggcc

SEQ ID NO: 4745 - RNA, 17 nt, Homo sapiens
ugacccacauuggccac

SEQ ID NO: 4746 - RNA, 17 nt, Homo sapiens
acauuggccaccaucug

SEQ ID NO: 4747 - RNA, 17 nt, Homo sapiens
cauuggccaccaucuga

SEQ ID NO: 4748 - RNA, 17 nt, Homo sapiens
uuggccaccaucugaac

SEQ ID NO: 4749 - RNA, 17 nt, Homo sapiens
uggccaccaucugaacg

SEQ ID NO: 4750 - RNA, 17 nt, Homo sapiens
ccaccaucugaacgugg

SEQ ID NO: 4751 - RNA, 17 nt, Homo sapiens
ugguuaaccugcuggga

SEQ ID NO: 4752 - RNA, 17 nt, Homo sapiens
gguuaaccugcugggag

SEQ ID NO: 4753 - RNA, 17 nt, Homo sapiens
uaaccugcugggagccu

SEQ ID NO: 4754 - RNA, 17 nt, Homo sapiens
cugggagccugcaccaa

SEQ ID NO: 4755 - RNA, 17 nt, Homo sapiens
ugggagccugcaccaag

SEQ ID NO: 4756 - RNA, 17 nt, Homo sapiens
gagccugcaccaagcaa

SEQ ID NO: 4757 - RNA, 17 nt, Homo sapiens
gccugcaccaagcaagg

SEQ ID NO: 4758 - RNA, 17 nt, Homo sapiens
ccugcaccaagcaagga

SEQ ID NO: 4759 - RNA, 17 nt, Homo sapiens
caccaagcaaggagggc

SEQ ID NO: 4760 - RNA, 17 nt, Homo sapiens
aggagggccucugaugg

SEQ ID NO: 4761 - RNA, 17 nt, Homo sapiens
ggagggccucugauggu

SEQ ID NO: 4762 - RNA, 17 nt, Homo sapiens
agggccucugaugguga

SEQ ID NO: 4763 - RNA, 17 nt, Homo sapiens
uugaauacugcaaauau

SEQ ID NO: 4764 - RNA, 17 nt, Homo sapiens
aauacugcaaauaugga

SEQ ID NO: 4765 - RNA, 17 nt, Homo sapiens
uggaaaucucuccaacu

SEQ ID NO: 4766 - RNA, 17 nt, Homo sapiens
gaaaucucuccaacuac

SEQ ID NO: 4767 - RNA, 17 nt, Homo sapiens
aaucucuccaacuaccu

SEQ ID NO: 4768 - RNA, 17 nt, Homo sapiens
aucucuccaacuaccuc

SEQ ID NO: 4769 - RNA, 17 nt, Homo sapiens
ucuccaacuaccucaag

SEQ ID NO: 4770 - RNA, 17 nt, Homo sapiens
ccaacuaccucaagagc

SEQ ID NO: 4771 - RNA, 17 nt, Homo sapiens
caacuaccucaagagca

SEQ ID NO: 4772 - RNA, 17 nt, Homo sapiens
acuaccucaagagcaaa

SEQ ID NO: 4773 - RNA, 17 nt, Homo sapiens
ucaagagcaaacgugac

SEQ ID NO: 4774 - RNA, 17 nt, Homo sapiens
aacgugacuuauuuuuu

SEQ ID NO: 4775 - RNA, 17 nt, Homo sapiens
auuuuuucucaacaagg

SEQ ID NO: 4776 - RNA, 17 nt, Homo sapiens
uuuuucucaacaaggau

SEQ ID NO: 4777 - RNA, 17 nt, Homo sapiens
uucucaacaaggaugca

SEQ ID NO: 4778 - RNA, 17 nt, Homo sapiens
aaggaugcagcacuaca

SEQ ID NO: 4779 - RNA, 17 nt, Homo sapiens
gaugcagcacuacacau

SEQ ID NO: 4780 - RNA, 17 nt, Homo sapiens
ugcagcacuacacaugg

SEQ ID NO: 4781 - RNA, 17 nt, Homo sapiens
agcacuacacauggagc

SEQ ID NO: 4782 - RNA, 17 nt, Homo sapiens
cacuacacauggagccu

SEQ ID NO: 4783 - RNA, 17 nt, Homo sapiens
cauggagccuaagaaag

SEQ ID NO: 4784 - RNA, 17 nt, Homo sapiens
auggagccuaagaaaga

SEQ ID NO: 4785 - RNA, 17 nt, Homo sapiens
aauggagccaggccugg

SEQ ID NO: 4786 - RNA, 17 nt, Homo sapiens
auggagccaggccugga

SEQ ID NO: 4787 - RNA, 17 nt, Homo sapiens
agccaggccuggaacaa

SEQ ID NO: 4788 - RNA, 17 nt, Homo sapiens
gccaggccuggaacaag

SEQ ID NO: 4789 - RNA, 17 nt, Homo sapiens
ccuggaacaaggcaaga

SEQ ID NO: 4790 - RNA, 17 nt, Homo sapiens
aacaaggcaagaaacca

SEQ ID NO: 4791 - RNA, 17 nt, Homo sapiens
caagaaaccaagacuag

SEQ ID NO: 4792 - RNA, 17 nt, Homo sapiens
aagaaaccaagacuaga

SEQ ID NO: 4793 - RNA, 17 nt, Homo sapiens
accaagacuagauagcg

SEQ ID NO: 4794 - RNA, 17 nt, Homo sapiens
auagcgucaccagcagc

SEQ ID NO: 4795 - RNA, 17 nt, Homo sapiens
agcgucaccagcagcga

SEQ ID NO: 4796 - RNA, 17 nt, Homo sapiens
gcgucaccagcagcgaa

SEQ ID NO: 4797 - RNA, 17 nt, Homo sapiens
ucaccagcagcgaaagc

SEQ ID NO: 4798 - RNA, 17 nt, Homo sapiens
gcgaaagcuuugcgagc

SEQ ID NO: 4799 - RNA, 17 nt, Homo sapiens
uugcgagcuccggcuuu

SEQ ID NO: 4800 - RNA, 17 nt, Homo sapiens
gcgagcuccggcuuuca

SEQ ID NO: 4801 - RNA, 17 nt, Homo sapiens
gcuccggcuuucaggaa

SEQ ID NO: 4802 - RNA, 17 nt, Homo sapiens
cggcuuucaggaagaua

SEQ ID NO: 4803 - RNA, 17 nt, Homo sapiens
uaaaagucugagugaug

SEQ ID NO: 4804 - RNA, 17 nt, Homo sapiens
gaggauucugacgguuu

SEQ ID NO: 4805 - RNA, 17 nt, Homo sapiens
acgguuucuacaaggag

SEQ ID NO: 4806 - RNA, 17 nt, Homo sapiens
guuucuacaaggagccc

SEQ ID NO: 4807 - RNA, 17 nt, Homo sapiens
caaggagcccaucacua

SEQ ID NO: 4808 - RNA, 17 nt, Homo sapiens
aaggagcccaucacuau

SEQ ID NO: 4809 - RNA, 17 nt, Homo sapiens
aggagcccaucacuaug

SEQ ID NO: 4810 - RNA, 17 nt, Homo sapiens
agcccaucacuauggaa

SEQ ID NO: 4811 - RNA, 17 nt, Homo sapiens
cccaucacuauggaaga

SEQ ID NO: 4812 - RNA, 17 nt, Homo sapiens
ggaagaucugauuucuu

SEQ ID NO: 4813 - RNA, 17 nt, Homo sapiens
cugauuucuuacaguuu

SEQ ID NO: 4814 - RNA, 17 nt, Homo sapiens
uuucuuacaguuuucaa

SEQ ID NO: 4815 - RNA, 17 nt, Homo sapiens
caguuuucaaguggcca

SEQ ID NO: 4816 - RNA, 17 nt, Homo sapiens
caaguggccagaggcau

SEQ ID NO: 4817 - RNA, 17 nt, Homo sapiens
aaguggccagaggcaug

SEQ ID NO: 4818 - RNA, 17 nt, Homo sapiens
ccagaggcauggaguuc

SEQ ID NO: 4819 - RNA, 17 nt, Homo sapiens
uggaguuccugucuucc

SEQ ID NO: 4820 - RNA, 17 nt, Homo sapiens
ggaguuccugucuucca

SEQ ID NO: 4821 - RNA, 17 nt, Homo sapiens
uuccugucuuccagaaa

SEQ ID NO: 4822 - RNA, 17 nt, Homo sapiens
cugucuuccagaaagug

SEQ ID NO: 4823 - RNA, 17 nt, Homo sapiens
ugucuuccagaaagugc

SEQ ID NO: 4824 - RNA, 17 nt, Homo sapiens
gaaagugcauucaucgg

SEQ ID NO: 4825 - RNA, 17 nt, Homo sapiens
gugcauucaucgggacc

SEQ ID NO: 4826 - RNA, 17 nt, Homo sapiens
aucgggaccuggcagcg

SEQ ID NO: 4827 - RNA, 17 nt, Homo sapiens
ucgggaccuggcagcga

SEQ ID NO: 4828 - RNA, 17 nt, Homo sapiens
gaccuggcagcgagaaa

SEQ ID NO: 4829 - RNA, 17 nt, Homo sapiens
cgagaaacauucuuuua

SEQ ID NO: 4830 - RNA, 17 nt, Homo sapiens
aaacauucuuuuaucug

SEQ ID NO: 4831 - RNA, 17 nt, Homo sapiens
cuuuuaucugagaacaa

SEQ ID NO: 4832 - RNA, 17 nt, Homo sapiens
cugagaacaacguggug

SEQ ID NO: 4833 - RNA, 17 nt, Homo sapiens
auuuuggccuugcccgg

SEQ ID NO: 4834 - RNA, 17 nt, Homo sapiens
uuuuggccuugcccggg

SEQ ID NO: 4835 - RNA, 17 nt, Homo sapiens
ggccuugcccgggauau

SEQ ID NO: 4836 - RNA, 17 nt, Homo sapiens
gccuugcccgggauauu

SEQ ID NO: 4837 - RNA, 17 nt, Homo sapiens
auaagaaccccgauuau

SEQ ID NO: 4838 - RNA, 17 nt, Homo sapiens
uaagaaccccgauuaug

SEQ ID NO: 4839 - RNA, 17 nt, Homo sapiens
aagaaccccgauuaugu

SEQ ID NO: 4840 - RNA, 17 nt, Homo sapiens
ggagauacucgacuucc

SEQ ID NO: 4841 - RNA, 17 nt, Homo sapiens
uacucgacuuccucuga

SEQ ID NO: 4842 - RNA, 17 nt, Homo sapiens
ucgacuuccucugaaau

SEQ ID NO: 4843 - RNA, 17 nt, Homo sapiens
cgacuuccucugaaaug

SEQ ID NO: 4844 - RNA, 17 nt, Homo sapiens
acuuccucugaaaugga

SEQ ID NO: 4845 - RNA, 17 nt, Homo sapiens
uggauggcucccgaauc

SEQ ID NO: 4846 - RNA, 17 nt, Homo sapiens
gauggcucccgaaucua

SEQ ID NO: 4847 - RNA, 17 nt, Homo sapiens
auggcucccgaaucuau

SEQ ID NO: 4848 - RNA, 17 nt, Homo sapiens
cccgaaucuaucuuuga

SEQ ID NO: 4849 - RNA, 17 nt, Homo sapiens
aaucuaucuuugacaaa

SEQ ID NO: 4850 - RNA, 17 nt, Homo sapiens
ucuuugacaaaaucuac

SEQ ID NO: 4851 - RNA, 17 nt, Homo sapiens
acaaaaucuacagcacc

SEQ ID NO: 4852 - RNA, 17 nt, Homo sapiens
aaaucuacagcaccaag

SEQ ID NO: 4853 - RNA, 17 nt, Homo sapiens
ucuacagcaccaagagc

SEQ ID NO: 4854 - RNA, 17 nt, Homo sapiens
uacagcaccaagagcga

SEQ ID NO: 4855 - RNA, 17 nt, Homo sapiens
acagcaccaagagcgac

SEQ ID NO: 4856 - RNA, 17 nt, Homo sapiens
guguggucuuacggagu

SEQ ID NO: 4857 - RNA, 17 nt, Homo sapiens
aguauugcugugggaaa

SEQ ID NO: 4858 - RNA, 17 nt, Homo sapiens
gggaaaucuucuccuua

SEQ ID NO: 4859 - RNA, 17 nt, Homo sapiens
aaaucuucuccuuaggu

SEQ ID NO: 4860 - RNA, 17 nt, Homo sapiens
aucuucuccuuaggugg

SEQ ID NO: 4861 - RNA, 17 nt, Homo sapiens
ucuucuccuuagguggg

SEQ ID NO: 4862 - RNA, 17 nt, Homo sapiens
ggugggucuccauaccc

SEQ ID NO: 4863 - RNA, 17 nt, Homo sapiens
ugggucuccauacccag

SEQ ID NO: 4864 - RNA, 17 nt, Homo sapiens
gggucuccauacccagg

SEQ ID NO: 4865 - RNA, 17 nt, Homo sapiens
cuccauacccaggagua

SEQ ID NO: 4866 - RNA, 17 nt, Homo sapiens
uccauacccaggaguac

SEQ ID NO: 4867 - RNA, 17 nt, Homo sapiens
ccauacccaggaguaca

SEQ ID NO: 4868 - RNA, 17 nt, Homo sapiens
aggaguacaaauggaug

SEQ ID NO: 4869 - RNA, 17 nt, Homo sapiens
augaggacuuuugcagu

SEQ ID NO: 4870 - RNA, 17 nt, Homo sapiens
acuuuugcagucgccug

SEQ ID NO: 4871 - RNA, 17 nt, Homo sapiens
gcagucgccugagggaa

SEQ ID NO: 4872 - RNA, 17 nt, Homo sapiens
cagucgccugagggaag

SEQ ID NO: 4873 - RNA, 17 nt, Homo sapiens
gggaaggcaugaggaug

SEQ ID NO: 4874 - RNA, 17 nt, Homo sapiens
augagagcuccugagua

SEQ ID NO: 4875 - RNA, 17 nt, Homo sapiens
gagagcuccugaguacu

SEQ ID NO: 4876 - RNA, 17 nt, Homo sapiens
agagcuccugaguacuc

SEQ ID NO: 4877 - RNA, 17 nt, Homo sapiens
cugaguacucuacuccu

SEQ ID NO: 4878 - RNA, 17 nt, Homo sapiens
gaguacucuacuccuga

SEQ ID NO: 4879 - RNA, 17 nt, Homo sapiens
uacucuacuccugaaau

SEQ ID NO: 4880 - RNA, 17 nt, Homo sapiens
cucuacuccugaaaucu

SEQ ID NO: 4881 - RNA, 17 nt, Homo sapiens
ucuacuccugaaaucua

SEQ ID NO: 4882 - RNA, 17 nt, Homo sapiens
cugaaaucuaucagauc

SEQ ID NO: 4883 - RNA, 17 nt, Homo sapiens
aaucuaucagaucaugc

SEQ ID NO: 4884 - RNA, 17 nt, Homo sapiens
aucagaucaugcuggac

SEQ ID NO: 4885 - RNA, 17 nt, Homo sapiens
gaucaugcuggacugcu

SEQ ID NO: 4886 - RNA, 17 nt, Homo sapiens
ugcuggacugcuggcac

SEQ ID NO: 4887 - RNA, 17 nt, Homo sapiens
uggacugcuggcacaga

SEQ ID NO: 4888 - RNA, 17 nt, Homo sapiens
cugcuggcacagagacc

SEQ ID NO: 4889 - RNA, 17 nt, Homo sapiens
gcuggcacagagaccca

SEQ ID NO: 4890 - RNA, 17 nt, Homo sapiens
acagagacccaaaagaa

SEQ ID NO: 4891 - RNA, 17 nt, Homo sapiens
cagagacccaaaagaaa

SEQ ID NO: 4892 - RNA, 17 nt, Homo sapiens
agagacccaaaagaaag

SEQ ID NO: 4893 - RNA, 17 nt, Homo sapiens
agaaaggccaagauuug

SEQ ID NO: 4894 - RNA, 17 nt, Homo sapiens
gaaaggccaagauuugc

SEQ ID NO: 4895 - RNA, 17 nt, Homo sapiens
agauuugcagaacuugu

SEQ ID NO: 4896 - RNA, 17 nt, Homo sapiens
ugcagaacuuguggaaa

SEQ ID NO: 4897 - RNA, 17 nt, Homo sapiens
ggaaaaacuaggugauu

SEQ ID NO: 4898 - RNA, 17 nt, Homo sapiens
ugauuugcuucaagcaa

SEQ ID NO: 4899 - RNA, 17 nt, Homo sapiens
uuugcuucaagcaaaug

SEQ ID NO: 4900 - RNA, 17 nt, Homo sapiens
cuucaagcaaauguaca

SEQ ID NO: 4901 - RNA, 17 nt, Homo sapiens
aaauguacaacaggaug

SEQ ID NO: 4902 - RNA, 17 nt, Homo sapiens
uguacaacaggauggua

SEQ ID NO: 4903 - RNA, 17 nt, Homo sapiens
guaaagacuacauccca

SEQ ID NO: 4904 - RNA, 17 nt, Homo sapiens
aagacuacaucccaauc

SEQ ID NO: 4905 - RNA, 17 nt, Homo sapiens
acuacaucccaaucaau

SEQ ID NO: 4906 - RNA, 17 nt, Homo sapiens
cuacaucccaaucaaug

SEQ ID NO: 4907 - RNA, 17 nt, Homo sapiens
uacaucccaaucaaugc

SEQ ID NO: 4908 - RNA, 17 nt, Homo sapiens
ucccaaucaaugccaua

SEQ ID NO: 4909 - RNA, 17 nt, Homo sapiens
aucaaugccauacugac

SEQ ID NO: 4910 - RNA, 17 nt, Homo sapiens
ucaaugccauacugaca

SEQ ID NO: 4911 - RNA, 17 nt, Homo sapiens
ugccauacugacaggaa

SEQ ID NO: 4912 - RNA, 17 nt, Homo sapiens
auacugacaggaaauag

SEQ ID NO: 4913 - RNA, 17 nt, Homo sapiens
ggguuuacauacucaac

SEQ ID NO: 4914 - RNA, 17 nt, Homo sapiens
uuacauacucaacuccu

SEQ ID NO: 4915 - RNA, 17 nt, Homo sapiens
acauacucaacuccugc

SEQ ID NO: 4916 - RNA, 17 nt, Homo sapiens
uacucaacuccugccuu

SEQ ID NO: 4917 - RNA, 17 nt, Homo sapiens
cucaacuccugccuucu

SEQ ID NO: 4918 - RNA, 17 nt, Homo sapiens
ucaacuccugccuucuc

SEQ ID NO: 4919 - RNA, 17 nt, Homo sapiens
acuccugccuucucuga

SEQ ID NO: 4920 - RNA, 17 nt, Homo sapiens
cuccugccuucucugag

SEQ ID NO: 4921 - RNA, 17 nt, Homo sapiens
cugccuucucugaggac

SEQ ID NO: 4922 - RNA, 17 nt, Homo sapiens
gccuucucugaggacuu

SEQ ID NO: 4923 - RNA, 17 nt, Homo sapiens
cugaggacuucuucaag

SEQ ID NO: 4924 - RNA, 17 nt, Homo sapiens
aggacuucuucaaggaa

SEQ ID NO: 4925 - RNA, 17 nt, Homo sapiens
acuucuucaaggaaagu

SEQ ID NO: 4926 - RNA, 17 nt, Homo sapiens
aguauuucagcuccgaa

SEQ ID NO: 4927 - RNA, 17 nt, Homo sapiens
auuucagcuccgaaguu

SEQ ID NO: 4928 - RNA, 17 nt, Homo sapiens
uucagcuccgaaguuua

SEQ ID NO: 4929 - RNA, 17 nt, Homo sapiens
uuuaauucaggaagcuc

SEQ ID NO: 4930 - RNA, 17 nt, Homo sapiens
caggaagcucugaugau

SEQ ID NO: 4931 - RNA, 17 nt, Homo sapiens
ggaagcucugaugaugu

SEQ ID NO: 4932 - RNA, 17 nt, Homo sapiens
augaugucagauaugua

SEQ ID NO: 4933 - RNA, 17 nt, Homo sapiens
guaaaugcuuucaaguu

SEQ ID NO: 4934 - RNA, 17 nt, Homo sapiens
augcuuucaaguucaug

SEQ ID NO: 4935 - RNA, 17 nt, Homo sapiens
ucaaguucaugagccug

SEQ ID NO: 4936 - RNA, 17 nt, Homo sapiens
ucaugagccuggaaaga

SEQ ID NO: 4937 - RNA, 17 nt, Homo sapiens
caugagccuggaaagaa

SEQ ID NO: 4938 - RNA, 17 nt, Homo sapiens
aaagaaucaaaaccuuu

SEQ ID NO: 4939 - RNA, 17 nt, Homo sapiens
aucaaaaccuuugaaga

SEQ ID NO: 4940 - RNA, 17 nt, Homo sapiens
ucaaaaccuuugaagaa

SEQ ID NO: 4941 - RNA, 17 nt, Homo sapiens
ugaagaacuuuuaccga

SEQ ID NO: 4942 - RNA, 17 nt, Homo sapiens
acuuuuaccgaaugcca

SEQ ID NO: 4943 - RNA, 17 nt, Homo sapiens
ccgaaugccaccuccau

SEQ ID NO: 4944 - RNA, 17 nt, Homo sapiens
cgaaugccaccuccaug

SEQ ID NO: 4945 - RNA, 17 nt, Homo sapiens
aaugccaccuccauguu

SEQ ID NO: 4946 - RNA, 17 nt, Homo sapiens
augccaccuccauguuu

SEQ ID NO: 4947 - RNA, 17 nt, Homo sapiens
gccaccuccauguuuga

SEQ ID NO: 4948 - RNA, 17 nt, Homo sapiens
ccaccuccauguuugau

SEQ ID NO: 4949 - RNA, 17 nt, Homo sapiens
uugaugacuaccagggc

SEQ ID NO: 4950 - RNA, 17 nt, Homo sapiens
augacuaccagggcgac

SEQ ID NO: 4951 - RNA, 17 nt, Homo sapiens
ugacuaccagggcgaca

SEQ ID NO: 4952 - RNA, 17 nt, Homo sapiens
agggcgacagcagcacu

SEQ ID NO: 4953 - RNA, 17 nt, Homo sapiens
gcgacagcagcacucug

SEQ ID NO: 4954 - RNA, 17 nt, Homo sapiens
acagcagcacucuguug

SEQ ID NO: 4955 - RNA, 17 nt, Homo sapiens
agcagcacucuguuggc

SEQ ID NO: 4956 - RNA, 17 nt, Homo sapiens
cagcacucuguuggccu

SEQ ID NO: 4957 - RNA, 17 nt, Homo sapiens
cuguuggccucucccau

SEQ ID NO: 4958 - RNA, 17 nt, Homo sapiens
uguuggccucucccaug

SEQ ID NO: 4959 - RNA, 17 nt, Homo sapiens
uuggccucucccaugcu

SEQ ID NO: 4960 - RNA, 17 nt, Homo sapiens
ggccucucccaugcuga

SEQ ID NO: 4961 - RNA, 17 nt, Homo sapiens
gccucucccaugcugaa

SEQ ID NO: 4962 - RNA, 17 nt, Homo sapiens
ccucucccaugcugaag

SEQ ID NO: 4963 - RNA, 17 nt, Homo sapiens
ucccaugcugaagcgcu

SEQ ID NO: 4964 - RNA, 17 nt, Homo sapiens
ugaagcgcuucaccugg

SEQ ID NO: 4965 - RNA, 17 nt, Homo sapiens
agcgcuucaccuggacu

SEQ ID NO: 4966 - RNA, 17 nt, Homo sapiens
cgcuucaccuggacuga

SEQ ID NO: 4967 - RNA, 17 nt, Homo sapiens
gcuucaccuggacugac

SEQ ID NO: 4968 - RNA, 17 nt, Homo sapiens
accuggacugacagcaa

SEQ ID NO: 4969 - RNA, 17 nt, Homo sapiens
ggacugacagcaaaccc

SEQ ID NO: 4970 - RNA, 17 nt, Homo sapiens
cugacagcaaacccaag

SEQ ID NO: 4971 - RNA, 17 nt, Homo sapiens
cagcaaacccaaggccu

SEQ ID NO: 4972 - RNA, 17 nt, Homo sapiens
agcaaacccaaggccuc

SEQ ID NO: 4973 - RNA, 17 nt, Homo sapiens
gcaaacccaaggccucg

SEQ ID NO: 4974 - RNA, 17 nt, Homo sapiens
cccaaggccucgcucaa

SEQ ID NO: 4975 - RNA, 17 nt, Homo sapiens
ccaaggccucgcucaag

SEQ ID NO: 4976 - RNA, 17 nt, Homo sapiens
ggccucgcucaagauug

SEQ ID NO: 4977 - RNA, 17 nt, Homo sapiens
ccucgcucaagauugac

SEQ ID NO: 4978 - RNA, 17 nt, Homo sapiens
agauugacuugagagua

SEQ ID NO: 4979 - RNA, 17 nt, Homo sapiens
agaguaaccaguaaaag

SEQ ID NO: 4980 - RNA, 17 nt, Homo sapiens
gaguaaccaguaaaagu

SEQ ID NO: 4981 - RNA, 17 nt, Homo sapiens
gucggggcugucugaug

SEQ ID NO: 4982 - RNA, 17 nt, Homo sapiens
gggcugucugaugucag

SEQ ID NO: 4983 - RNA, 17 nt, Homo sapiens
cugaugucagcaggccc

SEQ ID NO: 4984 - RNA, 17 nt, Homo sapiens
augucagcaggcccagu

SEQ ID NO: 4985 - RNA, 17 nt, Homo sapiens
cagcaggcccaguuucu

SEQ ID NO: 4986 - RNA, 17 nt, Homo sapiens
agcaggcccaguuucug

SEQ ID NO: 4987 - RNA, 17 nt, Homo sapiens
gcaggcccaguuucugc

SEQ ID NO: 4988 - RNA, 17 nt, Homo sapiens
ccaguuucugccauucc

SEQ ID NO: 4989 - RNA, 17 nt, Homo sapiens
guuucugccauuccagc

SEQ ID NO: 4990 - RNA, 17 nt, Homo sapiens
uuucugccauuccagcu

SEQ ID NO: 4991 - RNA, 17 nt, Homo sapiens
ugccauuccagcugugg

SEQ ID NO: 4992 - RNA, 17 nt, Homo sapiens
gccauuccagcuguggg

SEQ ID NO: 4993 - RNA, 17 nt, Homo sapiens
auuccagcugugggcac

SEQ ID NO: 4994 - RNA, 17 nt, Homo sapiens
cugugggcacgucagcg

SEQ ID NO: 4995 - RNA, 17 nt, Homo sapiens
ggcacgucagcgaaggc

SEQ ID NO: 4996 - RNA, 17 nt, Homo sapiens
gcgaaggcaagcgcagg

SEQ ID NO: 4997 - RNA, 17 nt, Homo sapiens
gcaagcgcagguucacc

SEQ ID NO: 4998 - RNA, 17 nt, Homo sapiens
gcagguucaccuacgac

SEQ ID NO: 4999 - RNA, 17 nt, Homo sapiens
agguucaccuacgacca

SEQ ID NO: 5000 - RNA, 17 nt, Homo sapiens
gguucaccuacgaccac

SEQ ID NO: 5001 - RNA, 17 nt, Homo sapiens
ccuacgaccacgcugag

SEQ ID NO: 5002 - RNA, 17 nt, Homo sapiens
cuacgaccacgcugagc

SEQ ID NO: 5003 - RNA, 17 nt, Homo sapiens
gaccacgcugagcugga

SEQ ID NO: 5004 - RNA, 17 nt, Homo sapiens
cgcugagcuggaaagga

SEQ ID NO: 5005 - RNA, 17 nt, Homo sapiens
ucgcgugcugcuccccg

SEQ ID NO: 5006 - RNA, 17 nt, Homo sapiens
cgugcugcuccccgccc

SEQ ID NO: 5007 - RNA, 17 nt, Homo sapiens
ugcugcuccccgccccc

SEQ ID NO: 5008 - RNA, 17 nt, Homo sapiens
gcugcuccccgccccca

SEQ ID NO: 5009 - RNA, 17 nt, Homo sapiens
cugcuccccgcccccag

SEQ ID NO: 5010 - RNA, 17 nt, Homo sapiens
cuccccgcccccagacu

SEQ ID NO: 5011 - RNA, 17 nt, Homo sapiens
uccccgcccccagacua

SEQ ID NO: 5012 - RNA, 17 nt, Homo sapiens
ccccgcccccagacuac

SEQ ID NO: 5013 - RNA, 17 nt, Homo sapiens
cccgcccccagacuaca

SEQ ID NO: 5014 - RNA, 17 nt, Homo sapiens
ccgcccccagacuacaa

SEQ ID NO: 5015 - RNA, 17 nt, Homo sapiens
ccccagacuacaacucg

SEQ ID NO: 5016 - RNA, 17 nt, Homo sapiens
cagacuacaacucggug

SEQ ID NO: 5017 - RNA, 17 nt, Homo sapiens
acuacaacucggugguc

SEQ ID NO: 5018 - RNA, 17 nt, Homo sapiens
cggugguccuguacucc

SEQ ID NO: 5019 - RNA, 17 nt, Homo sapiens
ggugguccuguacucca

SEQ ID NO: 5020 - RNA, 17 nt, Homo sapiens
uccuguacuccacccca

SEQ ID NO: 5021 - RNA, 17 nt, Homo sapiens
cuguacuccaccccacc

SEQ ID NO: 5022 - RNA, 17 nt, Homo sapiens
uguacuccaccccaccc

SEQ ID NO: 5023 - RNA, 17 nt, Homo sapiens
uacuccaccccacccau

SEQ ID NO: 5024 - RNA, 17 nt, Homo sapiens
acuccaccccacccauc

SEQ ID NO: 5025 - RNA, 17 nt, Homo sapiens
cuccaccccacccaucu

SEQ ID NO: 5026 - RNA, 17 nt, Homo sapiens
uccaccccacccaucua

SEQ ID NO: 5027 - RNA, 17 nt, Homo sapiens
caccccacccaucuaga

SEQ ID NO: 5028 - RNA, 17 nt, Homo sapiens
accccacccaucuagag

SEQ ID NO: 5029 - RNA, 17 nt, Homo sapiens
ccccacccaucuagagu

SEQ ID NO: 5030 - RNA, 17 nt, Homo sapiens
cacccaucuagaguuug

SEQ ID NO: 5031 - RNA, 17 nt, Homo sapiens
aguuugacacgaagccu

SEQ ID NO: 5032 - RNA, 17 nt, Homo sapiens
cacgaagccuuauuucu

SEQ ID NO: 5033 - RNA, 17 nt, Homo sapiens
acgaagccuuauuucua

SEQ ID NO: 5034 - RNA, 17 nt, Homo sapiens
cuuauuucuagaagcac

SEQ ID NO: 5035 - RNA, 17 nt, Homo sapiens
cuagaagcacaugugua

SEQ ID NO: 5036 - RNA, 17 nt, Homo sapiens
agaagcacauguguauu

SEQ ID NO: 5037 - RNA, 17 nt, Homo sapiens
auuuauacccccaggaa

SEQ ID NO: 5038 - RNA, 17 nt, Homo sapiens
uuuauacccccaggaaa

SEQ ID NO: 5039 - RNA, 17 nt, Homo sapiens
uuauacccccaggaaac

SEQ ID NO: 5040 - RNA, 17 nt, Homo sapiens
uauacccccaggaaacu

SEQ ID NO: 5041 - RNA, 17 nt, Homo sapiens
auacccccaggaaacua

SEQ ID NO: 5042 - RNA, 17 nt, Homo sapiens
caggaaacuagcuuuug

SEQ ID NO: 5043 - RNA, 17 nt, Homo sapiens
aaacuagcuuuugccag

SEQ ID NO: 5044 - RNA, 17 nt, Homo sapiens
gcuuuugccaguauuau

SEQ ID NO: 5045 - RNA, 17 nt, Homo sapiens
cuuuugccaguauuaug

SEQ ID NO: 5046 - RNA, 17 nt, Homo sapiens
uauuaugcauauauaag

SEQ ID NO: 5047 - RNA, 17 nt, Homo sapiens
aaguuuacaccuuuauc

SEQ ID NO: 5048 - RNA, 17 nt, Homo sapiens
guuuacaccuuuaucuu

SEQ ID NO: 5049 - RNA, 17 nt, Homo sapiens
uuuacaccuuuaucuuu

SEQ ID NO: 5050 - RNA, 17 nt, Homo sapiens
ccuuuaucuuuccaugg

SEQ ID NO: 5051 - RNA, 17 nt, Homo sapiens
uaucuuuccaugggagc

SEQ ID NO: 5052 - RNA, 17 nt, Homo sapiens
aucuuuccaugggagcc

SEQ ID NO: 5053 - RNA, 17 nt, Homo sapiens
augggagccagcugcuu

SEQ ID NO: 5054 - RNA, 17 nt, Homo sapiens
ugggagccagcugcuuu

SEQ ID NO: 5055 - RNA, 17 nt, Homo sapiens
gagccagcugcuuuuug

SEQ ID NO: 5056 - RNA, 17 nt, Homo sapiens
ccagcugcuuuuuguga

SEQ ID NO: 5057 - RNA, 17 nt, Homo sapiens
aauagugcuuuuuuuuu

SEQ ID NO: 5058 - RNA, 17 nt, Homo sapiens
uuuuugacuaacaagaa

SEQ ID NO: 5059 - RNA, 17 nt, Homo sapiens
ugacuaacaagaaugua

SEQ ID NO: 5060 - RNA, 17 nt, Homo sapiens
aauguaacuccagauag

SEQ ID NO: 5061 - RNA, 17 nt, Homo sapiens
uguaacuccagauagag

SEQ ID NO: 5062 - RNA, 17 nt, Homo sapiens
guaacuccagauagaga

SEQ ID NO: 5063 - RNA, 17 nt, Homo sapiens
auagugacaagugaaga

SEQ ID NO: 5064 - RNA, 17 nt, Homo sapiens
ugaagaacacuacugcu

SEQ ID NO: 5065 - RNA, 17 nt, Homo sapiens
aagaacacuacugcuaa

SEQ ID NO: 5066 - RNA, 17 nt, Homo sapiens
aacacuacugcuaaauc

SEQ ID NO: 5067 - RNA, 17 nt, Homo sapiens
acuacugcuaaauccuc

SEQ ID NO: 5068 - RNA, 17 nt, Homo sapiens
gcuaaauccucauguua

SEQ ID NO: 5069 - RNA, 17 nt, Homo sapiens
cuaaauccucauguuac

SEQ ID NO: 5070 - RNA, 17 nt, Homo sapiens
aaauccucauguuacuc

SEQ ID NO: 5071 - RNA, 17 nt, Homo sapiens
cauguuacucaguguua

SEQ ID NO: 5072 - RNA, 17 nt, Homo sapiens
uguuacucaguguuaga

SEQ ID NO: 5073 - RNA, 17 nt, Homo sapiens
gagaaauccuuccuaaa

SEQ ID NO: 5074 - RNA, 17 nt, Homo sapiens
agaaauccuuccuaaac

SEQ ID NO: 5075 - RNA, 17 nt, Homo sapiens
aauccuuccuaaaccca

SEQ ID NO: 5076 - RNA, 17 nt, Homo sapiens
auccuuccuaaacccaa

SEQ ID NO: 5077 - RNA, 17 nt, Homo sapiens
uccuaaacccaaugacu

SEQ ID NO: 5078 - RNA, 17 nt, Homo sapiens
ccuaaacccaaugacuu

SEQ ID NO: 5079 - RNA, 17 nt, Homo sapiens
cuaaacccaaugacuuc

SEQ ID NO: 5080 - RNA, 17 nt, Homo sapiens
ccaaugacuucccugcu

SEQ ID NO: 5081 - RNA, 17 nt, Homo sapiens
augacuucccugcucca

SEQ ID NO: 5082 - RNA, 17 nt, Homo sapiens
ugacuucccugcuccaa

SEQ ID NO: 5083 - RNA, 17 nt, Homo sapiens
gacuucccugcuccaac

SEQ ID NO: 5084 - RNA, 17 nt, Homo sapiens
uucccugcuccaacccc

SEQ ID NO: 5085 - RNA, 17 nt, Homo sapiens
cccugcuccaacccccg

SEQ ID NO: 5086 - RNA, 17 nt, Homo sapiens
ccugcuccaacccccgc

SEQ ID NO: 5087 - RNA, 17 nt, Homo sapiens
gcuccaacccccgccac

SEQ ID NO: 5088 - RNA, 17 nt, Homo sapiens
cuccaacccccgccacc

SEQ ID NO: 5089 - RNA, 17 nt, Homo sapiens
uccaacccccgccaccu

SEQ ID NO: 5090 - RNA, 17 nt, Homo sapiens
ccaacccccgccaccuc

SEQ ID NO: 5091 - RNA, 17 nt, Homo sapiens
acccccgccaccucagg

SEQ ID NO: 5092 - RNA, 17 nt, Homo sapiens
cccccgccaccucaggg

SEQ ID NO: 5093 - RNA, 17 nt, Homo sapiens
cccgccaccucagggca

SEQ ID NO: 5094 - RNA, 17 nt, Homo sapiens
ccgccaccucagggcac

SEQ ID NO: 5095 - RNA, 17 nt, Homo sapiens
gccaccucagggcacgc

SEQ ID NO: 5096 - RNA, 17 nt, Homo sapiens
cucagggcacgcaggac

SEQ ID NO: 5097 - RNA, 17 nt, Homo sapiens
gggcacgcaggaccagu

SEQ ID NO: 5098 - RNA, 17 nt, Homo sapiens
cgcaggaccaguuugau

SEQ ID NO: 5099 - RNA, 17 nt, Homo sapiens
gcaggaccaguuugauu

SEQ ID NO: 5100 - RNA, 17 nt, Homo sapiens
ugaggagcugcacugau

SEQ ID NO: 5101 - RNA, 17 nt, Homo sapiens
ggagcugcacugaucac

SEQ ID NO: 5102 - RNA, 17 nt, Homo sapiens
agcugcacugaucaccc

SEQ ID NO: 5103 - RNA, 17 nt, Homo sapiens
cacugaucacccaaugc

SEQ ID NO: 5104 - RNA, 17 nt, Homo sapiens
cugaucacccaaugcau

SEQ ID NO: 5105 - RNA, 17 nt, Homo sapiens
ugaucacccaaugcauc

SEQ ID NO: 5106 - RNA, 17 nt, Homo sapiens
gaucacccaaugcauca

SEQ ID NO: 5107 - RNA, 17 nt, Homo sapiens
cccaaugcaucacguac

SEQ ID NO: 5108 - RNA, 17 nt, Homo sapiens
aaugcaucacguacccc

SEQ ID NO: 5109 - RNA, 17 nt, Homo sapiens
ucacguaccccacuggg

SEQ ID NO: 5110 - RNA, 17 nt, Homo sapiens
cacguaccccacugggc

SEQ ID NO: 5111 - RNA, 17 nt, Homo sapiens
acguaccccacugggcc

SEQ ID NO: 5112 - RNA, 17 nt, Homo sapiens
cguaccccacugggcca

SEQ ID NO: 5113 - RNA, 17 nt, Homo sapiens
uaccccacugggccagc

SEQ ID NO: 5114 - RNA, 17 nt, Homo sapiens
cacugggccagcccugc

SEQ ID NO: 5115 - RNA, 17 nt, Homo sapiens
acugggccagcccugca

SEQ ID NO: 5116 - RNA, 17 nt, Homo sapiens
gggccagcccugcagcc

SEQ ID NO: 5117 - RNA, 17 nt, Homo sapiens
ggccagcccugcagccc

SEQ ID NO: 5118 - RNA, 17 nt, Homo sapiens
gccagcccugcagccca

SEQ ID NO: 5119 - RNA, 17 nt, Homo sapiens
agcccugcagcccaaaa

SEQ ID NO: 5120 - RNA, 17 nt, Homo sapiens
ccugcagcccaaaaccc

SEQ ID NO: 5121 - RNA, 17 nt, Homo sapiens
cugcagcccaaaaccca

SEQ ID NO: 5122 - RNA, 17 nt, Homo sapiens
ugcagcccaaaacccag

SEQ ID NO: 5123 - RNA, 17 nt, Homo sapiens
cccaaaacccagggcaa

SEQ ID NO: 5124 - RNA, 17 nt, Homo sapiens
ccaaaacccagggcaac

SEQ ID NO: 5125 - RNA, 17 nt, Homo sapiens
caaaacccagggcaaca

SEQ ID NO: 5126 - RNA, 17 nt, Homo sapiens
cccagggcaacaagccc

SEQ ID NO: 5127 - RNA, 17 nt, Homo sapiens
agggcaacaagcccguu

SEQ ID NO: 5128 - RNA, 17 nt, Homo sapiens
caacaagcccguuagcc

SEQ ID NO: 5129 - RNA, 17 nt, Homo sapiens
aacaagcccguuagccc

SEQ ID NO: 5130 - RNA, 17 nt, Homo sapiens
ccguuagccccagggga

SEQ ID NO: 5131 - RNA, 17 nt, Homo sapiens
cguuagccccaggggau

SEQ ID NO: 5132 - RNA, 17 nt, Homo sapiens
guuagccccaggggauc

SEQ ID NO: 5133 - RNA, 17 nt, Homo sapiens
uuagccccaggggauca

SEQ ID NO: 5134 - RNA, 17 nt, Homo sapiens
aggggaucacuggcugg

SEQ ID NO: 5135 - RNA, 17 nt, Homo sapiens
gggaucacuggcuggcc

SEQ ID NO: 5136 - RNA, 17 nt, Homo sapiens
ucacuggcuggccugag

SEQ ID NO: 5137 - RNA, 17 nt, Homo sapiens
uggcuggccugagcaac

SEQ ID NO: 5138 - RNA, 17 nt, Homo sapiens
ggcuggccugagcaaca

SEQ ID NO: 5139 - RNA, 17 nt, Homo sapiens
gccugagcaacaucucg

SEQ ID NO: 5140 - RNA, 17 nt, Homo sapiens
ugagcaacaucucggga

SEQ ID NO: 5141 - RNA, 17 nt, Homo sapiens
gcaacaucucgggaguc

SEQ ID NO: 5142 - RNA, 17 nt, Homo sapiens
cgggaguccucuagcag

SEQ ID NO: 5143 - RNA, 17 nt, Homo sapiens
gggaguccucuagcagg

SEQ ID NO: 5144 - RNA, 17 nt, Homo sapiens
gaguccucuagcaggcc

SEQ ID NO: 5145 - RNA, 17 nt, Homo sapiens
ccucuagcaggccuaag

SEQ ID NO: 5146 - RNA, 17 nt, Homo sapiens
uagcaggccuaagacau

SEQ ID NO: 5147 - RNA, 17 nt, Homo sapiens
agcaggccuaagacaug

SEQ ID NO: 5148 - RNA, 17 nt, Homo sapiens
ccuaagacaugugagga

SEQ ID NO: 5149 - RNA, 17 nt, Homo sapiens
aaaaaagcaaaaagcaa

SEQ ID NO: 5150 - RNA, 17 nt, Homo sapiens
caaaaagcaagggagaa

SEQ ID NO: 5151 - RNA, 17 nt, Homo sapiens
agagaaaccgggagaag

SEQ ID NO: 5152 - RNA, 17 nt, Homo sapiens
gagaaggcaugagaaag

SEQ ID NO: 5153 - RNA, 17 nt, Homo sapiens
ugagacgcaccaugugg

SEQ ID NO: 5154 - RNA, 17 nt, Homo sapiens
agacgcaccaugugggc

SEQ ID NO: 5155 - RNA, 17 nt, Homo sapiens
gacgcaccaugugggca

SEQ ID NO: 5156 - RNA, 17 nt, Homo sapiens
augugggcacggagggg

SEQ ID NO: 5157 - RNA, 17 nt, Homo sapiens
gacggggcucagcaaug

SEQ ID NO: 5158 - RNA, 17 nt, Homo sapiens
cggggcucagcaaugcc

SEQ ID NO: 5159 - RNA, 17 nt, Homo sapiens
ggcucagcaaugccauu

SEQ ID NO: 5160 - RNA, 17 nt, Homo sapiens
agcaaugccauuucagu

SEQ ID NO: 5161 - RNA, 17 nt, Homo sapiens
gcaaugccauuucagug

SEQ ID NO: 5162 - RNA, 17 nt, Homo sapiens
gccauuucaguggcuuc

SEQ ID NO: 5163 - RNA, 17 nt, Homo sapiens
ucaguggcuucccagcu

SEQ ID NO: 5164 - RNA, 17 nt, Homo sapiens
guggcuucccagcucug

SEQ ID NO: 5165 - RNA, 17 nt, Homo sapiens
uggcuucccagcucuga

SEQ ID NO: 5166 - RNA, 17 nt, Homo sapiens
ggcuucccagcucugac

SEQ ID NO: 5167 - RNA, 17 nt, Homo sapiens
uucccagcucugacccu

SEQ ID NO: 5168 - RNA, 17 nt, Homo sapiens
cccagcucugacccuuc

SEQ ID NO: 5169 - RNA, 17 nt, Homo sapiens
gcucugacccuucuaca

SEQ ID NO: 5170 - RNA, 17 nt, Homo sapiens
cucugacccuucuacau

SEQ ID NO: 5171 - RNA, 17 nt, Homo sapiens
ucugacccuucuacauu

SEQ ID NO: 5172 - RNA, 17 nt, Homo sapiens
gacccuucuacauuuga

SEQ ID NO: 5173 - RNA, 17 nt, Homo sapiens
ccuucuacauuugaggg

SEQ ID NO: 5174 - RNA, 17 nt, Homo sapiens
uugagggcccagccagg

SEQ ID NO: 5175 - RNA, 17 nt, Homo sapiens
ugagggcccagccagga

SEQ ID NO: 5176 - RNA, 17 nt, Homo sapiens
gagggcccagccaggag

SEQ ID NO: 5177 - RNA, 17 nt, Homo sapiens
ggcccagccaggagcag

SEQ ID NO: 5178 - RNA, 17 nt, Homo sapiens
gcccagccaggagcaga

SEQ ID NO: 5179 - RNA, 17 nt, Homo sapiens
ccaggagcagauggaca

SEQ ID NO: 5180 - RNA, 17 nt, Homo sapiens
agauggacagcgaugag

SEQ ID NO: 5181 - RNA, 17 nt, Homo sapiens
gaggggacauuuucugg

SEQ ID NO: 5182 - RNA, 17 nt, Homo sapiens
acauuuucuggauucug

SEQ ID NO: 5183 - RNA, 17 nt, Homo sapiens
cuggauucugggaggca

SEQ ID NO: 5184 - RNA, 17 nt, Homo sapiens
ugggaggcaagaaaagg

SEQ ID NO: 5185 - RNA, 17 nt, Homo sapiens
aaaaggacaaauaucuu

SEQ ID NO: 5186 - RNA, 17 nt, Homo sapiens
caaauaucuuuuuugga

SEQ ID NO: 5187 - RNA, 17 nt, Homo sapiens
uuuggaacuaaagcaaa

SEQ ID NO: 5188 - RNA, 17 nt, Homo sapiens
acuaaagcaaauuuuag

SEQ ID NO: 5189 - RNA, 17 nt, Homo sapiens
uuuuagaccuuuaccua

SEQ ID NO: 5190 - RNA, 17 nt, Homo sapiens
uuuagaccuuuaccuau

SEQ ID NO: 5191 - RNA, 17 nt, Homo sapiens
accuuuaccuauggaag

SEQ ID NO: 5192 - RNA, 17 nt, Homo sapiens
ccuuuaccuauggaagu

SEQ ID NO: 5193 - RNA, 17 nt, Homo sapiens
agugguucuauguccau

SEQ ID NO: 5194 - RNA, 17 nt, Homo sapiens
ucuauguccauucucau

SEQ ID NO: 5195 - RNA, 17 nt, Homo sapiens
cuauguccauucucauu

SEQ ID NO: 5196 - RNA, 17 nt, Homo sapiens
guccauucucauucgug

SEQ ID NO: 5197 - RNA, 17 nt, Homo sapiens
ccauucucauucguggc

SEQ ID NO: 5198 - RNA, 17 nt, Homo sapiens
uucguggcauguuuuga

SEQ ID NO: 5199 - RNA, 17 nt, Homo sapiens
uuuguagcacugagggu

SEQ ID NO: 5200 - RNA, 17 nt, Homo sapiens
uguagcacugagggugg

SEQ ID NO: 5201 - RNA, 17 nt, Homo sapiens
aggguggcacucaacuc

SEQ ID NO: 5202 - RNA, 17 nt, Homo sapiens
gguggcacucaacucug

SEQ ID NO: 5203 - RNA, 17 nt, Homo sapiens
uggcacucaacucugag

SEQ ID NO: 5204 - RNA, 17 nt, Homo sapiens
cacucaacucugagccc

SEQ ID NO: 5205 - RNA, 17 nt, Homo sapiens
cucaacucugagcccau

SEQ ID NO: 5206 - RNA, 17 nt, Homo sapiens
cucugagcccauacuuu

SEQ ID NO: 5207 - RNA, 17 nt, Homo sapiens
ucugagcccauacuuuu

SEQ ID NO: 5208 - RNA, 17 nt, Homo sapiens
cugagcccauacuuuug

SEQ ID NO: 5209 - RNA, 17 nt, Homo sapiens
gcccauacuuuuggcuc

SEQ ID NO: 5210 - RNA, 17 nt, Homo sapiens
cuuuuggcuccucuagu

SEQ ID NO: 5211 - RNA, 17 nt, Homo sapiens
uuuggcuccucuaguaa

SEQ ID NO: 5212 - RNA, 17 nt, Homo sapiens
uuggcuccucuaguaag

SEQ ID NO: 5213 - RNA, 17 nt, Homo sapiens
ggcuccucuaguaagau

SEQ ID NO: 5214 - RNA, 17 nt, Homo sapiens
uaagaugcacugaaaac

SEQ ID NO: 5215 - RNA, 17 nt, Homo sapiens
agaugcacugaaaacuu

SEQ ID NO: 5216 - RNA, 17 nt, Homo sapiens
cugaaaacuuagccaga

SEQ ID NO: 5217 - RNA, 17 nt, Homo sapiens
aacuuagccagaguuag

SEQ ID NO: 5218 - RNA, 17 nt, Homo sapiens
acuuagccagaguuagg

SEQ ID NO: 5219 - RNA, 17 nt, Homo sapiens
agguugucuccaggcca

SEQ ID NO: 5220 - RNA, 17 nt, Homo sapiens
guugucuccaggccaug

SEQ ID NO: 5221 - RNA, 17 nt, Homo sapiens
uugucuccaggccauga

SEQ ID NO: 5222 - RNA, 17 nt, Homo sapiens
cuccaggccaugauggc

SEQ ID NO: 5223 - RNA, 17 nt, Homo sapiens
uccaggccaugauggcc

SEQ ID NO: 5224 - RNA, 17 nt, Homo sapiens
augauggccuuacacug

SEQ ID NO: 5225 - RNA, 17 nt, Homo sapiens
ugauggccuuacacuga

SEQ ID NO: 5226 - RNA, 17 nt, Homo sapiens
ggccuuacacugaaaau

SEQ ID NO: 5227 - RNA, 17 nt, Homo sapiens
ccuuacacugaaaaugu

SEQ ID NO: 5228 - RNA, 17 nt, Homo sapiens
aaaaugucacauucuau

SEQ ID NO: 5229 - RNA, 17 nt, Homo sapiens
aaugucacauucuauuu

SEQ ID NO: 5230 - RNA, 17 nt, Homo sapiens
ucacauucuauuuuggg

SEQ ID NO: 5231 - RNA, 17 nt, Homo sapiens
auauaguccagacacuu

SEQ ID NO: 5232 - RNA, 17 nt, Homo sapiens
uauaguccagacacuua

SEQ ID NO: 5233 - RNA, 17 nt, Homo sapiens
guccagacacuuaacuc

SEQ ID NO: 5234 - RNA, 17 nt, Homo sapiens
ccagacacuuaacucaa

SEQ ID NO: 5235 - RNA, 17 nt, Homo sapiens
cacuuaacucaauuucu

SEQ ID NO: 5236 - RNA, 17 nt, Homo sapiens
cuuaacucaauuucuug

SEQ ID NO: 5237 - RNA, 17 nt, Homo sapiens
ucaauuucuugguauua

SEQ ID NO: 5238 - RNA, 17 nt, Homo sapiens
uauuauucuguuuugca

SEQ ID NO: 5239 - RNA, 17 nt, Homo sapiens
uguuuugcacaguuagu

SEQ ID NO: 5240 - RNA, 17 nt, Homo sapiens
uuuugcacaguuaguug

SEQ ID NO: 5241 - RNA, 17 nt, Homo sapiens
aagaaagcugagaagaa

SEQ ID NO: 5242 - RNA, 17 nt, Homo sapiens
gaaaaugcaguccugag

SEQ ID NO: 5243 - RNA, 17 nt, Homo sapiens
augcaguccugaggaga

SEQ ID NO: 5244 - RNA, 17 nt, Homo sapiens
ugcaguccugaggagag

SEQ ID NO: 5245 - RNA, 17 nt, Homo sapiens
gaguuuucuccauauca

SEQ ID NO: 5246 - RNA, 17 nt, Homo sapiens
guuuucuccauaucaaa

SEQ ID NO: 5247 - RNA, 17 nt, Homo sapiens
uuuucuccauaucaaaa

SEQ ID NO: 5248 - RNA, 17 nt, Homo sapiens
uccauaucaaaacgagg

SEQ ID NO: 5249 - RNA, 17 nt, Homo sapiens
acgagggcugauggagg

SEQ ID NO: 5250 - RNA, 17 nt, Homo sapiens
aaaaggucaauaagguc

SEQ ID NO: 5251 - RNA, 17 nt, Homo sapiens
auaaggucaagggaaga

SEQ ID NO: 5252 - RNA, 17 nt, Homo sapiens
gggaagaccccgucucu

SEQ ID NO: 5253 - RNA, 17 nt, Homo sapiens
ggaagaccccgucucua

SEQ ID NO: 5254 - RNA, 17 nt, Homo sapiens
gaagaccccgucucuau

SEQ ID NO: 5255 - RNA, 17 nt, Homo sapiens
accccgucucuauacca

SEQ ID NO: 5256 - RNA, 17 nt, Homo sapiens
cccgucucuauaccaac

SEQ ID NO: 5257 - RNA, 17 nt, Homo sapiens
cucuauaccaaccaaac

SEQ ID NO: 5258 - RNA, 17 nt, Homo sapiens
ucuauaccaaccaaacc

SEQ ID NO: 5259 - RNA, 17 nt, Homo sapiens
auaccaaccaaaccaau

SEQ ID NO: 5260 - RNA, 17 nt, Homo sapiens
uaccaaccaaaccaauu

SEQ ID NO: 5261 - RNA, 17 nt, Homo sapiens
aaccaaaccaauucacc

SEQ ID NO: 5262 - RNA, 17 nt, Homo sapiens
accaaaccaauucacca

SEQ ID NO: 5263 - RNA, 17 nt, Homo sapiens
accaauucaccaacaca

SEQ ID NO: 5264 - RNA, 17 nt, Homo sapiens
caauucaccaacacagu

SEQ ID NO: 5265 - RNA, 17 nt, Homo sapiens
aauucaccaacacaguu

SEQ ID NO: 5266 - RNA, 17 nt, Homo sapiens
ucaccaacacaguuggg

SEQ ID NO: 5267 - RNA, 17 nt, Homo sapiens
accaacacaguugggac

SEQ ID NO: 5268 - RNA, 17 nt, Homo sapiens
guugggacccaaaacac

SEQ ID NO: 5269 - RNA, 17 nt, Homo sapiens
uugggacccaaaacaca

SEQ ID NO: 5270 - RNA, 17 nt, Homo sapiens
ugggacccaaaacacag

SEQ ID NO: 5271 - RNA, 17 nt, Homo sapiens
cccaaaacacaggaagu

SEQ ID NO: 5272 - RNA, 17 nt, Homo sapiens
caaaacacaggaaguca

SEQ ID NO: 5273 - RNA, 17 nt, Homo sapiens
aggaagucagucacguu

SEQ ID NO: 5274 - RNA, 17 nt, Homo sapiens
agucagucacguuuccu

SEQ ID NO: 5275 - RNA, 17 nt, Homo sapiens
cacguuuccuuuucauu

SEQ ID NO: 5276 - RNA, 17 nt, Homo sapiens
acguuuccuuuucauuu

SEQ ID NO: 5277 - RNA, 17 nt, Homo sapiens
uccuuuucauuuaaugg

SEQ ID NO: 5278 - RNA, 17 nt, Homo sapiens
ggggauuccacuaucuc

SEQ ID NO: 5279 - RNA, 17 nt, Homo sapiens
gggauuccacuaucuca

SEQ ID NO: 5280 - RNA, 17 nt, Homo sapiens
gauuccacuaucucaca

SEQ ID NO: 5281 - RNA, 17 nt, Homo sapiens
ccacuaucucacacuaa

SEQ ID NO: 5282 - RNA, 17 nt, Homo sapiens
acuaucucacacuaauc

SEQ ID NO: 5283 - RNA, 17 nt, Homo sapiens
uaucucacacuaaucug

SEQ ID NO: 5284 - RNA, 17 nt, Homo sapiens
ucucacacuaaucugaa

SEQ ID NO: 5285 - RNA, 17 nt, Homo sapiens
cacuaaucugaaaggau

SEQ ID NO: 5286 - RNA, 17 nt, Homo sapiens
ggaagagcauuagcugg

SEQ ID NO: 5287 - RNA, 17 nt, Homo sapiens
gcauuagcuggcgcaua

SEQ ID NO: 5288 - RNA, 17 nt, Homo sapiens
gcuggcgcauauuaagc

SEQ ID NO: 5289 - RNA, 17 nt, Homo sapiens
uauuaagcacuuuaagc

SEQ ID NO: 5290 - RNA, 17 nt, Homo sapiens
uuaagcacuuuaagcuc

SEQ ID NO: 5291 - RNA, 17 nt, Homo sapiens
cuuuaagcuccuugagu

SEQ ID NO: 5292 - RNA, 17 nt, Homo sapiens
uuaagcuccuugaguaa

SEQ ID NO: 5293 - RNA, 17 nt, Homo sapiens
uaagcuccuugaguaaa

SEQ ID NO: 5294 - RNA, 17 nt, Homo sapiens
auuuaugcaagguauuu

SEQ ID NO: 5295 - RNA, 17 nt, Homo sapiens
gguauuucuccaguugg

SEQ ID NO: 5296 - RNA, 17 nt, Homo sapiens
uauuucuccaguuggga

SEQ ID NO: 5297 - RNA, 17 nt, Homo sapiens
auuucuccaguugggac

SEQ ID NO: 5298 - RNA, 17 nt, Homo sapiens
guugggacucaggauau

SEQ ID NO: 5299 - RNA, 17 nt, Homo sapiens
ugggacucaggauauua

SEQ ID NO: 5300 - RNA, 17 nt, Homo sapiens
uaaugagccaucacuag

SEQ ID NO: 5301 - RNA, 17 nt, Homo sapiens
aaugagccaucacuaga

SEQ ID NO: 5302 - RNA, 17 nt, Homo sapiens
gagccaucacuagaaga

SEQ ID NO: 5303 - RNA, 17 nt, Homo sapiens
gccaucacuagaagaaa

SEQ ID NO: 5304 - RNA, 17 nt, Homo sapiens
agaaaagcccauuuuca

SEQ ID NO: 5305 - RNA, 17 nt, Homo sapiens
gaaaagcccauuuucaa

SEQ ID NO: 5306 - RNA, 17 nt, Homo sapiens
aaaagcccauuuucaac

SEQ ID NO: 5307 - RNA, 17 nt, Homo sapiens
ccauuuucaacugcuuu

SEQ ID NO: 5308 - RNA, 17 nt, Homo sapiens
uuuucaacugcuuugaa

SEQ ID NO: 5309 - RNA, 17 nt, Homo sapiens
ucaacugcuuugaaacu

SEQ ID NO: 5310 - RNA, 17 nt, Homo sapiens
uuugaaacuugccuggg

SEQ ID NO: 5311 - RNA, 17 nt, Homo sapiens
aaacuugccuggggucu

SEQ ID NO: 5312 - RNA, 17 nt, Homo sapiens
aacuugccuggggucug

SEQ ID NO: 5313 - RNA, 17 nt, Homo sapiens
cuggggucugagcauga

SEQ ID NO: 5314 - RNA, 17 nt, Homo sapiens
gucugagcaugauggga

SEQ ID NO: 5315 - RNA, 17 nt, Homo sapiens
agggagacaggguagga

SEQ ID NO: 5316 - RNA, 17 nt, Homo sapiens
aagggcgccuacucuuc

SEQ ID NO: 5317 - RNA, 17 nt, Homo sapiens
agggcgccuacucuuca

SEQ ID NO: 5318 - RNA, 17 nt, Homo sapiens
gcgccuacucuucaggg

SEQ ID NO: 5319 - RNA, 17 nt, Homo sapiens
gccuacucuucaggguc

SEQ ID NO: 5320 - RNA, 17 nt, Homo sapiens
uacucuucagggucuaa

SEQ ID NO: 5321 - RNA, 17 nt, Homo sapiens
ucagggucuaaagauca

SEQ ID NO: 5322 - RNA, 17 nt, Homo sapiens
uaaagaucaagugggcc

SEQ ID NO: 5323 - RNA, 17 nt, Homo sapiens
aagugggccuuggaucg

SEQ ID NO: 5324 - RNA, 17 nt, Homo sapiens
agugggccuuggaucgc

SEQ ID NO: 5325 - RNA, 17 nt, Homo sapiens
uggaucgcuaagcuggc

SEQ ID NO: 5326 - RNA, 17 nt, Homo sapiens
cgcuaagcuggcucugu

SEQ ID NO: 5327 - RNA, 17 nt, Homo sapiens
aagcuggcucuguuuga

SEQ ID NO: 5328 - RNA, 17 nt, Homo sapiens
gcuggcucuguuugaug

SEQ ID NO: 5329 - RNA, 17 nt, Homo sapiens
uuugaugcuauuuaugc

SEQ ID NO: 5330 - RNA, 17 nt, Homo sapiens
auuuaugcaaguuaggg

SEQ ID NO: 5331 - RNA, 17 nt, Homo sapiens
uuagggucuauguauuu

SEQ ID NO: 5332 - RNA, 17 nt, Homo sapiens
ggaugcgccuacucuuc

SEQ ID NO: 5333 - RNA, 17 nt, Homo sapiens
gaugcgccuacucuuca

SEQ ID NO: 5334 - RNA, 17 nt, Homo sapiens
aggaugucugcaccuuc

SEQ ID NO: 5335 - RNA, 17 nt, Homo sapiens
augucugcaccuucugc

SEQ ID NO: 5336 - RNA, 17 nt, Homo sapiens
gucugcaccuucugcag

SEQ ID NO: 5337 - RNA, 17 nt, Homo sapiens
ucugcaccuucugcagc

SEQ ID NO: 5338 - RNA, 17 nt, Homo sapiens
gcaccuucugcagccag

SEQ ID NO: 5339 - RNA, 17 nt, Homo sapiens
ccuucugcagccaguca

SEQ ID NO: 5340 - RNA, 17 nt, Homo sapiens
ucugcagccagucagaa

SEQ ID NO: 5341 - RNA, 17 nt, Homo sapiens
cugcagccagucagaag

SEQ ID NO: 5342 - RNA, 17 nt, Homo sapiens
agccagucagaagcugg

SEQ ID NO: 5343 - RNA, 17 nt, Homo sapiens
ucagaagcuggagaggc

SEQ ID NO: 5344 - RNA, 17 nt, Homo sapiens
ggagaggcaacagugga

SEQ ID NO: 5345 - RNA, 17 nt, Homo sapiens
gaggcaacaguggauug

SEQ ID NO: 5346 - RNA, 17 nt, Homo sapiens
uggauugcugcuucuug

SEQ ID NO: 5347 - RNA, 17 nt, Homo sapiens
auugcugcuucuugggg

SEQ ID NO: 5348 - RNA, 17 nt, Homo sapiens
gcugcuucuuggggaga

SEQ ID NO: 5349 - RNA, 17 nt, Homo sapiens
gaguaugcuuccuuuua

SEQ ID NO: 5350 - RNA, 17 nt, Homo sapiens
uaugcuuccuuuuaucc

SEQ ID NO: 5351 - RNA, 17 nt, Homo sapiens
augcuuccuuuuaucca

SEQ ID NO: 5352 - RNA, 17 nt, Homo sapiens
cuuuuauccauguaauu

SEQ ID NO: 5353 - RNA, 17 nt, Homo sapiens
uuuuauccauguaauuu

SEQ ID NO: 5354 - RNA, 17 nt, Homo sapiens
aauuuaacuguagaacc

SEQ ID NO: 5355 - RNA, 17 nt, Homo sapiens
uguagaaccugagcucu

SEQ ID NO: 5356 - RNA, 17 nt, Homo sapiens
guagaaccugagcucua

SEQ ID NO: 5357 - RNA, 17 nt, Homo sapiens
accugagcucuaaguaa

SEQ ID NO: 5358 - RNA, 17 nt, Homo sapiens
cugagcucuaaguaacc

SEQ ID NO: 5359 - RNA, 17 nt, Homo sapiens
uaaguaaccgaagaaug

SEQ ID NO: 5360 - RNA, 17 nt, Homo sapiens
auguaugccucuguucu

SEQ ID NO: 5361 - RNA, 17 nt, Homo sapiens
uguaugccucuguucuu

SEQ ID NO: 5362 - RNA, 17 nt, Homo sapiens
uaugccucuguucuuau

SEQ ID NO: 5363 - RNA, 17 nt, Homo sapiens
cucuguucuuaugugcc

SEQ ID NO: 5364 - RNA, 17 nt, Homo sapiens
uuaugugccacauccuu

SEQ ID NO: 5365 - RNA, 17 nt, Homo sapiens
uaugugccacauccuug

SEQ ID NO: 5366 - RNA, 17 nt, Homo sapiens
ugugccacauccuuguu

SEQ ID NO: 5367 - RNA, 17 nt, Homo sapiens
gccacauccuuguuuaa

SEQ ID NO: 5368 - RNA, 17 nt, Homo sapiens
ccacauccuuguuuaaa

SEQ ID NO: 5369 - RNA, 17 nt, Homo sapiens
uuaaaggcucucuguau

SEQ ID NO: 5370 - RNA, 17 nt, Homo sapiens
aaaggcucucuguauga

SEQ ID NO: 5371 - RNA, 17 nt, Homo sapiens
aggcucucuguaugaag

SEQ ID NO: 5372 - RNA, 17 nt, Homo sapiens
gaugggaccgucaucag

SEQ ID NO: 5373 - RNA, 17 nt, Homo sapiens
ggaccgucaucagcaca

SEQ ID NO: 5374 - RNA, 17 nt, Homo sapiens
ccgucaucagcacauuc

SEQ ID NO: 5375 - RNA, 17 nt, Homo sapiens
ucaucagcacauucccu

SEQ ID NO: 5376 - RNA, 17 nt, Homo sapiens
aucagcacauucccuag

SEQ ID NO: 5377 - RNA, 17 nt, Homo sapiens
gcacauucccuagugag

SEQ ID NO: 5378 - RNA, 17 nt, Homo sapiens
cacauucccuagugagc

SEQ ID NO: 5379 - RNA, 17 nt, Homo sapiens
acauucccuagugagcc

SEQ ID NO: 5380 - RNA, 17 nt, Homo sapiens
uagugagccuacuggcu

SEQ ID NO: 5381 - RNA, 17 nt, Homo sapiens
agugagccuacuggcuc

SEQ ID NO: 5382 - RNA, 17 nt, Homo sapiens
gagccuacuggcuccug

SEQ ID NO: 5383 - RNA, 17 nt, Homo sapiens
cuacuggcuccuggcag

SEQ ID NO: 5384 - RNA, 17 nt, Homo sapiens
acuggcuccuggcagcg

SEQ ID NO: 5385 - RNA, 17 nt, Homo sapiens
cuggcuccuggcagcgg

SEQ ID NO: 5386 - RNA, 17 nt, Homo sapiens
cuccuggcagcggcuuu

SEQ ID NO: 5387 - RNA, 17 nt, Homo sapiens
gcagcggcuuuugugga

SEQ ID NO: 5388 - RNA, 17 nt, Homo sapiens
uggaagacucacuagcc

SEQ ID NO: 5389 - RNA, 17 nt, Homo sapiens
gaagacucacuagccag

SEQ ID NO: 5390 - RNA, 17 nt, Homo sapiens
agacucacuagccagaa

SEQ ID NO: 5391 - RNA, 17 nt, Homo sapiens
ucacuagccagaagaga

SEQ ID NO: 5392 - RNA, 17 nt, Homo sapiens
cacuagccagaagagag

SEQ ID NO: 5393 - RNA, 17 nt, Homo sapiens
agugggacaguccucuc

SEQ ID NO: 5394 - RNA, 17 nt, Homo sapiens
ggacaguccucuccacc

SEQ ID NO: 5395 - RNA, 17 nt, Homo sapiens
gacaguccucuccacca

SEQ ID NO: 5396 - RNA, 17 nt, Homo sapiens
caguccucuccaccaag

SEQ ID NO: 5397 - RNA, 17 nt, Homo sapiens
guccucuccaccaagau

SEQ ID NO: 5398 - RNA, 17 nt, Homo sapiens
uccucuccaccaagauc

SEQ ID NO: 5399 - RNA, 17 nt, Homo sapiens
cucuccaccaagaucua

SEQ ID NO: 5400 - RNA, 17 nt, Homo sapiens
ucuccaccaagaucuaa

SEQ ID NO: 5401 - RNA, 17 nt, Homo sapiens
ccaagaucuaaauccaa

SEQ ID NO: 5402 - RNA, 17 nt, Homo sapiens
ucuaaauccaaacaaaa

SEQ ID NO: 5403 - RNA, 17 nt, Homo sapiens
cuaaauccaaacaaaag

SEQ ID NO: 5404 - RNA, 17 nt, Homo sapiens
auccaaacaaaagcagg

SEQ ID NO: 5405 - RNA, 17 nt, Homo sapiens
acaaaagcaggcuagag

SEQ ID NO: 5406 - RNA, 17 nt, Homo sapiens
aagcaggcuagagccag

SEQ ID NO: 5407 - RNA, 17 nt, Homo sapiens
gcuagagccagaagaga

SEQ ID NO: 5408 - RNA, 17 nt, Homo sapiens
cuagagccagaagagag

SEQ ID NO: 5409 - RNA, 17 nt, Homo sapiens
gagaggacaaaucuuug

SEQ ID NO: 5410 - RNA, 17 nt, Homo sapiens
gacaaaucuuuguuguu

SEQ ID NO: 5411 - RNA, 17 nt, Homo sapiens
uguuguuccucuucuuu

SEQ ID NO: 5412 - RNA, 17 nt, Homo sapiens
guuguuccucuucuuua

SEQ ID NO: 5413 - RNA, 17 nt, Homo sapiens
uguuccucuucuuuaca

SEQ ID NO: 5414 - RNA, 17 nt, Homo sapiens
uccucuucuuuacacau

SEQ ID NO: 5415 - RNA, 17 nt, Homo sapiens
uucuuuacacauacgca

SEQ ID NO: 5416 - RNA, 17 nt, Homo sapiens
cuuuacacauacgcaaa

SEQ ID NO: 5417 - RNA, 17 nt, Homo sapiens
acauacgcaaaccaccu

SEQ ID NO: 5418 - RNA, 17 nt, Homo sapiens
acgcaaaccaccuguga

SEQ ID NO: 5419 - RNA, 17 nt, Homo sapiens
cgcaaaccaccugugac

SEQ ID NO: 5420 - RNA, 17 nt, Homo sapiens
caaaccaccugugacag

SEQ ID NO: 5421 - RNA, 17 nt, Homo sapiens
aaaccaccugugacagc

SEQ ID NO: 5422 - RNA, 17 nt, Homo sapiens
ccugugacagcuggcaa

SEQ ID NO: 5423 - RNA, 17 nt, Homo sapiens
gugacagcuggcaauuu

SEQ ID NO: 5424 - RNA, 17 nt, Homo sapiens
cagcuggcaauuuuaua

SEQ ID NO: 5425 - RNA, 17 nt, Homo sapiens
uauaaaucagguaacug

SEQ ID NO: 5426 - RNA, 17 nt, Homo sapiens
cagguaacuggaaggag

SEQ ID NO: 5427 - RNA, 17 nt, Homo sapiens
gguuaaacucagaaaaa

SEQ ID NO: 5428 - RNA, 17 nt, Homo sapiens
uuaaacucagaaaaaag

SEQ ID NO: 5429 - RNA, 17 nt, Homo sapiens
aagaagaccucagucaa

SEQ ID NO: 5430 - RNA, 17 nt, Homo sapiens
agaagaccucagucaau

SEQ ID NO: 5431 - RNA, 17 nt, Homo sapiens
aagaccucagucaauuc

SEQ ID NO: 5432 - RNA, 17 nt, Homo sapiens
ccucagucaauucucua

SEQ ID NO: 5433 - RNA, 17 nt, Homo sapiens
gucaauucucuacuuuu

SEQ ID NO: 5434 - RNA, 17 nt, Homo sapiens
caauucucuacuuuuuu

SEQ ID NO: 5435 - RNA, 17 nt, Homo sapiens
uucucuacuuuuuuuuu

SEQ ID NO: 5436 - RNA, 17 nt, Homo sapiens
uuuuuuuccaaaucaga

SEQ ID NO: 5437 - RNA, 17 nt, Homo sapiens
uuuuuuccaaaucagau

SEQ ID NO: 5438 - RNA, 17 nt, Homo sapiens
uccaaaucagauaauag

SEQ ID NO: 5439 - RNA, 17 nt, Homo sapiens
auaauagcccagcaaau

SEQ ID NO: 5440 - RNA, 17 nt, Homo sapiens
uaauagcccagcaaaua

SEQ ID NO: 5441 - RNA, 17 nt, Homo sapiens
aauagcccagcaaauag

SEQ ID NO: 5442 - RNA, 17 nt, Homo sapiens
agcccagcaaauaguga

SEQ ID NO: 5443 - RNA, 17 nt, Homo sapiens
gugauaacaaauaaaac

SEQ ID NO: 5444 - RNA, 17 nt, Homo sapiens
aauaaaaccuuagcugu

SEQ ID NO: 5445 - RNA, 17 nt, Homo sapiens
auaaaaccuuagcuguu

SEQ ID NO: 5446 - RNA, 17 nt, Homo sapiens
accuuagcuguucaugu

SEQ ID NO: 5447 - RNA, 17 nt, Homo sapiens
agcuguucaugucuuga

SEQ ID NO: 5448 - RNA, 17 nt, Homo sapiens
uucaugucuugauuuca

SEQ ID NO: 5449 - RNA, 17 nt, Homo sapiens
uugauuucaauaauuaa

SEQ ID NO: 5450 - RNA, 17 nt, Homo sapiens
auuaauucuuaaucauu

SEQ ID NO: 5451 - RNA, 17 nt, Homo sapiens
ucuuaaucauuaagaga

SEQ ID NO: 5452 - RNA, 17 nt, Homo sapiens
uaagagaccauaauaaa

SEQ ID NO: 5453 - RNA, 17 nt, Homo sapiens
aagagaccauaauaaau

SEQ ID NO: 5454 - RNA, 17 nt, Homo sapiens
auaaauacuccuuuuca

SEQ ID NO: 5455 - RNA, 17 nt, Homo sapiens
aaauacuccuuuucaag

SEQ ID NO: 5456 - RNA, 17 nt, Homo sapiens
aauacuccuuuucaaga

SEQ ID NO: 5457 - RNA, 17 nt, Homo sapiens
uccuuuucaagagaaaa

SEQ ID NO: 5458 - RNA, 17 nt, Homo sapiens
agaaaagcaaaaccauu

SEQ ID NO: 5459 - RNA, 17 nt, Homo sapiens
agcaaaaccauuagaau

SEQ ID NO: 5460 - RNA, 17 nt, Homo sapiens
gcaaaaccauuagaauu

SEQ ID NO: 5461 - RNA, 17 nt, Homo sapiens
auuguuacucagcuccu

SEQ ID NO: 5462 - RNA, 17 nt, Homo sapiens
uguuacucagcuccuuc

SEQ ID NO: 5463 - RNA, 17 nt, Homo sapiens
uacucagcuccuucaaa

SEQ ID NO: 5464 - RNA, 17 nt, Homo sapiens
cucagcuccuucaaacu

SEQ ID NO: 5465 - RNA, 17 nt, Homo sapiens
ucagcuccuucaaacuc

SEQ ID NO: 5466 - RNA, 17 nt, Homo sapiens
gcuccuucaaacucagg

SEQ ID NO: 5467 - RNA, 17 nt, Homo sapiens
cuucaaacucagguuug

SEQ ID NO: 5468 - RNA, 17 nt, Homo sapiens
ucaaacucagguuugua

SEQ ID NO: 5469 - RNA, 17 nt, Homo sapiens
uuuguagcauacaugag

SEQ ID NO: 5470 - RNA, 17 nt, Homo sapiens
uagcauacaugagucca

SEQ ID NO: 5471 - RNA, 17 nt, Homo sapiens
caugaguccauccauca

SEQ ID NO: 5472 - RNA, 17 nt, Homo sapiens
augaguccauccaucag

SEQ ID NO: 5473 - RNA, 17 nt, Homo sapiens
aguccauccaucaguca

SEQ ID NO: 5474 - RNA, 17 nt, Homo sapiens
guccauccaucagucaa

SEQ ID NO: 5475 - RNA, 17 nt, Homo sapiens
cauccaucagucaaaga

SEQ ID NO: 5476 - RNA, 17 nt, Homo sapiens
caucagucaaagaaugg

SEQ ID NO: 5477 - RNA, 17 nt, Homo sapiens
aaugguuccaucuggag

SEQ ID NO: 5478 - RNA, 17 nt, Homo sapiens
augguuccaucuggagu

SEQ ID NO: 5479 - RNA, 17 nt, Homo sapiens
guuccaucuggagucuu

SEQ ID NO: 5480 - RNA, 17 nt, Homo sapiens
cuggagucuuaauguag

SEQ ID NO: 5481 - RNA, 17 nt, Homo sapiens
auggagacuuguaauaa

SEQ ID NO: 5482 - RNA, 17 nt, Homo sapiens
uaaugagcuaguuacaa

SEQ ID NO: 5483 - RNA, 17 nt, Homo sapiens
cuaguuacaaagugcuu

SEQ ID NO: 5484 - RNA, 17 nt, Homo sapiens
caaagugcuuguucauu

SEQ ID NO: 5485 - RNA, 17 nt, Homo sapiens
gcuuguucauuaaaaua

SEQ ID NO: 5486 - RNA, 17 nt, Homo sapiens
aaaauagcacugaaaau

SEQ ID NO: 5487 - RNA, 17 nt, Homo sapiens
aauagcacugaaaauug

SEQ ID NO: 5488 - RNA, 17 nt, Homo sapiens
auugaaacaugaauuaa

SEQ ID NO: 5489 - RNA, 17 nt, Homo sapiens
gaauuaacugauaauau

SEQ ID NO: 5490 - RNA, 17 nt, Homo sapiens
uaauauuccaaucauuu

SEQ ID NO: 5491 - RNA, 17 nt, Homo sapiens
aauauuccaaucauuug

SEQ ID NO: 5492 - RNA, 17 nt, Homo sapiens
uuccaaucauuugccau

SEQ ID NO: 5493 - RNA, 17 nt, Homo sapiens
ucauuugccauuuauga

SEQ ID NO: 5494 - RNA, 17 nt, Homo sapiens
cauuugccauuuaugac

SEQ ID NO: 5495 - RNA, 17 nt, Homo sapiens
uuuaugacaaaaauggu

SEQ ID NO: 5496 - RNA, 17 nt, Homo sapiens
ugguuggcacuaacaaa

SEQ ID NO: 5497 - RNA, 17 nt, Homo sapiens
guuggcacuaacaaaga

SEQ ID NO: 5498 - RNA, 17 nt, Homo sapiens
gcacuaacaaagaacga

SEQ ID NO: 5499 - RNA, 17 nt, Homo sapiens
gaacgagcacuuccuuu

SEQ ID NO: 5500 - RNA, 17 nt, Homo sapiens
acgagcacuuccuuuca

SEQ ID NO: 5501 - RNA, 17 nt, Homo sapiens
agcacuuccuuucagag

SEQ ID NO: 5502 - RNA, 17 nt, Homo sapiens
gcacuuccuuucagagu

SEQ ID NO: 5503 - RNA, 17 nt, Homo sapiens
uuccuuucagaguuucu

SEQ ID NO: 5504 - RNA, 17 nt, Homo sapiens
agaguuucugagauaau

SEQ ID NO: 5505 - RNA, 17 nt, Homo sapiens
cguggaacagucugggu

SEQ ID NO: 5506 - RNA, 17 nt, Homo sapiens
gaacagucuggguggaa

SEQ ID NO: 5507 - RNA, 17 nt, Homo sapiens
aauggggcugaaaccau

SEQ ID NO: 5508 - RNA, 17 nt, Homo sapiens
gcugaaaccaugugcaa

SEQ ID NO: 5509 - RNA, 17 nt, Homo sapiens
cugaaaccaugugcaag

SEQ ID NO: 5510 - RNA, 17 nt, Homo sapiens
ccaugugcaagucugug

SEQ ID NO: 5511 - RNA, 17 nt, Homo sapiens
ugcaagucugugucuug

SEQ ID NO: 5512 - RNA, 17 nt, Homo sapiens
ucugugucuugucaguc

SEQ ID NO: 5513 - RNA, 17 nt, Homo sapiens
gucuugucaguccaaga

SEQ ID NO: 5514 - RNA, 17 nt, Homo sapiens
ugucaguccaagaagug

SEQ ID NO: 5515 - RNA, 17 nt, Homo sapiens
gucaguccaagaaguga

SEQ ID NO: 5516 - RNA, 17 nt, Homo sapiens
gaagugacaccgagaug

SEQ ID NO: 5517 - RNA, 17 nt, Homo sapiens
agugacaccgagauguu

SEQ ID NO: 5518 - RNA, 17 nt, Homo sapiens
uuagggacccgugccuu

SEQ ID NO: 5519 - RNA, 17 nt, Homo sapiens
uagggacccgugccuug

SEQ ID NO: 5520 - RNA, 17 nt, Homo sapiens
acccgugccuuguuucc

SEQ ID NO: 5521 - RNA, 17 nt, Homo sapiens
cccgugccuuguuuccu

SEQ ID NO: 5522 - RNA, 17 nt, Homo sapiens
cuuguuuccuagcccac

SEQ ID NO: 5523 - RNA, 17 nt, Homo sapiens
uuguuuccuagcccaca

SEQ ID NO: 5524 - RNA, 17 nt, Homo sapiens
uuccuagcccacaagaa

SEQ ID NO: 5525 - RNA, 17 nt, Homo sapiens
uccuagcccacaagaau

SEQ ID NO: 5526 - RNA, 17 nt, Homo sapiens
ccuagcccacaagaaug

SEQ ID NO: 5527 - RNA, 17 nt, Homo sapiens
uagcccacaagaaugca

SEQ ID NO: 5528 - RNA, 17 nt, Homo sapiens
aagaaugcaaacaucaa

SEQ ID NO: 5529 - RNA, 17 nt, Homo sapiens
augcaaacaucaaacag

SEQ ID NO: 5530 - RNA, 17 nt, Homo sapiens
caaacaucaaacagaua

SEQ ID NO: 5531 - RNA, 17 nt, Homo sapiens
caucaaacagauacucg

SEQ ID NO: 5532 - RNA, 17 nt, Homo sapiens
acagauacucgcuagcc

SEQ ID NO: 5533 - RNA, 17 nt, Homo sapiens
auacucgcuagccucau

SEQ ID NO: 5534 - RNA, 17 nt, Homo sapiens
ucgcuagccucauuuaa

SEQ ID NO: 5535 - RNA, 17 nt, Homo sapiens
cgcuagccucauuuaaa

SEQ ID NO: 5536 - RNA, 17 nt, Homo sapiens
cuagccucauuuaaauu

SEQ ID NO: 5537 - RNA, 17 nt, Homo sapiens
aggagugcaucuuuggc

SEQ ID NO: 5538 - RNA, 17 nt, Homo sapiens
agugcaucuuuggccga

SEQ ID NO: 5539 - RNA, 17 nt, Homo sapiens
ucuuuggccgacagugg

SEQ ID NO: 5540 - RNA, 17 nt, Homo sapiens
uggccgacaguggugua

SEQ ID NO: 5541 - RNA, 17 nt, Homo sapiens
gguguaacugugugugu

SEQ ID NO: 5542 - RNA, 17 nt, Homo sapiens
uuuugugcauaacuauu

SEQ ID NO: 5543 - RNA, 17 nt, Homo sapiens
ugcauaacuauuuaagg

SEQ ID NO: 5544 - RNA, 17 nt, Homo sapiens
aaggaaacuggaauuuu

SEQ ID NO: 5545 - RNA, 17 nt, Homo sapiens
aaaguuacuuuuauaca

SEQ ID NO: 5546 - RNA, 17 nt, Homo sapiens
uuuuauacaaaccaaga

SEQ ID NO: 5547 - RNA, 17 nt, Homo sapiens
auacaaaccaagaauau

SEQ ID NO: 5548 - RNA, 17 nt, Homo sapiens
uacaaaccaagaauaua

SEQ ID NO: 5549 - RNA, 17 nt, Homo sapiens
auauaugcuacagauau

SEQ ID NO: 5550 - RNA, 17 nt, Homo sapiens
uaugcuacagauauaag

SEQ ID NO: 5551 - RNA, 17 nt, Homo sapiens
uauaagacagacauggu

SEQ ID NO: 5552 - RNA, 17 nt, Homo sapiens
agacagacaugguuugg

SEQ ID NO: 5553 - RNA, 17 nt, Homo sapiens
guuugguccuauauuuc

SEQ ID NO: 5554 - RNA, 17 nt, Homo sapiens
uuugguccuauauuucu

SEQ ID NO: 5555 - RNA, 17 nt, Homo sapiens
uauauuucuagucauga

SEQ ID NO: 5556 - RNA, 17 nt, Homo sapiens
uucuagucaugaugaau

SEQ ID NO: 5557 - RNA, 17 nt, Homo sapiens
uuguauaccaucuucau

SEQ ID NO: 5558 - RNA, 17 nt, Homo sapiens
uguauaccaucuucaua

SEQ ID NO: 5559 - RNA, 17 nt, Homo sapiens
auaccaucuucauauaa

SEQ ID NO: 5560 - RNA, 17 nt, Homo sapiens
ccaucuucauauaauau

SEQ ID NO: 5561 - RNA, 17 nt, Homo sapiens
uaauauacuuaaaaaua

SEQ ID NO: 5562 - RNA, 17 nt, Homo sapiens
aauauuucuuaauuggg

SEQ ID NO: 5563 - RNA, 17 nt, Homo sapiens
aaucguaccaacuuaau

SEQ ID NO: 5564 - RNA, 17 nt, Homo sapiens
aucguaccaacuuaauu

SEQ ID NO: 5565 - RNA, 17 nt, Homo sapiens
guaccaacuuaauugau

SEQ ID NO: 5566 - RNA, 17 nt, Homo sapiens
ugauaaacuuggcaacu

SEQ ID NO: 5567 - RNA, 17 nt, Homo sapiens
aacuuggcaacugcuuu

SEQ ID NO: 5568 - RNA, 17 nt, Homo sapiens
uuggcaacugcuuuuau

SEQ ID NO: 5569 - RNA, 17 nt, Homo sapiens
gcaacugcuuuuauguu

SEQ ID NO: 5570 - RNA, 17 nt, Homo sapiens
uuauguucugucuccuu

SEQ ID NO: 5571 - RNA, 17 nt, Homo sapiens
guucugucuccuuccau

SEQ ID NO: 5572 - RNA, 17 nt, Homo sapiens
ucugucuccuuccauaa

SEQ ID NO: 5573 - RNA, 17 nt, Homo sapiens
cugucuccuuccauaaa

SEQ ID NO: 5574 - RNA, 17 nt, Homo sapiens
ucuccuuccauaaauuu

SEQ ID NO: 5575 - RNA, 17 nt, Homo sapiens
cuccuuccauaaauuuu

SEQ ID NO: 5576 - RNA, 17 nt, Homo sapiens
aauuuuucaaaauacua

SEQ ID NO: 5577 - RNA, 17 nt, Homo sapiens
caaaauacuaauucaac

SEQ ID NO: 5578 - RNA, 17 nt, Homo sapiens
acuaauucaacaaagaa

SEQ ID NO: 5579 - RNA, 17 nt, Homo sapiens
aauucaacaaagaaaaa

SEQ ID NO: 5580 - RNA, 17 nt, Homo sapiens
gaaaaagcucuuuuuuu

SEQ ID NO: 5581 - RNA, 17 nt, Homo sapiens
aaaagcucuuuuuuuuc

SEQ ID NO: 5582 - RNA, 17 nt, Homo sapiens
uuuuuuuccuaaaauaa

SEQ ID NO: 5583 - RNA, 17 nt, Homo sapiens
uuuuuuccuaaaauaaa

SEQ ID NO: 5584 - RNA, 17 nt, Homo sapiens
aaauaaacucaaauuua

SEQ ID NO: 5585 - RNA, 17 nt, Homo sapiens
auaaacucaaauuuauc

SEQ ID NO: 5586 - RNA, 17 nt, Homo sapiens
aauuuauccuuguuuag

SEQ ID NO: 5587 - RNA, 17 nt, Homo sapiens
auuuauccuuguuuaga

SEQ ID NO: 5588 - RNA, 17 nt, Homo sapiens
uuuagagcagagaaaaa

SEQ ID NO: 5589 - RNA, 17 nt, Homo sapiens
agaaaaacuuugaaaug

SEQ ID NO: 5590 - RNA, 17 nt, Homo sapiens
aaauggucucaaaaaau

SEQ ID NO: 5591 - RNA, 17 nt, Homo sapiens
auggucucaaaaaauug

SEQ ID NO: 5592 - RNA, 17 nt, Homo sapiens
aaaauugcuaaauauuu

SEQ ID NO: 5593 - RNA, 17 nt, Homo sapiens
auauuuucaauggaaaa

SEQ ID NO: 5594 - RNA, 17 nt, Homo sapiens
uggaaaacuaaauguua

SEQ ID NO: 5595 - RNA, 17 nt, Homo sapiens
aguuuagcugauuguau

SEQ ID NO: 5596 - RNA, 17 nt, Homo sapiens
uuucgaaccuuucacuu

SEQ ID NO: 5597 - RNA, 17 nt, Homo sapiens
uucgaaccuuucacuuu

SEQ ID NO: 5598 - RNA, 17 nt, Homo sapiens
aaccuuucacuuuuugu

SEQ ID NO: 5599 - RNA, 17 nt, Homo sapiens
ccuuucacuuuuuguuu

SEQ ID NO: 5600 - RNA, 17 nt, Homo sapiens
uguuuuaccuauuucac

SEQ ID NO: 5601 - RNA, 17 nt, Homo sapiens
guuuuaccuauuucaca

SEQ ID NO: 5602 - RNA, 17 nt, Homo sapiens
ccuauuucacaacugug

SEQ ID NO: 5603 - RNA, 17 nt, Homo sapiens
uauuucacaacugugua

SEQ ID NO: 5604 - RNA, 17 nt, Homo sapiens
uucacaacuguguaaau

SEQ ID NO: 5605 - RNA, 17 nt, Homo sapiens
uaaauugccaauaauuc

SEQ ID NO: 5606 - RNA, 17 nt, Homo sapiens
aaauugccaauaauucc

SEQ ID NO: 5607 - RNA, 17 nt, Homo sapiens
aauaauuccuguccaug

SEQ ID NO: 5608 - RNA, 17 nt, Homo sapiens
auaauuccuguccauga

SEQ ID NO: 5609 - RNA, 17 nt, Homo sapiens
uuccuguccaugaaaau

SEQ ID NO: 5610 - RNA, 17 nt, Homo sapiens
uccuguccaugaaaaug

SEQ ID NO: 5611 - RNA, 17 nt, Homo sapiens
gaaaaugcaaauuaucc

SEQ ID NO: 5612 - RNA, 17 nt, Homo sapiens
aaauuauccaguguaga

SEQ ID NO: 5613 - RNA, 17 nt, Homo sapiens
aauuauccaguguagau

SEQ ID NO: 5614 - RNA, 17 nt, Homo sapiens
uauuugaccaucacccu

SEQ ID NO: 5615 - RNA, 17 nt, Homo sapiens
auuugaccaucacccua

SEQ ID NO: 5616 - RNA, 17 nt, Homo sapiens
ugaccaucacccuaugg

SEQ ID NO: 5617 - RNA, 17 nt, Homo sapiens
accaucacccuauggau

SEQ ID NO: 5618 - RNA, 17 nt, Homo sapiens
ccaucacccuauggaua

SEQ ID NO: 5619 - RNA, 17 nt, Homo sapiens
caucacccuauggauau

SEQ ID NO: 5620 - RNA, 17 nt, Homo sapiens
auauuggcuaguuuugc

SEQ ID NO: 5621 - RNA, 17 nt, Homo sapiens
aguuuugccuuuauuaa

SEQ ID NO: 5622 - RNA, 17 nt, Homo sapiens
guuuugccuuuauuaag

SEQ ID NO: 5623 - RNA, 17 nt, Homo sapiens
uauuaagcaaauucauu

SEQ ID NO: 5624 - RNA, 17 nt, Homo sapiens
gcaaauucauuucagcc

SEQ ID NO: 5625 - RNA, 17 nt, Homo sapiens
uucauuucagccugaau

SEQ ID NO: 5626 - RNA, 17 nt, Homo sapiens
auuucagccugaauguc

SEQ ID NO: 5627 - RNA, 17 nt, Homo sapiens
uuucagccugaaugucu

SEQ ID NO: 5628 - RNA, 17 nt, Homo sapiens
ugaaugucugccuauau

SEQ ID NO: 5629 - RNA, 17 nt, Homo sapiens
augucugccuauauauu

SEQ ID NO: 5630 - RNA, 17 nt, Homo sapiens
ugucugccuauauauuc

SEQ ID NO: 5631 - RNA, 17 nt, Homo sapiens
auauauucucugcucuu

SEQ ID NO: 5632 - RNA, 17 nt, Homo sapiens
auauucucugcucuuug

SEQ ID NO: 5633 - RNA, 17 nt, Homo sapiens
uucucugcucuuuguau

SEQ ID NO: 5634 - RNA, 17 nt, Homo sapiens
cucugcucuuuguauuc

SEQ ID NO: 5635 - RNA, 17 nt, Homo sapiens
uuguauucuccuuugaa

SEQ ID NO: 5636 - RNA, 17 nt, Homo sapiens
guauucuccuuugaacc

SEQ ID NO: 5637 - RNA, 17 nt, Homo sapiens
uauucuccuuugaaccc

SEQ ID NO: 5638 - RNA, 17 nt, Homo sapiens
cuuugaacccguuaaaa

SEQ ID NO: 5639 - RNA, 17 nt, Homo sapiens
uuugaacccguuaaaac

SEQ ID NO: 5640 - RNA, 17 nt, Homo sapiens
guuaaaacauccugugg

SEQ ID NO: 5641 - RNA, 17 nt, Homo sapiens
aaaacauccuguggcac

SEQ ID NO: 5642 - RNA, 17 nt, Homo sapiens
aaacauccuguggcacu

SEQ ID NO: 5643 - RNA, 16 nt, Homo sapiens
gggcucgggugcagcg

SEQ ID NO: 5644 - RNA, 16 nt, Homo sapiens
gccuggcggcgaggau

SEQ ID NO: 5645 - RNA, 16 nt, Homo sapiens
ggaagugguugucucc

SEQ ID NO: 5646 - RNA, 16 nt, Homo sapiens
ggcuggagccgcgaga

SEQ ID NO: 5647 - RNA, 16 nt, Homo sapiens
cuggagccgcgagacg

SEQ ID NO: 5648 - RNA, 16 nt, Homo sapiens
cgagacgggcgcucag

SEQ ID NO: 5649 - RNA, 16 nt, Homo sapiens
cgcucagggcgcgggg

SEQ ID NO: 5650 - RNA, 16 nt, Homo sapiens
cggcggcggcgaacga

SEQ ID NO: 5651 - RNA, 16 nt, Homo sapiens
ggcggcgaacgagagg

SEQ ID NO: 5652 - RNA, 16 nt, Homo sapiens
ccgggggagcgcgggc

SEQ ID NO: 5653 - RNA, 16 nt, Homo sapiens
ggcaccgggcgagcag

SEQ ID NO: 5654 - RNA, 16 nt, Homo sapiens
cgagcaggccgcgucg

SEQ ID NO: 5655 - RNA, 16 nt, Homo sapiens
aggccgcgucgcgcuc

SEQ ID NO: 5656 - RNA, 16 nt, Homo sapiens
gccgcgucgcgcucac

SEQ ID NO: 5657 - RNA, 16 nt, Homo sapiens
ccgggguccugcugug

SEQ ID NO: 5658 - RNA, 16 nt, Homo sapiens
ggguccugcugugcgc

SEQ ID NO: 5659 - RNA, 16 nt, Homo sapiens
guccugcugugcgcgc

SEQ ID NO: 5660 - RNA, 16 nt, Homo sapiens
ccugcugugcgcgcug

SEQ ID NO: 5661 - RNA, 16 nt, Homo sapiens
ugcugugcgcgcugcu

SEQ ID NO: 5662 - RNA, 16 nt, Homo sapiens
ugugcgcgcugcucag

SEQ ID NO: 5663 - RNA, 16 nt, Homo sapiens
cugcucagcugucugc

SEQ ID NO: 5664 - RNA, 16 nt, Homo sapiens
ucagcugucugcuucu

SEQ ID NO: 5665 - RNA, 16 nt, Homo sapiens
aaaagauccugaacug

SEQ ID NO: 5666 - RNA, 16 nt, Homo sapiens
auccugaacugaguuu

SEQ ID NO: 5667 - RNA, 16 nt, Homo sapiens
agcacaucaugcaagc

SEQ ID NO: 5668 - RNA, 16 nt, Homo sapiens
gccagacacugcaucu

SEQ ID NO: 5669 - RNA, 16 nt, Homo sapiens
caucuccaaugcaggg

SEQ ID NO: 5670 - RNA, 16 nt, Homo sapiens
aauggucuuugccuga

SEQ ID NO: 5671 - RNA, 16 nt, Homo sapiens
gucuuugccugaaaug

SEQ ID NO: 5672 - RNA, 16 nt, Homo sapiens
cugaaauggugaguaa

SEQ ID NO: 5673 - RNA, 16 nt, Homo sapiens
uaaggaaagcgaaagg

SEQ ID NO: 5674 - RNA, 16 nt, Homo sapiens
gcgaaaggcugagcau

SEQ ID NO: 5675 - RNA, 16 nt, Homo sapiens
aacuaaaucugccugu

SEQ ID NO: 5676 - RNA, 16 nt, Homo sapiens
aaaucugccuguggaa

SEQ ID NO: 5677 - RNA, 16 nt, Homo sapiens
aaacaauucugcagua

SEQ ID NO: 5678 - RNA, 16 nt, Homo sapiens
cuuuaaccuugaacac

SEQ ID NO: 5679 - RNA, 16 nt, Homo sapiens
uucuacagcugcaaau

SEQ ID NO: 5680 - RNA, 16 nt, Homo sapiens
auaucuagcuguaccu

SEQ ID NO: 5681 - RNA, 16 nt, Homo sapiens
aacagaaucugcaauc

SEQ ID NO: 5682 - RNA, 16 nt, Homo sapiens
auuuauuagugauaca

SEQ ID NO: 5683 - RNA, 16 nt, Homo sapiens
ucguagagauguacag

SEQ ID NO: 5684 - RNA, 16 nt, Homo sapiens
gauguacagugaaauc

SEQ ID NO: 5685 - RNA, 16 nt, Homo sapiens
ugaaauccccgaaauu

SEQ ID NO: 5686 - RNA, 16 nt, Homo sapiens
uuauacacaugacuga

SEQ ID NO: 5687 - RNA, 16 nt, Homo sapiens
acacaugacugaagga

SEQ ID NO: 5688 - RNA, 16 nt, Homo sapiens
gucauucccugccggg

SEQ ID NO: 5689 - RNA, 16 nt, Homo sapiens
uaacaucacuguuacu

SEQ ID NO: 5690 - RNA, 16 nt, Homo sapiens
guuuccacuugacacu

SEQ ID NO: 5691 - RNA, 16 nt, Homo sapiens
uugacacuuugauccc

SEQ ID NO: 5692 - RNA, 16 nt, Homo sapiens
uuugaucccugaugga

SEQ ID NO: 5693 - RNA, 16 nt, Homo sapiens
gauggaaaacgcauaa

SEQ ID NO: 5694 - RNA, 16 nt, Homo sapiens
cauaucaaaugcaacg

SEQ ID NO: 5695 - RNA, 16 nt, Homo sapiens
uagggcuucugaccug

SEQ ID NO: 5696 - RNA, 16 nt, Homo sapiens
cuucugaccugugaag

SEQ ID NO: 5697 - RNA, 16 nt, Homo sapiens
ucugaccugugaagca

SEQ ID NO: 5698 - RNA, 16 nt, Homo sapiens
augggcauuuguauaa

SEQ ID NO: 5699 - RNA, 16 nt, Homo sapiens
cucacacaucgacaaa

SEQ ID NO: 5700 - RNA, 16 nt, Homo sapiens
aaucauagauguccaa

SEQ ID NO: 5701 - RNA, 16 nt, Homo sapiens
agcacaccacgcccag

SEQ ID NO: 5702 - RNA, 16 nt, Homo sapiens
ccauacucuuguccuc

SEQ ID NO: 5703 - RNA, 16 nt, Homo sapiens
guccucaauuguacug

SEQ ID NO: 5704 - RNA, 16 nt, Homo sapiens
caauuguacugcuacc

SEQ ID NO: 5705 - RNA, 16 nt, Homo sapiens
ccacucccuugaacac

SEQ ID NO: 5706 - RNA, 16 nt, Homo sapiens
ccuugaacacgagagu

SEQ ID NO: 5707 - RNA, 16 nt, Homo sapiens
gaguucaaaugaccug

SEQ ID NO: 5708 - RNA, 16 nt, Homo sapiens
gaguuacccugaugaa

SEQ ID NO: 5709 - RNA, 16 nt, Homo sapiens
uuacccugaugaaaaa

SEQ ID NO: 5710 - RNA, 16 nt, Homo sapiens
uccguaaggcgacgaa

SEQ ID NO: 5711 - RNA, 16 nt, Homo sapiens
guaaggcgacgaauug

SEQ ID NO: 5712 - RNA, 16 nt, Homo sapiens
gcgacgaauugaccaa

SEQ ID NO: 5713 - RNA, 16 nt, Homo sapiens
caauucccaugccaac

SEQ ID NO: 5714 - RNA, 16 nt, Homo sapiens
auucuacaguguucuu

SEQ ID NO: 5715 - RNA, 16 nt, Homo sapiens
ucuuacuauugacaaa

SEQ ID NO: 5716 - RNA, 16 nt, Homo sapiens
uugacaaaaugcagaa

SEQ ID NO: 5717 - RNA, 16 nt, Homo sapiens
cuuuauacuugucgug

SEQ ID NO: 5718 - RNA, 16 nt, Homo sapiens
uacuugucguguaagg

SEQ ID NO: 5719 - RNA, 16 nt, Homo sapiens
auucaaaucuguuaac

SEQ ID NO: 5720 - RNA, 16 nt, Homo sapiens
acaccucagugcauau

SEQ ID NO: 5721 - RNA, 16 nt, Homo sapiens
gcauauauaugauaaa

SEQ ID NO: 5722 - RNA, 16 nt, Homo sapiens
auucaucacugugaaa

SEQ ID NO: 5723 - RNA, 16 nt, Homo sapiens
ucaucacugugaaaca

SEQ ID NO: 5724 - RNA, 16 nt, Homo sapiens
gugaaacaucgaaaac

SEQ ID NO: 5725 - RNA, 16 nt, Homo sapiens
aacagcaggugcuuga

SEQ ID NO: 5726 - RNA, 16 nt, Homo sapiens
gcaggugcuugaaacc

SEQ ID NO: 5727 - RNA, 16 nt, Homo sapiens
ggcucucuaugaaagu

SEQ ID NO: 5728 - RNA, 16 nt, Homo sapiens
cuaugaaagugaaggc

SEQ ID NO: 5729 - RNA, 16 nt, Homo sapiens
cauuucccucgccgga

SEQ ID NO: 5730 - RNA, 16 nt, Homo sapiens
gccggaaguuguaugg

SEQ ID NO: 5731 - RNA, 16 nt, Homo sapiens
uggguuaccugcgacu

SEQ ID NO: 5732 - RNA, 16 nt, Homo sapiens
gguuaccugcgacuga

SEQ ID NO: 5733 - RNA, 16 nt, Homo sapiens
accugcgacugagaaa

SEQ ID NO: 5734 - RNA, 16 nt, Homo sapiens
ugagaaaucugcucgc

SEQ ID NO: 5735 - RNA, 16 nt, Homo sapiens
aaaucugcucgcuauu

SEQ ID NO: 5736 - RNA, 16 nt, Homo sapiens
cucgcuauuugacucg

SEQ ID NO: 5737 - RNA, 16 nt, Homo sapiens
ggacguaacugaagag

SEQ ID NO: 5738 - RNA, 16 nt, Homo sapiens
ugaagaggaugcaggg

SEQ ID NO: 5739 - RNA, 16 nt, Homo sapiens
auacaaucuugcugag

SEQ ID NO: 5740 - RNA, 16 nt, Homo sapiens
caaucuugcugagcau

SEQ ID NO: 5741 - RNA, 16 nt, Homo sapiens
acagucaaauguguuu

SEQ ID NO: 5742 - RNA, 16 nt, Homo sapiens
agucaaauguguuuaa

SEQ ID NO: 5743 - RNA, 16 nt, Homo sapiens
aaaccucacugccacu

SEQ ID NO: 5744 - RNA, 16 nt, Homo sapiens
cacucuaauugucaau

SEQ ID NO: 5745 - RNA, 16 nt, Homo sapiens
aauugucaaugugaaa

SEQ ID NO: 5746 - RNA, 16 nt, Homo sapiens
uugucaaugugaaacc

SEQ ID NO: 5747 - RNA, 16 nt, Homo sapiens
ccagauuuacgaaaag

SEQ ID NO: 5748 - RNA, 16 nt, Homo sapiens
aaaaggccgugucauc

SEQ ID NO: 5749 - RNA, 16 nt, Homo sapiens
gacaaauccugacuug

SEQ ID NO: 5750 - RNA, 16 nt, Homo sapiens
auccugacuuguaccg

SEQ ID NO: 5751 - RNA, 16 nt, Homo sapiens
gacuuguaccgcauau

SEQ ID NO: 5752 - RNA, 16 nt, Homo sapiens
uggcaccccuguaacc

SEQ ID NO: 5753 - RNA, 16 nt, Homo sapiens
uaaucauuccgaagca

SEQ ID NO: 5754 - RNA, 16 nt, Homo sapiens
gaagcaaggugugacu

SEQ ID NO: 5755 - RNA, 16 nt, Homo sapiens
agcaaggugugacuuu

SEQ ID NO: 5756 - RNA, 16 nt, Homo sapiens
ugugacuuuuguucca

SEQ ID NO: 5757 - RNA, 16 nt, Homo sapiens
uuccaauaaugaagag

SEQ ID NO: 5758 - RNA, 16 nt, Homo sapiens
uauccuggaugcugac

SEQ ID NO: 5759 - RNA, 16 nt, Homo sapiens
ccuggaugcugacagc

SEQ ID NO: 5760 - RNA, 16 nt, Homo sapiens
aaacagaauugagagc

SEQ ID NO: 5761 - RNA, 16 nt, Homo sapiens
aucacucagcgcaugg

SEQ ID NO: 5762 - RNA, 16 nt, Homo sapiens
caccuugguuguggcu

SEQ ID NO: 5763 - RNA, 16 nt, Homo sapiens
gguuguggcugacucu

SEQ ID NO: 5764 - RNA, 16 nt, Homo sapiens
aucuacauuugcauag

SEQ ID NO: 5765 - RNA, 16 nt, Homo sapiens
aguugggacuguggga

SEQ ID NO: 5766 - RNA, 16 nt, Homo sapiens
uaucacagaugugcca

SEQ ID NO: 5767 - RNA, 16 nt, Homo sapiens
ucacagaugugccaaa

SEQ ID NO: 5768 - RNA, 16 nt, Homo sapiens
uggguuucauguuaac

SEQ ID NO: 5769 - RNA, 16 nt, Homo sapiens
uggaaaaaaugccgac

SEQ ID NO: 5770 - RNA, 16 nt, Homo sapiens
aaaaaaugccgacgga

SEQ ID NO: 5771 - RNA, 16 nt, Homo sapiens
gagaggaccugaaacu

SEQ ID NO: 5772 - RNA, 16 nt, Homo sapiens
accugaaacugucuug

SEQ ID NO: 5773 - RNA, 16 nt, Homo sapiens
aaacugucuugcacag

SEQ ID NO: 5774 - RNA, 16 nt, Homo sapiens
ggauuuuacugcggac

SEQ ID NO: 5775 - RNA, 16 nt, Homo sapiens
acagaacaaugcacua

SEQ ID NO: 5776 - RNA, 16 nt, Homo sapiens
uuaccaucaugaaugu

SEQ ID NO: 5777 - RNA, 16 nt, Homo sapiens
caucaugaauguuucc

SEQ ID NO: 5778 - RNA, 16 nt, Homo sapiens
auguuucccugcaaga

SEQ ID NO: 5779 - RNA, 16 nt, Homo sapiens
aggcaccuaugccugc

SEQ ID NO: 5780 - RNA, 16 nt, Homo sapiens
accuaugccugcagag

SEQ ID NO: 5781 - RNA, 16 nt, Homo sapiens
agccaggaauguauac

SEQ ID NO: 5782 - RNA, 16 nt, Homo sapiens
cauaccuccugcgaaa

SEQ ID NO: 5783 - RNA, 16 nt, Homo sapiens
uaccuccugcgaaacc

SEQ ID NO: 5784 - RNA, 16 nt, Homo sapiens
aaaccucagugaucac

SEQ ID NO: 5785 - RNA, 16 nt, Homo sapiens
acuuuagacugucaug

SEQ ID NO: 5786 - RNA, 16 nt, Homo sapiens
agacugucaugcuaau

SEQ ID NO: 5787 - RNA, 16 nt, Homo sapiens
ugcuaauggugucccc

SEQ ID NO: 5788 - RNA, 16 nt, Homo sapiens
ugguguccccgagccu

SEQ ID NO: 5789 - RNA, 16 nt, Homo sapiens
gaagcagcacgcuguu

SEQ ID NO: 5790 - RNA, 16 nt, Homo sapiens
gcagcacgcuguuuau

SEQ ID NO: 5791 - RNA, 16 nt, Homo sapiens
gcuguuuauugaaaga

SEQ ID NO: 5792 - RNA, 16 nt, Homo sapiens
agaagaggaugaaggu

SEQ ID NO: 5793 - RNA, 16 nt, Homo sapiens
ggaugaaggugucuau

SEQ ID NO: 5794 - RNA, 16 nt, Homo sapiens
gucuaucacugcaaag

SEQ ID NO: 5795 - RNA, 16 nt, Homo sapiens
gaagggcucuguggaa

SEQ ID NO: 5796 - RNA, 16 nt, Homo sapiens
auaccucacuguucaa

SEQ ID NO: 5797 - RNA, 16 nt, Homo sapiens
aucuggagcugaucac

SEQ ID NO: 5798 - RNA, 16 nt, Homo sapiens
acucuaacaugcaccu

SEQ ID NO: 5799 - RNA, 16 nt, Homo sapiens
acaugcaccugugugg

SEQ ID NO: 5800 - RNA, 16 nt, Homo sapiens
augcaccuguguggcu

SEQ ID NO: 5801 - RNA, 16 nt, Homo sapiens
cuguguggcugcgacu

SEQ ID NO: 5802 - RNA, 16 nt, Homo sapiens
guguggcugcgacucu

SEQ ID NO: 5803 - RNA, 16 nt, Homo sapiens
cuccuuauccgaaaaa

SEQ ID NO: 5804 - RNA, 16 nt, Homo sapiens
uccgaaaaaugaaaag

SEQ ID NO: 5805 - RNA, 16 nt, Homo sapiens
gucuucuucugaaaua

SEQ ID NO: 5806 - RNA, 16 nt, Homo sapiens
aauaaagacugacuac

SEQ ID NO: 5807 - RNA, 16 nt, Homo sapiens
ggacccagaugaaguu

SEQ ID NO: 5808 - RNA, 16 nt, Homo sapiens
uccuuuggaugagcag

SEQ ID NO: 5809 - RNA, 16 nt, Homo sapiens
gaugagcagugugagc

SEQ ID NO: 5810 - RNA, 16 nt, Homo sapiens
ugagcagugugagcgg

SEQ ID NO: 5811 - RNA, 16 nt, Homo sapiens
gcucccuuaugaugcc

SEQ ID NO: 5812 - RNA, 16 nt, Homo sapiens
cccuuaugaugccagc

SEQ ID NO: 5813 - RNA, 16 nt, Homo sapiens
gugggaguuugcccgg

SEQ ID NO: 5814 - RNA, 16 nt, Homo sapiens
ucaccuacgugccgga

SEQ ID NO: 5815 - RNA, 16 nt, Homo sapiens
gugccggacuguggcu

SEQ ID NO: 5816 - RNA, 16 nt, Homo sapiens
gacuguggcugugaaa

SEQ ID NO: 5817 - RNA, 16 nt, Homo sapiens
cuguggcugugaaaau

SEQ ID NO: 5818 - RNA, 16 nt, Homo sapiens
cugugaaaaugcugaa

SEQ ID NO: 5819 - RNA, 16 nt, Homo sapiens
ugaaaaugcugaaaga

SEQ ID NO: 5820 - RNA, 16 nt, Homo sapiens
cacggccagcgaguac

SEQ ID NO: 5821 - RNA, 16 nt, Homo sapiens
acaaagcucugaugac

SEQ ID NO: 5822 - RNA, 16 nt, Homo sapiens
aagcucugaugacuga

SEQ ID NO: 5823 - RNA, 16 nt, Homo sapiens
ucugaugacugagcua

SEQ ID NO: 5824 - RNA, 16 nt, Homo sapiens
uaaaaaucuugaccca

SEQ ID NO: 5825 - RNA, 16 nt, Homo sapiens
gccaccaucugaacgu

SEQ ID NO: 5826 - RNA, 16 nt, Homo sapiens
ugguuaaccugcuggg

SEQ ID NO: 5827 - RNA, 16 nt, Homo sapiens
cugggagccugcacca

SEQ ID NO: 5828 - RNA, 16 nt, Homo sapiens
gagggccucugauggu

SEQ ID NO: 5829 - RNA, 16 nt, Homo sapiens
cucugauggugauugu

SEQ ID NO: 5830 - RNA, 16 nt, Homo sapiens
gauggugauuguugaa

SEQ ID NO: 5831 - RNA, 16 nt, Homo sapiens
ggugauuguugaauac

SEQ ID NO: 5832 - RNA, 16 nt, Homo sapiens
guugaauacugcaaau

SEQ ID NO: 5833 - RNA, 16 nt, Homo sapiens
gagcaaacgugacuua

SEQ ID NO: 5834 - RNA, 16 nt, Homo sapiens
caacaaggaugcagca

SEQ ID NO: 5835 - RNA, 16 nt, Homo sapiens
caccagcagcgaaagc

SEQ ID NO: 5836 - RNA, 16 nt, Homo sapiens
cgaaagcuuugcgagc

SEQ ID NO: 5837 - RNA, 16 nt, Homo sapiens
aaagcuuugcgagcuc

SEQ ID NO: 5838 - RNA, 16 nt, Homo sapiens
auaaaagucugaguga

SEQ ID NO: 5839 - RNA, 16 nt, Homo sapiens
aagucugagugauguu

SEQ ID NO: 5840 - RNA, 16 nt, Homo sapiens
ucugagugauguugag

SEQ ID NO: 5841 - RNA, 16 nt, Homo sapiens
gagugauguugaggaa

SEQ ID NO: 5842 - RNA, 16 nt, Homo sapiens
ggaggauucugacggu

SEQ ID NO: 5843 - RNA, 16 nt, Homo sapiens
uggaagaucugauuuc

SEQ ID NO: 5844 - RNA, 16 nt, Homo sapiens
uggaguuccugucuuc

SEQ ID NO: 5845 - RNA, 16 nt, Homo sapiens
uccagaaagugcauuc

SEQ ID NO: 5846 - RNA, 16 nt, Homo sapiens
accuggcagcgagaaa

SEQ ID NO: 5847 - RNA, 16 nt, Homo sapiens
ucuuuuaucugagaac

SEQ ID NO: 5848 - RNA, 16 nt, Homo sapiens
acaacguggugaagau

SEQ ID NO: 5849 - RNA, 16 nt, Homo sapiens
gugaagauuugugauu

SEQ ID NO: 5850 - RNA, 16 nt, Homo sapiens
gaagauuugugauuuu

SEQ ID NO: 5851 - RNA, 16 nt, Homo sapiens
uuuuggccuugcccgg

SEQ ID NO: 5852 - RNA, 16 nt, Homo sapiens
uaagaaccccgauuau

SEQ ID NO: 5853 - RNA, 16 nt, Homo sapiens
ccccgauuaugugaga

SEQ ID NO: 5854 - RNA, 16 nt, Homo sapiens
ccgauuaugugagaaa

SEQ ID NO: 5855 - RNA, 16 nt, Homo sapiens
ggagauacucgacuuc

SEQ ID NO: 5856 - RNA, 16 nt, Homo sapiens
gacuuccucugaaaug

SEQ ID NO: 5857 - RNA, 16 nt, Homo sapiens
gauggcucccgaaucu

SEQ ID NO: 5858 - RNA, 16 nt, Homo sapiens
aucuaucuuugacaaa

SEQ ID NO: 5859 - RNA, 16 nt, Homo sapiens
caccaagagcgacgug

SEQ ID NO: 5860 - RNA, 16 nt, Homo sapiens
agagcgacgugugguc

SEQ ID NO: 5861 - RNA, 16 nt, Homo sapiens
acggaguauugcugug

SEQ ID NO: 5862 - RNA, 16 nt, Homo sapiens
gaguauugcuguggga

SEQ ID NO: 5863 - RNA, 16 nt, Homo sapiens
acaaauggaugaggac

SEQ ID NO: 5864 - RNA, 16 nt, Homo sapiens
gaggacuuuugcaguc

SEQ ID NO: 5865 - RNA, 16 nt, Homo sapiens
uuuugcagucgccuga

SEQ ID NO: 5866 - RNA, 16 nt, Homo sapiens
gcagucgccugaggga

SEQ ID NO: 5867 - RNA, 16 nt, Homo sapiens
gggaaggcaugaggau

SEQ ID NO: 5868 - RNA, 16 nt, Homo sapiens
gcaugaggaugagagc

SEQ ID NO: 5869 - RNA, 16 nt, Homo sapiens
gagagcuccugaguac

SEQ ID NO: 5870 - RNA, 16 nt, Homo sapiens
cucuacuccugaaauc

SEQ ID NO: 5871 - RNA, 16 nt, Homo sapiens
aucagaucaugcugga

SEQ ID NO: 5872 - RNA, 16 nt, Homo sapiens
augcuggacugcuggc

SEQ ID NO: 5873 - RNA, 16 nt, Homo sapiens
gccaagauuugcagaa

SEQ ID NO: 5874 - RNA, 16 nt, Homo sapiens
ugcagaacuuguggaa

SEQ ID NO: 5875 - RNA, 16 nt, Homo sapiens
aaaacuaggugauuug

SEQ ID NO: 5876 - RNA, 16 nt, Homo sapiens
uaggugauuugcuuca

SEQ ID NO: 5877 - RNA, 16 nt, Homo sapiens
ucaagcaaauguacaa

SEQ ID NO: 5878 - RNA, 16 nt, Homo sapiens
cccaaucaaugccaua

SEQ ID NO: 5879 - RNA, 16 nt, Homo sapiens
augccauacugacagg

SEQ ID NO: 5880 - RNA, 16 nt, Homo sapiens
cucaacuccugccuuc

SEQ ID NO: 5881 - RNA, 16 nt, Homo sapiens
ugccuucucugaggac

SEQ ID NO: 5882 - RNA, 16 nt, Homo sapiens
uuucagcuccgaaguu

SEQ ID NO: 5883 - RNA, 16 nt, Homo sapiens
aggaagcucugaugau

SEQ ID NO: 5884 - RNA, 16 nt, Homo sapiens
aagcucugaugauguc

SEQ ID NO: 5885 - RNA, 16 nt, Homo sapiens
cucugaugaugucaga

SEQ ID NO: 5886 - RNA, 16 nt, Homo sapiens
ugucagauauguaaau

SEQ ID NO: 5887 - RNA, 16 nt, Homo sapiens
auauguaaaugcuuuc

SEQ ID NO: 5888 - RNA, 16 nt, Homo sapiens
ucaaguucaugagccu

SEQ ID NO: 5889 - RNA, 16 nt, Homo sapiens
caaaaccuuugaagaa

SEQ ID NO: 5890 - RNA, 16 nt, Homo sapiens
aacuuuuaccgaaugc

SEQ ID NO: 5891 - RNA, 16 nt, Homo sapiens
uuuaccgaaugccacc

SEQ ID NO: 5892 - RNA, 16 nt, Homo sapiens
ccaccuccauguuuga

SEQ ID NO: 5893 - RNA, 16 nt, Homo sapiens
cuccauguuugaugac

SEQ ID NO: 5894 - RNA, 16 nt, Homo sapiens
cauguuugaugacuac

SEQ ID NO: 5895 - RNA, 16 nt, Homo sapiens
cuaccagggcgacagc

SEQ ID NO: 5896 - RNA, 16 nt, Homo sapiens
gcagcacucuguuggc

SEQ ID NO: 5897 - RNA, 16 nt, Homo sapiens
ccucucccaugcugaa

SEQ ID NO: 5898 - RNA, 16 nt, Homo sapiens
cucccaugcugaagcg

SEQ ID NO: 5899 - RNA, 16 nt, Homo sapiens
augcugaagcgcuuca

SEQ ID NO: 5900 - RNA, 16 nt, Homo sapiens
caccuggacugacagc

SEQ ID NO: 5901 - RNA, 16 nt, Homo sapiens
ccaaggccucgcucaa

SEQ ID NO: 5902 - RNA, 16 nt, Homo sapiens
gcucaagauugacuug

SEQ ID NO: 5903 - RNA, 16 nt, Homo sapiens
agauugacuugagagu

SEQ ID NO: 5904 - RNA, 16 nt, Homo sapiens
agucggggcugucuga

SEQ ID NO: 5905 - RNA, 16 nt, Homo sapiens
ggggcugucugauguc

SEQ ID NO: 5906 - RNA, 16 nt, Homo sapiens
gcugucugaugucagc

SEQ ID NO: 5907 - RNA, 16 nt, Homo sapiens
cccaguuucugccauu

SEQ ID NO: 5908 - RNA, 16 nt, Homo sapiens
cauuccagcugugggc

SEQ ID NO: 5909 - RNA, 16 nt, Homo sapiens
gcacgucagcgaaggc

SEQ ID NO: 5910 - RNA, 16 nt, Homo sapiens
gaaggcaagcgcaggu

SEQ ID NO: 5911 - RNA, 16 nt, Homo sapiens
guucaccuacgaccac

SEQ ID NO: 5912 - RNA, 16 nt, Homo sapiens
cuacgaccacgcugag

SEQ ID NO: 5913 - RNA, 16 nt, Homo sapiens
cgaccacgcugagcug

SEQ ID NO: 5914 - RNA, 16 nt, Homo sapiens
aaggaaaaucgcgugc

SEQ ID NO: 5915 - RNA, 16 nt, Homo sapiens
aaaaucgcgugcugcu

SEQ ID NO: 5916 - RNA, 16 nt, Homo sapiens
aucgcgugcugcuccc

SEQ ID NO: 5917 - RNA, 16 nt, Homo sapiens
gcugcuccccgccccc

SEQ ID NO: 5918 - RNA, 16 nt, Homo sapiens
cggugguccuguacuc

SEQ ID NO: 5919 - RNA, 16 nt, Homo sapiens
ucuagaguuugacacg

SEQ ID NO: 5920 - RNA, 16 nt, Homo sapiens
aguuugacacgaagcc

SEQ ID NO: 5921 - RNA, 16 nt, Homo sapiens
agaagcacauguguau

SEQ ID NO: 5922 - RNA, 16 nt, Homo sapiens
aagcacauguguauuu

SEQ ID NO: 5923 - RNA, 16 nt, Homo sapiens
acuagcuuuugccagu

SEQ ID NO: 5924 - RNA, 16 nt, Homo sapiens
ccaguauuaugcauau

SEQ ID NO: 5925 - RNA, 16 nt, Homo sapiens
ggagccagcugcuuuu

SEQ ID NO: 5926 - RNA, 16 nt, Homo sapiens
gcugcuuuuugugauu

SEQ ID NO: 5927 - RNA, 16 nt, Homo sapiens
ugcuuuuugugauuuu

SEQ ID NO: 5928 - RNA, 16 nt, Homo sapiens
uuuuaauagugcuuuu

SEQ ID NO: 5929 - RNA, 16 nt, Homo sapiens
uuuuuuuuuugacuaa

SEQ ID NO: 5930 - RNA, 16 nt, Homo sapiens
uaacaagaauguaacu

SEQ ID NO: 5931 - RNA, 16 nt, Homo sapiens
gagaaauagugacaag

SEQ ID NO: 5932 - RNA, 16 nt, Homo sapiens
agugacaagugaagaa

SEQ ID NO: 5933 - RNA, 16 nt, Homo sapiens
gaacacuacugcuaaa

SEQ ID NO: 5934 - RNA, 16 nt, Homo sapiens
aaauccucauguuacu

SEQ ID NO: 5935 - RNA, 16 nt, Homo sapiens
guuacucaguguuaga

SEQ ID NO: 5936 - RNA, 16 nt, Homo sapiens
uaaacccaaugacuuc

SEQ ID NO: 5937 - RNA, 16 nt, Homo sapiens
ugacuucccugcucca

SEQ ID NO: 5938 - RNA, 16 nt, Homo sapiens
uccaacccccgccacc

SEQ ID NO: 5939 - RNA, 16 nt, Homo sapiens
cucagggcacgcagga

SEQ ID NO: 5940 - RNA, 16 nt, Homo sapiens
ggaccaguuugauuga

SEQ ID NO: 5941 - RNA, 16 nt, Homo sapiens
caguuugauugaggag

SEQ ID NO: 5942 - RNA, 16 nt, Homo sapiens
uugaggagcugcacug

SEQ ID NO: 5943 - RNA, 16 nt, Homo sapiens
gagcugcacugaucac

SEQ ID NO: 5944 - RNA, 16 nt, Homo sapiens
aucacccaaugcauca

SEQ ID NO: 5945 - RNA, 16 nt, Homo sapiens
ggccagcccugcagcc

SEQ ID NO: 5946 - RNA, 16 nt, Homo sapiens
uggcuggccugagcaa

SEQ ID NO: 5947 - RNA, 16 nt, Homo sapiens
ccuaagacaugugagg

SEQ ID NO: 5948 - RNA, 16 nt, Homo sapiens
uaagacaugugaggag

SEQ ID NO: 5949 - RNA, 16 nt, Homo sapiens
gagaaggcaugagaaa

SEQ ID NO: 5950 - RNA, 16 nt, Homo sapiens
gaaagaauuugagacg

SEQ ID NO: 5951 - RNA, 16 nt, Homo sapiens
aauuugagacgcacca

SEQ ID NO: 5952 - RNA, 16 nt, Homo sapiens
gacgcaccaugugggc

SEQ ID NO: 5953 - RNA, 16 nt, Homo sapiens
gcucagcaaugccauu

SEQ ID NO: 5954 - RNA, 16 nt, Homo sapiens
ucccagcucugacccu

SEQ ID NO: 5955 - RNA, 16 nt, Homo sapiens
uucuacauuugagggc

SEQ ID NO: 5956 - RNA, 16 nt, Homo sapiens
gauggacagcgaugag

SEQ ID NO: 5957 - RNA, 16 nt, Homo sapiens
ggacagcgaugagggg

SEQ ID NO: 5958 - RNA, 16 nt, Homo sapiens
gugguucuauguccau

SEQ ID NO: 5959 - RNA, 16 nt, Homo sapiens
uucguggcauguuuug

SEQ ID NO: 5960 - RNA, 16 nt, Homo sapiens
ggcauguuuugauuug

SEQ ID NO: 5961 - RNA, 16 nt, Homo sapiens
guuuugauuuguagca

SEQ ID NO: 5962 - RNA, 16 nt, Homo sapiens
uuguagcacugagggu

SEQ ID NO: 5963 - RNA, 16 nt, Homo sapiens
acucaacucugagccc

SEQ ID NO: 5964 - RNA, 16 nt, Homo sapiens
cuaguaagaugcacug

SEQ ID NO: 5965 - RNA, 16 nt, Homo sapiens
aagaugcacugaaaac

SEQ ID NO: 5966 - RNA, 16 nt, Homo sapiens
gaguuagguugucucc

SEQ ID NO: 5967 - RNA, 16 nt, Homo sapiens
uccaggccaugauggc

SEQ ID NO: 5968 - RNA, 16 nt, Homo sapiens
gccuuacacugaaaau

SEQ ID NO: 5969 - RNA, 16 nt, Homo sapiens
cacugaaaaugucaca

SEQ ID NO: 5970 - RNA, 16 nt, Homo sapiens
guauuauucuguuuug

SEQ ID NO: 5971 - RNA, 16 nt, Homo sapiens
auucuguuuugcacag

SEQ ID NO: 5972 - RNA, 16 nt, Homo sapiens
acaguuaguugugaaa

SEQ ID NO: 5973 - RNA, 16 nt, Homo sapiens
aguuaguugugaaaga

SEQ ID NO: 5974 - RNA, 16 nt, Homo sapiens
aaagaaagcugagaag

SEQ ID NO: 5975 - RNA, 16 nt, Homo sapiens
ugagaagaaugaaaau

SEQ ID NO: 5976 - RNA, 16 nt, Homo sapiens
gaaugaaaaugcaguc

SEQ ID NO: 5977 - RNA, 16 nt, Homo sapiens
augcaguccugaggag

SEQ ID NO: 5978 - RNA, 16 nt, Homo sapiens
auaucaaaacgagggc

SEQ ID NO: 5979 - RNA, 16 nt, Homo sapiens
aacgagggcugaugga

SEQ ID NO: 5980 - RNA, 16 nt, Homo sapiens
acacuaaucugaaagg

SEQ ID NO: 5981 - RNA, 16 nt, Homo sapiens
cugaaaggauguggaa

SEQ ID NO: 5982 - RNA, 16 nt, Homo sapiens
auuagcuggcgcauau

SEQ ID NO: 5983 - RNA, 16 nt, Homo sapiens
uaagcuccuugaguaa

SEQ ID NO: 5984 - RNA, 16 nt, Homo sapiens
aaggugguauguaauu

SEQ ID NO: 5985 - RNA, 16 nt, Homo sapiens
uguaauuuaugcaagg

SEQ ID NO: 5986 - RNA, 16 nt, Homo sapiens
auuaguuaaugagcca

SEQ ID NO: 5987 - RNA, 16 nt, Homo sapiens
auuuucaacugcuuug

SEQ ID NO: 5988 - RNA, 16 nt, Homo sapiens
caacugcuuugaaacu

SEQ ID NO: 5989 - RNA, 16 nt, Homo sapiens
uuugaaacuugccugg

SEQ ID NO: 5990 - RNA, 16 nt, Homo sapiens
ccuggggucugagcau

SEQ ID NO: 5991 - RNA, 16 nt, Homo sapiens
gucugagcaugauggg

SEQ ID NO: 5992 - RNA, 16 nt, Homo sapiens
aggaaagggcgccuac

SEQ ID NO: 5993 - RNA, 16 nt, Homo sapiens
gccuuggaucgcuaag

SEQ ID NO: 5994 - RNA, 16 nt, Homo sapiens
agcuggcucuguuuga

SEQ ID NO: 5995 - RNA, 16 nt, Homo sapiens
ggcucuguuugaugcu

SEQ ID NO: 5996 - RNA, 16 nt, Homo sapiens
ucuguuugaugcuauu

SEQ ID NO: 5997 - RNA, 16 nt, Homo sapiens
ugcuauuuaugcaagu

SEQ ID NO: 5998 - RNA, 16 nt, Homo sapiens
uagggucuauguauuu

SEQ ID NO: 5999 - RNA, 16 nt, Homo sapiens
uauuuaggaugcgccu

SEQ ID NO: 6000 - RNA, 16 nt, Homo sapiens
uuuaggaugcgccuac

SEQ ID NO: 6001 - RNA, 16 nt, Homo sapiens
uauuuaggaugucugc

SEQ ID NO: 6002 - RNA, 16 nt, Homo sapiens
uaggaugucugcaccu

SEQ ID NO: 6003 - RNA, 16 nt, Homo sapiens
ugcaccuucugcagcc

SEQ ID NO: 6004 - RNA, 16 nt, Homo sapiens
acaguggauugcugcu

SEQ ID NO: 6005 - RNA, 16 nt, Homo sapiens
guggauugcugcuucu

SEQ ID NO: 6006 - RNA, 16 nt, Homo sapiens
agaagaguaugcuucc

SEQ ID NO: 6007 - RNA, 16 nt, Homo sapiens
uuuuauccauguaauu

SEQ ID NO: 6008 - RNA, 16 nt, Homo sapiens
uaauuuaacuguagaa

SEQ ID NO: 6009 - RNA, 16 nt, Homo sapiens
uguagaaccugagcuc

SEQ ID NO: 6010 - RNA, 16 nt, Homo sapiens
cuaaguaaccgaagaa

SEQ ID NO: 6011 - RNA, 16 nt, Homo sapiens
accgaagaauguaugc

SEQ ID NO: 6012 - RNA, 16 nt, Homo sapiens
aagaauguaugccucu

SEQ ID NO: 6013 - RNA, 16 nt, Homo sapiens
guaugccucuguucuu

SEQ ID NO: 6014 - RNA, 16 nt, Homo sapiens
cuguucuuaugugcca

SEQ ID NO: 6015 - RNA, 16 nt, Homo sapiens
guucuuaugugccaca

SEQ ID NO: 6016 - RNA, 16 nt, Homo sapiens
ccacauccuuguuuaa

SEQ ID NO: 6017 - RNA, 16 nt, Homo sapiens
aaggcucucuguauga

SEQ ID NO: 6018 - RNA, 16 nt, Homo sapiens
cucucuguaugaagag

SEQ ID NO: 6019 - RNA, 16 nt, Homo sapiens
auucccuagugagccu

SEQ ID NO: 6020 - RNA, 16 nt, Homo sapiens
agcggcuuuuguggaa

SEQ ID NO: 6021 - RNA, 16 nt, Homo sapiens
acaaaucuuuguuguu

SEQ ID NO: 6022 - RNA, 16 nt, Homo sapiens
aaucuuuguuguuccu

SEQ ID NO: 6023 - RNA, 16 nt, Homo sapiens
uuacacauacgcaaac

SEQ ID NO: 6024 - RNA, 16 nt, Homo sapiens
caaaccaccugugaca

SEQ ID NO: 6025 - RNA, 16 nt, Homo sapiens
aaccaccugugacagc

SEQ ID NO: 6026 - RNA, 16 nt, Homo sapiens
agcaaauagugauaac

SEQ ID NO: 6027 - RNA, 16 nt, Homo sapiens
aaccuuagcuguucau

SEQ ID NO: 6028 - RNA, 16 nt, Homo sapiens
agcuguucaugucuug

SEQ ID NO: 6029 - RNA, 16 nt, Homo sapiens
uucaugucuugauuuc

SEQ ID NO: 6030 - RNA, 16 nt, Homo sapiens
cauuagaauuguuacu

SEQ ID NO: 6031 - RNA, 16 nt, Homo sapiens
acucagguuuguagca

SEQ ID NO: 6032 - RNA, 16 nt, Homo sapiens
uagcauacaugagucc

SEQ ID NO: 6033 - RNA, 16 nt, Homo sapiens
gagucuuaauguagaa

SEQ ID NO: 6034 - RNA, 16 nt, Homo sapiens
auggagacuuguaaua

SEQ ID NO: 6035 - RNA, 16 nt, Homo sapiens
uuguaauaaugagcua

SEQ ID NO: 6036 - RNA, 16 nt, Homo sapiens
guuacaaagugcuugu

SEQ ID NO: 6037 - RNA, 16 nt, Homo sapiens
caaagugcuuguucau

SEQ ID NO: 6038 - RNA, 16 nt, Homo sapiens
aaauagcacugaaaau

SEQ ID NO: 6039 - RNA, 16 nt, Homo sapiens
acugaaaauugaaaca

SEQ ID NO: 6040 - RNA, 16 nt, Homo sapiens
auugaaacaugaauua

SEQ ID NO: 6041 - RNA, 16 nt, Homo sapiens
ugaauuaacugauaau

SEQ ID NO: 6042 - RNA, 16 nt, Homo sapiens
ccaaucauuugccauu

SEQ ID NO: 6043 - RNA, 16 nt, Homo sapiens
ugccauuuaugacaaa

SEQ ID NO: 6044 - RNA, 16 nt, Homo sapiens
aacaaagaacgagcac

SEQ ID NO: 6045 - RNA, 16 nt, Homo sapiens
cagaguuucugagaua

SEQ ID NO: 6046 - RNA, 16 nt, Homo sapiens
cugagauaauguacgu

SEQ ID NO: 6047 - RNA, 16 nt, Homo sapiens
gaauggggcugaaacc

SEQ ID NO: 6048 - RNA, 16 nt, Homo sapiens
cugaaaccaugugcaa

SEQ ID NO: 6049 - RNA, 16 nt, Homo sapiens
gaaaccaugugcaagu

SEQ ID NO: 6050 - RNA, 16 nt, Homo sapiens
gugcaagucugugucu

SEQ ID NO: 6051 - RNA, 16 nt, Homo sapiens
gcaagucugugucuug

SEQ ID NO: 6052 - RNA, 16 nt, Homo sapiens
ucugugucuugucagu

SEQ ID NO: 6053 - RNA, 16 nt, Homo sapiens
uccaagaagugacacc

SEQ ID NO: 6054 - RNA, 16 nt, Homo sapiens
aagugacaccgagaug

SEQ ID NO: 6055 - RNA, 16 nt, Homo sapiens
acaccgagauguuaau

SEQ ID NO: 6056 - RNA, 16 nt, Homo sapiens
agggacccgugccuug

SEQ ID NO: 6057 - RNA, 16 nt, Homo sapiens
cccgugccuuguuucc

SEQ ID NO: 6058 - RNA, 16 nt, Homo sapiens
ccacaagaaugcaaac

SEQ ID NO: 6059 - RNA, 16 nt, Homo sapiens
acagauacucgcuagc

SEQ ID NO: 6060 - RNA, 16 nt, Homo sapiens
cauuuaaauugauuaa

SEQ ID NO: 6061 - RNA, 16 nt, Homo sapiens
aaggaggagugcaucu

SEQ ID NO: 6062 - RNA, 16 nt, Homo sapiens
aucuuuggccgacagu

SEQ ID NO: 6063 - RNA, 16 nt, Homo sapiens
cgacagugguguaacu

SEQ ID NO: 6064 - RNA, 16 nt, Homo sapiens
ugguguaacugugugu

SEQ ID NO: 6065 - RNA, 16 nt, Homo sapiens
guguaacugugugugu

SEQ ID NO: 6066 - RNA, 16 nt, Homo sapiens
guaacugugugugugu

SEQ ID NO: 6067 - RNA, 16 nt, Homo sapiens
aacugugugugugugu

SEQ ID NO: 6068 - RNA, 16 nt, Homo sapiens
cugugugugugugugu

SEQ ID NO: 6069 - RNA, 16 nt, Homo sapiens
gugugugugugugugu

SEQ ID NO: 6070 - RNA, 16 nt, Homo sapiens
gugugugugugugugg

SEQ ID NO: 6071 - RNA, 16 nt, Homo sapiens
gugugugugugugggu

SEQ ID NO: 6072 - RNA, 16 nt, Homo sapiens
gugugugggugugggu

SEQ ID NO: 6073 - RNA, 16 nt, Homo sapiens
ggguguggguguaugu

SEQ ID NO: 6074 - RNA, 16 nt, Homo sapiens
guggguguaugugugu

SEQ ID NO: 6075 - RNA, 16 nt, Homo sapiens
ggguguauguguguuu

SEQ ID NO: 6076 - RNA, 16 nt, Homo sapiens
guguauguguguuuug

SEQ ID NO: 6077 - RNA, 16 nt, Homo sapiens
uguguguuuugugcau

SEQ ID NO: 6078 - RNA, 16 nt, Homo sapiens
uguguuuugugcauaa

SEQ ID NO: 6079 - RNA, 16 nt, Homo sapiens
aagaauauaugcuaca

SEQ ID NO: 6080 - RNA, 16 nt, Homo sapiens
uucuagucaugaugaa

SEQ ID NO: 6081 - RNA, 16 nt, Homo sapiens
uagucaugaugaaugu

SEQ ID NO: 6082 - RNA, 16 nt, Homo sapiens
caugaugaauguauuu

SEQ ID NO: 6083 - RNA, 16 nt, Homo sapiens
aauguauuuuguauac

SEQ ID NO: 6084 - RNA, 16 nt, Homo sapiens
auugggauuuguaauc

SEQ ID NO: 6085 - RNA, 16 nt, Homo sapiens
caacuuaauugauaaa

SEQ ID NO: 6086 - RNA, 16 nt, Homo sapiens
cuuggcaacugcuuuu

SEQ ID NO: 6087 - RNA, 16 nt, Homo sapiens
cugcuuuuauguucug

SEQ ID NO: 6088 - RNA, 16 nt, Homo sapiens
uuuauguucugucucc

SEQ ID NO: 6089 - RNA, 16 nt, Homo sapiens
auuuauccuuguuuag

SEQ ID NO: 6090 - RNA, 16 nt, Homo sapiens
gaaaaacuuugaaaug

SEQ ID NO: 6091 - RNA, 16 nt, Homo sapiens
ucaaaaaauugcuaaa

SEQ ID NO: 6092 - RNA, 16 nt, Homo sapiens
aaaacuaaauguuagu

SEQ ID NO: 6093 - RNA, 16 nt, Homo sapiens
uaguuuagcugauugu

SEQ ID NO: 6094 - RNA, 16 nt, Homo sapiens
uuagcugauuguaugg

SEQ ID NO: 6095 - RNA, 16 nt, Homo sapiens
ugggguuuucgaaccu

SEQ ID NO: 6096 - RNA, 16 nt, Homo sapiens
uucacuuuuuguuugu

SEQ ID NO: 6097 - RNA, 16 nt, Homo sapiens
cuuuuuguuuguuuua

SEQ ID NO: 6098 - RNA, 16 nt, Homo sapiens
uuucacaacuguguaa

SEQ ID NO: 6099 - RNA, 16 nt, Homo sapiens
ucacaacuguguaaau

SEQ ID NO: 6100 - RNA, 16 nt, Homo sapiens
uguguaaauugccaau

SEQ ID NO: 6101 - RNA, 16 nt, Homo sapiens
aauaauuccuguccau

SEQ ID NO: 6102 - RNA, 16 nt, Homo sapiens
uccuguccaugaaaau

SEQ ID NO: 6103 - RNA, 16 nt, Homo sapiens
ccaugaaaaugcaaau

SEQ ID NO: 6104 - RNA, 16 nt, Homo sapiens
auuauccaguguagau

SEQ ID NO: 6105 - RNA, 16 nt, Homo sapiens
agauauauuugaccau

SEQ ID NO: 6106 - RNA, 16 nt, Homo sapiens
ggcuaguuuugccuuu

SEQ ID NO: 6107 - RNA, 16 nt, Homo sapiens
auuucagccugaaugu

SEQ ID NO: 6108 - RNA, 16 nt, Homo sapiens
cagccugaaugucugc

SEQ ID NO: 6109 - RNA, 16 nt, Homo sapiens
cugaaugucugccuau

SEQ ID NO: 6110 - RNA, 16 nt, Homo sapiens
uauauucucugcucuu

SEQ ID NO: 6111 - RNA, 16 nt, Homo sapiens
ucugcucuuuguauuc

SEQ ID NO: 6112 - RNA, 16 nt, Homo sapiens
auucuccuuugaaccc

SEQ ID NO: 6113 - RNA, 16 nt, Homo sapiens
aaaacauccuguggca

SEQ ID NO: 6114 - RNA, 17 nt, Homo sapiens
caaggugcugcuggccg

SEQ ID NO: 6115 - RNA, 17 nt, Homo sapiens
ggugcugcuggccgucg

SEQ ID NO: 6116 - RNA, 17 nt, Homo sapiens
cugcuggccgucgcccu

SEQ ID NO: 6117 - RNA, 17 nt, Homo sapiens
gccgucgcccuguggcu

SEQ ID NO: 6118 - RNA, 17 nt, Homo sapiens
ccgucgcccuguggcuc

SEQ ID NO: 6119 - RNA, 17 nt, Homo sapiens
cgucgcccuguggcucu

SEQ ID NO: 6120 - RNA, 17 nt, Homo sapiens
ccuguggcucugcgugg

SEQ ID NO: 6121 - RNA, 17 nt, Homo sapiens
uguggcucugcguggag

SEQ ID NO: 6122 - RNA, 17 nt, Homo sapiens
guggagacccgggccgc

SEQ ID NO: 6123 - RNA, 17 nt, Homo sapiens
uggagacccgggccgcc

SEQ ID NO: 6124 - RNA, 17 nt, Homo sapiens
acccgggccgccucugu

SEQ ID NO: 6125 - RNA, 17 nt, Homo sapiens
cgggccgccucuguggg

SEQ ID NO: 6126 - RNA, 17 nt, Homo sapiens
gggccgccucugugggu

SEQ ID NO: 6127 - RNA, 17 nt, Homo sapiens
gccgccucuguggguuu

SEQ ID NO: 6128 - RNA, 17 nt, Homo sapiens
ggguuugccuaguguuu

SEQ ID NO: 6129 - RNA, 17 nt, Homo sapiens
gguuugccuaguguuuc

SEQ ID NO: 6130 - RNA, 17 nt, Homo sapiens
aguguuucucuugaucu

SEQ ID NO: 6131 - RNA, 17 nt, Homo sapiens
uguuucucuugaucugc

SEQ ID NO: 6132 - RNA, 17 nt, Homo sapiens
ucuugaucugcccaggc

SEQ ID NO: 6133 - RNA, 17 nt, Homo sapiens
ugaucugcccaggcuca

SEQ ID NO: 6134 - RNA, 17 nt, Homo sapiens
gaucugcccaggcucag

SEQ ID NO: 6135 - RNA, 17 nt, Homo sapiens
aucugcccaggcucagc

SEQ ID NO: 6136 - RNA, 17 nt, Homo sapiens
gcccaggcucagcauac

SEQ ID NO: 6137 - RNA, 17 nt, Homo sapiens
ccaggcucagcauacaa

SEQ ID NO: 6138 - RNA, 17 nt, Homo sapiens
ggcucagcauacaaaaa

SEQ ID NO: 6139 - RNA, 17 nt, Homo sapiens
cagcauacaaaaagaca

SEQ ID NO: 6140 - RNA, 17 nt, Homo sapiens
aaaaagacauacuuaca

SEQ ID NO: 6141 - RNA, 17 nt, Homo sapiens
agacauacuuacaauua

SEQ ID NO: 6142 - RNA, 17 nt, Homo sapiens
auacuuacaauuaaggc

SEQ ID NO: 6143 - RNA, 17 nt, Homo sapiens
auuaaggcuaauacaac

SEQ ID NO: 6144 - RNA, 17 nt, Homo sapiens
gcuaauacaacucuuca

SEQ ID NO: 6145 - RNA, 17 nt, Homo sapiens
aauacaacucuucaaau

SEQ ID NO: 6146 - RNA, 17 nt, Homo sapiens
uacaacucuucaaauua

SEQ ID NO: 6147 - RNA, 17 nt, Homo sapiens
aacucuucaaauuacuu

SEQ ID NO: 6148 - RNA, 17 nt, Homo sapiens
caaauuacuugcagggg

SEQ ID NO: 6149 - RNA, 17 nt, Homo sapiens
uuacuugcaggggacag

SEQ ID NO: 6150 - RNA, 17 nt, Homo sapiens
caggggacagagggacu

SEQ ID NO: 6151 - RNA, 17 nt, Homo sapiens
agagggacuuggacugg

SEQ ID NO: 6152 - RNA, 17 nt, Homo sapiens
acuuggacuggcuuugg

SEQ ID NO: 6153 - RNA, 17 nt, Homo sapiens
ggacuggcuuuggccca

SEQ ID NO: 6154 - RNA, 17 nt, Homo sapiens
gcuuuggcccaauaauc

SEQ ID NO: 6155 - RNA, 17 nt, Homo sapiens
cuuuggcccaauaauca

SEQ ID NO: 6156 - RNA, 17 nt, Homo sapiens
uuuggcccaauaaucag

SEQ ID NO: 6157 - RNA, 17 nt, Homo sapiens
caauaaucagaguggca

SEQ ID NO: 6158 - RNA, 17 nt, Homo sapiens
agaguggcagugagcaa

SEQ ID NO: 6159 - RNA, 17 nt, Homo sapiens
cagugagcaaagggugg

SEQ ID NO: 6160 - RNA, 17 nt, Homo sapiens
gaggugacugagugcag

SEQ ID NO: 6161 - RNA, 17 nt, Homo sapiens
cugagugcagcgauggc

SEQ ID NO: 6162 - RNA, 17 nt, Homo sapiens
gcgauggccucuucugu

SEQ ID NO: 6163 - RNA, 17 nt, Homo sapiens
cgauggccucuucugua

SEQ ID NO: 6164 - RNA, 17 nt, Homo sapiens
auggccucuucuguaag

SEQ ID NO: 6165 - RNA, 17 nt, Homo sapiens
gccucuucuguaagaca

SEQ ID NO: 6166 - RNA, 17 nt, Homo sapiens
uguaagacacucacaau

SEQ ID NO: 6167 - RNA, 17 nt, Homo sapiens
uaagacacucacaauuc

SEQ ID NO: 6168 - RNA, 17 nt, Homo sapiens
agacacucacaauucca

SEQ ID NO: 6169 - RNA, 17 nt, Homo sapiens
acacucacaauuccaaa

SEQ ID NO: 6170 - RNA, 17 nt, Homo sapiens
cacaauuccaaaaguga

SEQ ID NO: 6171 - RNA, 17 nt, Homo sapiens
acaauuccaaaagugau

SEQ ID NO: 6172 - RNA, 17 nt, Homo sapiens
gaaaugacacuggagcc

SEQ ID NO: 6173 - RNA, 17 nt, Homo sapiens
aaugacacuggagccua

SEQ ID NO: 6174 - RNA, 17 nt, Homo sapiens
acuggagccuacaagug

SEQ ID NO: 6175 - RNA, 17 nt, Homo sapiens
cuggagccuacaagugc

SEQ ID NO: 6176 - RNA, 17 nt, Homo sapiens
gagccuacaagugcuuc

SEQ ID NO: 6177 - RNA, 17 nt, Homo sapiens
acaagugcuucuaccgg

SEQ ID NO: 6178 - RNA, 17 nt, Homo sapiens
agugcuucuaccgggaa

SEQ ID NO: 6179 - RNA, 17 nt, Homo sapiens
gcuucuaccgggaaacu

SEQ ID NO: 6180 - RNA, 17 nt, Homo sapiens
cgggaaacugacuuggc

SEQ ID NO: 6181 - RNA, 17 nt, Homo sapiens
aaacugacuuggccucg

SEQ ID NO: 6182 - RNA, 17 nt, Homo sapiens
gacuuggccucggucau

SEQ ID NO: 6183 - RNA, 17 nt, Homo sapiens
acuuggccucggucauu

SEQ ID NO: 6184 - RNA, 17 nt, Homo sapiens
ccucggucauuuauguc

SEQ ID NO: 6185 - RNA, 17 nt, Homo sapiens
uuuaugucuauguucaa

SEQ ID NO: 6186 - RNA, 17 nt, Homo sapiens
cuauguucaagauuaca

SEQ ID NO: 6187 - RNA, 17 nt, Homo sapiens
aagauuacagaucucca

SEQ ID NO: 6188 - RNA, 17 nt, Homo sapiens
uacagaucuccauuuau

SEQ ID NO: 6189 - RNA, 17 nt, Homo sapiens
cagaucuccauuuauug

SEQ ID NO: 6190 - RNA, 17 nt, Homo sapiens
agaucuccauuuauugc

SEQ ID NO: 6191 - RNA, 17 nt, Homo sapiens
uuuauugcuucuguuag

SEQ ID NO: 6192 - RNA, 17 nt, Homo sapiens
auugcuucuguuaguga

SEQ ID NO: 6193 - RNA, 17 nt, Homo sapiens
uuagugaccaacaugga

SEQ ID NO: 6194 - RNA, 17 nt, Homo sapiens
uagugaccaacauggag

SEQ ID NO: 6195 - RNA, 17 nt, Homo sapiens
ugaccaacauggagucg

SEQ ID NO: 6196 - RNA, 17 nt, Homo sapiens
ucguguacauuacugag

SEQ ID NO: 6197 - RNA, 17 nt, Homo sapiens
uacauuacugagaacaa

SEQ ID NO: 6198 - RNA, 17 nt, Homo sapiens
cugagaacaaaaacaaa

SEQ ID NO: 6199 - RNA, 17 nt, Homo sapiens
acaaaaacaaaacugug

SEQ ID NO: 6200 - RNA, 17 nt, Homo sapiens
aacaaaacuguggugau

SEQ ID NO: 6201 - RNA, 17 nt, Homo sapiens
ggugauuccaugucucg

SEQ ID NO: 6202 - RNA, 17 nt, Homo sapiens
gugauuccaugucucgg

SEQ ID NO: 6203 - RNA, 17 nt, Homo sapiens
uccaugucucgggucca

SEQ ID NO: 6204 - RNA, 17 nt, Homo sapiens
cucggguccauuucaaa

SEQ ID NO: 6205 - RNA, 17 nt, Homo sapiens
ucggguccauuucaaau

SEQ ID NO: 6206 - RNA, 17 nt, Homo sapiens
uccauuucaaaucucaa

SEQ ID NO: 6207 - RNA, 17 nt, Homo sapiens
uucaaaucucaacgugu

SEQ ID NO: 6208 - RNA, 17 nt, Homo sapiens
caaaucucaacguguca

SEQ ID NO: 6209 - RNA, 17 nt, Homo sapiens
aacgugucacuuugugc

SEQ ID NO: 6210 - RNA, 17 nt, Homo sapiens
cgugucacuuugugcaa

SEQ ID NO: 6211 - RNA, 17 nt, Homo sapiens
cuuugugcaagauaccc

SEQ ID NO: 6212 - RNA, 17 nt, Homo sapiens
caagauacccagaaaag

SEQ ID NO: 6213 - RNA, 17 nt, Homo sapiens
aagauacccagaaaaga

SEQ ID NO: 6214 - RNA, 17 nt, Homo sapiens
agauacccagaaaagag

SEQ ID NO: 6215 - RNA, 17 nt, Homo sapiens
auuuguuccugauggua

SEQ ID NO: 6216 - RNA, 17 nt, Homo sapiens
uuuguuccugaugguaa

SEQ ID NO: 6217 - RNA, 17 nt, Homo sapiens
augguaacagaauuucc

SEQ ID NO: 6218 - RNA, 17 nt, Homo sapiens
agaauuuccugggacag

SEQ ID NO: 6219 - RNA, 17 nt, Homo sapiens
gaauuuccugggacagc

SEQ ID NO: 6220 - RNA, 17 nt, Homo sapiens
ccugggacagcaagaag

SEQ ID NO: 6221 - RNA, 17 nt, Homo sapiens
gggacagcaagaagggc

SEQ ID NO: 6222 - RNA, 17 nt, Homo sapiens
agaagggcuuuacuauu

SEQ ID NO: 6223 - RNA, 17 nt, Homo sapiens
ggcuuuacuauucccag

SEQ ID NO: 6224 - RNA, 17 nt, Homo sapiens
uacuauucccagcuaca

SEQ ID NO: 6225 - RNA, 17 nt, Homo sapiens
acuauucccagcuacau

SEQ ID NO: 6226 - RNA, 17 nt, Homo sapiens
cuauucccagcuacaug

SEQ ID NO: 6227 - RNA, 17 nt, Homo sapiens
uucccagcuacaugauc

SEQ ID NO: 6228 - RNA, 17 nt, Homo sapiens
ccagcuacaugaucagc

SEQ ID NO: 6229 - RNA, 17 nt, Homo sapiens
acaugaucagcuaugcu

SEQ ID NO: 6230 - RNA, 17 nt, Homo sapiens
ugaucagcuaugcuggc

SEQ ID NO: 6231 - RNA, 17 nt, Homo sapiens
agcuaugcuggcauggu

SEQ ID NO: 6232 - RNA, 17 nt, Homo sapiens
augcuggcauggucuuc

SEQ ID NO: 6233 - RNA, 17 nt, Homo sapiens
gcauggucuucugugaa

SEQ ID NO: 6234 - RNA, 17 nt, Homo sapiens
uggucuucugugaagca

SEQ ID NO: 6235 - RNA, 17 nt, Homo sapiens
ugugaagcaaaaauuaa

SEQ ID NO: 6236 - RNA, 17 nt, Homo sapiens
aaaguuaccagucuauu

SEQ ID NO: 6237 - RNA, 17 nt, Homo sapiens
aaguuaccagucuauua

SEQ ID NO: 6238 - RNA, 17 nt, Homo sapiens
uaccagucuauuaugua

SEQ ID NO: 6239 - RNA, 17 nt, Homo sapiens
uuauguacauaguuguc

SEQ ID NO: 6240 - RNA, 17 nt, Homo sapiens
ugugguucugaguccgu

SEQ ID NO: 6241 - RNA, 17 nt, Homo sapiens
ucugaguccgucucaug

SEQ ID NO: 6242 - RNA, 17 nt, Homo sapiens
aguccgucucauggaau

SEQ ID NO: 6243 - RNA, 17 nt, Homo sapiens
uccgucucauggaauug

SEQ ID NO: 6244 - RNA, 17 nt, Homo sapiens
aauugaacuaucuguug

SEQ ID NO: 6245 - RNA, 17 nt, Homo sapiens
gaacuaucuguuggaga

SEQ ID NO: 6246 - RNA, 17 nt, Homo sapiens
agaaaagcuugucuuaa

SEQ ID NO: 6247 - RNA, 17 nt, Homo sapiens
agcuugucuuaaauugu

SEQ ID NO: 6248 - RNA, 17 nt, Homo sapiens
aauuguacagcaagaac

SEQ ID NO: 6249 - RNA, 17 nt, Homo sapiens
uguacagcaagaacuga

SEQ ID NO: 6250 - RNA, 17 nt, Homo sapiens
gcaagaacugaacuaaa

SEQ ID NO: 6251 - RNA, 17 nt, Homo sapiens
aacugaacuaaaugugg

SEQ ID NO: 6252 - RNA, 17 nt, Homo sapiens
ggauugacuucaacugg

SEQ ID NO: 6253 - RNA, 17 nt, Homo sapiens
uugacuucaacugggaa

SEQ ID NO: 6254 - RNA, 17 nt, Homo sapiens
acuucaacugggaauac

SEQ ID NO: 6255 - RNA, 17 nt, Homo sapiens
gggaauacccuucuucg

SEQ ID NO: 6256 - RNA, 17 nt, Homo sapiens
ggaauacccuucuucga

SEQ ID NO: 6257 - RNA, 17 nt, Homo sapiens
gaauacccuucuucgaa

SEQ ID NO: 6258 - RNA, 17 nt, Homo sapiens
uacccuucuucgaagca

SEQ ID NO: 6259 - RNA, 17 nt, Homo sapiens
uucgaagcaucagcaua

SEQ ID NO: 6260 - RNA, 17 nt, Homo sapiens
gaagcaucagcauaaga

SEQ ID NO: 6261 - RNA, 17 nt, Homo sapiens
gcaucagcauaagaaac

SEQ ID NO: 6262 - RNA, 17 nt, Homo sapiens
uaagaaacuuguaaacc

SEQ ID NO: 6263 - RNA, 17 nt, Homo sapiens
uuguaaaccgagaccua

SEQ ID NO: 6264 - RNA, 17 nt, Homo sapiens
accgagaccuaaaaacc

SEQ ID NO: 6265 - RNA, 17 nt, Homo sapiens
ccgagaccuaaaaaccc

SEQ ID NO: 6266 - RNA, 17 nt, Homo sapiens
cuaaaaacccagucugg

SEQ ID NO: 6267 - RNA, 17 nt, Homo sapiens
uaaaaacccagucuggg

SEQ ID NO: 6268 - RNA, 17 nt, Homo sapiens
aaaaacccagucuggga

SEQ ID NO: 6269 - RNA, 17 nt, Homo sapiens
acccagucugggaguga

SEQ ID NO: 6270 - RNA, 17 nt, Homo sapiens
uuuugagcaccuuaacu

SEQ ID NO: 6271 - RNA, 17 nt, Homo sapiens
uugagcaccuuaacuau

SEQ ID NO: 6272 - RNA, 17 nt, Homo sapiens
ugagcaccuuaacuaua

SEQ ID NO: 6273 - RNA, 17 nt, Homo sapiens
accuuaacuauagaugg

SEQ ID NO: 6274 - RNA, 17 nt, Homo sapiens
gguguaacccggaguga

SEQ ID NO: 6275 - RNA, 17 nt, Homo sapiens
guguaacccggagugac

SEQ ID NO: 6276 - RNA, 17 nt, Homo sapiens
ggagugaccaaggauug

SEQ ID NO: 6277 - RNA, 17 nt, Homo sapiens
gagugaccaaggauugu

SEQ ID NO: 6278 - RNA, 17 nt, Homo sapiens
gauuguacaccugugca

SEQ ID NO: 6279 - RNA, 17 nt, Homo sapiens
uuguacaccugugcagc

SEQ ID NO: 6280 - RNA, 17 nt, Homo sapiens
uguacaccugugcagca

SEQ ID NO: 6281 - RNA, 17 nt, Homo sapiens
accugugcagcauccag

SEQ ID NO: 6282 - RNA, 17 nt, Homo sapiens
ugugcagcauccagugg

SEQ ID NO: 6283 - RNA, 17 nt, Homo sapiens
gcagcauccagugggcu

SEQ ID NO: 6284 - RNA, 17 nt, Homo sapiens
cagcauccagugggcug

SEQ ID NO: 6285 - RNA, 17 nt, Homo sapiens
cagugggcugaugacca

SEQ ID NO: 6286 - RNA, 17 nt, Homo sapiens
cugaugaccaagaagaa

SEQ ID NO: 6287 - RNA, 17 nt, Homo sapiens
ugaugaccaagaagaac

SEQ ID NO: 6288 - RNA, 17 nt, Homo sapiens
agaagaacagcacauuu

SEQ ID NO: 6289 - RNA, 17 nt, Homo sapiens
agaacagcacauuuguc

SEQ ID NO: 6290 - RNA, 17 nt, Homo sapiens
aacagcacauuugucag

SEQ ID NO: 6291 - RNA, 17 nt, Homo sapiens
cauuugucaggguccau

SEQ ID NO: 6292 - RNA, 17 nt, Homo sapiens
ucaggguccaugaaaaa

SEQ ID NO: 6293 - RNA, 17 nt, Homo sapiens
caggguccaugaaaaac

SEQ ID NO: 6294 - RNA, 17 nt, Homo sapiens
ugaaaaaccuuuuguug

SEQ ID NO: 6295 - RNA, 17 nt, Homo sapiens
gaaaaaccuuuuguugc

SEQ ID NO: 6296 - RNA, 17 nt, Homo sapiens
uuuguugcuuuuggaag

SEQ ID NO: 6297 - RNA, 17 nt, Homo sapiens
gaaguggcauggaaucu

SEQ ID NO: 6298 - RNA, 17 nt, Homo sapiens
auggaaucucuggugga

SEQ ID NO: 6299 - RNA, 17 nt, Homo sapiens
ggaaucucugguggaag

SEQ ID NO: 6300 - RNA, 17 nt, Homo sapiens
guggaagccacgguggg

SEQ ID NO: 6301 - RNA, 17 nt, Homo sapiens
uggaagccacggugggg

SEQ ID NO: 6302 - RNA, 17 nt, Homo sapiens
agcgugucagaaucccu

SEQ ID NO: 6303 - RNA, 17 nt, Homo sapiens
ucagaaucccugcgaag

SEQ ID NO: 6304 - RNA, 17 nt, Homo sapiens
cagaaucccugcgaagu

SEQ ID NO: 6305 - RNA, 17 nt, Homo sapiens
agaaucccugcgaagua

SEQ ID NO: 6306 - RNA, 17 nt, Homo sapiens
cgaaguaccuugguuac

SEQ ID NO: 6307 - RNA, 17 nt, Homo sapiens
gaaguaccuugguuacc

SEQ ID NO: 6308 - RNA, 17 nt, Homo sapiens
uugguuacccaccccca

SEQ ID NO: 6309 - RNA, 17 nt, Homo sapiens
ugguuacccacccccag

SEQ ID NO: 6310 - RNA, 17 nt, Homo sapiens
gguuacccacccccaga

SEQ ID NO: 6311 - RNA, 17 nt, Homo sapiens
uuacccacccccagaaa

SEQ ID NO: 6312 - RNA, 17 nt, Homo sapiens
uacccacccccagaaau

SEQ ID NO: 6313 - RNA, 17 nt, Homo sapiens
acccacccccagaaaua

SEQ ID NO: 6314 - RNA, 17 nt, Homo sapiens
cccacccccagaaauaa

SEQ ID NO: 6315 - RNA, 17 nt, Homo sapiens
ccacccccagaaauaaa

SEQ ID NO: 6316 - RNA, 17 nt, Homo sapiens
uggaauaccccuugagu

SEQ ID NO: 6317 - RNA, 17 nt, Homo sapiens
ggaauaccccuugaguc

SEQ ID NO: 6318 - RNA, 17 nt, Homo sapiens
gaauaccccuugagucc

SEQ ID NO: 6319 - RNA, 17 nt, Homo sapiens
aauaccccuugagucca

SEQ ID NO: 6320 - RNA, 17 nt, Homo sapiens
cuugaguccaaucacac

SEQ ID NO: 6321 - RNA, 17 nt, Homo sapiens
uugaguccaaucacaca

SEQ ID NO: 6322 - RNA, 17 nt, Homo sapiens
guccaaucacacaauua

SEQ ID NO: 6323 - RNA, 17 nt, Homo sapiens
ccaaucacacaauuaaa

SEQ ID NO: 6324 - RNA, 17 nt, Homo sapiens
aaucacacaauuaaagc

SEQ ID NO: 6325 - RNA, 17 nt, Homo sapiens
agcggggcauguacuga

SEQ ID NO: 6326 - RNA, 17 nt, Homo sapiens
gcauguacugacgauua

SEQ ID NO: 6327 - RNA, 17 nt, Homo sapiens
aaagagacacaggaaau

SEQ ID NO: 6328 - RNA, 17 nt, Homo sapiens
agagacacaggaaauua

SEQ ID NO: 6329 - RNA, 17 nt, Homo sapiens
gaaauuacacugucauc

SEQ ID NO: 6330 - RNA, 17 nt, Homo sapiens
aauuacacugucauccu

SEQ ID NO: 6331 - RNA, 17 nt, Homo sapiens
acacugucauccuuacc

SEQ ID NO: 6332 - RNA, 17 nt, Homo sapiens
cugucauccuuaccaau

SEQ ID NO: 6333 - RNA, 17 nt, Homo sapiens
ugucauccuuaccaauc

SEQ ID NO: 6334 - RNA, 17 nt, Homo sapiens
auccuuaccaaucccau

SEQ ID NO: 6335 - RNA, 17 nt, Homo sapiens
uccuuaccaaucccauu

SEQ ID NO: 6336 - RNA, 17 nt, Homo sapiens
uaccaaucccauuucaa

SEQ ID NO: 6337 - RNA, 17 nt, Homo sapiens
accaaucccauuucaaa

SEQ ID NO: 6338 - RNA, 17 nt, Homo sapiens
ccaaucccauuucaaag

SEQ ID NO: 6339 - RNA, 17 nt, Homo sapiens
cccauuucaaaggagaa

SEQ ID NO: 6340 - RNA, 17 nt, Homo sapiens
ggagaagcagagccaug

SEQ ID NO: 6341 - RNA, 17 nt, Homo sapiens
agcagagccaugugguc

SEQ ID NO: 6342 - RNA, 17 nt, Homo sapiens
gcagagccauguggucu

SEQ ID NO: 6343 - RNA, 17 nt, Homo sapiens
auguggucucucugguu

SEQ ID NO: 6344 - RNA, 17 nt, Homo sapiens
guggucucucugguugu

SEQ ID NO: 6345 - RNA, 17 nt, Homo sapiens
ggucucucugguugugu

SEQ ID NO: 6346 - RNA, 17 nt, Homo sapiens
uguaugucccaccccag

SEQ ID NO: 6347 - RNA, 17 nt, Homo sapiens
guaugucccaccccaga

SEQ ID NO: 6348 - RNA, 17 nt, Homo sapiens
uaugucccaccccagau

SEQ ID NO: 6349 - RNA, 17 nt, Homo sapiens
ugucccaccccagauug

SEQ ID NO: 6350 - RNA, 17 nt, Homo sapiens
gucccaccccagauugg

SEQ ID NO: 6351 - RNA, 17 nt, Homo sapiens
ucccaccccagauuggu

SEQ ID NO: 6352 - RNA, 17 nt, Homo sapiens
cccaccccagauuggug

SEQ ID NO: 6353 - RNA, 17 nt, Homo sapiens
gagaaaucucuaaucuc

SEQ ID NO: 6354 - RNA, 17 nt, Homo sapiens
gaaaucucuaaucucuc

SEQ ID NO: 6355 - RNA, 17 nt, Homo sapiens
cucuaaucucuccugug

SEQ ID NO: 6356 - RNA, 17 nt, Homo sapiens
cuaaucucuccugugga

SEQ ID NO: 6357 - RNA, 17 nt, Homo sapiens
aaucucuccuguggauu

SEQ ID NO: 6358 - RNA, 17 nt, Homo sapiens
aucucuccuguggauuc

SEQ ID NO: 6359 - RNA, 17 nt, Homo sapiens
guggauuccuaccagua

SEQ ID NO: 6360 - RNA, 17 nt, Homo sapiens
uggauuccuaccaguac

SEQ ID NO: 6361 - RNA, 17 nt, Homo sapiens
auuccuaccaguacggc

SEQ ID NO: 6362 - RNA, 17 nt, Homo sapiens
uuccuaccaguacggca

SEQ ID NO: 6363 - RNA, 17 nt, Homo sapiens
aguacggcaccacucaa

SEQ ID NO: 6364 - RNA, 17 nt, Homo sapiens
uacggcaccacucaaac

SEQ ID NO: 6365 - RNA, 17 nt, Homo sapiens
acggcaccacucaaacg

SEQ ID NO: 6366 - RNA, 17 nt, Homo sapiens
ggcaccacucaaacgcu

SEQ ID NO: 6367 - RNA, 17 nt, Homo sapiens
caccacucaaacgcuga

SEQ ID NO: 6368 - RNA, 17 nt, Homo sapiens
ucaaacgcugacaugua

SEQ ID NO: 6369 - RNA, 17 nt, Homo sapiens
acgcugacauguacggu

SEQ ID NO: 6370 - RNA, 17 nt, Homo sapiens
guacggucuaugccauu

SEQ ID NO: 6371 - RNA, 17 nt, Homo sapiens
gucuaugccauuccucc

SEQ ID NO: 6372 - RNA, 17 nt, Homo sapiens
ucuaugccauuccuccc

SEQ ID NO: 6373 - RNA, 17 nt, Homo sapiens
ugccauuccucccccgc

SEQ ID NO: 6374 - RNA, 17 nt, Homo sapiens
gccauuccucccccgca

SEQ ID NO: 6375 - RNA, 17 nt, Homo sapiens
cauuccucccccgcauc

SEQ ID NO: 6376 - RNA, 17 nt, Homo sapiens
auuccucccccgcauca

SEQ ID NO: 6377 - RNA, 17 nt, Homo sapiens
uuccucccccgcaucac

SEQ ID NO: 6378 - RNA, 17 nt, Homo sapiens
uccucccccgcaucaca

SEQ ID NO: 6379 - RNA, 17 nt, Homo sapiens
ucccccgcaucacaucc

SEQ ID NO: 6380 - RNA, 17 nt, Homo sapiens
cccgcaucacauccacu

SEQ ID NO: 6381 - RNA, 17 nt, Homo sapiens
cgcaucacauccacugg

SEQ ID NO: 6382 - RNA, 17 nt, Homo sapiens
aucacauccacugguau

SEQ ID NO: 6383 - RNA, 17 nt, Homo sapiens
ucacauccacugguauu

SEQ ID NO: 6384 - RNA, 17 nt, Homo sapiens
acauccacugguauugg

SEQ ID NO: 6385 - RNA, 17 nt, Homo sapiens
guauuggcaguuggagg

SEQ ID NO: 6386 - RNA, 17 nt, Homo sapiens
gagugcgccaacgagcc

SEQ ID NO: 6387 - RNA, 17 nt, Homo sapiens
agugcgccaacgagccc

SEQ ID NO: 6388 - RNA, 17 nt, Homo sapiens
caacgagcccagccaag

SEQ ID NO: 6389 - RNA, 17 nt, Homo sapiens
aacgagcccagccaagc

SEQ ID NO: 6390 - RNA, 17 nt, Homo sapiens
acgagcccagccaagcu

SEQ ID NO: 6391 - RNA, 17 nt, Homo sapiens
agcccagccaagcuguc

SEQ ID NO: 6392 - RNA, 17 nt, Homo sapiens
gcccagccaagcugucu

SEQ ID NO: 6393 - RNA, 17 nt, Homo sapiens
agccaagcugucucagu

SEQ ID NO: 6394 - RNA, 17 nt, Homo sapiens
aagcugucucagugaca

SEQ ID NO: 6395 - RNA, 17 nt, Homo sapiens
gcugucucagugacaaa

SEQ ID NO: 6396 - RNA, 17 nt, Homo sapiens
ucagugacaaacccaua

SEQ ID NO: 6397 - RNA, 17 nt, Homo sapiens
ugacaaacccauacccu

SEQ ID NO: 6398 - RNA, 17 nt, Homo sapiens
gacaaacccauacccuu

SEQ ID NO: 6399 - RNA, 17 nt, Homo sapiens
acaaacccauacccuug

SEQ ID NO: 6400 - RNA, 17 nt, Homo sapiens
acccauacccuugugaa

SEQ ID NO: 6401 - RNA, 17 nt, Homo sapiens
cccauacccuugugaag

SEQ ID NO: 6402 - RNA, 17 nt, Homo sapiens
ccauacccuugugaaga

SEQ ID NO: 6403 - RNA, 17 nt, Homo sapiens
uggaggacuuccaggga

SEQ ID NO: 6404 - RNA, 17 nt, Homo sapiens
aggacuuccagggagga

SEQ ID NO: 6405 - RNA, 17 nt, Homo sapiens
ggacuuccagggaggaa

SEQ ID NO: 6406 - RNA, 17 nt, Homo sapiens
uaaaaaucaauuugcuc

SEQ ID NO: 6407 - RNA, 17 nt, Homo sapiens
caauuugcucuaauuga

SEQ ID NO: 6408 - RNA, 17 nt, Homo sapiens
auuugcucuaauugaag

SEQ ID NO: 6409 - RNA, 17 nt, Homo sapiens
gaaaaaacaaaacugua

SEQ ID NO: 6410 - RNA, 17 nt, Homo sapiens
aacaaaacuguaaguac

SEQ ID NO: 6411 - RNA, 17 nt, Homo sapiens
guaaguacccuuguuau

SEQ ID NO: 6412 - RNA, 17 nt, Homo sapiens
uaaguacccuuguuauc

SEQ ID NO: 6413 - RNA, 17 nt, Homo sapiens
aaguacccuuguuaucc

SEQ ID NO: 6414 - RNA, 17 nt, Homo sapiens
uuguuauccaagcggca

SEQ ID NO: 6415 - RNA, 17 nt, Homo sapiens
uguuauccaagcggcaa

SEQ ID NO: 6416 - RNA, 17 nt, Homo sapiens
caagcggcaaauguguc

SEQ ID NO: 6417 - RNA, 17 nt, Homo sapiens
aaugugucagcuuugua

SEQ ID NO: 6418 - RNA, 17 nt, Homo sapiens
gugucagcuuuguacaa

SEQ ID NO: 6419 - RNA, 17 nt, Homo sapiens
cuuuguacaaaugugaa

SEQ ID NO: 6420 - RNA, 17 nt, Homo sapiens
aagcggucaacaaaguc

SEQ ID NO: 6421 - RNA, 17 nt, Homo sapiens
cggucaacaaagucggg

SEQ ID NO: 6422 - RNA, 17 nt, Homo sapiens
gggugaucuccuuccac

SEQ ID NO: 6423 - RNA, 17 nt, Homo sapiens
gugaucuccuuccacgu

SEQ ID NO: 6424 - RNA, 17 nt, Homo sapiens
ugaucuccuuccacgug

SEQ ID NO: 6425 - RNA, 17 nt, Homo sapiens
ucuccuuccacgugacc

SEQ ID NO: 6426 - RNA, 17 nt, Homo sapiens
cuccuuccacgugacca

SEQ ID NO: 6427 - RNA, 17 nt, Homo sapiens
cacgugaccaggggucc

SEQ ID NO: 6428 - RNA, 17 nt, Homo sapiens
acgugaccagggguccu

SEQ ID NO: 6429 - RNA, 17 nt, Homo sapiens
cagggguccugaaauua

SEQ ID NO: 6430 - RNA, 17 nt, Homo sapiens
agggguccugaaauuac

SEQ ID NO: 6431 - RNA, 17 nt, Homo sapiens
gaaauuacuuugcaacc

SEQ ID NO: 6432 - RNA, 17 nt, Homo sapiens
uacuuugcaaccugaca

SEQ ID NO: 6433 - RNA, 17 nt, Homo sapiens
uuugcaaccugacaugc

SEQ ID NO: 6434 - RNA, 17 nt, Homo sapiens
uugcaaccugacaugca

SEQ ID NO: 6435 - RNA, 17 nt, Homo sapiens
aaccugacaugcagccc

SEQ ID NO: 6436 - RNA, 17 nt, Homo sapiens
ugacaugcagcccacug

SEQ ID NO: 6437 - RNA, 17 nt, Homo sapiens
caugcagcccacugagc

SEQ ID NO: 6438 - RNA, 17 nt, Homo sapiens
augcagcccacugagca

SEQ ID NO: 6439 - RNA, 17 nt, Homo sapiens
ugcagcccacugagcag

SEQ ID NO: 6440 - RNA, 17 nt, Homo sapiens
cagcccacugagcagga

SEQ ID NO: 6441 - RNA, 17 nt, Homo sapiens
cacugagcaggagagcg

SEQ ID NO: 6442 - RNA, 17 nt, Homo sapiens
agcgugucuuuguggug

SEQ ID NO: 6443 - RNA, 17 nt, Homo sapiens
uguggugcacugcagac

SEQ ID NO: 6444 - RNA, 17 nt, Homo sapiens
uggugcacugcagacag

SEQ ID NO: 6445 - RNA, 17 nt, Homo sapiens
ugcacugcagacagauc

SEQ ID NO: 6446 - RNA, 17 nt, Homo sapiens
cugcagacagaucuacg

SEQ ID NO: 6447 - RNA, 17 nt, Homo sapiens
gacagaucuacguuuga

SEQ ID NO: 6448 - RNA, 17 nt, Homo sapiens
uugagaaccucacaugg

SEQ ID NO: 6449 - RNA, 17 nt, Homo sapiens
ugagaaccucacauggu

SEQ ID NO: 6450 - RNA, 17 nt, Homo sapiens
agaaccucacaugguac

SEQ ID NO: 6451 - RNA, 17 nt, Homo sapiens
aaccucacaugguacaa

SEQ ID NO: 6452 - RNA, 17 nt, Homo sapiens
caugguacaagcuuggc

SEQ ID NO: 6453 - RNA, 17 nt, Homo sapiens
guacaagcuuggcccac

SEQ ID NO: 6454 - RNA, 17 nt, Homo sapiens
agcuuggcccacagccu

SEQ ID NO: 6455 - RNA, 17 nt, Homo sapiens
gcuuggcccacagccuc

SEQ ID NO: 6456 - RNA, 17 nt, Homo sapiens
cuuggcccacagccucu

SEQ ID NO: 6457 - RNA, 17 nt, Homo sapiens
uggcccacagccucugc

SEQ ID NO: 6458 - RNA, 17 nt, Homo sapiens
cccacagccucugccaa

SEQ ID NO: 6459 - RNA, 17 nt, Homo sapiens
ccacagccucugccaau

SEQ ID NO: 6460 - RNA, 17 nt, Homo sapiens
acagccucugccaaucc

SEQ ID NO: 6461 - RNA, 17 nt, Homo sapiens
gccucugccaauccaug

SEQ ID NO: 6462 - RNA, 17 nt, Homo sapiens
ccucugccaauccaugu

SEQ ID NO: 6463 - RNA, 17 nt, Homo sapiens
ugccaauccauguggga

SEQ ID NO: 6464 - RNA, 17 nt, Homo sapiens
gccaauccaugugggag

SEQ ID NO: 6465 - RNA, 17 nt, Homo sapiens
agaguugcccacaccug

SEQ ID NO: 6466 - RNA, 17 nt, Homo sapiens
gaguugcccacaccugu

SEQ ID NO: 6467 - RNA, 17 nt, Homo sapiens
aguugcccacaccuguu

SEQ ID NO: 6468 - RNA, 17 nt, Homo sapiens
uugcccacaccuguuug

SEQ ID NO: 6469 - RNA, 17 nt, Homo sapiens
gcccacaccuguuugca

SEQ ID NO: 6470 - RNA, 17 nt, Homo sapiens
cccacaccuguuugcaa

SEQ ID NO: 6471 - RNA, 17 nt, Homo sapiens
cuguuugcaagaacuug

SEQ ID NO: 6472 - RNA, 17 nt, Homo sapiens
gcaagaacuuggauacu

SEQ ID NO: 6473 - RNA, 17 nt, Homo sapiens
uuggauacucuuuggaa

SEQ ID NO: 6474 - RNA, 17 nt, Homo sapiens
ggauacucuuuggaaau

SEQ ID NO: 6475 - RNA, 17 nt, Homo sapiens
uugaaugccaccauguu

SEQ ID NO: 6476 - RNA, 17 nt, Homo sapiens
ugaaugccaccauguuc

SEQ ID NO: 6477 - RNA, 17 nt, Homo sapiens
aaugccaccauguucuc

SEQ ID NO: 6478 - RNA, 17 nt, Homo sapiens
augccaccauguucucu

SEQ ID NO: 6479 - RNA, 17 nt, Homo sapiens
ccauguucucuaauagc

SEQ ID NO: 6480 - RNA, 17 nt, Homo sapiens
auguucucuaauagcac

SEQ ID NO: 6481 - RNA, 17 nt, Homo sapiens
cuaauagcacaaaugac

SEQ ID NO: 6482 - RNA, 17 nt, Homo sapiens
aauagcacaaaugacau

SEQ ID NO: 6483 - RNA, 17 nt, Homo sapiens
caaaugacauuuugauc

SEQ ID NO: 6484 - RNA, 17 nt, Homo sapiens
uuuugaucauggagcuu

SEQ ID NO: 6485 - RNA, 17 nt, Homo sapiens
cauggagcuuaagaaug

SEQ ID NO: 6486 - RNA, 17 nt, Homo sapiens
aagaaugcauccuugca

SEQ ID NO: 6487 - RNA, 17 nt, Homo sapiens
aaugcauccuugcagga

SEQ ID NO: 6488 - RNA, 17 nt, Homo sapiens
augcauccuugcaggac

SEQ ID NO: 6489 - RNA, 17 nt, Homo sapiens
auccuugcaggaccaag

SEQ ID NO: 6490 - RNA, 17 nt, Homo sapiens
ugcaggaccaaggagac

SEQ ID NO: 6491 - RNA, 17 nt, Homo sapiens
gcaggaccaaggagacu

SEQ ID NO: 6492 - RNA, 17 nt, Homo sapiens
aaggagacuaugucugc

SEQ ID NO: 6493 - RNA, 17 nt, Homo sapiens
acuaugucugccuugcu

SEQ ID NO: 6494 - RNA, 17 nt, Homo sapiens
augucugccuugcucaa

SEQ ID NO: 6495 - RNA, 17 nt, Homo sapiens
ugucugccuugcucaag

SEQ ID NO: 6496 - RNA, 17 nt, Homo sapiens
ugccuugcucaagacag

SEQ ID NO: 6497 - RNA, 17 nt, Homo sapiens
ccuugcucaagacagga

SEQ ID NO: 6498 - RNA, 17 nt, Homo sapiens
cucaagacaggaagacc

SEQ ID NO: 6499 - RNA, 17 nt, Homo sapiens
aggaagaccaagaaaag

SEQ ID NO: 6500 - RNA, 17 nt, Homo sapiens
ggaagaccaagaaaaga

SEQ ID NO: 6501 - RNA, 17 nt, Homo sapiens
gaaaagacauugcgugg

SEQ ID NO: 6502 - RNA, 17 nt, Homo sapiens
gcguggucaggcagcuc

SEQ ID NO: 6503 - RNA, 17 nt, Homo sapiens
ggucaggcagcucacag

SEQ ID NO: 6504 - RNA, 17 nt, Homo sapiens
caggcagcucacagucc

SEQ ID NO: 6505 - RNA, 17 nt, Homo sapiens
ggcagcucacaguccua

SEQ ID NO: 6506 - RNA, 17 nt, Homo sapiens
cagcucacaguccuaga

SEQ ID NO: 6507 - RNA, 17 nt, Homo sapiens
ucacaguccuagagcgu

SEQ ID NO: 6508 - RNA, 17 nt, Homo sapiens
cacaguccuagagcgug

SEQ ID NO: 6509 - RNA, 17 nt, Homo sapiens
cguguggcacccacgau

SEQ ID NO: 6510 - RNA, 17 nt, Homo sapiens
uguggcacccacgauca

SEQ ID NO: 6511 - RNA, 17 nt, Homo sapiens
guggcacccacgaucac

SEQ ID NO: 6512 - RNA, 17 nt, Homo sapiens
uggcacccacgaucaca

SEQ ID NO: 6513 - RNA, 17 nt, Homo sapiens
ccacgaucacaggaaac

SEQ ID NO: 6514 - RNA, 17 nt, Homo sapiens
acgaucacaggaaaccu

SEQ ID NO: 6515 - RNA, 17 nt, Homo sapiens
caggaaaccuggagaau

SEQ ID NO: 6516 - RNA, 17 nt, Homo sapiens
aggaaaccuggagaauc

SEQ ID NO: 6517 - RNA, 17 nt, Homo sapiens
ggagaaucagacgacaa

SEQ ID NO: 6518 - RNA, 17 nt, Homo sapiens
cagacgacaaguauugg

SEQ ID NO: 6519 - RNA, 17 nt, Homo sapiens
gggaaagcaucgaaguc

SEQ ID NO: 6520 - RNA, 17 nt, Homo sapiens
ucgaagucucaugcacg

SEQ ID NO: 6521 - RNA, 17 nt, Homo sapiens
gaagucucaugcacggc

SEQ ID NO: 6522 - RNA, 17 nt, Homo sapiens
ucucaugcacggcaucu

SEQ ID NO: 6523 - RNA, 17 nt, Homo sapiens
ugcacggcaucugggaa

SEQ ID NO: 6524 - RNA, 17 nt, Homo sapiens
acggcaucugggaaucc

SEQ ID NO: 6525 - RNA, 17 nt, Homo sapiens
ugggaaucccccuccac

SEQ ID NO: 6526 - RNA, 17 nt, Homo sapiens
gggaaucccccuccaca

SEQ ID NO: 6527 - RNA, 17 nt, Homo sapiens
ggaaucccccuccacag

SEQ ID NO: 6528 - RNA, 17 nt, Homo sapiens
gaaucccccuccacaga

SEQ ID NO: 6529 - RNA, 17 nt, Homo sapiens
aaucccccuccacagau

SEQ ID NO: 6530 - RNA, 17 nt, Homo sapiens
ucccccuccacagauca

SEQ ID NO: 6531 - RNA, 17 nt, Homo sapiens
cccccuccacagaucau

SEQ ID NO: 6532 - RNA, 17 nt, Homo sapiens
cccuccacagaucaugu

SEQ ID NO: 6533 - RNA, 17 nt, Homo sapiens
cacagaucaugugguuu

SEQ ID NO: 6534 - RNA, 17 nt, Homo sapiens
aaugagacccuuguaga

SEQ ID NO: 6535 - RNA, 17 nt, Homo sapiens
augagacccuuguagaa

SEQ ID NO: 6536 - RNA, 17 nt, Homo sapiens
ugagacccuuguagaag

SEQ ID NO: 6537 - RNA, 17 nt, Homo sapiens
uagaagacucaggcauu

SEQ ID NO: 6538 - RNA, 17 nt, Homo sapiens
gaagacucaggcauugu

SEQ ID NO: 6539 - RNA, 17 nt, Homo sapiens
acucaggcauuguauug

SEQ ID NO: 6540 - RNA, 17 nt, Homo sapiens
augggaaccggaaccuc

SEQ ID NO: 6541 - RNA, 17 nt, Homo sapiens
accggaaccucacuauc

SEQ ID NO: 6542 - RNA, 17 nt, Homo sapiens
ccggaaccucacuaucc

SEQ ID NO: 6543 - RNA, 17 nt, Homo sapiens
ggaaccucacuauccgc

SEQ ID NO: 6544 - RNA, 17 nt, Homo sapiens
aaccucacuauccgcag

SEQ ID NO: 6545 - RNA, 17 nt, Homo sapiens
ucacuauccgcagagug

SEQ ID NO: 6546 - RNA, 17 nt, Homo sapiens
cuauccgcagagugagg

SEQ ID NO: 6547 - RNA, 17 nt, Homo sapiens
acgaaggccucuacacc

SEQ ID NO: 6548 - RNA, 17 nt, Homo sapiens
cgaaggccucuacaccu

SEQ ID NO: 6549 - RNA, 17 nt, Homo sapiens
aaggccucuacaccugc

SEQ ID NO: 6550 - RNA, 17 nt, Homo sapiens
gccucuacaccugccag

SEQ ID NO: 6551 - RNA, 17 nt, Homo sapiens
cucuacaccugccaggc

SEQ ID NO: 6552 - RNA, 17 nt, Homo sapiens
ucuacaccugccaggca

SEQ ID NO: 6553 - RNA, 17 nt, Homo sapiens
acaccugccaggcaugc

SEQ ID NO: 6554 - RNA, 17 nt, Homo sapiens
caccugccaggcaugca

SEQ ID NO: 6555 - RNA, 17 nt, Homo sapiens
ugccaggcaugcagugu

SEQ ID NO: 6556 - RNA, 17 nt, Homo sapiens
aggcaugcaguguucuu

SEQ ID NO: 6557 - RNA, 17 nt, Homo sapiens
caguguucuuggcugug

SEQ ID NO: 6558 - RNA, 17 nt, Homo sapiens
uucuuggcugugcaaaa

SEQ ID NO: 6559 - RNA, 17 nt, Homo sapiens
ggcugugcaaaagugga

SEQ ID NO: 6560 - RNA, 17 nt, Homo sapiens
guggaggcauuuuucau

SEQ ID NO: 6561 - RNA, 17 nt, Homo sapiens
cauuuuucauaauagaa

SEQ ID NO: 6562 - RNA, 17 nt, Homo sapiens
gaaggugcccaggaaaa

SEQ ID NO: 6563 - RNA, 17 nt, Homo sapiens
aaggugcccaggaaaag

SEQ ID NO: 6564 - RNA, 17 nt, Homo sapiens
aggugcccaggaaaaga

SEQ ID NO: 6565 - RNA, 17 nt, Homo sapiens
agacgaacuuggaaauc

SEQ ID NO: 6566 - RNA, 17 nt, Homo sapiens
uggaaaucauuauucua

SEQ ID NO: 6567 - RNA, 17 nt, Homo sapiens
cauuauucuaguaggca

SEQ ID NO: 6568 - RNA, 17 nt, Homo sapiens
uaguaggcacgacggug

SEQ ID NO: 6569 - RNA, 17 nt, Homo sapiens
gugauugccauguucuu

SEQ ID NO: 6570 - RNA, 17 nt, Homo sapiens
ugauugccauguucuuc

SEQ ID NO: 6571 - RNA, 17 nt, Homo sapiens
ccauguucuucuggcua

SEQ ID NO: 6572 - RNA, 17 nt, Homo sapiens
uguucuucuggcuacuu

SEQ ID NO: 6573 - RNA, 17 nt, Homo sapiens
cuucuggcuacuucuug

SEQ ID NO: 6574 - RNA, 17 nt, Homo sapiens
cuggcuacuucuuguca

SEQ ID NO: 6575 - RNA, 17 nt, Homo sapiens
gcuacuucuugucauca

SEQ ID NO: 6576 - RNA, 17 nt, Homo sapiens
uucuugucaucauccua

SEQ ID NO: 6577 - RNA, 17 nt, Homo sapiens
uugucaucauccuaggg

SEQ ID NO: 6578 - RNA, 17 nt, Homo sapiens
ucaucauccuagggacc

SEQ ID NO: 6579 - RNA, 17 nt, Homo sapiens
caucauccuagggaccg

SEQ ID NO: 6580 - RNA, 17 nt, Homo sapiens
cuagggaccguuaagcg

SEQ ID NO: 6581 - RNA, 17 nt, Homo sapiens
aagcgggccaauggagg

SEQ ID NO: 6582 - RNA, 17 nt, Homo sapiens
agcgggccaauggaggg

SEQ ID NO: 6583 - RNA, 17 nt, Homo sapiens
aggggaacugaagacag

SEQ ID NO: 6584 - RNA, 17 nt, Homo sapiens
cugaagacaggcuacuu

SEQ ID NO: 6585 - RNA, 17 nt, Homo sapiens
agacaggcuacuugucc

SEQ ID NO: 6586 - RNA, 17 nt, Homo sapiens
caggcuacuuguccauc

SEQ ID NO: 6587 - RNA, 17 nt, Homo sapiens
uacuuguccaucgucau

SEQ ID NO: 6588 - RNA, 17 nt, Homo sapiens
acuuguccaucgucaug

SEQ ID NO: 6589 - RNA, 17 nt, Homo sapiens
ccaucgucauggaucca

SEQ ID NO: 6590 - RNA, 17 nt, Homo sapiens
cauggauccagaugaac

SEQ ID NO: 6591 - RNA, 17 nt, Homo sapiens
auggauccagaugaacu

SEQ ID NO: 6592 - RNA, 17 nt, Homo sapiens
agaugaacucccauugg

SEQ ID NO: 6593 - RNA, 17 nt, Homo sapiens
augaacucccauuggau

SEQ ID NO: 6594 - RNA, 17 nt, Homo sapiens
ugaacucccauuggaug

SEQ ID NO: 6595 - RNA, 17 nt, Homo sapiens
gaacucccauuggauga

SEQ ID NO: 6596 - RNA, 17 nt, Homo sapiens
ggaugaacauugugaac

SEQ ID NO: 6597 - RNA, 17 nt, Homo sapiens
ugaacgacugccuuaug

SEQ ID NO: 6598 - RNA, 17 nt, Homo sapiens
acgacugccuuaugaug

SEQ ID NO: 6599 - RNA, 17 nt, Homo sapiens
cgacugccuuaugaugc

SEQ ID NO: 6600 - RNA, 17 nt, Homo sapiens
uaugaugccagcaaaug

SEQ ID NO: 6601 - RNA, 17 nt, Homo sapiens
augaugccagcaaaugg

SEQ ID NO: 6602 - RNA, 17 nt, Homo sapiens
augccagcaaaugggaa

SEQ ID NO: 6603 - RNA, 17 nt, Homo sapiens
gggaauuccccagagac

SEQ ID NO: 6604 - RNA, 17 nt, Homo sapiens
ggaauuccccagagacc

SEQ ID NO: 6605 - RNA, 17 nt, Homo sapiens
gaauuccccagagaccg

SEQ ID NO: 6606 - RNA, 17 nt, Homo sapiens
aauuccccagagaccgg

SEQ ID NO: 6607 - RNA, 17 nt, Homo sapiens
ccagagaccggcugaac

SEQ ID NO: 6608 - RNA, 17 nt, Homo sapiens
agaccggcugaaccuag

SEQ ID NO: 6609 - RNA, 17 nt, Homo sapiens
ggcugaaccuagguaag

SEQ ID NO: 6610 - RNA, 17 nt, Homo sapiens
gcugaaccuagguaagc

SEQ ID NO: 6611 - RNA, 17 nt, Homo sapiens
agguaagccucuuggcc

SEQ ID NO: 6612 - RNA, 17 nt, Homo sapiens
gguaagccucuuggccg

SEQ ID NO: 6613 - RNA, 17 nt, Homo sapiens
uaagccucuuggccgug

SEQ ID NO: 6614 - RNA, 17 nt, Homo sapiens
cucuuggccguggugcc

SEQ ID NO: 6615 - RNA, 17 nt, Homo sapiens
cguggugccuuuggcca

SEQ ID NO: 6616 - RNA, 17 nt, Homo sapiens
guggugccuuuggccaa

SEQ ID NO: 6617 - RNA, 17 nt, Homo sapiens
ccuuuggccaagagauu

SEQ ID NO: 6618 - RNA, 17 nt, Homo sapiens
cuuuggccaagagauug

SEQ ID NO: 6619 - RNA, 17 nt, Homo sapiens
auugaagcagaugccuu

SEQ ID NO: 6620 - RNA, 17 nt, Homo sapiens
gcagaugccuuuggaau

SEQ ID NO: 6621 - RNA, 17 nt, Homo sapiens
cagaugccuuuggaauu

SEQ ID NO: 6622 - RNA, 17 nt, Homo sapiens
gaauugacaagacagca

SEQ ID NO: 6623 - RNA, 17 nt, Homo sapiens
gacaagacagcaacuug

SEQ ID NO: 6624 - RNA, 17 nt, Homo sapiens
aagacagcaacuugcag

SEQ ID NO: 6625 - RNA, 17 nt, Homo sapiens
acagcaacuugcaggac

SEQ ID NO: 6626 - RNA, 17 nt, Homo sapiens
caacuugcaggacagua

SEQ ID NO: 6627 - RNA, 17 nt, Homo sapiens
ugcaggacaguagcagu

SEQ ID NO: 6628 - RNA, 17 nt, Homo sapiens
acaguagcagucaaaau

SEQ ID NO: 6629 - RNA, 17 nt, Homo sapiens
uagcagucaaaauguug

SEQ ID NO: 6630 - RNA, 17 nt, Homo sapiens
gaaggagcaacacacag

SEQ ID NO: 6631 - RNA, 17 nt, Homo sapiens
ggagcaacacacaguga

SEQ ID NO: 6632 - RNA, 17 nt, Homo sapiens
agcaacacacagugagc

SEQ ID NO: 6633 - RNA, 17 nt, Homo sapiens
caacacacagugagcau

SEQ ID NO: 6634 - RNA, 17 nt, Homo sapiens
cagugagcaucgagcuc

SEQ ID NO: 6635 - RNA, 17 nt, Homo sapiens
caucgagcucucauguc

SEQ ID NO: 6636 - RNA, 17 nt, Homo sapiens
ucgagcucucaugucug

SEQ ID NO: 6637 - RNA, 17 nt, Homo sapiens
gagcucucaugucugaa

SEQ ID NO: 6638 - RNA, 17 nt, Homo sapiens
cucaugucugaacucaa

SEQ ID NO: 6639 - RNA, 17 nt, Homo sapiens
gucugaacucaagaucc

SEQ ID NO: 6640 - RNA, 17 nt, Homo sapiens
cugaacucaagauccuc

SEQ ID NO: 6641 - RNA, 17 nt, Homo sapiens
ucaagauccucauucau

SEQ ID NO: 6642 - RNA, 17 nt, Homo sapiens
caagauccucauucaua

SEQ ID NO: 6643 - RNA, 17 nt, Homo sapiens
agauccucauucauauu

SEQ ID NO: 6644 - RNA, 17 nt, Homo sapiens
ccucauucauauugguc

SEQ ID NO: 6645 - RNA, 17 nt, Homo sapiens
uauuggucaccaucuca

SEQ ID NO: 6646 - RNA, 17 nt, Homo sapiens
uuggucaccaucucaau

SEQ ID NO: 6647 - RNA, 17 nt, Homo sapiens
uggucaccaucucaaug

SEQ ID NO: 6648 - RNA, 17 nt, Homo sapiens
ucaccaucucaaugugg

SEQ ID NO: 6649 - RNA, 17 nt, Homo sapiens
accaucucaaugugguc

SEQ ID NO: 6650 - RNA, 17 nt, Homo sapiens
auguggucaaccuucua

SEQ ID NO: 6651 - RNA, 17 nt, Homo sapiens
uggucaaccuucuaggu

SEQ ID NO: 6652 - RNA, 17 nt, Homo sapiens
ggucaaccuucuaggug

SEQ ID NO: 6653 - RNA, 17 nt, Homo sapiens
caaccuucuaggugccu

SEQ ID NO: 6654 - RNA, 17 nt, Homo sapiens
cuaggugccuguaccaa

SEQ ID NO: 6655 - RNA, 17 nt, Homo sapiens
uaggugccuguaccaag

SEQ ID NO: 6656 - RNA, 17 nt, Homo sapiens
gccuguaccaagccagg

SEQ ID NO: 6657 - RNA, 17 nt, Homo sapiens
ccuguaccaagccagga

SEQ ID NO: 6658 - RNA, 17 nt, Homo sapiens
uaccaagccaggagggc

SEQ ID NO: 6659 - RNA, 17 nt, Homo sapiens
accaagccaggagggcc

SEQ ID NO: 6660 - RNA, 17 nt, Homo sapiens
aggagggccacucaugg

SEQ ID NO: 6661 - RNA, 17 nt, Homo sapiens
ggagggccacucauggu

SEQ ID NO: 6662 - RNA, 17 nt, Homo sapiens
agggccacucaugguga

SEQ ID NO: 6663 - RNA, 17 nt, Homo sapiens
ggccacucauggugauu

SEQ ID NO: 6664 - RNA, 17 nt, Homo sapiens
uggaauucugcaaauuu

SEQ ID NO: 6665 - RNA, 17 nt, Homo sapiens
aauucugcaaauuugga

SEQ ID NO: 6666 - RNA, 17 nt, Homo sapiens
uuggaaaccuguccacu

SEQ ID NO: 6667 - RNA, 17 nt, Homo sapiens
uggaaaccuguccacuu

SEQ ID NO: 6668 - RNA, 17 nt, Homo sapiens
aaccuguccacuuaccu

SEQ ID NO: 6669 - RNA, 17 nt, Homo sapiens
accuguccacuuaccug

SEQ ID NO: 6670 - RNA, 17 nt, Homo sapiens
cuguccacuuaccugag

SEQ ID NO: 6671 - RNA, 17 nt, Homo sapiens
ccacuuaccugaggagc

SEQ ID NO: 6672 - RNA, 17 nt, Homo sapiens
cacuuaccugaggagca

SEQ ID NO: 6673 - RNA, 17 nt, Homo sapiens
ugaggagcaagagaaau

SEQ ID NO: 6674 - RNA, 17 nt, Homo sapiens
aauuuguccccuacaag

SEQ ID NO: 6675 - RNA, 17 nt, Homo sapiens
auuuguccccuacaaga

SEQ ID NO: 6676 - RNA, 17 nt, Homo sapiens
uuuguccccuacaagac

SEQ ID NO: 6677 - RNA, 17 nt, Homo sapiens
uuguccccuacaagacc

SEQ ID NO: 6678 - RNA, 17 nt, Homo sapiens
uccccuacaagaccaaa

SEQ ID NO: 6679 - RNA, 17 nt, Homo sapiens
uacaagaccaaaggggc

SEQ ID NO: 6680 - RNA, 17 nt, Homo sapiens
acaagaccaaaggggca

SEQ ID NO: 6681 - RNA, 17 nt, Homo sapiens
aaaggggcacgauuccg

SEQ ID NO: 6682 - RNA, 17 nt, Homo sapiens
cacgauuccgucaaggg

SEQ ID NO: 6683 - RNA, 17 nt, Homo sapiens
auuccgucaagggaaag

SEQ ID NO: 6684 - RNA, 17 nt, Homo sapiens
ggaaagacuacguugga

SEQ ID NO: 6685 - RNA, 17 nt, Homo sapiens
guuggagcaaucccugu

SEQ ID NO: 6686 - RNA, 17 nt, Homo sapiens
gagcaaucccuguggau

SEQ ID NO: 6687 - RNA, 17 nt, Homo sapiens
agcaaucccuguggauc

SEQ ID NO: 6688 - RNA, 17 nt, Homo sapiens
gcaaucccuguggaucu

SEQ ID NO: 6689 - RNA, 17 nt, Homo sapiens
uguggaucugaaacggc

SEQ ID NO: 6690 - RNA, 17 nt, Homo sapiens
aacggcgcuuggacagc

SEQ ID NO: 6691 - RNA, 17 nt, Homo sapiens
gcuuggacagcaucacc

SEQ ID NO: 6692 - RNA, 17 nt, Homo sapiens
uggacagcaucaccagu

SEQ ID NO: 6693 - RNA, 17 nt, Homo sapiens
acagcaucaccaguagc

SEQ ID NO: 6694 - RNA, 17 nt, Homo sapiens
agcaucaccaguagcca

SEQ ID NO: 6695 - RNA, 17 nt, Homo sapiens
gcaucaccaguagccag

SEQ ID NO: 6696 - RNA, 17 nt, Homo sapiens
ccaguagccagagcuca

SEQ ID NO: 6697 - RNA, 17 nt, Homo sapiens
caguagccagagcucag

SEQ ID NO: 6698 - RNA, 17 nt, Homo sapiens
gccagagcucagccagc

SEQ ID NO: 6699 - RNA, 17 nt, Homo sapiens
cagagcucagccagcuc

SEQ ID NO: 6700 - RNA, 17 nt, Homo sapiens
agcucagccagcucugg

SEQ ID NO: 6701 - RNA, 17 nt, Homo sapiens
gcucagccagcucugga

SEQ ID NO: 6702 - RNA, 17 nt, Homo sapiens
cagccagcucuggauuu

SEQ ID NO: 6703 - RNA, 17 nt, Homo sapiens
gccagcucuggauuugu

SEQ ID NO: 6704 - RNA, 17 nt, Homo sapiens
gagaagucccucaguga

SEQ ID NO: 6705 - RNA, 17 nt, Homo sapiens
agaagucccucagugau

SEQ ID NO: 6706 - RNA, 17 nt, Homo sapiens
gaagucccucagugaug

SEQ ID NO: 6707 - RNA, 17 nt, Homo sapiens
agucccucagugaugua

SEQ ID NO: 6708 - RNA, 17 nt, Homo sapiens
gaggaagcuccugaaga

SEQ ID NO: 6709 - RNA, 17 nt, Homo sapiens
ggaagcuccugaagauc

SEQ ID NO: 6710 - RNA, 17 nt, Homo sapiens
gaagcuccugaagaucu

SEQ ID NO: 6711 - RNA, 17 nt, Homo sapiens
ugaagaucuguauaagg

SEQ ID NO: 6712 - RNA, 17 nt, Homo sapiens
auaaggacuuccugacc

SEQ ID NO: 6713 - RNA, 17 nt, Homo sapiens
aggacuuccugaccuug

SEQ ID NO: 6714 - RNA, 17 nt, Homo sapiens
ggacuuccugaccuugg

SEQ ID NO: 6715 - RNA, 17 nt, Homo sapiens
uuccugaccuuggagca

SEQ ID NO: 6716 - RNA, 17 nt, Homo sapiens
uccugaccuuggagcau

SEQ ID NO: 6717 - RNA, 17 nt, Homo sapiens
cuuggagcaucucaucu

SEQ ID NO: 6718 - RNA, 17 nt, Homo sapiens
ggagcaucucaucuguu

SEQ ID NO: 6719 - RNA, 17 nt, Homo sapiens
agcaucucaucuguuac

SEQ ID NO: 6720 - RNA, 17 nt, Homo sapiens
aucucaucuguuacagc

SEQ ID NO: 6721 - RNA, 17 nt, Homo sapiens
ucuguuacagcuuccaa

SEQ ID NO: 6722 - RNA, 17 nt, Homo sapiens
guuacagcuuccaagug

SEQ ID NO: 6723 - RNA, 17 nt, Homo sapiens
acagcuuccaaguggcu

SEQ ID NO: 6724 - RNA, 17 nt, Homo sapiens
cagcuuccaaguggcua

SEQ ID NO: 6725 - RNA, 17 nt, Homo sapiens
caaguggcuaagggcau

SEQ ID NO: 6726 - RNA, 17 nt, Homo sapiens
cuaagggcauggaguuc

SEQ ID NO: 6727 - RNA, 17 nt, Homo sapiens
uggaguucuuggcaucg

SEQ ID NO: 6728 - RNA, 17 nt, Homo sapiens
uucuuggcaucgcgaaa

SEQ ID NO: 6729 - RNA, 17 nt, Homo sapiens
aguguauccacagggac

SEQ ID NO: 6730 - RNA, 17 nt, Homo sapiens
guguauccacagggacc

SEQ ID NO: 6731 - RNA, 17 nt, Homo sapiens
guauccacagggaccug

SEQ ID NO: 6732 - RNA, 17 nt, Homo sapiens
acagggaccuggcggca

SEQ ID NO: 6733 - RNA, 17 nt, Homo sapiens
cagggaccuggcggcac

SEQ ID NO: 6734 - RNA, 17 nt, Homo sapiens
cuggcggcacgaaauau

SEQ ID NO: 6735 - RNA, 17 nt, Homo sapiens
gaaauauccucuuaucg

SEQ ID NO: 6736 - RNA, 17 nt, Homo sapiens
aaauauccucuuaucgg

SEQ ID NO: 6737 - RNA, 17 nt, Homo sapiens
auauccucuuaucggag

SEQ ID NO: 6738 - RNA, 17 nt, Homo sapiens
uuaaaaucugugacuuu

SEQ ID NO: 6739 - RNA, 17 nt, Homo sapiens
ucugugacuuuggcuug

SEQ ID NO: 6740 - RNA, 17 nt, Homo sapiens
acuuuggcuuggcccgg

SEQ ID NO: 6741 - RNA, 17 nt, Homo sapiens
ggcuuggcccgggauau

SEQ ID NO: 6742 - RNA, 17 nt, Homo sapiens
gcuuggcccgggauauu

SEQ ID NO: 6743 - RNA, 17 nt, Homo sapiens
uaaagauccagauuaug

SEQ ID NO: 6744 - RNA, 17 nt, Homo sapiens
aaagauccagauuaugu

SEQ ID NO: 6745 - RNA, 17 nt, Homo sapiens
auuaugucagaaaagga

SEQ ID NO: 6746 - RNA, 17 nt, Homo sapiens
ggagaugcucgccuccc

SEQ ID NO: 6747 - RNA, 17 nt, Homo sapiens
augcucgccucccuuug

SEQ ID NO: 6748 - RNA, 17 nt, Homo sapiens
ugcucgccucccuuuga

SEQ ID NO: 6749 - RNA, 17 nt, Homo sapiens
cucgccucccuuugaaa

SEQ ID NO: 6750 - RNA, 17 nt, Homo sapiens
ucgccucccuuugaaau

SEQ ID NO: 6751 - RNA, 17 nt, Homo sapiens
cgccucccuuugaaaug

SEQ ID NO: 6752 - RNA, 17 nt, Homo sapiens
uggauggccccagaaac

SEQ ID NO: 6753 - RNA, 17 nt, Homo sapiens
ggauggccccagaaaca

SEQ ID NO: 6754 - RNA, 17 nt, Homo sapiens
gauggccccagaaacaa

SEQ ID NO: 6755 - RNA, 17 nt, Homo sapiens
auggccccagaaacaau

SEQ ID NO: 6756 - RNA, 17 nt, Homo sapiens
ccagaaacaauuuuuga

SEQ ID NO: 6757 - RNA, 17 nt, Homo sapiens
uuuuugacagaguguac

SEQ ID NO: 6758 - RNA, 17 nt, Homo sapiens
gaguguacacaauccag

SEQ ID NO: 6759 - RNA, 17 nt, Homo sapiens
guguacacaauccagag

SEQ ID NO: 6760 - RNA, 17 nt, Homo sapiens
acacaauccagagugac

SEQ ID NO: 6761 - RNA, 17 nt, Homo sapiens
cacaauccagagugacg

SEQ ID NO: 6762 - RNA, 17 nt, Homo sapiens
gugacgucuggucuuuu

SEQ ID NO: 6763 - RNA, 17 nt, Homo sapiens
gucuggucuuuuggugu

SEQ ID NO: 6764 - RNA, 17 nt, Homo sapiens
uguuuugcugugggaaa

SEQ ID NO: 6765 - RNA, 17 nt, Homo sapiens
auauuuuccuuaggugc

SEQ ID NO: 6766 - RNA, 17 nt, Homo sapiens
uauuuuccuuaggugcu

SEQ ID NO: 6767 - RNA, 17 nt, Homo sapiens
uuaggugcuucuccaua

SEQ ID NO: 6768 - RNA, 17 nt, Homo sapiens
ggugcuucuccauaucc

SEQ ID NO: 6769 - RNA, 17 nt, Homo sapiens
ugcuucuccauauccug

SEQ ID NO: 6770 - RNA, 17 nt, Homo sapiens
gcuucuccauauccugg

SEQ ID NO: 6771 - RNA, 17 nt, Homo sapiens
uccauauccugggguaa

SEQ ID NO: 6772 - RNA, 17 nt, Homo sapiens
ccauauccugggguaaa

SEQ ID NO: 6773 - RNA, 17 nt, Homo sapiens
gaaggaacuagaaugag

SEQ ID NO: 6774 - RNA, 17 nt, Homo sapiens
augagggccccugauua

SEQ ID NO: 6775 - RNA, 17 nt, Homo sapiens
ugagggccccugauuau

SEQ ID NO: 6776 - RNA, 17 nt, Homo sapiens
gagggccccugauuaua

SEQ ID NO: 6777 - RNA, 17 nt, Homo sapiens
agggccccugauuauac

SEQ ID NO: 6778 - RNA, 17 nt, Homo sapiens
gauuauacuacaccaga

SEQ ID NO: 6779 - RNA, 17 nt, Homo sapiens
uauacuacaccagaaau

SEQ ID NO: 6780 - RNA, 17 nt, Homo sapiens
uacuacaccagaaaugu

SEQ ID NO: 6781 - RNA, 17 nt, Homo sapiens
acuacaccagaaaugua

SEQ ID NO: 6782 - RNA, 17 nt, Homo sapiens
aaauguaccagaccaug

SEQ ID NO: 6783 - RNA, 17 nt, Homo sapiens
aauguaccagaccaugc

SEQ ID NO: 6784 - RNA, 17 nt, Homo sapiens
uaccagaccaugcugga

SEQ ID NO: 6785 - RNA, 17 nt, Homo sapiens
accagaccaugcuggac

SEQ ID NO: 6786 - RNA, 17 nt, Homo sapiens
gaccaugcuggacugcu

SEQ ID NO: 6787 - RNA, 17 nt, Homo sapiens
uggacugcuggcacggg

SEQ ID NO: 6788 - RNA, 17 nt, Homo sapiens
cugcuggcacggggagc

SEQ ID NO: 6789 - RNA, 17 nt, Homo sapiens
cggggagcccagucaga

SEQ ID NO: 6790 - RNA, 17 nt, Homo sapiens
ggggagcccagucagag

SEQ ID NO: 6791 - RNA, 17 nt, Homo sapiens
gggagcccagucagaga

SEQ ID NO: 6792 - RNA, 17 nt, Homo sapiens
gcccagucagagaccca

SEQ ID NO: 6793 - RNA, 17 nt, Homo sapiens
ucagagacccacguuuu

SEQ ID NO: 6794 - RNA, 17 nt, Homo sapiens
cagagacccacguuuuc

SEQ ID NO: 6795 - RNA, 17 nt, Homo sapiens
agagacccacguuuuca

SEQ ID NO: 6796 - RNA, 17 nt, Homo sapiens
acguuuucagaguuggu

SEQ ID NO: 6797 - RNA, 17 nt, Homo sapiens
gguggaacauuugggaa

SEQ ID NO: 6798 - RNA, 17 nt, Homo sapiens
gggaaaucucuugcaag

SEQ ID NO: 6799 - RNA, 17 nt, Homo sapiens
gaaaucucuugcaagcu

SEQ ID NO: 6800 - RNA, 17 nt, Homo sapiens
ucucuugcaagcuaaug

SEQ ID NO: 6801 - RNA, 17 nt, Homo sapiens
uugcaagcuaaugcuca

SEQ ID NO: 6802 - RNA, 17 nt, Homo sapiens
gcuaaugcucagcagga

SEQ ID NO: 6803 - RNA, 17 nt, Homo sapiens
uaaugcucagcaggaug

SEQ ID NO: 6804 - RNA, 17 nt, Homo sapiens
ugcucagcaggauggca

SEQ ID NO: 6805 - RNA, 17 nt, Homo sapiens
aggauggcaaagacuac

SEQ ID NO: 6806 - RNA, 17 nt, Homo sapiens
gcaaagacuacauuguu

SEQ ID NO: 6807 - RNA, 17 nt, Homo sapiens
aagacuacauuguucuu

SEQ ID NO: 6808 - RNA, 17 nt, Homo sapiens
cauuguucuuccgauau

SEQ ID NO: 6809 - RNA, 17 nt, Homo sapiens
uguucuuccgauaucag

SEQ ID NO: 6810 - RNA, 17 nt, Homo sapiens
ccgauaucagagacuuu

SEQ ID NO: 6811 - RNA, 17 nt, Homo sapiens
ucagagacuuugagcau

SEQ ID NO: 6812 - RNA, 17 nt, Homo sapiens
cuuugagcauggaagag

SEQ ID NO: 6813 - RNA, 17 nt, Homo sapiens
gaggauucuggacucuc

SEQ ID NO: 6814 - RNA, 17 nt, Homo sapiens
uucuggacucucucugc

SEQ ID NO: 6815 - RNA, 17 nt, Homo sapiens
cuggacucucucugccu

SEQ ID NO: 6816 - RNA, 17 nt, Homo sapiens
ggacucucucugccuac

SEQ ID NO: 6817 - RNA, 17 nt, Homo sapiens
acucucucugccuaccu

SEQ ID NO: 6818 - RNA, 17 nt, Homo sapiens
cucucugccuaccucac

SEQ ID NO: 6819 - RNA, 17 nt, Homo sapiens
ucucugccuaccucacc

SEQ ID NO: 6820 - RNA, 17 nt, Homo sapiens
cugccuaccucaccugu

SEQ ID NO: 6821 - RNA, 17 nt, Homo sapiens
ugccuaccucaccuguu

SEQ ID NO: 6822 - RNA, 17 nt, Homo sapiens
ccuaccucaccuguuuc

SEQ ID NO: 6823 - RNA, 17 nt, Homo sapiens
uaccucaccuguuuccu

SEQ ID NO: 6824 - RNA, 17 nt, Homo sapiens
accucaccuguuuccug

SEQ ID NO: 6825 - RNA, 17 nt, Homo sapiens
ccuguuuccuguaugga

SEQ ID NO: 6826 - RNA, 17 nt, Homo sapiens
cuguuuccuguauggag

SEQ ID NO: 6827 - RNA, 17 nt, Homo sapiens
uaugugaccccaaauuc

SEQ ID NO: 6828 - RNA, 17 nt, Homo sapiens
augugaccccaaauucc

SEQ ID NO: 6829 - RNA, 17 nt, Homo sapiens
ugugaccccaaauucca

SEQ ID NO: 6830 - RNA, 17 nt, Homo sapiens
gugaccccaaauuccau

SEQ ID NO: 6831 - RNA, 17 nt, Homo sapiens
ccaaauuccauuaugac

SEQ ID NO: 6832 - RNA, 17 nt, Homo sapiens
caaauuccauuaugaca

SEQ ID NO: 6833 - RNA, 17 nt, Homo sapiens
auuaugacaacacagca

SEQ ID NO: 6834 - RNA, 17 nt, Homo sapiens
augacaacacagcagga

SEQ ID NO: 6835 - RNA, 17 nt, Homo sapiens
gacaacacagcaggaau

SEQ ID NO: 6836 - RNA, 17 nt, Homo sapiens
aacacagcaggaaucag

SEQ ID NO: 6837 - RNA, 17 nt, Homo sapiens
caggaaucagucaguau

SEQ ID NO: 6838 - RNA, 17 nt, Homo sapiens
aaucagucaguaucugc

SEQ ID NO: 6839 - RNA, 17 nt, Homo sapiens
ucaguaucugcagaaca

SEQ ID NO: 6840 - RNA, 17 nt, Homo sapiens
guaucugcagaacagua

SEQ ID NO: 6841 - RNA, 17 nt, Homo sapiens
ugcagaacaguaagcga

SEQ ID NO: 6842 - RNA, 17 nt, Homo sapiens
gaaagagccggccugug

SEQ ID NO: 6843 - RNA, 17 nt, Homo sapiens
gagccggccugugagug

SEQ ID NO: 6844 - RNA, 17 nt, Homo sapiens
agccggccugugagugu

SEQ ID NO: 6845 - RNA, 17 nt, Homo sapiens
guaaaaacauuugaaga

SEQ ID NO: 6846 - RNA, 17 nt, Homo sapiens
aagauaucccguuagaa

SEQ ID NO: 6847 - RNA, 17 nt, Homo sapiens
agauaucccguuagaag

SEQ ID NO: 6848 - RNA, 17 nt, Homo sapiens
agaagaaccagaaguaa

SEQ ID NO: 6849 - RNA, 17 nt, Homo sapiens
gaagaaccagaaguaaa

SEQ ID NO: 6850 - RNA, 17 nt, Homo sapiens
aaguaaucccagaugac

SEQ ID NO: 6851 - RNA, 17 nt, Homo sapiens
aguaaucccagaugaca

SEQ ID NO: 6852 - RNA, 17 nt, Homo sapiens
guaaucccagaugacaa

SEQ ID NO: 6853 - RNA, 17 nt, Homo sapiens
cagaugacaaccagacg

SEQ ID NO: 6854 - RNA, 17 nt, Homo sapiens
augacaaccagacggac

SEQ ID NO: 6855 - RNA, 17 nt, Homo sapiens
ugacaaccagacggaca

SEQ ID NO: 6856 - RNA, 17 nt, Homo sapiens
agacggacagugguaug

SEQ ID NO: 6857 - RNA, 17 nt, Homo sapiens
uaugguucuugccucag

SEQ ID NO: 6858 - RNA, 17 nt, Homo sapiens
guucuugccucagaaga

SEQ ID NO: 6859 - RNA, 17 nt, Homo sapiens
uucuugccucagaagag

SEQ ID NO: 6860 - RNA, 17 nt, Homo sapiens
cuugccucagaagagcu

SEQ ID NO: 6861 - RNA, 17 nt, Homo sapiens
agaagagcugaaaacuu

SEQ ID NO: 6862 - RNA, 17 nt, Homo sapiens
cugaaaacuuuggaaga

SEQ ID NO: 6863 - RNA, 17 nt, Homo sapiens
uggaagacagaaccaaa

SEQ ID NO: 6864 - RNA, 17 nt, Homo sapiens
gacagaaccaaauuauc

SEQ ID NO: 6865 - RNA, 17 nt, Homo sapiens
acagaaccaaauuaucu

SEQ ID NO: 6866 - RNA, 17 nt, Homo sapiens
aaauuaucuccaucuuu

SEQ ID NO: 6867 - RNA, 17 nt, Homo sapiens
auuaucuccaucuuuug

SEQ ID NO: 6868 - RNA, 17 nt, Homo sapiens
uuaucuccaucuuuugg

SEQ ID NO: 6869 - RNA, 17 nt, Homo sapiens
ucuccaucuuuuggugg

SEQ ID NO: 6870 - RNA, 17 nt, Homo sapiens
aauggugcccagcaaaa

SEQ ID NO: 6871 - RNA, 17 nt, Homo sapiens
auggugcccagcaaaag

SEQ ID NO: 6872 - RNA, 17 nt, Homo sapiens
uggugcccagcaaaagc

SEQ ID NO: 6873 - RNA, 17 nt, Homo sapiens
ugcccagcaaaagcagg

SEQ ID NO: 6874 - RNA, 17 nt, Homo sapiens
gcaaaagcagggagucu

SEQ ID NO: 6875 - RNA, 17 nt, Homo sapiens
agggagucuguggcauc

SEQ ID NO: 6876 - RNA, 17 nt, Homo sapiens
ucuguggcaucugaagg

SEQ ID NO: 6877 - RNA, 17 nt, Homo sapiens
guggcaucugaaggcuc

SEQ ID NO: 6878 - RNA, 17 nt, Homo sapiens
cugaaggcucaaaccag

SEQ ID NO: 6879 - RNA, 17 nt, Homo sapiens
gaaggcucaaaccagac

SEQ ID NO: 6880 - RNA, 17 nt, Homo sapiens
gcucaaaccagacaagc

SEQ ID NO: 6881 - RNA, 17 nt, Homo sapiens
cucaaaccagacaagcg

SEQ ID NO: 6882 - RNA, 17 nt, Homo sapiens
aaccagacaagcggcua

SEQ ID NO: 6883 - RNA, 17 nt, Homo sapiens
caagcggcuaccagucc

SEQ ID NO: 6884 - RNA, 17 nt, Homo sapiens
gcggcuaccaguccgga

SEQ ID NO: 6885 - RNA, 17 nt, Homo sapiens
cggcuaccaguccggau

SEQ ID NO: 6886 - RNA, 17 nt, Homo sapiens
uaccaguccggauauca

SEQ ID NO: 6887 - RNA, 17 nt, Homo sapiens
cggauaucacuccgaug

SEQ ID NO: 6888 - RNA, 17 nt, Homo sapiens
gauaucacuccgaugac

SEQ ID NO: 6889 - RNA, 17 nt, Homo sapiens
uaucacuccgaugacac

SEQ ID NO: 6890 - RNA, 17 nt, Homo sapiens
ccgaugacacagacacc

SEQ ID NO: 6891 - RNA, 17 nt, Homo sapiens
gaugacacagacaccac

SEQ ID NO: 6892 - RNA, 17 nt, Homo sapiens
acacagacaccaccgug

SEQ ID NO: 6893 - RNA, 17 nt, Homo sapiens
acagacaccaccgugua

SEQ ID NO: 6894 - RNA, 17 nt, Homo sapiens
cagacaccaccguguac

SEQ ID NO: 6895 - RNA, 17 nt, Homo sapiens
gacaccaccguguacuc

SEQ ID NO: 6896 - RNA, 17 nt, Homo sapiens
ccguguacuccagugag

SEQ ID NO: 6897 - RNA, 17 nt, Homo sapiens
guguacuccagugagga

SEQ ID NO: 6898 - RNA, 17 nt, Homo sapiens
uguacuccagugaggaa

SEQ ID NO: 6899 - RNA, 17 nt, Homo sapiens
gaggaagcagaacuuuu

SEQ ID NO: 6900 - RNA, 17 nt, Homo sapiens
agcagaacuuuuaaagc

SEQ ID NO: 6901 - RNA, 17 nt, Homo sapiens
uuuaaagcugauagaga

SEQ ID NO: 6902 - RNA, 17 nt, Homo sapiens
uggagugcaaaccggua

SEQ ID NO: 6903 - RNA, 17 nt, Homo sapiens
gugcaaaccgguagcac

SEQ ID NO: 6904 - RNA, 17 nt, Homo sapiens
ccgguagcacagcccag

SEQ ID NO: 6905 - RNA, 17 nt, Homo sapiens
gguagcacagcccagau

SEQ ID NO: 6906 - RNA, 17 nt, Homo sapiens
agcacagcccagauucu

SEQ ID NO: 6907 - RNA, 17 nt, Homo sapiens
gcacagcccagauucuc

SEQ ID NO: 6908 - RNA, 17 nt, Homo sapiens
cacagcccagauucucc

SEQ ID NO: 6909 - RNA, 17 nt, Homo sapiens
ccagauucuccagccug

SEQ ID NO: 6910 - RNA, 17 nt, Homo sapiens
agauucuccagccugac

SEQ ID NO: 6911 - RNA, 17 nt, Homo sapiens
gauucuccagccugaca

SEQ ID NO: 6912 - RNA, 17 nt, Homo sapiens
ucuccagccugacacgg

SEQ ID NO: 6913 - RNA, 17 nt, Homo sapiens
cuccagccugacacggg

SEQ ID NO: 6914 - RNA, 17 nt, Homo sapiens
agccugacacggggacc

SEQ ID NO: 6915 - RNA, 17 nt, Homo sapiens
acggggaccacacugag

SEQ ID NO: 6916 - RNA, 17 nt, Homo sapiens
cggggaccacacugagc

SEQ ID NO: 6917 - RNA, 17 nt, Homo sapiens
gggaccacacugagcuc

SEQ ID NO: 6918 - RNA, 17 nt, Homo sapiens
gaccacacugagcucuc

SEQ ID NO: 6919 - RNA, 17 nt, Homo sapiens
cacugagcucuccuccu

SEQ ID NO: 6920 - RNA, 17 nt, Homo sapiens
cugagcucuccuccugu

SEQ ID NO: 6921 - RNA, 17 nt, Homo sapiens
gagcucuccuccuguuu

SEQ ID NO: 6922 - RNA, 17 nt, Homo sapiens
agcucuccuccuguuua

SEQ ID NO: 6923 - RNA, 17 nt, Homo sapiens
cucuccuccuguuuaaa

SEQ ID NO: 6924 - RNA, 17 nt, Homo sapiens
ucuccuccuguuuaaaa

SEQ ID NO: 6925 - RNA, 17 nt, Homo sapiens
aaggaagcauccacacc

SEQ ID NO: 6926 - RNA, 17 nt, Homo sapiens
gaagcauccacacccca

SEQ ID NO: 6927 - RNA, 17 nt, Homo sapiens
aagcauccacaccccaa

SEQ ID NO: 6928 - RNA, 17 nt, Homo sapiens
gcauccacaccccaacu

SEQ ID NO: 6929 - RNA, 17 nt, Homo sapiens
auccacaccccaacucc

SEQ ID NO: 6930 - RNA, 17 nt, Homo sapiens
uccacaccccaacuccc

SEQ ID NO: 6931 - RNA, 17 nt, Homo sapiens
ccacaccccaacucccg

SEQ ID NO: 6932 - RNA, 17 nt, Homo sapiens
cacaccccaacucccgg

SEQ ID NO: 6933 - RNA, 17 nt, Homo sapiens
accccaacucccggaca

SEQ ID NO: 6934 - RNA, 17 nt, Homo sapiens
cccaacucccggacauc

SEQ ID NO: 6935 - RNA, 17 nt, Homo sapiens
ccaacucccggacauca

SEQ ID NO: 6936 - RNA, 17 nt, Homo sapiens
ucccggacaucacauga

SEQ ID NO: 6937 - RNA, 17 nt, Homo sapiens
cggacaucacaugagag

SEQ ID NO: 6938 - RNA, 17 nt, Homo sapiens
gacaucacaugagaggu

SEQ ID NO: 6939 - RNA, 17 nt, Homo sapiens
gagaggucugcucagau

SEQ ID NO: 6940 - RNA, 17 nt, Homo sapiens
aggucugcucagauuuu

SEQ ID NO: 6941 - RNA, 17 nt, Homo sapiens
gucugcucagauuuuga

SEQ ID NO: 6942 - RNA, 17 nt, Homo sapiens
uguuguucuuuccacca

SEQ ID NO: 6943 - RNA, 17 nt, Homo sapiens
guucuuuccaccagcag

SEQ ID NO: 6944 - RNA, 17 nt, Homo sapiens
uucuuuccaccagcagg

SEQ ID NO: 6945 - RNA, 17 nt, Homo sapiens
cuuuccaccagcaggaa

SEQ ID NO: 6946 - RNA, 17 nt, Homo sapiens
uuuccaccagcaggaag

SEQ ID NO: 6947 - RNA, 17 nt, Homo sapiens
ccaccagcaggaaguag

SEQ ID NO: 6948 - RNA, 17 nt, Homo sapiens
gaaguagccgcauuuga

SEQ ID NO: 6949 - RNA, 17 nt, Homo sapiens
guagccgcauuugauuu

SEQ ID NO: 6950 - RNA, 17 nt, Homo sapiens
ugauuuucauuucgaca

SEQ ID NO: 6951 - RNA, 17 nt, Homo sapiens
auuucgacaacagaaaa

SEQ ID NO: 6952 - RNA, 17 nt, Homo sapiens
ucgacaacagaaaaagg

SEQ ID NO: 6953 - RNA, 17 nt, Homo sapiens
aaaaggaccucggacug

SEQ ID NO: 6954 - RNA, 17 nt, Homo sapiens
aaaggaccucggacugc

SEQ ID NO: 6955 - RNA, 17 nt, Homo sapiens
ccucggacugcagggag

SEQ ID NO: 6956 - RNA, 17 nt, Homo sapiens
cggacugcagggagcca

SEQ ID NO: 6957 - RNA, 17 nt, Homo sapiens
cagggagccagcucuuc

SEQ ID NO: 6958 - RNA, 17 nt, Homo sapiens
agggagccagcucuucu

SEQ ID NO: 6959 - RNA, 17 nt, Homo sapiens
gagccagcucuucuagg

SEQ ID NO: 6960 - RNA, 17 nt, Homo sapiens
gccagcucuucuaggcu

SEQ ID NO: 6961 - RNA, 17 nt, Homo sapiens
agcucuucuaggcuugu

SEQ ID NO: 6962 - RNA, 16 nt, Homo sapiens
gcaaggugcugcuggc

SEQ ID NO: 6963 - RNA, 16 nt, Homo sapiens
gcuggccgucgcccug

SEQ ID NO: 6964 - RNA, 16 nt, Homo sapiens
cuguggcucugcgugg

SEQ ID NO: 6965 - RNA, 16 nt, Homo sapiens
gacccgggccgccucu

SEQ ID NO: 6966 - RNA, 16 nt, Homo sapiens
cuguggguuugccuag

SEQ ID NO: 6967 - RNA, 16 nt, Homo sapiens
uguuucucuugaucug

SEQ ID NO: 6968 - RNA, 16 nt, Homo sapiens
cucuugaucugcccag

SEQ ID NO: 6969 - RNA, 16 nt, Homo sapiens
caaauuacuugcaggg

SEQ ID NO: 6970 - RNA, 16 nt, Homo sapiens
gaguggcagugagcaa

SEQ ID NO: 6971 - RNA, 16 nt, Homo sapiens
ggguggaggugacuga

SEQ ID NO: 6972 - RNA, 16 nt, Homo sapiens
ggaggugacugagugc

SEQ ID NO: 6973 - RNA, 16 nt, Homo sapiens
gugacugagugcagcg

SEQ ID NO: 6974 - RNA, 16 nt, Homo sapiens
ugagugcagcgauggc

SEQ ID NO: 6975 - RNA, 16 nt, Homo sapiens
uuccaaaagugaucgg

SEQ ID NO: 6976 - RNA, 16 nt, Homo sapiens
gaucggaaaugacacu

SEQ ID NO: 6977 - RNA, 16 nt, Homo sapiens
gccuacaagugcuucu

SEQ ID NO: 6978 - RNA, 16 nt, Homo sapiens
ccgggaaacugacuug

SEQ ID NO: 6979 - RNA, 16 nt, Homo sapiens
uccauuuauugcuucu

SEQ ID NO: 6980 - RNA, 16 nt, Homo sapiens
uucuguuagugaccaa

SEQ ID NO: 6981 - RNA, 16 nt, Homo sapiens
guacauuacugagaac

SEQ ID NO: 6982 - RNA, 16 nt, Homo sapiens
aaacuguggugauucc

SEQ ID NO: 6983 - RNA, 16 nt, Homo sapiens
gucacuuugugcaaga

SEQ ID NO: 6984 - RNA, 16 nt, Homo sapiens
auuuguuccugauggu

SEQ ID NO: 6985 - RNA, 16 nt, Homo sapiens
ccagcuacaugaucag

SEQ ID NO: 6986 - RNA, 16 nt, Homo sapiens
gaucagcuaugcuggc

SEQ ID NO: 6987 - RNA, 16 nt, Homo sapiens
ggucuucugugaagca

SEQ ID NO: 6988 - RNA, 16 nt, Homo sapiens
aaaaauuaaugaugaa

SEQ ID NO: 6989 - RNA, 16 nt, Homo sapiens
aauuaaugaugaaagu

SEQ ID NO: 6990 - RNA, 16 nt, Homo sapiens
uaggauuuaugaugug

SEQ ID NO: 6991 - RNA, 16 nt, Homo sapiens
augugguucugagucc

SEQ ID NO: 6992 - RNA, 16 nt, Homo sapiens
ucauggaauugaacua

SEQ ID NO: 6993 - RNA, 16 nt, Homo sapiens
agcaagaacugaacua

SEQ ID NO: 6994 - RNA, 16 nt, Homo sapiens
uguggggauugacuuc

SEQ ID NO: 6995 - RNA, 16 nt, Homo sapiens
acccuucuucgaagca

SEQ ID NO: 6996 - RNA, 16 nt, Homo sapiens
cuuguaaaccgagacc

SEQ ID NO: 6997 - RNA, 16 nt, Homo sapiens
gucugggagugagaug

SEQ ID NO: 6998 - RNA, 16 nt, Homo sapiens
ggagugagaugaagaa

SEQ ID NO: 6999 - RNA, 16 nt, Homo sapiens
agaaauuuuugagcac

SEQ ID NO: 7000 - RNA, 16 nt, Homo sapiens
aacccggagugaccaa

SEQ ID NO: 7001 - RNA, 16 nt, Homo sapiens
guacaccugugcagca

SEQ ID NO: 7002 - RNA, 16 nt, Homo sapiens
ccagugggcugaugac

SEQ ID NO: 7003 - RNA, 16 nt, Homo sapiens
gugggcugaugaccaa

SEQ ID NO: 7004 - RNA, 16 nt, Homo sapiens
caggguccaugaaaaa

SEQ ID NO: 7005 - RNA, 16 nt, Homo sapiens
accuuuuguugcuuuu

SEQ ID NO: 7006 - RNA, 16 nt, Homo sapiens
cagaaucccugcgaag

SEQ ID NO: 7007 - RNA, 16 nt, Homo sapiens
gaaucccugcgaagua

SEQ ID NO: 7008 - RNA, 16 nt, Homo sapiens
aauaccccuugagucc

SEQ ID NO: 7009 - RNA, 16 nt, Homo sapiens
ggcauguacugacgau

SEQ ID NO: 7010 - RNA, 16 nt, Homo sapiens
auguacugacgauuau

SEQ ID NO: 7011 - RNA, 16 nt, Homo sapiens
uuauggaagugaguga

SEQ ID NO: 7012 - RNA, 16 nt, Homo sapiens
ggaagugagugaaaga

SEQ ID NO: 7013 - RNA, 16 nt, Homo sapiens
ccagauuggugagaaa

SEQ ID NO: 7014 - RNA, 16 nt, Homo sapiens
ccacucaaacgcugac

SEQ ID NO: 7015 - RNA, 16 nt, Homo sapiens
cucaaacgcugacaug

SEQ ID NO: 7016 - RNA, 16 nt, Homo sapiens
uacggucuaugccauu

SEQ ID NO: 7017 - RNA, 16 nt, Homo sapiens
uuccucccccgcauca

SEQ ID NO: 7018 - RNA, 16 nt, Homo sapiens
gaggaagagugcgcca

SEQ ID NO: 7019 - RNA, 16 nt, Homo sapiens
ggaagagugcgccaac

SEQ ID NO: 7020 - RNA, 16 nt, Homo sapiens
gugcgccaacgagccc

SEQ ID NO: 7021 - RNA, 16 nt, Homo sapiens
cugucucagugacaaa

SEQ ID NO: 7022 - RNA, 16 nt, Homo sapiens
auacccuugugaagaa

SEQ ID NO: 7023 - RNA, 16 nt, Homo sapiens
aaauaaaauugaaguu

SEQ ID NO: 7024 - RNA, 16 nt, Homo sapiens
aaaucaauuugcucua

SEQ ID NO: 7025 - RNA, 16 nt, Homo sapiens
ugcucuaauugaagga

SEQ ID NO: 7026 - RNA, 16 nt, Homo sapiens
guacaaaugugaagcg

SEQ ID NO: 7027 - RNA, 16 nt, Homo sapiens
gagagagggugaucuc

SEQ ID NO: 7028 - RNA, 16 nt, Homo sapiens
ccuuccacgugaccag

SEQ ID NO: 7029 - RNA, 16 nt, Homo sapiens
cagggguccugaaauu

SEQ ID NO: 7030 - RNA, 16 nt, Homo sapiens
aaauuacuuugcaacc

SEQ ID NO: 7031 - RNA, 16 nt, Homo sapiens
uuugcaaccugacaug

SEQ ID NO: 7032 - RNA, 16 nt, Homo sapiens
aaccugacaugcagcc

SEQ ID NO: 7033 - RNA, 16 nt, Homo sapiens
gcagcccacugagcag

SEQ ID NO: 7034 - RNA, 16 nt, Homo sapiens
ucuuuguggugcacug

SEQ ID NO: 7035 - RNA, 16 nt, Homo sapiens
guggugcacugcagac

SEQ ID NO: 7036 - RNA, 16 nt, Homo sapiens
aucuacguuugagaac

SEQ ID NO: 7037 - RNA, 16 nt, Homo sapiens
cacagccucugccaau

SEQ ID NO: 7038 - RNA, 16 nt, Homo sapiens
ugggagaguugcccac

SEQ ID NO: 7039 - RNA, 16 nt, Homo sapiens
acaccuguuugcaaga

SEQ ID NO: 7040 - RNA, 16 nt, Homo sapiens
uuuggaaauugaaugc

SEQ ID NO: 7041 - RNA, 16 nt, Homo sapiens
gaaauugaaugccacc

SEQ ID NO: 7042 - RNA, 16 nt, Homo sapiens
uagcacaaaugacauu

SEQ ID NO: 7043 - RNA, 16 nt, Homo sapiens
augacauuuugaucau

SEQ ID NO: 7044 - RNA, 16 nt, Homo sapiens
gcuuaagaaugcaucc

SEQ ID NO: 7045 - RNA, 16 nt, Homo sapiens
augcauccuugcagga

SEQ ID NO: 7046 - RNA, 16 nt, Homo sapiens
gacuaugucugccuug

SEQ ID NO: 7047 - RNA, 16 nt, Homo sapiens
ugucugccuugcucaa

SEQ ID NO: 7048 - RNA, 16 nt, Homo sapiens
aaaagacauugcgugg

SEQ ID NO: 7049 - RNA, 16 nt, Homo sapiens
uggcacccacgaucac

SEQ ID NO: 7050 - RNA, 16 nt, Homo sapiens
agaaucagacgacaag

SEQ ID NO: 7051 - RNA, 16 nt, Homo sapiens
ggaaagcaucgaaguc

SEQ ID NO: 7052 - RNA, 16 nt, Homo sapiens
gaagucucaugcacgg

SEQ ID NO: 7053 - RNA, 16 nt, Homo sapiens
uaaagauaaugagacc

SEQ ID NO: 7054 - RNA, 16 nt, Homo sapiens
gcauuguauugaagga

SEQ ID NO: 7055 - RNA, 16 nt, Homo sapiens
cucacuauccgcagag

SEQ ID NO: 7056 - RNA, 16 nt, Homo sapiens
uccgcagagugaggaa

SEQ ID NO: 7057 - RNA, 16 nt, Homo sapiens
gaaggaggacgaaggc

SEQ ID NO: 7058 - RNA, 16 nt, Homo sapiens
cucuacaccugccagg

SEQ ID NO: 7059 - RNA, 16 nt, Homo sapiens
ugccaggcaugcagug

SEQ ID NO: 7060 - RNA, 16 nt, Homo sapiens
ucuuggcugugcaaaa

SEQ ID NO: 7061 - RNA, 16 nt, Homo sapiens
aauagaaggugcccag

SEQ ID NO: 7062 - RNA, 16 nt, Homo sapiens
aggaaaagacgaacuu

SEQ ID NO: 7063 - RNA, 16 nt, Homo sapiens
uaguaggcacgacggu

SEQ ID NO: 7064 - RNA, 16 nt, Homo sapiens
gcacgacggugauugc

SEQ ID NO: 7065 - RNA, 16 nt, Homo sapiens
gacggugauugccaug

SEQ ID NO: 7066 - RNA, 16 nt, Homo sapiens
gaggggaacugaagac

SEQ ID NO: 7067 - RNA, 16 nt, Homo sapiens
ggauccagaugaacuc

SEQ ID NO: 7068 - RNA, 16 nt, Homo sapiens
cccauuggaugaacau

SEQ ID NO: 7069 - RNA, 16 nt, Homo sapiens
ugaacauugugaacga

SEQ ID NO: 7070 - RNA, 16 nt, Homo sapiens
cauugugaacgacugc

SEQ ID NO: 7071 - RNA, 16 nt, Homo sapiens
gugaacgacugccuua

SEQ ID NO: 7072 - RNA, 16 nt, Homo sapiens
acugccuuaugaugcc

SEQ ID NO: 7073 - RNA, 16 nt, Homo sapiens
gccuuaugaugccagc

SEQ ID NO: 7074 - RNA, 16 nt, Homo sapiens
gagaccggcugaaccu

SEQ ID NO: 7075 - RNA, 16 nt, Homo sapiens
uggccguggugccuuu

SEQ ID NO: 7076 - RNA, 16 nt, Homo sapiens
ccaagagauugaagca

SEQ ID NO: 7077 - RNA, 16 nt, Homo sapiens
ugaagcagaugccuuu

SEQ ID NO: 7078 - RNA, 16 nt, Homo sapiens
cuuuggaauugacaag

SEQ ID NO: 7079 - RNA, 16 nt, Homo sapiens
acagcaacuugcagga

SEQ ID NO: 7080 - RNA, 16 nt, Homo sapiens
ucaaaauguugaaaga

SEQ ID NO: 7081 - RNA, 16 nt, Homo sapiens
aacacacagugagcau

SEQ ID NO: 7082 - RNA, 16 nt, Homo sapiens
agugagcaucgagcuc

SEQ ID NO: 7083 - RNA, 16 nt, Homo sapiens
ucucaugucugaacuc

SEQ ID NO: 7084 - RNA, 16 nt, Homo sapiens
ccuucuaggugccugu

SEQ ID NO: 7085 - RNA, 16 nt, Homo sapiens
cacucauggugauugu

SEQ ID NO: 7086 - RNA, 16 nt, Homo sapiens
guggaauucugcaaau

SEQ ID NO: 7087 - RNA, 16 nt, Homo sapiens
ccacuuaccugaggag

SEQ ID NO: 7088 - RNA, 16 nt, Homo sapiens
caagagaaaugaauuu

SEQ ID NO: 7089 - RNA, 16 nt, Homo sapiens
aaaggggcacgauucc

SEQ ID NO: 7090 - RNA, 16 nt, Homo sapiens
cuguggaucugaaacg

SEQ ID NO: 7091 - RNA, 16 nt, Homo sapiens
cugaaacggcgcuugg

SEQ ID NO: 7092 - RNA, 16 nt, Homo sapiens
gucccucagugaugua

SEQ ID NO: 7093 - RNA, 16 nt, Homo sapiens
ggaagcuccugaagau

SEQ ID NO: 7094 - RNA, 16 nt, Homo sapiens
aggacuuccugaccuu

SEQ ID NO: 7095 - RNA, 16 nt, Homo sapiens
ucuuggcaucgcgaaa

SEQ ID NO: 7096 - RNA, 16 nt, Homo sapiens
uuggcaucgcgaaagu

SEQ ID NO: 7097 - RNA, 16 nt, Homo sapiens
cuggcggcacgaaaua

SEQ ID NO: 7098 - RNA, 16 nt, Homo sapiens
uaaaaucugugacuuu

SEQ ID NO: 7099 - RNA, 16 nt, Homo sapiens
aaaaggagaugcucgc

SEQ ID NO: 7100 - RNA, 16 nt, Homo sapiens
ggagaugcucgccucc

SEQ ID NO: 7101 - RNA, 16 nt, Homo sapiens
gccucccuuugaaaug

SEQ ID NO: 7102 - RNA, 16 nt, Homo sapiens
aacaauuuuugacaga

SEQ ID NO: 7103 - RNA, 16 nt, Homo sapiens
aauccagagugacguc

SEQ ID NO: 7104 - RNA, 16 nt, Homo sapiens
uugguguuuugcugug

SEQ ID NO: 7105 - RNA, 16 nt, Homo sapiens
uuccuuaggugcuucu

SEQ ID NO: 7106 - RNA, 16 nt, Homo sapiens
gguaaagauugaugaa

SEQ ID NO: 7107 - RNA, 16 nt, Homo sapiens
aaagauugaugaagaa

SEQ ID NO: 7108 - RNA, 16 nt, Homo sapiens
uuuuguaggcgauuga

SEQ ID NO: 7109 - RNA, 16 nt, Homo sapiens
guaggcgauugaaaga

SEQ ID NO: 7110 - RNA, 16 nt, Homo sapiens
gaacuagaaugagggc

SEQ ID NO: 7111 - RNA, 16 nt, Homo sapiens
gagggccccugauuau

SEQ ID NO: 7112 - RNA, 16 nt, Homo sapiens
accagaccaugcugga

SEQ ID NO: 7113 - RNA, 16 nt, Homo sapiens
gaaaucucuugcaagc

SEQ ID NO: 7114 - RNA, 16 nt, Homo sapiens
gcaagcuaaugcucag

SEQ ID NO: 7115 - RNA, 16 nt, Homo sapiens
uuguucuuccgauauc

SEQ ID NO: 7116 - RNA, 16 nt, Homo sapiens
cagagacuuugagcau

SEQ ID NO: 7117 - RNA, 16 nt, Homo sapiens
gacucucucugccuac

SEQ ID NO: 7118 - RNA, 16 nt, Homo sapiens
ggaaguaugugacccc

SEQ ID NO: 7119 - RNA, 16 nt, Homo sapiens
auuccauuaugacaac

SEQ ID NO: 7120 - RNA, 16 nt, Homo sapiens
gucaguaucugcagaa

SEQ ID NO: 7121 - RNA, 16 nt, Homo sapiens
aacaguaagcgaaaga

SEQ ID NO: 7122 - RNA, 16 nt, Homo sapiens
gccggccugugagugu

SEQ ID NO: 7123 - RNA, 16 nt, Homo sapiens
aaaaacauuugaagau

SEQ ID NO: 7124 - RNA, 16 nt, Homo sapiens
aaucccagaugacaac

SEQ ID NO: 7125 - RNA, 16 nt, Homo sapiens
uaugguucuugccuca

SEQ ID NO: 7126 - RNA, 16 nt, Homo sapiens
cagaagagcugaaaac

SEQ ID NO: 7127 - RNA, 16 nt, Homo sapiens
guggaauggugcccag

SEQ ID NO: 7128 - RNA, 16 nt, Homo sapiens
uguggcaucugaaggc

SEQ ID NO: 7129 - RNA, 16 nt, Homo sapiens
auaucacuccgaugac

SEQ ID NO: 7130 - RNA, 16 nt, Homo sapiens
ucacuccgaugacaca

SEQ ID NO: 7131 - RNA, 16 nt, Homo sapiens
guacuccagugaggaa

SEQ ID NO: 7132 - RNA, 16 nt, Homo sapiens
uuuuaaagcugauaga

SEQ ID NO: 7133 - RNA, 16 nt, Homo sapiens
agauuggagugcaaac

SEQ ID NO: 7134 - RNA, 16 nt, Homo sapiens
ucuccagccugacacg

SEQ ID NO: 7135 - RNA, 16 nt, Homo sapiens
ggaccacacugagcuc

SEQ ID NO: 7136 - RNA, 16 nt, Homo sapiens
gacaucacaugagagg

SEQ ID NO: 7137 - RNA, 16 nt, Homo sapiens
ugagaggucugcucag

SEQ ID NO: 7138 - RNA, 16 nt, Homo sapiens
cucagauuuugaagug

SEQ ID NO: 7139 - RNA, 16 nt, Homo sapiens
ggaaguagccgcauuu

SEQ ID NO: 7140 - RNA, 16 nt, Homo sapiens
agccgcauuugauuuu

SEQ ID NO: 7141 - RNA, 16 nt, Homo sapiens
uuuucauuucgacaac

SEQ ID NO: 7142 - RNA, 16 nt, Homo sapiens
accucggacugcaggg

SEQ ID NO: 7143 - RNA, 17 nt, Homo sapiens
uccucucggcuccuccc

SEQ ID NO: 7144 - RNA, 17 nt, Homo sapiens
ccuccccggcagcggcg

SEQ ID NO: 7145 - RNA, 17 nt, Homo sapiens
ccccggcagcggcggcg

SEQ ID NO: 7146 - RNA, 17 nt, Homo sapiens
cggcagcggcggcggcu

SEQ ID NO: 7147 - RNA, 17 nt, Homo sapiens
cagcggcggcggcucgg

SEQ ID NO: 7148 - RNA, 17 nt, Homo sapiens
cggcggcggcucggagc

SEQ ID NO: 7149 - RNA, 17 nt, Homo sapiens
ggcucggagcgggcucc

SEQ ID NO: 7150 - RNA, 17 nt, Homo sapiens
cggagcgggcuccgggg

SEQ ID NO: 7151 - RNA, 17 nt, Homo sapiens
gcuccggggcucgggug

SEQ ID NO: 7152 - RNA, 17 nt, Homo sapiens
gggcucgggugcagcgg

SEQ ID NO: 7153 - RNA, 17 nt, Homo sapiens
gcucgggugcagcggcc

SEQ ID NO: 7154 - RNA, 17 nt, Homo sapiens
cgggugcagcggccagc

SEQ ID NO: 7155 - RNA, 17 nt, Homo sapiens
gugcagcggccagcggg

SEQ ID NO: 7156 - RNA, 17 nt, Homo sapiens
agcggccagcgggccug

SEQ ID NO: 7157 - RNA, 17 nt, Homo sapiens
gccagcgggccuggcgg

SEQ ID NO: 7158 - RNA, 17 nt, Homo sapiens
cgggccuggcggcgagg

SEQ ID NO: 7159 - RNA, 17 nt, Homo sapiens
gccuggcggcgaggauu

SEQ ID NO: 7160 - RNA, 17 nt, Homo sapiens
cggcgaggauuacccgg

SEQ ID NO: 7161 - RNA, 17 nt, Homo sapiens
ccggggaagugguuguc

SEQ ID NO: 7162 - RNA, 17 nt, Homo sapiens
gggaagugguugucucc

SEQ ID NO: 7163 - RNA, 17 nt, Homo sapiens
aagugguugucuccugg

SEQ ID NO: 7164 - RNA, 17 nt, Homo sapiens
gucuccuggcuggagcc

SEQ ID NO: 7165 - RNA, 17 nt, Homo sapiens
uggcuggagccgcgaga

SEQ ID NO: 7166 - RNA, 17 nt, Homo sapiens
cuggagccgcgagacgg

SEQ ID NO: 7167 - RNA, 17 nt, Homo sapiens
gccgcgagacgggcgcu

SEQ ID NO: 7168 - RNA, 17 nt, Homo sapiens
cgagacgggcgcucagg

SEQ ID NO: 7169 - RNA, 17 nt, Homo sapiens
agacgggcgcucagggc

SEQ ID NO: 7170 - RNA, 17 nt, Homo sapiens
cgcucagggcgcggggc

SEQ ID NO: 7171 - RNA, 17 nt, Homo sapiens
cucagggcgcggggccg

SEQ ID NO: 7172 - RNA, 17 nt, Homo sapiens
ggcgcggggccggcggc

SEQ ID NO: 7173 - RNA, 17 nt, Homo sapiens
cggggccggcggcggcg

SEQ ID NO: 7174 - RNA, 17 nt, Homo sapiens
ggccggcggcggcgaac

SEQ ID NO: 7175 - RNA, 17 nt, Homo sapiens
cggcggcggcgaacgag

SEQ ID NO: 7176 - RNA, 17 nt, Homo sapiens
ggcggcgaacgagagga

SEQ ID NO: 7177 - RNA, 17 nt, Homo sapiens
acgagaggacggacucu

SEQ ID NO: 7178 - RNA, 17 nt, Homo sapiens
gaggacggacucuggcg

SEQ ID NO: 7179 - RNA, 17 nt, Homo sapiens
ggacucuggcggccggg

SEQ ID NO: 7180 - RNA, 17 nt, Homo sapiens
cucuggcggccgggucg

SEQ ID NO: 7181 - RNA, 17 nt, Homo sapiens
gcggccgggucguuggc

SEQ ID NO: 7182 - RNA, 17 nt, Homo sapiens
gccgggucguuggccgg

SEQ ID NO: 7183 - RNA, 17 nt, Homo sapiens
ggucguuggccggggga

SEQ ID NO: 7184 - RNA, 17 nt, Homo sapiens
ccgggggagcgcgggca

SEQ ID NO: 7185 - RNA, 17 nt, Homo sapiens
gggggagcgcgggcacc

SEQ ID NO: 7186 - RNA, 17 nt, Homo sapiens
gagcgcgggcaccgggc

SEQ ID NO: 7187 - RNA, 17 nt, Homo sapiens
ggcaccgggcgagcagg

SEQ ID NO: 7188 - RNA, 17 nt, Homo sapiens
ccgggcgagcaggccgc

SEQ ID NO: 7189 - RNA, 17 nt, Homo sapiens
gcgagcaggccgcgucg

SEQ ID NO: 7190 - RNA, 17 nt, Homo sapiens
agcaggccgcgucgcgc

SEQ ID NO: 7191 - RNA, 17 nt, Homo sapiens
caggccgcgucgcgcuc

SEQ ID NO: 7192 - RNA, 17 nt, Homo sapiens
gccgcgucgcgcucacc

SEQ ID NO: 7193 - RNA, 17 nt, Homo sapiens
cgcgucgcgcucaccau

SEQ ID NO: 7194 - RNA, 17 nt, Homo sapiens
ucaccauggucagcuac

SEQ ID NO: 7195 - RNA, 17 nt, Homo sapiens
cauggucagcuacuggg

SEQ ID NO: 7196 - RNA, 17 nt, Homo sapiens
cuacugggacaccgggg

SEQ ID NO: 7197 - RNA, 17 nt, Homo sapiens
acaccgggguccugcug

SEQ ID NO: 7198 - RNA, 17 nt, Homo sapiens
gggguccugcugugcgc

SEQ ID NO: 7199 - RNA, 17 nt, Homo sapiens
guccugcugugcgcgcu

SEQ ID NO: 7200 - RNA, 17 nt, Homo sapiens
ccugcugugcgcgcugc

SEQ ID NO: 7201 - RNA, 17 nt, Homo sapiens
ugcugugcgcgcugcuc

SEQ ID NO: 7202 - RNA, 17 nt, Homo sapiens
cugugcgcgcugcucag

SEQ ID NO: 7203 - RNA, 17 nt, Homo sapiens
ugcgcgcugcucagcug

SEQ ID NO: 7204 - RNA, 17 nt, Homo sapiens
gcugcucagcugucugc

SEQ ID NO: 7205 - RNA, 17 nt, Homo sapiens
gcucagcugucugcuuc

SEQ ID NO: 7206 - RNA, 17 nt, Homo sapiens
agcugucugcuucucac

SEQ ID NO: 7207 - RNA, 17 nt, Homo sapiens
cucacaggaucuaguuc

SEQ ID NO: 7208 - RNA, 17 nt, Homo sapiens
aggaucuaguucagguu

SEQ ID NO: 7209 - RNA, 17 nt, Homo sapiens
uaguucagguucaaaau

SEQ ID NO: 7210 - RNA, 17 nt, Homo sapiens
gguucaaaauuaaaaga

SEQ ID NO: 7211 - RNA, 17 nt, Homo sapiens
auuaaaagauccugaac

SEQ ID NO: 7212 - RNA, 17 nt, Homo sapiens
gauccugaacugaguuu

SEQ ID NO: 7213 - RNA, 17 nt, Homo sapiens
ugaacugaguuuaaaag

SEQ ID NO: 7214 - RNA, 17 nt, Homo sapiens
uuuaaaaggcacccagc

SEQ ID NO: 7215 - RNA, 17 nt, Homo sapiens
ggcacccagcacaucau

SEQ ID NO: 7216 - RNA, 17 nt, Homo sapiens
cacaucaugcaagcagg

SEQ ID NO: 7217 - RNA, 17 nt, Homo sapiens
ucaugcaagcaggccag

SEQ ID NO: 7218 - RNA, 17 nt, Homo sapiens
gcaagcaggccagacac

SEQ ID NO: 7219 - RNA, 17 nt, Homo sapiens
caggccagacacugcau

SEQ ID NO: 7220 - RNA, 17 nt, Homo sapiens
cagacacugcaucucca

SEQ ID NO: 7221 - RNA, 17 nt, Homo sapiens
caucuccaaugcagggg

SEQ ID NO: 7222 - RNA, 17 nt, Homo sapiens
ucuccaaugcagggggg

SEQ ID NO: 7223 - RNA, 17 nt, Homo sapiens
ggggggaagcagcccau

SEQ ID NO: 7224 - RNA, 17 nt, Homo sapiens
gggaagcagcccauaaa

SEQ ID NO: 7225 - RNA, 17 nt, Homo sapiens
gcccauaaauggucuuu

SEQ ID NO: 7226 - RNA, 17 nt, Homo sapiens
cauaaauggucuuugcc

SEQ ID NO: 7227 - RNA, 17 nt, Homo sapiens
uggucuuugccugaaau

SEQ ID NO: 7228 - RNA, 17 nt, Homo sapiens
ugccugaaauggugagu

SEQ ID NO: 7229 - RNA, 17 nt, Homo sapiens
cugaaauggugaguaag

SEQ ID NO: 7230 - RNA, 17 nt, Homo sapiens
aauggugaguaaggaaa

SEQ ID NO: 7231 - RNA, 17 nt, Homo sapiens
uaaggaaagcgaaaggc

SEQ ID NO: 7232 - RNA, 17 nt, Homo sapiens
agcgaaaggcugagcau

SEQ ID NO: 7233 - RNA, 17 nt, Homo sapiens
aaggcugagcauaacua

SEQ ID NO: 7234 - RNA, 17 nt, Homo sapiens
ugagcauaacuaaaucu

SEQ ID NO: 7235 - RNA, 17 nt, Homo sapiens
auaacuaaaucugccug

SEQ ID NO: 7236 - RNA, 17 nt, Homo sapiens
cuaaaucugccugugga

SEQ ID NO: 7237 - RNA, 17 nt, Homo sapiens
aucugccuguggaagaa

SEQ ID NO: 7238 - RNA, 17 nt, Homo sapiens
uggaagaaauggcaaac

SEQ ID NO: 7239 - RNA, 17 nt, Homo sapiens
aagaaauggcaaacaau

SEQ ID NO: 7240 - RNA, 17 nt, Homo sapiens
aauggcaaacaauucug

SEQ ID NO: 7241 - RNA, 17 nt, Homo sapiens
ggcaaacaauucugcag

SEQ ID NO: 7242 - RNA, 17 nt, Homo sapiens
acaauucugcaguacuu

SEQ ID NO: 7243 - RNA, 17 nt, Homo sapiens
auucugcaguacuuuaa

SEQ ID NO: 7244 - RNA, 17 nt, Homo sapiens
guacuuuaaccuugaac

SEQ ID NO: 7245 - RNA, 17 nt, Homo sapiens
aaccuugaacacagcuc

SEQ ID NO: 7246 - RNA, 17 nt, Homo sapiens
ugaacacagcucaagca

SEQ ID NO: 7247 - RNA, 17 nt, Homo sapiens
cagcucaagcaaaccac

SEQ ID NO: 7248 - RNA, 17 nt, Homo sapiens
ucaagcaaaccacacug

SEQ ID NO: 7249 - RNA, 17 nt, Homo sapiens
ccacacuggcuucuaca

SEQ ID NO: 7250 - RNA, 17 nt, Homo sapiens
cuucuacagcugcaaau

SEQ ID NO: 7251 - RNA, 17 nt, Homo sapiens
cuacagcugcaaauauc

SEQ ID NO: 7252 - RNA, 17 nt, Homo sapiens
agcugcaaauaucuagc

SEQ ID NO: 7253 - RNA, 17 nt, Homo sapiens
aauaucuagcuguaccu

SEQ ID NO: 7254 - RNA, 17 nt, Homo sapiens
aucuagcuguaccuacu

SEQ ID NO: 7255 - RNA, 17 nt, Homo sapiens
agaaggaaacagaaucu

SEQ ID NO: 7256 - RNA, 17 nt, Homo sapiens
gaaacagaaucugcaau

SEQ ID NO: 7257 - RNA, 17 nt, Homo sapiens
cagaaucugcaaucuau

SEQ ID NO: 7258 - RNA, 17 nt, Homo sapiens
aaucugcaaucuauaua

SEQ ID NO: 7259 - RNA, 17 nt, Homo sapiens
auuuauuagugauacag

SEQ ID NO: 7260 - RNA, 17 nt, Homo sapiens
uauuagugauacaggua

SEQ ID NO: 7261 - RNA, 17 nt, Homo sapiens
ugauacagguagaccuu

SEQ ID NO: 7262 - RNA, 17 nt, Homo sapiens
acagguagaccuuucgu

SEQ ID NO: 7263 - RNA, 17 nt, Homo sapiens
gaccuuucguagagaug

SEQ ID NO: 7264 - RNA, 17 nt, Homo sapiens
ucguagagauguacagu

SEQ ID NO: 7265 - RNA, 17 nt, Homo sapiens
guagagauguacaguga

SEQ ID NO: 7266 - RNA, 17 nt, Homo sapiens
gauguacagugaaaucc

SEQ ID NO: 7267 - RNA, 17 nt, Homo sapiens
acagugaaauccccgaa

SEQ ID NO: 7268 - RNA, 17 nt, Homo sapiens
uccccgaaauuauacac

SEQ ID NO: 7269 - RNA, 17 nt, Homo sapiens
uacacaugacugaagga

SEQ ID NO: 7270 - RNA, 17 nt, Homo sapiens
ggaagggagcucgucau

SEQ ID NO: 7271 - RNA, 17 nt, Homo sapiens
gggagcucgucauuccc

SEQ ID NO: 7272 - RNA, 17 nt, Homo sapiens
cauucccugccggguua

SEQ ID NO: 7273 - RNA, 17 nt, Homo sapiens
ccugccggguuacguca

SEQ ID NO: 7274 - RNA, 17 nt, Homo sapiens
cggguuacgucaccuaa

SEQ ID NO: 7275 - RNA, 17 nt, Homo sapiens
gucaccuaacaucacug

SEQ ID NO: 7276 - RNA, 17 nt, Homo sapiens
acaucacuguuacuuua

SEQ ID NO: 7277 - RNA, 17 nt, Homo sapiens
uuaaaaaaguuuccacu

SEQ ID NO: 7278 - RNA, 17 nt, Homo sapiens
uccacuugacacuuuga

SEQ ID NO: 7279 - RNA, 17 nt, Homo sapiens
acacuuugaucccugau

SEQ ID NO: 7280 - RNA, 17 nt, Homo sapiens
gaucccugauggaaaac

SEQ ID NO: 7281 - RNA, 17 nt, Homo sapiens
gauggaaaacgcauaau

SEQ ID NO: 7282 - RNA, 17 nt, Homo sapiens
uggaaaacgcauaaucu

SEQ ID NO: 7283 - RNA, 17 nt, Homo sapiens
aacgcauaaucugggac

SEQ ID NO: 7284 - RNA, 17 nt, Homo sapiens
aaucugggacaguagaa

SEQ ID NO: 7285 - RNA, 17 nt, Homo sapiens
cugggacaguagaaagg

SEQ ID NO: 7286 - RNA, 17 nt, Homo sapiens
uagaaagggcuucauca

SEQ ID NO: 7287 - RNA, 17 nt, Homo sapiens
cauaucaaaugcaacgu

SEQ ID NO: 7288 - RNA, 17 nt, Homo sapiens
uaucaaaugcaacguac

SEQ ID NO: 7289 - RNA, 17 nt, Homo sapiens
caaaugcaacguacaaa

SEQ ID NO: 7290 - RNA, 17 nt, Homo sapiens
aaugcaacguacaaaga

SEQ ID NO: 7291 - RNA, 17 nt, Homo sapiens
acaaagaaauagggcuu

SEQ ID NO: 7292 - RNA, 17 nt, Homo sapiens
gaaauagggcuucugac

SEQ ID NO: 7293 - RNA, 17 nt, Homo sapiens
ggcuucugaccugugaa

SEQ ID NO: 7294 - RNA, 17 nt, Homo sapiens
ucugaccugugaagcaa

SEQ ID NO: 7295 - RNA, 17 nt, Homo sapiens
ccugugaagcaacaguc

SEQ ID NO: 7296 - RNA, 17 nt, Homo sapiens
gugaagcaacagucaau

SEQ ID NO: 7297 - RNA, 17 nt, Homo sapiens
aagcaacagucaauggg

SEQ ID NO: 7298 - RNA, 17 nt, Homo sapiens
aacagucaaugggcauu

SEQ ID NO: 7299 - RNA, 17 nt, Homo sapiens
gucaaugggcauuugua

SEQ ID NO: 7300 - RNA, 17 nt, Homo sapiens
gggcauuuguauaagac

SEQ ID NO: 7301 - RNA, 17 nt, Homo sapiens
uguauaagacaaacuau

SEQ ID NO: 7302 - RNA, 17 nt, Homo sapiens
uaagacaaacuaucuca

SEQ ID NO: 7303 - RNA, 17 nt, Homo sapiens
acacaucgacaaaccaa

SEQ ID NO: 7304 - RNA, 17 nt, Homo sapiens
aucgacaaaccaauaca

SEQ ID NO: 7305 - RNA, 17 nt, Homo sapiens
acaaaccaauacaauca

SEQ ID NO: 7306 - RNA, 17 nt, Homo sapiens
ccaauacaaucauagau

SEQ ID NO: 7307 - RNA, 17 nt, Homo sapiens
aaucauagauguccaaa

SEQ ID NO: 7308 - RNA, 17 nt, Homo sapiens
ucauagauguccaaaua

SEQ ID NO: 7309 - RNA, 17 nt, Homo sapiens
auguccaaauaagcaca

SEQ ID NO: 7310 - RNA, 17 nt, Homo sapiens
ccaaauaagcacaccac

SEQ ID NO: 7311 - RNA, 17 nt, Homo sapiens
cacaccacgcccaguca

SEQ ID NO: 7312 - RNA, 17 nt, Homo sapiens
cacgcccagucaaauua

SEQ ID NO: 7313 - RNA, 17 nt, Homo sapiens
ccagucaaauuacuuag

SEQ ID NO: 7314 - RNA, 17 nt, Homo sapiens
acuuagaggccauacuc

SEQ ID NO: 7315 - RNA, 17 nt, Homo sapiens
auacucuuguccucaau

SEQ ID NO: 7316 - RNA, 17 nt, Homo sapiens
uguccucaauuguacug

SEQ ID NO: 7317 - RNA, 17 nt, Homo sapiens
ccucaauuguacugcua

SEQ ID NO: 7318 - RNA, 17 nt, Homo sapiens
auuguacugcuaccacu

SEQ ID NO: 7319 - RNA, 17 nt, Homo sapiens
ucccuugaacacgagag

SEQ ID NO: 7320 - RNA, 17 nt, Homo sapiens
acacgagaguucaaaug

SEQ ID NO: 7321 - RNA, 17 nt, Homo sapiens
gaguucaaaugaccugg

SEQ ID NO: 7322 - RNA, 17 nt, Homo sapiens
uucaaaugaccuggagu

SEQ ID NO: 7323 - RNA, 17 nt, Homo sapiens
gaccuggaguuacccug

SEQ ID NO: 7324 - RNA, 17 nt, Homo sapiens
uuacccugaugaaaaaa

SEQ ID NO: 7325 - RNA, 17 nt, Homo sapiens
ugaaaaaaauaagagag

SEQ ID NO: 7326 - RNA, 17 nt, Homo sapiens
auaagagagcuuccgua

SEQ ID NO: 7327 - RNA, 17 nt, Homo sapiens
gagcuuccguaaggcga

SEQ ID NO: 7328 - RNA, 17 nt, Homo sapiens
uccguaaggcgacgaau

SEQ ID NO: 7329 - RNA, 17 nt, Homo sapiens
guaaggcgacgaauuga

SEQ ID NO: 7330 - RNA, 17 nt, Homo sapiens
ggcgacgaauugaccaa

SEQ ID NO: 7331 - RNA, 17 nt, Homo sapiens
acgaauugaccaaagca

SEQ ID NO: 7332 - RNA, 17 nt, Homo sapiens
ugaccaaagcaauuccc

SEQ ID NO: 7333 - RNA, 17 nt, Homo sapiens
ccaaagcaauucccaug

SEQ ID NO: 7334 - RNA, 17 nt, Homo sapiens
auucccaugccaacaua

SEQ ID NO: 7335 - RNA, 17 nt, Homo sapiens
ccaugccaacauauucu

SEQ ID NO: 7336 - RNA, 17 nt, Homo sapiens
auucuacaguguucuua

SEQ ID NO: 7337 - RNA, 17 nt, Homo sapiens
ucuacaguguucuuacu

SEQ ID NO: 7338 - RNA, 17 nt, Homo sapiens
uacuauugacaaaaugc

SEQ ID NO: 7339 - RNA, 17 nt, Homo sapiens
uugacaaaaugcagaac

SEQ ID NO: 7340 - RNA, 17 nt, Homo sapiens
gacaaaaugcagaacaa

SEQ ID NO: 7341 - RNA, 17 nt, Homo sapiens
aaugcagaacaaagaca

SEQ ID NO: 7342 - RNA, 17 nt, Homo sapiens
gaacaaagacaaaggac

SEQ ID NO: 7343 - RNA, 17 nt, Homo sapiens
gacaaaggacuuuauac

SEQ ID NO: 7344 - RNA, 17 nt, Homo sapiens
uuauacuugucguguaa

SEQ ID NO: 7345 - RNA, 17 nt, Homo sapiens
uacuugucguguaagga

SEQ ID NO: 7346 - RNA, 17 nt, Homo sapiens
cuugucguguaaggagu

SEQ ID NO: 7347 - RNA, 17 nt, Homo sapiens
uguaaggaguggaccau

SEQ ID NO: 7348 - RNA, 17 nt, Homo sapiens
aggaguggaccaucauu

SEQ ID NO: 7349 - RNA, 17 nt, Homo sapiens
ucauucaaaucuguuaa

SEQ ID NO: 7350 - RNA, 17 nt, Homo sapiens
ucaaaucuguuaacacc

SEQ ID NO: 7351 - RNA, 17 nt, Homo sapiens
aucuguuaacaccucag

SEQ ID NO: 7352 - RNA, 17 nt, Homo sapiens
acaccucagugcauaua

SEQ ID NO: 7353 - RNA, 17 nt, Homo sapiens
accucagugcauauaua

SEQ ID NO: 7354 - RNA, 17 nt, Homo sapiens
uauauaugauaaagcau

SEQ ID NO: 7355 - RNA, 17 nt, Homo sapiens
augauaaagcauucauc

SEQ ID NO: 7356 - RNA, 17 nt, Homo sapiens
ucaucacugugaaacau

SEQ ID NO: 7357 - RNA, 17 nt, Homo sapiens
acugugaaacaucgaaa

SEQ ID NO: 7358 - RNA, 17 nt, Homo sapiens
caucgaaaacagcaggu

SEQ ID NO: 7359 - RNA, 17 nt, Homo sapiens
cgaaaacagcaggugcu

SEQ ID NO: 7360 - RNA, 17 nt, Homo sapiens
aacagcaggugcuugaa

SEQ ID NO: 7361 - RNA, 17 nt, Homo sapiens
cagcaggugcuugaaac

SEQ ID NO: 7362 - RNA, 17 nt, Homo sapiens
ugcuugaaaccguagcu

SEQ ID NO: 7363 - RNA, 17 nt, Homo sapiens
uugaaaccguagcuggc

SEQ ID NO: 7364 - RNA, 17 nt, Homo sapiens
aaaccguagcuggcaag

SEQ ID NO: 7365 - RNA, 17 nt, Homo sapiens
cguagcuggcaagcggu

SEQ ID NO: 7366 - RNA, 17 nt, Homo sapiens
gcuggcaagcggucuua

SEQ ID NO: 7367 - RNA, 17 nt, Homo sapiens
ggcaagcggucuuaccg

SEQ ID NO: 7368 - RNA, 17 nt, Homo sapiens
ucuuaccggcucucuau

SEQ ID NO: 7369 - RNA, 17 nt, Homo sapiens
cuaugaaagugaaggca

SEQ ID NO: 7370 - RNA, 17 nt, Homo sapiens
aagugaaggcauuuccc

SEQ ID NO: 7371 - RNA, 17 nt, Homo sapiens
uuucccucgccggaagu

SEQ ID NO: 7372 - RNA, 17 nt, Homo sapiens
cgccggaaguuguaugg

SEQ ID NO: 7373 - RNA, 17 nt, Homo sapiens
cggaaguuguaugguua

SEQ ID NO: 7374 - RNA, 17 nt, Homo sapiens
guuguaugguuaaaaga

SEQ ID NO: 7375 - RNA, 17 nt, Homo sapiens
guuaaaagauggguuac

SEQ ID NO: 7376 - RNA, 17 nt, Homo sapiens
aaagauggguuaccugc

SEQ ID NO: 7377 - RNA, 17 nt, Homo sapiens
gguuaccugcgacugag

SEQ ID NO: 7378 - RNA, 17 nt, Homo sapiens
uaccugcgacugagaaa

SEQ ID NO: 7379 - RNA, 17 nt, Homo sapiens
acugagaaaucugcucg

SEQ ID NO: 7380 - RNA, 17 nt, Homo sapiens
agaaaucugcucgcuau

SEQ ID NO: 7381 - RNA, 17 nt, Homo sapiens
aucugcucgcuauuuga

SEQ ID NO: 7382 - RNA, 17 nt, Homo sapiens
gcuauuugacucguggc

SEQ ID NO: 7383 - RNA, 17 nt, Homo sapiens
uuugacucguggcuacu

SEQ ID NO: 7384 - RNA, 17 nt, Homo sapiens
gacucguggcuacucgu

SEQ ID NO: 7385 - RNA, 17 nt, Homo sapiens
ggcuacucguuaauuau

SEQ ID NO: 7386 - RNA, 17 nt, Homo sapiens
acucguuaauuaucaag

SEQ ID NO: 7387 - RNA, 17 nt, Homo sapiens
uaucaaggacguaacug

SEQ ID NO: 7388 - RNA, 17 nt, Homo sapiens
ucaaggacguaacugaa

SEQ ID NO: 7389 - RNA, 17 nt, Homo sapiens
aggacguaacugaagag

SEQ ID NO: 7390 - RNA, 17 nt, Homo sapiens
ugaagaggaugcaggga

SEQ ID NO: 7391 - RNA, 17 nt, Homo sapiens
aagaggaugcagggaau

SEQ ID NO: 7392 - RNA, 17 nt, Homo sapiens
ugcagggaauuauacaa

SEQ ID NO: 7393 - RNA, 17 nt, Homo sapiens
auuauacaaucuugcug

SEQ ID NO: 7394 - RNA, 17 nt, Homo sapiens
acaaucuugcugagcau

SEQ ID NO: 7395 - RNA, 17 nt, Homo sapiens
cuugcugagcauaaaac

SEQ ID NO: 7396 - RNA, 17 nt, Homo sapiens
agcauaaaacagucaaa

SEQ ID NO: 7397 - RNA, 17 nt, Homo sapiens
auaaaacagucaaaugu

SEQ ID NO: 7398 - RNA, 17 nt, Homo sapiens
acagucaaauguguuua

SEQ ID NO: 7399 - RNA, 17 nt, Homo sapiens
agucaaauguguuuaaa

SEQ ID NO: 7400 - RNA, 17 nt, Homo sapiens
ucaaauguguuuaaaaa

SEQ ID NO: 7401 - RNA, 17 nt, Homo sapiens
guuuaaaaaccucacug

SEQ ID NO: 7402 - RNA, 17 nt, Homo sapiens
accucacugccacucua

SEQ ID NO: 7403 - RNA, 17 nt, Homo sapiens
ccacucuaauugucaau

SEQ ID NO: 7404 - RNA, 17 nt, Homo sapiens
cucuaauugucaaugug

SEQ ID NO: 7405 - RNA, 17 nt, Homo sapiens
aauugucaaugugaaac

SEQ ID NO: 7406 - RNA, 17 nt, Homo sapiens
uugucaaugugaaaccc

SEQ ID NO: 7407 - RNA, 17 nt, Homo sapiens
aaugugaaaccccagau

SEQ ID NO: 7408 - RNA, 17 nt, Homo sapiens
aaccccagauuuacgaa

SEQ ID NO: 7409 - RNA, 17 nt, Homo sapiens
acgaaaaggccguguca

SEQ ID NO: 7410 - RNA, 17 nt, Homo sapiens
aaaaggccgugucaucg

SEQ ID NO: 7411 - RNA, 17 nt, Homo sapiens
aaggccgugucaucguu

SEQ ID NO: 7412 - RNA, 17 nt, Homo sapiens
gugucaucguuuccaga

SEQ ID NO: 7413 - RNA, 17 nt, Homo sapiens
guuuccagacccggcuc

SEQ ID NO: 7414 - RNA, 17 nt, Homo sapiens
cagacccggcucucuac

SEQ ID NO: 7415 - RNA, 17 nt, Homo sapiens
cccacugggcagcagac

SEQ ID NO: 7416 - RNA, 17 nt, Homo sapiens
acugggcagcagacaaa

SEQ ID NO: 7417 - RNA, 17 nt, Homo sapiens
ggcagcagacaaauccu

SEQ ID NO: 7418 - RNA, 17 nt, Homo sapiens
gcagacaaauccugacu

SEQ ID NO: 7419 - RNA, 17 nt, Homo sapiens
aaauccugacuuguacc

SEQ ID NO: 7420 - RNA, 17 nt, Homo sapiens
ccugacuuguaccgcau

SEQ ID NO: 7421 - RNA, 17 nt, Homo sapiens
cuuguaccgcauauggu

SEQ ID NO: 7422 - RNA, 17 nt, Homo sapiens
cgcauaugguaucccuc

SEQ ID NO: 7423 - RNA, 17 nt, Homo sapiens
aucccucaaccuacaau

SEQ ID NO: 7424 - RNA, 17 nt, Homo sapiens
aaccuacaaucaagugg

SEQ ID NO: 7425 - RNA, 17 nt, Homo sapiens
acaaucaagugguucug

SEQ ID NO: 7426 - RNA, 17 nt, Homo sapiens
aucaagugguucuggca

SEQ ID NO: 7427 - RNA, 17 nt, Homo sapiens
ugguucuggcaccccug

SEQ ID NO: 7428 - RNA, 17 nt, Homo sapiens
gcaccccuguaaccaua

SEQ ID NO: 7429 - RNA, 17 nt, Homo sapiens
ccccuguaaccauaauc

SEQ ID NO: 7430 - RNA, 17 nt, Homo sapiens
uaaccauaaucauuccg

SEQ ID NO: 7431 - RNA, 17 nt, Homo sapiens
auuccgaagcaaggugu

SEQ ID NO: 7432 - RNA, 17 nt, Homo sapiens
gaagcaaggugugacuu

SEQ ID NO: 7433 - RNA, 17 nt, Homo sapiens
agcaaggugugacuuuu

SEQ ID NO: 7434 - RNA, 17 nt, Homo sapiens
aaggugugacuuuuguu

SEQ ID NO: 7435 - RNA, 17 nt, Homo sapiens
ugacuuuuguuccaaua

SEQ ID NO: 7436 - RNA, 17 nt, Homo sapiens
uuguuccaauaaugaag

SEQ ID NO: 7437 - RNA, 17 nt, Homo sapiens
uuccaauaaugaagagu

SEQ ID NO: 7438 - RNA, 17 nt, Homo sapiens
aaugaagaguccuuuau

SEQ ID NO: 7439 - RNA, 17 nt, Homo sapiens
uauccuggaugcugaca

SEQ ID NO: 7440 - RNA, 17 nt, Homo sapiens
uccuggaugcugacagc

SEQ ID NO: 7441 - RNA, 17 nt, Homo sapiens
ggaugcugacagcaaca

SEQ ID NO: 7442 - RNA, 17 nt, Homo sapiens
ugcugacagcaacaugg

SEQ ID NO: 7443 - RNA, 17 nt, Homo sapiens
ugacagcaacaugggaa

SEQ ID NO: 7444 - RNA, 17 nt, Homo sapiens
caugggaaacagaauug

SEQ ID NO: 7445 - RNA, 17 nt, Homo sapiens
gaaacagaauugagagc

SEQ ID NO: 7446 - RNA, 17 nt, Homo sapiens
aauugagagcaucacuc

SEQ ID NO: 7447 - RNA, 17 nt, Homo sapiens
aucacucagcgcauggc

SEQ ID NO: 7448 - RNA, 17 nt, Homo sapiens
cacucagcgcauggcaa

SEQ ID NO: 7449 - RNA, 17 nt, Homo sapiens
agcgcauggcaauaaua

SEQ ID NO: 7450 - RNA, 17 nt, Homo sapiens
gcauggcaauaauagaa

SEQ ID NO: 7451 - RNA, 17 nt, Homo sapiens
uggcaauaauagaagga

SEQ ID NO: 7452 - RNA, 17 nt, Homo sapiens
aggaaagaauaagaugg

SEQ ID NO: 7453 - RNA, 17 nt, Homo sapiens
agaauaagauggcuagc

SEQ ID NO: 7454 - RNA, 17 nt, Homo sapiens
auaagauggcuagcacc

SEQ ID NO: 7455 - RNA, 17 nt, Homo sapiens
gauggcuagcaccuugg

SEQ ID NO: 7456 - RNA, 17 nt, Homo sapiens
gcaccuugguuguggcu

SEQ ID NO: 7457 - RNA, 17 nt, Homo sapiens
ccuugguuguggcugac

SEQ ID NO: 7458 - RNA, 17 nt, Homo sapiens
ugguuguggcugacucu

SEQ ID NO: 7459 - RNA, 17 nt, Homo sapiens
uguggcugacucuagaa

SEQ ID NO: 7460 - RNA, 17 nt, Homo sapiens
acucuagaauuucugga

SEQ ID NO: 7461 - RNA, 17 nt, Homo sapiens
uuucuggaaucuacauu

SEQ ID NO: 7462 - RNA, 17 nt, Homo sapiens
cuacauuugcauagcuu

SEQ ID NO: 7463 - RNA, 17 nt, Homo sapiens
uuugcauagcuuccaau

SEQ ID NO: 7464 - RNA, 17 nt, Homo sapiens
agcuuccaauaaaguug

SEQ ID NO: 7465 - RNA, 17 nt, Homo sapiens
ccaauaaaguugggacu

SEQ ID NO: 7466 - RNA, 17 nt, Homo sapiens
aaguugggacuguggga

SEQ ID NO: 7467 - RNA, 17 nt, Homo sapiens
uugggacugugggaaga

SEQ ID NO: 7468 - RNA, 17 nt, Homo sapiens
gggaagaaacauaagcu

SEQ ID NO: 7469 - RNA, 17 nt, Homo sapiens
aaacauaagcuuuuaua

SEQ ID NO: 7470 - RNA, 17 nt, Homo sapiens
uaucacagaugugccaa

SEQ ID NO: 7471 - RNA, 17 nt, Homo sapiens
ucacagaugugccaaau

SEQ ID NO: 7472 - RNA, 17 nt, Homo sapiens
acagaugugccaaaugg

SEQ ID NO: 7473 - RNA, 17 nt, Homo sapiens
ugugccaaauggguuuc

SEQ ID NO: 7474 - RNA, 17 nt, Homo sapiens
ccaaauggguuucaugu

SEQ ID NO: 7475 - RNA, 17 nt, Homo sapiens
gguuucauguuaacuug

SEQ ID NO: 7476 - RNA, 17 nt, Homo sapiens
ucauguuaacuuggaaa

SEQ ID NO: 7477 - RNA, 17 nt, Homo sapiens
uggaaaaaaugccgacg

SEQ ID NO: 7478 - RNA, 17 nt, Homo sapiens
gaaaaaaugccgacgga

SEQ ID NO: 7479 - RNA, 17 nt, Homo sapiens
aaaugccgacggaagga

SEQ ID NO: 7480 - RNA, 17 nt, Homo sapiens
aggagaggaccugaaac

SEQ ID NO: 7481 - RNA, 17 nt, Homo sapiens
gaccugaaacugucuug

SEQ ID NO: 7482 - RNA, 17 nt, Homo sapiens
cugaaacugucuugcac

SEQ ID NO: 7483 - RNA, 17 nt, Homo sapiens
acugucuugcacaguua

SEQ ID NO: 7484 - RNA, 17 nt, Homo sapiens
cuugcacaguuaacaag

SEQ ID NO: 7485 - RNA, 17 nt, Homo sapiens
cacaguuaacaaguucu

SEQ ID NO: 7486 - RNA, 17 nt, Homo sapiens
guuaacaaguucuuaua

SEQ ID NO: 7487 - RNA, 17 nt, Homo sapiens
auacagagacguuacuu

SEQ ID NO: 7488 - RNA, 17 nt, Homo sapiens
acagagacguuacuugg

SEQ ID NO: 7489 - RNA, 17 nt, Homo sapiens
uuacuuggauuuuacug

SEQ ID NO: 7490 - RNA, 17 nt, Homo sapiens
auuuuacugcggacagu

SEQ ID NO: 7491 - RNA, 17 nt, Homo sapiens
uacugcggacaguuaau

SEQ ID NO: 7492 - RNA, 17 nt, Homo sapiens
ugcggacaguuaauaac

SEQ ID NO: 7493 - RNA, 17 nt, Homo sapiens
gacaguuaauaacagaa

SEQ ID NO: 7494 - RNA, 17 nt, Homo sapiens
aguuaauaacagaacaa

SEQ ID NO: 7495 - RNA, 17 nt, Homo sapiens
auaacagaacaaugcac

SEQ ID NO: 7496 - RNA, 17 nt, Homo sapiens
acagaacaaugcacuac

SEQ ID NO: 7497 - RNA, 17 nt, Homo sapiens
agaacaaugcacuacag

SEQ ID NO: 7498 - RNA, 17 nt, Homo sapiens
gcacuacaguauuagca

SEQ ID NO: 7499 - RNA, 17 nt, Homo sapiens
caguauuagcaagcaaa

SEQ ID NO: 7500 - RNA, 17 nt, Homo sapiens
auuagcaagcaaaaaau

SEQ ID NO: 7501 - RNA, 17 nt, Homo sapiens
agcaaaaaauggccauc

SEQ ID NO: 7502 - RNA, 17 nt, Homo sapiens
aaaaaauggccaucacu

SEQ ID NO: 7503 - RNA, 17 nt, Homo sapiens
acuaaggagcacuccau

SEQ ID NO: 7504 - RNA, 17 nt, Homo sapiens
cacucuuaaucuuacca

SEQ ID NO: 7505 - RNA, 17 nt, Homo sapiens
caucaugaauguuuccc

SEQ ID NO: 7506 - RNA, 17 nt, Homo sapiens
ucaugaauguuucccug

SEQ ID NO: 7507 - RNA, 17 nt, Homo sapiens
guuucccugcaagauuc

SEQ ID NO: 7508 - RNA, 17 nt, Homo sapiens
ccugcaagauucaggca

SEQ ID NO: 7509 - RNA, 17 nt, Homo sapiens
agauucaggcaccuaug

SEQ ID NO: 7510 - RNA, 17 nt, Homo sapiens
gcaccuaugccugcaga

SEQ ID NO: 7511 - RNA, 17 nt, Homo sapiens
cuaugccugcagagcca

SEQ ID NO: 7512 - RNA, 17 nt, Homo sapiens
ccugcagagccaggaau

SEQ ID NO: 7513 - RNA, 17 nt, Homo sapiens
agccaggaauguauaca

SEQ ID NO: 7514 - RNA, 17 nt, Homo sapiens
ccaggaauguauacaca

SEQ ID NO: 7515 - RNA, 17 nt, Homo sapiens
gggaagaaauccuccag

SEQ ID NO: 7516 - RNA, 17 nt, Homo sapiens
agaaagaaauuacaauc

SEQ ID NO: 7517 - RNA, 17 nt, Homo sapiens
aaauuacaaucagagau

SEQ ID NO: 7518 - RNA, 17 nt, Homo sapiens
aaucagagaucaggaag

SEQ ID NO: 7519 - RNA, 17 nt, Homo sapiens
aucaggaagcaccauac

SEQ ID NO: 7520 - RNA, 17 nt, Homo sapiens
uaccuccugcgaaaccu

SEQ ID NO: 7521 - RNA, 17 nt, Homo sapiens
ccugcgaaaccucagug

SEQ ID NO: 7522 - RNA, 17 nt, Homo sapiens
aaaccucagugaucaca

SEQ ID NO: 7523 - RNA, 17 nt, Homo sapiens
ccucagugaucacacag

SEQ ID NO: 7524 - RNA, 17 nt, Homo sapiens
aucacacaguggccauc

SEQ ID NO: 7525 - RNA, 17 nt, Homo sapiens
acacaguggccaucagc

SEQ ID NO: 7526 - RNA, 17 nt, Homo sapiens
ggccaucagcaguucca

SEQ ID NO: 7527 - RNA, 17 nt, Homo sapiens
caucagcaguuccacca

SEQ ID NO: 7528 - RNA, 17 nt, Homo sapiens
cacuuuagacugucaug

SEQ ID NO: 7529 - RNA, 17 nt, Homo sapiens
uuuagacugucaugcua

SEQ ID NO: 7530 - RNA, 17 nt, Homo sapiens
acugucaugcuaauggu

SEQ ID NO: 7531 - RNA, 17 nt, Homo sapiens
ucaugcuaauggugucc

SEQ ID NO: 7532 - RNA, 17 nt, Homo sapiens
ugcuaaugguguccccg

SEQ ID NO: 7533 - RNA, 17 nt, Homo sapiens
cuaaugguguccccgag

SEQ ID NO: 7534 - RNA, 17 nt, Homo sapiens
guccccgagccucagau

SEQ ID NO: 7535 - RNA, 17 nt, Homo sapiens
agccucagaucacuugg

SEQ ID NO: 7536 - RNA, 17 nt, Homo sapiens
aucacuugguuuaaaaa

SEQ ID NO: 7537 - RNA, 17 nt, Homo sapiens
guuuaaaaacaaccaca

SEQ ID NO: 7538 - RNA, 17 nt, Homo sapiens
uaaaaacaaccacaaaa

SEQ ID NO: 7539 - RNA, 17 nt, Homo sapiens
accacaaaauacaacaa

SEQ ID NO: 7540 - RNA, 17 nt, Homo sapiens
aaaauacaacaagagcc

SEQ ID NO: 7541 - RNA, 17 nt, Homo sapiens
caacaagagccuggaau

SEQ ID NO: 7542 - RNA, 17 nt, Homo sapiens
agccuggaauuauuuua

SEQ ID NO: 7543 - RNA, 17 nt, Homo sapiens
auuuuaggaccaggaag

SEQ ID NO: 7544 - RNA, 17 nt, Homo sapiens
accaggaagcagcacgc

SEQ ID NO: 7545 - RNA, 17 nt, Homo sapiens
aggaagcagcacgcugu

SEQ ID NO: 7546 - RNA, 17 nt, Homo sapiens
agcagcacgcuguuuau

SEQ ID NO: 7547 - RNA, 17 nt, Homo sapiens
agcacgcuguuuauuga

SEQ ID NO: 7548 - RNA, 17 nt, Homo sapiens
uugaaagagucacagaa

SEQ ID NO: 7549 - RNA, 17 nt, Homo sapiens
agaagaggaugaaggug

SEQ ID NO: 7550 - RNA, 17 nt, Homo sapiens
ggaugaaggugucuauc

SEQ ID NO: 7551 - RNA, 17 nt, Homo sapiens
augaaggugucuaucac

SEQ ID NO: 7552 - RNA, 17 nt, Homo sapiens
cuaucacugcaaagcca

SEQ ID NO: 7553 - RNA, 17 nt, Homo sapiens
acugcaaagccaccaac

SEQ ID NO: 7554 - RNA, 17 nt, Homo sapiens
agccaccaaccagaagg

SEQ ID NO: 7555 - RNA, 17 nt, Homo sapiens
ccagaagggcucugugg

SEQ ID NO: 7556 - RNA, 17 nt, Homo sapiens
agggcucuguggaaagu

SEQ ID NO: 7557 - RNA, 17 nt, Homo sapiens
uguggaaaguucagcau

SEQ ID NO: 7558 - RNA, 17 nt, Homo sapiens
aaaguucagcauaccuc

SEQ ID NO: 7559 - RNA, 17 nt, Homo sapiens
accucacuguucaagga

SEQ ID NO: 7560 - RNA, 17 nt, Homo sapiens
uucaaggaaccucggac

SEQ ID NO: 7561 - RNA, 17 nt, Homo sapiens
aaccucggacaagucua

SEQ ID NO: 7562 - RNA, 17 nt, Homo sapiens
ucggacaagucuaaucu

SEQ ID NO: 7563 - RNA, 17 nt, Homo sapiens
caagucuaaucuggagc

SEQ ID NO: 7564 - RNA, 17 nt, Homo sapiens
aaucuggagcugaucac

SEQ ID NO: 7565 - RNA, 17 nt, Homo sapiens
uggagcugaucacucua

SEQ ID NO: 7566 - RNA, 17 nt, Homo sapiens
ucacucuaacaugcacc

SEQ ID NO: 7567 - RNA, 17 nt, Homo sapiens
ucuaacaugcaccugug

SEQ ID NO: 7568 - RNA, 17 nt, Homo sapiens
augcaccuguguggcug

SEQ ID NO: 7569 - RNA, 17 nt, Homo sapiens
gcaccuguguggcugcg

SEQ ID NO: 7570 - RNA, 17 nt, Homo sapiens
ccuguguggcugcgacu

SEQ ID NO: 7571 - RNA, 17 nt, Homo sapiens
guguggcugcgacucuc

SEQ ID NO: 7572 - RNA, 17 nt, Homo sapiens
uggcugcgacucucuuc

SEQ ID NO: 7573 - RNA, 17 nt, Homo sapiens
cucuucuggcuccuauu

SEQ ID NO: 7574 - RNA, 17 nt, Homo sapiens
uccuauuaacccuccuu

SEQ ID NO: 7575 - RNA, 17 nt, Homo sapiens
uccgaaaaaugaaaagg

SEQ ID NO: 7576 - RNA, 17 nt, Homo sapiens
augaaaaggucuucuuc

SEQ ID NO: 7577 - RNA, 17 nt, Homo sapiens
cuucugaaauaaagacu

SEQ ID NO: 7578 - RNA, 17 nt, Homo sapiens
aaauaaagacugacuac

SEQ ID NO: 7579 - RNA, 17 nt, Homo sapiens
aaagacugacuaccuau

SEQ ID NO: 7580 - RNA, 17 nt, Homo sapiens
accuaucaauuauaaug

SEQ ID NO: 7581 - RNA, 17 nt, Homo sapiens
caauuauaauggaccca

SEQ ID NO: 7582 - RNA, 17 nt, Homo sapiens
uauaauggacccagaug

SEQ ID NO: 7583 - RNA, 17 nt, Homo sapiens
ggacccagaugaaguuc

SEQ ID NO: 7584 - RNA, 17 nt, Homo sapiens
cagaugaaguuccuuug

SEQ ID NO: 7585 - RNA, 17 nt, Homo sapiens
uccuuuggaugagcagu

SEQ ID NO: 7586 - RNA, 17 nt, Homo sapiens
uuggaugagcaguguga

SEQ ID NO: 7587 - RNA, 17 nt, Homo sapiens
gaugagcagugugagcg

SEQ ID NO: 7588 - RNA, 17 nt, Homo sapiens
ugagcagugugagcggc

SEQ ID NO: 7589 - RNA, 17 nt, Homo sapiens
cagugugagcggcuccc

SEQ ID NO: 7590 - RNA, 17 nt, Homo sapiens
ugugagcggcucccuua

SEQ ID NO: 7591 - RNA, 17 nt, Homo sapiens
cccuuaugaugccagca

SEQ ID NO: 7592 - RNA, 17 nt, Homo sapiens
cuuaugaugccagcaag

SEQ ID NO: 7593 - RNA, 17 nt, Homo sapiens
ugaugccagcaaguggg

SEQ ID NO: 7594 - RNA, 17 nt, Homo sapiens
gccagcaagugggaguu

SEQ ID NO: 7595 - RNA, 17 nt, Homo sapiens
aagugggaguuugcccg

SEQ ID NO: 7596 - RNA, 17 nt, Homo sapiens
gggaguuugcccgggag

SEQ ID NO: 7597 - RNA, 17 nt, Homo sapiens
cgggagagacuuaaacu

SEQ ID NO: 7598 - RNA, 17 nt, Homo sapiens
agacuuaaacugggcaa

SEQ ID NO: 7599 - RNA, 17 nt, Homo sapiens
uaaacugggcaaaucac

SEQ ID NO: 7600 - RNA, 17 nt, Homo sapiens
cugggcaaaucacuugg

SEQ ID NO: 7601 - RNA, 17 nt, Homo sapiens
gaagaggggcuuuugga

SEQ ID NO: 7602 - RNA, 17 nt, Homo sapiens
uuggaaaagugguucaa

SEQ ID NO: 7603 - RNA, 17 nt, Homo sapiens
gaaaagugguucaagca

SEQ ID NO: 7604 - RNA, 17 nt, Homo sapiens
ugguucaagcaucagca

SEQ ID NO: 7605 - RNA, 17 nt, Homo sapiens
aagcaucagcauuuggc

SEQ ID NO: 7606 - RNA, 17 nt, Homo sapiens
agcauuuggcauuaaga

SEQ ID NO: 7607 - RNA, 17 nt, Homo sapiens
auuaagaaaucaccuac

SEQ ID NO: 7608 - RNA, 17 nt, Homo sapiens
ucaccuacgugccggac

SEQ ID NO: 7609 - RNA, 17 nt, Homo sapiens
accuacgugccggacug

SEQ ID NO: 7610 - RNA, 17 nt, Homo sapiens
cgugccggacuguggcu

SEQ ID NO: 7611 - RNA, 17 nt, Homo sapiens
gccggacuguggcugug

SEQ ID NO: 7612 - RNA, 17 nt, Homo sapiens
ggacuguggcugugaaa

SEQ ID NO: 7613 - RNA, 17 nt, Homo sapiens
cuguggcugugaaaaug

SEQ ID NO: 7614 - RNA, 17 nt, Homo sapiens
cugugaaaaugcugaaa

SEQ ID NO: 7615 - RNA, 17 nt, Homo sapiens
gugaaaaugcugaaaga

SEQ ID NO: 7616 - RNA, 17 nt, Homo sapiens
aagagggggccacggcc

SEQ ID NO: 7617 - RNA, 17 nt, Homo sapiens
gggccacggccagcgag

SEQ ID NO: 7618 - RNA, 17 nt, Homo sapiens
cacggccagcgaguaca

SEQ ID NO: 7619 - RNA, 17 nt, Homo sapiens
gccagcgaguacaaagc

SEQ ID NO: 7620 - RNA, 17 nt, Homo sapiens
aguacaaagcucugaug

SEQ ID NO: 7621 - RNA, 17 nt, Homo sapiens
aagcucugaugacugag

SEQ ID NO: 7622 - RNA, 17 nt, Homo sapiens
cucugaugacugagcua

SEQ ID NO: 7623 - RNA, 17 nt, Homo sapiens
augacugagcuaaaaau

SEQ ID NO: 7624 - RNA, 17 nt, Homo sapiens
agcuaaaaaucuugacc

SEQ ID NO: 7625 - RNA, 17 nt, Homo sapiens
aaaucuugacccacauu

SEQ ID NO: 7626 - RNA, 17 nt, Homo sapiens
ccacauuggccaccauc

SEQ ID NO: 7627 - RNA, 17 nt, Homo sapiens
ccaucugaacgugguua

SEQ ID NO: 7628 - RNA, 17 nt, Homo sapiens
aucugaacgugguuaac

SEQ ID NO: 7629 - RNA, 17 nt, Homo sapiens
ugaacgugguuaaccug

SEQ ID NO: 7630 - RNA, 17 nt, Homo sapiens
cgugguuaaccugcugg

SEQ ID NO: 7631 - RNA, 17 nt, Homo sapiens
guuaaccugcugggagc

SEQ ID NO: 7632 - RNA, 17 nt, Homo sapiens
ugcugggagccugcacc

SEQ ID NO: 7633 - RNA, 17 nt, Homo sapiens
gggagccugcaccaagc

SEQ ID NO: 7634 - RNA, 17 nt, Homo sapiens
ugcaccaagcaaggagg

SEQ ID NO: 7635 - RNA, 17 nt, Homo sapiens
caaggagggccucugau

SEQ ID NO: 7636 - RNA, 17 nt, Homo sapiens
ggccucugauggugauu

SEQ ID NO: 7637 - RNA, 17 nt, Homo sapiens
cucugauggugauuguu

SEQ ID NO: 7638 - RNA, 17 nt, Homo sapiens
ugauggugauuguugaa

SEQ ID NO: 7639 - RNA, 17 nt, Homo sapiens
uggugauuguugaauac

SEQ ID NO: 7640 - RNA, 17 nt, Homo sapiens
auuguugaauacugcaa

SEQ ID NO: 7641 - RNA, 17 nt, Homo sapiens
ugaauacugcaaauaug

SEQ ID NO: 7642 - RNA, 17 nt, Homo sapiens
uacugcaaauauggaaa

SEQ ID NO: 7643 - RNA, 17 nt, Homo sapiens
auauggaaaucucucca

SEQ ID NO: 7644 - RNA, 17 nt, Homo sapiens
ucucuccaacuaccuca

SEQ ID NO: 7645 - RNA, 17 nt, Homo sapiens
ccucaagagcaaacgug

SEQ ID NO: 7646 - RNA, 17 nt, Homo sapiens
aagagcaaacgugacuu

SEQ ID NO: 7647 - RNA, 17 nt, Homo sapiens
gagcaaacgugacuuau

SEQ ID NO: 7648 - RNA, 17 nt, Homo sapiens
caaacgugacuuauuuu

SEQ ID NO: 7649 - RNA, 17 nt, Homo sapiens
uuuucucaacaaggaug

SEQ ID NO: 7650 - RNA, 17 nt, Homo sapiens
caacaaggaugcagcac

SEQ ID NO: 7651 - RNA, 17 nt, Homo sapiens
acaaggaugcagcacua

SEQ ID NO: 7652 - RNA, 17 nt, Homo sapiens
aggaugcagcacuacac

SEQ ID NO: 7653 - RNA, 17 nt, Homo sapiens
cacauggagccuaagaa

SEQ ID NO: 7654 - RNA, 17 nt, Homo sapiens
aagaaaaaauggagcca

SEQ ID NO: 7655 - RNA, 17 nt, Homo sapiens
aaaauggagccaggccu

SEQ ID NO: 7656 - RNA, 17 nt, Homo sapiens
ggagccaggccuggaac

SEQ ID NO: 7657 - RNA, 17 nt, Homo sapiens
ggccuggaacaaggcaa

SEQ ID NO: 7658 - RNA, 17 nt, Homo sapiens
ggaacaaggcaagaaac

SEQ ID NO: 7659 - RNA, 17 nt, Homo sapiens
ggcaagaaaccaagacu

SEQ ID NO: 7660 - RNA, 17 nt, Homo sapiens
aaaccaagacuagauag

SEQ ID NO: 7661 - RNA, 17 nt, Homo sapiens
aagacuagauagcguca

SEQ ID NO: 7662 - RNA, 17 nt, Homo sapiens
acuagauagcgucacca

SEQ ID NO: 7663 - RNA, 17 nt, Homo sapiens
uagauagcgucaccagc

SEQ ID NO: 7664 - RNA, 17 nt, Homo sapiens
cgucaccagcagcgaaa

SEQ ID NO: 7665 - RNA, 17 nt, Homo sapiens
caccagcagcgaaagcu

SEQ ID NO: 7666 - RNA, 17 nt, Homo sapiens
cagcgaaagcuuugcga

SEQ ID NO: 7667 - RNA, 17 nt, Homo sapiens
aaagcuuugcgagcucc

SEQ ID NO: 7668 - RNA, 17 nt, Homo sapiens
cuuugcgagcuccggcu

SEQ ID NO: 7669 - RNA, 17 nt, Homo sapiens
gagcuccggcuuucagg

SEQ ID NO: 7670 - RNA, 17 nt, Homo sapiens
ucaggaagauaaaaguc

SEQ ID NO: 7671 - RNA, 17 nt, Homo sapiens
agauaaaagucugagug

SEQ ID NO: 7672 - RNA, 17 nt, Homo sapiens
aagucugagugauguug

SEQ ID NO: 7673 - RNA, 17 nt, Homo sapiens
ucugagugauguugagg

SEQ ID NO: 7674 - RNA, 17 nt, Homo sapiens
ugagugauguugaggaa

SEQ ID NO: 7675 - RNA, 17 nt, Homo sapiens
agaggaggauucugacg

SEQ ID NO: 7676 - RNA, 17 nt, Homo sapiens
ggauucugacgguuucu

SEQ ID NO: 7677 - RNA, 17 nt, Homo sapiens
uucugacgguuucuaca

SEQ ID NO: 7678 - RNA, 17 nt, Homo sapiens
uacaaggagcccaucac

SEQ ID NO: 7679 - RNA, 17 nt, Homo sapiens
uauggaagaucugauuu

SEQ ID NO: 7680 - RNA, 17 nt, Homo sapiens
aagaucugauuucuuac

SEQ ID NO: 7681 - RNA, 17 nt, Homo sapiens
uucuuacaguuuucaag

SEQ ID NO: 7682 - RNA, 17 nt, Homo sapiens
guuuucaaguggccaga

SEQ ID NO: 7683 - RNA, 17 nt, Homo sapiens
uucaaguggccagaggc

SEQ ID NO: 7684 - RNA, 17 nt, Homo sapiens
ggccagaggcauggagu

SEQ ID NO: 7685 - RNA, 17 nt, Homo sapiens
ggcauggaguuccuguc

SEQ ID NO: 7686 - RNA, 17 nt, Homo sapiens
gaguuccugucuuccag

SEQ ID NO: 7687 - RNA, 17 nt, Homo sapiens
uccagaaagugcauuca

SEQ ID NO: 7688 - RNA, 17 nt, Homo sapiens
cagaaagugcauucauc

SEQ ID NO: 7689 - RNA, 17 nt, Homo sapiens
ucaucgggaccuggcag

SEQ ID NO: 7690 - RNA, 17 nt, Homo sapiens
gggaccuggcagcgaga

SEQ ID NO: 7691 - RNA, 17 nt, Homo sapiens
accuggcagcgagaaac

SEQ ID NO: 7692 - RNA, 17 nt, Homo sapiens
agcgagaaacauucuuu

SEQ ID NO: 7693 - RNA, 17 nt, Homo sapiens
aucugagaacaacgugg

SEQ ID NO: 7694 - RNA, 17 nt, Homo sapiens
ugagaacaacgugguga

SEQ ID NO: 7695 - RNA, 17 nt, Homo sapiens
agaacaacguggugaag

SEQ ID NO: 7696 - RNA, 17 nt, Homo sapiens
acaacguggugaagauu

SEQ ID NO: 7697 - RNA, 17 nt, Homo sapiens
uggugaagauuugugau

SEQ ID NO: 7698 - RNA, 17 nt, Homo sapiens
gaagauuugugauuuug

SEQ ID NO: 7699 - RNA, 17 nt, Homo sapiens
gauuugugauuuuggcc

SEQ ID NO: 7700 - RNA, 17 nt, Homo sapiens
ugauuuuggccuugccc

SEQ ID NO: 7701 - RNA, 17 nt, Homo sapiens
uuggccuugcccgggau

SEQ ID NO: 7702 - RNA, 17 nt, Homo sapiens
ugcccgggauauuuaua

SEQ ID NO: 7703 - RNA, 17 nt, Homo sapiens
uuauaagaaccccgauu

SEQ ID NO: 7704 - RNA, 17 nt, Homo sapiens
gaaccccgauuauguga

SEQ ID NO: 7705 - RNA, 17 nt, Homo sapiens
ccgauuaugugagaaaa

SEQ ID NO: 7706 - RNA, 17 nt, Homo sapiens
aaaaggagauacucgac

SEQ ID NO: 7707 - RNA, 17 nt, Homo sapiens
gauacucgacuuccucu

SEQ ID NO: 7708 - RNA, 17 nt, Homo sapiens
ccucugaaauggauggc

SEQ ID NO: 7709 - RNA, 17 nt, Homo sapiens
ugaaauggauggcuccc

SEQ ID NO: 7710 - RNA, 17 nt, Homo sapiens
aauggauggcucccgaa

SEQ ID NO: 7711 - RNA, 17 nt, Homo sapiens
gcucccgaaucuaucuu

SEQ ID NO: 7712 - RNA, 17 nt, Homo sapiens
uaucuuugacaaaaucu

SEQ ID NO: 7713 - RNA, 17 nt, Homo sapiens
uugacaaaaucuacagc

SEQ ID NO: 7714 - RNA, 17 nt, Homo sapiens
aaucuacagcaccaaga

SEQ ID NO: 7715 - RNA, 17 nt, Homo sapiens
caccaagagcgacgugu

SEQ ID NO: 7716 - RNA, 17 nt, Homo sapiens
caagagcgacguguggu

SEQ ID NO: 7717 - RNA, 17 nt, Homo sapiens
agagcgacguguggucu

SEQ ID NO: 7718 - RNA, 17 nt, Homo sapiens
agcgacguguggucuua

SEQ ID NO: 7719 - RNA, 17 nt, Homo sapiens
gacguguggucuuacgg

SEQ ID NO: 7720 - RNA, 17 nt, Homo sapiens
cuuacggaguauugcug

SEQ ID NO: 7721 - RNA, 17 nt, Homo sapiens
ggaguauugcuguggga

SEQ ID NO: 7722 - RNA, 17 nt, Homo sapiens
guauugcugugggaaau

SEQ ID NO: 7723 - RNA, 17 nt, Homo sapiens
ugugggaaaucuucucc

SEQ ID NO: 7724 - RNA, 17 nt, Homo sapiens
cuccuuaggugggucuc

SEQ ID NO: 7725 - RNA, 17 nt, Homo sapiens
uuaggugggucuccaua

SEQ ID NO: 7726 - RNA, 17 nt, Homo sapiens
acccaggaguacaaaug

SEQ ID NO: 7727 - RNA, 17 nt, Homo sapiens
gaguacaaauggaugag

SEQ ID NO: 7728 - RNA, 17 nt, Homo sapiens
acaaauggaugaggacu

SEQ ID NO: 7729 - RNA, 17 nt, Homo sapiens
ggaugaggacuuuugca

SEQ ID NO: 7730 - RNA, 17 nt, Homo sapiens
ggacuuuugcagucgcc

SEQ ID NO: 7731 - RNA, 17 nt, Homo sapiens
cuuuugcagucgccuga

SEQ ID NO: 7732 - RNA, 17 nt, Homo sapiens
uugcagucgccugaggg

SEQ ID NO: 7733 - RNA, 17 nt, Homo sapiens
gagggaaggcaugagga

SEQ ID NO: 7734 - RNA, 17 nt, Homo sapiens
gcaugaggaugagagcu

SEQ ID NO: 7735 - RNA, 17 nt, Homo sapiens
ggaugagagcuccugag

SEQ ID NO: 7736 - RNA, 17 nt, Homo sapiens
gcuccugaguacucuac

SEQ ID NO: 7737 - RNA, 17 nt, Homo sapiens
cuccugaaaucuaucag

SEQ ID NO: 7738 - RNA, 17 nt, Homo sapiens
ucuaucagaucaugcug

SEQ ID NO: 7739 - RNA, 17 nt, Homo sapiens
cagaucaugcuggacug

SEQ ID NO: 7740 - RNA, 17 nt, Homo sapiens
caugcuggacugcuggc

SEQ ID NO: 7741 - RNA, 17 nt, Homo sapiens
gcuggacugcuggcaca

SEQ ID NO: 7742 - RNA, 17 nt, Homo sapiens
gacugcuggcacagaga

SEQ ID NO: 7743 - RNA, 17 nt, Homo sapiens
gcacagagacccaaaag

SEQ ID NO: 7744 - RNA, 17 nt, Homo sapiens
aaagaaaggccaagauu

SEQ ID NO: 7745 - RNA, 17 nt, Homo sapiens
aggccaagauuugcaga

SEQ ID NO: 7746 - RNA, 17 nt, Homo sapiens
caagauuugcagaacuu

SEQ ID NO: 7747 - RNA, 17 nt, Homo sapiens
uuugcagaacuugugga

SEQ ID NO: 7748 - RNA, 17 nt, Homo sapiens
cagaacuuguggaaaaa

SEQ ID NO: 7749 - RNA, 17 nt, Homo sapiens
guggaaaaacuagguga

SEQ ID NO: 7750 - RNA, 17 nt, Homo sapiens
aaaacuaggugauuugc

SEQ ID NO: 7751 - RNA, 17 nt, Homo sapiens
acuaggugauuugcuuc

SEQ ID NO: 7752 - RNA, 17 nt, Homo sapiens
ggugauuugcuucaagc

SEQ ID NO: 7753 - RNA, 17 nt, Homo sapiens
ugcuucaagcaaaugua

SEQ ID NO: 7754 - RNA, 17 nt, Homo sapiens
ucaagcaaauguacaac

SEQ ID NO: 7755 - RNA, 17 nt, Homo sapiens
aagcaaauguacaacag

SEQ ID NO: 7756 - RNA, 17 nt, Homo sapiens
aauguacaacaggaugg

SEQ ID NO: 7757 - RNA, 17 nt, Homo sapiens
acaacaggaugguaaag

SEQ ID NO: 7758 - RNA, 17 nt, Homo sapiens
acaggaugguaaagacu

SEQ ID NO: 7759 - RNA, 17 nt, Homo sapiens
ugguaaagacuacaucc

SEQ ID NO: 7760 - RNA, 17 nt, Homo sapiens
acaucccaaucaaugcc

SEQ ID NO: 7761 - RNA, 17 nt, Homo sapiens
cccaaucaaugccauac

SEQ ID NO: 7762 - RNA, 17 nt, Homo sapiens
caaucaaugccauacug

SEQ ID NO: 7763 - RNA, 17 nt, Homo sapiens
ccauacugacaggaaau

SEQ ID NO: 7764 - RNA, 17 nt, Homo sapiens
gacaggaaauagugggu

SEQ ID NO: 7765 - RNA, 17 nt, Homo sapiens
aggaaauaguggguuua

SEQ ID NO: 7766 - RNA, 17 nt, Homo sapiens
aauaguggguuuacaua

SEQ ID NO: 7767 - RNA, 17 nt, Homo sapiens
cauacucaacuccugcc

SEQ ID NO: 7768 - RNA, 17 nt, Homo sapiens
caacuccugccuucucu

SEQ ID NO: 7769 - RNA, 17 nt, Homo sapiens
cucugaggacuucuuca

SEQ ID NO: 7770 - RNA, 17 nt, Homo sapiens
caaggaaaguauuucag

SEQ ID NO: 7771 - RNA, 17 nt, Homo sapiens
guauuucagcuccgaag

SEQ ID NO: 7772 - RNA, 17 nt, Homo sapiens
gcuccgaaguuuaauuc

SEQ ID NO: 7773 - RNA, 17 nt, Homo sapiens
gaaguuuaauucaggaa

SEQ ID NO: 7774 - RNA, 17 nt, Homo sapiens
uucaggaagcucugaug

SEQ ID NO: 7775 - RNA, 17 nt, Homo sapiens
aagcucugaugauguca

SEQ ID NO: 7776 - RNA, 17 nt, Homo sapiens
cucugaugaugucagau

SEQ ID NO: 7777 - RNA, 17 nt, Homo sapiens
cugaugaugucagauau

SEQ ID NO: 7778 - RNA, 17 nt, Homo sapiens
gaugucagauauguaaa

SEQ ID NO: 7779 - RNA, 17 nt, Homo sapiens
ucagauauguaaaugcu

SEQ ID NO: 7780 - RNA, 17 nt, Homo sapiens
auauguaaaugcuuuca

SEQ ID NO: 7781 - RNA, 17 nt, Homo sapiens
auguaaaugcuuucaag

SEQ ID NO: 7782 - RNA, 17 nt, Homo sapiens
gcuuucaaguucaugag

SEQ ID NO: 7783 - RNA, 17 nt, Homo sapiens
guucaugagccuggaaa

SEQ ID NO: 7784 - RNA, 17 nt, Homo sapiens
uggaaagaaucaaaacc

SEQ ID NO: 7785 - RNA, 17 nt, Homo sapiens
gaaucaaaaccuuugaa

SEQ ID NO: 7786 - RNA, 17 nt, Homo sapiens
uuugaagaacuuuuacc

SEQ ID NO: 7787 - RNA, 17 nt, Homo sapiens
uuuaccgaaugccaccu

SEQ ID NO: 7788 - RNA, 17 nt, Homo sapiens
uaccgaaugccaccucc

SEQ ID NO: 7789 - RNA, 17 nt, Homo sapiens
accuccauguuugauga

SEQ ID NO: 7790 - RNA, 17 nt, Homo sapiens
cauguuugaugacuacc

SEQ ID NO: 7791 - RNA, 17 nt, Homo sapiens
guuugaugacuaccagg

SEQ ID NO: 7792 - RNA, 17 nt, Homo sapiens
cuaccagggcgacagca

SEQ ID NO: 7793 - RNA, 17 nt, Homo sapiens
ccagggcgacagcagca

SEQ ID NO: 7794 - RNA, 17 nt, Homo sapiens
gggcgacagcagcacuc

SEQ ID NO: 7795 - RNA, 17 nt, Homo sapiens
cgacagcagcacucugu

SEQ ID NO: 7796 - RNA, 17 nt, Homo sapiens
agcacucuguuggccuc

SEQ ID NO: 7797 - RNA, 17 nt, Homo sapiens
cucuguuggccucuccc

SEQ ID NO: 7798 - RNA, 17 nt, Homo sapiens
ucucccaugcugaagcg

SEQ ID NO: 7799 - RNA, 17 nt, Homo sapiens
augcugaagcgcuucac

SEQ ID NO: 7800 - RNA, 17 nt, Homo sapiens
gcugaagcgcuucaccu

SEQ ID NO: 7801 - RNA, 17 nt, Homo sapiens
ucaccuggacugacagc

SEQ ID NO: 7802 - RNA, 17 nt, Homo sapiens
cuggacugacagcaaac

SEQ ID NO: 7803 - RNA, 17 nt, Homo sapiens
gacugacagcaaaccca

SEQ ID NO: 7804 - RNA, 17 nt, Homo sapiens
gacagcaaacccaaggc

SEQ ID NO: 7805 - RNA, 17 nt, Homo sapiens
aacccaaggccucgcuc

SEQ ID NO: 7806 - RNA, 17 nt, Homo sapiens
aaggccucgcucaagau

SEQ ID NO: 7807 - RNA, 17 nt, Homo sapiens
cgcucaagauugacuug

SEQ ID NO: 7808 - RNA, 17 nt, Homo sapiens
caagauugacuugagag

SEQ ID NO: 7809 - RNA, 17 nt, Homo sapiens
acuugagaguaaccagu

SEQ ID NO: 7810 - RNA, 17 nt, Homo sapiens
ugagaguaaccaguaaa

SEQ ID NO: 7811 - RNA, 17 nt, Homo sapiens
aguaaccaguaaaagua

SEQ ID NO: 7812 - RNA, 17 nt, Homo sapiens
caguaaaaguaaggagu

SEQ ID NO: 7813 - RNA, 17 nt, Homo sapiens
aguaaggagucggggcu

SEQ ID NO: 7814 - RNA, 17 nt, Homo sapiens
gagucggggcugucuga

SEQ ID NO: 7815 - RNA, 17 nt, Homo sapiens
ucggggcugucugaugu

SEQ ID NO: 7816 - RNA, 17 nt, Homo sapiens
gcugucugaugucagca

SEQ ID NO: 7817 - RNA, 17 nt, Homo sapiens
ugucugaugucagcagg

SEQ ID NO: 7818 - RNA, 17 nt, Homo sapiens
ugaugucagcaggccca

SEQ ID NO: 7819 - RNA, 17 nt, Homo sapiens
gucagcaggcccaguuu

SEQ ID NO: 7820 - RNA, 17 nt, Homo sapiens
caggcccaguuucugcc

SEQ ID NO: 7821 - RNA, 17 nt, Homo sapiens
caguuucugccauucca

SEQ ID NO: 7822 - RNA, 17 nt, Homo sapiens
ccauuccagcugugggc

SEQ ID NO: 7823 - RNA, 17 nt, Homo sapiens
uuccagcugugggcacg

SEQ ID NO: 7824 - RNA, 17 nt, Homo sapiens
agcugugggcacgucag

SEQ ID NO: 7825 - RNA, 17 nt, Homo sapiens
gugggcacgucagcgaa

SEQ ID NO: 7826 - RNA, 17 nt, Homo sapiens
gcacgucagcgaaggca

SEQ ID NO: 7827 - RNA, 17 nt, Homo sapiens
cagcgaaggcaagcgca

SEQ ID NO: 7828 - RNA, 17 nt, Homo sapiens
gaaggcaagcgcagguu

SEQ ID NO: 7829 - RNA, 17 nt, Homo sapiens
aggcaagcgcagguuca

SEQ ID NO: 7830 - RNA, 17 nt, Homo sapiens
aagcgcagguucaccua

SEQ ID NO: 7831 - RNA, 17 nt, Homo sapiens
caccuacgaccacgcug

SEQ ID NO: 7832 - RNA, 17 nt, Homo sapiens
acgaccacgcugagcug

SEQ ID NO: 7833 - RNA, 17 nt, Homo sapiens
cacgcugagcuggaaag

SEQ ID NO: 7834 - RNA, 17 nt, Homo sapiens
aaaggaaaaucgcgugc

SEQ ID NO: 7835 - RNA, 17 nt, Homo sapiens
ggaaaaucgcgugcugc

SEQ ID NO: 7836 - RNA, 17 nt, Homo sapiens
aaaaucgcgugcugcuc

SEQ ID NO: 7837 - RNA, 17 nt, Homo sapiens
aaucgcgugcugcuccc

SEQ ID NO: 7838 - RNA, 17 nt, Homo sapiens
cgcgugcugcuccccgc

SEQ ID NO: 7839 - RNA, 17 nt, Homo sapiens
ugcuccccgcccccaga

SEQ ID NO: 7840 - RNA, 17 nt, Homo sapiens
gcccccagacuacaacu

SEQ ID NO: 7841 - RNA, 17 nt, Homo sapiens
agacuacaacucggugg

SEQ ID NO: 7842 - RNA, 17 nt, Homo sapiens
acaacucggugguccug

SEQ ID NO: 7843 - RNA, 17 nt, Homo sapiens
acucggugguccuguac

SEQ ID NO: 7844 - RNA, 17 nt, Homo sapiens
gugguccuguacuccac

SEQ ID NO: 7845 - RNA, 17 nt, Homo sapiens
caucuagaguuugacac

SEQ ID NO: 7846 - RNA, 17 nt, Homo sapiens
agaguuugacacgaagc

SEQ ID NO: 7847 - RNA, 17 nt, Homo sapiens
gacacgaagccuuauuu

SEQ ID NO: 7848 - RNA, 17 nt, Homo sapiens
uucuagaagcacaugug

SEQ ID NO: 7849 - RNA, 17 nt, Homo sapiens
aagcacauguguauuua

SEQ ID NO: 7850 - RNA, 17 nt, Homo sapiens
gcacauguguauuuaua

SEQ ID NO: 7851 - RNA, 17 nt, Homo sapiens
cccaggaaacuagcuuu

SEQ ID NO: 7852 - RNA, 17 nt, Homo sapiens
ggaaacuagcuuuugcc

SEQ ID NO: 7853 - RNA, 17 nt, Homo sapiens
uagcuuuugccaguauu

SEQ ID NO: 7854 - RNA, 17 nt, Homo sapiens
uuuugccaguauuaugc

SEQ ID NO: 7855 - RNA, 17 nt, Homo sapiens
aguauuaugcauauaua

SEQ ID NO: 7856 - RNA, 17 nt, Homo sapiens
auauauaaguuuacacc

SEQ ID NO: 7857 - RNA, 17 nt, Homo sapiens
ccaugggagccagcugc

SEQ ID NO: 7858 - RNA, 17 nt, Homo sapiens
gggagccagcugcuuuu

SEQ ID NO: 7859 - RNA, 17 nt, Homo sapiens
agccagcugcuuuuugu

SEQ ID NO: 7860 - RNA, 17 nt, Homo sapiens
ugcuuuuugugauuuuu

SEQ ID NO: 7861 - RNA, 17 nt, Homo sapiens
uuuuugugauuuuuuua

SEQ ID NO: 7862 - RNA, 17 nt, Homo sapiens
uuuuuuuaauagugcuu

SEQ ID NO: 7863 - RNA, 17 nt, Homo sapiens
uuuuaauagugcuuuuu

SEQ ID NO: 7864 - RNA, 17 nt, Homo sapiens
uuaauagugcuuuuuuu

SEQ ID NO: 7865 - RNA, 17 nt, Homo sapiens
uuuuuuugacuaacaag

SEQ ID NO: 7866 - RNA, 17 nt, Homo sapiens
uuugacuaacaagaaug

SEQ ID NO: 7867 - RNA, 17 nt, Homo sapiens
uaacaagaauguaacuc

SEQ ID NO: 7868 - RNA, 17 nt, Homo sapiens
acaagaauguaacucca

SEQ ID NO: 7869 - RNA, 17 nt, Homo sapiens
agaauguaacuccagau

SEQ ID NO: 7870 - RNA, 17 nt, Homo sapiens
aacuccagauagagaaa

SEQ ID NO: 7871 - RNA, 17 nt, Homo sapiens
auagagaaauagugaca

SEQ ID NO: 7872 - RNA, 17 nt, Homo sapiens
gagaaauagugacaagu

SEQ ID NO: 7873 - RNA, 17 nt, Homo sapiens
aaauagugacaagugaa

SEQ ID NO: 7874 - RNA, 17 nt, Homo sapiens
agugacaagugaagaac

SEQ ID NO: 7875 - RNA, 17 nt, Homo sapiens
agugaagaacacuacug

SEQ ID NO: 7876 - RNA, 17 nt, Homo sapiens
acacuacugcuaaaucc

SEQ ID NO: 7877 - RNA, 17 nt, Homo sapiens
acugcuaaauccucaug

SEQ ID NO: 7878 - RNA, 17 nt, Homo sapiens
auccucauguuacucag

SEQ ID NO: 7879 - RNA, 17 nt, Homo sapiens
guuacucaguguuagag

SEQ ID NO: 7880 - RNA, 17 nt, Homo sapiens
uacucaguguuagagaa

SEQ ID NO: 7881 - RNA, 17 nt, Homo sapiens
uuagagaaauccuuccu

SEQ ID NO: 7882 - RNA, 17 nt, Homo sapiens
cuuccuaaacccaauga

SEQ ID NO: 7883 - RNA, 17 nt, Homo sapiens
uaaacccaaugacuucc

SEQ ID NO: 7884 - RNA, 17 nt, Homo sapiens
acccaaugacuucccug

SEQ ID NO: 7885 - RNA, 17 nt, Homo sapiens
acuucccugcuccaacc

SEQ ID NO: 7886 - RNA, 17 nt, Homo sapiens
cugcuccaacccccgcc

SEQ ID NO: 7887 - RNA, 17 nt, Homo sapiens
caacccccgccaccuca

SEQ ID NO: 7888 - RNA, 17 nt, Homo sapiens
accucagggcacgcagg

SEQ ID NO: 7889 - RNA, 17 nt, Homo sapiens
cagggcacgcaggacca

SEQ ID NO: 7890 - RNA, 17 nt, Homo sapiens
cacgcaggaccaguuug

SEQ ID NO: 7891 - RNA, 17 nt, Homo sapiens
caggaccaguuugauug

SEQ ID NO: 7892 - RNA, 17 nt, Homo sapiens
ccaguuugauugaggag

SEQ ID NO: 7893 - RNA, 17 nt, Homo sapiens
auugaggagcugcacug

SEQ ID NO: 7894 - RNA, 17 nt, Homo sapiens
gaggagcugcacugauc

SEQ ID NO: 7895 - RNA, 17 nt, Homo sapiens
cugcacugaucacccaa

SEQ ID NO: 7896 - RNA, 17 nt, Homo sapiens
aucacccaaugcaucac

SEQ ID NO: 7897 - RNA, 17 nt, Homo sapiens
cacccaaugcaucacgu

SEQ ID NO: 7898 - RNA, 17 nt, Homo sapiens
ugcaucacguaccccac

SEQ ID NO: 7899 - RNA, 17 nt, Homo sapiens
cccacugggccagcccu

SEQ ID NO: 7900 - RNA, 17 nt, Homo sapiens
cugggccagcccugcag

SEQ ID NO: 7901 - RNA, 17 nt, Homo sapiens
ccagcccugcagcccaa

SEQ ID NO: 7902 - RNA, 17 nt, Homo sapiens
gcccugcagcccaaaac

SEQ ID NO: 7903 - RNA, 17 nt, Homo sapiens
agcccaaaacccagggc

SEQ ID NO: 7904 - RNA, 17 nt, Homo sapiens
aacccagggcaacaagc

SEQ ID NO: 7905 - RNA, 17 nt, Homo sapiens
ccagggcaacaagcccg

SEQ ID NO: 7906 - RNA, 17 nt, Homo sapiens
ggcaacaagcccguuag

SEQ ID NO: 7907 - RNA, 17 nt, Homo sapiens
acaagcccguuagcccc

SEQ ID NO: 7908 - RNA, 17 nt, Homo sapiens
gcccguuagccccaggg

SEQ ID NO: 7909 - RNA, 17 nt, Homo sapiens
cccaggggaucacuggc

SEQ ID NO: 7910 - RNA, 17 nt, Homo sapiens
gaucacuggcuggccug

SEQ ID NO: 7911 - RNA, 17 nt, Homo sapiens
acuggcuggccugagca

SEQ ID NO: 7912 - RNA, 17 nt, Homo sapiens
uggccugagcaacaucu

SEQ ID NO: 7913 - RNA, 17 nt, Homo sapiens
ccugagcaacaucucgg

SEQ ID NO: 7914 - RNA, 17 nt, Homo sapiens
ucucgggaguccucuag

SEQ ID NO: 7915 - RNA, 17 nt, Homo sapiens
guccucuagcaggccua

SEQ ID NO: 7916 - RNA, 17 nt, Homo sapiens
ucuagcaggccuaagac

SEQ ID NO: 7917 - RNA, 17 nt, Homo sapiens
ggccuaagacaugugag

SEQ ID NO: 7918 - RNA, 17 nt, Homo sapiens
uaagacaugugaggagg

SEQ ID NO: 7919 - RNA, 17 nt, Homo sapiens
gaaaaaaagcaaaaagc

SEQ ID NO: 7920 - RNA, 17 nt, Homo sapiens
agcaaaaagcaagggag

SEQ ID NO: 7921 - RNA, 17 nt, Homo sapiens
aaagagaaaccgggaga

SEQ ID NO: 7922 - RNA, 17 nt, Homo sapiens
gggagaaggcaugagaa

SEQ ID NO: 7923 - RNA, 17 nt, Homo sapiens
gagaaagaauuugagac

SEQ ID NO: 7924 - RNA, 17 nt, Homo sapiens
aauuugagacgcaccau

SEQ ID NO: 7925 - RNA, 17 nt, Homo sapiens
uuugagacgcaccaugu

SEQ ID NO: 7926 - RNA, 17 nt, Homo sapiens
cgcaccaugugggcacg

SEQ ID NO: 7927 - RNA, 17 nt, Homo sapiens
ccaugugggcacggagg

SEQ ID NO: 7928 - RNA, 17 nt, Homo sapiens
ggagggggacggggcuc

SEQ ID NO: 7929 - RNA, 17 nt, Homo sapiens
gggacggggcucagcaa

SEQ ID NO: 7930 - RNA, 17 nt, Homo sapiens
ggggcucagcaaugcca

SEQ ID NO: 7931 - RNA, 17 nt, Homo sapiens
gcucagcaaugccauuu

SEQ ID NO: 7932 - RNA, 17 nt, Homo sapiens
ucagcaaugccauuuca

SEQ ID NO: 7933 - RNA, 17 nt, Homo sapiens
ccauuucaguggcuucc

SEQ ID NO: 7934 - RNA, 17 nt, Homo sapiens
uuucaguggcuucccag

SEQ ID NO: 7935 - RNA, 17 nt, Homo sapiens
gcuucccagcucugacc

SEQ ID NO: 7936 - RNA, 17 nt, Homo sapiens
cagcucugacccuucua

SEQ ID NO: 7937 - RNA, 17 nt, Homo sapiens
auuugagggcccagcca

SEQ ID NO: 7938 - RNA, 17 nt, Homo sapiens
agggcccagccaggagc

SEQ ID NO: 7939 - RNA, 17 nt, Homo sapiens
agccaggagcagaugga

SEQ ID NO: 7940 - RNA, 17 nt, Homo sapiens
aggagcagauggacagc

SEQ ID NO: 7941 - RNA, 17 nt, Homo sapiens
gcagauggacagcgaug

SEQ ID NO: 7942 - RNA, 17 nt, Homo sapiens
gauggacagcgaugagg

SEQ ID NO: 7943 - RNA, 17 nt, Homo sapiens
ggacagcgaugagggga

SEQ ID NO: 7944 - RNA, 17 nt, Homo sapiens
augaggggacauuuucu

SEQ ID NO: 7945 - RNA, 17 nt, Homo sapiens
uuuucuggauucuggga

SEQ ID NO: 7946 - RNA, 17 nt, Homo sapiens
ucugggaggcaagaaaa

SEQ ID NO: 7947 - RNA, 17 nt, Homo sapiens
agaaaaggacaaauauc

SEQ ID NO: 7948 - RNA, 17 nt, Homo sapiens
aaggacaaauaucuuuu

SEQ ID NO: 7949 - RNA, 17 nt, Homo sapiens
uuuuuggaacuaaagca

SEQ ID NO: 7950 - RNA, 17 nt, Homo sapiens
gaacuaaagcaaauuuu

SEQ ID NO: 7951 - RNA, 17 nt, Homo sapiens
uaaagcaaauuuuagac

SEQ ID NO: 7952 - RNA, 17 nt, Homo sapiens
aauuuuagaccuuuacc

SEQ ID NO: 7953 - RNA, 17 nt, Homo sapiens
cuauggaagugguucua

SEQ ID NO: 7954 - RNA, 17 nt, Homo sapiens
uggaagugguucuaugu

SEQ ID NO: 7955 - RNA, 17 nt, Homo sapiens
gguucuauguccauucu

SEQ ID NO: 7956 - RNA, 17 nt, Homo sapiens
ucucauucguggcaugu

SEQ ID NO: 7957 - RNA, 17 nt, Homo sapiens
cauucguggcauguuuu

SEQ ID NO: 7958 - RNA, 17 nt, Homo sapiens
cguggcauguuuugauu

SEQ ID NO: 7959 - RNA, 17 nt, Homo sapiens
auguuuugauuuguagc

SEQ ID NO: 7960 - RNA, 17 nt, Homo sapiens
uuugauuuguagcacug

SEQ ID NO: 7961 - RNA, 17 nt, Homo sapiens
gauuuguagcacugagg

SEQ ID NO: 7962 - RNA, 17 nt, Homo sapiens
cacugaggguggcacuc

SEQ ID NO: 7963 - RNA, 17 nt, Homo sapiens
ugaggguggcacucaac

SEQ ID NO: 7964 - RNA, 17 nt, Homo sapiens
ggcacucaacucugagc

SEQ ID NO: 7965 - RNA, 17 nt, Homo sapiens
aacucugagcccauacu

SEQ ID NO: 7966 - RNA, 17 nt, Homo sapiens
uacuuuuggcuccucua

SEQ ID NO: 7967 - RNA, 17 nt, Homo sapiens
cuccucuaguaagaugc

SEQ ID NO: 7968 - RNA, 17 nt, Homo sapiens
cuaguaagaugcacuga

SEQ ID NO: 7969 - RNA, 17 nt, Homo sapiens
aguaagaugcacugaaa

SEQ ID NO: 7970 - RNA, 17 nt, Homo sapiens
cacugaaaacuuagcca

SEQ ID NO: 7971 - RNA, 17 nt, Homo sapiens
aaaacuuagccagaguu

SEQ ID NO: 7972 - RNA, 17 nt, Homo sapiens
uagccagaguuagguug

SEQ ID NO: 7973 - RNA, 17 nt, Homo sapiens
agaguuagguugucucc

SEQ ID NO: 7974 - RNA, 17 nt, Homo sapiens
guuagguugucuccagg

SEQ ID NO: 7975 - RNA, 17 nt, Homo sapiens
gucuccaggccaugaug

SEQ ID NO: 7976 - RNA, 17 nt, Homo sapiens
aggccaugauggccuua

SEQ ID NO: 7977 - RNA, 17 nt, Homo sapiens
ccaugauggccuuacac

SEQ ID NO: 7978 - RNA, 17 nt, Homo sapiens
cacugaaaaugucacau

SEQ ID NO: 7979 - RNA, 17 nt, Homo sapiens
cugaaaaugucacauuc

SEQ ID NO: 7980 - RNA, 17 nt, Homo sapiens
uauuuuggguauuaaua

SEQ ID NO: 7981 - RNA, 17 nt, Homo sapiens
ggguauuaauauauagu

SEQ ID NO: 7982 - RNA, 17 nt, Homo sapiens
aauauauaguccagaca

SEQ ID NO: 7983 - RNA, 17 nt, Homo sapiens
uaguccagacacuuaac

SEQ ID NO: 7984 - RNA, 17 nt, Homo sapiens
gacacuuaacucaauuu

SEQ ID NO: 7985 - RNA, 17 nt, Homo sapiens
uuaacucaauuucuugg

SEQ ID NO: 7986 - RNA, 17 nt, Homo sapiens
auuucuugguauuauuc

SEQ ID NO: 7987 - RNA, 17 nt, Homo sapiens
auuauucuguuuugcac

SEQ ID NO: 7988 - RNA, 17 nt, Homo sapiens
ucuguuuugcacaguua

SEQ ID NO: 7989 - RNA, 17 nt, Homo sapiens
uuugcacaguuaguugu

SEQ ID NO: 7990 - RNA, 17 nt, Homo sapiens
cacaguuaguugugaaa

SEQ ID NO: 7991 - RNA, 17 nt, Homo sapiens
aguuaguugugaaagaa

SEQ ID NO: 7992 - RNA, 17 nt, Homo sapiens
gaaagaaagcugagaag

SEQ ID NO: 7993 - RNA, 17 nt, Homo sapiens
ugagaagaaugaaaaug

SEQ ID NO: 7994 - RNA, 17 nt, Homo sapiens
gaaugaaaaugcagucc

SEQ ID NO: 7995 - RNA, 17 nt, Homo sapiens
augaaaaugcaguccug

SEQ ID NO: 7996 - RNA, 17 nt, Homo sapiens
aaaaugcaguccugagg

SEQ ID NO: 7997 - RNA, 17 nt, Homo sapiens
ugaggagaguuuucucc

SEQ ID NO: 7998 - RNA, 17 nt, Homo sapiens
auaucaaaacgagggcu

SEQ ID NO: 7999 - RNA, 17 nt, Homo sapiens
aaacgagggcugaugga

SEQ ID NO: 8000 - RNA, 17 nt, Homo sapiens
gagggcugauggaggaa

SEQ ID NO: 8001 - RNA, 17 nt, Homo sapiens
ggaaaaaggucaauaag

SEQ ID NO: 8002 - RNA, 17 nt, Homo sapiens
aaaggucaauaagguca

SEQ ID NO: 8003 - RNA, 17 nt, Homo sapiens
ucaauaaggucaaggga

SEQ ID NO: 8004 - RNA, 17 nt, Homo sapiens
aagggaagaccccgucu

SEQ ID NO: 8005 - RNA, 17 nt, Homo sapiens
aagaccccgucucuaua

SEQ ID NO: 8006 - RNA, 17 nt, Homo sapiens
cuauaccaaccaaacca

SEQ ID NO: 8007 - RNA, 17 nt, Homo sapiens
ccaaccaaaccaauuca

SEQ ID NO: 8008 - RNA, 17 nt, Homo sapiens
ccaaaccaauucaccaa

SEQ ID NO: 8009 - RNA, 17 nt, Homo sapiens
auucaccaacacaguug

SEQ ID NO: 8010 - RNA, 17 nt, Homo sapiens
ccaacacaguugggacc

SEQ ID NO: 8011 - RNA, 17 nt, Homo sapiens
caguugggacccaaaac

SEQ ID NO: 8012 - RNA, 17 nt, Homo sapiens
gacccaaaacacaggaa

SEQ ID NO: 8013 - RNA, 17 nt, Homo sapiens
cacaggaagucagucac

SEQ ID NO: 8014 - RNA, 17 nt, Homo sapiens
ggaagucagucacguuu

SEQ ID NO: 8015 - RNA, 17 nt, Homo sapiens
ucagucacguuuccuuu

SEQ ID NO: 8016 - RNA, 17 nt, Homo sapiens
uucauuuaauggggauu

SEQ ID NO: 8017 - RNA, 17 nt, Homo sapiens
uaauggggauuccacua

SEQ ID NO: 8018 - RNA, 17 nt, Homo sapiens
ucacacuaaucugaaag

SEQ ID NO: 8019 - RNA, 17 nt, Homo sapiens
cugaaaggauguggaag

SEQ ID NO: 8020 - RNA, 17 nt, Homo sapiens
gaaaggauguggaagag

SEQ ID NO: 8021 - RNA, 17 nt, Homo sapiens
guggaagagcauuagcu

SEQ ID NO: 8022 - RNA, 17 nt, Homo sapiens
gagcauuagcuggcgca

SEQ ID NO: 8023 - RNA, 17 nt, Homo sapiens
auuagcuggcgcauauu

SEQ ID NO: 8024 - RNA, 17 nt, Homo sapiens
uagcuggcgcauauuaa

SEQ ID NO: 8025 - RNA, 17 nt, Homo sapiens
cauauuaagcacuuuaa

SEQ ID NO: 8026 - RNA, 17 nt, Homo sapiens
cacuuuaagcuccuuga

SEQ ID NO: 8027 - RNA, 17 nt, Homo sapiens
cuccuugaguaaaaagg

SEQ ID NO: 8028 - RNA, 17 nt, Homo sapiens
guaaaaaggugguaugu

SEQ ID NO: 8029 - RNA, 17 nt, Homo sapiens
aaaaggugguauguaau

SEQ ID NO: 8030 - RNA, 17 nt, Homo sapiens
ggugguauguaauuuau

SEQ ID NO: 8031 - RNA, 17 nt, Homo sapiens
gguauguaauuuaugca

SEQ ID NO: 8032 - RNA, 17 nt, Homo sapiens
uaauuuaugcaagguau

SEQ ID NO: 8033 - RNA, 17 nt, Homo sapiens
uaugcaagguauuucuc

SEQ ID NO: 8034 - RNA, 17 nt, Homo sapiens
uuucuccaguugggacu

SEQ ID NO: 8035 - RNA, 17 nt, Homo sapiens
caguugggacucaggau

SEQ ID NO: 8036 - RNA, 17 nt, Homo sapiens
gacucaggauauuaguu

SEQ ID NO: 8037 - RNA, 17 nt, Homo sapiens
ggauauuaguuaaugag

SEQ ID NO: 8038 - RNA, 17 nt, Homo sapiens
auuaguuaaugagccau

SEQ ID NO: 8039 - RNA, 17 nt, Homo sapiens
guuaaugagccaucacu

SEQ ID NO: 8040 - RNA, 17 nt, Homo sapiens
gaagaaaagcccauuuu

SEQ ID NO: 8041 - RNA, 17 nt, Homo sapiens
cauuuucaacugcuuug

SEQ ID NO: 8042 - RNA, 17 nt, Homo sapiens
uuucaacugcuuugaaa

SEQ ID NO: 8043 - RNA, 17 nt, Homo sapiens
gcuuugaaacuugccug

SEQ ID NO: 8044 - RNA, 17 nt, Homo sapiens
ugaaacuugccuggggu

SEQ ID NO: 8045 - RNA, 17 nt, Homo sapiens
ugccuggggucugagca

SEQ ID NO: 8046 - RNA, 17 nt, Homo sapiens
gggucugagcaugaugg

SEQ ID NO: 8047 - RNA, 17 nt, Homo sapiens
ugagcaugaugggaaua

SEQ ID NO: 8048 - RNA, 17 nt, Homo sapiens
ugaugggaauagggaga

SEQ ID NO: 8049 - RNA, 17 nt, Homo sapiens
auagggagacaggguag

SEQ ID NO: 8050 - RNA, 17 nt, Homo sapiens
gagacaggguaggaaag

SEQ ID NO: 8051 - RNA, 17 nt, Homo sapiens
aggaaagggcgccuacu

SEQ ID NO: 8052 - RNA, 17 nt, Homo sapiens
gaaagggcgccuacucu

SEQ ID NO: 8053 - RNA, 17 nt, Homo sapiens
ucuucagggucuaaaga

SEQ ID NO: 8054 - RNA, 17 nt, Homo sapiens
gucuaaagaucaagugg

SEQ ID NO: 8055 - RNA, 17 nt, Homo sapiens
aagaucaagugggccuu

SEQ ID NO: 8056 - RNA, 17 nt, Homo sapiens
ucaagugggccuuggau

SEQ ID NO: 8057 - RNA, 17 nt, Homo sapiens
ggccuuggaucgcuaag

SEQ ID NO: 8058 - RNA, 17 nt, Homo sapiens
cuuggaucgcuaagcug

SEQ ID NO: 8059 - RNA, 17 nt, Homo sapiens
aucgcuaagcuggcucu

SEQ ID NO: 8060 - RNA, 17 nt, Homo sapiens
cuaagcuggcucuguuu

SEQ ID NO: 8061 - RNA, 17 nt, Artificial Sequence
  Description of Artificial Sequence:  Enzymatic Nucleic Acid
cuggcucuguuugaugc

SEQ ID NO: 8062 - RNA, 17 nt, Homo sapiens
ucuguuugaugcuauuu

SEQ ID NO: 8063 - RNA, 17 nt, Homo sapiens
uguuugaugcuauuuau

SEQ ID NO: 8064 - RNA, 17 nt, Homo sapiens
cuauuuaugcaaguuag

SEQ ID NO: 8065 - RNA, 17 nt, Homo sapiens
uuaugcaaguuaggguc

SEQ ID NO: 8066 - RNA, 17 nt, Homo sapiens
aaguuagggucuaugua

SEQ ID NO: 8067 - RNA, 17 nt, Homo sapiens
gggucuauguauuuagg

SEQ ID NO: 8068 - RNA, 17 nt, Homo sapiens
uauuuaggaugcgccua

SEQ ID NO: 8069 - RNA, 17 nt, Homo sapiens
uuuaggaugcgccuacu

SEQ ID NO: 8070 - RNA, 17 nt, Homo sapiens
uaggaugcgccuacucu

SEQ ID NO: 8071 - RNA, 17 nt, Homo sapiens
uauuuaggaugucugca

SEQ ID NO: 8072 - RNA, 17 nt, Homo sapiens
uuuaggaugucugcacc

SEQ ID NO: 8073 - RNA, 17 nt, Homo sapiens
ggaugucugcaccuucu

SEQ ID NO: 8074 - RNA, 17 nt, Homo sapiens
caccuucugcagccagu

SEQ ID NO: 8075 - RNA, 17 nt, Homo sapiens
cuucugcagccagucag

SEQ ID NO: 8076 - RNA, 17 nt, Homo sapiens
ugcagccagucagaagc

SEQ ID NO: 8077 - RNA, 17 nt, Homo sapiens
agucagaagcuggagag

SEQ ID NO: 8078 - RNA, 17 nt, Homo sapiens
cuggagaggcaacagug

SEQ ID NO: 8079 - RNA, 17 nt, Homo sapiens
gagaggcaacaguggau

SEQ ID NO: 8080 - RNA, 17 nt, Homo sapiens
aggcaacaguggauugc

SEQ ID NO: 8081 - RNA, 17 nt, Homo sapiens
aacaguggauugcugcu

SEQ ID NO: 8082 - RNA, 17 nt, Homo sapiens
aguggauugcugcuucu

SEQ ID NO: 8083 - RNA, 17 nt, Homo sapiens
ggauugcugcuucuugg

SEQ ID NO: 8084 - RNA, 17 nt, Homo sapiens
ggagaagaguaugcuuc

SEQ ID NO: 8085 - RNA, 17 nt, Homo sapiens
aagaguaugcuuccuuu

SEQ ID NO: 8086 - RNA, 17 nt, Homo sapiens
uuauccauguaauuuaa

SEQ ID NO: 8087 - RNA, 17 nt, Homo sapiens
uccauguaauuuaacug

SEQ ID NO: 8088 - RNA, 17 nt, Homo sapiens
guaauuuaacuguagaa

SEQ ID NO: 8089 - RNA, 17 nt, Homo sapiens
auuuaacuguagaaccu

SEQ ID NO: 8090 - RNA, 17 nt, Homo sapiens
acuguagaaccugagcu

SEQ ID NO: 8091 - RNA, 17 nt, Homo sapiens
gaaccugagcucuaagu

SEQ ID NO: 8092 - RNA, 17 nt, Homo sapiens
agcucuaaguaaccgaa

SEQ ID NO: 8093 - RNA, 17 nt, Homo sapiens
ucuaaguaaccgaagaa

SEQ ID NO: 8094 - RNA, 17 nt, Homo sapiens
accgaagaauguaugcc

SEQ ID NO: 8095 - RNA, 17 nt, Homo sapiens
cgaagaauguaugccuc

SEQ ID NO: 8096 - RNA, 17 nt, Homo sapiens
gaauguaugccucuguu

SEQ ID NO: 8097 - RNA, 17 nt, Homo sapiens
augccucuguucuuaug

SEQ ID NO: 8098 - RNA, 17 nt, Homo sapiens
guucuuaugugccacau

SEQ ID NO: 8099 - RNA, 17 nt, Homo sapiens
ucuuaugugccacaucc

SEQ ID NO: 8100 - RNA, 17 nt, Homo sapiens
acauccuuguuuaaagg

SEQ ID NO: 8101 - RNA, 17 nt, Homo sapiens
guuuaaaggcucucugu

SEQ ID NO: 8102 - RNA, 17 nt, Homo sapiens
ggcucucuguaugaaga

SEQ ID NO: 8103 - RNA, 17 nt, Homo sapiens
augaagagaugggaccg

SEQ ID NO: 8104 - RNA, 17 nt, Homo sapiens
gagaugggaccgucauc

SEQ ID NO: 8105 - RNA, 17 nt, Homo sapiens
augggaccgucaucagc

SEQ ID NO: 8106 - RNA, 17 nt, Homo sapiens
cgucaucagcacauucc

SEQ ID NO: 8107 - RNA, 17 nt, Homo sapiens
auucccuagugagccua

SEQ ID NO: 8108 - RNA, 17 nt, Homo sapiens
ccuagugagccuacugg

SEQ ID NO: 8109 - RNA, 17 nt, Homo sapiens
gccuacuggcuccuggc

SEQ ID NO: 8110 - RNA, 17 nt, Homo sapiens
ggcuccuggcagcggcu

SEQ ID NO: 8111 - RNA, 17 nt, Homo sapiens
uccuggcagcggcuuuu

SEQ ID NO: 8112 - RNA, 17 nt, Homo sapiens
uggcagcggcuuuugug

SEQ ID NO: 8113 - RNA, 17 nt, Homo sapiens
cggcuuuuguggaagac

SEQ ID NO: 8114 - RNA, 17 nt, Homo sapiens
uguggaagacucacuag

SEQ ID NO: 8115 - RNA, 17 nt, Homo sapiens
acucacuagccagaaga

SEQ ID NO: 8116 - RNA, 17 nt, Homo sapiens
agagaggagugggacag

SEQ ID NO: 8117 - RNA, 17 nt, Homo sapiens
ggagugggacaguccuc

SEQ ID NO: 8118 - RNA, 17 nt, Homo sapiens
gugggacaguccucucc

SEQ ID NO: 8119 - RNA, 17 nt, Homo sapiens
ccaccaagaucuaaauc

SEQ ID NO: 8120 - RNA, 17 nt, Homo sapiens
agaucuaaauccaaaca

SEQ ID NO: 8121 - RNA, 17 nt, Homo sapiens
aaauccaaacaaaagca

SEQ ID NO: 8122 - RNA, 17 nt, Homo sapiens
aaacaaaagcaggcuag

SEQ ID NO: 8123 - RNA, 17 nt, Homo sapiens
aaaagcaggcuagagcc

SEQ ID NO: 8124 - RNA, 17 nt, Homo sapiens
aggcuagagccagaaga

SEQ ID NO: 8125 - RNA, 17 nt, Homo sapiens
aagagaggacaaaucuu

SEQ ID NO: 8126 - RNA, 17 nt, Homo sapiens
gaggacaaaucuuuguu

SEQ ID NO: 8127 - RNA, 17 nt, Homo sapiens
aaaucuuuguuguuccu

SEQ ID NO: 8128 - RNA, 17 nt, Homo sapiens
ucuuuguuguuccucuu

SEQ ID NO: 8129 - RNA, 17 nt, Homo sapiens
acacauacgcaaaccac

SEQ ID NO: 8130 - RNA, 17 nt, Homo sapiens
auacgcaaaccaccugu

SEQ ID NO: 8131 - RNA, 17 nt, Homo sapiens
aaccaccugugacagcu

SEQ ID NO: 8132 - RNA, 17 nt, Homo sapiens
caccugugacagcuggc

SEQ ID NO: 8133 - RNA, 17 nt, Homo sapiens
cugugacagcuggcaau

SEQ ID NO: 8134 - RNA, 17 nt, Homo sapiens
gacagcuggcaauuuua

SEQ ID NO: 8135 - RNA, 17 nt, Homo sapiens
agcuggcaauuuuauaa

SEQ ID NO: 8136 - RNA, 17 nt, Homo sapiens
uuuuauaaaucagguaa

SEQ ID NO: 8137 - RNA, 17 nt, Homo sapiens
uaaaucagguaacugga

SEQ ID NO: 8138 - RNA, 17 nt, Homo sapiens
aucagguaacuggaagg

SEQ ID NO: 8139 - RNA, 17 nt, Homo sapiens
ggaaggagguuaaacuc

SEQ ID NO: 8140 - RNA, 17 nt, Homo sapiens
gagguuaaacucagaaa

SEQ ID NO: 8141 - RNA, 17 nt, Homo sapiens
aaaagaagaccucaguc

SEQ ID NO: 8142 - RNA, 17 nt, Homo sapiens
agaccucagucaauucu

SEQ ID NO: 8143 - RNA, 17 nt, Homo sapiens
cucagucaauucucuac

SEQ ID NO: 8144 - RNA, 17 nt, Homo sapiens
uuuuccaaaucagauaa

SEQ ID NO: 8145 - RNA, 17 nt, Homo sapiens
caaaucagauaauagcc

SEQ ID NO: 8146 - RNA, 17 nt, Homo sapiens
aucagauaauagcccag

SEQ ID NO: 8147 - RNA, 17 nt, Homo sapiens
agauaauagcccagcaa

SEQ ID NO: 8148 - RNA, 17 nt, Homo sapiens
auagcccagcaaauagu

SEQ ID NO: 8149 - RNA, 17 nt, Homo sapiens
cccagcaaauagugaua

SEQ ID NO: 8150 - RNA, 17 nt, Homo sapiens
agcaaauagugauaaca

SEQ ID NO: 8151 - RNA, 17 nt, Homo sapiens
aaauagugauaacaaau

SEQ ID NO: 8152 - RNA, 17 nt, Homo sapiens
uagugauaacaaauaaa

SEQ ID NO: 8153 - RNA, 17 nt, Homo sapiens
gauaacaaauaaaaccu

SEQ ID NO: 8154 - RNA, 17 nt, Homo sapiens
caaauaaaaccuuagcu

SEQ ID NO: 8155 - RNA, 17 nt, Homo sapiens
aaaccuuagcuguucau

SEQ ID NO: 8156 - RNA, 17 nt, Homo sapiens
ccuuagcuguucauguc

SEQ ID NO: 8157 - RNA, 17 nt, Homo sapiens
cuguucaugucuugauu

SEQ ID NO: 8158 - RNA, 17 nt, Homo sapiens
augucuugauuucaaua

SEQ ID NO: 8159 - RNA, 17 nt, Homo sapiens
ugauuucaauaauuaau

SEQ ID NO: 8160 - RNA, 17 nt, Homo sapiens
uuucaauaauuaauucu

SEQ ID NO: 8161 - RNA, 17 nt, Homo sapiens
aauaauuaauucuuaau

SEQ ID NO: 8162 - RNA, 17 nt, Homo sapiens
aauucuuaaucauuaag

SEQ ID NO: 8163 - RNA, 17 nt, Homo sapiens
auuaagagaccauaaua

SEQ ID NO: 8164 - RNA, 17 nt, Homo sapiens
agaccauaauaaauacu

SEQ ID NO: 8165 - RNA, 17 nt, Homo sapiens
cauaauaaauacuccuu

SEQ ID NO: 8166 - RNA, 17 nt, Homo sapiens
agagaaaagcaaaacca

SEQ ID NO: 8167 - RNA, 17 nt, Homo sapiens
aaagcaaaaccauuaga

SEQ ID NO: 8168 - RNA, 17 nt, Homo sapiens
ccauuagaauuguuacu

SEQ ID NO: 8169 - RNA, 17 nt, Homo sapiens
uuagaauuguuacucag

SEQ ID NO: 8170 - RNA, 17 nt, Homo sapiens
guuacucagcuccuuca

SEQ ID NO: 8171 - RNA, 17 nt, Homo sapiens
uccuucaaacucagguu

SEQ ID NO: 8172 - RNA, 17 nt, Homo sapiens
aaacucagguuuguagc

SEQ ID NO: 8173 - RNA, 17 nt, Homo sapiens
ucagguuuguagcauac

SEQ ID NO: 8174 - RNA, 17 nt, Homo sapiens
gguuuguagcauacaug

SEQ ID NO: 8175 - RNA, 17 nt, Homo sapiens
auacaugaguccaucca

SEQ ID NO: 8176 - RNA, 17 nt, Homo sapiens
auccaucagucaaagaa

SEQ ID NO: 8177 - RNA, 17 nt, Homo sapiens
gucaaagaaugguucca

SEQ ID NO: 8178 - RNA, 17 nt, Homo sapiens
aaagaaugguuccaucu

SEQ ID NO: 8179 - RNA, 17 nt, Homo sapiens
caucuggagucuuaaug

SEQ ID NO: 8180 - RNA, 17 nt, Homo sapiens
gagucuuaauguagaaa

SEQ ID NO: 8181 - RNA, 17 nt, Homo sapiens
gucuuaauguagaaaga

SEQ ID NO: 8182 - RNA, 17 nt, Homo sapiens
aaagaaaaauggagacu

SEQ ID NO: 8183 - RNA, 17 nt, Homo sapiens
aaauggagacuuguaau

SEQ ID NO: 8184 - RNA, 17 nt, Homo sapiens
ggagacuuguaauaaug

SEQ ID NO: 8185 - RNA, 17 nt, Homo sapiens
gacuuguaauaaugagc

SEQ ID NO: 8186 - RNA, 17 nt, Homo sapiens
uuguaauaaugagcuag

SEQ ID NO: 8187 - RNA, 17 nt, Homo sapiens
aauaaugagcuaguuac

SEQ ID NO: 8188 - RNA, 17 nt, Homo sapiens
augagcuaguuacaaag

SEQ ID NO: 8189 - RNA, 17 nt, Homo sapiens
guuacaaagugcuuguu

SEQ ID NO: 8190 - RNA, 17 nt, Homo sapiens
uacaaagugcuuguuca

SEQ ID NO: 8191 - RNA, 17 nt, Homo sapiens
aagugcuuguucauuaa

SEQ ID NO: 8192 - RNA, 17 nt, Homo sapiens
ucauuaaaauagcacug

SEQ ID NO: 8193 - RNA, 17 nt, Homo sapiens
uuaaaauagcacugaaa

SEQ ID NO: 8194 - RNA, 17 nt, Homo sapiens
cacugaaaauugaaaca

SEQ ID NO: 8195 - RNA, 17 nt, Homo sapiens
aaauugaaacaugaauu

SEQ ID NO: 8196 - RNA, 17 nt, Homo sapiens
aaacaugaauuaacuga

SEQ ID NO: 8197 - RNA, 17 nt, Homo sapiens
augaauuaacugauaau

SEQ ID NO: 8198 - RNA, 17 nt, Homo sapiens
auuaacugauaauauuc

SEQ ID NO: 8199 - RNA, 17 nt, Homo sapiens
aacugauaauauuccaa

SEQ ID NO: 8200 - RNA, 17 nt, Homo sapiens
auauuccaaucauuugc

SEQ ID NO: 8201 - RNA, 17 nt, Homo sapiens
aaucauuugccauuuau

SEQ ID NO: 8202 - RNA, 17 nt, Homo sapiens
cauuuaugacaaaaaug

SEQ ID NO: 8203 - RNA, 17 nt, Homo sapiens
ugacaaaaaugguuggc

SEQ ID NO: 8204 - RNA, 17 nt, Homo sapiens
caaaaaugguuggcacu

SEQ ID NO: 8205 - RNA, 17 nt, Homo sapiens
aaugguuggcacuaaca

SEQ ID NO: 8206 - RNA, 17 nt, Homo sapiens
uggcacuaacaaagaac

SEQ ID NO: 8207 - RNA, 17 nt, Homo sapiens
aacaaagaacgagcacu

SEQ ID NO: 8208 - RNA, 17 nt, Homo sapiens
aagaacgagcacuuccu

SEQ ID NO: 8209 - RNA, 17 nt, Homo sapiens
cuuucagaguuucugag

SEQ ID NO: 8210 - RNA, 17 nt, Homo sapiens
uuucugagauaauguac

SEQ ID NO: 8211 - RNA, 17 nt, Homo sapiens
cugagauaauguacgug

SEQ ID NO: 8212 - RNA, 17 nt, Homo sapiens
gagauaauguacgugga

SEQ ID NO: 8213 - RNA, 17 nt, Homo sapiens
uaauguacguggaacag

SEQ ID NO: 8214 - RNA, 17 nt, Homo sapiens
uacguggaacagucugg

SEQ ID NO: 8215 - RNA, 17 nt, Homo sapiens
guggaacagucugggug

SEQ ID NO: 8216 - RNA, 17 nt, Homo sapiens
cagucuggguggaaugg

SEQ ID NO: 8217 - RNA, 17 nt, Homo sapiens
uggguggaauggggcug

SEQ ID NO: 8218 - RNA, 17 nt, Homo sapiens
ggaauggggcugaaacc

SEQ ID NO: 8219 - RNA, 17 nt, Homo sapiens
gggcugaaaccaugugc

SEQ ID NO: 8220 - RNA, 17 nt, Homo sapiens
gaaaccaugugcaaguc

SEQ ID NO: 8221 - RNA, 17 nt, Homo sapiens
aaccaugugcaagucug

SEQ ID NO: 8222 - RNA, 17 nt, Homo sapiens
augugcaagucuguguc

SEQ ID NO: 8223 - RNA, 17 nt, Homo sapiens
gcaagucugugucuugu

SEQ ID NO: 8224 - RNA, 17 nt, Homo sapiens
aagucugugucuuguca

SEQ ID NO: 8225 - RNA, 17 nt, Homo sapiens
ugugucuugucagucca

SEQ ID NO: 8226 - RNA, 17 nt, Homo sapiens
ucuugucaguccaagaa

SEQ ID NO: 8227 - RNA, 17 nt, Homo sapiens
uccaagaagugacaccg

SEQ ID NO: 8228 - RNA, 17 nt, Homo sapiens
aagaagugacaccgaga

SEQ ID NO: 8229 - RNA, 17 nt, Homo sapiens
acaccgagauguuaauu

SEQ ID NO: 8230 - RNA, 17 nt, Homo sapiens
accgagauguuaauuuu

SEQ ID NO: 8231 - RNA, 17 nt, Homo sapiens
agauguuaauuuuaggg

SEQ ID NO: 8232 - RNA, 17 nt, Homo sapiens
uuuuagggacccgugcc

SEQ ID NO: 8233 - RNA, 17 nt, Homo sapiens
agggacccgugccuugu

SEQ ID NO: 8234 - RNA, 17 nt, Homo sapiens
ggacccgugccuuguuu

SEQ ID NO: 8235 - RNA, 17 nt, Homo sapiens
cgugccuuguuuccuag

SEQ ID NO: 8236 - RNA, 17 nt, Homo sapiens
guuuccuagcccacaag

SEQ ID NO: 8237 - RNA, 17 nt, Homo sapiens
ccacaagaaugcaaaca

SEQ ID NO: 8238 - RNA, 17 nt, Homo sapiens
acaagaaugcaaacauc

SEQ ID NO: 8239 - RNA, 17 nt, Homo sapiens
gaaugcaaacaucaaac

SEQ ID NO: 8240 - RNA, 17 nt, Homo sapiens
aacaucaaacagauacu

SEQ ID NO: 8241 - RNA, 17 nt, Homo sapiens
ucaaacagauacucgcu

SEQ ID NO: 8242 - RNA, 17 nt, Homo sapiens
agauacucgcuagccuc

SEQ ID NO: 8243 - RNA, 17 nt, Homo sapiens
acucgcuagccucauuu

SEQ ID NO: 8244 - RNA, 17 nt, Homo sapiens
ucauuuaaauugauuaa

SEQ ID NO: 8245 - RNA, 17 nt, Homo sapiens
uuaaauugauuaaagga

SEQ ID NO: 8246 - RNA, 17 nt, Homo sapiens
aaggaggagugcaucuu

SEQ ID NO: 8247 - RNA, 17 nt, Homo sapiens
ggaggagugcaucuuug

SEQ ID NO: 8248 - RNA, 17 nt, Homo sapiens
caucuuuggccgacagu

SEQ ID NO: 8249 - RNA, 17 nt, Homo sapiens
uuuggccgacaguggug

SEQ ID NO: 8250 - RNA, 17 nt, Homo sapiens
ggccgacagugguguaa

SEQ ID NO: 8251 - RNA, 17 nt, Homo sapiens
cgacagugguguaacug

SEQ ID NO: 8252 - RNA, 17 nt, Homo sapiens
acagugguguaacugug

SEQ ID NO: 8253 - RNA, 17 nt, Homo sapiens
gugguguaacugugugu

SEQ ID NO: 8254 - RNA, 17 nt, Homo sapiens
guguaacugugugugug

SEQ ID NO: 8255 - RNA, 17 nt, Homo sapiens
guaacugugugugugug

SEQ ID NO: 8256 - RNA, 17 nt, Homo sapiens
aacugugugugugugug

SEQ ID NO: 8257 - RNA, 17 nt, Homo sapiens
cugugugugugugugug

SEQ ID NO: 8258 - RNA, 17 nt, Homo sapiens
gugugugugugugugug

SEQ ID NO: 8259 - RNA, 17 nt, Homo sapiens
guguguguguguguggg

SEQ ID NO: 8260 - RNA, 17 nt, Homo sapiens
gugugugugugugggug

SEQ ID NO: 8261 - RNA, 17 nt, Homo sapiens
gugugugugugggugug

SEQ ID NO: 8262 - RNA, 17 nt, Homo sapiens
gugugugggugugggug

SEQ ID NO: 8263 - RNA, 17 nt, Homo sapiens
gugugggugugggugua

SEQ ID NO: 8264 - RNA, 17 nt, Homo sapiens
ggguguggguguaugug

SEQ ID NO: 8265 - RNA, 17 nt, Homo sapiens
guguggguguaugugug

SEQ ID NO: 8266 - RNA, 17 nt, Homo sapiens
ggguguauguguguuuu

SEQ ID NO: 8267 - RNA, 17 nt, Homo sapiens
guguauguguguuuugu

SEQ ID NO: 8268 - RNA, 17 nt, Homo sapiens
guauguguguuuugugc

SEQ ID NO: 8269 - RNA, 17 nt, Homo sapiens
uguguuuugugcauaac

SEQ ID NO: 8270 - RNA, 17 nt, Homo sapiens
uguuuugugcauaacua

SEQ ID NO: 8271 - RNA, 17 nt, Homo sapiens
ugugcauaacuauuuaa

SEQ ID NO: 8272 - RNA, 17 nt, Homo sapiens
uuaaggaaacuggaauu

SEQ ID NO: 8273 - RNA, 17 nt, Homo sapiens
aaacuggaauuuuaaag

SEQ ID NO: 8274 - RNA, 17 nt, Homo sapiens
auuuuaaaguuacuuuu

SEQ ID NO: 8275 - RNA, 17 nt, Homo sapiens
uuauacaaaccaagaau

SEQ ID NO: 8276 - RNA, 17 nt, Homo sapiens
aaccaagaauauaugcu

SEQ ID NO: 8277 - RNA, 17 nt, Homo sapiens
gaauauaugcuacagau

SEQ ID NO: 8278 - RNA, 17 nt, Homo sapiens
ugcuacagauauaagac

SEQ ID NO: 8279 - RNA, 17 nt, Homo sapiens
gauauaagacagacaug

SEQ ID NO: 8280 - RNA, 17 nt, Homo sapiens
uaagacagacaugguuu

SEQ ID NO: 8281 - RNA, 17 nt, Homo sapiens
cagacaugguuuggucc

SEQ ID NO: 8282 - RNA, 17 nt, Homo sapiens
augguuugguccuauau

SEQ ID NO: 8283 - RNA, 17 nt, Homo sapiens
uauuucuagucaugaug

SEQ ID NO: 8284 - RNA, 17 nt, Homo sapiens
uagucaugaugaaugua

SEQ ID NO: 8285 - RNA, 17 nt, Homo sapiens
caugaugaauguauuuu

SEQ ID NO: 8286 - RNA, 17 nt, Homo sapiens
ugaugaauguauuuugu

SEQ ID NO: 8287 - RNA, 17 nt, Homo sapiens
uguauuuuguauaccau

SEQ ID NO: 8288 - RNA, 17 nt, Homo sapiens
uucauauaauauacuua

SEQ ID NO: 8289 - RNA, 17 nt, Homo sapiens
acuuaaaaauauuucuu

SEQ ID NO: 8290 - RNA, 17 nt, Homo sapiens
auuucuuaauugggauu

SEQ ID NO: 8291 - RNA, 17 nt, Homo sapiens
uaauugggauuuguaau

SEQ ID NO: 8292 - RNA, 17 nt, Homo sapiens
ugggauuuguaaucgua

SEQ ID NO: 8293 - RNA, 17 nt, Homo sapiens
gauuuguaaucguacca

SEQ ID NO: 8294 - RNA, 17 nt, Homo sapiens
uuguaaucguaccaacu

SEQ ID NO: 8295 - RNA, 17 nt, Homo sapiens
ucguaccaacuuaauug

SEQ ID NO: 8296 - RNA, 17 nt, Homo sapiens
ccaacuuaauugauaaa

SEQ ID NO: 8297 - RNA, 17 nt, Homo sapiens
cuuaauugauaaacuug

SEQ ID NO: 8298 - RNA, 17 nt, Homo sapiens
auugauaaacuuggcaa

SEQ ID NO: 8299 - RNA, 17 nt, Homo sapiens
uaaacuuggcaacugcu

SEQ ID NO: 8300 - RNA, 17 nt, Homo sapiens
acuuggcaacugcuuuu

SEQ ID NO: 8301 - RNA, 17 nt, Homo sapiens
uggcaacugcuuuuaug

SEQ ID NO: 8302 - RNA, 17 nt, Homo sapiens
gcuuuuauguucugucu

SEQ ID NO: 8303 - RNA, 17 nt, Homo sapiens
uauguucugucuccuuc

SEQ ID NO: 8304 - RNA, 17 nt, Homo sapiens
uuccauaaauuuuucaa

SEQ ID NO: 8305 - RNA, 17 nt, Homo sapiens
uuuucaaaauacuaauu

SEQ ID NO: 8306 - RNA, 17 nt, Homo sapiens
aaauacuaauucaacaa

SEQ ID NO: 8307 - RNA, 17 nt, Homo sapiens
cuaauucaacaaagaaa

SEQ ID NO: 8308 - RNA, 17 nt, Homo sapiens
aagaaaaagcucuuuuu

SEQ ID NO: 8309 - RNA, 17 nt, Homo sapiens
uuccuaaaauaaacuca

SEQ ID NO: 8310 - RNA, 17 nt, Homo sapiens
uaaaauaaacucaaauu

SEQ ID NO: 8311 - RNA, 17 nt, Homo sapiens
aaacucaaauuuauccu

SEQ ID NO: 8312 - RNA, 17 nt, Homo sapiens
uuauccuuguuuagagc

SEQ ID NO: 8313 - RNA, 17 nt, Homo sapiens
uguuuagagcagagaaa

SEQ ID NO: 8314 - RNA, 17 nt, Homo sapiens
agagaaaaauuaagaaa

SEQ ID NO: 8315 - RNA, 17 nt, Homo sapiens
uaagaaaaacuuugaaa

SEQ ID NO: 8316 - RNA, 17 nt, Homo sapiens
acuuugaaauggucuca

SEQ ID NO: 8317 - RNA, 17 nt, Homo sapiens
uugaaauggucucaaaa

SEQ ID NO: 8318 - RNA, 17 nt, Homo sapiens
cucaaaaaauugcuaaa

SEQ ID NO: 8319 - RNA, 17 nt, Homo sapiens
aaaaaauugcuaaauau

SEQ ID NO: 8320 - RNA, 17 nt, Homo sapiens
auugcuaaauauuuuca

SEQ ID NO: 8321 - RNA, 17 nt, Homo sapiens
uauuuucaauggaaaac

SEQ ID NO: 8322 - RNA, 17 nt, Homo sapiens
aauggaaaacuaaaugu

SEQ ID NO: 8323 - RNA, 17 nt, Homo sapiens
aaaacuaaauguuaguu

SEQ ID NO: 8324 - RNA, 17 nt, Homo sapiens
aacuaaauguuaguuua

SEQ ID NO: 8325 - RNA, 17 nt, Homo sapiens
aaauguuaguuuagcug

SEQ ID NO: 8326 - RNA, 17 nt, Homo sapiens
uuaguuuagcugauugu

SEQ ID NO: 8327 - RNA, 17 nt, Homo sapiens
uuuagcugauuguaugg

SEQ ID NO: 8328 - RNA, 17 nt, Homo sapiens
agcugauuguauggggu

SEQ ID NO: 8329 - RNA, 17 nt, Homo sapiens
uguaugggguuuucgaa

SEQ ID NO: 8330 - RNA, 17 nt, Homo sapiens
guuuucgaaccuuucac

SEQ ID NO: 8331 - RNA, 17 nt, Homo sapiens
cacuuuuuguuuguuuu

SEQ ID NO: 8332 - RNA, 17 nt, Homo sapiens
uuuuguuuguuuuaccu

SEQ ID NO: 8333 - RNA, 17 nt, Homo sapiens
auuucacaacuguguaa

SEQ ID NO: 8334 - RNA, 17 nt, Homo sapiens
ucacaacuguguaaauu

SEQ ID NO: 8335 - RNA, 17 nt, Homo sapiens
acaacuguguaaauugc

SEQ ID NO: 8336 - RNA, 17 nt, Homo sapiens
cuguguaaauugccaau

SEQ ID NO: 8337 - RNA, 17 nt, Homo sapiens
uguaaauugccaauaau

SEQ ID NO: 8338 - RNA, 17 nt, Homo sapiens
aauugccaauaauuccu

SEQ ID NO: 8339 - RNA, 17 nt, Homo sapiens
ugccaauaauuccuguc

SEQ ID NO: 8340 - RNA, 17 nt, Homo sapiens
uaauuccuguccaugaa

SEQ ID NO: 8341 - RNA, 17 nt, Homo sapiens
ccaugaaaaugcaaauu

SEQ ID NO: 8342 - RNA, 17 nt, Homo sapiens
augaaaaugcaaauuau

SEQ ID NO: 8343 - RNA, 17 nt, Homo sapiens
aaaugcaaauuauccag

SEQ ID NO: 8344 - RNA, 17 nt, Homo sapiens
auuauccaguguagaua

SEQ ID NO: 8345 - RNA, 17 nt, Homo sapiens
uauccaguguagauaua

SEQ ID NO: 8346 - RNA, 17 nt, Homo sapiens
caguguagauauauuug

SEQ ID NO: 8347 - RNA, 17 nt, Homo sapiens
uauauuugaccaucacc

SEQ ID NO: 8348 - RNA, 17 nt, Homo sapiens
cccuauggauauuggcu

SEQ ID NO: 8349 - RNA, 17 nt, Homo sapiens
ggauauuggcuaguuuu

SEQ ID NO: 8350 - RNA, 17 nt, Homo sapiens
auuggcuaguuuugccu

SEQ ID NO: 8351 - RNA, 17 nt, Homo sapiens
cuaguuuugccuuuauu

SEQ ID NO: 8352 - RNA, 17 nt, Homo sapiens
uuuauuaagcaaauuca

SEQ ID NO: 8353 - RNA, 17 nt, Homo sapiens
uuaagcaaauucauuuc

SEQ ID NO: 8354 - RNA, 17 nt, Homo sapiens
ucauuucagccugaaug

SEQ ID NO: 8355 - RNA, 17 nt, Homo sapiens
cagccugaaugucugcc

SEQ ID NO: 8356 - RNA, 17 nt, Homo sapiens
gccugaaugucugccua

SEQ ID NO: 8357 - RNA, 17 nt, Homo sapiens
gaaugucugccuauaua

SEQ ID NO: 8358 - RNA, 17 nt, Homo sapiens
uauucucugcucuuugu

SEQ ID NO: 8359 - RNA, 17 nt, Homo sapiens
ugcucuuuguauucucc

SEQ ID NO: 8360 - RNA, 17 nt, Homo sapiens
uccuuugaacccguuaa

SEQ ID NO: 8361 - RNA, 17 nt, Homo sapiens
uugaacccguuaaaaca

SEQ ID NO: 8362 - RNA, 17 nt, Homo sapiens
ccguuaaaacauccugu

SEQ ID NO: 8363 - RNA, 17 nt, Homo sapiens
aacauccuguggcacuc

SEQ ID NO: 8364 - RNA, 17 nt, Homo sapiens
gucccgggaccccggga

SEQ ID NO: 8365 - RNA, 17 nt, Homo sapiens
ccgggagagcggucagu

SEQ ID NO: 8366 - RNA, 17 nt, Homo sapiens
ggagagcggucagugug

SEQ ID NO: 8367 - RNA, 17 nt, Homo sapiens
agcggucaguguguggu

SEQ ID NO: 8368 - RNA, 17 nt, Homo sapiens
cggucaguguguggucg

SEQ ID NO: 8369 - RNA, 17 nt, Homo sapiens
gucaguguguggucgcu

SEQ ID NO: 8370 - RNA, 17 nt, Homo sapiens
aguguguggucgcugcg

SEQ ID NO: 8371 - RNA, 17 nt, Homo sapiens
guguggucgcugcguuu

SEQ ID NO: 8372 - RNA, 17 nt, Homo sapiens
uggucgcugcguuuccu

SEQ ID NO: 8373 - RNA, 17 nt, Homo sapiens
gucgcugcguuuccucu

SEQ ID NO: 8374 - RNA, 17 nt, Homo sapiens
uuuccucugccugcgcc

SEQ ID NO: 8375 - RNA, 17 nt, Homo sapiens
cucugccugcgccgggc

SEQ ID NO: 8376 - RNA, 17 nt, Homo sapiens
cugccugcgccgggcau

SEQ ID NO: 8377 - RNA, 17 nt, Homo sapiens
ugcgccgggcaucacuu

SEQ ID NO: 8378 - RNA, 17 nt, Homo sapiens
cgccgggcaucacuugc

SEQ ID NO: 8379 - RNA, 17 nt, Homo sapiens
cgggcaucacuugcgcg

SEQ ID NO: 8380 - RNA, 17 nt, Homo sapiens
caucacuugcgcgccgc

SEQ ID NO: 8381 - RNA, 17 nt, Homo sapiens
ucacuugcgcgccgcag

SEQ ID NO: 8382 - RNA, 17 nt, Homo sapiens
acuugcgcgccgcagaa

SEQ ID NO: 8383 - RNA, 17 nt, Homo sapiens
ugcgcgccgcagaaagu

SEQ ID NO: 8384 - RNA, 17 nt, Homo sapiens
cgcagaaaguccgucug

SEQ ID NO: 8385 - RNA, 17 nt, Homo sapiens
gaaaguccgucuggcag

SEQ ID NO: 8386 - RNA, 17 nt, Homo sapiens
uccgucuggcagccugg

SEQ ID NO: 8387 - RNA, 17 nt, Homo sapiens
gucuggcagccuggaua

SEQ ID NO: 8388 - RNA, 17 nt, Homo sapiens
cagccuggauauccucu

SEQ ID NO: 8389 - RNA, 17 nt, Homo sapiens
gccuggauauccucucc

SEQ ID NO: 8390 - RNA, 17 nt, Homo sapiens
ccucuccuaccggcacc

SEQ ID NO: 8391 - RNA, 17 nt, Homo sapiens
uccuaccggcacccgca

SEQ ID NO: 8392 - RNA, 17 nt, Homo sapiens
cuaccggcacccgcaga

SEQ ID NO: 8393 - RNA, 17 nt, Homo sapiens
cggcacccgcagacgcc

SEQ ID NO: 8394 - RNA, 17 nt, Homo sapiens
acccgcagacgccccug

SEQ ID NO: 8395 - RNA, 17 nt, Homo sapiens
ccgcagacgccccugca

SEQ ID NO: 8396 - RNA, 17 nt, Homo sapiens
acgccccugcagccgcc

SEQ ID NO: 8397 - RNA, 17 nt, Homo sapiens
ccccugcagccgccggu

SEQ ID NO: 8398 - RNA, 17 nt, Homo sapiens
cugcagccgccggucgg

SEQ ID NO: 8399 - RNA, 17 nt, Homo sapiens
agccgccggucggcgcc

SEQ ID NO: 8400 - RNA, 17 nt, Homo sapiens
gccggucggcgcccggg

SEQ ID NO: 8401 - RNA, 17 nt, Homo sapiens
cggucggcgcccgggcu

SEQ ID NO: 8402 - RNA, 17 nt, Homo sapiens
gcgcccgggcucccuag

SEQ ID NO: 8403 - RNA, 17 nt, Homo sapiens
gcucccuagcccugugc

SEQ ID NO: 8404 - RNA, 17 nt, Homo sapiens
cuagcccugugcgcuca

SEQ ID NO: 8405 - RNA, 17 nt, Homo sapiens
agcccugugcgcucaac

SEQ ID NO: 8406 - RNA, 17 nt, Homo sapiens
cccugugcgcucaacug

SEQ ID NO: 8407 - RNA, 17 nt, Homo sapiens
ugcgcucaacuguccug

SEQ ID NO: 8408 - RNA, 17 nt, Homo sapiens
gcucaacuguccugcgc

SEQ ID NO: 8409 - RNA, 17 nt, Homo sapiens
acuguccugcgcugcgg

SEQ ID NO: 8410 - RNA, 17 nt, Homo sapiens
uguccugcgcugcgggg

SEQ ID NO: 8411 - RNA, 17 nt, Homo sapiens
ccugcgcugcggggugc

SEQ ID NO: 8412 - RNA, 17 nt, Homo sapiens
gcugcggggugccgcga

SEQ ID NO: 8413 - RNA, 17 nt, Homo sapiens
ugcggggugccgcgagu

SEQ ID NO: 8414 - RNA, 17 nt, Homo sapiens
ggggugccgcgaguucc

SEQ ID NO: 8415 - RNA, 17 nt, Homo sapiens
ugccgcgaguuccaccu

SEQ ID NO: 8416 - RNA, 17 nt, Homo sapiens
cgaguuccaccuccgcg

SEQ ID NO: 8417 - RNA, 17 nt, Homo sapiens
ccaccuccgcgccuccu

SEQ ID NO: 8418 - RNA, 17 nt, Homo sapiens
accuccgcgccuccuuc

SEQ ID NO: 8419 - RNA, 17 nt, Homo sapiens
uucucuagacaggcgcu

SEQ ID NO: 8420 - RNA, 17 nt, Homo sapiens
cuagacaggcgcuggga

SEQ ID NO: 8421 - RNA, 17 nt, Homo sapiens
agacaggcgcugggaga

SEQ ID NO: 8422 - RNA, 17 nt, Homo sapiens
gagaaagaaccggcucc

SEQ ID NO: 8423 - RNA, 17 nt, Homo sapiens
aagaaccggcucccgag

SEQ ID NO: 8424 - RNA, 17 nt, Homo sapiens
gcucccgaguucugggc

SEQ ID NO: 8425 - RNA, 17 nt, Homo sapiens
aguucugggcauuucgc

SEQ ID NO: 8426 - RNA, 17 nt, Homo sapiens
uucugggcauuucgccc

SEQ ID NO: 8427 - RNA, 17 nt, Homo sapiens
ggcauuucgcccggcuc

SEQ ID NO: 8428 - RNA, 17 nt, Homo sapiens
uucgcccggcucgaggu

SEQ ID NO: 8429 - RNA, 17 nt, Homo sapiens
ggcucgaggugcaggau

SEQ ID NO: 8430 - RNA, 17 nt, Homo sapiens
cucgaggugcaggaugc

SEQ ID NO: 8431 - RNA, 17 nt, Homo sapiens
ggugcaggaugcagagc

SEQ ID NO: 8432 - RNA, 17 nt, Homo sapiens
ugcaggaugcagagcaa

SEQ ID NO: 8433 - RNA, 17 nt, Homo sapiens
gaugcagagcaaggugc

SEQ ID NO: 8434 - RNA, 17 nt, Homo sapiens
agagcaaggugcugcug

SEQ ID NO: 8435 - RNA, 17 nt, Homo sapiens
agcaaggugcugcuggc

SEQ ID NO: 8436 - RNA, 17 nt, Homo sapiens
aaggugcugcuggccgu

SEQ ID NO: 8437 - RNA, 17 nt, Homo sapiens
ugcugcuggccgucgcc

SEQ ID NO: 8438 - RNA, 17 nt, Homo sapiens
ugcuggccgucgcccug

SEQ ID NO: 8439 - RNA, 17 nt, Homo sapiens
uggccgucgcccugugg

SEQ ID NO: 8440 - RNA, 17 nt, Homo sapiens
gucgcccuguggcucug

SEQ ID NO: 8441 - RNA, 17 nt, Homo sapiens
gcccuguggcucugcgu

SEQ ID NO: 8442 - RNA, 17 nt, Homo sapiens
guggcucugcguggaga

SEQ ID NO: 8443 - RNA, 17 nt, Homo sapiens
ggcucugcguggagacc

SEQ ID NO: 8444 - RNA, 17 nt, Homo sapiens
gcguggagacccgggcc

SEQ ID NO: 8445 - RNA, 17 nt, Homo sapiens
agacccgggccgccucu

SEQ ID NO: 8446 - RNA, 17 nt, Homo sapiens
cccgggccgccucugug

SEQ ID NO: 8447 - RNA, 17 nt, Homo sapiens
ccgccucuguggguuug

SEQ ID NO: 8448 - RNA, 17 nt, Homo sapiens
cucuguggguuugccua

SEQ ID NO: 8449 - RNA, 17 nt, Homo sapiens
guggguuugccuagugu

SEQ ID NO: 8450 - RNA, 17 nt, Homo sapiens
uuugccuaguguuucuc

SEQ ID NO: 8451 - RNA, 17 nt, Homo sapiens
ugccuaguguuucucuu

SEQ ID NO: 8452 - RNA, 17 nt, Homo sapiens
uucucuugaucugccca

SEQ ID NO: 8453 - RNA, 17 nt, Homo sapiens
cuugaucugcccaggcu

SEQ ID NO: 8454 - RNA, 17 nt, Homo sapiens
cugcccaggcucagcau

SEQ ID NO: 8455 - RNA, 17 nt, Homo sapiens
caggcucagcauacaaa

SEQ ID NO: 8456 - RNA, 17 nt, Homo sapiens
acaaaaagacauacuua

SEQ ID NO: 8457 - RNA, 17 nt, Homo sapiens
uacuuacaauuaaggcu

SEQ ID NO: 8458 - RNA, 17 nt, Homo sapiens
caauuaaggcuaauaca

SEQ ID NO: 8459 - RNA, 17 nt, Homo sapiens
uaaggcuaauacaacuc

SEQ ID NO: 8460 - RNA, 17 nt, Homo sapiens
cuaauacaacucuucaa

SEQ ID NO: 8461 - RNA, 17 nt, Homo sapiens
cucuucaaauuacuugc

SEQ ID NO: 8462 - RNA, 17 nt, Homo sapiens
aauuacuugcaggggac

SEQ ID NO: 8463 - RNA, 17 nt, Homo sapiens
ugcaggggacagaggga

SEQ ID NO: 8464 - RNA, 17 nt, Homo sapiens
acagagggacuuggacu

SEQ ID NO: 8465 - RNA, 17 nt, Homo sapiens
ggacuuggacuggcuuu

SEQ ID NO: 8466 - RNA, 17 nt, Homo sapiens
uuggacuggcuuuggcc

SEQ ID NO: 8467 - RNA, 17 nt, Homo sapiens
uggcuuuggcccaauaa

SEQ ID NO: 8468 - RNA, 17 nt, Homo sapiens
uuggcccaauaaucaga

SEQ ID NO: 8469 - RNA, 17 nt, Homo sapiens
gcccaauaaucagagug

SEQ ID NO: 8470 - RNA, 17 nt, Homo sapiens
uaaucagaguggcagug

SEQ ID NO: 8471 - RNA, 17 nt, Homo sapiens
ucagaguggcagugagc

SEQ ID NO: 8472 - RNA, 17 nt, Homo sapiens
gaguggcagugagcaaa

SEQ ID NO: 8473 - RNA, 17 nt, Homo sapiens
ggcagugagcaaagggu

SEQ ID NO: 8474 - RNA, 17 nt, Homo sapiens
agcaaaggguggaggug

SEQ ID NO: 8475 - RNA, 17 nt, Homo sapiens
ggguggaggugacugag

SEQ ID NO: 8476 - RNA, 17 nt, Homo sapiens
uggaggugacugagugc

SEQ ID NO: 8477 - RNA, 17 nt, Homo sapiens
gugacugagugcagcga

SEQ ID NO: 8478 - RNA, 17 nt, Homo sapiens
gacugagugcagcgaug

SEQ ID NO: 8479 - RNA, 17 nt, Homo sapiens
ugagugcagcgauggcc

SEQ ID NO: 8480 - RNA, 17 nt, Homo sapiens
gugcagcgauggccucu

SEQ ID NO: 8481 - RNA, 17 nt, Homo sapiens
cagcgauggccucuucu

SEQ ID NO: 8482 - RNA, 17 nt, Homo sapiens
ccucuucuguaagacac

SEQ ID NO: 8483 - RNA, 17 nt, Homo sapiens
ucuguaagacacucaca

SEQ ID NO: 8484 - RNA, 17 nt, Homo sapiens
cacucacaauuccaaaa

SEQ ID NO: 8485 - RNA, 17 nt, Homo sapiens
uuccaaaagugaucgga

SEQ ID NO: 8486 - RNA, 17 nt, Homo sapiens
caaaagugaucggaaau

SEQ ID NO: 8487 - RNA, 17 nt, Homo sapiens
gaucggaaaugacacug

SEQ ID NO: 8488 - RNA, 17 nt, Homo sapiens
cggaaaugacacuggag

SEQ ID NO: 8489 - RNA, 17 nt, Homo sapiens
acacuggagccuacaag

SEQ ID NO: 8490 - RNA, 17 nt, Homo sapiens
gccuacaagugcuucua

SEQ ID NO: 8491 - RNA, 17 nt, Homo sapiens
cuacaagugcuucuacc

SEQ ID NO: 8492 - RNA, 17 nt, Homo sapiens
accgggaaacugacuug

SEQ ID NO: 8493 - RNA, 17 nt, Homo sapiens
ggaaacugacuuggccu

SEQ ID NO: 8494 - RNA, 17 nt, Homo sapiens
cugacuuggccucgguc

SEQ ID NO: 8495 - RNA, 17 nt, Homo sapiens
uggccucggucauuuau

SEQ ID NO: 8496 - RNA, 17 nt, Homo sapiens
ucauuuaugucuauguu

SEQ ID NO: 8497 - RNA, 17 nt, Homo sapiens
augucuauguucaagau

SEQ ID NO: 8498 - RNA, 17 nt, Homo sapiens
uguucaagauuacagau

SEQ ID NO: 8499 - RNA, 17 nt, Homo sapiens
gauuacagaucuccauu

SEQ ID NO: 8500 - RNA, 17 nt, Homo sapiens
cauuuauugcuucuguu

SEQ ID NO: 8501 - RNA, 17 nt, Homo sapiens
uugcuucuguuagugac

SEQ ID NO: 8502 - RNA, 17 nt, Homo sapiens
uucuguuagugaccaac

SEQ ID NO: 8503 - RNA, 17 nt, Homo sapiens
uguuagugaccaacaug

SEQ ID NO: 8504 - RNA, 17 nt, Homo sapiens
agugaccaacauggagu

SEQ ID NO: 8505 - RNA, 17 nt, Homo sapiens
aacauggagucguguac

SEQ ID NO: 8506 - RNA, 17 nt, Homo sapiens
auggagucguguacauu

SEQ ID NO: 8507 - RNA, 17 nt, Homo sapiens
ggagucguguacauuac

SEQ ID NO: 8508 - RNA, 17 nt, Homo sapiens
uacugagaacaaaaaca

SEQ ID NO: 8509 - RNA, 17 nt, Homo sapiens
gaacaaaaacaaaacug

SEQ ID NO: 8510 - RNA, 17 nt, Homo sapiens
aaaacaaaacuguggug

SEQ ID NO: 8511 - RNA, 17 nt, Homo sapiens
acaaaacuguggugauu

SEQ ID NO: 8512 - RNA, 17 nt, Homo sapiens
aaacuguggugauucca

SEQ ID NO: 8513 - RNA, 17 nt, Homo sapiens
cuguggugauuccaugu

SEQ ID NO: 8514 - RNA, 17 nt, Homo sapiens
gauuccaugucucgggu

SEQ ID NO: 8515 - RNA, 17 nt, Homo sapiens
ugucucggguccauuuc

SEQ ID NO: 8516 - RNA, 17 nt, Homo sapiens
cauuucaaaucucaacg

SEQ ID NO: 8517 - RNA, 17 nt, Homo sapiens
aaaucucaacgugucac

SEQ ID NO: 8518 - RNA, 17 nt, Homo sapiens
aucucaacgugucacuu

SEQ ID NO: 8519 - RNA, 17 nt, Homo sapiens
cucaacgugucacuuug

SEQ ID NO: 8520 - RNA, 17 nt, Homo sapiens
gucacuuugugcaagau

SEQ ID NO: 8521 - RNA, 17 nt, Homo sapiens
cacuuugugcaagauac

SEQ ID NO: 8522 - RNA, 17 nt, Homo sapiens
ugugcaagauacccaga

SEQ ID NO: 8523 - RNA, 17 nt, Homo sapiens
gaaaagagauuuguucc

SEQ ID NO: 8524 - RNA, 17 nt, Homo sapiens
agagauuuguuccugau

SEQ ID NO: 8525 - RNA, 17 nt, Homo sapiens
uguuccugaugguaaca

SEQ ID NO: 8526 - RNA, 17 nt, Homo sapiens
uccugaugguaacagaa

SEQ ID NO: 8527 - RNA, 17 nt, Homo sapiens
ugaugguaacagaauuu

SEQ ID NO: 8528 - RNA, 17 nt, Homo sapiens
guaacagaauuuccugg

SEQ ID NO: 8529 - RNA, 17 nt, Homo sapiens
uuccugggacagcaaga

SEQ ID NO: 8530 - RNA, 17 nt, Homo sapiens
cugggacagcaagaagg

SEQ ID NO: 8531 - RNA, 17 nt, Homo sapiens
caagaagggcuuuacua

SEQ ID NO: 8532 - RNA, 17 nt, Homo sapiens
uauucccagcuacauga

SEQ ID NO: 8533 - RNA, 17 nt, Homo sapiens
gcuacaugaucagcuau

SEQ ID NO: 8534 - RNA, 17 nt, Homo sapiens
caugaucagcuaugcug

SEQ ID NO: 8535 - RNA, 17 nt, Homo sapiens
ucagcuaugcuggcaug

SEQ ID NO: 8536 - RNA, 17 nt, Homo sapiens
cuaugcuggcauggucu

SEQ ID NO: 8537 - RNA, 17 nt, Homo sapiens
cuggcauggucuucugu

SEQ ID NO: 8538 - RNA, 17 nt, Homo sapiens
ggucuucugugaagcaa

SEQ ID NO: 8539 - RNA, 17 nt, Homo sapiens
ucugugaagcaaaaauu

SEQ ID NO: 8540 - RNA, 17 nt, Homo sapiens
aagcaaaaauuaaugau

SEQ ID NO: 8541 - RNA, 17 nt, Homo sapiens
aaaaauuaaugaugaaa

SEQ ID NO: 8542 - RNA, 17 nt, Homo sapiens
aauuaaugaugaaaguu

SEQ ID NO: 8543 - RNA, 17 nt, Homo sapiens
ugaugaaaguuaccagu

SEQ ID NO: 8544 - RNA, 17 nt, Homo sapiens
aguuaccagucuauuau

SEQ ID NO: 8545 - RNA, 17 nt, Homo sapiens
ucuauuauguacauagu

SEQ ID NO: 8546 - RNA, 17 nt, Homo sapiens
uguacauaguugucguu

SEQ ID NO: 8547 - RNA, 17 nt, Homo sapiens
acauaguugucguugua

SEQ ID NO: 8548 - RNA, 17 nt, Homo sapiens
uaguugucguuguaggg

SEQ ID NO: 8549 - RNA, 17 nt, Homo sapiens
uugucguuguaggguau

SEQ ID NO: 8550 - RNA, 17 nt, Homo sapiens
guuguaggguauaggau

SEQ ID NO: 8551 - RNA, 17 nt, Homo sapiens
gguauaggauuuaugau

SEQ ID NO: 8552 - RNA, 17 nt, Homo sapiens
gauuuaugaugugguuc

SEQ ID NO: 8553 - RNA, 17 nt, Homo sapiens
uuuaugaugugguucug

SEQ ID NO: 8554 - RNA, 17 nt, Homo sapiens
augaugugguucugagu

SEQ ID NO: 8555 - RNA, 17 nt, Homo sapiens
gguucugaguccgucuc

SEQ ID NO: 8556 - RNA, 17 nt, Homo sapiens
cugaguccgucucaugg

SEQ ID NO: 8557 - RNA, 17 nt, Homo sapiens
cucauggaauugaacua

SEQ ID NO: 8558 - RNA, 17 nt, Homo sapiens
ggaauugaacuaucugu

SEQ ID NO: 8559 - RNA, 17 nt, Homo sapiens
aacuaucuguuggagaa

SEQ ID NO: 8560 - RNA, 17 nt, Homo sapiens
ggagaaaagcuugucuu

SEQ ID NO: 8561 - RNA, 17 nt, Homo sapiens
aaaagcuugucuuaaau

SEQ ID NO: 8562 - RNA, 17 nt, Homo sapiens
ugucuuaaauuguacag

SEQ ID NO: 8563 - RNA, 17 nt, Homo sapiens
cuuaaauuguacagcaa

SEQ ID NO: 8564 - RNA, 17 nt, Homo sapiens
auuguacagcaagaacu

SEQ ID NO: 8565 - RNA, 17 nt, Homo sapiens
cagcaagaacugaacua

SEQ ID NO: 8566 - RNA, 17 nt, Homo sapiens
agaacugaacuaaaugu

SEQ ID NO: 8567 - RNA, 17 nt, Homo sapiens
ugaacuaaaugugggga

SEQ ID NO: 8568 - RNA, 17 nt, Homo sapiens
aacuaaauguggggauu

SEQ ID NO: 8569 - RNA, 17 nt, Homo sapiens
auguggggauugacuuc

SEQ ID NO: 8570 - RNA, 17 nt, Homo sapiens
ggggauugacuucaacu

SEQ ID NO: 8571 - RNA, 17 nt, Homo sapiens
ugacuucaacugggaau

SEQ ID NO: 8572 - RNA, 17 nt, Homo sapiens
aacugggaauacccuuc

SEQ ID NO: 8573 - RNA, 17 nt, Homo sapiens
ucuucgaagcaucagca

SEQ ID NO: 8574 - RNA, 17 nt, Homo sapiens
aagcaucagcauaagaa

SEQ ID NO: 8575 - RNA, 17 nt, Homo sapiens
cauaagaaacuuguaaa

SEQ ID NO: 8576 - RNA, 17 nt, Homo sapiens
agaaacuuguaaaccga

SEQ ID NO: 8577 - RNA, 17 nt, Homo sapiens
acuuguaaaccgagacc

SEQ ID NO: 8578 - RNA, 17 nt, Homo sapiens
aaaccgagaccuaaaaa

SEQ ID NO: 8579 - RNA, 17 nt, Homo sapiens
accuaaaaacccagucu

SEQ ID NO: 8580 - RNA, 17 nt, Homo sapiens
aaaacccagucugggag

SEQ ID NO: 8581 - RNA, 17 nt, Homo sapiens
gucugggagugagauga

SEQ ID NO: 8582 - RNA, 17 nt, Homo sapiens
ggagugagaugaagaaa

SEQ ID NO: 8583 - RNA, 17 nt, Homo sapiens
augaagaaauuuuugag

SEQ ID NO: 8584 - RNA, 17 nt, Homo sapiens
auuuuugagcaccuuaa

SEQ ID NO: 8585 - RNA, 17 nt, Homo sapiens
gcaccuuaacuauagau

SEQ ID NO: 8586 - RNA, 17 nt, Homo sapiens
aacuauagaugguguaa

SEQ ID NO: 8587 - RNA, 17 nt, Homo sapiens
uauagaugguguaaccc

SEQ ID NO: 8588 - RNA, 17 nt, Homo sapiens
uagaugguguaacccgg

SEQ ID NO: 8589 - RNA, 17 nt, Homo sapiens
augguguaacccggagu

SEQ ID NO: 8590 - RNA, 17 nt, Homo sapiens
aacccggagugaccaag

SEQ ID NO: 8591 - RNA, 17 nt, Homo sapiens
ccggagugaccaaggau

SEQ ID NO: 8592 - RNA, 17 nt, Homo sapiens
gaccaaggauuguacac

SEQ ID NO: 8593 - RNA, 17 nt, Homo sapiens
caaggauuguacaccug

SEQ ID NO: 8594 - RNA, 17 nt, Homo sapiens
guacaccugugcagcau

SEQ ID NO: 8595 - RNA, 17 nt, Homo sapiens
acaccugugcagcaucc

SEQ ID NO: 8596 - RNA, 17 nt, Homo sapiens
ccugugcagcauccagu

SEQ ID NO: 8597 - RNA, 17 nt, Homo sapiens
agcauccagugggcuga

SEQ ID NO: 8598 - RNA, 17 nt, Homo sapiens
uccagugggcugaugac

SEQ ID NO: 8599 - RNA, 17 nt, Homo sapiens
gugggcugaugaccaag

SEQ ID NO: 8600 - RNA, 17 nt, Homo sapiens
ggcugaugaccaagaag

SEQ ID NO: 8601 - RNA, 17 nt, Homo sapiens
caagaagaacagcacau

SEQ ID NO: 8602 - RNA, 17 nt, Homo sapiens
gaagaacagcacauuug

SEQ ID NO: 8603 - RNA, 17 nt, Homo sapiens
gcacauuugucaggguc

SEQ ID NO: 8604 - RNA, 17 nt, Homo sapiens
uugucaggguccaugaa

SEQ ID NO: 8605 - RNA, 17 nt, Homo sapiens
caugaaaaaccuuuugu

SEQ ID NO: 8606 - RNA, 17 nt, Homo sapiens
aaccuuuuguugcuuuu

SEQ ID NO: 8607 - RNA, 17 nt, Homo sapiens
cuuuuguugcuuuugga

SEQ ID NO: 8608 - RNA, 17 nt, Homo sapiens
uuuuggaaguggcaugg

SEQ ID NO: 8609 - RNA, 17 nt, Homo sapiens
uggaaguggcauggaau

SEQ ID NO: 8610 - RNA, 17 nt, Homo sapiens
ggcauggaaucucuggu

SEQ ID NO: 8611 - RNA, 17 nt, Homo sapiens
aaucucugguggaagcc

SEQ ID NO: 8612 - RNA, 17 nt, Homo sapiens
ugguggaagccacggug

SEQ ID NO: 8613 - RNA, 17 nt, Homo sapiens
aagccacggugggggag

SEQ ID NO: 8614 - RNA, 17 nt, Homo sapiens
gugggggagcgugucag

SEQ ID NO: 8615 - RNA, 17 nt, Homo sapiens
gggggagcgugucagaa

SEQ ID NO: 8616 - RNA, 17 nt, Homo sapiens
gggagcgugucagaauc

SEQ ID NO: 8617 - RNA, 17 nt, Homo sapiens
gugucagaaucccugcg

SEQ ID NO: 8618 - RNA, 17 nt, Homo sapiens
gaaucccugcgaaguac

SEQ ID NO: 8619 - RNA, 17 nt, Homo sapiens
ccugcgaaguaccuugg

SEQ ID NO: 8620 - RNA, 17 nt, Homo sapiens
guaccuugguuacccac

SEQ ID NO: 8621 - RNA, 17 nt, Homo sapiens
ccccagaaauaaaaugg

SEQ ID NO: 8622 - RNA, 17 nt, Homo sapiens
gaaauaaaaugguauaa

SEQ ID NO: 8623 - RNA, 17 nt, Homo sapiens
auaaaaugguauaaaaa

SEQ ID NO: 8624 - RNA, 17 nt, Homo sapiens
guauaaaaauggaauac

SEQ ID NO: 8625 - RNA, 17 nt, Homo sapiens
aaaauggaauaccccuu

SEQ ID NO: 8626 - RNA, 17 nt, Homo sapiens
ccccuugaguccaauca

SEQ ID NO: 8627 - RNA, 17 nt, Homo sapiens
ugaguccaaucacacaa

SEQ ID NO: 8628 - RNA, 17 nt, Homo sapiens
aucacacaauuaaagcg

SEQ ID NO: 8629 - RNA, 17 nt, Homo sapiens
caauuaaagcggggcau

SEQ ID NO: 8630 - RNA, 17 nt, Homo sapiens
aaagcggggcauguacu

SEQ ID NO: 8631 - RNA, 17 nt, Homo sapiens
cggggcauguacugacg

SEQ ID NO: 8632 - RNA, 17 nt, Homo sapiens
auguacugacgauuaug

SEQ ID NO: 8633 - RNA, 17 nt, Homo sapiens
uacugacgauuauggaa

SEQ ID NO: 8634 - RNA, 17 nt, Homo sapiens
uuauggaagugagugaa

SEQ ID NO: 8635 - RNA, 17 nt, Homo sapiens
ggaagugagugaaagag

SEQ ID NO: 8636 - RNA, 17 nt, Homo sapiens
ugaaagagacacaggaa

SEQ ID NO: 8637 - RNA, 17 nt, Homo sapiens
cacaggaaauuacacug

SEQ ID NO: 8638 - RNA, 17 nt, Homo sapiens
auuacacugucauccuu

SEQ ID NO: 8639 - RNA, 17 nt, Homo sapiens
ccuuaccaaucccauuu

SEQ ID NO: 8640 - RNA, 17 nt, Homo sapiens
aaggagaagcagagcca

SEQ ID NO: 8641 - RNA, 17 nt, Homo sapiens
gaagcagagccaugugg

SEQ ID NO: 8642 - RNA, 17 nt, Homo sapiens
agagccauguggucucu

SEQ ID NO: 8643 - RNA, 17 nt, Homo sapiens
gccauguggucucucug

SEQ ID NO: 8644 - RNA, 17 nt, Homo sapiens
ucucucugguuguguau

SEQ ID NO: 8645 - RNA, 17 nt, Homo sapiens
cucugguuguguauguc

SEQ ID NO: 8646 - RNA, 17 nt, Homo sapiens
cugguuguguauguccc

SEQ ID NO: 8647 - RNA, 17 nt, Homo sapiens
uuguguaugucccaccc

SEQ ID NO: 8648 - RNA, 17 nt, Homo sapiens
caccccagauuggugag

SEQ ID NO: 8649 - RNA, 17 nt, Homo sapiens
ccagauuggugagaaau

SEQ ID NO: 8650 - RNA, 17 nt, Homo sapiens
ggugagaaaucucuaau

SEQ ID NO: 8651 - RNA, 17 nt, Homo sapiens
aaucucuaaucucuccu

SEQ ID NO: 8652 - RNA, 17 nt, Homo sapiens
ucucuccuguggauucc

SEQ ID NO: 8653 - RNA, 17 nt, Homo sapiens
uccuguggauuccuacc

SEQ ID NO: 8654 - RNA, 17 nt, Homo sapiens
uccuaccaguacggcac

SEQ ID NO: 8655 - RNA, 17 nt, Homo sapiens
ccaguacggcaccacuc

SEQ ID NO: 8656 - RNA, 17 nt, Homo sapiens
ccacucaaacgcugaca

SEQ ID NO: 8657 - RNA, 17 nt, Homo sapiens
acucaaacgcugacaug

SEQ ID NO: 8658 - RNA, 17 nt, Homo sapiens
aaacgcugacauguacg

SEQ ID NO: 8659 - RNA, 17 nt, Homo sapiens
gcugacauguacggucu

SEQ ID NO: 8660 - RNA, 17 nt, Homo sapiens
cauguacggucuaugcc

SEQ ID NO: 8661 - RNA, 17 nt, Homo sapiens
cggucuaugccauuccu

SEQ ID NO: 8662 - RNA, 17 nt, Homo sapiens
ccucccccgcaucacau

SEQ ID NO: 8663 - RNA, 17 nt, Homo sapiens
auccacugguauuggca

SEQ ID NO: 8664 - RNA, 17 nt, Homo sapiens
ugguauuggcaguugga

SEQ ID NO: 8665 - RNA, 17 nt, Homo sapiens
uauuggcaguuggagga

SEQ ID NO: 8666 - RNA, 17 nt, Homo sapiens
gaggaagagugcgccaa

SEQ ID NO: 8667 - RNA, 17 nt, Homo sapiens
ggaagagugcgccaacg

SEQ ID NO: 8668 - RNA, 17 nt, Homo sapiens
aagagugcgccaacgag

SEQ ID NO: 8669 - RNA, 17 nt, Homo sapiens
gugcgccaacgagccca

SEQ ID NO: 8670 - RNA, 17 nt, Homo sapiens
gccaacgagcccagcca

SEQ ID NO: 8671 - RNA, 17 nt, Homo sapiens
cgagcccagccaagcug

SEQ ID NO: 8672 - RNA, 17 nt, Homo sapiens
ccagccaagcugucuca

SEQ ID NO: 8673 - RNA, 17 nt, Homo sapiens
gccaagcugucucagug

SEQ ID NO: 8674 - RNA, 17 nt, Homo sapiens
cugucucagugacaaac

SEQ ID NO: 8675 - RNA, 17 nt, Homo sapiens
ucucagugacaaaccca

SEQ ID NO: 8676 - RNA, 17 nt, Homo sapiens
agugacaaacccauacc

SEQ ID NO: 8677 - RNA, 17 nt, Homo sapiens
auacccuugugaagaau

SEQ ID NO: 8678 - RNA, 17 nt, Homo sapiens
ugugaagaauggagaag

SEQ ID NO: 8679 - RNA, 17 nt, Homo sapiens
auggagaaguguggagg

SEQ ID NO: 8680 - RNA, 17 nt, Homo sapiens
ggagaaguguggaggac

SEQ ID NO: 8681 - RNA, 17 nt, Homo sapiens
uguggaggacuuccagg

SEQ ID NO: 8682 - RNA, 17 nt, Homo sapiens
gggaggaaauaaaauug

SEQ ID NO: 8683 - RNA, 17 nt, Homo sapiens
gaaauaaaauugaaguu

SEQ ID NO: 8684 - RNA, 17 nt, Homo sapiens
aaauugaaguuaauaaa

SEQ ID NO: 8685 - RNA, 17 nt, Homo sapiens
ugaaguuaauaaaaauc

SEQ ID NO: 8686 - RNA, 17 nt, Homo sapiens
uaauaaaaaucaauuug

SEQ ID NO: 8687 - RNA, 17 nt, Homo sapiens
aaaaaucaauuugcucu

SEQ ID NO: 8688 - RNA, 17 nt, Homo sapiens
aucaauuugcucuaauu

SEQ ID NO: 8689 - RNA, 17 nt, Homo sapiens
uugcucuaauugaagga

SEQ ID NO: 8690 - RNA, 17 nt, Homo sapiens
aggaaaaaacaaaacug

SEQ ID NO: 8691 - RNA, 17 nt, Homo sapiens
aaaacaaaacuguaagu

SEQ ID NO: 8692 - RNA, 17 nt, Homo sapiens
acaaaacuguaaguacc

SEQ ID NO: 8693 - RNA, 17 nt, Homo sapiens
aacuguaaguacccuug

SEQ ID NO: 8694 - RNA, 17 nt, Homo sapiens
guacccuuguuauccaa

SEQ ID NO: 8695 - RNA, 17 nt, Homo sapiens
uuauccaagcggcaaau

SEQ ID NO: 8696 - RNA, 17 nt, Homo sapiens
uccaagcggcaaaugug

SEQ ID NO: 8697 - RNA, 17 nt, Homo sapiens
agcggcaaaugugucag

SEQ ID NO: 8698 - RNA, 17 nt, Homo sapiens
cggcaaaugugucagcu

SEQ ID NO: 8699 - RNA, 17 nt, Homo sapiens
gcaaaugugucagcuuu

SEQ ID NO: 8700 - RNA, 17 nt, Homo sapiens
augugucagcuuuguac

SEQ ID NO: 8701 - RNA, 17 nt, Homo sapiens
ucagcuuuguacaaaug

SEQ ID NO: 8702 - RNA, 17 nt, Homo sapiens
uuguacaaaugugaagc

SEQ ID NO: 8703 - RNA, 17 nt, Homo sapiens
guacaaaugugaagcgg

SEQ ID NO: 8704 - RNA, 17 nt, Homo sapiens
aaugugaagcggucaac

SEQ ID NO: 8705 - RNA, 17 nt, Homo sapiens
gugaagcggucaacaaa

SEQ ID NO: 8706 - RNA, 17 nt, Homo sapiens
agcggucaacaaagucg

SEQ ID NO: 8707 - RNA, 17 nt, Homo sapiens
ucaacaaagucgggaga

SEQ ID NO: 8708 - RNA, 17 nt, Homo sapiens
gagagagggugaucucc

SEQ ID NO: 8709 - RNA, 17 nt, Homo sapiens
agagggugaucuccuuc

SEQ ID NO: 8710 - RNA, 17 nt, Homo sapiens
ccuuccacgugaccagg

SEQ ID NO: 8711 - RNA, 17 nt, Homo sapiens
uccacgugaccaggggu

SEQ ID NO: 8712 - RNA, 17 nt, Homo sapiens
gaccagggguccugaaa

SEQ ID NO: 8713 - RNA, 17 nt, Homo sapiens
guccugaaauuacuuug

SEQ ID NO: 8714 - RNA, 17 nt, Homo sapiens
auuacuuugcaaccuga

SEQ ID NO: 8715 - RNA, 17 nt, Homo sapiens
acuuugcaaccugacau

SEQ ID NO: 8716 - RNA, 17 nt, Homo sapiens
gcaaccugacaugcagc

SEQ ID NO: 8717 - RNA, 17 nt, Homo sapiens
ccugacaugcagcccac

SEQ ID NO: 8718 - RNA, 17 nt, Homo sapiens
gacaugcagcccacuga

SEQ ID NO: 8719 - RNA, 17 nt, Homo sapiens
cccacugagcaggagag

SEQ ID NO: 8720 - RNA, 17 nt, Homo sapiens
gcaggagagcgugucuu

SEQ ID NO: 8721 - RNA, 17 nt, Homo sapiens
aggagagcgugucuuug

SEQ ID NO: 8722 - RNA, 17 nt, Homo sapiens
gagagcgugucuuugug

SEQ ID NO: 8723 - RNA, 17 nt, Homo sapiens
gugucuuuguggugcac

SEQ ID NO: 8724 - RNA, 17 nt, Homo sapiens
ucuuuguggugcacugc

SEQ ID NO: 8725 - RNA, 17 nt, Homo sapiens
uuuguggugcacugcag

SEQ ID NO: 8726 - RNA, 17 nt, Homo sapiens
ggugcacugcagacaga

SEQ ID NO: 8727 - RNA, 17 nt, Homo sapiens
cacugcagacagaucua

SEQ ID NO: 8728 - RNA, 17 nt, Homo sapiens
gcagacagaucuacguu

SEQ ID NO: 8729 - RNA, 17 nt, Homo sapiens
agaucuacguuugagaa

SEQ ID NO: 8730 - RNA, 17 nt, Homo sapiens
guuugagaaccucacau

SEQ ID NO: 8731 - RNA, 17 nt, Homo sapiens
cucacaugguacaagcu

SEQ ID NO: 8732 - RNA, 17 nt, Homo sapiens
ugguacaagcuuggccc

SEQ ID NO: 8733 - RNA, 17 nt, Homo sapiens
caagcuuggcccacagc

SEQ ID NO: 8734 - RNA, 17 nt, Homo sapiens
ggcccacagccucugcc

SEQ ID NO: 8735 - RNA, 17 nt, Homo sapiens
cagccucugccaaucca

SEQ ID NO: 8736 - RNA, 17 nt, Homo sapiens
cucugccaauccaugug

SEQ ID NO: 8737 - RNA, 17 nt, Homo sapiens
caauccaugugggagag

SEQ ID NO: 8738 - RNA, 17 nt, Homo sapiens
gugggagaguugcccac

SEQ ID NO: 8739 - RNA, 17 nt, Homo sapiens
ggagaguugcccacacc

SEQ ID NO: 8740 - RNA, 17 nt, Homo sapiens
ccacaccuguuugcaag

SEQ ID NO: 8741 - RNA, 17 nt, Homo sapiens
accuguuugcaagaacu

SEQ ID NO: 8742 - RNA, 17 nt, Homo sapiens
uugcaagaacuuggaua

SEQ ID NO: 8743 - RNA, 17 nt, Homo sapiens
gaacuuggauacucuuu

SEQ ID NO: 8744 - RNA, 17 nt, Homo sapiens
cuuuggaaauugaaugc

SEQ ID NO: 8745 - RNA, 17 nt, Homo sapiens
gaaauugaaugccacca

SEQ ID NO: 8746 - RNA, 17 nt, Homo sapiens
aauugaaugccaccaug

SEQ ID NO: 8747 - RNA, 17 nt, Homo sapiens
gccaccauguucucuaa

SEQ ID NO: 8748 - RNA, 17 nt, Homo sapiens
guucucuaauagcacaa

SEQ ID NO: 8749 - RNA, 17 nt, Homo sapiens
cucuaauagcacaaaug

SEQ ID NO: 8750 - RNA, 17 nt, Homo sapiens
uagcacaaaugacauuu

SEQ ID NO: 8751 - RNA, 17 nt, Homo sapiens
cacaaaugacauuuuga

SEQ ID NO: 8752 - RNA, 17 nt, Homo sapiens
acauuuugaucauggag

SEQ ID NO: 8753 - RNA, 17 nt, Homo sapiens
aucauggagcuuaagaa

SEQ ID NO: 8754 - RNA, 17 nt, Homo sapiens
gcuuaagaaugcauccu

SEQ ID NO: 8755 - RNA, 17 nt, Homo sapiens
uuaagaaugcauccuug

SEQ ID NO: 8756 - RNA, 17 nt, Homo sapiens
gcauccuugcaggacca

SEQ ID NO: 8757 - RNA, 17 nt, Homo sapiens
cuugcaggaccaaggag

SEQ ID NO: 8758 - RNA, 17 nt, Homo sapiens
ccaaggagacuaugucu

SEQ ID NO: 8759 - RNA, 17 nt, Homo sapiens
gagacuaugucugccuu

SEQ ID NO: 8760 - RNA, 17 nt, Homo sapiens
cuaugucugccuugcuc

SEQ ID NO: 8761 - RNA, 17 nt, Homo sapiens
ucugccuugcucaagac

SEQ ID NO: 8762 - RNA, 17 nt, Homo sapiens
ugcucaagacaggaaga

SEQ ID NO: 8763 - RNA, 17 nt, Homo sapiens
acaggaagaccaagaaa

SEQ ID NO: 8764 - RNA, 17 nt, Homo sapiens
aagaaaagacauugcgu

SEQ ID NO: 8765 - RNA, 17 nt, Homo sapiens
aagacauugcgugguca

SEQ ID NO: 8766 - RNA, 17 nt, Homo sapiens
gacauugcguggucagg

SEQ ID NO: 8767 - RNA, 17 nt, Homo sapiens
auugcguggucaggcag

SEQ ID NO: 8768 - RNA, 17 nt, Homo sapiens
guggucaggcagcucac

SEQ ID NO: 8769 - RNA, 17 nt, Homo sapiens
gucaggcagcucacagu

SEQ ID NO: 8770 - RNA, 17 nt, Homo sapiens
agcucacaguccuagag

SEQ ID NO: 8771 - RNA, 17 nt, Homo sapiens
guccuagagcguguggc

SEQ ID NO: 8772 - RNA, 17 nt, Homo sapiens
ccuagagcguguggcac

SEQ ID NO: 8773 - RNA, 17 nt, Homo sapiens
uagagcguguggcaccc

SEQ ID NO: 8774 - RNA, 17 nt, Homo sapiens
agcguguggcacccacg

SEQ ID NO: 8775 - RNA, 17 nt, Homo sapiens
cacccacgaucacagga

SEQ ID NO: 8776 - RNA, 17 nt, Homo sapiens
cacaggaaaccuggaga

SEQ ID NO: 8777 - RNA, 17 nt, Homo sapiens
ccuggagaaucagacga

SEQ ID NO: 8778 - RNA, 17 nt, Homo sapiens
agaaucagacgacaagu

SEQ ID NO: 8779 - RNA, 17 nt, Homo sapiens
aucagacgacaaguauu

SEQ ID NO: 8780 - RNA, 17 nt, Homo sapiens
gacgacaaguauugggg

SEQ ID NO: 8781 - RNA, 17 nt, Homo sapiens
uggggaaagcaucgaag

SEQ ID NO: 8782 - RNA, 17 nt, Homo sapiens
gcaucgaagucucaugc

SEQ ID NO: 8783 - RNA, 17 nt, Homo sapiens
agucucaugcacggcau

SEQ ID NO: 8784 - RNA, 17 nt, Homo sapiens
caugcacggcaucuggg

SEQ ID NO: 8785 - RNA, 17 nt, Homo sapiens
aucugggaaucccccuc

SEQ ID NO: 8786 - RNA, 17 nt, Homo sapiens
cuccacagaucaugugg

SEQ ID NO: 8787 - RNA, 17 nt, Homo sapiens
cagaucaugugguuuaa

SEQ ID NO: 8788 - RNA, 17 nt, Homo sapiens
aucaugugguuuaaaga

SEQ ID NO: 8789 - RNA, 17 nt, Homo sapiens
guuuaaagauaaugaga

SEQ ID NO: 8790 - RNA, 17 nt, Homo sapiens
uaaagauaaugagaccc

SEQ ID NO: 8791 - RNA, 17 nt, Homo sapiens
auaaugagacccuugua

SEQ ID NO: 8792 - RNA, 17 nt, Homo sapiens
agacccuuguagaagac

SEQ ID NO: 8793 - RNA, 17 nt, Homo sapiens
uguagaagacucaggca

SEQ ID NO: 8794 - RNA, 17 nt, Homo sapiens
agacucaggcauuguau

SEQ ID NO: 8795 - RNA, 17 nt, Homo sapiens
caggcauuguauugaag

SEQ ID NO: 8796 - RNA, 17 nt, Homo sapiens
auugaaggaugggaacc

SEQ ID NO: 8797 - RNA, 17 nt, Homo sapiens
ggaugggaaccggaacc

SEQ ID NO: 8798 - RNA, 17 nt, Homo sapiens
gaaccggaaccucacua

SEQ ID NO: 8799 - RNA, 17 nt, Homo sapiens
cacuauccgcagaguga

SEQ ID NO: 8800 - RNA, 17 nt, Homo sapiens
uccgcagagugaggaag

SEQ ID NO: 8801 - RNA, 17 nt, Homo sapiens
gaaggaggacgaaggcc

SEQ ID NO: 8802 - RNA, 17 nt, Homo sapiens
ggacgaaggccucuaca

SEQ ID NO: 8803 - RNA, 17 nt, Homo sapiens
cuacaccugccaggcau

SEQ ID NO: 8804 - RNA, 17 nt, Homo sapiens
ccugccaggcaugcagu

SEQ ID NO: 8805 - RNA, 17 nt, Homo sapiens
ccaggcaugcaguguuc

SEQ ID NO: 8806 - RNA, 17 nt, Homo sapiens
ggcaugcaguguucuug

SEQ ID NO: 8807 - RNA, 17 nt, Homo sapiens
caugcaguguucuuggc

SEQ ID NO: 8808 - RNA, 17 nt, Homo sapiens
uguucuuggcugugcaa

SEQ ID NO: 8809 - RNA, 17 nt, Homo sapiens
ucuuggcugugcaaaag

SEQ ID NO: 8810 - RNA, 17 nt, Homo sapiens
uuggcugugcaaaagug

SEQ ID NO: 8811 - RNA, 17 nt, Homo sapiens
gugcaaaaguggaggca

SEQ ID NO: 8812 - RNA, 17 nt, Homo sapiens
aaguggaggcauuuuuc

SEQ ID NO: 8813 - RNA, 17 nt, Homo sapiens
uuuucauaauagaaggu

SEQ ID NO: 8814 - RNA, 17 nt, Homo sapiens
aauagaaggugcccagg

SEQ ID NO: 8815 - RNA, 17 nt, Homo sapiens
uagaaggugcccaggaa

SEQ ID NO: 8816 - RNA, 17 nt, Homo sapiens
aggaaaagacgaacuug

SEQ ID NO: 8817 - RNA, 17 nt, Homo sapiens
aaagacgaacuuggaaa

SEQ ID NO: 8818 - RNA, 17 nt, Homo sapiens
acuuggaaaucauuauu

SEQ ID NO: 8819 - RNA, 17 nt, Homo sapiens
uuauucuaguaggcacg

SEQ ID NO: 8820 - RNA, 17 nt, Homo sapiens
ucuaguaggcacggcgg

SEQ ID NO: 8821 - RNA, 17 nt, Homo sapiens
uaguaggcacggcggug

SEQ ID NO: 8822 - RNA, 17 nt, Homo sapiens
uaggcacggcggugauu

SEQ ID NO: 8823 - RNA, 17 nt, Homo sapiens
gcacggcggugauugcc

SEQ ID NO: 8824 - RNA, 17 nt, Homo sapiens
cggcggugauugccaug

SEQ ID NO: 8825 - RNA, 17 nt, Homo sapiens
cggugauugccauguuc

SEQ ID NO: 8826 - RNA, 17 nt, Homo sapiens
auugccauguucuucug

SEQ ID NO: 8827 - RNA, 17 nt, Homo sapiens
uucuucuggcuacuucu

SEQ ID NO: 8828 - RNA, 17 nt, Homo sapiens
uacuucuugucaucauc

SEQ ID NO: 8829 - RNA, 17 nt, Homo sapiens
uugucaucauccuacgg

SEQ ID NO: 8830 - RNA, 17 nt, Homo sapiens
aucauccuacggaccgu

SEQ ID NO: 8831 - RNA, 17 nt, Homo sapiens
uccuacggaccguuaag

SEQ ID NO: 8832 - RNA, 17 nt, Homo sapiens
uacggaccguuaagcgg

SEQ ID NO: 8833 - RNA, 17 nt, Homo sapiens
accguuaagcgggccaa

SEQ ID NO: 8834 - RNA, 17 nt, Homo sapiens
uuaagcgggccaaugga

SEQ ID NO: 8835 - RNA, 17 nt, Homo sapiens
gcgggccaauggagggg

SEQ ID NO: 8836 - RNA, 17 nt, Homo sapiens
ggaggggaacugaagac

SEQ ID NO: 8837 - RNA, 17 nt, Homo sapiens
aacugaagacaggcuac

SEQ ID NO: 8838 - RNA, 17 nt, Homo sapiens
gaagacaggcuacuugu

SEQ ID NO: 8839 - RNA, 17 nt, Homo sapiens
ggcuacuuguccaucgu

SEQ ID NO: 8840 - RNA, 17 nt, Homo sapiens
uguccaucgucauggau

SEQ ID NO: 8841 - RNA, 17 nt, Homo sapiens
cgucauggauccagaug

SEQ ID NO: 8842 - RNA, 17 nt, Homo sapiens
ggauccagaugaacucc

SEQ ID NO: 8843 - RNA, 17 nt, Homo sapiens
ccagaugaacucccauu

SEQ ID NO: 8844 - RNA, 17 nt, Homo sapiens
cccauuggaugaacauu

SEQ ID NO: 8845 - RNA, 17 nt, Homo sapiens
uuggaugaacauuguga

SEQ ID NO: 8846 - RNA, 17 nt, Homo sapiens
ugaacauugugaacgac

SEQ ID NO: 8847 - RNA, 17 nt, Homo sapiens
cauugugaacgacugcc

SEQ ID NO: 8848 - RNA, 17 nt, Homo sapiens
ugugaacgacugccuua

SEQ ID NO: 8849 - RNA, 17 nt, Homo sapiens
gaacgacugccuuauga

SEQ ID NO: 8850 - RNA, 17 nt, Homo sapiens
gccuuaugaugccagca

SEQ ID NO: 8851 - RNA, 17 nt, Homo sapiens
cuuaugaugccagcaaa

SEQ ID NO: 8852 - RNA, 17 nt, Homo sapiens
ugaugccagcaaauggg

SEQ ID NO: 8853 - RNA, 17 nt, Homo sapiens
gccagcaaaugggaauu

SEQ ID NO: 8854 - RNA, 17 nt, Homo sapiens
aaaugggaauuccccag

SEQ ID NO: 8855 - RNA, 17 nt, Homo sapiens
ccccagagaccggcuga

SEQ ID NO: 8856 - RNA, 17 nt, Homo sapiens
agagaccggcugaagcu

SEQ ID NO: 8857 - RNA, 17 nt, Homo sapiens
cggcugaagcuagguaa

SEQ ID NO: 8858 - RNA, 17 nt, Homo sapiens
gaagcuagguaagccuc

SEQ ID NO: 8859 - RNA, 17 nt, Homo sapiens
cuagguaagccucuugg

SEQ ID NO: 8860 - RNA, 17 nt, Homo sapiens
gccucuuggccguggug

SEQ ID NO: 8861 - RNA, 17 nt, Homo sapiens
ucuuggccguggugccu

SEQ ID NO: 8862 - RNA, 17 nt, Homo sapiens
uggccguggugccuuug

SEQ ID NO: 8863 - RNA, 17 nt, Homo sapiens
gccguggugccuuuggc

SEQ ID NO: 8864 - RNA, 17 nt, Homo sapiens
ugccuuuggccaaguga

SEQ ID NO: 8865 - RNA, 17 nt, Homo sapiens
uuggccaagugauugaa

SEQ ID NO: 8866 - RNA, 17 nt, Homo sapiens
gccaagugauugaagca

SEQ ID NO: 8867 - RNA, 17 nt, Homo sapiens
ugauugaagcagaugcc

SEQ ID NO: 8868 - RNA, 17 nt, Homo sapiens
ugaagcagaugccuuug

SEQ ID NO: 8869 - RNA, 17 nt, Homo sapiens
aagcagaugccuuugga

SEQ ID NO: 8870 - RNA, 17 nt, Homo sapiens
ccuuuggaauugacaag

SEQ ID NO: 8871 - RNA, 17 nt, Homo sapiens
uggaauugacaagacag

SEQ ID NO: 8872 - RNA, 17 nt, Homo sapiens
uugacaagacagcaacu

SEQ ID NO: 8873 - RNA, 17 nt, Homo sapiens
acaagacagcaacuugc

SEQ ID NO: 8874 - RNA, 17 nt, Homo sapiens
agacagcaacuugcagg

SEQ ID NO: 8875 - RNA, 17 nt, Homo sapiens
agcaacuugcaggacag

SEQ ID NO: 8876 - RNA, 17 nt, Homo sapiens
cuugcaggacaguagca

SEQ ID NO: 8877 - RNA, 17 nt, Homo sapiens
gcaggacaguagcaguc

SEQ ID NO: 8878 - RNA, 17 nt, Homo sapiens
ggacaguagcagucaaa

SEQ ID NO: 8879 - RNA, 17 nt, Homo sapiens
caguagcagucaaaaug

SEQ ID NO: 8880 - RNA, 17 nt, Homo sapiens
cagucaaaauguugaaa

SEQ ID NO: 8881 - RNA, 17 nt, Homo sapiens
gucaaaauguugaaaga

SEQ ID NO: 8882 - RNA, 17 nt, Homo sapiens
aagaaggagcaacacac

SEQ ID NO: 8883 - RNA, 17 nt, Homo sapiens
aaggagcaacacacagu

SEQ ID NO: 8884 - RNA, 17 nt, Homo sapiens
aacacacagugagcauc

SEQ ID NO: 8885 - RNA, 17 nt, Homo sapiens
cacagugagcaucgagc

SEQ ID NO: 8886 - RNA, 17 nt, Homo sapiens
agcaucgagcucucaug

SEQ ID NO: 8887 - RNA, 17 nt, Homo sapiens
gcucucaugucugaacu

SEQ ID NO: 8888 - RNA, 17 nt, Homo sapiens
augucugaacucaagau

SEQ ID NO: 8889 - RNA, 17 nt, Homo sapiens
aacucaagauccucauu

SEQ ID NO: 8890 - RNA, 17 nt, Homo sapiens
ucauauuggucaccauc

SEQ ID NO: 8891 - RNA, 17 nt, Homo sapiens
ccaucucaaugugguca

SEQ ID NO: 8892 - RNA, 17 nt, Homo sapiens
aucucaauguggucaac

SEQ ID NO: 8893 - RNA, 17 nt, Homo sapiens
ucaauguggucaaccuu

SEQ ID NO: 8894 - RNA, 17 nt, Homo sapiens
uguggucaaccuucuag

SEQ ID NO: 8895 - RNA, 17 nt, Homo sapiens
ccuucuaggugccugua

SEQ ID NO: 8896 - RNA, 17 nt, Homo sapiens
uucuaggugccuguacc

SEQ ID NO: 8897 - RNA, 17 nt, Homo sapiens
aggugccuguaccaagc

SEQ ID NO: 8898 - RNA, 17 nt, Homo sapiens
uguaccaagccaggagg

SEQ ID NO: 8899 - RNA, 17 nt, Homo sapiens
ccaggagggccacucau

SEQ ID NO: 8900 - RNA, 17 nt, Homo sapiens
cacucauggugauugug

SEQ ID NO: 8901 - RNA, 17 nt, Homo sapiens
ucauggugauuguggaa

SEQ ID NO: 8902 - RNA, 17 nt, Homo sapiens
uggugauuguggaauuc

SEQ ID NO: 8903 - RNA, 17 nt, Homo sapiens
auuguggaauucugcaa

SEQ ID NO: 8904 - RNA, 17 nt, Homo sapiens
ggaauucugcaaauuug

SEQ ID NO: 8905 - RNA, 17 nt, Homo sapiens
uucugcaaauuuggaaa

SEQ ID NO: 8906 - RNA, 17 nt, Homo sapiens
auuuggaaaccugucca

SEQ ID NO: 8907 - RNA, 17 nt, Homo sapiens
ggaaaccuguccacuua

SEQ ID NO: 8908 - RNA, 17 nt, Homo sapiens
ccugaggagcaagagaa

SEQ ID NO: 8909 - RNA, 17 nt, Homo sapiens
caagagaaaugaauuug

SEQ ID NO: 8910 - RNA, 17 nt, Homo sapiens
agaaaugaauuuguccc

SEQ ID NO: 8911 - RNA, 17 nt, Homo sapiens
augaauuuguccccuac

SEQ ID NO: 8912 - RNA, 17 nt, Homo sapiens
ccuacaagaccaaaggg

SEQ ID NO: 8913 - RNA, 17 nt, Homo sapiens
ccaaaggggcacgauuc

SEQ ID NO: 8914 - RNA, 17 nt, Homo sapiens
ggggcacgauuccguca

SEQ ID NO: 8915 - RNA, 17 nt, Homo sapiens
acgauuccgucaaggga

SEQ ID NO: 8916 - RNA, 17 nt, Homo sapiens
agggaaagacuacguug

SEQ ID NO: 8917 - RNA, 17 nt, Homo sapiens
aagacuacguuggagca

SEQ ID NO: 8918 - RNA, 17 nt, Homo sapiens
acguuggagcaaucccu

SEQ ID NO: 8919 - RNA, 17 nt, Homo sapiens
uuggagcaaucccugug

SEQ ID NO: 8920 - RNA, 17 nt, Homo sapiens
caaucccuguggaucug

SEQ ID NO: 8921 - RNA, 17 nt, Homo sapiens
cccuguggaucugaaac

SEQ ID NO: 8922 - RNA, 17 nt, Homo sapiens
gaucugaaacggcgcuu

SEQ ID NO: 8923 - RNA, 17 nt, Homo sapiens
cugaaacggcgcuugga

SEQ ID NO: 8924 - RNA, 17 nt, Homo sapiens
gaaacggcgcuuggaca

SEQ ID NO: 8925 - RNA, 17 nt, Homo sapiens
gcgcuuggacagcauca

SEQ ID NO: 8926 - RNA, 17 nt, Homo sapiens
cuuggacagcaucacca

SEQ ID NO: 8927 - RNA, 17 nt, Homo sapiens
caucaccaguagccaga

SEQ ID NO: 8928 - RNA, 17 nt, Homo sapiens
caccaguagccagagcu

SEQ ID NO: 8929 - RNA, 17 nt, Homo sapiens
uagccagagcucagcca

SEQ ID NO: 8930 - RNA, 17 nt, Homo sapiens
agagcucagccagcucu

SEQ ID NO: 8931 - RNA, 17 nt, Homo sapiens
cucagccagcucuggau

SEQ ID NO: 8932 - RNA, 17 nt, Homo sapiens
agcucuggauuugugga

SEQ ID NO: 8933 - RNA, 17 nt, Homo sapiens
cuggauuuguggaggag

SEQ ID NO: 8934 - RNA, 17 nt, Homo sapiens
gaggagaagucccucag

SEQ ID NO: 8935 - RNA, 17 nt, Homo sapiens
gucccucagugauguag

SEQ ID NO: 8936 - RNA, 17 nt, Homo sapiens
ccucagugauguagaag

SEQ ID NO: 8937 - RNA, 17 nt, Homo sapiens
ucagugauguagaagaa

SEQ ID NO: 8938 - RNA, 17 nt, Homo sapiens
aagaggaagcuccugaa

SEQ ID NO: 8939 - RNA, 17 nt, Homo sapiens
uccugaagaucuguaua

SEQ ID NO: 8940 - RNA, 17 nt, Homo sapiens
gaagaucuguauaagga

SEQ ID NO: 8941 - RNA, 17 nt, Homo sapiens
guauaaggacuuccuga

SEQ ID NO: 8942 - RNA, 17 nt, Homo sapiens
acuuccugaccuuggag

SEQ ID NO: 8943 - RNA, 17 nt, Homo sapiens
accuuggagcaucucau

SEQ ID NO: 8944 - RNA, 17 nt, Homo sapiens
ucucaucuguuacagcu

SEQ ID NO: 8945 - RNA, 17 nt, Homo sapiens
cuguuacagcuuccaag

SEQ ID NO: 8946 - RNA, 17 nt, Homo sapiens
gcuuccaaguggcuaag

SEQ ID NO: 8947 - RNA, 17 nt, Homo sapiens
uccaaguggcuaagggc

SEQ ID NO: 8948 - RNA, 17 nt, Homo sapiens
ggcuaagggcauggagu

SEQ ID NO: 8949 - RNA, 17 nt, Homo sapiens
ggcauggaguucuuggc

SEQ ID NO: 8950 - RNA, 17 nt, Homo sapiens
aguucuuggcaucgcga

SEQ ID NO: 8951 - RNA, 17 nt, Homo sapiens
uuggcaucgcgaaagug

SEQ ID NO: 8952 - RNA, 17 nt, Homo sapiens
ucgcgaaaguguaucca

SEQ ID NO: 8953 - RNA, 17 nt, Homo sapiens
gcgaaaguguauccaca

SEQ ID NO: 8954 - RNA, 17 nt, Homo sapiens
ccacagggaccuggcgg

SEQ ID NO: 8955 - RNA, 17 nt, Homo sapiens
gggaccuggcggcacga

SEQ ID NO: 8956 - RNA, 17 nt, Homo sapiens
accuggcggcacgaaau

SEQ ID NO: 8957 - RNA, 17 nt, Homo sapiens
ggcacgaaauauccucu

SEQ ID NO: 8958 - RNA, 17 nt, Homo sapiens
ggagaagaacgugguua

SEQ ID NO: 8959 - RNA, 17 nt, Homo sapiens
agaagaacgugguuaaa

SEQ ID NO: 8960 - RNA, 17 nt, Homo sapiens
agaacgugguuaaaauc

SEQ ID NO: 8961 - RNA, 17 nt, Homo sapiens
ugguuaaaaucugugac

SEQ ID NO: 8962 - RNA, 17 nt, Homo sapiens
uaaaaucugugacuuug

SEQ ID NO: 8963 - RNA, 17 nt, Homo sapiens
aaucugugacuuuggcu

SEQ ID NO: 8964 - RNA, 17 nt, Homo sapiens
ugacuuuggcuuggccc

SEQ ID NO: 8965 - RNA, 17 nt, Homo sapiens
uuggcuuggcccgggau

SEQ ID NO: 8966 - RNA, 17 nt, Homo sapiens
ggcccgggauauuuaua

SEQ ID NO: 8967 - RNA, 17 nt, Homo sapiens
uuauaaagauccagauu

SEQ ID NO: 8968 - RNA, 17 nt, Homo sapiens
agauccagauuauguca

SEQ ID NO: 8969 - RNA, 17 nt, Homo sapiens
cagauuaugucagaaaa

SEQ ID NO: 8970 - RNA, 17 nt, Homo sapiens
aaaaggagaugcucgcc

SEQ ID NO: 8971 - RNA, 17 nt, Homo sapiens
aaggagaugcucgccuc

SEQ ID NO: 8972 - RNA, 17 nt, Homo sapiens
agaugcucgccucccuu

SEQ ID NO: 8973 - RNA, 17 nt, Homo sapiens
ccuuugaaauggauggc

SEQ ID NO: 8974 - RNA, 17 nt, Homo sapiens
ugaaauggauggcccca

SEQ ID NO: 8975 - RNA, 17 nt, Homo sapiens
aauggauggccccagaa

SEQ ID NO: 8976 - RNA, 17 nt, Homo sapiens
ccccagaaacaauuuuu

SEQ ID NO: 8977 - RNA, 17 nt, Homo sapiens
cagaaacaauuuuugac

SEQ ID NO: 8978 - RNA, 17 nt, Homo sapiens
aauuuuugacagagugu

SEQ ID NO: 8979 - RNA, 17 nt, Homo sapiens
uugacagaguguacaca

SEQ ID NO: 8980 - RNA, 17 nt, Homo sapiens
gacagaguguacacaau

SEQ ID NO: 8981 - RNA, 17 nt, Homo sapiens
uguacacaauccagagu

SEQ ID NO: 8982 - RNA, 17 nt, Homo sapiens
aauccagagugacgucu

SEQ ID NO: 8983 - RNA, 17 nt, Homo sapiens
ccagagugacgucuggu

SEQ ID NO: 8984 - RNA, 17 nt, Homo sapiens
agagugacgucuggucu

SEQ ID NO: 8985 - RNA, 17 nt, Homo sapiens
gacgucuggucuuuugg

SEQ ID NO: 8986 - RNA, 17 nt, Homo sapiens
gucuuuugguguuuugc

SEQ ID NO: 8987 - RNA, 17 nt, Homo sapiens
cuuuugguguuuugcug

SEQ ID NO: 8988 - RNA, 17 nt, Homo sapiens
gguguuuugcuguggga

SEQ ID NO: 8989 - RNA, 17 nt, Homo sapiens
guuuugcugugggaaau

SEQ ID NO: 8990 - RNA, 17 nt, Homo sapiens
ugugggaaauauuuucc

SEQ ID NO: 8991 - RNA, 17 nt, Homo sapiens
uuccuuaggugcuucuc

SEQ ID NO: 8992 - RNA, 17 nt, Homo sapiens
ccuuaggugcuucucca

SEQ ID NO: 8993 - RNA, 17 nt, Homo sapiens
auccugggguaaagauu

SEQ ID NO: 8994 - RNA, 17 nt, Homo sapiens
ggguaaagauugaugaa

SEQ ID NO: 8995 - RNA, 17 nt, Homo sapiens
aaagauugaugaagaau

SEQ ID NO: 8996 - RNA, 17 nt, Homo sapiens
gaugaagaauuuuguag

SEQ ID NO: 8997 - RNA, 17 nt, Homo sapiens
agaauuuuguaggcgau

SEQ ID NO: 8998 - RNA, 17 nt, Homo sapiens
uuuuguaggcgauugaa

SEQ ID NO: 8999 - RNA, 17 nt, Homo sapiens
uguaggcgauugaaaga

SEQ ID NO: 9000 - RNA, 17 nt, Homo sapiens
aagaaggaacuagaaug

SEQ ID NO: 9001 - RNA, 17 nt, Homo sapiens
gaacuagaaugagggcc

SEQ ID NO: 9002 - RNA, 17 nt, Homo sapiens
gaaugagggccccugau

SEQ ID NO: 9003 - RNA, 17 nt, Homo sapiens
ggccccugauuauacua

SEQ ID NO: 9004 - RNA, 17 nt, Homo sapiens
caccagaaauguaccag

SEQ ID NO: 9005 - RNA, 17 nt, Homo sapiens
ccagaaauguaccagac

SEQ ID NO: 9006 - RNA, 17 nt, Homo sapiens
uguaccagaccaugcug

SEQ ID NO: 9007 - RNA, 17 nt, Homo sapiens
cagaccaugcuggacug

SEQ ID NO: 9008 - RNA, 17 nt, Homo sapiens
gcuggacugcuggcacg

SEQ ID NO: 9009 - RNA, 17 nt, Homo sapiens
gacugcuggcacgggga

SEQ ID NO: 9010 - RNA, 17 nt, Homo sapiens
cacggggagcccaguca

SEQ ID NO: 9011 - RNA, 17 nt, Homo sapiens
ggagcccagucagagac

SEQ ID NO: 9012 - RNA, 17 nt, Homo sapiens
agucagagacccacguu

SEQ ID NO: 9013 - RNA, 17 nt, Homo sapiens
agacccacguuuucaga

SEQ ID NO: 9014 - RNA, 17 nt, Homo sapiens
uuuucagaguuggugga

SEQ ID NO: 9015 - RNA, 17 nt, Homo sapiens
cagaguugguggaacau

SEQ ID NO: 9016 - RNA, 17 nt, Homo sapiens
uugguggaacauuuggg

SEQ ID NO: 9017 - RNA, 17 nt, Homo sapiens
uuugggaaaucucuugc

SEQ ID NO: 9018 - RNA, 17 nt, Homo sapiens
aaucucuugcaagcuaa

SEQ ID NO: 9019 - RNA, 17 nt, Homo sapiens
ucuugcaagcuaaugcu

SEQ ID NO: 9020 - RNA, 17 nt, Homo sapiens
gcaagcuaaugcucagc

SEQ ID NO: 9021 - RNA, 17 nt, Homo sapiens
aagcuaaugcucagcag

SEQ ID NO: 9022 - RNA, 17 nt, Homo sapiens
aaugcucagcaggaugg

SEQ ID NO: 9023 - RNA, 17 nt, Homo sapiens
ucagcaggauggcaaag

SEQ ID NO: 9024 - RNA, 17 nt, Homo sapiens
gcaggauggcaaagacu

SEQ ID NO: 9025 - RNA, 17 nt, Homo sapiens
uggcaaagacuacauug

SEQ ID NO: 9026 - RNA, 17 nt, Homo sapiens
acuacauuguucuuccg

SEQ ID NO: 9027 - RNA, 17 nt, Homo sapiens
uucuuccgauaucagag

SEQ ID NO: 9028 - RNA, 17 nt, Homo sapiens
uaucagagacuuugagc

SEQ ID NO: 9029 - RNA, 17 nt, Homo sapiens
gacuuugagcauggaag

SEQ ID NO: 9030 - RNA, 17 nt, Homo sapiens
ggaagaggauucuggac

SEQ ID NO: 9031 - RNA, 17 nt, Homo sapiens
gauucuggacucucucu

SEQ ID NO: 9032 - RNA, 17 nt, Homo sapiens
cucucucugccuaccuc

SEQ ID NO: 9033 - RNA, 17 nt, Homo sapiens
ccucaccuguuuccugu

SEQ ID NO: 9034 - RNA, 17 nt, Homo sapiens
uguuuccuguauggagg

SEQ ID NO: 9035 - RNA, 17 nt, Homo sapiens
aggaggaaguaugugac

SEQ ID NO: 9036 - RNA, 17 nt, Homo sapiens
ggaaguaugugacccca

SEQ ID NO: 9037 - RNA, 17 nt, Homo sapiens
aguaugugaccccaaau

SEQ ID NO: 9038 - RNA, 17 nt, Homo sapiens
gaccccaaauuccauua

SEQ ID NO: 9039 - RNA, 17 nt, Homo sapiens
ccauuaugacaacacag

SEQ ID NO: 9040 - RNA, 17 nt, Homo sapiens
uuaugacaacacagcag

SEQ ID NO: 9041 - RNA, 17 nt, Homo sapiens
acaacacagcaggaauc

SEQ ID NO: 9042 - RNA, 17 nt, Homo sapiens
cagcaggaaucagucag

SEQ ID NO: 9043 - RNA, 17 nt, Homo sapiens
aggaaucagucaguauc

SEQ ID NO: 9044 - RNA, 17 nt, Homo sapiens
aucagucaguaucugca

SEQ ID NO: 9045 - RNA, 17 nt, Homo sapiens
caguaucugcagaacag

SEQ ID NO: 9046 - RNA, 17 nt, Homo sapiens
ucugcagaacaguaagc

SEQ ID NO: 9047 - RNA, 17 nt, Homo sapiens
gcagaacaguaagcgaa

SEQ ID NO: 9048 - RNA, 17 nt, Homo sapiens
aacaguaagcgaaagag

SEQ ID NO: 9049 - RNA, 17 nt, Homo sapiens
gcgaaagagccggccug

SEQ ID NO: 9050 - RNA, 17 nt, Homo sapiens
aagagccggccugugag

SEQ ID NO: 9051 - RNA, 17 nt, Homo sapiens
gccggccugugagugua

SEQ ID NO: 9052 - RNA, 17 nt, Homo sapiens
gccugugaguguaaaaa

SEQ ID NO: 9053 - RNA, 17 nt, Homo sapiens
cugugaguguaaaaaca

SEQ ID NO: 9054 - RNA, 17 nt, Homo sapiens
guguaaaaacauuugaa

SEQ ID NO: 9055 - RNA, 17 nt, Homo sapiens
auuugaagauaucccgu

SEQ ID NO: 9056 - RNA, 17 nt, Homo sapiens
gauaucccguuagaaga

SEQ ID NO: 9057 - RNA, 17 nt, Homo sapiens
uuagaagaaccagaagu

SEQ ID NO: 9058 - RNA, 17 nt, Homo sapiens
aaccagaaguaaaagua

SEQ ID NO: 9059 - RNA, 17 nt, Homo sapiens
aaguaaaaguaauccca

SEQ ID NO: 9060 - RNA, 17 nt, Homo sapiens
uaaaaguaaucccagau

SEQ ID NO: 9061 - RNA, 17 nt, Homo sapiens
aaucccagaugacaacc

SEQ ID NO: 9062 - RNA, 17 nt, Homo sapiens
cccagaugacaaccaga

SEQ ID NO: 9063 - RNA, 17 nt, Homo sapiens
agaugacaaccagacgg

SEQ ID NO: 9064 - RNA, 17 nt, Homo sapiens
acaaccagacggacagu

SEQ ID NO: 9065 - RNA, 17 nt, Homo sapiens
ccagacggacaguggua

SEQ ID NO: 9066 - RNA, 17 nt, Homo sapiens
gacggacagugguaugg

SEQ ID NO: 9067 - RNA, 17 nt, Homo sapiens
ggacagugguaugguuc

SEQ ID NO: 9068 - RNA, 17 nt, Homo sapiens
gugguaugguucuugcc

SEQ ID NO: 9069 - RNA, 17 nt, Homo sapiens
ugguucuugccucagaa

SEQ ID NO: 9070 - RNA, 17 nt, Homo sapiens
ucagaagagcugaaaac

SEQ ID NO: 9071 - RNA, 17 nt, Homo sapiens
agcugaaaacuuuggaa

SEQ ID NO: 9072 - RNA, 17 nt, Homo sapiens
uuuggaagacagaacca

SEQ ID NO: 9073 - RNA, 17 nt, Homo sapiens
aagacagaaccaaauua

SEQ ID NO: 9074 - RNA, 17 nt, Homo sapiens
agaaccaaauuaucucc

SEQ ID NO: 9075 - RNA, 17 nt, Homo sapiens
aucuuuugguggaaugg

SEQ ID NO: 9076 - RNA, 17 nt, Homo sapiens
uugguggaauggugccc

SEQ ID NO: 9077 - RNA, 17 nt, Homo sapiens
guggaauggugcccagc

SEQ ID NO: 9078 - RNA, 17 nt, Homo sapiens
ggaauggugcccagcaa

SEQ ID NO: 9079 - RNA, 17 nt, Homo sapiens
ggugcccagcaaaagca

SEQ ID NO: 9080 - RNA, 17 nt, Homo sapiens
cagcaaaagcagggagu

SEQ ID NO: 9081 - RNA, 17 nt, Homo sapiens
agcagggagucuguggc

SEQ ID NO: 9082 - RNA, 17 nt, Homo sapiens
gggagucuguggcaucu

SEQ ID NO: 9083 - RNA, 17 nt, Homo sapiens
agucuguggcaucugaa

SEQ ID NO: 9084 - RNA, 17 nt, Homo sapiens
aucugaaggcucaaacc

SEQ ID NO: 9085 - RNA, 17 nt, Homo sapiens
aggcucaaaccagacaa

SEQ ID NO: 9086 - RNA, 17 nt, Homo sapiens
caaaccagacaagcggc

SEQ ID NO: 9087 - RNA, 17 nt, Homo sapiens
ccagacaagcggcuacc

SEQ ID NO: 9088 - RNA, 17 nt, Homo sapiens
gacaagcggcuaccagu

SEQ ID NO: 9089 - RNA, 17 nt, Homo sapiens
ggcuaccaguccggaua

SEQ ID NO: 9090 - RNA, 17 nt, Homo sapiens
caguccggauaucacuc

SEQ ID NO: 9091 - RNA, 17 nt, Homo sapiens
ucacuccgaugacacag

SEQ ID NO: 9092 - RNA, 17 nt, Homo sapiens
cuccgaugacacagaca

SEQ ID NO: 9093 - RNA, 17 nt, Homo sapiens
ugacacagacaccaccg

SEQ ID NO: 9094 - RNA, 17 nt, Homo sapiens
acaccaccguguacucc

SEQ ID NO: 9095 - RNA, 17 nt, Homo sapiens
accaccguguacuccag

SEQ ID NO: 9096 - RNA, 17 nt, Homo sapiens
guacuccagugaggaag

SEQ ID NO: 9097 - RNA, 17 nt, Homo sapiens
gugaggaagcagaacuu

SEQ ID NO: 9098 - RNA, 17 nt, Homo sapiens
gaagcagaacuuuuaaa

SEQ ID NO: 9099 - RNA, 17 nt, Homo sapiens
cuuuuaaagcugauaga

SEQ ID NO: 9100 - RNA, 17 nt, Homo sapiens
uaaagcugauagagauu

SEQ ID NO: 9101 - RNA, 17 nt, Homo sapiens
ugauagagauuggagug

SEQ ID NO: 9102 - RNA, 17 nt, Homo sapiens
agauuggagugcaaacc

SEQ ID NO: 9103 - RNA, 17 nt, Homo sapiens
auuggagugcaaaccgg

SEQ ID NO: 9104 - RNA, 17 nt, Homo sapiens
gagugcaaaccgguagc

SEQ ID NO: 9105 - RNA, 17 nt, Homo sapiens
gcaaaccgguagcacag

SEQ ID NO: 9106 - RNA, 17 nt, Homo sapiens
aaccgguagcacagccc

SEQ ID NO: 9107 - RNA, 17 nt, Homo sapiens
guagcacagcccagauu

SEQ ID NO: 9108 - RNA, 17 nt, Homo sapiens
cagcccagauucuccag

SEQ ID NO: 9109 - RNA, 17 nt, Homo sapiens
auucuccagccugacuc

SEQ ID NO: 9110 - RNA, 17 nt, Homo sapiens
ccagccugacucgggga

SEQ ID NO: 9111 - RNA, 17 nt, Homo sapiens
acucggggaccacacug

SEQ ID NO: 9112 - RNA, 17 nt, Homo sapiens
cacacugagcucuccuc

SEQ ID NO: 9113 - RNA, 17 nt, Homo sapiens
cuccuccuguuuaaaag

SEQ ID NO: 9114 - RNA, 17 nt, Homo sapiens
aaaaggaagcauccaca

SEQ ID NO: 9115 - RNA, 17 nt, Homo sapiens
acaccccaacucccgga

SEQ ID NO: 9116 - RNA, 17 nt, Homo sapiens
acucccggacaucacau

SEQ ID NO: 9117 - RNA, 17 nt, Homo sapiens
caugagaggucugcuca

SEQ ID NO: 9118 - RNA, 17 nt, Homo sapiens
agaggucugcucagauu

SEQ ID NO: 9119 - RNA, 17 nt, Homo sapiens
cugcucagauuuugaag

SEQ ID NO: 9120 - RNA, 17 nt, Homo sapiens
auuuugaaguguuguuc

SEQ ID NO: 9121 - RNA, 17 nt, Homo sapiens
uuugaaguguuguucuu

SEQ ID NO: 9122 - RNA, 17 nt, Homo sapiens
gaaguguuguucuuucc

SEQ ID NO: 9123 - RNA, 17 nt, Homo sapiens
uuccaccagcaggaagu

SEQ ID NO: 9124 - RNA, 17 nt, Homo sapiens
agcaggaaguagccgca

SEQ ID NO: 9125 - RNA, 17 nt, Homo sapiens
aggaaguagccgcauuu

SEQ ID NO: 9126 - RNA, 17 nt, Homo sapiens
aaguagccgcauuugau

SEQ ID NO: 9127 - RNA, 17 nt, Homo sapiens
cgcauuugauuuucauu

SEQ ID NO: 9128 - RNA, 17 nt, Homo sapiens
ucauuucgacaacagaa

SEQ ID NO: 9129 - RNA, 17 nt, Homo sapiens
uuucgacaacagaaaaa

SEQ ID NO: 9130 - RNA, 17 nt, Homo sapiens
gaaaaaggaccucggac

SEQ ID NO: 9131 - RNA, 17 nt, Homo sapiens
gaccucggacugcaggg

SEQ ID NO: 9132 - RNA, 17 nt, Homo sapiens
cucggacugcagggagc

SEQ ID NO: 9133 - RNA, 17 nt, Homo sapiens
ugcagggagccagucuu

SEQ ID NO: 9134 - RNA, 17 nt, Homo sapiens
gggagccagucuucuag

SEQ ID NO: 9135 - RNA, 17 nt, Homo sapiens
ucuucuaggcauauccu

SEQ ID NO: 9136 - RNA, 17 nt, Homo sapiens
uucuaggcauauccugg

SEQ ID NO: 9137 - RNA, 17 nt, Homo sapiens
cuaggcauauccuggaa

SEQ ID NO: 9138 - RNA, 17 nt, Homo sapiens
uggaagaggcuugugac

SEQ ID NO: 9139 - RNA, 17 nt, Homo sapiens
agaggcuugugacccaa

SEQ ID NO: 9140 - RNA, 17 nt, Homo sapiens
ggcuugugacccaagaa

SEQ ID NO: 9141 - RNA, 17 nt, Homo sapiens
acccaagaaugugucug

SEQ ID NO: 9142 - RNA, 17 nt, Homo sapiens
ccaagaaugugucugug

SEQ ID NO: 9143 - RNA, 17 nt, Homo sapiens
aagaaugugucuguguc

SEQ ID NO: 9144 - RNA, 17 nt, Homo sapiens
augugucugugucuucu

SEQ ID NO: 9145 - RNA, 17 nt, Homo sapiens
gugucugugucuucucc

SEQ ID NO: 9146 - RNA, 17 nt, Homo sapiens
uucucccaguguugacc

SEQ ID NO: 9147 - RNA, 17 nt, Homo sapiens
cucccaguguugaccug

SEQ ID NO: 9148 - RNA, 17 nt, Homo sapiens
caguguugaccugaucc

SEQ ID NO: 9149 - RNA, 17 nt, Homo sapiens
uugaccugauccucuuu

SEQ ID NO: 9150 - RNA, 17 nt, Homo sapiens
cuuuuuucauucauuua

SEQ ID NO: 9151 - RNA, 17 nt, Homo sapiens
uuucauucauuuaaaaa

SEQ ID NO: 9152 - RNA, 17 nt, Homo sapiens
uuuaaaaagcauuauca

SEQ ID NO: 9153 - RNA, 17 nt, Homo sapiens
uaaaaagcauuaucaug

SEQ ID NO: 9154 - RNA, 17 nt, Homo sapiens
aaagcauuaucaugccc

SEQ ID NO: 9155 - RNA, 17 nt, Homo sapiens
gcauuaucaugccccug

SEQ ID NO: 9156 - RNA, 17 nt, Homo sapiens
auuaucaugccccugcu

SEQ ID NO: 9157 - RNA, 17 nt, Homo sapiens
augccccugcugcgggu

SEQ ID NO: 9158 - RNA, 17 nt, Homo sapiens
ccccugcugcgggucuc

SEQ ID NO: 9159 - RNA, 17 nt, Homo sapiens
ugcugcgggucucacca

SEQ ID NO: 9160 - RNA, 17 nt, Homo sapiens
cgggucucaccaugggu

SEQ ID NO: 9161 - RNA, 17 nt, Homo sapiens
gucucaccauggguuua

SEQ ID NO: 9162 - RNA, 17 nt, Homo sapiens
caccauggguuuagaac

SEQ ID NO: 9163 - RNA, 17 nt, Homo sapiens
gguuuagaacaaagagc

SEQ ID NO: 9164 - RNA, 17 nt, Homo sapiens
aacaaagagcuucaagc

SEQ ID NO: 9165 - RNA, 17 nt, Homo sapiens
agcuucaagcaauggcc

SEQ ID NO: 9166 - RNA, 17 nt, Homo sapiens
uucaagcaauggcccca

SEQ ID NO: 9167 - RNA, 17 nt, Homo sapiens
aagcaauggccccaucc

SEQ ID NO: 9168 - RNA, 17 nt, Homo sapiens
auggccccauccucaaa

SEQ ID NO: 9169 - RNA, 17 nt, Homo sapiens
ucaaagaaguagcagua

SEQ ID NO: 9170 - RNA, 17 nt, Homo sapiens
aagaaguagcaguaccu

SEQ ID NO: 9171 - RNA, 17 nt, Homo sapiens
aaguagcaguaccuggg

SEQ ID NO: 9172 - RNA, 17 nt, Homo sapiens
guagcaguaccugggga

SEQ ID NO: 9173 - RNA, 17 nt, Homo sapiens
ccuggggagcugacacu

SEQ ID NO: 9174 - RNA, 17 nt, Homo sapiens
gggagcugacacuucug

SEQ ID NO: 9175 - RNA, 17 nt, Homo sapiens
gagcugacacuucugua

SEQ ID NO: 9176 - RNA, 17 nt, Homo sapiens
acacuucuguaaaacua

SEQ ID NO: 9177 - RNA, 17 nt, Homo sapiens
ucuguaaaacuagaaga

SEQ ID NO: 9178 - RNA, 17 nt, Homo sapiens
acuagaagauaaaccag

SEQ ID NO: 9179 - RNA, 17 nt, Homo sapiens
gaagauaaaccaggcaa

SEQ ID NO: 9180 - RNA, 17 nt, Homo sapiens
uaaaccaggcaacguaa

SEQ ID NO: 9181 - RNA, 17 nt, Homo sapiens
accaggcaacguaagug

SEQ ID NO: 9182 - RNA, 17 nt, Homo sapiens
caggcaacguaaguguu

SEQ ID NO: 9183 - RNA, 17 nt, Homo sapiens
caacguaaguguucgag

SEQ ID NO: 9184 - RNA, 17 nt, Homo sapiens
acguaaguguucgaggu

SEQ ID NO: 9185 - RNA, 17 nt, Homo sapiens
uguucgagguguugaag

SEQ ID NO: 9186 - RNA, 17 nt, Homo sapiens
uucgagguguugaagau

SEQ ID NO: 9187 - RNA, 17 nt, Homo sapiens
uguugaagaugggaagg

SEQ ID NO: 9188 - RNA, 17 nt, Homo sapiens
ugggaaggauuugcagg

SEQ ID NO: 9189 - RNA, 17 nt, Homo sapiens
aaggauuugcagggcug

SEQ ID NO: 9190 - RNA, 17 nt, Homo sapiens
uuugcagggcugagucu

SEQ ID NO: 9191 - RNA, 17 nt, Homo sapiens
agggcugagucuaucca

SEQ ID NO: 9192 - RNA, 17 nt, Homo sapiens
cugagucuauccaagag

SEQ ID NO: 9193 - RNA, 17 nt, Homo sapiens
uccaagaggcuuuguuu

SEQ ID NO: 9194 - RNA, 17 nt, Homo sapiens
gaggcuuuguuuaggac

SEQ ID NO: 9195 - RNA, 17 nt, Homo sapiens
uguuuaggacguggguc

SEQ ID NO: 9196 - RNA, 17 nt, Homo sapiens
uuuaggacguggguccc

SEQ ID NO: 9197 - RNA, 17 nt, Homo sapiens
ggacgugggucccaagc

SEQ ID NO: 9198 - RNA, 17 nt, Homo sapiens
ggucccaagccaagccu

SEQ ID NO: 9199 - RNA, 17 nt, Homo sapiens
caagccaagccuuaagu

SEQ ID NO: 9200 - RNA, 17 nt, Homo sapiens
agccuuaaguguggaau

SEQ ID NO: 9201 - RNA, 17 nt, Homo sapiens
ccuuaaguguggaauuc

SEQ ID NO: 9202 - RNA, 17 nt, Homo sapiens
aguguggaauucggauu

SEQ ID NO: 9203 - RNA, 17 nt, Homo sapiens
gaauucggauugauaga

SEQ ID NO: 9204 - RNA, 17 nt, Homo sapiens
ucggauugauagaaagg

SEQ ID NO: 9205 - RNA, 17 nt, Homo sapiens
aaaggaagacuaacguu

SEQ ID NO: 9206 - RNA, 17 nt, Homo sapiens
gaagacuaacguuaccu

SEQ ID NO: 9207 - RNA, 17 nt, Homo sapiens
agacuaacguuaccuug

SEQ ID NO: 9208 - RNA, 17 nt, Homo sapiens
cuaacguuaccuugcuu

SEQ ID NO: 9209 - RNA, 17 nt, Homo sapiens
guuaccuugcuuuggag

SEQ ID NO: 9210 - RNA, 17 nt, Homo sapiens
uuuggagaguacuggag

SEQ ID NO: 9211 - RNA, 17 nt, Homo sapiens
uggagaguacuggagcc

SEQ ID NO: 9212 - RNA, 17 nt, Homo sapiens
guacuggagccugcaaa

SEQ ID NO: 9213 - RNA, 17 nt, Homo sapiens
uggagccugcaaaugca

SEQ ID NO: 9214 - RNA, 17 nt, Homo sapiens
gccugcaaaugcauugu

SEQ ID NO: 9215 - RNA, 17 nt, Homo sapiens
cugcaaaugcauugugu

SEQ ID NO: 9216 - RNA, 17 nt, Homo sapiens
gcaaaugcauuguguuu

SEQ ID NO: 9217 - RNA, 17 nt, Homo sapiens
aaugcauuguguuugcu

SEQ ID NO: 9218 - RNA, 17 nt, Homo sapiens
ugcauuguguuugcucu

SEQ ID NO: 9219 - RNA, 17 nt, Homo sapiens
uuguguuugcucuggug

SEQ ID NO: 9220 - RNA, 17 nt, Homo sapiens
uugcucugguggaggug

SEQ ID NO: 9221 - RNA, 17 nt, Homo sapiens
ugguggaggugggcaug

SEQ ID NO: 9222 - RNA, 17 nt, Homo sapiens
ggaggugggcauggggu

SEQ ID NO: 9223 - RNA, 17 nt, Homo sapiens
aggugggcauggggucu

SEQ ID NO: 9224 - RNA, 17 nt, Homo sapiens
ggcauggggucuguucu

SEQ ID NO: 9225 - RNA, 17 nt, Homo sapiens
uggggucuguucugaaa

SEQ ID NO: 9226 - RNA, 17 nt, Homo sapiens
guucugaaauguaaagg

SEQ ID NO: 9227 - RNA, 17 nt, Homo sapiens
ucugaaauguaaagggu

SEQ ID NO: 9228 - RNA, 17 nt, Homo sapiens
uguaaaggguucagacg

SEQ ID NO: 9229 - RNA, 17 nt, Homo sapiens
ggguucagacgggguuu

SEQ ID NO: 9230 - RNA, 17 nt, Homo sapiens
cagacgggguuucuggu

SEQ ID NO: 9231 - RNA, 17 nt, Homo sapiens
gguuucugguuuuagaa

SEQ ID NO: 9232 - RNA, 17 nt, Homo sapiens
uuuagaagguugcgugu

SEQ ID NO: 9233 - RNA, 17 nt, Homo sapiens
agaagguugcguguucu

SEQ ID NO: 9234 - RNA, 17 nt, Homo sapiens
aagguugcguguucuuc

SEQ ID NO: 9235 - RNA, 17 nt, Homo sapiens
gguugcguguucuucga

SEQ ID NO: 9236 - RNA, 17 nt, Homo sapiens
uucuucgaguugggcua

SEQ ID NO: 9237 - RNA, 17 nt, Homo sapiens
cgaguugggcuaaagua

SEQ ID NO: 9238 - RNA, 17 nt, Homo sapiens
gggcuaaaguagaguuc

SEQ ID NO: 9239 - RNA, 17 nt, Homo sapiens
aaaguagaguucguugu

SEQ ID NO: 9240 - RNA, 17 nt, Homo sapiens
uagaguucguugugcug

SEQ ID NO: 9241 - RNA, 17 nt, Homo sapiens
aguucguugugcuguuu

SEQ ID NO: 9242 - RNA, 17 nt, Homo sapiens
uucguugugcuguuucu

SEQ ID NO: 9243 - RNA, 17 nt, Homo sapiens
guugugcuguuucugac

SEQ ID NO: 9244 - RNA, 17 nt, Homo sapiens
uguuucugacuccuaau

SEQ ID NO: 9245 - RNA, 17 nt, Homo sapiens
gacuccuaaugagaguu

SEQ ID NO: 9246 - RNA, 17 nt, Homo sapiens
uaaugagaguuccuucc

SEQ ID NO: 9247 - RNA, 17 nt, Homo sapiens
ccuuccagaccguuagc

SEQ ID NO: 9248 - RNA, 17 nt, Homo sapiens
uccagaccguuagcugu

SEQ ID NO: 9249 - RNA, 17 nt, Homo sapiens
gaccguuagcugucucc

SEQ ID NO: 9250 - RNA, 17 nt, Homo sapiens
cguuagcugucuccuug

SEQ ID NO: 9251 - RNA, 17 nt, Homo sapiens
gucuccuugccaagccc

SEQ ID NO: 9252 - RNA, 17 nt, Homo sapiens
cuugccaagccccagga

SEQ ID NO: 9253 - RNA, 17 nt, Homo sapiens
ggaagaaaaugaugcag

SEQ ID NO: 9254 - RNA, 17 nt, Homo sapiens
agaaaaugaugcagcuc

SEQ ID NO: 9255 - RNA, 17 nt, Homo sapiens
aaaaugaugcagcucug

SEQ ID NO: 9256 - RNA, 17 nt, Homo sapiens
augaugcagcucuggcu

SEQ ID NO: 9257 - RNA, 17 nt, Homo sapiens
cagcucuggcuccuugu

SEQ ID NO: 9258 - RNA, 17 nt, Homo sapiens
ggcuccuugucucccag

SEQ ID NO: 9259 - RNA, 17 nt, Homo sapiens
ucucccaggcugauccu

SEQ ID NO: 9260 - RNA, 17 nt, Homo sapiens
ccaggcugauccuuuau

SEQ ID NO: 9261 - RNA, 17 nt, Homo sapiens
gauccuuuauucagaau

SEQ ID NO: 9262 - RNA, 17 nt, Homo sapiens
uauucagaauaccacaa

SEQ ID NO: 9263 - RNA, 17 nt, Homo sapiens
uucagaauaccacaaag

SEQ ID NO: 9264 - RNA, 17 nt, Homo sapiens
agaauaccacaaagaaa

SEQ ID NO: 9265 - RNA, 17 nt, Homo sapiens
aagaaaggacauucagc

SEQ ID NO: 9266 - RNA, 17 nt, Homo sapiens
gaaaggacauucagcuc

SEQ ID NO: 9267 - RNA, 17 nt, Homo sapiens
gacauucagcucaaggc

SEQ ID NO: 9268 - RNA, 17 nt, Homo sapiens
agcucaaggcucccugc

SEQ ID NO: 9269 - RNA, 17 nt, Homo sapiens
ggcucccugccguguug

SEQ ID NO: 9270 - RNA, 17 nt, Homo sapiens
ucccugccguguugaag

SEQ ID NO: 9271 - RNA, 17 nt, Homo sapiens
ccugccguguugaagag

SEQ ID NO: 9272 - RNA, 17 nt, Homo sapiens
guugaagaguucugacu

SEQ ID NO: 9273 - RNA, 17 nt, Homo sapiens
gaguucugacugcacaa

SEQ ID NO: 9274 - RNA, 17 nt, Homo sapiens
uucugacugcacaaacc

SEQ ID NO: 9275 - RNA, 17 nt, Homo sapiens
cugacugcacaaaccag

SEQ ID NO: 9276 - RNA, 17 nt, Homo sapiens
cugcacaaaccagcuuc

SEQ ID NO: 9277 - RNA, 17 nt, Homo sapiens
acaaaccagcuucuggu

SEQ ID NO: 9278 - RNA, 17 nt, Homo sapiens
agcuucugguuucuucu

SEQ ID NO: 9279 - RNA, 17 nt, Homo sapiens
cuucuggaaugaauacc

SEQ ID NO: 9280 - RNA, 17 nt, Homo sapiens
uggaaugaauacccuca

SEQ ID NO: 9281 - RNA, 17 nt, Homo sapiens
gaaugaauacccucaua

SEQ ID NO: 9282 - RNA, 17 nt, Homo sapiens
auacccucauaucuguc

SEQ ID NO: 9283 - RNA, 17 nt, Homo sapiens
acccucauaucuguccu

SEQ ID NO: 9284 - RNA, 17 nt, Homo sapiens
ucauaucuguccugaug

SEQ ID NO: 9285 - RNA, 17 nt, Homo sapiens
cuguccugaugugauau

SEQ ID NO: 9286 - RNA, 17 nt, Homo sapiens
guccugaugugauaugu

SEQ ID NO: 9287 - RNA, 17 nt, Homo sapiens
cugaugugauaugucug

SEQ ID NO: 9288 - RNA, 17 nt, Homo sapiens
gaugugauaugucugag

SEQ ID NO: 9289 - RNA, 17 nt, Homo sapiens
ugugauaugucugagac

SEQ ID NO: 9290 - RNA, 17 nt, Homo sapiens
ugucugagacugaaugc

SEQ ID NO: 9291 - RNA, 17 nt, Homo sapiens
gagacugaaugcgggag

SEQ ID NO: 9292 - RNA, 17 nt, Homo sapiens
gacugaaugcgggaggu

SEQ ID NO: 9293 - RNA, 17 nt, Homo sapiens
ugcgggagguucaaugu

SEQ ID NO: 9294 - RNA, 17 nt, Homo sapiens
gagguucaaugugaagc

SEQ ID NO: 9295 - RNA, 17 nt, Homo sapiens
gguucaaugugaagcug

SEQ ID NO: 9296 - RNA, 17 nt, Homo sapiens
aaugugaagcugugugu

SEQ ID NO: 9297 - RNA, 17 nt, Homo sapiens
gugaagcuguguguggu

SEQ ID NO: 9298 - RNA, 17 nt, Homo sapiens
gaagcuguguguggugu

SEQ ID NO: 9299 - RNA, 17 nt, Homo sapiens
agcugugugugguguca

SEQ ID NO: 9300 - RNA, 17 nt, Homo sapiens
uguguguggugucaaag

SEQ ID NO: 9301 - RNA, 17 nt, Homo sapiens
uguguggugucaaaguu

SEQ ID NO: 9302 - RNA, 17 nt, Homo sapiens
gugucaaaguuucagga

SEQ ID NO: 9303 - RNA, 17 nt, Homo sapiens
caggaaggauuuuaccc

SEQ ID NO: 9304 - RNA, 17 nt, Homo sapiens
aggauuuuacccuuuug

SEQ ID NO: 9305 - RNA, 17 nt, Homo sapiens
acccuuuuguucuuccc

SEQ ID NO: 9306 - RNA, 17 nt, Homo sapiens
uucccccuguccccaac

SEQ ID NO: 9307 - RNA, 17 nt, Homo sapiens
uguccccaacccacucu

SEQ ID NO: 9308 - RNA, 17 nt, Homo sapiens
cccaacccacucucacc

SEQ ID NO: 9309 - RNA, 17 nt, Homo sapiens
ccacucucaccccgcaa

SEQ ID NO: 9310 - RNA, 17 nt, Homo sapiens
cucaccccgcaacccau

SEQ ID NO: 9311 - RNA, 17 nt, Homo sapiens
accccgcaacccaucag

SEQ ID NO: 9312 - RNA, 17 nt, Homo sapiens
cgcaacccaucaguauu

SEQ ID NO: 9313 - RNA, 17 nt, Homo sapiens
acccaucaguauuuuag

SEQ ID NO: 9314 - RNA, 17 nt, Homo sapiens
ccaucaguauuuuaguu

SEQ ID NO: 9315 - RNA, 17 nt, Homo sapiens
guauuuuaguuauuugg

SEQ ID NO: 9316 - RNA, 17 nt, Homo sapiens
uuuuaguuauuuggccu

SEQ ID NO: 9317 - RNA, 17 nt, Homo sapiens
guuauuuggccucuacu

SEQ ID NO: 9318 - RNA, 17 nt, Homo sapiens
uggccucuacuccagua

SEQ ID NO: 9319 - RNA, 17 nt, Homo sapiens
cuacuccaguaaaccug

SEQ ID NO: 9320 - RNA, 17 nt, Homo sapiens
uccaguaaaccugauug

SEQ ID NO: 9321 - RNA, 17 nt, Homo sapiens
uaaaccugauuggguuu

SEQ ID NO: 9322 - RNA, 17 nt, Homo sapiens
cugauuggguuuguuca

SEQ ID NO: 9323 - RNA, 17 nt, Homo sapiens
uuggguuuguucacucu

SEQ ID NO: 9324 - RNA, 17 nt, Homo sapiens
guuuguucacucucuga

SEQ ID NO: 9325 - RNA, 17 nt, Homo sapiens
cucucugaaugauuauu

SEQ ID NO: 9326 - RNA, 17 nt, Homo sapiens
ucugaaugauuauuagc

SEQ ID NO: 9327 - RNA, 17 nt, Homo sapiens
gaaugauuauuagccag

SEQ ID NO: 9328 - RNA, 17 nt, Homo sapiens
gauuauuagccagacuu

SEQ ID NO: 9329 - RNA, 17 nt, Homo sapiens
uuagccagacuucaaaa

SEQ ID NO: 9330 - RNA, 17 nt, Homo sapiens
acuucaaaauuauuuua

SEQ ID NO: 9331 - RNA, 17 nt, Homo sapiens
ucaaaauuauuuuauag

SEQ ID NO: 9332 - RNA, 17 nt, Homo sapiens
auuauuuuauagcccaa

SEQ ID NO: 9333 - RNA, 17 nt, Homo sapiens
auuuuauagcccaaauu

SEQ ID NO: 9334 - RNA, 17 nt, Homo sapiens
uagcccaaauuauaaca

SEQ ID NO: 9335 - RNA, 17 nt, Homo sapiens
cccaaauuauaacaucu

SEQ ID NO: 9336 - RNA, 17 nt, Homo sapiens
aaauuauaacaucuauu

SEQ ID NO: 9337 - RNA, 17 nt, Homo sapiens
auuauaacaucuauugu

SEQ ID NO: 9338 - RNA, 17 nt, Homo sapiens
uaacaucuauuguauua

SEQ ID NO: 9339 - RNA, 17 nt, Homo sapiens
caucuauuguauuauuu

SEQ ID NO: 9340 - RNA, 17 nt, Homo sapiens
ucuauuguauuauuuag

SEQ ID NO: 9341 - RNA, 17 nt, Homo sapiens
auuguauuauuuagacu

SEQ ID NO: 9342 - RNA, 17 nt, Homo sapiens
uuauuuagacuuuuaac

SEQ ID NO: 9343 - RNA, 17 nt, Homo sapiens
gacuuuuaacauauaga

SEQ ID NO: 9344 - RNA, 17 nt, Homo sapiens
cuuuuaacauauagagc

SEQ ID NO: 9345 - RNA, 17 nt, Homo sapiens
uuuaacauauagagcua

SEQ ID NO: 9346 - RNA, 17 nt, Homo sapiens
cauauagagcuauuucu

SEQ ID NO: 9347 - RNA, 17 nt, Homo sapiens
auagagcuauuucuacu

SEQ ID NO: 9348 - RNA, 17 nt, Homo sapiens
cuauuucuacugauuuu

SEQ ID NO: 9349 - RNA, 17 nt, Homo sapiens
uucuacugauuuuugcc

SEQ ID NO: 9350 - RNA, 17 nt, Homo sapiens
ugauuuuugcccuuguu

SEQ ID NO: 9351 - RNA, 17 nt, Homo sapiens
uugcccuuguucugucc

SEQ ID NO: 9352 - RNA, 17 nt, Homo sapiens
cuuguucuguccuuuuu

SEQ ID NO: 9353 - RNA, 17 nt, Homo sapiens
aaaagaaaauguguuuu

SEQ ID NO: 9354 - RNA, 17 nt, Homo sapiens
aagaaaauguguuuuuu

SEQ ID NO: 9355 - RNA, 17 nt, Homo sapiens
gaaaauguguuuuuugu

SEQ ID NO: 9356 - RNA, 17 nt, Homo sapiens
uguuuuuuguuugguac

SEQ ID NO: 9357 - RNA, 17 nt, Homo sapiens
uuuguuugguaccauag

SEQ ID NO: 9358 - RNA, 17 nt, Homo sapiens
uguuugguaccauagug

SEQ ID NO: 9359 - RNA, 17 nt, Homo sapiens
uugguaccauaguguga

SEQ ID NO: 9360 - RNA, 17 nt, Homo sapiens
guaccauagugugaaau

SEQ ID NO: 9361 - RNA, 17 nt, Homo sapiens
accauagugugaaaugc

SEQ ID NO: 9362 - RNA, 17 nt, Homo sapiens
agugugaaaugcuggga

SEQ ID NO: 9363 - RNA, 17 nt, Homo sapiens
ugugaaaugcugggaac

SEQ ID NO: 9364 - RNA, 17 nt, Homo sapiens
ugcugggaacaaugacu

SEQ ID NO: 9365 - RNA, 17 nt, Homo sapiens
ugggaacaaugacuaua

SEQ ID NO: 9366 - RNA, 17 nt, Homo sapiens
gaacaaugacuauaaga

SEQ ID NO: 9367 - RNA, 17 nt, Homo sapiens
caaugacuauaagacau

SEQ ID NO: 9368 - RNA, 17 nt, Homo sapiens
acuauaagacaugcuau

SEQ ID NO: 9369 - RNA, 17 nt, Homo sapiens
uauaagacaugcuaugg

SEQ ID NO: 9370 - RNA, 17 nt, Homo sapiens
uaagacaugcuauggca

SEQ ID NO: 9371 - RNA, 17 nt, Homo sapiens
gacaugcuauggcacau

SEQ ID NO: 9372 - RNA, 17 nt, Homo sapiens
augcuauggcacauaua

SEQ ID NO: 9373 - RNA, 17 nt, Homo sapiens
gcuauggcacauauauu

SEQ ID NO: 9374 - RNA, 17 nt, Homo sapiens
uauggcacauauauuua

SEQ ID NO: 9375 - RNA, 17 nt, Homo sapiens
uggcacauauauuuaua

SEQ ID NO: 9376 - RNA, 17 nt, Homo sapiens
gcacauauauuuauagu

SEQ ID NO: 9377 - RNA, 17 nt, Homo sapiens
auauauuuauagucugu

SEQ ID NO: 9378 - RNA, 17 nt, Homo sapiens
uauuuauagucuguuua

SEQ ID NO: 9379 - RNA, 17 nt, Homo sapiens
uauagucuguuuaugua

SEQ ID NO: 9380 - RNA, 17 nt, Homo sapiens
gucuguuuauguagaaa

SEQ ID NO: 9381 - RNA, 17 nt, Homo sapiens
cuguuuauguagaaaca

SEQ ID NO: 9382 - RNA, 17 nt, Homo sapiens
auguagaaacaaaugua

SEQ ID NO: 9383 - RNA, 17 nt, Homo sapiens
agaaacaaauguaauau

SEQ ID NO: 9384 - RNA, 17 nt, Homo sapiens
aaacaaauguaauauau

SEQ ID NO: 9385 - RNA, 17 nt, Homo sapiens
caaauguaauauauuaa

SEQ ID NO: 9386 - RNA, 17 nt, Homo sapiens
aauguaauauauuaaag

SEQ ID NO: 9387 - RNA, 17 nt, Homo sapiens
uguaauauauuaaagcc

SEQ ID NO: 9388 - RNA, 17 nt, Homo sapiens
auauuaaagccuuauau

SEQ ID NO: 9389 - RNA, 17 nt, Homo sapiens
aaagccuuauauauaau

SEQ ID NO: 9390 - RNA, 17 nt, Homo sapiens
agccuuauauauaauga

SEQ ID NO: 9391 - RNA, 17 nt, Homo sapiens
ccuuauauauaaugaac

SEQ ID NO: 9392 - RNA, 17 nt, Homo sapiens
uauauauaaugaacuuu

SEQ ID NO: 9393 - RNA, 17 nt, Homo sapiens
uauaaugaacuuuguac

SEQ ID NO: 9394 - RNA, 17 nt, Homo sapiens
ugaacuuuguacuauuc

SEQ ID NO: 9395 - RNA, 17 nt, Homo sapiens
aacuuuguacuauucac

SEQ ID NO: 9396 - RNA, 17 nt, Homo sapiens
uuuguacuauucacauu

SEQ ID NO: 9397 - RNA, 17 nt, Homo sapiens
uacuauucacauuuugu

SEQ ID NO: 9398 - RNA, 17 nt, Homo sapiens
cuauucacauuuuguau

SEQ ID NO: 9399 - RNA, 17 nt, Homo sapiens
cacauuuuguaucagua

SEQ ID NO: 9400 - RNA, 17 nt, Homo sapiens
cauuuuguaucaguauu

SEQ ID NO: 9401 - RNA, 17 nt, Homo sapiens
uuguaucaguauuaugu

SEQ ID NO: 9402 - RNA, 17 nt, Homo sapiens
guaucaguauuauguag

SEQ ID NO: 9403 - RNA, 17 nt, Homo sapiens
ucaguauuauguagcau

SEQ ID NO: 9404 - RNA, 17 nt, Homo sapiens
aguauuauguagcauaa

SEQ ID NO: 9405 - RNA, 17 nt, Homo sapiens
auuauguagcauaacaa

SEQ ID NO: 9406 - RNA, 17 nt, Homo sapiens
uauguagcauaacaaag

SEQ ID NO: 9407 - RNA, 17 nt, Homo sapiens
guagcauaacaaagguc

SEQ ID NO: 9408 - RNA, 17 nt, Homo sapiens
uaacaaaggucauaaug

SEQ ID NO: 9409 - RNA, 17 nt, Homo sapiens
caaaggucauaaugcuu

SEQ ID NO: 9410 - RNA, 17 nt, Homo sapiens
aggucauaaugcuuuca

SEQ ID NO: 9411 - RNA, 17 nt, Homo sapiens
gucauaaugcuuucagc

SEQ ID NO: 9412 - RNA, 17 nt, Homo sapiens
ugcuuucagcaauugau

SEQ ID NO: 9413 - RNA, 17 nt, Homo sapiens
uuucagcaauugauguc

SEQ ID NO: 9414 - RNA, 17 nt, Homo sapiens
agcaauugaugucauuu

SEQ ID NO: 9415 - RNA, 17 nt, Homo sapiens
caauugaugucauuuua

SEQ ID NO: 9416 - RNA, 17 nt, Homo sapiens
uugaugucauuuuauua

SEQ ID NO: 9417 - RNA, 17 nt, Homo sapiens
gucauuuuauuaaagaa

SEQ ID NO: 9418 - RNA, 17 nt, Homo sapiens
auuaaagaacauugaaa

SEQ ID NO: 9419 - RNA, 17 nt, Homo sapiens
uaaagaacauugaaaaa

SEQ ID NO: 9420 - RNA, 38 nt, Artificial Sequence
  Description of Artificial Sequence:  Enzymatic Nucleic Acid
gccgagagcugaugaggccguuaggccgaaaguguccg

SEQ ID NO: 9421 - RNA, 38 nt, Artificial Sequence
  Description of Artificial Sequence:  Enzymatic Nucleic Acid
ggagccgacugaugaggccguuaggccgaaaggagugu

SEQ ID NO: 9422 - RNA, 38 nt, Artificial Sequence
  Description of Artificial Sequence:  Enzymatic Nucleic Acid
gaggagcccugaugaggccguuaggccgaaagaggagu

SEQ ID NO: 9423 - RNA, 38 nt, Artificial Sequence
  Description of Artificial Sequence:  Enzymatic Nucleic Acid
ccggggagcugaugaggccguuaggccgaaagccgaga

SEQ ID NO: 9424 - RNA, 38 nt, Artificial Sequence
  Description of Artificial Sequence:  Enzymatic Nucleic Acid
cugccgggcugaugaggccguuaggccgaaaggagccg

SEQ ID NO: 9425 - RNA, 38 nt, Artificial Sequence
  Description of Artificial Sequence:  Enzymatic Nucleic Acid
cccgcucccugaugaggccguuaggccgaaagccgccg

SEQ ID NO: 9426 - RNA, 38 nt, Artificial Sequence
  Description of Artificial Sequence:  Enzymatic Nucleic Acid
gagccccgcugaugaggccguuaggccgaaagcccgcu

SEQ ID NO: 9427 - RNA, 38 nt, Artificial Sequence
  Description of Artificial Sequence:  Enzymatic Nucleic Acid
cugcaccccugaugaggccguuaggccgaaagccccgg

SEQ ID NO: 9428 - RNA, 38 nt, Artificial Sequence
  Description of Artificial Sequence:  Enzymatic Nucleic Acid
ccccgggucugaugaggccguuaggccgaaauccucgc

SEQ ID NO: 9429 - RNA, 38 nt, Artificial Sequence
  Description of Artificial Sequence:  Enzymatic Nucleic Acid
uccccgggcugaugaggccguuaggccgaaaauccucg

SEQ ID NO: 9430 - RNA, 38 nt, Artificial Sequence
  Description of Artificial Sequence:  Enzymatic Nucleic Acid
caggagaccugaugaggccguuaggccgaaaccacuuc

SEQ ID NO: 9431 - RNA, 38 nt, Artificial Sequence
  Description of Artificial Sequence:  Enzymatic Nucleic Acid
agccaggacugaugaggccguuaggccgaaacaaccac

SEQ ID NO: 9432 - RNA, 38 nt, Artificial Sequence
  Description of Artificial Sequence:  Enzymatic Nucleic Acid
ccagccagcugaugaggccguuaggccgaaagacaacc

SEQ ID NO: 9433 - RNA, 38 nt, Artificial Sequence
  Description of Artificial Sequence:  Enzymatic Nucleic Acid
cgcgcccucugaugaggccguuaggccgaaagcgcccg

SEQ ID NO: 9434 - RNA, 38 nt, Artificial Sequence
  Description of Artificial Sequence:  Enzymatic Nucleic Acid
ggccgccacugaugaggccguuaggccgaaaguccguc

SEQ ID NO: 9435 - RNA, 38 nt, Artificial Sequence
  Description of Artificial Sequence:  Enzymatic Nucleic Acid
cggccaaccugaugaggccguuaggccgaaacccggcc

SEQ ID NO: 9436 - RNA, 38 nt, Artificial Sequence
  Description of Artificial Sequence:  Enzymatic Nucleic Acid
ccccggcccugaugaggccguuaggccgaaacgacccg

SEQ ID NO: 9437 - RNA, 38 nt, Artificial Sequence
  Description of Artificial Sequence:  Enzymatic Nucleic Acid
gugagcgccugaugaggccguuaggccgaaacgcggcc

SEQ ID NO: 9438 - RNA, 38 nt, Artificial Sequence
  Description of Artificial Sequence:  Enzymatic Nucleic Acid
accauggucugaugaggccguuaggccgaaagcgcgac

SEQ ID NO: 9439 - RNA, 38 nt, Artificial Sequence
  Description of Artificial Sequence:  Enzymatic Nucleic Acid
caguagcucugaugaggccguuaggccgaaaccauggu

SEQ ID NO: 9440 - RNA, 38 nt, Artificial Sequence
  Description of Artificial Sequence:  Enzymatic Nucleic Acid
ugucccagcugaugaggccguuaggccgaaagcugacc

SEQ ID NO: 9441 - RNA, 38 nt, Artificial Sequence
  Description of Artificial Sequence:  Enzymatic Nucleic Acid
cacagcagcugaugaggccguuaggccgaaaccccggu

SEQ ID NO: 9442 - RNA, 38 nt, Artificial Sequence
  Description of Artificial Sequence:  Enzymatic Nucleic Acid
agacagcucugaugaggccguuaggccgaaagcagcgc

SEQ ID NO: 9443 - RNA, 38 nt, Artificial Sequence
  Description of Artificial Sequence:  Enzymatic Nucleic Acid
gagaagcacugaugaggccguuaggccgaaacagcuga

SEQ ID NO: 9444 - RNA, 38 nt, Artificial Sequence
  Description of Artificial Sequence:  Enzymatic Nucleic Acid
ccugugagcugaugaggccguuaggccgaaagcagaca

SEQ ID NO: 9445 - RNA, 38 nt, Artificial Sequence
  Description of Artificial Sequence:  Enzymatic Nucleic Acid
uccugugacugaugaggccguuaggccgaaaagcagac

SEQ ID NO: 9446 - RNA, 38 nt, Artificial Sequence
  Description of Artificial Sequence:  Enzymatic Nucleic Acid
gauccugucugaugaggccguuaggccgaaagaagcag

SEQ ID NO: 9447 - RNA, 38 nt, Artificial Sequence
  Description of Artificial Sequence:  Enzymatic Nucleic Acid
cugaacuacugaugaggccguuaggccgaaauccugug

SEQ ID NO: 9448 - RNA, 38 nt, Artificial Sequence
  Description of Artificial Sequence:  Enzymatic Nucleic Acid
accugaaccugaugaggccguuaggccgaaagauccug

SEQ ID NO: 9449 - RNA, 38 nt, Artificial Sequence
  Description of Artificial Sequence:  Enzymatic Nucleic Acid
ugaaccugcugaugaggccguuaggccgaaacuagauc

SEQ ID NO: 9450 - RNA, 38 nt, Artificial Sequence
  Description of Artificial Sequence:  Enzymatic Nucleic Acid
uugaaccucugaugaggccguuaggccgaaaacuagau

SEQ ID NO: 9451 - RNA, 38 nt, Artificial Sequence
  Description of Artificial Sequence:  Enzymatic Nucleic Acid
uaauuuugcugaugaggccguuaggccgaaaccugaac

SEQ ID NO: 9452 - RNA, 38 nt, Artificial Sequence
  Description of Artificial Sequence:  Enzymatic Nucleic Acid
uuaauuuucugaugaggccguuaggccgaaaaccugaa

SEQ ID NO: 9453 - RNA, 38 nt, Artificial Sequence
  Description of Artificial Sequence:  Enzymatic Nucleic Acid
gaucuuuucugaugaggccguuaggccgaaauuuugaa

SEQ ID NO: 9454 - RNA, 38 nt, Artificial Sequence
  Description of Artificial Sequence:  Enzymatic Nucleic Acid
ggaucuuucugaugaggccguuaggccgaaaauuuuga

SEQ ID NO: 9455 - RNA, 38 nt, Artificial Sequence
  Description of Artificial Sequence:  Enzymatic Nucleic Acid
caguucagcugaugaggccguuaggccgaaaucuuuua

SEQ ID NO: 9456 - RNA, 38 nt, Artificial Sequence
  Description of Artificial Sequence:  Enzymatic Nucleic Acid
gccuuuuacugaugaggccguuaggccgaaacucaguu

SEQ ID NO: 9457 - RNA, 38 nt, Artificial Sequence
  Description of Artificial Sequence:  Enzymatic Nucleic Acid
ugccuuuucugaugaggccguuaggccgaaaacucagu

SEQ ID NO: 9458 - RNA, 38 nt, Artificial Sequence
  Description of Artificial Sequence:  Enzymatic Nucleic Acid
gugccuuucugaugaggccguuaggccgaaaaacucag

SEQ ID NO: 9459 - RNA, 38 nt, Artificial Sequence
  Description of Artificial Sequence:  Enzymatic Nucleic Acid
gcuugcaucugaugaggccguuaggccgaaaugugcug

SEQ ID NO: 9460 - RNA, 38 nt, Artificial Sequence
  Description of Artificial Sequence:  Enzymatic Nucleic Acid
gcauuggacugaugaggccguuaggccgaaaugcagug

SEQ ID NO: 9461 - RNA, 38 nt, Artificial Sequence
  Description of Artificial Sequence:  Enzymatic Nucleic Acid
cugcauugcugaugaggccguuaggccgaaagaugcag

SEQ ID NO: 9462 - RNA, 38 nt, Artificial Sequence
  Description of Artificial Sequence:  Enzymatic Nucleic Acid
agaccauucugaugaggccguuaggccgaaaugggcug

SEQ ID NO: 9463 - RNA, 38 nt, Artificial Sequence
  Description of Artificial Sequence:  Enzymatic Nucleic Acid
caggcaaacugaugaggccguuaggccgaaaccauuua

SEQ ID NO: 9464 - RNA, 38 nt, Artificial Sequence
  Description of Artificial Sequence:  Enzymatic Nucleic Acid
uucaggcacugaugaggccguuaggccgaaagaccauu

SEQ ID NO: 9465 - RNA, 38 nt, Artificial Sequence
  Description of Artificial Sequence:  Enzymatic Nucleic Acid
uuucaggccugaugaggccguuaggccgaaaagaccau

SEQ ID NO: 9466 - RNA, 38 nt, Artificial Sequence
  Description of Artificial Sequence:  Enzymatic Nucleic Acid
gcuuuccucugaugaggccguuaggccgaaacucacca

SEQ ID NO: 9467 - RNA, 38 nt, Artificial Sequence
  Description of Artificial Sequence:  Enzymatic Nucleic Acid
gauuuagucugaugaggccguuaggccgaaaugcucag

SEQ ID NO: 9468 - RNA, 38 nt, Artificial Sequence
  Description of Artificial Sequence:  Enzymatic Nucleic Acid
ggcagauucugaugaggccguuaggccgaaaguuaugc

SEQ ID NO: 9469 - RNA, 38 nt, Artificial Sequence
  Description of Artificial Sequence:  Enzymatic Nucleic Acid
cacaggcacugaugaggccguuaggccgaaauuuaguu

SEQ ID NO: 9470 - RNA, 38 nt, Artificial Sequence
  Description of Artificial Sequence:  Enzymatic Nucleic Acid
uacugcagcugaugaggccguuaggccgaaauuguuug

SEQ ID NO: 9471 - RNA, 38 nt, Artificial Sequence
  Description of Artificial Sequence:  Enzymatic Nucleic Acid
guacugcacugaugaggccguuaggccgaaaauuguuu

SEQ ID NO: 9472 - RNA, 38 nt, Artificial Sequence
  Description of Artificial Sequence:  Enzymatic Nucleic Acid
gguuaaagcugaugaggccguuaggccgaaacugcaga

SEQ ID NO: 9473 - RNA, 38 nt, Artificial Sequence
  Description of Artificial Sequence:  Enzymatic Nucleic Acid
caagguuacugaugaggccguuaggccgaaaguacugc

SEQ ID NO: 9474 - RNA, 38 nt, Artificial Sequence
  Description of Artificial Sequence:  Enzymatic Nucleic Acid
ucaagguucugaugaggccguuaggccgaaaaguacug

SEQ ID NO: 9475 - RNA, 38 nt, Artificial Sequence
  Description of Artificial Sequence:  Enzymatic Nucleic Acid
uucaaggucugaugaggccguuaggccgaaaaaguacu

SEQ ID NO: 9476 - RNA, 38 nt, Artificial Sequence
  Description of Artificial Sequence:  Enzymatic Nucleic Acid
cuguguuccugaugaggccguuaggccgaaagguuaaa

SEQ ID NO: 9477 - RNA, 38 nt, Artificial Sequence
  Description of Artificial Sequence:  Enzymatic Nucleic Acid
guuugcuucugaugaggccguuaggccgaaagcugugu

SEQ ID NO: 9478 - RNA, 38 nt, Artificial Sequence
  Description of Artificial Sequence:  Enzymatic Nucleic Acid
agcuguagcugaugaggccguuaggccgaaagccagug

SEQ ID NO: 9479 - RNA, 38 nt, Artificial Sequence
  Description of Artificial Sequence:  Enzymatic Nucleic Acid
cagcuguacugaugaggccguuaggccgaaaagccagu

SEQ ID NO: 9480 - RNA, 38 nt, Artificial Sequence
  Description of Artificial Sequence:  Enzymatic Nucleic Acid
ugcagcugcugaugaggccguuaggccgaaagaagcca

SEQ ID NO: 9481 - RNA, 38 nt, Artificial Sequence
  Description of Artificial Sequence:  Enzymatic Nucleic Acid
cagcuagacugaugaggccguuaggccgaaauuugcag

SEQ ID NO: 9482 - RNA, 38 nt, Artificial Sequence
  Description of Artificial Sequence:  Enzymatic Nucleic Acid
uacagcuacugaugaggccguuaggccgaaauauuugc

SEQ ID NO: 9483 - RNA, 38 nt, Artificial Sequence
  Description of Artificial Sequence:  Enzymatic Nucleic Acid
gguacagccugaugaggccguuaggccgaaagauauuu

SEQ ID NO: 9484 - RNA, 38 nt, Artificial Sequence
  Description of Artificial Sequence:  Enzymatic Nucleic Acid
gaaguaggcugaugaggccguuaggccgaaacagcuag

SEQ ID NO: 9485 - RNA, 38 nt, Artificial Sequence
  Description of Artificial Sequence:  Enzymatic Nucleic Acid
cuuugaagcugaugaggccguuaggccgaaagguacag

SEQ ID NO: 9486 - RNA, 38 nt, Artificial Sequence
  Description of Artificial Sequence:  Enzymatic Nucleic Acid
cuucuuugcugaugaggccguuaggccgaaaguaggua

SEQ ID NO: 9487 - RNA, 38 nt, Artificial Sequence
  Description of Artificial Sequence:  Enzymatic Nucleic Acid
ucuucuuucugaugaggccguuaggccgaaaaguaggu

SEQ ID NO: 9488 - RNA, 38 nt, Artificial Sequence
  Description of Artificial Sequence:  Enzymatic Nucleic Acid
agauugcacugaugaggccguuaggccgaaauucuguu

SEQ ID NO: 9489 - RNA, 38 nt, Artificial Sequence
  Description of Artificial Sequence:  Enzymatic Nucleic Acid
aauauauacugaugaggccguuaggccgaaauugcaga

SEQ ID NO: 9490 - RNA, 38 nt, Artificial Sequence
  Description of Artificial Sequence:  Enzymatic Nucleic Acid
uaaauauacugaugaggccguuaggccgaaagauugca

SEQ ID NO: 9491 - RNA, 38 nt, Artificial Sequence
  Description of Artificial Sequence:  Enzymatic Nucleic Acid
aauaaauacugaugaggccguuaggccgaaauagauug

SEQ ID NO: 9492 - RNA, 38 nt, Artificial Sequence
  Description of Artificial Sequence:  Enzymatic Nucleic Acid
cuaauaaacugaugaggccguuaggccgaaauauagau

SEQ ID NO: 9493 - RNA, 38 nt, Artificial Sequence
  Description of Artificial Sequence:  Enzymatic Nucleic Acid
cacuaauacugaugaggccguuaggccgaaauauauag

SEQ ID NO: 9494 - RNA, 38 nt, Artificial Sequence
  Description of Artificial Sequence:  Enzymatic Nucleic Acid
ucacuaaucugaugaggccguuaggccgaaaauauaua

SEQ ID NO: 9495 - RNA, 38 nt, Artificial Sequence
  Description of Artificial Sequence:  Enzymatic Nucleic Acid
aucacuaacugaugaggccguuaggccgaaaaauauau

SEQ ID NO: 9496 - RNA, 38 nt, Artificial Sequence
  Description of Artificial Sequence:  Enzymatic Nucleic Acid
guaucacucugaugaggccguuaggccgaaauaaauau

SEQ ID NO: 9497 - RNA, 38 nt, Artificial Sequence
  Description of Artificial Sequence:  Enzymatic Nucleic Acid
uguaucaccugaugaggccguuaggccgaaaauaaaua

SEQ ID NO: 9498 - RNA, 38 nt, Artificial Sequence
  Description of Artificial Sequence:  Enzymatic Nucleic Acid
ucuaccugcugaugaggccguuaggccgaaaucacuaa

SEQ ID NO: 9499 - RNA, 38 nt, Artificial Sequence
  Description of Artificial Sequence:  Enzymatic Nucleic Acid
gaaagguccugaugaggccguuaggccgaaaccuguau

SEQ ID NO: 9500 - RNA, 38 nt, Artificial Sequence
  Description of Artificial Sequence:  Enzymatic Nucleic Acid
cucuacgacugaugaggccguuaggccgaaaggucuac

SEQ ID NO: 9501 - RNA, 38 nt, Artificial Sequence
  Description of Artificial Sequence:  Enzymatic Nucleic Acid
ucucuacgcugaugaggccguuaggccgaaaaggucua

SEQ ID NO: 9502 - RNA, 38 nt, Artificial Sequence
  Description of Artificial Sequence:  Enzymatic Nucleic Acid
aucucuaccugaugaggccguuaggccgaaaaaggucu

SEQ ID NO: 9503 - RNA, 38 nt, Artificial Sequence
  Description of Artificial Sequence:  Enzymatic Nucleic Acid
uacaucuccugaugaggccguuaggccgaaacgaaagg

SEQ ID NO: 9504 - RNA, 38 nt, Artificial Sequence
  Description of Artificial Sequence:  Enzymatic Nucleic Acid
uuucacugcugaugaggccguuaggccgaaacaucucu

SEQ ID NO: 9505 - RNA, 38 nt, Artificial Sequence
  Description of Artificial Sequence:  Enzymatic Nucleic Acid
auuucgggcugaugaggccguuaggccgaaauuucacu

SEQ ID NO: 9506 - RNA, 38 nt, Artificial Sequence
  Description of Artificial Sequence:  Enzymatic Nucleic Acid
auguguaucugaugaggccguuaggccgaaauuucggg

SEQ ID NO: 9507 - RNA, 38 nt, Artificial Sequence
  Description of Artificial Sequence:  Enzymatic Nucleic Acid
cauguguacugaugaggccguuaggccgaaaauuucgg

SEQ ID NO: 9508 - RNA, 38 nt, Artificial Sequence
  Description of Artificial Sequence:  Enzymatic Nucleic Acid
gucaugugcugaugaggccguuaggccgaaauaauuuc

SEQ ID NO: 9509 - RNA, 38 nt, Artificial Sequence
  Description of Artificial Sequence:  Enzymatic Nucleic Acid
ggaaugaccugaugaggccguuaggccgaaagcucccu

SEQ ID NO: 9510 - RNA, 38 nt, Artificial Sequence
  Description of Artificial Sequence:  Enzymatic Nucleic Acid
cagggaaucugaugaggccguuaggccgaaacgagcuc

SEQ ID NO: 9511 - RNA, 38 nt, Artificial Sequence
  Description of Artificial Sequence:  Enzymatic Nucleic Acid
cggcagggcugaugaggccguuaggccgaaaugacgag

SEQ ID NO: 9512 - RNA, 38 nt, Artificial Sequence
  Description of Artificial Sequence:  Enzymatic Nucleic Acid
ccggcaggcugaugaggccguuaggccgaaaaugacga

SEQ ID NO: 9513 - RNA, 38 nt, Artificial Sequence
  Description of Artificial Sequence:  Enzymatic Nucleic Acid
ggugacgucugaugaggccguuaggccgaaacccggca

SEQ ID NO: 9514 - RNA, 38 nt, Artificial Sequence
  Description of Artificial Sequence:  Enzymatic Nucleic Acid
aggugacgcugaugaggccguuaggccgaaaacccggc

SEQ ID NO: 9515 - RNA, 38 nt, Artificial Sequence
  Description of Artificial Sequence:  Enzymatic Nucleic Acid
uguuaggucugaugaggccguuaggccgaaacguaacc

SEQ ID NO: 9516 - RNA, 38 nt, Artificial Sequence
  Description of Artificial Sequence:  Enzymatic Nucleic Acid
agugaugucugaugaggccguuaggccgaaaggugacg

SEQ ID NO: 9517 - RNA, 38 nt, Artificial Sequence
  Description of Artificial Sequence:  Enzymatic Nucleic Acid
guaacagucugaugaggccguuaggccgaaauguuagg

SEQ ID NO: 9518 - RNA, 38 nt, Artificial Sequence
  Description of Artificial Sequence:  Enzymatic Nucleic Acid
uuuaaagucugaugaggccguuaggccgaaacagugau

SEQ ID NO: 9519 - RNA, 38 nt, Artificial Sequence
  Description of Artificial Sequence:  Enzymatic Nucleic Acid
uuuuaaagcugaugaggccguuaggccgaaaacaguga

SEQ ID NO: 9520 - RNA, 38 nt, Artificial Sequence
  Description of Artificial Sequence:  Enzymatic Nucleic Acid
cuuuuuuacugaugaggccguuaggccgaaaguaacag

SEQ ID NO: 9521 - RNA, 38 nt, Artificial Sequence
  Description of Artificial Sequence:  Enzymatic Nucleic Acid
acuuuuuucugaugaggccguuaggccgaaaaguaaca

SEQ ID NO: 9522 - RNA, 38 nt, Artificial Sequence
  Description of Artificial Sequence:  Enzymatic Nucleic Acid
aacuuuuucugaugaggccguuaggccgaaaaaguaac

SEQ ID NO: 9523 - RNA, 38 nt, Artificial Sequence
  Description of Artificial Sequence:  Enzymatic Nucleic Acid
caaguggacugaugaggccguuaggccgaaacuuuuuu

SEQ ID NO: 9524 - RNA, 38 nt, Artificial Sequence
  Description of Artificial Sequence:  Enzymatic Nucleic Acid
ucaaguggcugaugaggccguuaggccgaaaacuuuuu

SEQ ID NO: 9525 - RNA, 38 nt, Artificial Sequence
  Description of Artificial Sequence:  Enzymatic Nucleic Acid
gucaagugcugaugaggccguuaggccgaaaaacuuuu

SEQ ID NO: 9526 - RNA, 38 nt, Artificial Sequence
  Description of Artificial Sequence:  Enzymatic Nucleic Acid
aaaguguccugaugaggccguuaggccgaaaguggaaa

SEQ ID NO: 9527 - RNA, 38 nt, Artificial Sequence
  Description of Artificial Sequence:  Enzymatic Nucleic Acid
agggaucacugaugaggccguuaggccgaaagugucaa

SEQ ID NO: 9528 - RNA, 38 nt, Artificial Sequence
  Description of Artificial Sequence:  Enzymatic Nucleic Acid
cagggauccugaugaggccguuaggccgaaaaguguca

SEQ ID NO: 9529 - RNA, 38 nt, Artificial Sequence
  Description of Artificial Sequence:  Enzymatic Nucleic Acid
ccaucaggcugaugaggccguuaggccgaaaucaaagu

SEQ ID NO: 9530 - RNA, 38 nt, Artificial Sequence
  Description of Artificial Sequence:  Enzymatic Nucleic Acid
ucccagaucugaugaggccguuaggccgaaaugcguuu

SEQ ID NO: 9531 - RNA, 38 nt, Artificial Sequence
  Description of Artificial Sequence:  Enzymatic Nucleic Acid
cugucccacugaugaggccguuaggccgaaauuaugcg

SEQ ID NO: 9532 - RNA, 38 nt, Artificial Sequence
  Description of Artificial Sequence:  Enzymatic Nucleic Acid
gcccuuuccugaugaggccguuaggccgaaacuguccc

SEQ ID NO: 9533 - RNA, 38 nt, Artificial Sequence
  Description of Artificial Sequence:  Enzymatic Nucleic Acid
auaugaugcugaugaggccguuaggccgaaagcccuuu

SEQ ID NO: 9534 - RNA, 38 nt, Artificial Sequence
  Description of Artificial Sequence:  Enzymatic Nucleic Acid
gauaugaucugaugaggccguuaggccgaaaagcccuu

SEQ ID NO: 9535 - RNA, 38 nt, Artificial Sequence
  Description of Artificial Sequence:  Enzymatic Nucleic Acid
uuugauaucugaugaggccguuaggccgaaaugaagcc

SEQ ID NO: 9536 - RNA, 38 nt, Artificial Sequence
  Description of Artificial Sequence:  Enzymatic Nucleic Acid
gcauuugacugaugaggccguuaggccgaaaugaugaa

SEQ ID NO: 9537 - RNA, 38 nt, Artificial Sequence
  Description of Artificial Sequence:  Enzymatic Nucleic Acid
uugcauuucugaugaggccguuaggccgaaauaugaug

SEQ ID NO: 9538 - RNA, 38 nt, Artificial Sequence
  Description of Artificial Sequence:  Enzymatic Nucleic Acid
uuucuuugcugaugaggccguuaggccgaaacguugca

SEQ ID NO: 9539 - RNA, 38 nt, Artificial Sequence
  Description of Artificial Sequence:  Enzymatic Nucleic Acid
agaagccccugaugaggccguuaggccgaaauuucuuu

SEQ ID NO: 9540 - RNA, 38 nt, Artificial Sequence
  Description of Artificial Sequence:  Enzymatic Nucleic Acid
caggucagcugaugaggccguuaggccgaaagcccuau

SEQ ID NO: 9541 - RNA, 38 nt, Artificial Sequence
  Description of Artificial Sequence:  Enzymatic Nucleic Acid
acaggucacugaugaggccguuaggccgaaaagcccua

SEQ ID NO: 9542 - RNA, 38 nt, Artificial Sequence
  Description of Artificial Sequence:  Enzymatic Nucleic Acid
ugcccauucugaugaggccguuaggccgaaacuguugc

SEQ ID NO: 9543 - RNA, 38 nt, Artificial Sequence
  Description of Artificial Sequence:  Enzymatic Nucleic Acid
cuuauacacugaugaggccguuaggccgaaaugcccau

SEQ ID NO: 9544 - RNA, 38 nt, Artificial Sequence
  Description of Artificial Sequence:  Enzymatic Nucleic Acid
ucuuauaccugaugaggccguuaggccgaaaaugccca

SEQ ID NO: 9545 - RNA, 38 nt, Artificial Sequence
  Description of Artificial Sequence:  Enzymatic Nucleic Acid
uugucuuacugaugaggccguuaggccgaaacaaaugc

SEQ ID NO: 9546 - RNA, 38 nt, Artificial Sequence
  Description of Artificial Sequence:  Enzymatic Nucleic Acid
guuugucucugaugaggccguuaggccgaaauacaaau

SEQ ID NO: 9547 - RNA, 38 nt, Artificial Sequence
  Description of Artificial Sequence:  Enzymatic Nucleic Acid
gugugagacugaugaggccguuaggccgaaaguuuguc

SEQ ID NO: 9548 - RNA, 38 nt, Artificial Sequence
  Description of Artificial Sequence:  Enzymatic Nucleic Acid
augugugacugaugaggccguuaggccgaaauaguuug

SEQ ID NO: 9549 - RNA, 38 nt, Artificial Sequence
  Description of Artificial Sequence:  Enzymatic Nucleic Acid
cgaugugucugaugaggccguuaggccgaaagauaguu

SEQ ID NO: 9550 - RNA, 38 nt, Artificial Sequence
  Description of Artificial Sequence:  Enzymatic Nucleic Acid
gguuuguccugaugaggccguuaggccgaaauguguga

SEQ ID NO: 9551 - RNA, 38 nt, Artificial Sequence
  Description of Artificial Sequence:  Enzymatic Nucleic Acid
uaugauugcugaugaggccguuaggccgaaauugguuu

SEQ ID NO: 9552 - RNA, 38 nt, Artificial Sequence
  Description of Artificial Sequence:  Enzymatic Nucleic Acid
acaucuaucugaugaggccguuaggccgaaauuguauu

SEQ ID NO: 9553 - RNA, 38 nt, Artificial Sequence
  Description of Artificial Sequence:  Enzymatic Nucleic Acid
uggacauccugaugaggccguuaggccgaaaugauugu

SEQ ID NO: 9554 - RNA, 38 nt, Artificial Sequence
  Description of Artificial Sequence:  Enzymatic Nucleic Acid
cuuauuugcugaugaggccguuaggccgaaacaucuau

SEQ ID NO: 9555 - RNA, 38 nt, Artificial Sequence
  Description of Artificial Sequence:  Enzymatic Nucleic Acid
ggugugcucugaugaggccguuaggccgaaauuuggac

SEQ ID NO: 9556 - RNA, 38 nt, Artificial Sequence
  Description of Artificial Sequence:  Enzymatic Nucleic Acid
aguaauuucugaugaggccguuaggccgaaacugggcg

SEQ ID NO: 9557 - RNA, 38 nt, Artificial Sequence
  Description of Artificial Sequence:  Enzymatic Nucleic Acid
cucuaagucugaugaggccguuaggccgaaauuugacu

SEQ ID NO: 9558 - RNA, 38 nt, Artificial Sequence
  Description of Artificial Sequence:  Enzymatic Nucleic Acid
ccucuaagcugaugaggccguuaggccgaaaauuugac

SEQ ID NO: 9559 - RNA, 38 nt, Artificial Sequence
  Description of Artificial Sequence:  Enzymatic Nucleic Acid
uggccucucugaugaggccguuaggccgaaaguaauuu

SEQ ID NO: 9560 - RNA, 38 nt, Artificial Sequence
  Description of Artificial Sequence:  Enzymatic Nucleic Acid
auggccuccugaugaggccguuaggccgaaaaguaauu

SEQ ID NO: 9561 - RNA, 38 nt, Artificial Sequence
  Description of Artificial Sequence:  Enzymatic Nucleic Acid
gacaagagcugaugaggccguuaggccgaaauggccuc

SEQ ID NO: 9562 - RNA, 38 nt, Artificial Sequence
  Description of Artificial Sequence:  Enzymatic Nucleic Acid
gaggacaacugaugaggccguuaggccgaaaguauggc

SEQ ID NO: 9563 - RNA, 38 nt, Artificial Sequence
  Description of Artificial Sequence:  Enzymatic Nucleic Acid
uugaggaccugaugaggccguuaggccgaaagaguaug

SEQ ID NO: 9564 - RNA, 38 nt, Artificial Sequence
  Description of Artificial Sequence:  Enzymatic Nucleic Acid
caauugagcugaugaggccguuaggccgaaacaagagu

SEQ ID NO: 9565 - RNA, 38 nt, Artificial Sequence
  Description of Artificial Sequence:  Enzymatic Nucleic Acid
guacaauucugaugaggccguuaggccgaaaggacaag

SEQ ID NO: 9566 - RNA, 38 nt, Artificial Sequence
  Description of Artificial Sequence:  Enzymatic Nucleic Acid
agcaguaccugaugaggccguuaggccgaaauugagga

SEQ ID NO: 9567 - RNA, 38 nt, Artificial Sequence
  Description of Artificial Sequence:  Enzymatic Nucleic Acid
gguagcagcugaugaggccguuaggccgaaacaauuga

SEQ ID NO: 9568 - RNA, 38 nt, Artificial Sequence
  Description of Artificial Sequence:  Enzymatic Nucleic Acid
gggaguggcugaugaggccguuaggccgaaagcaguac

SEQ ID NO: 9569 - RNA, 38 nt, Artificial Sequence
  Description of Artificial Sequence:  Enzymatic Nucleic Acid
guucaaggcugaugaggccguuaggccgaaagugguag

SEQ ID NO: 9570 - RNA, 38 nt, Artificial Sequence
  Description of Artificial Sequence:  Enzymatic Nucleic Acid
ucguguuccugaugaggccguuaggccgaaagggagug

SEQ ID NO: 9571 - RNA, 38 nt, Artificial Sequence
  Description of Artificial Sequence:  Enzymatic Nucleic Acid
gucauuugcugaugaggccguuaggccgaaacucucgu

SEQ ID NO: 9572 - RNA, 38 nt, Artificial Sequence
  Description of Artificial Sequence:  Enzymatic Nucleic Acid
ggucauuucugaugaggccguuaggccgaaaacucucg

SEQ ID NO: 9573 - RNA, 38 nt, Artificial Sequence
  Description of Artificial Sequence:  Enzymatic Nucleic Acid
aucagggucugaugaggccguuaggccgaaacuccagg

SEQ ID NO: 9574 - RNA, 38 nt, Artificial Sequence
  Description of Artificial Sequence:  Enzymatic Nucleic Acid
caucagggcugaugaggccguuaggccgaaaacuccag

SEQ ID NO: 9575 - RNA, 38 nt, Artificial Sequence
  Description of Artificial Sequence:  Enzymatic Nucleic Acid
agcucucucugaugaggccguuaggccgaaauuuuuuu

SEQ ID NO: 9576 - RNA, 38 nt, Artificial Sequence
  Description of Artificial Sequence:  Enzymatic Nucleic Acid
ccuuacggcugaugaggccguuaggccgaaagcucucu

SEQ ID NO: 9577 - RNA, 38 nt, Artificial Sequence
  Description of Artificial Sequence:  Enzymatic Nucleic Acid
gccuuacgcugaugaggccguuaggccgaaaagcucuc

SEQ ID NO: 9578 - RNA, 38 nt, Artificial Sequence
  Description of Artificial Sequence:  Enzymatic Nucleic Acid
cgucgccucugaugaggccguuaggccgaaacggaagc

SEQ ID NO: 9579 - RNA, 38 nt, Artificial Sequence
  Description of Artificial Sequence:  Enzymatic Nucleic Acid
cuuugguccugaugaggccguuaggccgaaauucgucg

SEQ ID NO: 9580 - RNA, 38 nt, Artificial Sequence
  Description of Artificial Sequence:  Enzymatic Nucleic Acid
ggcaugggcugaugaggccguuaggccgaaauugcuuu

SEQ ID NO: 9581 - RNA, 38 nt, Artificial Sequence
  Description of Artificial Sequence:  Enzymatic Nucleic Acid
uggcauggcugaugaggccguuaggccgaaaauugcuu

SEQ ID NO: 9582 - RNA, 38 nt, Artificial Sequence
  Description of Artificial Sequence:  Enzymatic Nucleic Acid
cuguagaacugaugaggccguuaggccgaaauguuggc

SEQ ID NO: 9583 - RNA, 38 nt, Artificial Sequence
  Description of Artificial Sequence:  Enzymatic Nucleic Acid
cacuguagcugaugaggccguuaggccgaaauauguug

SEQ ID NO: 9584 - RNA, 38 nt, Artificial Sequence
  Description of Artificial Sequence:  Enzymatic Nucleic Acid
acacuguacugaugaggccguuaggccgaaaauauguu

SEQ ID NO: 9585 - RNA, 38 nt, Artificial Sequence
  Description of Artificial Sequence:  Enzymatic Nucleic Acid
gaacacugcugaugaggccguuaggccgaaagaauaug

SEQ ID NO: 9586 - RNA, 38 nt, Artificial Sequence
  Description of Artificial Sequence:  Enzymatic Nucleic Acid
auaguaagcugaugaggccguuaggccgaaacacugua

SEQ ID NO: 9587 - RNA, 38 nt, Artificial Sequence
  Description of Artificial Sequence:  Enzymatic Nucleic Acid
aauaguaacugaugaggccguuaggccgaaaacacugu

SEQ ID NO: 9588 - RNA, 38 nt, Artificial Sequence
  Description of Artificial Sequence:  Enzymatic Nucleic Acid
ucaauagucugaugaggccguuaggccgaaagaacacu

SEQ ID NO: 9589 - RNA, 38 nt, Artificial Sequence
  Description of Artificial Sequence:  Enzymatic Nucleic Acid
gucaauagcugaugaggccguuaggccgaaaagaacac

SEQ ID NO: 9590 - RNA, 38 nt, Artificial Sequence
  Description of Artificial Sequence:  Enzymatic Nucleic Acid
uuugucaacugaugaggccguuaggccgaaaguaagaa

SEQ ID NO: 9591 - RNA, 38 nt, Artificial Sequence
  Description of Artificial Sequence:  Enzymatic Nucleic Acid
auuuuguccugaugaggccguuaggccgaaauaguaag

SEQ ID NO: 9592 - RNA, 38 nt, Artificial Sequence
  Description of Artificial Sequence:  Enzymatic Nucleic Acid
caaguauacugaugaggccguuaggccgaaaguccuuu

SEQ ID NO: 9593 - RNA, 38 nt, Artificial Sequence
  Description of Artificial Sequence:  Enzymatic Nucleic Acid
acaaguaucugaugaggccguuaggccgaaaaguccuu

SEQ ID NO: 9594 - RNA, 38 nt, Artificial Sequence
  Description of Artificial Sequence:  Enzymatic Nucleic Acid
gacaaguacugaugaggccguuaggccgaaaaaguccu

SEQ ID NO: 9595 - RNA, 38 nt, Artificial Sequence
  Description of Artificial Sequence:  Enzymatic Nucleic Acid
acgacaagcugaugaggccguuaggccgaaauaaaguc

SEQ ID NO: 9596 - RNA, 38 nt, Artificial Sequence
  Description of Artificial Sequence:  Enzymatic Nucleic Acid
uacacgaccugaugaggccguuaggccgaaaguauaaa

SEQ ID NO: 9597 - RNA, 38 nt, Artificial Sequence
  Description of Artificial Sequence:  Enzymatic Nucleic Acid
ccuuacaccugaugaggccguuaggccgaaacaaguau

SEQ ID NO: 9598 - RNA, 38 nt, Artificial Sequence
  Description of Artificial Sequence:  Enzymatic Nucleic Acid
ccacuccucugaugaggccguuaggccgaaacacgaca

SEQ ID NO: 9599 - RNA, 38 nt, Artificial Sequence
  Description of Artificial Sequence:  Enzymatic Nucleic Acid
auuugaaucugaugaggccguuaggccgaaauggucca

SEQ ID NO: 9600 - RNA, 38 nt, Artificial Sequence
  Description of Artificial Sequence:  Enzymatic Nucleic Acid
cagauuugcugaugaggccguuaggccgaaaugauggu

SEQ ID NO: 9601 - RNA, 38 nt, Artificial Sequence
  Description of Artificial Sequence:  Enzymatic Nucleic Acid
acagauuucugaugaggccguuaggccgaaaaugaugg

SEQ ID NO: 9602 - RNA, 38 nt, Artificial Sequence
  Description of Artificial Sequence:  Enzymatic Nucleic Acid
uguuaacacugaugaggccguuaggccgaaauuugaau

SEQ ID NO: 9603 - RNA, 38 nt, Artificial Sequence
  Description of Artificial Sequence:  Enzymatic Nucleic Acid
gagguguucugaugaggccguuaggccgaaacagauuu

SEQ ID NO: 9604 - RNA, 38 nt, Artificial Sequence
  Description of Artificial Sequence:  Enzymatic Nucleic Acid
ugaggugucugaugaggccguuaggccgaaaacagauu

SEQ ID NO: 9605 - RNA, 38 nt, Artificial Sequence
  Description of Artificial Sequence:  Enzymatic Nucleic Acid
uaugcacucugaugaggccguuaggccgaaagguguua

SEQ ID NO: 9606 - RNA, 38 nt, Artificial Sequence
  Description of Artificial Sequence:  Enzymatic Nucleic Acid
aucauauacugaugaggccguuaggccgaaaugcacug

SEQ ID NO: 9607 - RNA, 38 nt, Artificial Sequence
  Description of Artificial Sequence:  Enzymatic Nucleic Acid
uuaucauacugaugaggccguuaggccgaaauaugcac

SEQ ID NO: 9608 - RNA, 38 nt, Artificial Sequence
  Description of Artificial Sequence:  Enzymatic Nucleic Acid
cuuuaucacugaugaggccguuaggccgaaauauaugc

SEQ ID NO: 9609 - RNA, 38 nt, Artificial Sequence
  Description of Artificial Sequence:  Enzymatic Nucleic Acid
gaaugcuucugaugaggccguuaggccgaaaucauaua

SEQ ID NO: 9610 - RNA, 38 nt, Artificial Sequence
  Description of Artificial Sequence:  Enzymatic Nucleic Acid
cagugaugcugaugaggccguuaggccgaaaugcuuua

SEQ ID NO: 9611 - RNA, 38 nt, Artificial Sequence
  Description of Artificial Sequence:  Enzymatic Nucleic Acid
acagugaucugaugaggccguuaggccgaaaaugcuuu

SEQ ID NO: 9612 - RNA, 38 nt, Artificial Sequence
  Description of Artificial Sequence:  Enzymatic Nucleic Acid
uucacagucugaugaggccguuaggccgaaaugaaugc

SEQ ID NO: 9613 - RNA, 38 nt, Artificial Sequence
  Description of Artificial Sequence:  Enzymatic Nucleic Acid
cuguuuuccugaugaggccguuaggccgaaauguuuca

SEQ ID NO: 9614 - RNA, 38 nt, Artificial Sequence
  Description of Artificial Sequence:  Enzymatic Nucleic Acid
acgguuuccugaugaggccguuaggccgaaagcaccug

SEQ ID NO: 9615 - RNA, 38 nt, Artificial Sequence
  Description of Artificial Sequence:  Enzymatic Nucleic Acid
uugccagccugaugaggccguuaggccgaaacgguuuc

SEQ ID NO: 9616 - RNA, 38 nt, Artificial Sequence
  Description of Artificial Sequence:  Enzymatic Nucleic Acid
gccgguaacugaugaggccguuaggccgaaaccgcuug

SEQ ID NO: 9617 - RNA, 38 nt, Artificial Sequence
  Description of Artificial Sequence:  Enzymatic Nucleic Acid
gagccggucugaugaggccguuaggccgaaagaccgcu

SEQ ID NO: 9618 - RNA, 38 nt, Artificial Sequence
  Description of Artificial Sequence:  Enzymatic Nucleic Acid
agagccggcugaugaggccguuaggccgaaaagaccgc

SEQ ID NO: 9619 - RNA, 38 nt, Artificial Sequence
  Description of Artificial Sequence:  Enzymatic Nucleic Acid
uucauagacugaugaggccguuaggccgaaagccggua

SEQ ID NO: 9620 - RNA, 38 nt, Artificial Sequence
  Description of Artificial Sequence:  Enzymatic Nucleic Acid
cuuucauacugaugaggccguuaggccgaaagagccgg

SEQ ID NO: 9621 - RNA, 38 nt, Artificial Sequence
  Description of Artificial Sequence:  Enzymatic Nucleic Acid
cacuuucacugaugaggccguuaggccgaaagagagcc

SEQ ID NO: 9622 - RNA, 38 nt, Artificial Sequence
  Description of Artificial Sequence:  Enzymatic Nucleic Acid
gcgagggacugaugaggccguuaggccgaaaugccuuc

SEQ ID NO: 9623 - RNA, 38 nt, Artificial Sequence
  Description of Artificial Sequence:  Enzymatic Nucleic Acid
ggcgagggcugaugaggccguuaggccgaaaaugccuu

SEQ ID NO: 9624 - RNA, 38 nt, Artificial Sequence
  Description of Artificial Sequence:  Enzymatic Nucleic Acid
cggcgaggcugaugaggccguuaggccgaaaaaugccu

SEQ ID NO: 9625 - RNA, 38 nt, Artificial Sequence
  Description of Artificial Sequence:  Enzymatic Nucleic Acid
cuuccggccugaugaggccguuaggccgaaagggaaau

SEQ ID NO: 9626 - RNA, 38 nt, Artificial Sequence
  Description of Artificial Sequence:  Enzymatic Nucleic Acid
aaccauaccugaugaggccguuaggccgaaacuuccgg

SEQ ID NO: 9627 - RNA, 38 nt, Artificial Sequence
  Description of Artificial Sequence:  Enzymatic Nucleic Acid
uuuaaccacugaugaggccguuaggccgaaacaacuuc

SEQ ID NO: 9628 - RNA, 38 nt, Artificial Sequence
  Description of Artificial Sequence:  Enzymatic Nucleic Acid
caucuuuucugaugaggccguuaggccgaaaccauaca

SEQ ID NO: 9629 - RNA, 38 nt, Artificial Sequence
  Description of Artificial Sequence:  Enzymatic Nucleic Acid
ccaucuuucugaugaggccguuaggccgaaaaccauac

SEQ ID NO: 9630 - RNA, 38 nt, Artificial Sequence
  Description of Artificial Sequence:  Enzymatic Nucleic Acid
ucgcaggucugaugaggccguuaggccgaaacccaucu

SEQ ID NO: 9631 - RNA, 38 nt, Artificial Sequence
  Description of Artificial Sequence:  Enzymatic Nucleic Acid
gucgcaggcugaugaggccguuaggccgaaaacccauc

SEQ ID NO: 9632 - RNA, 38 nt, Artificial Sequence
  Description of Artificial Sequence:  Enzymatic Nucleic Acid
agcgagcacugaugaggccguuaggccgaaauuucuca

SEQ ID NO: 9633 - RNA, 38 nt, Artificial Sequence
  Description of Artificial Sequence:  Enzymatic Nucleic Acid
caaauagccugaugaggccguuaggccgaaagcagauu

SEQ ID NO: 9634 - RNA, 38 nt, Artificial Sequence
  Description of Artificial Sequence:  Enzymatic Nucleic Acid
gagucaaacugaugaggccguuaggccgaaagcgagca

SEQ ID NO: 9635 - RNA, 38 nt, Artificial Sequence
  Description of Artificial Sequence:  Enzymatic Nucleic Acid
acgagucacugaugaggccguuaggccgaaauagcgag

SEQ ID NO: 9636 - RNA, 38 nt, Artificial Sequence
  Description of Artificial Sequence:  Enzymatic Nucleic Acid
cacgaguccugaugaggccguuaggccgaaaauagcga

SEQ ID NO: 9637 - RNA, 38 nt, Artificial Sequence
  Description of Artificial Sequence:  Enzymatic Nucleic Acid
guagccaccugaugaggccguuaggccgaaagucaaau

SEQ ID NO: 9638 - RNA, 38 nt, Artificial Sequence
  Description of Artificial Sequence:  Enzymatic Nucleic Acid
uuaacgagcugaugaggccguuaggccgaaagccacga

SEQ ID NO: 9639 - RNA, 38 nt, Artificial Sequence
  Description of Artificial Sequence:  Enzymatic Nucleic Acid
uaauuaaccugaugaggccguuaggccgaaaguagcca

SEQ ID NO: 9640 - RNA, 38 nt, Artificial Sequence
  Description of Artificial Sequence:  Enzymatic Nucleic Acid
ugauaauucugaugaggccguuaggccgaaacgaguag

SEQ ID NO: 9641 - RNA, 38 nt, Artificial Sequence
  Description of Artificial Sequence:  Enzymatic Nucleic Acid
uugauaaucugaugaggccguuaggccgaaaacgagua

SEQ ID NO: 9642 - RNA, 38 nt, Artificial Sequence
  Description of Artificial Sequence:  Enzymatic Nucleic Acid
uccuugaucugaugaggccguuaggccgaaauuaacga

SEQ ID NO: 9643 - RNA, 38 nt, Artificial Sequence
  Description of Artificial Sequence:  Enzymatic Nucleic Acid
guccuugacugaugaggccguuaggccgaaaauuaacg

SEQ ID NO: 9644 - RNA, 38 nt, Artificial Sequence
  Description of Artificial Sequence:  Enzymatic Nucleic Acid
acguccuucugaugaggccguuaggccgaaauaauuaa

SEQ ID NO: 9645 - RNA, 38 nt, Artificial Sequence
  Description of Artificial Sequence:  Enzymatic Nucleic Acid
ucuucagucugaugaggccguuaggccgaaacguccuu

SEQ ID NO: 9646 - RNA, 38 nt, Artificial Sequence
  Description of Artificial Sequence:  Enzymatic Nucleic Acid
gauuguaucugaugaggccguuaggccgaaauucccug

SEQ ID NO: 9647 - RNA, 38 nt, Artificial Sequence
  Description of Artificial Sequence:  Enzymatic Nucleic Acid
agauuguacugaugaggccguuaggccgaaaauucccu

SEQ ID NO: 9648 - RNA, 38 nt, Artificial Sequence
  Description of Artificial Sequence:  Enzymatic Nucleic Acid
caagauugcugaugaggccguuaggccgaaauaauucc

SEQ ID NO: 9649 - RNA, 38 nt, Artificial Sequence
  Description of Artificial Sequence:  Enzymatic Nucleic Acid
cucagcaacugaugaggccguuaggccgaaauuguaua

SEQ ID NO: 9650 - RNA, 38 nt, Artificial Sequence
  Description of Artificial Sequence:  Enzymatic Nucleic Acid
ugcucagccugaugaggccguuaggccgaaagauugua

SEQ ID NO: 9651 - RNA, 38 nt, Artificial Sequence
  Description of Artificial Sequence:  Enzymatic Nucleic Acid
gacuguuucugaugaggccguuaggccgaaaugcucag

SEQ ID NO: 9652 - RNA, 38 nt, Artificial Sequence
  Description of Artificial Sequence:  Enzymatic Nucleic Acid
acacauuucugaugaggccguuaggccgaaacuguuuu

SEQ ID NO: 9653 - RNA, 38 nt, Artificial Sequence
  Description of Artificial Sequence:  Enzymatic Nucleic Acid
gguuuuuacugaugaggccguuaggccgaaacacauuu

SEQ ID NO: 9654 - RNA, 38 nt, Artificial Sequence
  Description of Artificial Sequence:  Enzymatic Nucleic Acid
agguuuuucugaugaggccguuaggccgaaaacacauu

SEQ ID NO: 9655 - RNA, 38 nt, Artificial Sequence
  Description of Artificial Sequence:  Enzymatic Nucleic Acid
gagguuuucugaugaggccguuaggccgaaaaacacau

SEQ ID NO: 9656 - RNA, 38 nt, Artificial Sequence
  Description of Artificial Sequence:  Enzymatic Nucleic Acid
guggcagucugaugaggccguuaggccgaaagguuuuu

SEQ ID NO: 9657 - RNA, 38 nt, Artificial Sequence
  Description of Artificial Sequence:  Enzymatic Nucleic Acid
gacaauuacugaugaggccguuaggccgaaaguggcag

SEQ ID NO: 9658 - RNA, 38 nt, Artificial Sequence
  Description of Artificial Sequence:  Enzymatic Nucleic Acid
uugacaaucugaugaggccguuaggccgaaagaguggc

SEQ ID NO: 9659 - RNA, 38 nt, Artificial Sequence
  Description of Artificial Sequence:  Enzymatic Nucleic Acid
acauugaccugaugaggccguuaggccgaaauuagagu

SEQ ID NO: 9660 - RNA, 38 nt, Artificial Sequence
  Description of Artificial Sequence:  Enzymatic Nucleic Acid
uucacauucugaugaggccguuaggccgaaacaauuag

SEQ ID NO: 9661 - RNA, 38 nt, Artificial Sequence
  Description of Artificial Sequence:  Enzymatic Nucleic Acid
uuuucguacugaugaggccguuaggccgaaaucugggg

SEQ ID NO: 9662 - RNA, 38 nt, Artificial Sequence
  Description of Artificial Sequence:  Enzymatic Nucleic Acid
cuuuucgucugaugaggccguuaggccgaaaaucuggg

SEQ ID NO: 9663 - RNA, 38 nt, Artificial Sequence
  Description of Artificial Sequence:  Enzymatic Nucleic Acid
ccuuuucgcugaugaggccguuaggccgaaaaaucugg

SEQ ID NO: 9664 - RNA, 38 nt, Artificial Sequence
  Description of Artificial Sequence:  Enzymatic Nucleic Acid
gaaacgaucugaugaggccguuaggccgaaacacggcc

SEQ ID NO: 9665 - RNA, 38 nt, Artificial Sequence
  Description of Artificial Sequence:  Enzymatic Nucleic Acid
cuggaaaccugaugaggccguuaggccgaaaugacacg

SEQ ID NO: 9666 - RNA, 38 nt, Artificial Sequence
  Description of Artificial Sequence:  Enzymatic Nucleic Acid
ggucuggacugaugaggccguuaggccgaaacgaugac

SEQ ID NO: 9667 - RNA, 38 nt, Artificial Sequence
  Description of Artificial Sequence:  Enzymatic Nucleic Acid
gggucuggcugaugaggccguuaggccgaaaacgauga

SEQ ID NO: 9668 - RNA, 38 nt, Artificial Sequence
  Description of Artificial Sequence:  Enzymatic Nucleic Acid
cgggucugcugaugaggccguuaggccgaaaaacgaug

SEQ ID NO: 9669 - RNA, 38 nt, Artificial Sequence
  Description of Artificial Sequence:  Enzymatic Nucleic Acid
uggguagacugaugaggccguuaggccgaaagccgggu

SEQ ID NO: 9670 - RNA, 38 nt, Artificial Sequence
  Description of Artificial Sequence:  Enzymatic Nucleic Acid
aguggguacugaugaggccguuaggccgaaagagccgg

SEQ ID NO: 9671 - RNA, 38 nt, Artificial Sequence
  Description of Artificial Sequence:  Enzymatic Nucleic Acid
ccagugggcugaugaggccguuaggccgaaagagagcc

SEQ ID NO: 9672 - RNA, 38 nt, Artificial Sequence
  Description of Artificial Sequence:  Enzymatic Nucleic Acid
caagucagcugaugaggccguuaggccgaaauuugucu

SEQ ID NO: 9673 - RNA, 38 nt, Artificial Sequence
  Description of Artificial Sequence:  Enzymatic Nucleic Acid
ugcgguaccugaugaggccguuaggccgaaagucagga

SEQ ID NO: 9674 - RNA, 38 nt, Artificial Sequence
  Description of Artificial Sequence:  Enzymatic Nucleic Acid
auaugcggcugaugaggccguuaggccgaaacaaguca

SEQ ID NO: 9675 - RNA, 38 nt, Artificial Sequence
  Description of Artificial Sequence:  Enzymatic Nucleic Acid
ggauaccacugaugaggccguuaggccgaaaugcggua

SEQ ID NO: 9676 - RNA, 38 nt, Artificial Sequence
  Description of Artificial Sequence:  Enzymatic Nucleic Acid
uugagggacugaugaggccguuaggccgaaaccauaug

SEQ ID NO: 9677 - RNA, 38 nt, Artificial Sequence
  Description of Artificial Sequence:  Enzymatic Nucleic Acid
gguugaggcugaugaggccguuaggccgaaauaccaua

SEQ ID NO: 9678 - RNA, 38 nt, Artificial Sequence
  Description of Artificial Sequence:  Enzymatic Nucleic Acid
uguagguucugaugaggccguuaggccgaaagggauac

SEQ ID NO: 9679 - RNA, 38 nt, Artificial Sequence
  Description of Artificial Sequence:  Enzymatic Nucleic Acid
cuugauugcugaugaggccguuaggccgaaagguugag

SEQ ID NO: 9680 - RNA, 38 nt, Artificial Sequence
  Description of Artificial Sequence:  Enzymatic Nucleic Acid
aaccacuucugaugaggccguuaggccgaaauuguagg

SEQ ID NO: 9681 - RNA, 38 nt, Artificial Sequence
  Description of Artificial Sequence:  Enzymatic Nucleic Acid
ggugccagcugaugaggccguuaggccgaaaccacuug

SEQ ID NO: 9682 - RNA, 38 nt, Artificial Sequence
  Description of Artificial Sequence:  Enzymatic Nucleic Acid
gggugccacugaugaggccguuaggccgaaaaccacuu

SEQ ID NO: 9683 - RNA, 38 nt, Artificial Sequence
  Description of Artificial Sequence:  Enzymatic Nucleic Acid
auuauggucugaugaggccguuaggccgaaacaggggu

SEQ ID NO: 9684 - RNA, 38 nt, Artificial Sequence
  Description of Artificial Sequence:  Enzymatic Nucleic Acid
ggaaugaucugaugaggccguuaggccgaaaugguuac

SEQ ID NO: 9685 - RNA, 38 nt, Artificial Sequence
  Description of Artificial Sequence:  Enzymatic Nucleic Acid
uucggaaucugaugaggccguuaggccgaaauuauggu

SEQ ID NO: 9686 - RNA, 38 nt, Artificial Sequence
  Description of Artificial Sequence:  Enzymatic Nucleic Acid
ugcuucggcugaugaggccguuaggccgaaaugauuau

SEQ ID NO: 9687 - RNA, 38 nt, Artificial Sequence
  Description of Artificial Sequence:  Enzymatic Nucleic Acid
uugcuucgcugaugaggccguuaggccgaaaaugauua

SEQ ID NO: 9688 - RNA, 38 nt, Artificial Sequence
  Description of Artificial Sequence:  Enzymatic Nucleic Acid
uggaacaacugaugaggccguuaggccgaaagucacac

SEQ ID NO: 9689 - RNA, 38 nt, Artificial Sequence
  Description of Artificial Sequence:  Enzymatic Nucleic Acid
uuggaacacugaugaggccguuaggccgaaaagucaca

SEQ ID NO: 9690 - RNA, 38 nt, Artificial Sequence
  Description of Artificial Sequence:  Enzymatic Nucleic Acid
auuggaaccugaugaggccguuaggccgaaaaagucac

SEQ ID NO: 9691 - RNA, 38 nt, Artificial Sequence
  Description of Artificial Sequence:  Enzymatic Nucleic Acid
auuauuggcugaugaggccguuaggccgaaacaaaagu

SEQ ID NO: 9692 - RNA, 38 nt, Artificial Sequence
  Description of Artificial Sequence:  Enzymatic Nucleic Acid
cauuauugcugaugaggccguuaggccgaaaacaaaag

SEQ ID NO: 9693 - RNA, 38 nt, Artificial Sequence
  Description of Artificial Sequence:  Enzymatic Nucleic Acid
cucuucaucugaugaggccguuaggccgaaauuggaac

SEQ ID NO: 9694 - RNA, 38 nt, Artificial Sequence
  Description of Artificial Sequence:  Enzymatic Nucleic Acid
ggauaaagcugaugaggccguuaggccgaaacucuuca

SEQ ID NO: 9695 - RNA, 38 nt, Artificial Sequence
  Description of Artificial Sequence:  Enzymatic Nucleic Acid
ccaggauacugaugaggccguuaggccgaaaggacucu

SEQ ID NO: 9696 - RNA, 38 nt, Artificial Sequence
  Description of Artificial Sequence:  Enzymatic Nucleic Acid
uccaggaucugaugaggccguuaggccgaaaaggacuc

SEQ ID NO: 9697 - RNA, 38 nt, Artificial Sequence
  Description of Artificial Sequence:  Enzymatic Nucleic Acid
auccaggacugaugaggccguuaggccgaaaaaggacu

SEQ ID NO: 9698 - RNA, 38 nt, Artificial Sequence
  Description of Artificial Sequence:  Enzymatic Nucleic Acid
gcauccagcugaugaggccguuaggccgaaauaaagga

SEQ ID NO: 9699 - RNA, 38 nt, Artificial Sequence
  Description of Artificial Sequence:  Enzymatic Nucleic Acid
augcucuccugaugaggccguuaggccgaaauucuguu

SEQ ID NO: 9700 - RNA, 38 nt, Artificial Sequence
  Description of Artificial Sequence:  Enzymatic Nucleic Acid
cgcugagucugaugaggccguuaggccgaaaugcucuc

SEQ ID NO: 9701 - RNA, 38 nt, Artificial Sequence
  Description of Artificial Sequence:  Enzymatic Nucleic Acid
caugcgcucugaugaggccguuaggccgaaagugaugc

SEQ ID NO: 9702 - RNA, 38 nt, Artificial Sequence
  Description of Artificial Sequence:  Enzymatic Nucleic Acid
ccuucuaucugaugaggccguuaggccgaaauugccau

SEQ ID NO: 9703 - RNA, 38 nt, Artificial Sequence
  Description of Artificial Sequence:  Enzymatic Nucleic Acid
uuuccuuccugaugaggccguuaggccgaaauuauugc

SEQ ID NO: 9704 - RNA, 38 nt, Artificial Sequence
  Description of Artificial Sequence:  Enzymatic Nucleic Acid
agccaucucugaugaggccguuaggccgaaauucuuuc

SEQ ID NO: 9705 - RNA, 38 nt, Artificial Sequence
  Description of Artificial Sequence:  Enzymatic Nucleic Acid
caaggugccugaugaggccguuaggccgaaagccaucu

SEQ ID NO: 9706 - RNA, 38 nt, Artificial Sequence
  Description of Artificial Sequence:  Enzymatic Nucleic Acid
ccacaacccugaugaggccguuaggccgaaaggugcua

SEQ ID NO: 9707 - RNA, 38 nt, Artificial Sequence
  Description of Artificial Sequence:  Enzymatic Nucleic Acid
ucagccaccugaugaggccguuaggccgaaaccaaggu

SEQ ID NO: 9708 - RNA, 38 nt, Artificial Sequence
  Description of Artificial Sequence:  Enzymatic Nucleic Acid
aaauucuacugaugaggccguuaggccgaaagucagcc

SEQ ID NO: 9709 - RNA, 38 nt, Artificial Sequence
  Description of Artificial Sequence:  Enzymatic Nucleic Acid
agaaauuccugaugaggccguuaggccgaaagagucag

SEQ ID NO: 9710 - RNA, 38 nt, Artificial Sequence
  Description of Artificial Sequence:  Enzymatic Nucleic Acid
auuccagacugaugaggccguuaggccgaaauucuaga

SEQ ID NO: 9711 - RNA, 38 nt, Artificial Sequence
  Description of Artificial Sequence:  Enzymatic Nucleic Acid
gauuccagcugaugaggccguuaggccgaaaauucuag

SEQ ID NO: 9712 - RNA, 38 nt, Artificial Sequence
  Description of Artificial Sequence:  Enzymatic Nucleic Acid
agauuccacugaugaggccguuaggccgaaaaauucua

SEQ ID NO: 9713 - RNA, 38 nt, Artificial Sequence
  Description of Artificial Sequence:  Enzymatic Nucleic Acid
caaauguacugaugaggccguuaggccgaaauuccaga

SEQ ID NO: 9714 - RNA, 38 nt, Artificial Sequence
  Description of Artificial Sequence:  Enzymatic Nucleic Acid
ugcaaaugcugaugaggccguuaggccgaaagauucca

SEQ ID NO: 9715 - RNA, 38 nt, Artificial Sequence
  Description of Artificial Sequence:  Enzymatic Nucleic Acid
gcuaugcacugaugaggccguuaggccgaaauguagau

SEQ ID NO: 9716 - RNA, 38 nt, Artificial Sequence
  Description of Artificial Sequence:  Enzymatic Nucleic Acid
agcuaugccugaugaggccguuaggccgaaaauguaga

SEQ ID NO: 9717 - RNA, 38 nt, Artificial Sequence
  Description of Artificial Sequence:  Enzymatic Nucleic Acid
uuggaagccugaugaggccguuaggccgaaaugcaaau

SEQ ID NO: 9718 - RNA, 38 nt, Artificial Sequence
  Description of Artificial Sequence:  Enzymatic Nucleic Acid
uuuauuggcugaugaggccguuaggccgaaagcuaugc

SEQ ID NO: 9719 - RNA, 38 nt, Artificial Sequence
  Description of Artificial Sequence:  Enzymatic Nucleic Acid
cuuuauugcugaugaggccguuaggccgaaaagcuaug

SEQ ID NO: 9720 - RNA, 38 nt, Artificial Sequence
  Description of Artificial Sequence:  Enzymatic Nucleic Acid
cccaacuucugaugaggccguuaggccgaaauuggaag

SEQ ID NO: 9721 - RNA, 38 nt, Artificial Sequence
  Description of Artificial Sequence:  Enzymatic Nucleic Acid
acaguccccugaugaggccguuaggccgaaacuuuauu

SEQ ID NO: 9722 - RNA, 38 nt, Artificial Sequence
  Description of Artificial Sequence:  Enzymatic Nucleic Acid
uaaaagcucugaugaggccguuaggccgaaauguuucu

SEQ ID NO: 9723 - RNA, 38 nt, Artificial Sequence
  Description of Artificial Sequence:  Enzymatic Nucleic Acid
ugauauaacugaugaggccguuaggccgaaagcuuaug

SEQ ID NO: 9724 - RNA, 38 nt, Artificial Sequence
  Description of Artificial Sequence:  Enzymatic Nucleic Acid
gugauauacugaugaggccguuaggccgaaaagcuuau

SEQ ID NO: 9725 - RNA, 38 nt, Artificial Sequence
  Description of Artificial Sequence:  Enzymatic Nucleic Acid
ugugauaucugaugaggccguuaggccgaaaaagcuua

SEQ ID NO: 9726 - RNA, 38 nt, Artificial Sequence
  Description of Artificial Sequence:  Enzymatic Nucleic Acid
cugugauacugaugaggccguuaggccgaaaaaagcuu

SEQ ID NO: 9727 - RNA, 38 nt, Artificial Sequence
  Description of Artificial Sequence:  Enzymatic Nucleic Acid
aucugugacugaugaggccguuaggccgaaauaaaagc

SEQ ID NO: 9728 - RNA, 38 nt, Artificial Sequence
  Description of Artificial Sequence:  Enzymatic Nucleic Acid
acaucugucugaugaggccguuaggccgaaauauaaaa

SEQ ID NO: 9729 - RNA, 38 nt, Artificial Sequence
  Description of Artificial Sequence:  Enzymatic Nucleic Acid
uaacaugacugaugaggccguuaggccgaaacccauuu

SEQ ID NO: 9730 - RNA, 38 nt, Artificial Sequence
  Description of Artificial Sequence:  Enzymatic Nucleic Acid
uuaacaugcugaugaggccguuaggccgaaaacccauu

SEQ ID NO: 9731 - RNA, 38 nt, Artificial Sequence
  Description of Artificial Sequence:  Enzymatic Nucleic Acid
guuaacaucugaugaggccguuaggccgaaaaacccau

SEQ ID NO: 9732 - RNA, 38 nt, Artificial Sequence
  Description of Artificial Sequence:  Enzymatic Nucleic Acid
uccaaguucugaugaggccguuaggccgaaacaugaaa

SEQ ID NO: 9733 - RNA, 38 nt, Artificial Sequence
  Description of Artificial Sequence:  Enzymatic Nucleic Acid
uuccaagucugaugaggccguuaggccgaaaacaugaa

SEQ ID NO: 9734 - RNA, 38 nt, Artificial Sequence
  Description of Artificial Sequence:  Enzymatic Nucleic Acid
uuuuuucccugaugaggccguuaggccgaaaguuaaca

SEQ ID NO: 9735 - RNA, 38 nt, Artificial Sequence
  Description of Artificial Sequence:  Enzymatic Nucleic Acid
cugugcaacugaugaggccguuaggccgaaacaguuuc

SEQ ID NO: 9736 - RNA, 38 nt, Artificial Sequence
  Description of Artificial Sequence:  Enzymatic Nucleic Acid
aacugugccugaugaggccguuaggccgaaagacaguu

SEQ ID NO: 9737 - RNA, 38 nt, Artificial Sequence
  Description of Artificial Sequence:  Enzymatic Nucleic Acid
aacuuguucugaugaggccguuaggccgaaacugugca

SEQ ID NO: 9738 - RNA, 38 nt, Artificial Sequence
  Description of Artificial Sequence:  Enzymatic Nucleic Acid
gaacuugucugaugaggccguuaggccgaaaacugugc

SEQ ID NO: 9739 - RNA, 38 nt, Artificial Sequence
  Description of Artificial Sequence:  Enzymatic Nucleic Acid
uguauaagcugaugaggccguuaggccgaaacuuguua

SEQ ID NO: 9740 - RNA, 38 nt, Artificial Sequence
  Description of Artificial Sequence:  Enzymatic Nucleic Acid
cuguauaacugaugaggccguuaggccgaaaacuuguu

SEQ ID NO: 9741 - RNA, 38 nt, Artificial Sequence
  Description of Artificial Sequence:  Enzymatic Nucleic Acid
cucuguaucugaugaggccguuaggccgaaagaacuug

SEQ ID NO: 9742 - RNA, 38 nt, Artificial Sequence
  Description of Artificial Sequence:  Enzymatic Nucleic Acid
ucucuguacugaugaggccguuaggccgaaaagaacuu

SEQ ID NO: 9743 - RNA, 38 nt, Artificial Sequence
  Description of Artificial Sequence:  Enzymatic Nucleic Acid
cgucucugcugaugaggccguuaggccgaaauaagaac

SEQ ID NO: 9744 - RNA, 38 nt, Artificial Sequence
  Description of Artificial Sequence:  Enzymatic Nucleic Acid
auccaagucugaugaggccguuaggccgaaacgucucu

SEQ ID NO: 9745 - RNA, 38 nt, Artificial Sequence
  Description of Artificial Sequence:  Enzymatic Nucleic Acid
aauccaagcugaugaggccguuaggccgaaaacgucuc

SEQ ID NO: 9746 - RNA, 38 nt, Artificial Sequence
  Description of Artificial Sequence:  Enzymatic Nucleic Acid
uaaaaucccugaugaggccguuaggccgaaaguaacgu

SEQ ID NO: 9747 - RNA, 38 nt, Artificial Sequence
  Description of Artificial Sequence:  Enzymatic Nucleic Acid
cgcaguaacugaugaggccguuaggccgaaauccaagu

SEQ ID NO: 9748 - RNA, 38 nt, Artificial Sequence
  Description of Artificial Sequence:  Enzymatic Nucleic Acid
ccgcaguacugaugaggccguuaggccgaaaauccaag

SEQ ID NO: 9749 - RNA, 38 nt, Artificial Sequence
  Description of Artificial Sequence:  Enzymatic Nucleic Acid
uccgcagucugaugaggccguuaggccgaaaaauccaa

SEQ ID NO: 9750 - RNA, 38 nt, Artificial Sequence
  Description of Artificial Sequence:  Enzymatic Nucleic Acid
guccgcagcugaugaggccguuaggccgaaaaaaucca

SEQ ID NO: 9751 - RNA, 38 nt, Artificial Sequence
  Description of Artificial Sequence:  Enzymatic Nucleic Acid
cuguuauucugaugaggccguuaggccgaaacuguccg

SEQ ID NO: 9752 - RNA, 38 nt, Artificial Sequence
  Description of Artificial Sequence:  Enzymatic Nucleic Acid
ucuguuaucugaugaggccguuaggccgaaaacugucc

SEQ ID NO: 9753 - RNA, 38 nt, Artificial Sequence
  Description of Artificial Sequence:  Enzymatic Nucleic Acid
uguucugucugaugaggccguuaggccgaaauuaacug

SEQ ID NO: 9754 - RNA, 38 nt, Artificial Sequence
  Description of Artificial Sequence:  Enzymatic Nucleic Acid
uaauacugcugaugaggccguuaggccgaaagugcauu

SEQ ID NO: 9755 - RNA, 38 nt, Artificial Sequence
  Description of Artificial Sequence:  Enzymatic Nucleic Acid
cuugcuaacugaugaggccguuaggccgaaacuguagu

SEQ ID NO: 9756 - RNA, 38 nt, Artificial Sequence
  Description of Artificial Sequence:  Enzymatic Nucleic Acid
ugcuugcucugaugaggccguuaggccgaaauacugua

SEQ ID NO: 9757 - RNA, 38 nt, Artificial Sequence
  Description of Artificial Sequence:  Enzymatic Nucleic Acid
uugcuugccugaugaggccguuaggccgaaaauacugu

SEQ ID NO: 9758 - RNA, 38 nt, Artificial Sequence
  Description of Artificial Sequence:  Enzymatic Nucleic Acid
uccuuagucugaugaggccguuaggccgaaauggccau

SEQ ID NO: 9759 - RNA, 38 nt, Artificial Sequence
  Description of Artificial Sequence:  Enzymatic Nucleic Acid
gugcuccucugaugaggccguuaggccgaaagugaugg

SEQ ID NO: 9760 - RNA, 38 nt, Artificial Sequence
  Description of Artificial Sequence:  Enzymatic Nucleic Acid
gagugaugcugaugaggccguuaggccgaaagugcucc

SEQ ID NO: 9761 - RNA, 38 nt, Artificial Sequence
  Description of Artificial Sequence:  Enzymatic Nucleic Acid
uuaagagucugaugaggccguuaggccgaaauggagug

SEQ ID NO: 9762 - RNA, 38 nt, Artificial Sequence
  Description of Artificial Sequence:  Enzymatic Nucleic Acid
aagauuaacugaugaggccguuaggccgaaagugaugg

SEQ ID NO: 9763 - RNA, 38 nt, Artificial Sequence
  Description of Artificial Sequence:  Enzymatic Nucleic Acid
guaagauucugaugaggccguuaggccgaaagagugau

SEQ ID NO: 9764 - RNA, 38 nt, Artificial Sequence
  Description of Artificial Sequence:  Enzymatic Nucleic Acid
gguaagaucugaugaggccguuaggccgaaaagaguga

SEQ ID NO: 9765 - RNA, 38 nt, Artificial Sequence
  Description of Artificial Sequence:  Enzymatic Nucleic Acid
gaugguaacugaugaggccguuaggccgaaauuaagag

SEQ ID NO: 9766 - RNA, 38 nt, Artificial Sequence
  Description of Artificial Sequence:  Enzymatic Nucleic Acid
augauggucugaugaggccguuaggccgaaagauuaag

SEQ ID NO: 9767 - RNA, 38 nt, Artificial Sequence
  Description of Artificial Sequence:  Enzymatic Nucleic Acid
caugauggcugaugaggccguuaggccgaaaagauuaa

SEQ ID NO: 9768 - RNA, 38 nt, Artificial Sequence
  Description of Artificial Sequence:  Enzymatic Nucleic Acid
acauucaucugaugaggccguuaggccgaaaugguaag

SEQ ID NO: 9769 - RNA, 38 nt, Artificial Sequence
  Description of Artificial Sequence:  Enzymatic Nucleic Acid
ugcagggacugaugaggccguuaggccgaaacauucau

SEQ ID NO: 9770 - RNA, 38 nt, Artificial Sequence
  Description of Artificial Sequence:  Enzymatic Nucleic Acid
uugcagggcugaugaggccguuaggccgaaaacauuca

SEQ ID NO: 9771 - RNA, 38 nt, Artificial Sequence
  Description of Artificial Sequence:  Enzymatic Nucleic Acid
cuugcaggcugaugaggccguuaggccgaaaaacauuc

SEQ ID NO: 9772 - RNA, 38 nt, Artificial Sequence
  Description of Artificial Sequence:  Enzymatic Nucleic Acid
ggugccugcugaugaggccguuaggccgaaaucuugca

SEQ ID NO: 9773 - RNA, 38 nt, Artificial Sequence
  Description of Artificial Sequence:  Enzymatic Nucleic Acid
aggugccucugaugaggccguuaggccgaaaaucuugc

SEQ ID NO: 9774 - RNA, 38 nt, Artificial Sequence
  Description of Artificial Sequence:  Enzymatic Nucleic Acid
ugcaggcacugaugaggccguuaggccgaaaggugccu

SEQ ID NO: 9775 - RNA, 38 nt, Artificial Sequence
  Description of Artificial Sequence:  Enzymatic Nucleic Acid
ccuguguacugaugaggccguuaggccgaaacauuccu

SEQ ID NO: 9776 - RNA, 38 nt, Artificial Sequence
  Description of Artificial Sequence:  Enzymatic Nucleic Acid
ccccugugcugaugaggccguuaggccgaaauacauuc

SEQ ID NO: 9777 - RNA, 38 nt, Artificial Sequence
  Description of Artificial Sequence:  Enzymatic Nucleic Acid
uucuggagcugaugaggccguuaggccgaaauuucuuc

SEQ ID NO: 9778 - RNA, 38 nt, Artificial Sequence
  Description of Artificial Sequence:  Enzymatic Nucleic Acid
uucuucugcugaugaggccguuaggccgaaaggauuuc

SEQ ID NO: 9779 - RNA, 38 nt, Artificial Sequence
  Description of Artificial Sequence:  Enzymatic Nucleic Acid
cugauugucugaugaggccguuaggccgaaauuucuuu

SEQ ID NO: 9780 - RNA, 38 nt, Artificial Sequence
  Description of Artificial Sequence:  Enzymatic Nucleic Acid
ucugauugcugaugaggccguuaggccgaaaauuucuu

SEQ ID NO: 9781 - RNA, 38 nt, Artificial Sequence
  Description of Artificial Sequence:  Enzymatic Nucleic Acid
ugaucucucugaugaggccguuaggccgaaauuguaau

SEQ ID NO: 9782 - RNA, 38 nt, Artificial Sequence
  Description of Artificial Sequence:  Enzymatic Nucleic Acid
ugcuuccucugaugaggccguuaggccgaaaucucuga

SEQ ID NO: 9783 - RNA, 38 nt, Artificial Sequence
  Description of Artificial Sequence:  Enzymatic Nucleic Acid
gcaggaggcugaugaggccguuaggccgaaauggugcu

SEQ ID NO: 9784 - RNA, 38 nt, Artificial Sequence
  Description of Artificial Sequence:  Enzymatic Nucleic Acid
uuucgcagcugaugaggccguuaggccgaaagguaugg

SEQ ID NO: 9785 - RNA, 38 nt, Artificial Sequence
  Description of Artificial Sequence:  Enzymatic Nucleic Acid
ugaucacucugaugaggccguuaggccgaaagguuucg

SEQ ID NO: 9786 - RNA, 38 nt, Artificial Sequence
  Description of Artificial Sequence:  Enzymatic Nucleic Acid
cacugugucugaugaggccguuaggccgaaaucacuga

SEQ ID NO: 9787 - RNA, 38 nt, Artificial Sequence
  Description of Artificial Sequence:  Enzymatic Nucleic Acid
gaacugcucugaugaggccguuaggccgaaauggccac

SEQ ID NO: 9788 - RNA, 38 nt, Artificial Sequence
  Description of Artificial Sequence:  Enzymatic Nucleic Acid
agugguggcugaugaggccguuaggccgaaacugcuga

SEQ ID NO: 9789 - RNA, 38 nt, Artificial Sequence
  Description of Artificial Sequence:  Enzymatic Nucleic Acid
aaguggugcugaugaggccguuaggccgaaaacugcug

SEQ ID NO: 9790 - RNA, 38 nt, Artificial Sequence
  Description of Artificial Sequence:  Enzymatic Nucleic Acid
acagucuacugaugaggccguuaggccgaaaguggugg

SEQ ID NO: 9791 - RNA, 38 nt, Artificial Sequence
  Description of Artificial Sequence:  Enzymatic Nucleic Acid
gacagucucugaugaggccguuaggccgaaaaguggug

SEQ ID NO: 9792 - RNA, 38 nt, Artificial Sequence
  Description of Artificial Sequence:  Enzymatic Nucleic Acid
ugacaguccugaugaggccguuaggccgaaaaaguggu

SEQ ID NO: 9793 - RNA, 38 nt, Artificial Sequence
  Description of Artificial Sequence:  Enzymatic Nucleic Acid
auuagcaucugaugaggccguuaggccgaaacagucua

SEQ ID NO: 9794 - RNA, 38 nt, Artificial Sequence
  Description of Artificial Sequence:  Enzymatic Nucleic Acid
gacaccaucugaugaggccguuaggccgaaagcaugac

SEQ ID NO: 9795 - RNA, 38 nt, Artificial Sequence
  Description of Artificial Sequence:  Enzymatic Nucleic Acid
ggcucgggcugaugaggccguuaggccgaaacaccauu

SEQ ID NO: 9796 - RNA, 38 nt, Artificial Sequence
  Description of Artificial Sequence:  Enzymatic Nucleic Acid
agugaucucugaugaggccguuaggccgaaaggcucgg

SEQ ID NO: 9797 - RNA, 38 nt, Artificial Sequence
  Description of Artificial Sequence:  Enzymatic Nucleic Acid
aaccaagucugaugaggccguuaggccgaaaucugagg

SEQ ID NO: 9798 - RNA, 38 nt, Artificial Sequence
  Description of Artificial Sequence:  Enzymatic Nucleic Acid
uuuaaacccugaugaggccguuaggccgaaagugaucu

SEQ ID NO: 9799 - RNA, 38 nt, Artificial Sequence
  Description of Artificial Sequence:  Enzymatic Nucleic Acid
uguuuuuacugaugaggccguuaggccgaaaccaagug

SEQ ID NO: 9800 - RNA, 38 nt, Artificial Sequence
  Description of Artificial Sequence:  Enzymatic Nucleic Acid
uuguuuuucugaugaggccguuaggccgaaaaccaagu

SEQ ID NO: 9801 - RNA, 38 nt, Artificial Sequence
  Description of Artificial Sequence:  Enzymatic Nucleic Acid
guuguuuucugaugaggccguuaggccgaaaaaccaag

SEQ ID NO: 9802 - RNA, 38 nt, Artificial Sequence
  Description of Artificial Sequence:  Enzymatic Nucleic Acid
ucuuguugcugaugaggccguuaggccgaaauuuugug

SEQ ID NO: 9803 - RNA, 38 nt, Artificial Sequence
  Description of Artificial Sequence:  Enzymatic Nucleic Acid
ccuaaaaucugaugaggccguuaggccgaaauuccagg

SEQ ID NO: 9804 - RNA, 38 nt, Artificial Sequence
  Description of Artificial Sequence:  Enzymatic Nucleic Acid
uccuaaaacugaugaggccguuaggccgaaaauuccag

SEQ ID NO: 9805 - RNA, 38 nt, Artificial Sequence
  Description of Artificial Sequence:  Enzymatic Nucleic Acid
gguccuaacugaugaggccguuaggccgaaauaauucc

SEQ ID NO: 9806 - RNA, 38 nt, Artificial Sequence
  Description of Artificial Sequence:  Enzymatic Nucleic Acid
ugguccuacugaugaggccguuaggccgaaaauaauuc

SEQ ID NO: 9807 - RNA, 38 nt, Artificial Sequence
  Description of Artificial Sequence:  Enzymatic Nucleic Acid
cugguccucugaugaggccguuaggccgaaaaauaauu

SEQ ID NO: 9808 - RNA, 38 nt, Artificial Sequence
  Description of Artificial Sequence:  Enzymatic Nucleic Acid
ccuggucccugaugaggccguuaggccgaaaaaauaau

SEQ ID NO: 9809 - RNA, 38 nt, Artificial Sequence
  Description of Artificial Sequence:  Enzymatic Nucleic Acid
uuucaauacugaugaggccguuaggccgaaacagcgug

SEQ ID NO: 9810 - RNA, 38 nt, Artificial Sequence
  Description of Artificial Sequence:  Enzymatic Nucleic Acid
cuuucaaucugaugaggccguuaggccgaaaacagcgu

SEQ ID NO: 9811 - RNA, 38 nt, Artificial Sequence
  Description of Artificial Sequence:  Enzymatic Nucleic Acid
ucuuucaacugaugaggccguuaggccgaaaaacagcg

SEQ ID NO: 9812 - RNA, 38 nt, Artificial Sequence
  Description of Artificial Sequence:  Enzymatic Nucleic Acid
acucuuuccugaugaggccguuaggccgaaauaaacag

SEQ ID NO: 9813 - RNA, 38 nt, Artificial Sequence
  Description of Artificial Sequence:  Enzymatic Nucleic Acid
ucuucugucugaugaggccguuaggccgaaacucuuuc

SEQ ID NO: 9814 - RNA, 38 nt, Artificial Sequence
  Description of Artificial Sequence:  Enzymatic Nucleic Acid
cagugauacugaugaggccguuaggccgaaacaccuuc

SEQ ID NO: 9815 - RNA, 38 nt, Artificial Sequence
  Description of Artificial Sequence:  Enzymatic Nucleic Acid
ugcagugacugaugaggccguuaggccgaaagacaccu

SEQ ID NO: 9816 - RNA, 38 nt, Artificial Sequence
  Description of Artificial Sequence:  Enzymatic Nucleic Acid
uuugcagucugaugaggccguuaggccgaaauagacac

SEQ ID NO: 9817 - RNA, 38 nt, Artificial Sequence
  Description of Artificial Sequence:  Enzymatic Nucleic Acid
uuuccacacugaugaggccguuaggccgaaagcccuuc

SEQ ID NO: 9818 - RNA, 38 nt, Artificial Sequence
  Description of Artificial Sequence:  Enzymatic Nucleic Acid
guaugcugcugaugaggccguuaggccgaaacuuucca

SEQ ID NO: 9819 - RNA, 38 nt, Artificial Sequence
  Description of Artificial Sequence:  Enzymatic Nucleic Acid
gguaugcucugaugaggccguuaggccgaaaacuuucc

SEQ ID NO: 9820 - RNA, 38 nt, Artificial Sequence
  Description of Artificial Sequence:  Enzymatic Nucleic Acid
cagugaggcugaugaggccguuaggccgaaaugcugaa

SEQ ID NO: 9821 - RNA, 38 nt, Artificial Sequence
  Description of Artificial Sequence:  Enzymatic Nucleic Acid
ugaacagucugaugaggccguuaggccgaaagguaugc

SEQ ID NO: 9822 - RNA, 38 nt, Artificial Sequence
  Description of Artificial Sequence:  Enzymatic Nucleic Acid
guuccuugcugaugaggccguuaggccgaaacagugag

SEQ ID NO: 9823 - RNA, 38 nt, Artificial Sequence
  Description of Artificial Sequence:  Enzymatic Nucleic Acid
gguuccuucugaugaggccguuaggccgaaaacaguga

SEQ ID NO: 9824 - RNA, 38 nt, Artificial Sequence
  Description of Artificial Sequence:  Enzymatic Nucleic Acid
acuugucccugaugaggccguuaggccgaaagguuccu

SEQ ID NO: 9825 - RNA, 38 nt, Artificial Sequence
  Description of Artificial Sequence:  Enzymatic Nucleic Acid
ccagauuacugaugaggccguuaggccgaaacuugucc

SEQ ID NO: 9826 - RNA, 38 nt, Artificial Sequence
  Description of Artificial Sequence:  Enzymatic Nucleic Acid
cuccagaucugaugaggccguuaggccgaaagacuugu

SEQ ID NO: 9827 - RNA, 38 nt, Artificial Sequence
  Description of Artificial Sequence:  Enzymatic Nucleic Acid
cagcuccacugaugaggccguuaggccgaaauuagacu

SEQ ID NO: 9828 - RNA, 38 nt, Artificial Sequence
  Description of Artificial Sequence:  Enzymatic Nucleic Acid
guuagagucugaugaggccguuaggccgaaaucagcuc

SEQ ID NO: 9829 - RNA, 38 nt, Artificial Sequence
  Description of Artificial Sequence:  Enzymatic Nucleic Acid
gcauguuacugaugaggccguuaggccgaaagugauca

SEQ ID NO: 9830 - RNA, 38 nt, Artificial Sequence
  Description of Artificial Sequence:  Enzymatic Nucleic Acid
gugcaugucugaugaggccguuaggccgaaagagugau

SEQ ID NO: 9831 - RNA, 38 nt, Artificial Sequence
  Description of Artificial Sequence:  Enzymatic Nucleic Acid
ccagaagacugaugaggccguuaggccgaaagucgcag

SEQ ID NO: 9832 - RNA, 38 nt, Artificial Sequence
  Description of Artificial Sequence:  Enzymatic Nucleic Acid
agccagaacugaugaggccguuaggccgaaagagucgc

SEQ ID NO: 9833 - RNA, 38 nt, Artificial Sequence
  Description of Artificial Sequence:  Enzymatic Nucleic Acid
ggagccagcugaugaggccguuaggccgaaagagaguc

SEQ ID NO: 9834 - RNA, 38 nt, Artificial Sequence
  Description of Artificial Sequence:  Enzymatic Nucleic Acid
aggagccacugaugaggccguuaggccgaaaagagagu

SEQ ID NO: 9835 - RNA, 38 nt, Artificial Sequence
  Description of Artificial Sequence:  Enzymatic Nucleic Acid
guuaauagcugaugaggccguuaggccgaaagccagaa

SEQ ID NO: 9836 - RNA, 38 nt, Artificial Sequence
  Description of Artificial Sequence:  Enzymatic Nucleic Acid
aggguuaacugaugaggccguuaggccgaaaggagcca

SEQ ID NO: 9837 - RNA, 38 nt, Artificial Sequence
  Description of Artificial Sequence:  Enzymatic Nucleic Acid
ggaggguucugaugaggccguuaggccgaaauaggagc

SEQ ID NO: 9838 - RNA, 38 nt, Artificial Sequence
  Description of Artificial Sequence:  Enzymatic Nucleic Acid
aggagggucugaugaggccguuaggccgaaaauaggag

SEQ ID NO: 9839 - RNA, 38 nt, Artificial Sequence
  Description of Artificial Sequence:  Enzymatic Nucleic Acid
cggauaagcugaugaggccguuaggccgaaaggguuaa

SEQ ID NO: 9840 - RNA, 38 nt, Artificial Sequence
  Description of Artificial Sequence:  Enzymatic Nucleic Acid
uuucggaucugaugaggccguuaggccgaaaggagggu

SEQ ID NO: 9841 - RNA, 38 nt, Artificial Sequence
  Description of Artificial Sequence:  Enzymatic Nucleic Acid
uuuucggacugaugaggccguuaggccgaaaaggaggg

SEQ ID NO: 9842 - RNA, 38 nt, Artificial Sequence
  Description of Artificial Sequence:  Enzymatic Nucleic Acid
auuuuucgcugaugaggccguuaggccgaaauaaggag

SEQ ID NO: 9843 - RNA, 38 nt, Artificial Sequence
  Description of Artificial Sequence:  Enzymatic Nucleic Acid
cagaagaacugaugaggccguuaggccgaaaccuuuuc

SEQ ID NO: 9844 - RNA, 38 nt, Artificial Sequence
  Description of Artificial Sequence:  Enzymatic Nucleic Acid
uucagaagcugaugaggccguuaggccgaaagaccuuu

SEQ ID NO: 9845 - RNA, 38 nt, Artificial Sequence
  Description of Artificial Sequence:  Enzymatic Nucleic Acid
uuucagaacugaugaggccguuaggccgaaaagaccuu

SEQ ID NO: 9846 - RNA, 38 nt, Artificial Sequence
  Description of Artificial Sequence:  Enzymatic Nucleic Acid
uauuucagcugaugaggccguuaggccgaaagaagacc

SEQ ID NO: 9847 - RNA, 38 nt, Artificial Sequence
  Description of Artificial Sequence:  Enzymatic Nucleic Acid
uuauuucacugaugaggccguuaggccgaaaagaagac

SEQ ID NO: 9848 - RNA, 38 nt, Artificial Sequence
  Description of Artificial Sequence:  Enzymatic Nucleic Acid
ucagucuucugaugaggccguuaggccgaaauuucaga

SEQ ID NO: 9849 - RNA, 38 nt, Artificial Sequence
  Description of Artificial Sequence:  Enzymatic Nucleic Acid
uugauaggcugaugaggccguuaggccgaaagucaguc

SEQ ID NO: 9850 - RNA, 38 nt, Artificial Sequence
  Description of Artificial Sequence:  Enzymatic Nucleic Acid
auaauugacugaugaggccguuaggccgaaagguaguc

SEQ ID NO: 9851 - RNA, 38 nt, Artificial Sequence
  Description of Artificial Sequence:  Enzymatic Nucleic Acid
uuauaauucugaugaggccguuaggccgaaauagguag

SEQ ID NO: 9852 - RNA, 38 nt, Artificial Sequence
  Description of Artificial Sequence:  Enzymatic Nucleic Acid
uccauuaucugaugaggccguuaggccgaaauugauag

SEQ ID NO: 9853 - RNA, 38 nt, Artificial Sequence
  Description of Artificial Sequence:  Enzymatic Nucleic Acid
guccauuacugaugaggccguuaggccgaaaauugaua

SEQ ID NO: 9854 - RNA, 38 nt, Artificial Sequence
  Description of Artificial Sequence:  Enzymatic Nucleic Acid
ggguccaucugaugaggccguuaggccgaaauaauuga

SEQ ID NO: 9855 - RNA, 38 nt, Artificial Sequence
  Description of Artificial Sequence:  Enzymatic Nucleic Acid
uccaaaggcugaugaggccguuaggccgaaacuucauc

SEQ ID NO: 9856 - RNA, 38 nt, Artificial Sequence
  Description of Artificial Sequence:  Enzymatic Nucleic Acid
auccaaagcugaugaggccguuaggccgaaaacuucau

SEQ ID NO: 9857 - RNA, 38 nt, Artificial Sequence
  Description of Artificial Sequence:  Enzymatic Nucleic Acid
cucauccacugaugaggccguuaggccgaaaggaacuu

SEQ ID NO: 9858 - RNA, 38 nt, Artificial Sequence
  Description of Artificial Sequence:  Enzymatic Nucleic Acid
gcucaucccugaugaggccguuaggccgaaaaggaacu

SEQ ID NO: 9859 - RNA, 38 nt, Artificial Sequence
  Description of Artificial Sequence:  Enzymatic Nucleic Acid
ucauaaggcugaugaggccguuaggccgaaagccgcuc

SEQ ID NO: 9860 - RNA, 38 nt, Artificial Sequence
  Description of Artificial Sequence:  Enzymatic Nucleic Acid
ggcaucaucugaugaggccguuaggccgaaagggagcc

SEQ ID NO: 9861 - RNA, 38 nt, Artificial Sequence
  Description of Artificial Sequence:  Enzymatic Nucleic Acid
uggcaucacugaugaggccguuaggccgaaaagggagc

SEQ ID NO: 9862 - RNA, 38 nt, Artificial Sequence
  Description of Artificial Sequence:  Enzymatic Nucleic Acid
cccgggcacugaugaggccguuaggccgaaacucccac

SEQ ID NO: 9863 - RNA, 38 nt, Artificial Sequence
  Description of Artificial Sequence:  Enzymatic Nucleic Acid
ucccgggccugaugaggccguuaggccgaaaacuccca

SEQ ID NO: 9864 - RNA, 38 nt, Artificial Sequence
  Description of Artificial Sequence:  Enzymatic Nucleic Acid
cccaguuucugaugaggccguuaggccgaaagucucuc

SEQ ID NO: 9865 - RNA, 38 nt, Artificial Sequence
  Description of Artificial Sequence:  Enzymatic Nucleic Acid
gcccaguucugaugaggccguuaggccgaaaagucucu

SEQ ID NO: 9866 - RNA, 38 nt, Artificial Sequence
  Description of Artificial Sequence:  Enzymatic Nucleic Acid
uuccaagucugaugaggccguuaggccgaaauuugccc

SEQ ID NO: 9867 - RNA, 38 nt, Artificial Sequence
  Description of Artificial Sequence:  Enzymatic Nucleic Acid
ccucuucccugaugaggccguuaggccgaaagugauuu

SEQ ID NO: 9868 - RNA, 38 nt, Artificial Sequence
  Description of Artificial Sequence:  Enzymatic Nucleic Acid
uuuuccaacugaugaggccguuaggccgaaagccccuc

SEQ ID NO: 9869 - RNA, 38 nt, Artificial Sequence
  Description of Artificial Sequence:  Enzymatic Nucleic Acid
cuuuuccacugaugaggccguuaggccgaaaagccccu

SEQ ID NO: 9870 - RNA, 38 nt, Artificial Sequence
  Description of Artificial Sequence:  Enzymatic Nucleic Acid
acuuuucccugaugaggccguuaggccgaaaaagcccc

SEQ ID NO: 9871 - RNA, 38 nt, Artificial Sequence
  Description of Artificial Sequence:  Enzymatic Nucleic Acid
gaugcuugcugaugaggccguuaggccgaaaccacuuu

SEQ ID NO: 9872 - RNA, 38 nt, Artificial Sequence
  Description of Artificial Sequence:  Enzymatic Nucleic Acid
ugaugcuucugaugaggccguuaggccgaaaaccacuu

SEQ ID NO: 9873 - RNA, 38 nt, Artificial Sequence
  Description of Artificial Sequence:  Enzymatic Nucleic Acid
caaaugcucugaugaggccguuaggccgaaaugcuuga

SEQ ID NO: 9874 - RNA, 38 nt, Artificial Sequence
  Description of Artificial Sequence:  Enzymatic Nucleic Acid
uaaugccacugaugaggccguuaggccgaaaugcugau

SEQ ID NO: 9875 - RNA, 38 nt, Artificial Sequence
  Description of Artificial Sequence:  Enzymatic Nucleic Acid
uuaaugcccugaugaggccguuaggccgaaaaugcuga

SEQ ID NO: 9876 - RNA, 38 nt, Artificial Sequence
  Description of Artificial Sequence:  Enzymatic Nucleic Acid
gauuucuucugaugaggccguuaggccgaaaugccaaa

SEQ ID NO: 9877 - RNA, 38 nt, Artificial Sequence
  Description of Artificial Sequence:  Enzymatic Nucleic Acid
ugauuucucugaugaggccguuaggccgaaaaugccaa

SEQ ID NO: 9878 - RNA, 38 nt, Artificial Sequence
  Description of Artificial Sequence:  Enzymatic Nucleic Acid
acguaggucugaugaggccguuaggccgaaauuucuua

SEQ ID NO: 9879 - RNA, 38 nt, Artificial Sequence
  Description of Artificial Sequence:  Enzymatic Nucleic Acid
ccggcacgcugaugaggccguuaggccgaaaggugauu

SEQ ID NO: 9880 - RNA, 38 nt, Artificial Sequence
  Description of Artificial Sequence:  Enzymatic Nucleic Acid
gagcuuugcugaugaggccguuaggccgaaacucgcug

SEQ ID NO: 9881 - RNA, 38 nt, Artificial Sequence
  Description of Artificial Sequence:  Enzymatic Nucleic Acid
agucaucacugaugaggccguuaggccgaaagcuuugu

SEQ ID NO: 9882 - RNA, 38 nt, Artificial Sequence
  Description of Artificial Sequence:  Enzymatic Nucleic Acid
aagauuuucugaugaggccguuaggccgaaagcucagu

SEQ ID NO: 9883 - RNA, 38 nt, Artificial Sequence
  Description of Artificial Sequence:  Enzymatic Nucleic Acid
ugggucaacugaugaggccguuaggccgaaauuuuuag

SEQ ID NO: 9884 - RNA, 38 nt, Artificial Sequence
  Description of Artificial Sequence:  Enzymatic Nucleic Acid
uguggguccugaugaggccguuaggccgaaagauuuuu

SEQ ID NO: 9885 - RNA, 38 nt, Artificial Sequence
  Description of Artificial Sequence:  Enzymatic Nucleic Acid
ugguggcccugaugaggccguuaggccgaaaugugggu

SEQ ID NO: 9886 - RNA, 38 nt, Artificial Sequence
  Description of Artificial Sequence:  Enzymatic Nucleic Acid
cacguucacugaugaggccguuaggccgaaaugguggc

SEQ ID NO: 9887 - RNA, 38 nt, Artificial Sequence
  Description of Artificial Sequence:  Enzymatic Nucleic Acid
agcagguucugaugaggccguuaggccgaaaccacguu

SEQ ID NO: 9888 - RNA, 38 nt, Artificial Sequence
  Description of Artificial Sequence:  Enzymatic Nucleic Acid
cagcaggucugaugaggccguuaggccgaaaaccacgu

SEQ ID NO: 9889 - RNA, 38 nt, Artificial Sequence
  Description of Artificial Sequence:  Enzymatic Nucleic Acid
caccaucacugaugaggccguuaggccgaaaggcccuc

SEQ ID NO: 9890 - RNA, 38 nt, Artificial Sequence
  Description of Artificial Sequence:  Enzymatic Nucleic Acid
uauucaaccugaugaggccguuaggccgaaaucaccau

SEQ ID NO: 9891 - RNA, 38 nt, Artificial Sequence
  Description of Artificial Sequence:  Enzymatic Nucleic Acid
caguauuccugaugaggccguuaggccgaaacaaucac

SEQ ID NO: 9892 - RNA, 38 nt, Artificial Sequence
  Description of Artificial Sequence:  Enzymatic Nucleic Acid
auuugcagcugaugaggccguuaggccgaaauucaaca

SEQ ID NO: 9893 - RNA, 38 nt, Artificial Sequence
  Description of Artificial Sequence:  Enzymatic Nucleic Acid
gauuuccacugaugaggccguuaggccgaaauuugcag

SEQ ID NO: 9894 - RNA, 38 nt, Artificial Sequence
  Description of Artificial Sequence:  Enzymatic Nucleic Acid
guuggagacugaugaggccguuaggccgaaauuuccau

SEQ ID NO: 9895 - RNA, 38 nt, Artificial Sequence
  Description of Artificial Sequence:  Enzymatic Nucleic Acid
uaguuggacugaugaggccguuaggccgaaagauuucc

SEQ ID NO: 9896 - RNA, 38 nt, Artificial Sequence
  Description of Artificial Sequence:  Enzymatic Nucleic Acid
gguaguugcugaugaggccguuaggccgaaagagauuu

SEQ ID NO: 9897 - RNA, 38 nt, Artificial Sequence
  Description of Artificial Sequence:  Enzymatic Nucleic Acid
ucuugaggcugaugaggccguuaggccgaaaguuggag

SEQ ID NO: 9898 - RNA, 38 nt, Artificial Sequence
  Description of Artificial Sequence:  Enzymatic Nucleic Acid
uugcucuucugaugaggccguuaggccgaaagguaguu

SEQ ID NO: 9899 - RNA, 38 nt, Artificial Sequence
  Description of Artificial Sequence:  Enzymatic Nucleic Acid
gaaaaaaucugaugaggccguuaggccgaaagucacgu

SEQ ID NO: 9900 - RNA, 38 nt, Artificial Sequence
  Description of Artificial Sequence:  Enzymatic Nucleic Acid
agaaaaaacugaugaggccguuaggccgaaaagucacg

SEQ ID NO: 9901 - RNA, 38 nt, Artificial Sequence
  Description of Artificial Sequence:  Enzymatic Nucleic Acid
ugagaaaacugaugaggccguuaggccgaaauaaguca

SEQ ID NO: 9902 - RNA, 38 nt, Artificial Sequence
  Description of Artificial Sequence:  Enzymatic Nucleic Acid
uugagaaacugaugaggccguuaggccgaaaauaaguc

SEQ ID NO: 9903 - RNA, 38 nt, Artificial Sequence
  Description of Artificial Sequence:  Enzymatic Nucleic Acid
guugagaacugaugaggccguuaggccgaaaaauaagu

SEQ ID NO: 9904 - RNA, 38 nt, Artificial Sequence
  Description of Artificial Sequence:  Enzymatic Nucleic Acid
uguugagacugaugaggccguuaggccgaaaaaauaag

SEQ ID NO: 9905 - RNA, 38 nt, Artificial Sequence
  Description of Artificial Sequence:  Enzymatic Nucleic Acid
uuguugagcugaugaggccguuaggccgaaaaaaauaa

SEQ ID NO: 9906 - RNA, 38 nt, Artificial Sequence
  Description of Artificial Sequence:  Enzymatic Nucleic Acid
cuuguugacugaugaggccguuaggccgaaaaaaaaua

SEQ ID NO: 9907 - RNA, 38 nt, Artificial Sequence
  Description of Artificial Sequence:  Enzymatic Nucleic Acid
uccuuguucugaugaggccguuaggccgaaagaaaaaa

SEQ ID NO: 9908 - RNA, 38 nt, Artificial Sequence
  Description of Artificial Sequence:  Enzymatic Nucleic Acid
uccaugugcugaugaggccguuaggccgaaagugcugc

SEQ ID NO: 9909 - RNA, 38 nt, Artificial Sequence
  Description of Artificial Sequence:  Enzymatic Nucleic Acid
uucuuucucugaugaggccguuaggccgaaaggcucca

SEQ ID NO: 9910 - RNA, 38 nt, Artificial Sequence
  Description of Artificial Sequence:  Enzymatic Nucleic Acid
acgcuauccugaugaggccguuaggccgaaagucuugg

SEQ ID NO: 9911 - RNA, 38 nt, Artificial Sequence
  Description of Artificial Sequence:  Enzymatic Nucleic Acid
ggugacgccugaugaggccguuaggccgaaaucuaguc

SEQ ID NO: 9912 - RNA, 38 nt, Artificial Sequence
  Description of Artificial Sequence:  Enzymatic Nucleic Acid
cugcuggucugaugaggccguuaggccgaaacgcuauc

SEQ ID NO: 9913 - RNA, 38 nt, Artificial Sequence
  Description of Artificial Sequence:  Enzymatic Nucleic Acid
agcucgcacugaugaggccguuaggccgaaagcuuucg

SEQ ID NO: 9914 - RNA, 38 nt, Artificial Sequence
  Description of Artificial Sequence:  Enzymatic Nucleic Acid
gagcucgccugaugaggccguuaggccgaaaagcuuuc

SEQ ID NO: 9915 - RNA, 38 nt, Artificial Sequence
  Description of Artificial Sequence:  Enzymatic Nucleic Acid
gaaagccgcugaugaggccguuaggccgaaagcucgca

SEQ ID NO: 9916 - RNA, 38 nt, Artificial Sequence
  Description of Artificial Sequence:  Enzymatic Nucleic Acid
cuuccugacugaugaggccguuaggccgaaagccggag

SEQ ID NO: 9917 - RNA, 38 nt, Artificial Sequence
  Description of Artificial Sequence:  Enzymatic Nucleic Acid
ucuuccugcugaugaggccguuaggccgaaaagccgga

SEQ ID NO: 9918 - RNA, 38 nt, Artificial Sequence
  Description of Artificial Sequence:  Enzymatic Nucleic Acid
aucuuccucugaugaggccguuaggccgaaaaagccgg

SEQ ID NO: 9919 - RNA, 38 nt, Artificial Sequence
  Description of Artificial Sequence:  Enzymatic Nucleic Acid
cagacuuucugaugaggccguuaggccgaaaucuuccu

SEQ ID NO: 9920 - RNA, 38 nt, Artificial Sequence
  Description of Artificial Sequence:  Enzymatic Nucleic Acid
aucacucacugaugaggccguuaggccgaaacuuuuau

SEQ ID NO: 9921 - RNA, 38 nt, Artificial Sequence
  Description of Artificial Sequence:  Enzymatic Nucleic Acid
ucuuccuccugaugaggccguuaggccgaaacaucacu

SEQ ID NO: 9922 - RNA, 38 nt, Artificial Sequence
  Description of Artificial Sequence:  Enzymatic Nucleic Acid
accgucagcugaugaggccguuaggccgaaauccuccu

SEQ ID NO: 9923 - RNA, 38 nt, Artificial Sequence
  Description of Artificial Sequence:  Enzymatic Nucleic Acid
aaccgucacugaugaggccguuaggccgaaaauccucc

SEQ ID NO: 9924 - RNA, 38 nt, Artificial Sequence
  Description of Artificial Sequence:  Enzymatic Nucleic Acid
cuuguagacugaugaggccguuaggccgaaaccgucag

SEQ ID NO: 9925 - RNA, 38 nt, Artificial Sequence
  Description of Artificial Sequence:  Enzymatic Nucleic Acid
ccuuguagcugaugaggccguuaggccgaaaaccguca

SEQ ID NO: 9926 - RNA, 38 nt, Artificial Sequence
  Description of Artificial Sequence:  Enzymatic Nucleic Acid
uccuuguacugaugaggccguuaggccgaaaaaccguc

SEQ ID NO: 9927 - RNA, 38 nt, Artificial Sequence
  Description of Artificial Sequence:  Enzymatic Nucleic Acid
gcuccuugcugaugaggccguuaggccgaaagaaaccg

SEQ ID NO: 9928 - RNA, 38 nt, Artificial Sequence
  Description of Artificial Sequence:  Enzymatic Nucleic Acid
uccauagucugaugaggccguuaggccgaaaugggcuc

SEQ ID NO: 9929 - RNA, 38 nt, Artificial Sequence
  Description of Artificial Sequence:  Enzymatic Nucleic Acid
aucuuccacugaugaggccguuaggccgaaagugaugg

SEQ ID NO: 9930 - RNA, 38 nt, Artificial Sequence
  Description of Artificial Sequence:  Enzymatic Nucleic Acid
agaaaucacugaugaggccguuaggccgaaaucuucca

SEQ ID NO: 9931 - RNA, 38 nt, Artificial Sequence
  Description of Artificial Sequence:  Enzymatic Nucleic Acid
cuguaagacugaugaggccguuaggccgaaaucagauc

SEQ ID NO: 9932 - RNA, 38 nt, Artificial Sequence
  Description of Artificial Sequence:  Enzymatic Nucleic Acid
acuguaagcugaugaggccguuaggccgaaaaucagau

SEQ ID NO: 9933 - RNA, 38 nt, Artificial Sequence
  Description of Artificial Sequence:  Enzymatic Nucleic Acid
aacuguaacugaugaggccguuaggccgaaaaaucaga

SEQ ID NO: 9934 - RNA, 38 nt, Artificial Sequence
  Description of Artificial Sequence:  Enzymatic Nucleic Acid
aaaacugucugaugaggccguuaggccgaaagaaauca

SEQ ID NO: 9935 - RNA, 38 nt, Artificial Sequence
  Description of Artificial Sequence:  Enzymatic Nucleic Acid
gaaaacugcugaugaggccguuaggccgaaaagaaauc

SEQ ID NO: 9936 - RNA, 38 nt, Artificial Sequence
  Description of Artificial Sequence:  Enzymatic Nucleic Acid
cacuugaacugaugaggccguuaggccgaaacuguaag

SEQ ID NO: 9937 - RNA, 38 nt, Artificial Sequence
  Description of Artificial Sequence:  Enzymatic Nucleic Acid
ccacuugacugaugaggccguuaggccgaaaacuguaa

SEQ ID NO: 9938 - RNA, 38 nt, Artificial Sequence
  Description of Artificial Sequence:  Enzymatic Nucleic Acid
gccacuugcugaugaggccguuaggccgaaaaacugua

SEQ ID NO: 9939 - RNA, 38 nt, Artificial Sequence
  Description of Artificial Sequence:  Enzymatic Nucleic Acid
ggccacuucugaugaggccguuaggccgaaaaaacugu

SEQ ID NO: 9940 - RNA, 38 nt, Artificial Sequence
  Description of Artificial Sequence:  Enzymatic Nucleic Acid
aagacaggcugaugaggccguuaggccgaaacuccaug

SEQ ID NO: 9941 - RNA, 38 nt, Artificial Sequence
  Description of Artificial Sequence:  Enzymatic Nucleic Acid
gaagacagcugaugaggccguuaggccgaaaacuccau

SEQ ID NO: 9942 - RNA, 38 nt, Artificial Sequence
  Description of Artificial Sequence:  Enzymatic Nucleic Acid
uucuggaacugaugaggccguuaggccgaaacaggaac

SEQ ID NO: 9943 - RNA, 38 nt, Artificial Sequence
  Description of Artificial Sequence:  Enzymatic Nucleic Acid
cuuucuggcugaugaggccguuaggccgaaagacagga

SEQ ID NO: 9944 - RNA, 38 nt, Artificial Sequence
  Description of Artificial Sequence:  Enzymatic Nucleic Acid
acuuucugcugaugaggccguuaggccgaaaagacagg

SEQ ID NO: 9945 - RNA, 38 nt, Artificial Sequence
  Description of Artificial Sequence:  Enzymatic Nucleic Acid
ucccgaugcugaugaggccguuaggccgaaaugcacuu

SEQ ID NO: 9946 - RNA, 38 nt, Artificial Sequence
  Description of Artificial Sequence:  Enzymatic Nucleic Acid
gucccgaucugaugaggccguuaggccgaaaaugcacu

SEQ ID NO: 9947 - RNA, 38 nt, Artificial Sequence
  Description of Artificial Sequence:  Enzymatic Nucleic Acid
cagguccccugaugaggccguuaggccgaaaugaaugc

SEQ ID NO: 9948 - RNA, 38 nt, Artificial Sequence
  Description of Artificial Sequence:  Enzymatic Nucleic Acid
gauaaaagcugaugaggccguuaggccgaaauguuucu

SEQ ID NO: 9949 - RNA, 38 nt, Artificial Sequence
  Description of Artificial Sequence:  Enzymatic Nucleic Acid
agauaaaacugaugaggccguuaggccgaaaauguuuc

SEQ ID NO: 9950 - RNA, 38 nt, Artificial Sequence
  Description of Artificial Sequence:  Enzymatic Nucleic Acid
ucagauaacugaugaggccguuaggccgaaagaauguu

SEQ ID NO: 9951 - RNA, 38 nt, Artificial Sequence
  Description of Artificial Sequence:  Enzymatic Nucleic Acid
cucagauacugaugaggccguuaggccgaaaagaaugu

SEQ ID NO: 9952 - RNA, 38 nt, Artificial Sequence
  Description of Artificial Sequence:  Enzymatic Nucleic Acid
ucucagaucugaugaggccguuaggccgaaaaagaaug

SEQ ID NO: 9953 - RNA, 38 nt, Artificial Sequence
  Description of Artificial Sequence:  Enzymatic Nucleic Acid
uucucagacugaugaggccguuaggccgaaaaaagaau

SEQ ID NO: 9954 - RNA, 38 nt, Artificial Sequence
  Description of Artificial Sequence:  Enzymatic Nucleic Acid
uguucucacugaugaggccguuaggccgaaauaaaaga

SEQ ID NO: 9955 - RNA, 38 nt, Artificial Sequence
  Description of Artificial Sequence:  Enzymatic Nucleic Acid
aaaucacacugaugaggccguuaggccgaaaucuucac

SEQ ID NO: 9956 - RNA, 38 nt, Artificial Sequence
  Description of Artificial Sequence:  Enzymatic Nucleic Acid
aaaaucaccugaugaggccguuaggccgaaaaucuuca

SEQ ID NO: 9957 - RNA, 38 nt, Artificial Sequence
  Description of Artificial Sequence:  Enzymatic Nucleic Acid
aaggccaacugaugaggccguuaggccgaaaucacaaa

SEQ ID NO: 9958 - RNA, 38 nt, Artificial Sequence
  Description of Artificial Sequence:  Enzymatic Nucleic Acid
caaggccacugaugaggccguuaggccgaaaaucacaa

SEQ ID NO: 9959 - RNA, 38 nt, Artificial Sequence
  Description of Artificial Sequence:  Enzymatic Nucleic Acid
gcaaggcccugaugaggccguuaggccgaaaaaucaca

SEQ ID NO: 9960 - RNA, 38 nt, Artificial Sequence
  Description of Artificial Sequence:  Enzymatic Nucleic Acid
ucccgggccugaugaggccguuaggccgaaaggccaaa

SEQ ID NO: 9961 - RNA, 38 nt, Artificial Sequence
  Description of Artificial Sequence:  Enzymatic Nucleic Acid
cuuauaaacugaugaggccguuaggccgaaaucccggg

SEQ ID NO: 9962 - RNA, 38 nt, Artificial Sequence
  Description of Artificial Sequence:  Enzymatic Nucleic Acid
uucuuauacugaugaggccguuaggccgaaauaucccg

SEQ ID NO: 9963 - RNA, 38 nt, Artificial Sequence
  Description of Artificial Sequence:  Enzymatic Nucleic Acid
guucuuaucugaugaggccguuaggccgaaaauauccc

SEQ ID NO: 9964 - RNA, 38 nt, Artificial Sequence
  Description of Artificial Sequence:  Enzymatic Nucleic Acid
gguucuuacugaugaggccguuaggccgaaaaauaucc

SEQ ID NO: 9965 - RNA, 38 nt, Artificial Sequence
  Description of Artificial Sequence:  Enzymatic Nucleic Acid
gggguucucugaugaggccguuaggccgaaauaaauau

SEQ ID NO: 9966 - RNA, 38 nt, Artificial Sequence
  Description of Artificial Sequence:  Enzymatic Nucleic Acid
ucucacaucugaugaggccguuaggccgaaaucggggu

SEQ ID NO: 9967 - RNA, 38 nt, Artificial Sequence
  Description of Artificial Sequence:  Enzymatic Nucleic Acid
uucucacacugaugaggccguuaggccgaaaaucgggg

SEQ ID NO: 9968 - RNA, 38 nt, Artificial Sequence
  Description of Artificial Sequence:  Enzymatic Nucleic Acid
aagucgagcugaugaggccguuaggccgaaaucuccuu

SEQ ID NO: 9969 - RNA, 38 nt, Artificial Sequence
  Description of Artificial Sequence:  Enzymatic Nucleic Acid
aggaaguccugaugaggccguuaggccgaaaguaucuc

SEQ ID NO: 9970 - RNA, 38 nt, Artificial Sequence
  Description of Artificial Sequence:  Enzymatic Nucleic Acid
uucagaggcugaugaggccguuaggccgaaagucgagu

SEQ ID NO: 9971 - RNA, 38 nt, Artificial Sequence
  Description of Artificial Sequence:  Enzymatic Nucleic Acid
uuucagagcugaugaggccguuaggccgaaaagucgag

SEQ ID NO: 9972 - RNA, 38 nt, Artificial Sequence
  Description of Artificial Sequence:  Enzymatic Nucleic Acid
ccauuucacugaugaggccguuaggccgaaaggaaguc

SEQ ID NO: 9973 - RNA, 38 nt, Artificial Sequence
  Description of Artificial Sequence:  Enzymatic Nucleic Acid
agauucggcugaugaggccguuaggccgaaagccaucc

SEQ ID NO: 9974 - RNA, 38 nt, Artificial Sequence
  Description of Artificial Sequence:  Enzymatic Nucleic Acid
caaagauacugaugaggccguuaggccgaaauucggga

SEQ ID NO: 9975 - RNA, 38 nt, Artificial Sequence
  Description of Artificial Sequence:  Enzymatic Nucleic Acid
gucaaagacugaugaggccguuaggccgaaagauucgg

SEQ ID NO: 9976 - RNA, 38 nt, Artificial Sequence
  Description of Artificial Sequence:  Enzymatic Nucleic Acid
uugucaaacugaugaggccguuaggccgaaauagauuc

SEQ ID NO: 9977 - RNA, 38 nt, Artificial Sequence
  Description of Artificial Sequence:  Enzymatic Nucleic Acid
uuuugucacugaugaggccguuaggccgaaagauagau

SEQ ID NO: 9978 - RNA, 38 nt, Artificial Sequence
  Description of Artificial Sequence:  Enzymatic Nucleic Acid
auuuuguccugaugaggccguuaggccgaaaagauaga

SEQ ID NO: 9979 - RNA, 38 nt, Artificial Sequence
  Description of Artificial Sequence:  Enzymatic Nucleic Acid
gugcuguacugaugaggccguuaggccgaaauuuuguc

SEQ ID NO: 9980 - RNA, 38 nt, Artificial Sequence
  Description of Artificial Sequence:  Enzymatic Nucleic Acid
uggugcugcugaugaggccguuaggccgaaagauuuug

SEQ ID NO: 9981 - RNA, 38 nt, Artificial Sequence
  Description of Artificial Sequence:  Enzymatic Nucleic Acid
cuccguaacugaugaggccguuaggccgaaaccacacg

SEQ ID NO: 9982 - RNA, 38 nt, Artificial Sequence
  Description of Artificial Sequence:  Enzymatic Nucleic Acid
uacuccgucugaugaggccguuaggccgaaagaccaca

SEQ ID NO: 9983 - RNA, 38 nt, Artificial Sequence
  Description of Artificial Sequence:  Enzymatic Nucleic Acid
auacuccgcugaugaggccguuaggccgaaaagaccac

SEQ ID NO: 9984 - RNA, 38 nt, Artificial Sequence
  Description of Artificial Sequence:  Enzymatic Nucleic Acid
cacagcaacugaugaggccguuaggccgaaacuccgua

SEQ ID NO: 9985 - RNA, 38 nt, Artificial Sequence
  Description of Artificial Sequence:  Enzymatic Nucleic Acid
cccacagccugaugaggccguuaggccgaaauacuccg

SEQ ID NO: 9986 - RNA, 38 nt, Artificial Sequence
  Description of Artificial Sequence:  Enzymatic Nucleic Acid
aaggagaacugaugaggccguuaggccgaaauuuccca

SEQ ID NO: 9987 - RNA, 38 nt, Artificial Sequence
  Description of Artificial Sequence:  Enzymatic Nucleic Acid
cuaaggagcugaugaggccguuaggccgaaagauuucc

SEQ ID NO: 9988 - RNA, 38 nt, Artificial Sequence
  Description of Artificial Sequence:  Enzymatic Nucleic Acid
ccuaaggacugaugaggccguuaggccgaaaagauuuc

SEQ ID NO: 9989 - RNA, 38 nt, Artificial Sequence
  Description of Artificial Sequence:  Enzymatic Nucleic Acid
caccuaagcugaugaggccguuaggccgaaagaagauu

SEQ ID NO: 9990 - RNA, 38 nt, Artificial Sequence
  Description of Artificial Sequence:  Enzymatic Nucleic Acid
acccaccucugaugaggccguuaggccgaaaggagaag

SEQ ID NO: 9991 - RNA, 38 nt, Artificial Sequence
  Description of Artificial Sequence:  Enzymatic Nucleic Acid
gacccacccugaugaggccguuaggccgaaaaggagaa

SEQ ID NO: 9992 - RNA, 38 nt, Artificial Sequence
  Description of Artificial Sequence:  Enzymatic Nucleic Acid
gguauggacugaugaggccguuaggccgaaacccaccu

SEQ ID NO: 9993 - RNA, 38 nt, Artificial Sequence
  Description of Artificial Sequence:  Enzymatic Nucleic Acid
uggguaugcugaugaggccguuaggccgaaagacccac

SEQ ID NO: 9994 - RNA, 38 nt, Artificial Sequence
  Description of Artificial Sequence:  Enzymatic Nucleic Acid
cuccugggcugaugaggccguuaggccgaaauggagac

SEQ ID NO: 9995 - RNA, 38 nt, Artificial Sequence
  Description of Artificial Sequence:  Enzymatic Nucleic Acid
uccauuugcugaugaggccguuaggccgaaacuccugg

SEQ ID NO: 9996 - RNA, 38 nt, Artificial Sequence
  Description of Artificial Sequence:  Enzymatic Nucleic Acid
gacugcaacugaugaggccguuaggccgaaaguccuca

SEQ ID NO: 9997 - RNA, 38 nt, Artificial Sequence
  Description of Artificial Sequence:  Enzymatic Nucleic Acid
cgacugcacugaugaggccguuaggccgaaaaguccuc

SEQ ID NO: 9998 - RNA, 38 nt, Artificial Sequence
  Description of Artificial Sequence:  Enzymatic Nucleic Acid
gcgacugccugaugaggccguuaggccgaaaaaguccu

SEQ ID NO: 9999 - RNA, 38 nt, Artificial Sequence
  Description of Artificial Sequence:  Enzymatic Nucleic Acid
ccucaggccugaugaggccguuaggccgaaacugcaaa

SEQ ID NO: 10000 - RNA, 38 nt, Artificial Sequence
  Description of Artificial Sequence:  Enzymatic Nucleic Acid
guacucagcugaugaggccguuaggccgaaagcucuca

SEQ ID NO: 10001 - RNA, 38 nt, Artificial Sequence
  Description of Artificial Sequence:  Enzymatic Nucleic Acid
gaguagagcugaugaggccguuaggccgaaacucagga

SEQ ID NO: 10002 - RNA, 38 nt, Artificial Sequence
  Description of Artificial Sequence:  Enzymatic Nucleic Acid
caggaguacugaugaggccguuaggccgaaaguacuca

SEQ ID NO: 10003 - RNA, 38 nt, Artificial Sequence
  Description of Artificial Sequence:  Enzymatic Nucleic Acid
uucaggagcugaugaggccguuaggccgaaagaguacu

SEQ ID NO: 10004 - RNA, 38 nt, Artificial Sequence
  Description of Artificial Sequence:  Enzymatic Nucleic Acid
gauuucagcugaugaggccguuaggccgaaaguagagu

SEQ ID NO: 10005 - RNA, 38 nt, Artificial Sequence
  Description of Artificial Sequence:  Enzymatic Nucleic Acid
aucugauacugaugaggccguuaggccgaaauuucagg

SEQ ID NO: 10006 - RNA, 38 nt, Artificial Sequence
  Description of Artificial Sequence:  Enzymatic Nucleic Acid
ugaucugacugaugaggccguuaggccgaaagauuuca

SEQ ID NO: 10007 - RNA, 38 nt, Artificial Sequence
  Description of Artificial Sequence:  Enzymatic Nucleic Acid
caugaucucugaugaggccguuaggccgaaauagauuu

SEQ ID NO: 10008 - RNA, 38 nt, Artificial Sequence
  Description of Artificial Sequence:  Enzymatic Nucleic Acid
uccagcaucugaugaggccguuaggccgaaaucugaua

SEQ ID NO: 10009 - RNA, 38 nt, Artificial Sequence
  Description of Artificial Sequence:  Enzymatic Nucleic Acid
guucugcacugaugaggccguuaggccgaaaucuuggc

SEQ ID NO: 10010 - RNA, 38 nt, Artificial Sequence
  Description of Artificial Sequence:  Enzymatic Nucleic Acid
aguucugccugaugaggccguuaggccgaaaaucuugg

SEQ ID NO: 10011 - RNA, 38 nt, Artificial Sequence
  Description of Artificial Sequence:  Enzymatic Nucleic Acid
uuuuccaccugaugaggccguuaggccgaaaguucugc

SEQ ID NO: 10012 - RNA, 38 nt, Artificial Sequence
  Description of Artificial Sequence:  Enzymatic Nucleic Acid
aaaucacccugaugaggccguuaggccgaaaguuuuuc

SEQ ID NO: 10013 - RNA, 38 nt, Artificial Sequence
  Description of Artificial Sequence:  Enzymatic Nucleic Acid
uugaagcacugaugaggccguuaggccgaaaucaccua

SEQ ID NO: 10014 - RNA, 38 nt, Artificial Sequence
  Description of Artificial Sequence:  Enzymatic Nucleic Acid
cuugaagccugaugaggccguuaggccgaaaaucaccu

SEQ ID NO: 10015 - RNA, 38 nt, Artificial Sequence
  Description of Artificial Sequence:  Enzymatic Nucleic Acid
uuugcuugcugaugaggccguuaggccgaaagcaaauc

SEQ ID NO: 10016 - RNA, 38 nt, Artificial Sequence
  Description of Artificial Sequence:  Enzymatic Nucleic Acid
auuugcuucugaugaggccguuaggccgaaaagcaaau

SEQ ID NO: 10017 - RNA, 38 nt, Artificial Sequence
  Description of Artificial Sequence:  Enzymatic Nucleic Acid
uccuguugcugaugaggccguuaggccgaaacauuugc

SEQ ID NO: 10018 - RNA, 38 nt, Artificial Sequence
  Description of Artificial Sequence:  Enzymatic Nucleic Acid
guagucuucugaugaggccguuaggccgaaaccauccu

SEQ ID NO: 10019 - RNA, 38 nt, Artificial Sequence
  Description of Artificial Sequence:  Enzymatic Nucleic Acid
uugggaugcugaugaggccguuaggccgaaagucuuua

SEQ ID NO: 10020 - RNA, 38 nt, Artificial Sequence
  Description of Artificial Sequence:  Enzymatic Nucleic Acid
uugauuggcugaugaggccguuaggccgaaauguaguc

SEQ ID NO: 10021 - RNA, 38 nt, Artificial Sequence
  Description of Artificial Sequence:  Enzymatic Nucleic Acid
auggcauucugaugaggccguuaggccgaaauugggau

SEQ ID NO: 10022 - RNA, 38 nt, Artificial Sequence
  Description of Artificial Sequence:  Enzymatic Nucleic Acid
ccugucagcugaugaggccguuaggccgaaauggcauu

SEQ ID NO: 10023 - RNA, 38 nt, Artificial Sequence
  Description of Artificial Sequence:  Enzymatic Nucleic Acid
aaacccaccugaugaggccguuaggccgaaauuuccug

SEQ ID NO: 10024 - RNA, 38 nt, Artificial Sequence
  Description of Artificial Sequence:  Enzymatic Nucleic Acid
aguauguacugaugaggccguuaggccgaaacccacua

SEQ ID NO: 10025 - RNA, 38 nt, Artificial Sequence
  Description of Artificial Sequence:  Enzymatic Nucleic Acid
gaguaugucugaugaggccguuaggccgaaaacccacu

SEQ ID NO: 10026 - RNA, 38 nt, Artificial Sequence
  Description of Artificial Sequence:  Enzymatic Nucleic Acid
ugaguaugcugaugaggccguuaggccgaaaaacccac

SEQ ID NO: 10027 - RNA, 38 nt, Artificial Sequence
  Description of Artificial Sequence:  Enzymatic Nucleic Acid
gaguugagcugaugaggccguuaggccgaaauguaaac

SEQ ID NO: 10028 - RNA, 38 nt, Artificial Sequence
  Description of Artificial Sequence:  Enzymatic Nucleic Acid
caggaguucugaugaggccguuaggccgaaaguaugua

SEQ ID NO: 10029 - RNA, 38 nt, Artificial Sequence
  Description of Artificial Sequence:  Enzymatic Nucleic Acid
gaaggcagcugaugaggccguuaggccgaaaguugagu

SEQ ID NO: 10030 - RNA, 38 nt, Artificial Sequence
  Description of Artificial Sequence:  Enzymatic Nucleic Acid
ccucagagcugaugaggccguuaggccgaaaggcagga

SEQ ID NO: 10031 - RNA, 38 nt, Artificial Sequence
  Description of Artificial Sequence:  Enzymatic Nucleic Acid
uccucagacugaugaggccguuaggccgaaaaggcagg

SEQ ID NO: 10032 - RNA, 38 nt, Artificial Sequence
  Description of Artificial Sequence:  Enzymatic Nucleic Acid
aguccucacugaugaggccguuaggccgaaagaaggca

SEQ ID NO: 10033 - RNA, 38 nt, Artificial Sequence
  Description of Artificial Sequence:  Enzymatic Nucleic Acid
ccuugaagcugaugaggccguuaggccgaaaguccuca

SEQ ID NO: 10034 - RNA, 38 nt, Artificial Sequence
  Description of Artificial Sequence:  Enzymatic Nucleic Acid
uccuugaacugaugaggccguuaggccgaaaaguccuc

SEQ ID NO: 10035 - RNA, 38 nt, Artificial Sequence
  Description of Artificial Sequence:  Enzymatic Nucleic Acid
uuuccuugcugaugaggccguuaggccgaaagaagucc

SEQ ID NO: 10036 - RNA, 38 nt, Artificial Sequence
  Description of Artificial Sequence:  Enzymatic Nucleic Acid
cuuuccuucugaugaggccguuaggccgaaaagaaguc

SEQ ID NO: 10037 - RNA, 38 nt, Artificial Sequence
  Description of Artificial Sequence:  Enzymatic Nucleic Acid
agcugaaacugaugaggccguuaggccgaaacuuuccu

SEQ ID NO: 10038 - RNA, 38 nt, Artificial Sequence
  Description of Artificial Sequence:  Enzymatic Nucleic Acid
ggagcugacugaugaggccguuaggccgaaauacuuuc

SEQ ID NO: 10039 - RNA, 38 nt, Artificial Sequence
  Description of Artificial Sequence:  Enzymatic Nucleic Acid
cggagcugcugaugaggccguuaggccgaaaauacuuu

SEQ ID NO: 10040 - RNA, 38 nt, Artificial Sequence
  Description of Artificial Sequence:  Enzymatic Nucleic Acid
ucggagcucugaugaggccguuaggccgaaaaauacuu

SEQ ID NO: 10041 - RNA, 38 nt, Artificial Sequence
  Description of Artificial Sequence:  Enzymatic Nucleic Acid
aaacuucgcugaugaggccguuaggccgaaagcugaaa

SEQ ID NO: 10042 - RNA, 38 nt, Artificial Sequence
  Description of Artificial Sequence:  Enzymatic Nucleic Acid
cugaauuacugaugaggccguuaggccgaaacuucgga

SEQ ID NO: 10043 - RNA, 38 nt, Artificial Sequence
  Description of Artificial Sequence:  Enzymatic Nucleic Acid
ccugaauucugaugaggccguuaggccgaaaacuucgg

SEQ ID NO: 10044 - RNA, 38 nt, Artificial Sequence
  Description of Artificial Sequence:  Enzymatic Nucleic Acid
uccugaaucugaugaggccguuaggccgaaaaacuucg

SEQ ID NO: 10045 - RNA, 38 nt, Artificial Sequence
  Description of Artificial Sequence:  Enzymatic Nucleic Acid
gcuuccugcugaugaggccguuaggccgaaauuaaacu

SEQ ID NO: 10046 - RNA, 38 nt, Artificial Sequence
  Description of Artificial Sequence:  Enzymatic Nucleic Acid
agcuuccucugaugaggccguuaggccgaaaauuaaac

SEQ ID NO: 10047 - RNA, 38 nt, Artificial Sequence
  Description of Artificial Sequence:  Enzymatic Nucleic Acid
caucaucacugaugaggccguuaggccgaaagcuuccu

SEQ ID NO: 10048 - RNA, 38 nt, Artificial Sequence
  Description of Artificial Sequence:  Enzymatic Nucleic Acid
acauaucucugaugaggccguuaggccgaaacaucauc

SEQ ID NO: 10049 - RNA, 38 nt, Artificial Sequence
  Description of Artificial Sequence:  Enzymatic Nucleic Acid
cauuuacacugaugaggccguuaggccgaaaucugaca

SEQ ID NO: 10050 - RNA, 38 nt, Artificial Sequence
  Description of Artificial Sequence:  Enzymatic Nucleic Acid
aaagcauucugaugaggccguuaggccgaaacauaucu

SEQ ID NO: 10051 - RNA, 38 nt, Artificial Sequence
  Description of Artificial Sequence:  Enzymatic Nucleic Acid
gaacuugacugaugaggccguuaggccgaaagcauuua

SEQ ID NO: 10052 - RNA, 38 nt, Artificial Sequence
  Description of Artificial Sequence:  Enzymatic Nucleic Acid
ugaacuugcugaugaggccguuaggccgaaaagcauuu

SEQ ID NO: 10053 - RNA, 38 nt, Artificial Sequence
  Description of Artificial Sequence:  Enzymatic Nucleic Acid
augaacuucugaugaggccguuaggccgaaaaagcauu

SEQ ID NO: 10054 - RNA, 38 nt, Artificial Sequence
  Description of Artificial Sequence:  Enzymatic Nucleic Acid
ggcucaugcugaugaggccguuaggccgaaacuugaaa

SEQ ID NO: 10055 - RNA, 38 nt, Artificial Sequence
  Description of Artificial Sequence:  Enzymatic Nucleic Acid
aggcucaucugaugaggccguuaggccgaaaacuugaa

SEQ ID NO: 10056 - RNA, 38 nt, Artificial Sequence
  Description of Artificial Sequence:  Enzymatic Nucleic Acid
aagguuuucugaugaggccguuaggccgaaauucuuuc

SEQ ID NO: 10057 - RNA, 38 nt, Artificial Sequence
  Description of Artificial Sequence:  Enzymatic Nucleic Acid
guucuucacugaugaggccguuaggccgaaagguuuug

SEQ ID NO: 10058 - RNA, 38 nt, Artificial Sequence
  Description of Artificial Sequence:  Enzymatic Nucleic Acid
aguucuuccugaugaggccguuaggccgaaaagguuuu

SEQ ID NO: 10059 - RNA, 38 nt, Artificial Sequence
  Description of Artificial Sequence:  Enzymatic Nucleic Acid
uucgguaacugaugaggccguuaggccgaaaguucuuc

SEQ ID NO: 10060 - RNA, 38 nt, Artificial Sequence
  Description of Artificial Sequence:  Enzymatic Nucleic Acid
auucgguacugaugaggccguuaggccgaaaaguucuu

SEQ ID NO: 10061 - RNA, 38 nt, Artificial Sequence
  Description of Artificial Sequence:  Enzymatic Nucleic Acid
cauucggucugaugaggccguuaggccgaaaaaguucu

SEQ ID NO: 10062 - RNA, 38 nt, Artificial Sequence
  Description of Artificial Sequence:  Enzymatic Nucleic Acid
gcauucggcugaugaggccguuaggccgaaaaaaguuc

SEQ ID NO: 10063 - RNA, 38 nt, Artificial Sequence
  Description of Artificial Sequence:  Enzymatic Nucleic Acid
caaacaugcugaugaggccguuaggccgaaagguggca

SEQ ID NO: 10064 - RNA, 38 nt, Artificial Sequence
  Description of Artificial Sequence:  Enzymatic Nucleic Acid
agucaucacugaugaggccguuaggccgaaacauggag

SEQ ID NO: 10065 - RNA, 38 nt, Artificial Sequence
  Description of Artificial Sequence:  Enzymatic Nucleic Acid
uagucauccugaugaggccguuaggccgaaaacaugga

SEQ ID NO: 10066 - RNA, 38 nt, Artificial Sequence
  Description of Artificial Sequence:  Enzymatic Nucleic Acid
cgcccuggcugaugaggccguuaggccgaaagucauca

SEQ ID NO: 10067 - RNA, 38 nt, Artificial Sequence
  Description of Artificial Sequence:  Enzymatic Nucleic Acid
ggccaacacugaugaggccguuaggccgaaagugcugc

SEQ ID NO: 10068 - RNA, 38 nt, Artificial Sequence
  Description of Artificial Sequence:  Enzymatic Nucleic Acid
gagaggcccugaugaggccguuaggccgaaacagagug

SEQ ID NO: 10069 - RNA, 38 nt, Artificial Sequence
  Description of Artificial Sequence:  Enzymatic Nucleic Acid
gcaugggacugaugaggccguuaggccgaaaggccaac

SEQ ID NO: 10070 - RNA, 38 nt, Artificial Sequence
  Description of Artificial Sequence:  Enzymatic Nucleic Acid
cagcauggcugaugaggccguuaggccgaaagaggcca

SEQ ID NO: 10071 - RNA, 38 nt, Artificial Sequence
  Description of Artificial Sequence:  Enzymatic Nucleic Acid
uccaggugcugaugaggccguuaggccgaaagcgcuuc

SEQ ID NO: 10072 - RNA, 38 nt, Artificial Sequence
  Description of Artificial Sequence:  Enzymatic Nucleic Acid
guccaggucugaugaggccguuaggccgaaaagcgcuu

SEQ ID NO: 10073 - RNA, 38 nt, Artificial Sequence
  Description of Artificial Sequence:  Enzymatic Nucleic Acid
ucuugagccugaugaggccguuaggccgaaaggccuug

SEQ ID NO: 10074 - RNA, 38 nt, Artificial Sequence
  Description of Artificial Sequence:  Enzymatic Nucleic Acid
ucaaucuucugaugaggccguuaggccgaaagcgaggc

SEQ ID NO: 10075 - RNA, 38 nt, Artificial Sequence
  Description of Artificial Sequence:  Enzymatic Nucleic Acid
cucaaguccugaugaggccguuaggccgaaaucuugag

SEQ ID NO: 10076 - RNA, 38 nt, Artificial Sequence
  Description of Artificial Sequence:  Enzymatic Nucleic Acid
uuacucuccugaugaggccguuaggccgaaagucaauc

SEQ ID NO: 10077 - RNA, 38 nt, Artificial Sequence
  Description of Artificial Sequence:  Enzymatic Nucleic Acid
uuacuggucugaugaggccguuaggccgaaacucucaa

SEQ ID NO: 10078 - RNA, 38 nt, Artificial Sequence
  Description of Artificial Sequence:  Enzymatic Nucleic Acid
cuuacuuucugaugaggccguuaggccgaaacugguua

SEQ ID NO: 10079 - RNA, 38 nt, Artificial Sequence
  Description of Artificial Sequence:  Enzymatic Nucleic Acid
cgacuccucugaugaggccguuaggccgaaacuuuuac

SEQ ID NO: 10080 - RNA, 38 nt, Artificial Sequence
  Description of Artificial Sequence:  Enzymatic Nucleic Acid
acagcccccugaugaggccguuaggccgaaacuccuua

SEQ ID NO: 10081 - RNA, 38 nt, Artificial Sequence
  Description of Artificial Sequence:  Enzymatic Nucleic Acid
ugacaucacugaugaggccguuaggccgaaacagcccc

SEQ ID NO: 10082 - RNA, 38 nt, Artificial Sequence
  Description of Artificial Sequence:  Enzymatic Nucleic Acid
ggccugcucugaugaggccguuaggccgaaacaucaga

SEQ ID NO: 10083 - RNA, 38 nt, Artificial Sequence
  Description of Artificial Sequence:  Enzymatic Nucleic Acid
auggcagacugaugaggccguuaggccgaaacugggcc

SEQ ID NO: 10084 - RNA, 38 nt, Artificial Sequence
  Description of Artificial Sequence:  Enzymatic Nucleic Acid
aauggcagcugaugaggccguuaggccgaaaacugggc

SEQ ID NO: 10085 - RNA, 38 nt, Artificial Sequence
  Description of Artificial Sequence:  Enzymatic Nucleic Acid
gaauggcacugaugaggccguuaggccgaaaaacuggg

SEQ ID NO: 10086 - RNA, 38 nt, Artificial Sequence
  Description of Artificial Sequence:  Enzymatic Nucleic Acid
acagcuggcugaugaggccguuaggccgaaauggcaga

SEQ ID NO: 10087 - RNA, 38 nt, Artificial Sequence
  Description of Artificial Sequence:  Enzymatic Nucleic Acid
cacagcugcugaugaggccguuaggccgaaaauggcag

SEQ ID NO: 10088 - RNA, 38 nt, Artificial Sequence
  Description of Artificial Sequence:  Enzymatic Nucleic Acid
ccuucgcucugaugaggccguuaggccgaaacgugccc

SEQ ID NO: 10089 - RNA, 38 nt, Artificial Sequence
  Description of Artificial Sequence:  Enzymatic Nucleic Acid
cguaggugcugaugaggccguuaggccgaaaccugcgc

SEQ ID NO: 10090 - RNA, 38 nt, Artificial Sequence
  Description of Artificial Sequence:  Enzymatic Nucleic Acid
ucguaggucugaugaggccguuaggccgaaaaccugcg

SEQ ID NO: 10091 - RNA, 38 nt, Artificial Sequence
  Description of Artificial Sequence:  Enzymatic Nucleic Acid
cguggucgcugaugaggccguuaggccgaaaggugaac

SEQ ID NO: 10092 - RNA, 38 nt, Artificial Sequence
  Description of Artificial Sequence:  Enzymatic Nucleic Acid
cagcacgccugaugaggccguuaggccgaaauuuuccu

SEQ ID NO: 10093 - RNA, 38 nt, Artificial Sequence
  Description of Artificial Sequence:  Enzymatic Nucleic Acid
ggggcgggcugaugaggccguuaggccgaaagcagcac

SEQ ID NO: 10094 - RNA, 38 nt, Artificial Sequence
  Description of Artificial Sequence:  Enzymatic Nucleic Acid
ccgaguugcugaugaggccguuaggccgaaagucuggg

SEQ ID NO: 10095 - RNA, 38 nt, Artificial Sequence
  Description of Artificial Sequence:  Enzymatic Nucleic Acid
ggaccacccugaugaggccguuaggccgaaaguuguag

SEQ ID NO: 10096 - RNA, 38 nt, Artificial Sequence
  Description of Artificial Sequence:  Enzymatic Nucleic Acid
gaguacagcugaugaggccguuaggccgaaaccaccga

SEQ ID NO: 10097 - RNA, 38 nt, Artificial Sequence
  Description of Artificial Sequence:  Enzymatic Nucleic Acid
ggguggagcugaugaggccguuaggccgaaacaggacc

SEQ ID NO: 10098 - RNA, 38 nt, Artificial Sequence
  Description of Artificial Sequence:  Enzymatic Nucleic Acid
guggggugcugaugaggccguuaggccgaaaguacagg

SEQ ID NO: 10099 - RNA, 38 nt, Artificial Sequence
  Description of Artificial Sequence:  Enzymatic Nucleic Acid
aaacucuacugaugaggccguuaggccgaaaugggugg

SEQ ID NO: 10100 - RNA, 38 nt, Artificial Sequence
  Description of Artificial Sequence:  Enzymatic Nucleic Acid
ucaaacuccugaugaggccguuaggccgaaagaugggu

SEQ ID NO: 10101 - RNA, 38 nt, Artificial Sequence
  Description of Artificial Sequence:  Enzymatic Nucleic Acid
ucgugucacugaugaggccguuaggccgaaacucuaga

SEQ ID NO: 10102 - RNA, 38 nt, Artificial Sequence
  Description of Artificial Sequence:  Enzymatic Nucleic Acid
uucguguccugaugaggccguuaggccgaaaacucuag

SEQ ID NO: 10103 - RNA, 38 nt, Artificial Sequence
  Description of Artificial Sequence:  Enzymatic Nucleic Acid
cuagaaaucugaugaggccguuaggccgaaaggcuucg

SEQ ID NO: 10104 - RNA, 38 nt, Artificial Sequence
  Description of Artificial Sequence:  Enzymatic Nucleic Acid
ucuagaaacugaugaggccguuaggccgaaaaggcuuc

SEQ ID NO: 10105 - RNA, 38 nt, Artificial Sequence
  Description of Artificial Sequence:  Enzymatic Nucleic Acid
cuucuagacugaugaggccguuaggccgaaauaaggcu

SEQ ID NO: 10106 - RNA, 38 nt, Artificial Sequence
  Description of Artificial Sequence:  Enzymatic Nucleic Acid
gcuucuagcugaugaggccguuaggccgaaaauaaggc

SEQ ID NO: 10107 - RNA, 38 nt, Artificial Sequence
  Description of Artificial Sequence:  Enzymatic Nucleic Acid
ugcuucuacugaugaggccguuaggccgaaaaauaagg

SEQ ID NO: 10108 - RNA, 38 nt, Artificial Sequence
  Description of Artificial Sequence:  Enzymatic Nucleic Acid
ugugcuuccugaugaggccguuaggccgaaagaaauaa

SEQ ID NO: 10109 - RNA, 38 nt, Artificial Sequence
  Description of Artificial Sequence:  Enzymatic Nucleic Acid
gguauaaacugaugaggccguuaggccgaaacacaugu

SEQ ID NO: 10110 - RNA, 38 nt, Artificial Sequence
  Description of Artificial Sequence:  Enzymatic Nucleic Acid
gggguauacugaugaggccguuaggccgaaauacacau

SEQ ID NO: 10111 - RNA, 38 nt, Artificial Sequence
  Description of Artificial Sequence:  Enzymatic Nucleic Acid
ggggguaucugaugaggccguuaggccgaaaauacaca

SEQ ID NO: 10112 - RNA, 38 nt, Artificial Sequence
  Description of Artificial Sequence:  Enzymatic Nucleic Acid
uggggguacugaugaggccguuaggccgaaaaauacac

SEQ ID NO: 10113 - RNA, 38 nt, Artificial Sequence
  Description of Artificial Sequence:  Enzymatic Nucleic Acid
ccugggggcugaugaggccguuaggccgaaauaaauac

SEQ ID NO: 10114 - RNA, 38 nt, Artificial Sequence
  Description of Artificial Sequence:  Enzymatic Nucleic Acid
gcaaaagccugaugaggccguuaggccgaaaguuuccu

SEQ ID NO: 10115 - RNA, 38 nt, Artificial Sequence
  Description of Artificial Sequence:  Enzymatic Nucleic Acid
acuggcaacugaugaggccguuaggccgaaagcuaguu

SEQ ID NO: 10116 - RNA, 38 nt, Artificial Sequence
  Description of Artificial Sequence:  Enzymatic Nucleic Acid
uacuggcacugaugaggccguuaggccgaaaagcuagu

SEQ ID NO: 10117 - RNA, 38 nt, Artificial Sequence
  Description of Artificial Sequence:  Enzymatic Nucleic Acid
auacuggccugaugaggccguuaggccgaaaaagcuag

SEQ ID NO: 10118 - RNA, 38 nt, Artificial Sequence
  Description of Artificial Sequence:  Enzymatic Nucleic Acid
augcauaacugaugaggccguuaggccgaaacuggcaa

SEQ ID NO: 10119 - RNA, 38 nt, Artificial Sequence
  Description of Artificial Sequence:  Enzymatic Nucleic Acid
auaugcaucugaugaggccguuaggccgaaauacuggc

SEQ ID NO: 10120 - RNA, 38 nt, Artificial Sequence
  Description of Artificial Sequence:  Enzymatic Nucleic Acid
uauaugcacugaugaggccguuaggccgaaaauacugg

SEQ ID NO: 10121 - RNA, 38 nt, Artificial Sequence
  Description of Artificial Sequence:  Enzymatic Nucleic Acid
aacuuauacugaugaggccguuaggccgaaaugcauaa

SEQ ID NO: 10122 - RNA, 38 nt, Artificial Sequence
  Description of Artificial Sequence:  Enzymatic Nucleic Acid
uaaacuuacugaugaggccguuaggccgaaauaugcau

SEQ ID NO: 10123 - RNA, 38 nt, Artificial Sequence
  Description of Artificial Sequence:  Enzymatic Nucleic Acid
uguaaacucugaugaggccguuaggccgaaauauaugc

SEQ ID NO: 10124 - RNA, 38 nt, Artificial Sequence
  Description of Artificial Sequence:  Enzymatic Nucleic Acid
aagguguacugaugaggccguuaggccgaaacuuauau

SEQ ID NO: 10125 - RNA, 38 nt, Artificial Sequence
  Description of Artificial Sequence:  Enzymatic Nucleic Acid
aaaggugucugaugaggccguuaggccgaaaacuuaua

SEQ ID NO: 10126 - RNA, 38 nt, Artificial Sequence
  Description of Artificial Sequence:  Enzymatic Nucleic Acid
uaaaggugcugaugaggccguuaggccgaaaaacuuau

SEQ ID NO: 10127 - RNA, 38 nt, Artificial Sequence
  Description of Artificial Sequence:  Enzymatic Nucleic Acid
gaaagauacugaugaggccguuaggccgaaagguguaa

SEQ ID NO: 10128 - RNA, 38 nt, Artificial Sequence
  Description of Artificial Sequence:  Enzymatic Nucleic Acid
ggaaagaucugaugaggccguuaggccgaaaaggugua

SEQ ID NO: 10129 - RNA, 38 nt, Artificial Sequence
  Description of Artificial Sequence:  Enzymatic Nucleic Acid
uggaaagacugaugaggccguuaggccgaaaaaggugu

SEQ ID NO: 10130 - RNA, 38 nt, Artificial Sequence
  Description of Artificial Sequence:  Enzymatic Nucleic Acid
cauggaaacugaugaggccguuaggccgaaauaaaggu

SEQ ID NO: 10131 - RNA, 38 nt, Artificial Sequence
  Description of Artificial Sequence:  Enzymatic Nucleic Acid
cccauggacugaugaggccguuaggccgaaagauaaag

SEQ ID NO: 10132 - RNA, 38 nt, Artificial Sequence
  Description of Artificial Sequence:  Enzymatic Nucleic Acid
ucccauggcugaugaggccguuaggccgaaaagauaaa

SEQ ID NO: 10133 - RNA, 38 nt, Artificial Sequence
  Description of Artificial Sequence:  Enzymatic Nucleic Acid
cucccaugcugaugaggccguuaggccgaaaaagauaa

SEQ ID NO: 10134 - RNA, 38 nt, Artificial Sequence
  Description of Artificial Sequence:  Enzymatic Nucleic Acid
aucacaaacugaugaggccguuaggccgaaagcagcug

SEQ ID NO: 10135 - RNA, 38 nt, Artificial Sequence
  Description of Artificial Sequence:  Enzymatic Nucleic Acid
aaucacaacugaugaggccguuaggccgaaaagcagcu

SEQ ID NO: 10136 - RNA, 38 nt, Artificial Sequence
  Description of Artificial Sequence:  Enzymatic Nucleic Acid
aaaucacacugaugaggccguuaggccgaaaaagcagc

SEQ ID NO: 10137 - RNA, 38 nt, Artificial Sequence
  Description of Artificial Sequence:  Enzymatic Nucleic Acid
aaaaucaccugaugaggccguuaggccgaaaaaagcag

SEQ ID NO: 10138 - RNA, 38 nt, Artificial Sequence
  Description of Artificial Sequence:  Enzymatic Nucleic Acid
auuaaaaacugaugaggccguuaggccgaaaucacaaa

SEQ ID NO: 10139 - RNA, 38 nt, Artificial Sequence
  Description of Artificial Sequence:  Enzymatic Nucleic Acid
uauuaaaacugaugaggccguuaggccgaaaaucacaa

SEQ ID NO: 10140 - RNA, 38 nt, Artificial Sequence
  Description of Artificial Sequence:  Enzymatic Nucleic Acid
cuauuaaacugaugaggccguuaggccgaaaaaucaca

SEQ ID NO: 10141 - RNA, 38 nt, Artificial Sequence
  Description of Artificial Sequence:  Enzymatic Nucleic Acid
acuauuaacugaugaggccguuaggccgaaaaaaucac

SEQ ID NO: 10142 - RNA, 38 nt, Artificial Sequence
  Description of Artificial Sequence:  Enzymatic Nucleic Acid
cacuauuacugaugaggccguuaggccgaaaaaaauca

SEQ ID NO: 10143 - RNA, 38 nt, Artificial Sequence
  Description of Artificial Sequence:  Enzymatic Nucleic Acid
gcacuauucugaugaggccguuaggccgaaaaaaaauc

SEQ ID NO: 10144 - RNA, 38 nt, Artificial Sequence
  Description of Artificial Sequence:  Enzymatic Nucleic Acid
agcacuaucugaugaggccguuaggccgaaaaaaaaau

SEQ ID NO: 10145 - RNA, 38 nt, Artificial Sequence
  Description of Artificial Sequence:  Enzymatic Nucleic Acid
aaaagcaccugaugaggccguuaggccgaaauuaaaaa

SEQ ID NO: 10146 - RNA, 38 nt, Artificial Sequence
  Description of Artificial Sequence:  Enzymatic Nucleic Acid
aaaaaaaacugaugaggccguuaggccgaaagcacuau

SEQ ID NO: 10147 - RNA, 38 nt, Artificial Sequence
  Description of Artificial Sequence:  Enzymatic Nucleic Acid
aaaaaaaacugaugaggccguuaggccgaaaagcacua

SEQ ID NO: 10148 - RNA, 38 nt, Artificial Sequence
  Description of Artificial Sequence:  Enzymatic Nucleic Acid
caaaaaaacugaugaggccguuaggccgaaaaagcacu

SEQ ID NO: 10149 - RNA, 38 nt, Artificial Sequence
  Description of Artificial Sequence:  Enzymatic Nucleic Acid
ucaaaaaacugaugaggccguuaggccgaaaaaagcac

SEQ ID NO: 10150 - RNA, 38 nt, Artificial Sequence
  Description of Artificial Sequence:  Enzymatic Nucleic Acid
gucaaaaacugaugaggccguuaggccgaaaaaaagca

SEQ ID NO: 10151 - RNA, 38 nt, Artificial Sequence
  Description of Artificial Sequence:  Enzymatic Nucleic Acid
agucaaaacugaugaggccguuaggccgaaaaaaaagc

SEQ ID NO: 10152 - RNA, 38 nt, Artificial Sequence
  Description of Artificial Sequence:  Enzymatic Nucleic Acid
uagucaaacugaugaggccguuaggccgaaaaaaaaag

SEQ ID NO: 10153 - RNA, 38 nt, Artificial Sequence
  Description of Artificial Sequence:  Enzymatic Nucleic Acid
uuagucaacugaugaggccguuaggccgaaaaaaaaaa

SEQ ID NO: 10154 - RNA, 38 nt, Artificial Sequence
  Description of Artificial Sequence:  Enzymatic Nucleic Acid
guuagucacugaugaggccguuaggccgaaaaaaaaaa

SEQ ID NO: 10155 - RNA, 38 nt, Artificial Sequence
  Description of Artificial Sequence:  Enzymatic Nucleic Acid
uguuaguccugaugaggccguuaggccgaaaaaaaaaa

SEQ ID NO: 10156 - RNA, 38 nt, Artificial Sequence
  Description of Artificial Sequence:  Enzymatic Nucleic Acid
auucuugucugaugaggccguuaggccgaaagucaaaa

SEQ ID NO: 10157 - RNA, 38 nt, Artificial Sequence
  Description of Artificial Sequence:  Enzymatic Nucleic Acid
ucuggagucugaugaggccguuaggccgaaacauucuu

SEQ ID NO: 10158 - RNA, 38 nt, Artificial Sequence
  Description of Artificial Sequence:  Enzymatic Nucleic Acid
ucuaucugcugaugaggccguuaggccgaaaguuacau

SEQ ID NO: 10159 - RNA, 38 nt, Artificial Sequence
  Description of Artificial Sequence:  Enzymatic Nucleic Acid
uauuucuccugaugaggccguuaggccgaaaucuggag

SEQ ID NO: 10160 - RNA, 38 nt, Artificial Sequence
  Description of Artificial Sequence:  Enzymatic Nucleic Acid
cuugucaccugaugaggccguuaggccgaaauuucucu

SEQ ID NO: 10161 - RNA, 38 nt, Artificial Sequence
  Description of Artificial Sequence:  Enzymatic Nucleic Acid
uuuagcagcugaugaggccguuaggccgaaaguguucu

SEQ ID NO: 10162 - RNA, 38 nt, Artificial Sequence
  Description of Artificial Sequence:  Enzymatic Nucleic Acid
ugaggauucugaugaggccguuaggccgaaagcaguag

SEQ ID NO: 10163 - RNA, 38 nt, Artificial Sequence
  Description of Artificial Sequence:  Enzymatic Nucleic Acid
aacaugagcugaugaggccguuaggccgaaauuuagca

SEQ ID NO: 10164 - RNA, 38 nt, Artificial Sequence
  Description of Artificial Sequence:  Enzymatic Nucleic Acid
aguaacaucugaugaggccguuaggccgaaaggauuua

SEQ ID NO: 10165 - RNA, 38 nt, Artificial Sequence
  Description of Artificial Sequence:  Enzymatic Nucleic Acid
cacugagucugaugaggccguuaggccgaaacaugagg

SEQ ID NO: 10166 - RNA, 38 nt, Artificial Sequence
  Description of Artificial Sequence:  Enzymatic Nucleic Acid
acacugagcugaugaggccguuaggccgaaaacaugag

SEQ ID NO: 10167 - RNA, 38 nt, Artificial Sequence
  Description of Artificial Sequence:  Enzymatic Nucleic Acid
cuaacacucugaugaggccguuaggccgaaaguaacau

SEQ ID NO: 10168 - RNA, 38 nt, Artificial Sequence
  Description of Artificial Sequence:  Enzymatic Nucleic Acid
auuucucucugaugaggccguuaggccgaaacacugag

SEQ ID NO: 10169 - RNA, 38 nt, Artificial Sequence
  Description of Artificial Sequence:  Enzymatic Nucleic Acid
gauuucuccugaugaggccguuaggccgaaaacacuga

SEQ ID NO: 10170 - RNA, 38 nt, Artificial Sequence
  Description of Artificial Sequence:  Enzymatic Nucleic Acid
uuaggaagcugaugaggccguuaggccgaaauuucucu

SEQ ID NO: 10171 - RNA, 38 nt, Artificial Sequence
  Description of Artificial Sequence:  Enzymatic Nucleic Acid
gguuuaggcugaugaggccguuaggccgaaaggauuuc

SEQ ID NO: 10172 - RNA, 38 nt, Artificial Sequence
  Description of Artificial Sequence:  Enzymatic Nucleic Acid
ggguuuagcugaugaggccguuaggccgaaaaggauuu

SEQ ID NO: 10173 - RNA, 38 nt, Artificial Sequence
  Description of Artificial Sequence:  Enzymatic Nucleic Acid
auuggguucugaugaggccguuaggccgaaaggaagga

SEQ ID NO: 10174 - RNA, 38 nt, Artificial Sequence
  Description of Artificial Sequence:  Enzymatic Nucleic Acid
gagcagggcugaugaggccguuaggccgaaagucauug

SEQ ID NO: 10175 - RNA, 38 nt, Artificial Sequence
  Description of Artificial Sequence:  Enzymatic Nucleic Acid
ggagcaggcugaugaggccguuaggccgaaaagucauu

SEQ ID NO: 10176 - RNA, 38 nt, Artificial Sequence
  Description of Artificial Sequence:  Enzymatic Nucleic Acid
ggggguugcugaugaggccguuaggccgaaagcaggga

SEQ ID NO: 10177 - RNA, 38 nt, Artificial Sequence
  Description of Artificial Sequence:  Enzymatic Nucleic Acid
cgugcccucugaugaggccguuaggccgaaagguggcg

SEQ ID NO: 10178 - RNA, 38 nt, Artificial Sequence
  Description of Artificial Sequence:  Enzymatic Nucleic Acid
cucaaucacugaugaggccguuaggccgaaacuggucc

SEQ ID NO: 10179 - RNA, 38 nt, Artificial Sequence
  Description of Artificial Sequence:  Enzymatic Nucleic Acid
ccucaauccugaugaggccguuaggccgaaaacugguc

SEQ ID NO: 10180 - RNA, 38 nt, Artificial Sequence
  Description of Artificial Sequence:  Enzymatic Nucleic Acid
agcuccuccugaugaggccguuaggccgaaaucaaacu

SEQ ID NO: 10181 - RNA, 38 nt, Artificial Sequence
  Description of Artificial Sequence:  Enzymatic Nucleic Acid
cauugggucugaugaggccguuaggccgaaaucagugc

SEQ ID NO: 10182 - RNA, 38 nt, Artificial Sequence
  Description of Artificial Sequence:  Enzymatic Nucleic Acid
ggguacgucugaugaggccguuaggccgaaaugcauug

SEQ ID NO: 10183 - RNA, 38 nt, Artificial Sequence
  Description of Artificial Sequence:  Enzymatic Nucleic Acid
caguggggcugaugaggccguuaggccgaaacgugaug

SEQ ID NO: 10184 - RNA, 38 nt, Artificial Sequence
  Description of Artificial Sequence:  Enzymatic Nucleic Acid
cuggggcucugaugaggccguuaggccgaaacgggcuu

SEQ ID NO: 10185 - RNA, 38 nt, Artificial Sequence
  Description of Artificial Sequence:  Enzymatic Nucleic Acid
ccuggggccugaugaggccguuaggccgaaaacgggcu

SEQ ID NO: 10186 - RNA, 38 nt, Artificial Sequence
  Description of Artificial Sequence:  Enzymatic Nucleic Acid
cagccagucugaugaggccguuaggccgaaauccccug

SEQ ID NO: 10187 - RNA, 38 nt, Artificial Sequence
  Description of Artificial Sequence:  Enzymatic Nucleic Acid
acucccgacugaugaggccguuaggccgaaauguugcu

SEQ ID NO: 10188 - RNA, 38 nt, Artificial Sequence
  Description of Artificial Sequence:  Enzymatic Nucleic Acid
ggacuccccugaugaggccguuaggccgaaagauguug

SEQ ID NO: 10189 - RNA, 38 nt, Artificial Sequence
  Description of Artificial Sequence:  Enzymatic Nucleic Acid
ugcuagagcugaugaggccguuaggccgaaacucccga

SEQ ID NO: 10190 - RNA, 38 nt, Artificial Sequence
  Description of Artificial Sequence:  Enzymatic Nucleic Acid
gccugcuacugaugaggccguuaggccgaaaggacucc

SEQ ID NO: 10191 - RNA, 38 nt, Artificial Sequence
  Description of Artificial Sequence:  Enzymatic Nucleic Acid
aggccugccugaugaggccguuaggccgaaagaggacu

SEQ ID NO: 10192 - RNA, 38 nt, Artificial Sequence
  Description of Artificial Sequence:  Enzymatic Nucleic Acid
acaugucucugaugaggccguuaggccgaaaggccugc

SEQ ID NO: 10193 - RNA, 38 nt, Artificial Sequence
  Description of Artificial Sequence:  Enzymatic Nucleic Acid
gcgucucacugaugaggccguuaggccgaaauucuuuc

SEQ ID NO: 10194 - RNA, 38 nt, Artificial Sequence
  Description of Artificial Sequence:  Enzymatic Nucleic Acid
ugcgucuccugaugaggccguuaggccgaaaauucuuu

SEQ ID NO: 10195 - RNA, 38 nt, Artificial Sequence
  Description of Artificial Sequence:  Enzymatic Nucleic Acid
gcauugcucugaugaggccguuaggccgaaagccccgu

SEQ ID NO: 10196 - RNA, 38 nt, Artificial Sequence
  Description of Artificial Sequence:  Enzymatic Nucleic Acid
gccacugacugaugaggccguuaggccgaaauggcauu

SEQ ID NO: 10197 - RNA, 38 nt, Artificial Sequence
  Description of Artificial Sequence:  Enzymatic Nucleic Acid
agccacugcugaugaggccguuaggccgaaaauggcau

SEQ ID NO: 10198 - RNA, 38 nt, Artificial Sequence
  Description of Artificial Sequence:  Enzymatic Nucleic Acid
aagccacucugaugaggccguuaggccgaaaaauggca

SEQ ID NO: 10199 - RNA, 38 nt, Artificial Sequence
  Description of Artificial Sequence:  Enzymatic Nucleic Acid
gagcugggcugaugaggccguuaggccgaaagccacug

SEQ ID NO: 10200 - RNA, 38 nt, Artificial Sequence
  Description of Artificial Sequence:  Enzymatic Nucleic Acid
agagcuggcugaugaggccguuaggccgaaaagccacu

SEQ ID NO: 10201 - RNA, 38 nt, Artificial Sequence
  Description of Artificial Sequence:  Enzymatic Nucleic Acid
aagggucacugaugaggccguuaggccgaaagcuggga

SEQ ID NO: 10202 - RNA, 38 nt, Artificial Sequence
  Description of Artificial Sequence:  Enzymatic Nucleic Acid
aaauguagcugaugaggccguuaggccgaaagggucag

SEQ ID NO: 10203 - RNA, 38 nt, Artificial Sequence
  Description of Artificial Sequence:  Enzymatic Nucleic Acid
caaauguacugaugaggccguuaggccgaaaaggguca

SEQ ID NO: 10204 - RNA, 38 nt, Artificial Sequence
  Description of Artificial Sequence:  Enzymatic Nucleic Acid
cucaaaugcugaugaggccguuaggccgaaagaagggu

SEQ ID NO: 10205 - RNA, 38 nt, Artificial Sequence
  Description of Artificial Sequence:  Enzymatic Nucleic Acid
ggcccucacugaugaggccguuaggccgaaauguagaa

SEQ ID NO: 10206 - RNA, 38 nt, Artificial Sequence
  Description of Artificial Sequence:  Enzymatic Nucleic Acid
gggcccuccugaugaggccguuaggccgaaaauguaga

SEQ ID NO: 10207 - RNA, 38 nt, Artificial Sequence
  Description of Artificial Sequence:  Enzymatic Nucleic Acid
auccagaacugaugaggccguuaggccgaaaugucccc

SEQ ID NO: 10208 - RNA, 38 nt, Artificial Sequence
  Description of Artificial Sequence:  Enzymatic Nucleic Acid
aauccagacugaugaggccguuaggccgaaaauguccc

SEQ ID NO: 10209 - RNA, 38 nt, Artificial Sequence
  Description of Artificial Sequence:  Enzymatic Nucleic Acid
gaauccagcugaugaggccguuaggccgaaaaaugucc

SEQ ID NO: 10210 - RNA, 38 nt, Artificial Sequence
  Description of Artificial Sequence:  Enzymatic Nucleic Acid
agaauccacugaugaggccguuaggccgaaaaaauguc

SEQ ID NO: 10211 - RNA, 38 nt, Artificial Sequence
  Description of Artificial Sequence:  Enzymatic Nucleic Acid
ccucccagcugaugaggccguuaggccgaaauccagaa

SEQ ID NO: 10212 - RNA, 38 nt, Artificial Sequence
  Description of Artificial Sequence:  Enzymatic Nucleic Acid
gccucccacugaugaggccguuaggccgaaaauccaga

SEQ ID NO: 10213 - RNA, 38 nt, Artificial Sequence
  Description of Artificial Sequence:  Enzymatic Nucleic Acid
aaaaaagacugaugaggccguuaggccgaaauuugucc

SEQ ID NO: 10214 - RNA, 38 nt, Artificial Sequence
  Description of Artificial Sequence:  Enzymatic Nucleic Acid
ccaaaaaacugaugaggccguuaggccgaaauauuugu

SEQ ID NO: 10215 - RNA, 38 nt, Artificial Sequence
  Description of Artificial Sequence:  Enzymatic Nucleic Acid
uuccaaaacugaugaggccguuaggccgaaagauauuu

SEQ ID NO: 10216 - RNA, 38 nt, Artificial Sequence
  Description of Artificial Sequence:  Enzymatic Nucleic Acid
guuccaaacugaugaggccguuaggccgaaaagauauu

SEQ ID NO: 10217 - RNA, 38 nt, Artificial Sequence
  Description of Artificial Sequence:  Enzymatic Nucleic Acid
aguuccaacugaugaggccguuaggccgaaaaagauau

SEQ ID NO: 10218 - RNA, 38 nt, Artificial Sequence
  Description of Artificial Sequence:  Enzymatic Nucleic Acid
uaguuccacugaugaggccguuaggccgaaaaaagaua

SEQ ID NO: 10219 - RNA, 38 nt, Artificial Sequence
  Description of Artificial Sequence:  Enzymatic Nucleic Acid
uuaguucccugaugaggccguuaggccgaaaaaaagau

SEQ ID NO: 10220 - RNA, 38 nt, Artificial Sequence
  Description of Artificial Sequence:  Enzymatic Nucleic Acid
auuugcuucugaugaggccguuaggccgaaaguuccaa

SEQ ID NO: 10221 - RNA, 38 nt, Artificial Sequence
  Description of Artificial Sequence:  Enzymatic Nucleic Acid
aggucuaacugaugaggccguuaggccgaaauuugcuu

SEQ ID NO: 10222 - RNA, 38 nt, Artificial Sequence
  Description of Artificial Sequence:  Enzymatic Nucleic Acid
aaggucuacugaugaggccguuaggccgaaaauuugcu

SEQ ID NO: 10223 - RNA, 38 nt, Artificial Sequence
  Description of Artificial Sequence:  Enzymatic Nucleic Acid
aaaggucucugaugaggccguuaggccgaaaaauuugc

SEQ ID NO: 10224 - RNA, 38 nt, Artificial Sequence
  Description of Artificial Sequence:  Enzymatic Nucleic Acid
uaaagguccugaugaggccguuaggccgaaaaaauuug

SEQ ID NO: 10225 - RNA, 38 nt, Artificial Sequence
  Description of Artificial Sequence:  Enzymatic Nucleic Acid
cauagguacugaugaggccguuaggccgaaaggucuaa

SEQ ID NO: 10226 - RNA, 38 nt, Artificial Sequence
  Description of Artificial Sequence:  Enzymatic Nucleic Acid
ccauaggucugaugaggccguuaggccgaaaaggucua

SEQ ID NO: 10227 - RNA, 38 nt, Artificial Sequence
  Description of Artificial Sequence:  Enzymatic Nucleic Acid
uccauaggcugaugaggccguuaggccgaaaaaggucu

SEQ ID NO: 10228 - RNA, 38 nt, Artificial Sequence
  Description of Artificial Sequence:  Enzymatic Nucleic Acid
cacuuccacugaugaggccguuaggccgaaagguaaag

SEQ ID NO: 10229 - RNA, 38 nt, Artificial Sequence
  Description of Artificial Sequence:  Enzymatic Nucleic Acid
ggacauagcugaugaggccguuaggccgaaaccacuuc

SEQ ID NO: 10230 - RNA, 38 nt, Artificial Sequence
  Description of Artificial Sequence:  Enzymatic Nucleic Acid
uggacauacugaugaggccguuaggccgaaaaccacuu

SEQ ID NO: 10231 - RNA, 38 nt, Artificial Sequence
  Description of Artificial Sequence:  Enzymatic Nucleic Acid
aauggacacugaugaggccguuaggccgaaagaaccac

SEQ ID NO: 10232 - RNA, 38 nt, Artificial Sequence
  Description of Artificial Sequence:  Enzymatic Nucleic Acid
ugagaaugcugaugaggccguuaggccgaaacauagaa

SEQ ID NO: 10233 - RNA, 38 nt, Artificial Sequence
  Description of Artificial Sequence:  Enzymatic Nucleic Acid
cgaaugagcugaugaggccguuaggccgaaauggacau

SEQ ID NO: 10234 - RNA, 38 nt, Artificial Sequence
  Description of Artificial Sequence:  Enzymatic Nucleic Acid
acgaaugacugaugaggccguuaggccgaaaauggaca

SEQ ID NO: 10235 - RNA, 38 nt, Artificial Sequence
  Description of Artificial Sequence:  Enzymatic Nucleic Acid
ccacgaaucugaugaggccguuaggccgaaagaaugga

SEQ ID NO: 10236 - RNA, 38 nt, Artificial Sequence
  Description of Artificial Sequence:  Enzymatic Nucleic Acid
augccacgcugaugaggccguuaggccgaaaugagaau

SEQ ID NO: 10237 - RNA, 38 nt, Artificial Sequence
  Description of Artificial Sequence:  Enzymatic Nucleic Acid
caugccaccugaugaggccguuaggccgaaaaugagaa

SEQ ID NO: 10238 - RNA, 38 nt, Artificial Sequence
  Description of Artificial Sequence:  Enzymatic Nucleic Acid
caaaucaacugaugaggccguuaggccgaaacaugcca

SEQ ID NO: 10239 - RNA, 38 nt, Artificial Sequence
  Description of Artificial Sequence:  Enzymatic Nucleic Acid
acaaaucacugaugaggccguuaggccgaaaacaugcc

SEQ ID NO: 10240 - RNA, 38 nt, Artificial Sequence
  Description of Artificial Sequence:  Enzymatic Nucleic Acid
uacaaauccugaugaggccguuaggccgaaaaacaugc

SEQ ID NO: 10241 - RNA, 38 nt, Artificial Sequence
  Description of Artificial Sequence:  Enzymatic Nucleic Acid
gugcuacacugaugaggccguuaggccgaaaucaaaac

SEQ ID NO: 10242 - RNA, 38 nt, Artificial Sequence
  Description of Artificial Sequence:  Enzymatic Nucleic Acid
agugcuaccugaugaggccguuaggccgaaaaucaaaa

SEQ ID NO: 10243 - RNA, 38 nt, Artificial Sequence
  Description of Artificial Sequence:  Enzymatic Nucleic Acid
cucagugccugaugaggccguuaggccgaaacaaauca

SEQ ID NO: 10244 - RNA, 38 nt, Artificial Sequence
  Description of Artificial Sequence:  Enzymatic Nucleic Acid
ucagaguucugaugaggccguuaggccgaaagugccac

SEQ ID NO: 10245 - RNA, 38 nt, Artificial Sequence
  Description of Artificial Sequence:  Enzymatic Nucleic Acid
ugggcucacugaugaggccguuaggccgaaaguugagu

SEQ ID NO: 10246 - RNA, 38 nt, Artificial Sequence
  Description of Artificial Sequence:  Enzymatic Nucleic Acid
gccaaaagcugaugaggccguuaggccgaaaugggcuc

SEQ ID NO: 10247 - RNA, 38 nt, Artificial Sequence
  Description of Artificial Sequence:  Enzymatic Nucleic Acid
ggagccaacugaugaggccguuaggccgaaaguauggg

SEQ ID NO: 10248 - RNA, 38 nt, Artificial Sequence
  Description of Artificial Sequence:  Enzymatic Nucleic Acid
aggagccacugaugaggccguuaggccgaaaaguaugg

SEQ ID NO: 10249 - RNA, 38 nt, Artificial Sequence
  Description of Artificial Sequence:  Enzymatic Nucleic Acid
gaggagcccugaugaggccguuaggccgaaaaaguaug

SEQ ID NO: 10250 - RNA, 38 nt, Artificial Sequence
  Description of Artificial Sequence:  Enzymatic Nucleic Acid
uacuagagcugaugaggccguuaggccgaaagccaaaa

SEQ ID NO: 10251 - RNA, 38 nt, Artificial Sequence
  Description of Artificial Sequence:  Enzymatic Nucleic Acid
ucuuacuacugaugaggccguuaggccgaaaggagcca

SEQ ID NO: 10252 - RNA, 38 nt, Artificial Sequence
  Description of Artificial Sequence:  Enzymatic Nucleic Acid
caucuuaccugaugaggccguuaggccgaaagaggagc

SEQ ID NO: 10253 - RNA, 38 nt, Artificial Sequence
  Description of Artificial Sequence:  Enzymatic Nucleic Acid
gugcaucucugaugaggccguuaggccgaaacuagagg

SEQ ID NO: 10254 - RNA, 38 nt, Artificial Sequence
  Description of Artificial Sequence:  Enzymatic Nucleic Acid
cucuggcucugaugaggccguuaggccgaaaguuuuca

SEQ ID NO: 10255 - RNA, 38 nt, Artificial Sequence
  Description of Artificial Sequence:  Enzymatic Nucleic Acid
acucuggccugaugaggccguuaggccgaaaaguuuuc

SEQ ID NO: 10256 - RNA, 38 nt, Artificial Sequence
  Description of Artificial Sequence:  Enzymatic Nucleic Acid
gacaaccucugaugaggccguuaggccgaaacucuggc

SEQ ID NO: 10257 - RNA, 38 nt, Artificial Sequence
  Description of Artificial Sequence:  Enzymatic Nucleic Acid
agacaacccugaugaggccguuaggccgaaaacucugg

SEQ ID NO: 10258 - RNA, 38 nt, Artificial Sequence
  Description of Artificial Sequence:  Enzymatic Nucleic Acid
cuggagaccugaugaggccguuaggccgaaaccuaacu

SEQ ID NO: 10259 - RNA, 38 nt, Artificial Sequence
  Description of Artificial Sequence:  Enzymatic Nucleic Acid
ggccuggacugaugaggccguuaggccgaaacaaccua

SEQ ID NO: 10260 - RNA, 38 nt, Artificial Sequence
  Description of Artificial Sequence:  Enzymatic Nucleic Acid
auggccugcugaugaggccguuaggccgaaagacaacc

SEQ ID NO: 10261 - RNA, 38 nt, Artificial Sequence
  Description of Artificial Sequence:  Enzymatic Nucleic Acid
uucagugucugaugaggccguuaggccgaaaggccauc

SEQ ID NO: 10262 - RNA, 38 nt, Artificial Sequence
  Description of Artificial Sequence:  Enzymatic Nucleic Acid
uuucagugcugaugaggccguuaggccgaaaaggccau

SEQ ID NO: 10263 - RNA, 38 nt, Artificial Sequence
  Description of Artificial Sequence:  Enzymatic Nucleic Acid
uagaaugucugaugaggccguuaggccgaaacauuuuc

SEQ ID NO: 10264 - RNA, 38 nt, Artificial Sequence
  Description of Artificial Sequence:  Enzymatic Nucleic Acid
caaaauagcugaugaggccguuaggccgaaaugugaca

SEQ ID NO: 10265 - RNA, 38 nt, Artificial Sequence
  Description of Artificial Sequence:  Enzymatic Nucleic Acid
ccaaaauacugaugaggccguuaggccgaaaaugugac

SEQ ID NO: 10266 - RNA, 38 nt, Artificial Sequence
  Description of Artificial Sequence:  Enzymatic Nucleic Acid
acccaaaacugaugaggccguuaggccgaaagaaugug

SEQ ID NO: 10267 - RNA, 38 nt, Artificial Sequence
  Description of Artificial Sequence:  Enzymatic Nucleic Acid
auacccaacugaugaggccguuaggccgaaauagaaug

SEQ ID NO: 10268 - RNA, 38 nt, Artificial Sequence
  Description of Artificial Sequence:  Enzymatic Nucleic Acid
aauacccacugaugaggccguuaggccgaaaauagaau

SEQ ID NO: 10269 - RNA, 38 nt, Artificial Sequence
  Description of Artificial Sequence:  Enzymatic Nucleic Acid
uaauaccccugaugaggccguuaggccgaaaaauagaa

SEQ ID NO: 10270 - RNA, 38 nt, Artificial Sequence
  Description of Artificial Sequence:  Enzymatic Nucleic Acid
uauauuaacugaugaggccguuaggccgaaacccaaaa

SEQ ID NO: 10271 - RNA, 38 nt, Artificial Sequence
  Description of Artificial Sequence:  Enzymatic Nucleic Acid
uauauauucugaugaggccguuaggccgaaauacccaa

SEQ ID NO: 10272 - RNA, 38 nt, Artificial Sequence
  Description of Artificial Sequence:  Enzymatic Nucleic Acid
cuauauaucugaugaggccguuaggccgaaaauaccca

SEQ ID NO: 10273 - RNA, 38 nt, Artificial Sequence
  Description of Artificial Sequence:  Enzymatic Nucleic Acid
ggacuauacugaugaggccguuaggccgaaauuaauac

SEQ ID NO: 10274 - RNA, 38 nt, Artificial Sequence
  Description of Artificial Sequence:  Enzymatic Nucleic Acid
cuggacuacugaugaggccguuaggccgaaauauuaau

SEQ ID NO: 10275 - RNA, 38 nt, Artificial Sequence
  Description of Artificial Sequence:  Enzymatic Nucleic Acid
gucuggaccugaugaggccguuaggccgaaauauauua

SEQ ID NO: 10276 - RNA, 38 nt, Artificial Sequence
  Description of Artificial Sequence:  Enzymatic Nucleic Acid
agugucugcugaugaggccguuaggccgaaacuauaua

SEQ ID NO: 10277 - RNA, 38 nt, Artificial Sequence
  Description of Artificial Sequence:  Enzymatic Nucleic Acid
auugaguucugaugaggccguuaggccgaaagugucug

SEQ ID NO: 10278 - RNA, 38 nt, Artificial Sequence
  Description of Artificial Sequence:  Enzymatic Nucleic Acid
aauugagucugaugaggccguuaggccgaaaagugucu

SEQ ID NO: 10279 - RNA, 38 nt, Artificial Sequence
  Description of Artificial Sequence:  Enzymatic Nucleic Acid
aagaaauucugaugaggccguuaggccgaaaguuaagu

SEQ ID NO: 10280 - RNA, 38 nt, Artificial Sequence
  Description of Artificial Sequence:  Enzymatic Nucleic Acid
uaccaagacugaugaggccguuaggccgaaauugaguu

SEQ ID NO: 10281 - RNA, 38 nt, Artificial Sequence
  Description of Artificial Sequence:  Enzymatic Nucleic Acid
auaccaagcugaugaggccguuaggccgaaaauugagu

SEQ ID NO: 10282 - RNA, 38 nt, Artificial Sequence
  Description of Artificial Sequence:  Enzymatic Nucleic Acid
aauaccaacugaugaggccguuaggccgaaaaauugag

SEQ ID NO: 10283 - RNA, 38 nt, Artificial Sequence
  Description of Artificial Sequence:  Enzymatic Nucleic Acid
auaauacccugaugaggccguuaggccgaaagaaauug

SEQ ID NO: 10284 - RNA, 38 nt, Artificial Sequence
  Description of Artificial Sequence:  Enzymatic Nucleic Acid
cagaauaacugaugaggccguuaggccgaaaccaagaa

SEQ ID NO: 10285 - RNA, 38 nt, Artificial Sequence
  Description of Artificial Sequence:  Enzymatic Nucleic Acid
aacagaaucugaugaggccguuaggccgaaauaccaag

SEQ ID NO: 10286 - RNA, 38 nt, Artificial Sequence
  Description of Artificial Sequence:  Enzymatic Nucleic Acid
aaacagaacugaugaggccguuaggccgaaaauaccaa

SEQ ID NO: 10287 - RNA, 38 nt, Artificial Sequence
  Description of Artificial Sequence:  Enzymatic Nucleic Acid
caaaacagcugaugaggccguuaggccgaaauaauacc

SEQ ID NO: 10288 - RNA, 38 nt, Artificial Sequence
  Description of Artificial Sequence:  Enzymatic Nucleic Acid
gcaaaacacugaugaggccguuaggccgaaaauaauac

SEQ ID NO: 10289 - RNA, 38 nt, Artificial Sequence
  Description of Artificial Sequence:  Enzymatic Nucleic Acid
cugugcaacugaugaggccguuaggccgaaacagaaua

SEQ ID NO: 10290 - RNA, 38 nt, Artificial Sequence
  Description of Artificial Sequence:  Enzymatic Nucleic Acid
acugugcacugaugaggccguuaggccgaaaacagaau

SEQ ID NO: 10291 - RNA, 38 nt, Artificial Sequence
  Description of Artificial Sequence:  Enzymatic Nucleic Acid
aacugugccugaugaggccguuaggccgaaaaacagaa

SEQ ID NO: 10292 - RNA, 38 nt, Artificial Sequence
  Description of Artificial Sequence:  Enzymatic Nucleic Acid
ucacaacucugaugaggccguuaggccgaaacugugca

SEQ ID NO: 10293 - RNA, 38 nt, Artificial Sequence
  Description of Artificial Sequence:  Enzymatic Nucleic Acid
uucacaaccugaugaggccguuaggccgaaaacugugc

SEQ ID NO: 10294 - RNA, 38 nt, Artificial Sequence
  Description of Artificial Sequence:  Enzymatic Nucleic Acid
ucuuucaccugaugaggccguuaggccgaaacuaacug

SEQ ID NO: 10295 - RNA, 38 nt, Artificial Sequence
  Description of Artificial Sequence:  Enzymatic Nucleic Acid
cuccucagcugaugaggccguuaggccgaaacugcauu

SEQ ID NO: 10296 - RNA, 38 nt, Artificial Sequence
  Description of Artificial Sequence:  Enzymatic Nucleic Acid
auggagaacugaugaggccguuaggccgaaacucuccu

SEQ ID NO: 10297 - RNA, 38 nt, Artificial Sequence
  Description of Artificial Sequence:  Enzymatic Nucleic Acid
uauggagacugaugaggccguuaggccgaaaacucucc

SEQ ID NO: 10298 - RNA, 38 nt, Artificial Sequence
  Description of Artificial Sequence:  Enzymatic Nucleic Acid
auauggagcugaugaggccguuaggccgaaaaacucuc

SEQ ID NO: 10299 - RNA, 38 nt, Artificial Sequence
  Description of Artificial Sequence:  Enzymatic Nucleic Acid
gauauggacugaugaggccguuaggccgaaaaaacucu

SEQ ID NO: 10300 - RNA, 38 nt, Artificial Sequence
  Description of Artificial Sequence:  Enzymatic Nucleic Acid
uugauaugcugaugaggccguuaggccgaaagaaaacu

SEQ ID NO: 10301 - RNA, 38 nt, Artificial Sequence
  Description of Artificial Sequence:  Enzymatic Nucleic Acid
cguuuugacugaugaggccguuaggccgaaauggagaa

SEQ ID NO: 10302 - RNA, 38 nt, Artificial Sequence
  Description of Artificial Sequence:  Enzymatic Nucleic Acid
cucguuuucugaugaggccguuaggccgaaauauggag

SEQ ID NO: 10303 - RNA, 38 nt, Artificial Sequence
  Description of Artificial Sequence:  Enzymatic Nucleic Acid
accuuauucugaugaggccguuaggccgaaaccuuuuu

SEQ ID NO: 10304 - RNA, 38 nt, Artificial Sequence
  Description of Artificial Sequence:  Enzymatic Nucleic Acid
cuugaccucugaugaggccguuaggccgaaauugaccu

SEQ ID NO: 10305 - RNA, 38 nt, Artificial Sequence
  Description of Artificial Sequence:  Enzymatic Nucleic Acid
cuucccuucugaugaggccguuaggccgaaaccuuauu

SEQ ID NO: 10306 - RNA, 38 nt, Artificial Sequence
  Description of Artificial Sequence:  Enzymatic Nucleic Acid
gguauagacugaugaggccguuaggccgaaacgggguc

SEQ ID NO: 10307 - RNA, 38 nt, Artificial Sequence
  Description of Artificial Sequence:  Enzymatic Nucleic Acid
uugguauacugaugaggccguuaggccgaaagacgggg

SEQ ID NO: 10308 - RNA, 38 nt, Artificial Sequence
  Description of Artificial Sequence:  Enzymatic Nucleic Acid
gguugguacugaugaggccguuaggccgaaagagacgg

SEQ ID NO: 10309 - RNA, 38 nt, Artificial Sequence
  Description of Artificial Sequence:  Enzymatic Nucleic Acid
uugguuggcugaugaggccguuaggccgaaauagagac

SEQ ID NO: 10310 - RNA, 38 nt, Artificial Sequence
  Description of Artificial Sequence:  Enzymatic Nucleic Acid
uguuggugcugaugaggccguuaggccgaaauugguuu

SEQ ID NO: 10311 - RNA, 38 nt, Artificial Sequence
  Description of Artificial Sequence:  Enzymatic Nucleic Acid
guguuggucugaugaggccguuaggccgaaaauugguu

SEQ ID NO: 10312 - RNA, 38 nt, Artificial Sequence
  Description of Artificial Sequence:  Enzymatic Nucleic Acid
uggguccccugaugaggccguuaggccgaaacuguguu

SEQ ID NO: 10313 - RNA, 38 nt, Artificial Sequence
  Description of Artificial Sequence:  Enzymatic Nucleic Acid
acgugacucugaugaggccguuaggccgaaacuuccug

SEQ ID NO: 10314 - RNA, 38 nt, Artificial Sequence
  Description of Artificial Sequence:  Enzymatic Nucleic Acid
ggaaacgucugaugaggccguuaggccgaaacugacuu

SEQ ID NO: 10315 - RNA, 38 nt, Artificial Sequence
  Description of Artificial Sequence:  Enzymatic Nucleic Acid
gaaaaggacugaugaggccguuaggccgaaacgugacu

SEQ ID NO: 10316 - RNA, 38 nt, Artificial Sequence
  Description of Artificial Sequence:  Enzymatic Nucleic Acid
ugaaaaggcugaugaggccguuaggccgaaaacgugac

SEQ ID NO: 10317 - RNA, 38 nt, Artificial Sequence
  Description of Artificial Sequence:  Enzymatic Nucleic Acid
augaaaagcugaugaggccguuaggccgaaaaacguga

SEQ ID NO: 10318 - RNA, 38 nt, Artificial Sequence
  Description of Artificial Sequence:  Enzymatic Nucleic Acid
uaaaugaacugaugaggccguuaggccgaaaggaaacg

SEQ ID NO: 10319 - RNA, 38 nt, Artificial Sequence
  Description of Artificial Sequence:  Enzymatic Nucleic Acid
uuaaaugacugaugaggccguuaggccgaaaaggaaac

SEQ ID NO: 10320 - RNA, 38 nt, Artificial Sequence
  Description of Artificial Sequence:  Enzymatic Nucleic Acid
auuaaaugcugaugaggccguuaggccgaaaaaggaaa

SEQ ID NO: 10321 - RNA, 38 nt, Artificial Sequence
  Description of Artificial Sequence:  Enzymatic Nucleic Acid
cauuaaaucugaugaggccguuaggccgaaaaaaggaa

SEQ ID NO: 10322 - RNA, 38 nt, Artificial Sequence
  Description of Artificial Sequence:  Enzymatic Nucleic Acid
ccccauuacugaugaggccguuaggccgaaaugaaaag

SEQ ID NO: 10323 - RNA, 38 nt, Artificial Sequence
  Description of Artificial Sequence:  Enzymatic Nucleic Acid
uccccauucugaugaggccguuaggccgaaaaugaaaa

SEQ ID NO: 10324 - RNA, 38 nt, Artificial Sequence
  Description of Artificial Sequence:  Enzymatic Nucleic Acid
auccccaucugaugaggccguuaggccgaaaaaugaaa

SEQ ID NO: 10325 - RNA, 38 nt, Artificial Sequence
  Description of Artificial Sequence:  Enzymatic Nucleic Acid
gauaguggcugaugaggccguuaggccgaaauccccau

SEQ ID NO: 10326 - RNA, 38 nt, Artificial Sequence
  Description of Artificial Sequence:  Enzymatic Nucleic Acid
agauagugcugaugaggccguuaggccgaaaaucccca

SEQ ID NO: 10327 - RNA, 38 nt, Artificial Sequence
  Description of Artificial Sequence:  Enzymatic Nucleic Acid
gugugagacugaugaggccguuaggccgaaaguggaau

SEQ ID NO: 10328 - RNA, 38 nt, Artificial Sequence
  Description of Artificial Sequence:  Enzymatic Nucleic Acid
uagugugacugaugaggccguuaggccgaaauagugga

SEQ ID NO: 10329 - RNA, 38 nt, Artificial Sequence
  Description of Artificial Sequence:  Enzymatic Nucleic Acid
auuagugucugaugaggccguuaggccgaaagauagug

SEQ ID NO: 10330 - RNA, 38 nt, Artificial Sequence
  Description of Artificial Sequence:  Enzymatic Nucleic Acid
uuucagaucugaugaggccguuaggccgaaagugugag

SEQ ID NO: 10331 - RNA, 38 nt, Artificial Sequence
  Description of Artificial Sequence:  Enzymatic Nucleic Acid
uccuuucacugaugaggccguuaggccgaaauuagugu

SEQ ID NO: 10332 - RNA, 38 nt, Artificial Sequence
  Description of Artificial Sequence:  Enzymatic Nucleic Acid
cgccagcucugaugaggccguuaggccgaaaugcucuu

SEQ ID NO: 10333 - RNA, 38 nt, Artificial Sequence
  Description of Artificial Sequence:  Enzymatic Nucleic Acid
gcgccagccugaugaggccguuaggccgaaaaugcucu

SEQ ID NO: 10334 - RNA, 38 nt, Artificial Sequence
  Description of Artificial Sequence:  Enzymatic Nucleic Acid
gugcuuaacugaugaggccguuaggccgaaaugcgcca

SEQ ID NO: 10335 - RNA, 38 nt, Artificial Sequence
  Description of Artificial Sequence:  Enzymatic Nucleic Acid
aagugcuucugaugaggccguuaggccgaaauaugcgc

SEQ ID NO: 10336 - RNA, 38 nt, Artificial Sequence
  Description of Artificial Sequence:  Enzymatic Nucleic Acid
aaagugcucugaugaggccguuaggccgaaaauaugcg

SEQ ID NO: 10337 - RNA, 38 nt, Artificial Sequence
  Description of Artificial Sequence:  Enzymatic Nucleic Acid
ggagcuuacugaugaggccguuaggccgaaagugcuua

SEQ ID NO: 10338 - RNA, 38 nt, Artificial Sequence
  Description of Artificial Sequence:  Enzymatic Nucleic Acid
aggagcuucugaugaggccguuaggccgaaaagugcuu

SEQ ID NO: 10339 - RNA, 38 nt, Artificial Sequence
  Description of Artificial Sequence:  Enzymatic Nucleic Acid
aaggagcucugaugaggccguuaggccgaaaaagugcu

SEQ ID NO: 10340 - RNA, 38 nt, Artificial Sequence
  Description of Artificial Sequence:  Enzymatic Nucleic Acid
uacucaagcugaugaggccguuaggccgaaagcuuaaa

SEQ ID NO: 10341 - RNA, 38 nt, Artificial Sequence
  Description of Artificial Sequence:  Enzymatic Nucleic Acid
uuuuacuccugaugaggccguuaggccgaaaggagcuu

SEQ ID NO: 10342 - RNA, 38 nt, Artificial Sequence
  Description of Artificial Sequence:  Enzymatic Nucleic Acid
caccuuuucugaugaggccguuaggccgaaacucaagg

SEQ ID NO: 10343 - RNA, 38 nt, Artificial Sequence
  Description of Artificial Sequence:  Enzymatic Nucleic Acid
aaauuacacugaugaggccguuaggccgaaaccaccuu

SEQ ID NO: 10344 - RNA, 38 nt, Artificial Sequence
  Description of Artificial Sequence:  Enzymatic Nucleic Acid
gcauaaaucugaugaggccguuaggccgaaacauacca

SEQ ID NO: 10345 - RNA, 38 nt, Artificial Sequence
  Description of Artificial Sequence:  Enzymatic Nucleic Acid
cuugcauacugaugaggccguuaggccgaaauuacaua

SEQ ID NO: 10346 - RNA, 38 nt, Artificial Sequence
  Description of Artificial Sequence:  Enzymatic Nucleic Acid
ccuugcaucugaugaggccguuaggccgaaaauuacau

SEQ ID NO: 10347 - RNA, 38 nt, Artificial Sequence
  Description of Artificial Sequence:  Enzymatic Nucleic Acid
accuugcacugaugaggccguuaggccgaaaaauuaca

SEQ ID NO: 10348 - RNA, 38 nt, Artificial Sequence
  Description of Artificial Sequence:  Enzymatic Nucleic Acid
uggagaaacugaugaggccguuaggccgaaaccuugca

SEQ ID NO: 10349 - RNA, 38 nt, Artificial Sequence
  Description of Artificial Sequence:  Enzymatic Nucleic Acid
acuggagacugaugaggccguuaggccgaaauaccuug

SEQ ID NO: 10350 - RNA, 38 nt, Artificial Sequence
  Description of Artificial Sequence:  Enzymatic Nucleic Acid
aacuggagcugaugaggccguuaggccgaaaauaccuu

SEQ ID NO: 10351 - RNA, 38 nt, Artificial Sequence
  Description of Artificial Sequence:  Enzymatic Nucleic Acid
caacuggacugaugaggccguuaggccgaaaaauaccu

SEQ ID NO: 10352 - RNA, 38 nt, Artificial Sequence
  Description of Artificial Sequence:  Enzymatic Nucleic Acid
cccaacugcugaugaggccguuaggccgaaagaaauac

SEQ ID NO: 10353 - RNA, 38 nt, Artificial Sequence
  Description of Artificial Sequence:  Enzymatic Nucleic Acid
ugaguccccugaugaggccguuaggccgaaacuggaga

SEQ ID NO: 10354 - RNA, 38 nt, Artificial Sequence
  Description of Artificial Sequence:  Enzymatic Nucleic Acid
aauauccucugaugaggccguuaggccgaaagucccaa

SEQ ID NO: 10355 - RNA, 38 nt, Artificial Sequence
  Description of Artificial Sequence:  Enzymatic Nucleic Acid
uuaacuaacugaugaggccguuaggccgaaauccugag

SEQ ID NO: 10356 - RNA, 38 nt, Artificial Sequence
  Description of Artificial Sequence:  Enzymatic Nucleic Acid
cauuaacucugaugaggccguuaggccgaaauauccug

SEQ ID NO: 10357 - RNA, 38 nt, Artificial Sequence
  Description of Artificial Sequence:  Enzymatic Nucleic Acid
ucauuaaccugaugaggccguuaggccgaaaauauccu

SEQ ID NO: 10358 - RNA, 38 nt, Artificial Sequence
  Description of Artificial Sequence:  Enzymatic Nucleic Acid
ggcucauucugaugaggccguuaggccgaaacuaauau

SEQ ID NO: 10359 - RNA, 38 nt, Artificial Sequence
  Description of Artificial Sequence:  Enzymatic Nucleic Acid
uggcucaucugaugaggccguuaggccgaaaacuaaua

SEQ ID NO: 10360 - RNA, 38 nt, Artificial Sequence
  Description of Artificial Sequence:  Enzymatic Nucleic Acid
cuucuagucugaugaggccguuaggccgaaauggcuca

SEQ ID NO: 10361 - RNA, 38 nt, Artificial Sequence
  Description of Artificial Sequence:  Enzymatic Nucleic Acid
uuuucuuccugaugaggccguuaggccgaaagugaugg

SEQ ID NO: 10362 - RNA, 38 nt, Artificial Sequence
  Description of Artificial Sequence:  Enzymatic Nucleic Acid
caguugaacugaugaggccguuaggccgaaaugggcuu

SEQ ID NO: 10363 - RNA, 38 nt, Artificial Sequence
  Description of Artificial Sequence:  Enzymatic Nucleic Acid
gcaguugacugaugaggccguuaggccgaaaaugggcu

SEQ ID NO: 10364 - RNA, 38 nt, Artificial Sequence
  Description of Artificial Sequence:  Enzymatic Nucleic Acid
agcaguugcugaugaggccguuaggccgaaaaaugggc

SEQ ID NO: 10365 - RNA, 38 nt, Artificial Sequence
  Description of Artificial Sequence:  Enzymatic Nucleic Acid
aagcaguucugaugaggccguuaggccgaaaaaauggg

SEQ ID NO: 10366 - RNA, 38 nt, Artificial Sequence
  Description of Artificial Sequence:  Enzymatic Nucleic Acid
aaguuucacugaugaggccguuaggccgaaagcaguug

SEQ ID NO: 10367 - RNA, 38 nt, Artificial Sequence
  Description of Artificial Sequence:  Enzymatic Nucleic Acid
caaguuuccugaugaggccguuaggccgaaaagcaguu

SEQ ID NO: 10368 - RNA, 38 nt, Artificial Sequence
  Description of Artificial Sequence:  Enzymatic Nucleic Acid
ccccaggccugaugaggccguuaggccgaaaguuucaa

SEQ ID NO: 10369 - RNA, 38 nt, Artificial Sequence
  Description of Artificial Sequence:  Enzymatic Nucleic Acid
caugcucacugaugaggccguuaggccgaaaccccagg

SEQ ID NO: 10370 - RNA, 38 nt, Artificial Sequence
  Description of Artificial Sequence:  Enzymatic Nucleic Acid
ugucuccccugaugaggccguuaggccgaaauucccau

SEQ ID NO: 10371 - RNA, 38 nt, Artificial Sequence
  Description of Artificial Sequence:  Enzymatic Nucleic Acid
cccuuucccugaugaggccguuaggccgaaacccuguc

SEQ ID NO: 10372 - RNA, 38 nt, Artificial Sequence
  Description of Artificial Sequence:  Enzymatic Nucleic Acid
cugaagagcugaugaggccguuaggccgaaaggcgccc

SEQ ID NO: 10373 - RNA, 38 nt, Artificial Sequence
  Description of Artificial Sequence:  Enzymatic Nucleic Acid
acccugaacugaugaggccguuaggccgaaaguaggcg

SEQ ID NO: 10374 - RNA, 38 nt, Artificial Sequence
  Description of Artificial Sequence:  Enzymatic Nucleic Acid
agacccugcugaugaggccguuaggccgaaagaguagg

SEQ ID NO: 10375 - RNA, 38 nt, Artificial Sequence
  Description of Artificial Sequence:  Enzymatic Nucleic Acid
uagacccucugaugaggccguuaggccgaaaagaguag

SEQ ID NO: 10376 - RNA, 38 nt, Artificial Sequence
  Description of Artificial Sequence:  Enzymatic Nucleic Acid
gaucuuuacugaugaggccguuaggccgaaacccugaa

SEQ ID NO: 10377 - RNA, 38 nt, Artificial Sequence
  Description of Artificial Sequence:  Enzymatic Nucleic Acid
uugaucuucugaugaggccguuaggccgaaagacccug

SEQ ID NO: 10378 - RNA, 38 nt, Artificial Sequence
  Description of Artificial Sequence:  Enzymatic Nucleic Acid
gcccacuucugaugaggccguuaggccgaaaucuuuag

SEQ ID NO: 10379 - RNA, 38 nt, Artificial Sequence
  Description of Artificial Sequence:  Enzymatic Nucleic Acid
agcgaucccugaugaggccguuaggccgaaaggcccac

SEQ ID NO: 10380 - RNA, 38 nt, Artificial Sequence
  Description of Artificial Sequence:  Enzymatic Nucleic Acid
agcuuagccugaugaggccguuaggccgaaauccaagg

SEQ ID NO: 10381 - RNA, 38 nt, Artificial Sequence
  Description of Artificial Sequence:  Enzymatic Nucleic Acid
agccagcucugaugaggccguuaggccgaaagcgaucc

SEQ ID NO: 10382 - RNA, 38 nt, Artificial Sequence
  Description of Artificial Sequence:  Enzymatic Nucleic Acid
aucaaacacugaugaggccguuaggccgaaagccagcu

SEQ ID NO: 10383 - RNA, 38 nt, Artificial Sequence
  Description of Artificial Sequence:  Enzymatic Nucleic Acid
uagcaucacugaugaggccguuaggccgaaacagagcc

SEQ ID NO: 10384 - RNA, 38 nt, Artificial Sequence
  Description of Artificial Sequence:  Enzymatic Nucleic Acid
auagcauccugaugaggccguuaggccgaaaacagagc

SEQ ID NO: 10385 - RNA, 38 nt, Artificial Sequence
  Description of Artificial Sequence:  Enzymatic Nucleic Acid
ugcauaaacugaugaggccguuaggccgaaagcaucaa

SEQ ID NO: 10386 - RNA, 38 nt, Artificial Sequence
  Description of Artificial Sequence:  Enzymatic Nucleic Acid
cuugcauacugaugaggccguuaggccgaaauagcauc

SEQ ID NO: 10387 - RNA, 38 nt, Artificial Sequence
  Description of Artificial Sequence:  Enzymatic Nucleic Acid
acuugcaucugaugaggccguuaggccgaaaauagcau

SEQ ID NO: 10388 - RNA, 38 nt, Artificial Sequence
  Description of Artificial Sequence:  Enzymatic Nucleic Acid
aacuugcacugaugaggccguuaggccgaaaaauagca

SEQ ID NO: 10389 - RNA, 38 nt, Artificial Sequence
  Description of Artificial Sequence:  Enzymatic Nucleic Acid
uagacccucugaugaggccguuaggccgaaacuugcau

SEQ ID NO: 10390 - RNA, 38 nt, Artificial Sequence
  Description of Artificial Sequence:  Enzymatic Nucleic Acid
auagaccccugaugaggccguuaggccgaaaacuugca

SEQ ID NO: 10391 - RNA, 38 nt, Artificial Sequence
  Description of Artificial Sequence:  Enzymatic Nucleic Acid
aauacauacugaugaggccguuaggccgaaacccuaac

SEQ ID NO: 10392 - RNA, 38 nt, Artificial Sequence
  Description of Artificial Sequence:  Enzymatic Nucleic Acid
uaaauacacugaugaggccguuaggccgaaagacccua

SEQ ID NO: 10393 - RNA, 38 nt, Artificial Sequence
  Description of Artificial Sequence:  Enzymatic Nucleic Acid
auccuaaacugaugaggccguuaggccgaaacauagac

SEQ ID NO: 10394 - RNA, 38 nt, Artificial Sequence
  Description of Artificial Sequence:  Enzymatic Nucleic Acid
gcauccuacugaugaggccguuaggccgaaauacauag

SEQ ID NO: 10395 - RNA, 38 nt, Artificial Sequence
  Description of Artificial Sequence:  Enzymatic Nucleic Acid
cgcauccucugaugaggccguuaggccgaaaauacaua

SEQ ID NO: 10396 - RNA, 38 nt, Artificial Sequence
  Description of Artificial Sequence:  Enzymatic Nucleic Acid
gcgcaucccugaugaggccguuaggccgaaaaauacau

SEQ ID NO: 10397 - RNA, 38 nt, Artificial Sequence
  Description of Artificial Sequence:  Enzymatic Nucleic Acid
cugaagagcugaugaggccguuaggccgaaaggcgcau

SEQ ID NO: 10398 - RNA, 38 nt, Artificial Sequence
  Description of Artificial Sequence:  Enzymatic Nucleic Acid
acauccuacugaugaggccguuaggccgaaauacauag

SEQ ID NO: 10399 - RNA, 38 nt, Artificial Sequence
  Description of Artificial Sequence:  Enzymatic Nucleic Acid
gacauccucugaugaggccguuaggccgaaaauacaua

SEQ ID NO: 10400 - RNA, 38 nt, Artificial Sequence
  Description of Artificial Sequence:  Enzymatic Nucleic Acid
agacaucccugaugaggccguuaggccgaaaaauacau

SEQ ID NO: 10401 - RNA, 38 nt, Artificial Sequence
  Description of Artificial Sequence:  Enzymatic Nucleic Acid
aaggugcacugaugaggccguuaggccgaaacauccua

SEQ ID NO: 10402 - RNA, 38 nt, Artificial Sequence
  Description of Artificial Sequence:  Enzymatic Nucleic Acid
ggcugcagcugaugaggccguuaggccgaaaggugcag

SEQ ID NO: 10403 - RNA, 38 nt, Artificial Sequence
  Description of Artificial Sequence:  Enzymatic Nucleic Acid
uggcugcacugaugaggccguuaggccgaaaaggugca

SEQ ID NO: 10404 - RNA, 38 nt, Artificial Sequence
  Description of Artificial Sequence:  Enzymatic Nucleic Acid
cagcuucucugaugaggccguuaggccgaaacuggcug

SEQ ID NO: 10405 - RNA, 38 nt, Artificial Sequence
  Description of Artificial Sequence:  Enzymatic Nucleic Acid
gaagcagccugaugaggccguuaggccgaaauccacug

SEQ ID NO: 10406 - RNA, 38 nt, Artificial Sequence
  Description of Artificial Sequence:  Enzymatic Nucleic Acid
uccccaagcugaugaggccguuaggccgaaagcagcaa

SEQ ID NO: 10407 - RNA, 38 nt, Artificial Sequence
  Description of Artificial Sequence:  Enzymatic Nucleic Acid
cuccccaacugaugaggccguuaggccgaaaagcagca

SEQ ID NO: 10408 - RNA, 38 nt, Artificial Sequence
  Description of Artificial Sequence:  Enzymatic Nucleic Acid
uucucccccugaugaggccguuaggccgaaagaagcag

SEQ ID NO: 10409 - RNA, 38 nt, Artificial Sequence
  Description of Artificial Sequence:  Enzymatic Nucleic Acid
aggaagcacugaugaggccguuaggccgaaacucuucu

SEQ ID NO: 10410 - RNA, 38 nt, Artificial Sequence
  Description of Artificial Sequence:  Enzymatic Nucleic Acid
auaaaaggcugaugaggccguuaggccgaaagcauacu

SEQ ID NO: 10411 - RNA, 38 nt, Artificial Sequence
  Description of Artificial Sequence:  Enzymatic Nucleic Acid
gauaaaagcugaugaggccguuaggccgaaaagcauac

SEQ ID NO: 10412 - RNA, 38 nt, Artificial Sequence
  Description of Artificial Sequence:  Enzymatic Nucleic Acid
auggauaacugaugaggccguuaggccgaaaggaagca

SEQ ID NO: 10413 - RNA, 38 nt, Artificial Sequence
  Description of Artificial Sequence:  Enzymatic Nucleic Acid
cauggauacugaugaggccguuaggccgaaaaggaagc

SEQ ID NO: 10414 - RNA, 38 nt, Artificial Sequence
  Description of Artificial Sequence:  Enzymatic Nucleic Acid
acauggaucugaugaggccguuaggccgaaaaaggaag

SEQ ID NO: 10415 - RNA, 38 nt, Artificial Sequence
  Description of Artificial Sequence:  Enzymatic Nucleic Acid
uacauggacugaugaggccguuaggccgaaaaaaggaa

SEQ ID NO: 10416 - RNA, 38 nt, Artificial Sequence
  Description of Artificial Sequence:  Enzymatic Nucleic Acid
auuacaugcugaugaggccguuaggccgaaauaaaagg

SEQ ID NO: 10417 - RNA, 38 nt, Artificial Sequence
  Description of Artificial Sequence:  Enzymatic Nucleic Acid
aguuaaaucugaugaggccguuaggccgaaacauggau

SEQ ID NO: 10418 - RNA, 38 nt, Artificial Sequence
  Description of Artificial Sequence:  Enzymatic Nucleic Acid
uacaguuacugaugaggccguuaggccgaaauuacaug

SEQ ID NO: 10419 - RNA, 38 nt, Artificial Sequence
  Description of Artificial Sequence:  Enzymatic Nucleic Acid
cuacaguucugaugaggccguuaggccgaaaauuacau

SEQ ID NO: 10420 - RNA, 38 nt, Artificial Sequence
  Description of Artificial Sequence:  Enzymatic Nucleic Acid
ucuacagucugaugaggccguuaggccgaaaaauuaca

SEQ ID NO: 10421 - RNA, 38 nt, Artificial Sequence
  Description of Artificial Sequence:  Enzymatic Nucleic Acid
ucagguuccugaugaggccguuaggccgaaacaguuaa

SEQ ID NO: 10422 - RNA, 38 nt, Artificial Sequence
  Description of Artificial Sequence:  Enzymatic Nucleic Acid
guuacuuacugaugaggccguuaggccgaaagcucagg

SEQ ID NO: 10423 - RNA, 38 nt, Artificial Sequence
  Description of Artificial Sequence:  Enzymatic Nucleic Acid
cgguuacucugaugaggccguuaggccgaaagagcuca

SEQ ID NO: 10424 - RNA, 38 nt, Artificial Sequence
  Description of Artificial Sequence:  Enzymatic Nucleic Acid
ucuucggucugaugaggccguuaggccgaaacuuagag

SEQ ID NO: 10425 - RNA, 38 nt, Artificial Sequence
  Description of Artificial Sequence:  Enzymatic Nucleic Acid
cagaggcacugaugaggccguuaggccgaaacauucuu

SEQ ID NO: 10426 - RNA, 38 nt, Artificial Sequence
  Description of Artificial Sequence:  Enzymatic Nucleic Acid
uaagaacacugaugaggccguuaggccgaaaggcauac

SEQ ID NO: 10427 - RNA, 38 nt, Artificial Sequence
  Description of Artificial Sequence:  Enzymatic Nucleic Acid
cacauaagcugaugaggccguuaggccgaaacagaggc

SEQ ID NO: 10428 - RNA, 38 nt, Artificial Sequence
  Description of Artificial Sequence:  Enzymatic Nucleic Acid
gcacauaacugaugaggccguuaggccgaaaacagagg

SEQ ID NO: 10429 - RNA, 38 nt, Artificial Sequence
  Description of Artificial Sequence:  Enzymatic Nucleic Acid
uggcacaucugaugaggccguuaggccgaaagaacaga

SEQ ID NO: 10430 - RNA, 38 nt, Artificial Sequence
  Description of Artificial Sequence:  Enzymatic Nucleic Acid
guggcacacugaugaggccguuaggccgaaaagaacag

SEQ ID NO: 10431 - RNA, 38 nt, Artificial Sequence
  Description of Artificial Sequence:  Enzymatic Nucleic Acid
uaaacaagcugaugaggccguuaggccgaaauguggca

SEQ ID NO: 10432 - RNA, 38 nt, Artificial Sequence
  Description of Artificial Sequence:  Enzymatic Nucleic Acid
cuuuaaaccugaugaggccguuaggccgaaaggaugug

SEQ ID NO: 10433 - RNA, 38 nt, Artificial Sequence
  Description of Artificial Sequence:  Enzymatic Nucleic Acid
agccuuuacugaugaggccguuaggccgaaacaaggau

SEQ ID NO: 10434 - RNA, 38 nt, Artificial Sequence
  Description of Artificial Sequence:  Enzymatic Nucleic Acid
gagccuuucugaugaggccguuaggccgaaaacaagga

SEQ ID NO: 10435 - RNA, 38 nt, Artificial Sequence
  Description of Artificial Sequence:  Enzymatic Nucleic Acid
agagccuucugaugaggccguuaggccgaaaaacaagg

SEQ ID NO: 10436 - RNA, 38 nt, Artificial Sequence
  Description of Artificial Sequence:  Enzymatic Nucleic Acid
cauacagacugaugaggccguuaggccgaaagccuuua

SEQ ID NO: 10437 - RNA, 38 nt, Artificial Sequence
  Description of Artificial Sequence:  Enzymatic Nucleic Acid
uucauacacugaugaggccguuaggccgaaagagccuu

SEQ ID NO: 10438 - RNA, 38 nt, Artificial Sequence
  Description of Artificial Sequence:  Enzymatic Nucleic Acid
ucucuucacugaugaggccguuaggccgaaacagagag

SEQ ID NO: 10439 - RNA, 38 nt, Artificial Sequence
  Description of Artificial Sequence:  Enzymatic Nucleic Acid
gugcugaucugaugaggccguuaggccgaaacgguccc

SEQ ID NO: 10440 - RNA, 38 nt, Artificial Sequence
  Description of Artificial Sequence:  Enzymatic Nucleic Acid
aaugugcucugaugaggccguuaggccgaaaugacggu

SEQ ID NO: 10441 - RNA, 38 nt, Artificial Sequence
  Description of Artificial Sequence:  Enzymatic Nucleic Acid
cacuagggcugaugaggccguuaggccgaaaugugcug

SEQ ID NO: 10442 - RNA, 38 nt, Artificial Sequence
  Description of Artificial Sequence:  Enzymatic Nucleic Acid
ucacuaggcugaugaggccguuaggccgaaaaugugcu

SEQ ID NO: 10443 - RNA, 38 nt, Artificial Sequence
  Description of Artificial Sequence:  Enzymatic Nucleic Acid
aggcucaccugaugaggccguuaggccgaaagggaaug

SEQ ID NO: 10444 - RNA, 38 nt, Artificial Sequence
  Description of Artificial Sequence:  Enzymatic Nucleic Acid
ggagccagcugaugaggccguuaggccgaaaggcucac

SEQ ID NO: 10445 - RNA, 38 nt, Artificial Sequence
  Description of Artificial Sequence:  Enzymatic Nucleic Acid
gcugccagcugaugaggccguuaggccgaaagccagua

SEQ ID NO: 10446 - RNA, 38 nt, Artificial Sequence
  Description of Artificial Sequence:  Enzymatic Nucleic Acid
uuccacaacugaugaggccguuaggccgaaagccgcug

SEQ ID NO: 10447 - RNA, 38 nt, Artificial Sequence
  Description of Artificial Sequence:  Enzymatic Nucleic Acid
cuuccacacugaugaggccguuaggccgaaaagccgcu

SEQ ID NO: 10448 - RNA, 38 nt, Artificial Sequence
  Description of Artificial Sequence:  Enzymatic Nucleic Acid
ucuuccaccugaugaggccguuaggccgaaaaagccgc

SEQ ID NO: 10449 - RNA, 38 nt, Artificial Sequence
  Description of Artificial Sequence:  Enzymatic Nucleic Acid
uggcuagucugaugaggccguuaggccgaaagucuucc

SEQ ID NO: 10450 - RNA, 38 nt, Artificial Sequence
  Description of Artificial Sequence:  Enzymatic Nucleic Acid
cuucuggccugaugaggccguuaggccgaaagugaguc

SEQ ID NO: 10451 - RNA, 38 nt, Artificial Sequence
  Description of Artificial Sequence:  Enzymatic Nucleic Acid
guggagagcugaugaggccguuaggccgaaacuguccc

SEQ ID NO: 10452 - RNA, 38 nt, Artificial Sequence
  Description of Artificial Sequence:  Enzymatic Nucleic Acid
uugguggacugaugaggccguuaggccgaaaggacugu

SEQ ID NO: 10453 - RNA, 38 nt, Artificial Sequence
  Description of Artificial Sequence:  Enzymatic Nucleic Acid
ucuuggugcugaugaggccguuaggccgaaagaggacu

SEQ ID NO: 10454 - RNA, 38 nt, Artificial Sequence
  Description of Artificial Sequence:  Enzymatic Nucleic Acid
uggauuuacugaugaggccguuaggccgaaaucuuggu

SEQ ID NO: 10455 - RNA, 38 nt, Artificial Sequence
  Description of Artificial Sequence:  Enzymatic Nucleic Acid
uuuggauucugaugaggccguuaggccgaaagaucuug

SEQ ID NO: 10456 - RNA, 38 nt, Artificial Sequence
  Description of Artificial Sequence:  Enzymatic Nucleic Acid
uuuguuugcugaugaggccguuaggccgaaauuuagau

SEQ ID NO: 10457 - RNA, 38 nt, Artificial Sequence
  Description of Artificial Sequence:  Enzymatic Nucleic Acid
ucuggcuccugaugaggccguuaggccgaaagccugcu

SEQ ID NO: 10458 - RNA, 38 nt, Artificial Sequence
  Description of Artificial Sequence:  Enzymatic Nucleic Acid
acaacaaacugaugaggccguuaggccgaaauuugucc

SEQ ID NO: 10459 - RNA, 38 nt, Artificial Sequence
  Description of Artificial Sequence:  Enzymatic Nucleic Acid
gaacaacacugaugaggccguuaggccgaaagauuugu

SEQ ID NO: 10460 - RNA, 38 nt, Artificial Sequence
  Description of Artificial Sequence:  Enzymatic Nucleic Acid
ggaacaaccugaugaggccguuaggccgaaaagauuug

SEQ ID NO: 10461 - RNA, 38 nt, Artificial Sequence
  Description of Artificial Sequence:  Enzymatic Nucleic Acid
agaggaaccugaugaggccguuaggccgaaacaaagau

SEQ ID NO: 10462 - RNA, 38 nt, Artificial Sequence
  Description of Artificial Sequence:  Enzymatic Nucleic Acid
agaagaggcugaugaggccguuaggccgaaacaacaaa

SEQ ID NO: 10463 - RNA, 38 nt, Artificial Sequence
  Description of Artificial Sequence:  Enzymatic Nucleic Acid
aagaagagcugaugaggccguuaggccgaaaacaacaa

SEQ ID NO: 10464 - RNA, 38 nt, Artificial Sequence
  Description of Artificial Sequence:  Enzymatic Nucleic Acid
guaaagaacugaugaggccguuaggccgaaaggaacaa

SEQ ID NO: 10465 - RNA, 38 nt, Artificial Sequence
  Description of Artificial Sequence:  Enzymatic Nucleic Acid
guguaaagcugaugaggccguuaggccgaaagaggaac

SEQ ID NO: 10466 - RNA, 38 nt, Artificial Sequence
  Description of Artificial Sequence:  Enzymatic Nucleic Acid
uguguaaacugaugaggccguuaggccgaaaagaggaa

SEQ ID NO: 10467 - RNA, 38 nt, Artificial Sequence
  Description of Artificial Sequence:  Enzymatic Nucleic Acid
uauguguacugaugaggccguuaggccgaaagaagagg

SEQ ID NO: 10468 - RNA, 38 nt, Artificial Sequence
  Description of Artificial Sequence:  Enzymatic Nucleic Acid
guaugugucugaugaggccguuaggccgaaaagaagag

SEQ ID NO: 10469 - RNA, 38 nt, Artificial Sequence
  Description of Artificial Sequence:  Enzymatic Nucleic Acid
cguaugugcugaugaggccguuaggccgaaaaagaaga

SEQ ID NO: 10470 - RNA, 38 nt, Artificial Sequence
  Description of Artificial Sequence:  Enzymatic Nucleic Acid
gguuugcgcugaugaggccguuaggccgaaauguguaa

SEQ ID NO: 10471 - RNA, 38 nt, Artificial Sequence
  Description of Artificial Sequence:  Enzymatic Nucleic Acid
auuuauaacugaugaggccguuaggccgaaauugccag

SEQ ID NO: 10472 - RNA, 38 nt, Artificial Sequence
  Description of Artificial Sequence:  Enzymatic Nucleic Acid
gauuuauacugaugaggccguuaggccgaaaauugcca

SEQ ID NO: 10473 - RNA, 38 nt, Artificial Sequence
  Description of Artificial Sequence:  Enzymatic Nucleic Acid
ugauuuaucugaugaggccguuaggccgaaaaauugcc

SEQ ID NO: 10474 - RNA, 38 nt, Artificial Sequence
  Description of Artificial Sequence:  Enzymatic Nucleic Acid
cugauuuacugaugaggccguuaggccgaaaaaauugc

SEQ ID NO: 10475 - RNA, 38 nt, Artificial Sequence
  Description of Artificial Sequence:  Enzymatic Nucleic Acid
accugauucugaugaggccguuaggccgaaauaaaauu

SEQ ID NO: 10476 - RNA, 38 nt, Artificial Sequence
  Description of Artificial Sequence:  Enzymatic Nucleic Acid
aguuaccucugaugaggccguuaggccgaaauuuauaa

SEQ ID NO: 10477 - RNA, 38 nt, Artificial Sequence
  Description of Artificial Sequence:  Enzymatic Nucleic Acid
cuuccagucugaugaggccguuaggccgaaaccugauu

SEQ ID NO: 10478 - RNA, 38 nt, Artificial Sequence
  Description of Artificial Sequence:  Enzymatic Nucleic Acid
cugaguuucugaugaggccguuaggccgaaaccuccuu

SEQ ID NO: 10479 - RNA, 38 nt, Artificial Sequence
  Description of Artificial Sequence:  Enzymatic Nucleic Acid
ucugaguucugaugaggccguuaggccgaaaaccuccu

SEQ ID NO: 10480 - RNA, 38 nt, Artificial Sequence
  Description of Artificial Sequence:  Enzymatic Nucleic Acid
uuuuuucucugaugaggccguuaggccgaaaguuuaac

SEQ ID NO: 10481 - RNA, 38 nt, Artificial Sequence
  Description of Artificial Sequence:  Enzymatic Nucleic Acid
aauugacucugaugaggccguuaggccgaaaggucuuc

SEQ ID NO: 10482 - RNA, 38 nt, Artificial Sequence
  Description of Artificial Sequence:  Enzymatic Nucleic Acid
agagaauucugaugaggccguuaggccgaaacugaggu

SEQ ID NO: 10483 - RNA, 38 nt, Artificial Sequence
  Description of Artificial Sequence:  Enzymatic Nucleic Acid
aaguagagcugaugaggccguuaggccgaaauugacug

SEQ ID NO: 10484 - RNA, 38 nt, Artificial Sequence
  Description of Artificial Sequence:  Enzymatic Nucleic Acid
aaaguagacugaugaggccguuaggccgaaaauugacu

SEQ ID NO: 10485 - RNA, 38 nt, Artificial Sequence
  Description of Artificial Sequence:  Enzymatic Nucleic Acid
aaaaaguacugaugaggccguuaggccgaaagaauuga

SEQ ID NO: 10486 - RNA, 38 nt, Artificial Sequence
  Description of Artificial Sequence:  Enzymatic Nucleic Acid
aaaaaaagcugaugaggccguuaggccgaaagagaauu

SEQ ID NO: 10487 - RNA, 38 nt, Artificial Sequence
  Description of Artificial Sequence:  Enzymatic Nucleic Acid
aaaaaaaacugaugaggccguuaggccgaaaguagaga

SEQ ID NO: 10488 - RNA, 38 nt, Artificial Sequence
  Description of Artificial Sequence:  Enzymatic Nucleic Acid
aaaaaaaacugaugaggccguuaggccgaaaaguagag

SEQ ID NO: 10489 - RNA, 38 nt, Artificial Sequence
  Description of Artificial Sequence:  Enzymatic Nucleic Acid
aaaaaaaacugaugaggccguuaggccgaaaaaguaga

SEQ ID NO: 10490 - RNA, 38 nt, Artificial Sequence
  Description of Artificial Sequence:  Enzymatic Nucleic Acid
aaaaaaaacugaugaggccguuaggccgaaaaaaguag

SEQ ID NO: 10491 - RNA, 38 nt, Artificial Sequence
  Description of Artificial Sequence:  Enzymatic Nucleic Acid
aaaaaaaacugaugaggccguuaggccgaaaaaaagua

SEQ ID NO: 10492 - RNA, 38 nt, Artificial Sequence
  Description of Artificial Sequence:  Enzymatic Nucleic Acid
aaaaaaaacugaugaggccguuaggccgaaaaaaaagu

SEQ ID NO: 10493 - RNA, 38 nt, Artificial Sequence
  Description of Artificial Sequence:  Enzymatic Nucleic Acid
aaaaaaaacugaugaggccguuaggccgaaaaaaaaag

SEQ ID NO: 10494 - RNA, 38 nt, Artificial Sequence
  Description of Artificial Sequence:  Enzymatic Nucleic Acid
gaaaaaaacugaugaggccguuaggccgaaaaaaaaaa

SEQ ID NO: 10495 - RNA, 38 nt, Artificial Sequence
  Description of Artificial Sequence:  Enzymatic Nucleic Acid
ggaaaaaacugaugaggccguuaggccgaaaaaaaaaa

SEQ ID NO: 10496 - RNA, 38 nt, Artificial Sequence
  Description of Artificial Sequence:  Enzymatic Nucleic Acid
uggaaaaacugaugaggccguuaggccgaaaaaaaaaa

SEQ ID NO: 10497 - RNA, 38 nt, Artificial Sequence
  Description of Artificial Sequence:  Enzymatic Nucleic Acid
uuggaaaacugaugaggccguuaggccgaaaaaaaaaa

SEQ ID NO: 10498 - RNA, 38 nt, Artificial Sequence
  Description of Artificial Sequence:  Enzymatic Nucleic Acid
uuuggaaacugaugaggccguuaggccgaaaaaaaaaa

SEQ ID NO: 10499 - RNA, 38 nt, Artificial Sequence
  Description of Artificial Sequence:  Enzymatic Nucleic Acid
auuuggaacugaugaggccguuaggccgaaaaaaaaaa

SEQ ID NO: 10500 - RNA, 38 nt, Artificial Sequence
  Description of Artificial Sequence:  Enzymatic Nucleic Acid
gauuuggacugaugaggccguuaggccgaaaaaaaaaa

SEQ ID NO: 10501 - RNA, 38 nt, Artificial Sequence
  Description of Artificial Sequence:  Enzymatic Nucleic Acid
ugauuuggcugaugaggccguuaggccgaaaaaaaaaa

SEQ ID NO: 10502 - RNA, 38 nt, Artificial Sequence
  Description of Artificial Sequence:  Enzymatic Nucleic Acid
cugauuugcugaugaggccguuaggccgaaaaaaaaaa

SEQ ID NO: 10503 - RNA, 38 nt, Artificial Sequence
  Description of Artificial Sequence:  Enzymatic Nucleic Acid
uauuaucucugaugaggccguuaggccgaaauuuggaa

SEQ ID NO: 10504 - RNA, 38 nt, Artificial Sequence
  Description of Artificial Sequence:  Enzymatic Nucleic Acid
ugggcuaucugaugaggccguuaggccgaaaucugauu

SEQ ID NO: 10505 - RNA, 38 nt, Artificial Sequence
  Description of Artificial Sequence:  Enzymatic Nucleic Acid
ugcugggccugaugaggccguuaggccgaaauuaucug

SEQ ID NO: 10506 - RNA, 38 nt, Artificial Sequence
  Description of Artificial Sequence:  Enzymatic Nucleic Acid
guuaucaccugaugaggccguuaggccgaaauuugcug

SEQ ID NO: 10507 - RNA, 38 nt, Artificial Sequence
  Description of Artificial Sequence:  Enzymatic Nucleic Acid
uuauuugucugaugaggccguuaggccgaaaucacuau

SEQ ID NO: 10508 - RNA, 38 nt, Artificial Sequence
  Description of Artificial Sequence:  Enzymatic Nucleic Acid
uaagguuucugaugaggccguuaggccgaaauuuguua

SEQ ID NO: 10509 - RNA, 38 nt, Artificial Sequence
  Description of Artificial Sequence:  Enzymatic Nucleic Acid
gaacagcucugaugaggccguuaggccgaaagguuuua

SEQ ID NO: 10510 - RNA, 38 nt, Artificial Sequence
  Description of Artificial Sequence:  Enzymatic Nucleic Acid
ugaacagccugaugaggccguuaggccgaaaagguuuu

SEQ ID NO: 10511 - RNA, 38 nt, Artificial Sequence
  Description of Artificial Sequence:  Enzymatic Nucleic Acid
aagacaugcugaugaggccguuaggccgaaacagcuaa

SEQ ID NO: 10512 - RNA, 38 nt, Artificial Sequence
  Description of Artificial Sequence:  Enzymatic Nucleic Acid
caagacaucugaugaggccguuaggccgaaaacagcua

SEQ ID NO: 10513 - RNA, 38 nt, Artificial Sequence
  Description of Artificial Sequence:  Enzymatic Nucleic Acid
gaaaucaacugaugaggccguuaggccgaaacaugaac

SEQ ID NO: 10514 - RNA, 38 nt, Artificial Sequence
  Description of Artificial Sequence:  Enzymatic Nucleic Acid
uugaaauccugaugaggccguuaggccgaaagacauga

SEQ ID NO: 10515 - RNA, 38 nt, Artificial Sequence
  Description of Artificial Sequence:  Enzymatic Nucleic Acid
auuauugacugaugaggccguuaggccgaaaucaagac

SEQ ID NO: 10516 - RNA, 38 nt, Artificial Sequence
  Description of Artificial Sequence:  Enzymatic Nucleic Acid
aauuauugcugaugaggccguuaggccgaaaaucaaga

SEQ ID NO: 10517 - RNA, 38 nt, Artificial Sequence
  Description of Artificial Sequence:  Enzymatic Nucleic Acid
uaauuauucugaugaggccguuaggccgaaaaaucaag

SEQ ID NO: 10518 - RNA, 38 nt, Artificial Sequence
  Description of Artificial Sequence:  Enzymatic Nucleic Acid
gaauuaaucugaugaggccguuaggccgaaauugaaau

SEQ ID NO: 10519 - RNA, 38 nt, Artificial Sequence
  Description of Artificial Sequence:  Enzymatic Nucleic Acid
uaagaauucugaugaggccguuaggccgaaauuauuga

SEQ ID NO: 10520 - RNA, 38 nt, Artificial Sequence
  Description of Artificial Sequence:  Enzymatic Nucleic Acid
uuaagaaucugaugaggccguuaggccgaaaauuauug

SEQ ID NO: 10521 - RNA, 38 nt, Artificial Sequence
  Description of Artificial Sequence:  Enzymatic Nucleic Acid
ugauuaagcugaugaggccguuaggccgaaauuaauua

SEQ ID NO: 10522 - RNA, 38 nt, Artificial Sequence
  Description of Artificial Sequence:  Enzymatic Nucleic Acid
augauuaacugaugaggccguuaggccgaaaauuaauu

SEQ ID NO: 10523 - RNA, 38 nt, Artificial Sequence
  Description of Artificial Sequence:  Enzymatic Nucleic Acid
uaaugauucugaugaggccguuaggccgaaagaauuaa

SEQ ID NO: 10524 - RNA, 38 nt, Artificial Sequence
  Description of Artificial Sequence:  Enzymatic Nucleic Acid
uuaaugaucugaugaggccguuaggccgaaaagaauua

SEQ ID NO: 10525 - RNA, 38 nt, Artificial Sequence
  Description of Artificial Sequence:  Enzymatic Nucleic Acid
cucuuaaucugaugaggccguuaggccgaaauuaagaa

SEQ ID NO: 10526 - RNA, 38 nt, Artificial Sequence
  Description of Artificial Sequence:  Enzymatic Nucleic Acid
ggucucuucugaugaggccguuaggccgaaaugauuaa

SEQ ID NO: 10527 - RNA, 38 nt, Artificial Sequence
  Description of Artificial Sequence:  Enzymatic Nucleic Acid
uggucucucugaugaggccguuaggccgaaaaugauua

SEQ ID NO: 10528 - RNA, 38 nt, Artificial Sequence
  Description of Artificial Sequence:  Enzymatic Nucleic Acid
guauuuaucugaugaggccguuaggccgaaauggucuc

SEQ ID NO: 10529 - RNA, 38 nt, Artificial Sequence
  Description of Artificial Sequence:  Enzymatic Nucleic Acid
ggaguauucugaugaggccguuaggccgaaauuauggu

SEQ ID NO: 10530 - RNA, 38 nt, Artificial Sequence
  Description of Artificial Sequence:  Enzymatic Nucleic Acid
aaaaggagcugaugaggccguuaggccgaaauuuauua

SEQ ID NO: 10531 - RNA, 38 nt, Artificial Sequence
  Description of Artificial Sequence:  Enzymatic Nucleic Acid
uugaaaagcugaugaggccguuaggccgaaaguauuua

SEQ ID NO: 10532 - RNA, 38 nt, Artificial Sequence
  Description of Artificial Sequence:  Enzymatic Nucleic Acid
cucuugaacugaugaggccguuaggccgaaaggaguau

SEQ ID NO: 10533 - RNA, 38 nt, Artificial Sequence
  Description of Artificial Sequence:  Enzymatic Nucleic Acid
ucucuugacugaugaggccguuaggccgaaaaggagua

SEQ ID NO: 10534 - RNA, 38 nt, Artificial Sequence
  Description of Artificial Sequence:  Enzymatic Nucleic Acid
uucucuugcugaugaggccguuaggccgaaaaaggagu

SEQ ID NO: 10535 - RNA, 38 nt, Artificial Sequence
  Description of Artificial Sequence:  Enzymatic Nucleic Acid
uuucucuucugaugaggccguuaggccgaaaaaaggag

SEQ ID NO: 10536 - RNA, 38 nt, Artificial Sequence
  Description of Artificial Sequence:  Enzymatic Nucleic Acid
acaauucucugaugaggccguuaggccgaaaugguuuu

SEQ ID NO: 10537 - RNA, 38 nt, Artificial Sequence
  Description of Artificial Sequence:  Enzymatic Nucleic Acid
aacaauuccugaugaggccguuaggccgaaaaugguuu

SEQ ID NO: 10538 - RNA, 38 nt, Artificial Sequence
  Description of Artificial Sequence:  Enzymatic Nucleic Acid
ugaguaaccugaugaggccguuaggccgaaauucuaau

SEQ ID NO: 10539 - RNA, 38 nt, Artificial Sequence
  Description of Artificial Sequence:  Enzymatic Nucleic Acid
agcugagucugaugaggccguuaggccgaaacaauucu

SEQ ID NO: 10540 - RNA, 38 nt, Artificial Sequence
  Description of Artificial Sequence:  Enzymatic Nucleic Acid
gagcugagcugaugaggccguuaggccgaaaacaauuc

SEQ ID NO: 10541 - RNA, 38 nt, Artificial Sequence
  Description of Artificial Sequence:  Enzymatic Nucleic Acid
aaggagcucugaugaggccguuaggccgaaaguaacaa

SEQ ID NO: 10542 - RNA, 38 nt, Artificial Sequence
  Description of Artificial Sequence:  Enzymatic Nucleic Acid
guuugaagcugaugaggccguuaggccgaaagcugagu

SEQ ID NO: 10543 - RNA, 38 nt, Artificial Sequence
  Description of Artificial Sequence:  Enzymatic Nucleic Acid
ugaguuugcugaugaggccguuaggccgaaaggagcug

SEQ ID NO: 10544 - RNA, 38 nt, Artificial Sequence
  Description of Artificial Sequence:  Enzymatic Nucleic Acid
cugaguuucugaugaggccguuaggccgaaaaggagcu

SEQ ID NO: 10545 - RNA, 38 nt, Artificial Sequence
  Description of Artificial Sequence:  Enzymatic Nucleic Acid
acaaaccucugaugaggccguuaggccgaaaguuugaa

SEQ ID NO: 10546 - RNA, 38 nt, Artificial Sequence
  Description of Artificial Sequence:  Enzymatic Nucleic Acid
augcuacacugaugaggccguuaggccgaaaccugagu

SEQ ID NO: 10547 - RNA, 38 nt, Artificial Sequence
  Description of Artificial Sequence:  Enzymatic Nucleic Acid
uaugcuaccugaugaggccguuaggccgaaaaccugag

SEQ ID NO: 10548 - RNA, 38 nt, Artificial Sequence
  Description of Artificial Sequence:  Enzymatic Nucleic Acid
auguaugccugaugaggccguuaggccgaaacaaaccu

SEQ ID NO: 10549 - RNA, 38 nt, Artificial Sequence
  Description of Artificial Sequence:  Enzymatic Nucleic Acid
gacucaugcugaugaggccguuaggccgaaaugcuaca

SEQ ID NO: 10550 - RNA, 38 nt, Artificial Sequence
  Description of Artificial Sequence:  Enzymatic Nucleic Acid
gauggaugcugaugaggccguuaggccgaaacucaugu

SEQ ID NO: 10551 - RNA, 38 nt, Artificial Sequence
  Description of Artificial Sequence:  Enzymatic Nucleic Acid
gacugaugcugaugaggccguuaggccgaaauggacuc

SEQ ID NO: 10552 - RNA, 38 nt, Artificial Sequence
  Description of Artificial Sequence:  Enzymatic Nucleic Acid
cuuugacucugaugaggccguuaggccgaaauggaugg

SEQ ID NO: 10553 - RNA, 38 nt, Artificial Sequence
  Description of Artificial Sequence:  Enzymatic Nucleic Acid
cauucuuucugaugaggccguuaggccgaaacugaugg

SEQ ID NO: 10554 - RNA, 38 nt, Artificial Sequence
  Description of Artificial Sequence:  Enzymatic Nucleic Acid
ccagauggcugaugaggccguuaggccgaaaccauucu

SEQ ID NO: 10555 - RNA, 38 nt, Artificial Sequence
  Description of Artificial Sequence:  Enzymatic Nucleic Acid
uccagaugcugaugaggccguuaggccgaaaaccauuc

SEQ ID NO: 10556 - RNA, 38 nt, Artificial Sequence
  Description of Artificial Sequence:  Enzymatic Nucleic Acid
agacuccacugaugaggccguuaggccgaaauggaacc

SEQ ID NO: 10557 - RNA, 38 nt, Artificial Sequence
  Description of Artificial Sequence:  Enzymatic Nucleic Acid
uacauuaacugaugaggccguuaggccgaaacuccaga

SEQ ID NO: 10558 - RNA, 38 nt, Artificial Sequence
  Description of Artificial Sequence:  Enzymatic Nucleic Acid
ucuacauucugaugaggccguuaggccgaaagacucca

SEQ ID NO: 10559 - RNA, 38 nt, Artificial Sequence
  Description of Artificial Sequence:  Enzymatic Nucleic Acid
uucuacaucugaugaggccguuaggccgaaaagacucc

SEQ ID NO: 10560 - RNA, 38 nt, Artificial Sequence
  Description of Artificial Sequence:  Enzymatic Nucleic Acid
uuucuuuccugaugaggccguuaggccgaaacauuaag

SEQ ID NO: 10561 - RNA, 38 nt, Artificial Sequence
  Description of Artificial Sequence:  Enzymatic Nucleic Acid
auuauuaccugaugaggccguuaggccgaaagucucca

SEQ ID NO: 10562 - RNA, 38 nt, Artificial Sequence
  Description of Artificial Sequence:  Enzymatic Nucleic Acid
cucauuaucugaugaggccguuaggccgaaacaagucu

SEQ ID NO: 10563 - RNA, 38 nt, Artificial Sequence
  Description of Artificial Sequence:  Enzymatic Nucleic Acid
uagcucaucugaugaggccguuaggccgaaauuacaag

SEQ ID NO: 10564 - RNA, 38 nt, Artificial Sequence
  Description of Artificial Sequence:  Enzymatic Nucleic Acid
uuuguaaccugaugaggccguuaggccgaaagcucauu

SEQ ID NO: 10565 - RNA, 38 nt, Artificial Sequence
  Description of Artificial Sequence:  Enzymatic Nucleic Acid
cacuuugucugaugaggccguuaggccgaaacuagcuc

SEQ ID NO: 10566 - RNA, 38 nt, Artificial Sequence
  Description of Artificial Sequence:  Enzymatic Nucleic Acid
gcacuuugcugaugaggccguuaggccgaaaacuagcu

SEQ ID NO: 10567 - RNA, 38 nt, Artificial Sequence
  Description of Artificial Sequence:  Enzymatic Nucleic Acid
uaaugaaccugaugaggccguuaggccgaaagcacuuu

SEQ ID NO: 10568 - RNA, 38 nt, Artificial Sequence
  Description of Artificial Sequence:  Enzymatic Nucleic Acid
uuuuaaugcugaugaggccguuaggccgaaacaagcac

SEQ ID NO: 10569 - RNA, 38 nt, Artificial Sequence
  Description of Artificial Sequence:  Enzymatic Nucleic Acid
auuuuaaucugaugaggccguuaggccgaaaacaagca

SEQ ID NO: 10570 - RNA, 38 nt, Artificial Sequence
  Description of Artificial Sequence:  Enzymatic Nucleic Acid
gcuauuuucugaugaggccguuaggccgaaaugaacaa

SEQ ID NO: 10571 - RNA, 38 nt, Artificial Sequence
  Description of Artificial Sequence:  Enzymatic Nucleic Acid
ugcuauuucugaugaggccguuaggccgaaaaugaaca

SEQ ID NO: 10572 - RNA, 38 nt, Artificial Sequence
  Description of Artificial Sequence:  Enzymatic Nucleic Acid
uucagugccugaugaggccguuaggccgaaauuuuaau

SEQ ID NO: 10573 - RNA, 38 nt, Artificial Sequence
  Description of Artificial Sequence:  Enzymatic Nucleic Acid
cauguuuccugaugaggccguuaggccgaaauuuucag

SEQ ID NO: 10574 - RNA, 38 nt, Artificial Sequence
  Description of Artificial Sequence:  Enzymatic Nucleic Acid
uaucaguucugaugaggccguuaggccgaaauucaugu

SEQ ID NO: 10575 - RNA, 38 nt, Artificial Sequence
  Description of Artificial Sequence:  Enzymatic Nucleic Acid
uuaucagucugaugaggccguuaggccgaaaauucaug

SEQ ID NO: 10576 - RNA, 38 nt, Artificial Sequence
  Description of Artificial Sequence:  Enzymatic Nucleic Acid
uggaauaucugaugaggccguuaggccgaaaucaguua

SEQ ID NO: 10577 - RNA, 38 nt, Artificial Sequence
  Description of Artificial Sequence:  Enzymatic Nucleic Acid
gauuggaacugaugaggccguuaggccgaaauuaucag

SEQ ID NO: 10578 - RNA, 38 nt, Artificial Sequence
  Description of Artificial Sequence:  Enzymatic Nucleic Acid
augauuggcugaugaggccguuaggccgaaauauuauc

SEQ ID NO: 10579 - RNA, 38 nt, Artificial Sequence
  Description of Artificial Sequence:  Enzymatic Nucleic Acid
aaugauugcugaugaggccguuaggccgaaaauauuau

SEQ ID NO: 10580 - RNA, 38 nt, Artificial Sequence
  Description of Artificial Sequence:  Enzymatic Nucleic Acid
uggcaaaucugaugaggccguuaggccgaaauuggaau

SEQ ID NO: 10581 - RNA, 38 nt, Artificial Sequence
  Description of Artificial Sequence:  Enzymatic Nucleic Acid
aaauggcacugaugaggccguuaggccgaaaugauugg

SEQ ID NO: 10582 - RNA, 38 nt, Artificial Sequence
  Description of Artificial Sequence:  Enzymatic Nucleic Acid
uaaauggccugaugaggccguuaggccgaaaaugauug

SEQ ID NO: 10583 - RNA, 38 nt, Artificial Sequence
  Description of Artificial Sequence:  Enzymatic Nucleic Acid
uugucauacugaugaggccguuaggccgaaauggcaaa

SEQ ID NO: 10584 - RNA, 38 nt, Artificial Sequence
  Description of Artificial Sequence:  Enzymatic Nucleic Acid
uuugucaucugaugaggccguuaggccgaaaauggcaa

SEQ ID NO: 10585 - RNA, 38 nt, Artificial Sequence
  Description of Artificial Sequence:  Enzymatic Nucleic Acid
uuuugucacugaugaggccguuaggccgaaaaauggca

SEQ ID NO: 10586 - RNA, 38 nt, Artificial Sequence
  Description of Artificial Sequence:  Enzymatic Nucleic Acid
uuagugcccugaugaggccguuaggccgaaaccauuuu

SEQ ID NO: 10587 - RNA, 38 nt, Artificial Sequence
  Description of Artificial Sequence:  Enzymatic Nucleic Acid
uucuuugucugaugaggccguuaggccgaaagugccaa

SEQ ID NO: 10588 - RNA, 38 nt, Artificial Sequence
  Description of Artificial Sequence:  Enzymatic Nucleic Acid
cugaaaggcugaugaggccguuaggccgaaagugcucg

SEQ ID NO: 10589 - RNA, 38 nt, Artificial Sequence
  Description of Artificial Sequence:  Enzymatic Nucleic Acid
ucugaaagcugaugaggccguuaggccgaaaagugcuc

SEQ ID NO: 10590 - RNA, 38 nt, Artificial Sequence
  Description of Artificial Sequence:  Enzymatic Nucleic Acid
aacucugacugaugaggccguuaggccgaaaggaagug

SEQ ID NO: 10591 - RNA, 38 nt, Artificial Sequence
  Description of Artificial Sequence:  Enzymatic Nucleic Acid
aaacucugcugaugaggccguuaggccgaaaaggaagu

SEQ ID NO: 10592 - RNA, 38 nt, Artificial Sequence
  Description of Artificial Sequence:  Enzymatic Nucleic Acid
gaaacucucugaugaggccguuaggccgaaaaaggaag

SEQ ID NO: 10593 - RNA, 38 nt, Artificial Sequence
  Description of Artificial Sequence:  Enzymatic Nucleic Acid
aucucagacugaugaggccguuaggccgaaacucugaa

SEQ ID NO: 10594 - RNA, 38 nt, Artificial Sequence
  Description of Artificial Sequence:  Enzymatic Nucleic Acid
uaucucagcugaugaggccguuaggccgaaaacucuga

SEQ ID NO: 10595 - RNA, 38 nt, Artificial Sequence
  Description of Artificial Sequence:  Enzymatic Nucleic Acid
uuaucucacugaugaggccguuaggccgaaaaacucug

SEQ ID NO: 10596 - RNA, 38 nt, Artificial Sequence
  Description of Artificial Sequence:  Enzymatic Nucleic Acid
acguacaucugaugaggccguuaggccgaaaucucaga

SEQ ID NO: 10597 - RNA, 38 nt, Artificial Sequence
  Description of Artificial Sequence:  Enzymatic Nucleic Acid
guuccacgcugaugaggccguuaggccgaaacauuauc

SEQ ID NO: 10598 - RNA, 38 nt, Artificial Sequence
  Description of Artificial Sequence:  Enzymatic Nucleic Acid
uccacccacugaugaggccguuaggccgaaacuguucc

SEQ ID NO: 10599 - RNA, 38 nt, Artificial Sequence
  Description of Artificial Sequence:  Enzymatic Nucleic Acid
aagacacacugaugaggccguuaggccgaaacuugcac

SEQ ID NO: 10600 - RNA, 38 nt, Artificial Sequence
  Description of Artificial Sequence:  Enzymatic Nucleic Acid
acugacaacugaugaggccguuaggccgaaacacagac

SEQ ID NO: 10601 - RNA, 38 nt, Artificial Sequence
  Description of Artificial Sequence:  Enzymatic Nucleic Acid
ggacugaccugaugaggccguuaggccgaaagacacag

SEQ ID NO: 10602 - RNA, 38 nt, Artificial Sequence
  Description of Artificial Sequence:  Enzymatic Nucleic Acid
cuuggacucugaugaggccguuaggccgaaacaagaca

SEQ ID NO: 10603 - RNA, 38 nt, Artificial Sequence
  Description of Artificial Sequence:  Enzymatic Nucleic Acid
acuucuugcugaugaggccguuaggccgaaacugacaa

SEQ ID NO: 10604 - RNA, 38 nt, Artificial Sequence
  Description of Artificial Sequence:  Enzymatic Nucleic Acid
cuaaaauucugaugaggccguuaggccgaaacaucucg

SEQ ID NO: 10605 - RNA, 38 nt, Artificial Sequence
  Description of Artificial Sequence:  Enzymatic Nucleic Acid
ccuaaaaucugaugaggccguuaggccgaaaacaucuc

SEQ ID NO: 10606 - RNA, 38 nt, Artificial Sequence
  Description of Artificial Sequence:  Enzymatic Nucleic Acid
gucccuaacugaugaggccguuaggccgaaauuaacau

SEQ ID NO: 10607 - RNA, 38 nt, Artificial Sequence
  Description of Artificial Sequence:  Enzymatic Nucleic Acid
ggucccuacugaugaggccguuaggccgaaaauuaaca

SEQ ID NO: 10608 - RNA, 38 nt, Artificial Sequence
  Description of Artificial Sequence:  Enzymatic Nucleic Acid
gggucccucugaugaggccguuaggccgaaaaauuaac

SEQ ID NO: 10609 - RNA, 38 nt, Artificial Sequence
  Description of Artificial Sequence:  Enzymatic Nucleic Acid
cggguccccugaugaggccguuaggccgaaaaaauuaa

SEQ ID NO: 10610 - RNA, 38 nt, Artificial Sequence
  Description of Artificial Sequence:  Enzymatic Nucleic Acid
uaggaaaccugaugaggccguuaggccgaaaggcacgg

SEQ ID NO: 10611 - RNA, 38 nt, Artificial Sequence
  Description of Artificial Sequence:  Enzymatic Nucleic Acid
ggcuaggacugaugaggccguuaggccgaaacaaggca

SEQ ID NO: 10612 - RNA, 38 nt, Artificial Sequence
  Description of Artificial Sequence:  Enzymatic Nucleic Acid
gggcuaggcugaugaggccguuaggccgaaaacaaggc

SEQ ID NO: 10613 - RNA, 38 nt, Artificial Sequence
  Description of Artificial Sequence:  Enzymatic Nucleic Acid
ugggcuagcugaugaggccguuaggccgaaaaacaagg

SEQ ID NO: 10614 - RNA, 38 nt, Artificial Sequence
  Description of Artificial Sequence:  Enzymatic Nucleic Acid
uugugggccugaugaggccguuaggccgaaaggaaaca

SEQ ID NO: 10615 - RNA, 38 nt, Artificial Sequence
  Description of Artificial Sequence:  Enzymatic Nucleic Acid
aucuguuucugaugaggccguuaggccgaaauguuugc

SEQ ID NO: 10616 - RNA, 38 nt, Artificial Sequence
  Description of Artificial Sequence:  Enzymatic Nucleic Acid
cuagcgagcugaugaggccguuaggccgaaaucuguuu

SEQ ID NO: 10617 - RNA, 38 nt, Artificial Sequence
  Description of Artificial Sequence:  Enzymatic Nucleic Acid
aggcuagccugaugaggccguuaggccgaaaguaucug

SEQ ID NO: 10618 - RNA, 38 nt, Artificial Sequence
  Description of Artificial Sequence:  Enzymatic Nucleic Acid
aaugaggccugaugaggccguuaggccgaaagcgagua

SEQ ID NO: 10619 - RNA, 38 nt, Artificial Sequence
  Description of Artificial Sequence:  Enzymatic Nucleic Acid
auuuaaaucugaugaggccguuaggccgaaaggcuagc

SEQ ID NO: 10620 - RNA, 38 nt, Artificial Sequence
  Description of Artificial Sequence:  Enzymatic Nucleic Acid
ucaauuuacugaugaggccguuaggccgaaaugaggcu

SEQ ID NO: 10621 - RNA, 38 nt, Artificial Sequence
  Description of Artificial Sequence:  Enzymatic Nucleic Acid
aucaauuucugaugaggccguuaggccgaaaaugaggc

SEQ ID NO: 10622 - RNA, 38 nt, Artificial Sequence
  Description of Artificial Sequence:  Enzymatic Nucleic Acid
aaucaauucugaugaggccguuaggccgaaaaaugagg

SEQ ID NO: 10623 - RNA, 38 nt, Artificial Sequence
  Description of Artificial Sequence:  Enzymatic Nucleic Acid
cuuuaauccugaugaggccguuaggccgaaauuuaaau

SEQ ID NO: 10624 - RNA, 38 nt, Artificial Sequence
  Description of Artificial Sequence:  Enzymatic Nucleic Acid
ccuccuuucugaugaggccguuaggccgaaaucaauuu

SEQ ID NO: 10625 - RNA, 38 nt, Artificial Sequence
  Description of Artificial Sequence:  Enzymatic Nucleic Acid
uccuccuucugaugaggccguuaggccgaaaaucaauu

SEQ ID NO: 10626 - RNA, 38 nt, Artificial Sequence
  Description of Artificial Sequence:  Enzymatic Nucleic Acid
cggccaaacugaugaggccguuaggccgaaaugcacuc

SEQ ID NO: 10627 - RNA, 38 nt, Artificial Sequence
  Description of Artificial Sequence:  Enzymatic Nucleic Acid
gucggccacugaugaggccguuaggccgaaagaugcac

SEQ ID NO: 10628 - RNA, 38 nt, Artificial Sequence
  Description of Artificial Sequence:  Enzymatic Nucleic Acid
ugucggcccugaugaggccguuaggccgaaaagaugca

SEQ ID NO: 10629 - RNA, 38 nt, Artificial Sequence
  Description of Artificial Sequence:  Enzymatic Nucleic Acid
cacacagucugaugaggccguuaggccgaaacaccacu

SEQ ID NO: 10630 - RNA, 38 nt, Artificial Sequence
  Description of Artificial Sequence:  Enzymatic Nucleic Acid
aacacacacugaugaggccguuaggccgaaacacccac

SEQ ID NO: 10631 - RNA, 38 nt, Artificial Sequence
  Description of Artificial Sequence:  Enzymatic Nucleic Acid
augcacaacugaugaggccguuaggccgaaacacacau

SEQ ID NO: 10632 - RNA, 38 nt, Artificial Sequence
  Description of Artificial Sequence:  Enzymatic Nucleic Acid
uaugcacacugaugaggccguuaggccgaaaacacaca

SEQ ID NO: 10633 - RNA, 38 nt, Artificial Sequence
  Description of Artificial Sequence:  Enzymatic Nucleic Acid
uuaugcaccugaugaggccguuaggccgaaaaacacac

SEQ ID NO: 10634 - RNA, 38 nt, Artificial Sequence
  Description of Artificial Sequence:  Enzymatic Nucleic Acid
uaaauagucugaugaggccguuaggccgaaaugcacaa

SEQ ID NO: 10635 - RNA, 38 nt, Artificial Sequence
  Description of Artificial Sequence:  Enzymatic Nucleic Acid
uccuuaaacugaugaggccguuaggccgaaaguuaugc

SEQ ID NO: 10636 - RNA, 38 nt, Artificial Sequence
  Description of Artificial Sequence:  Enzymatic Nucleic Acid
uuuccuuacugaugaggccguuaggccgaaauaguuau

SEQ ID NO: 10637 - RNA, 38 nt, Artificial Sequence
  Description of Artificial Sequence:  Enzymatic Nucleic Acid
guuuccuucugaugaggccguuaggccgaaaauaguua

SEQ ID NO: 10638 - RNA, 38 nt, Artificial Sequence
  Description of Artificial Sequence:  Enzymatic Nucleic Acid
aguuuccucugaugaggccguuaggccgaaaaauaguu

SEQ ID NO: 10639 - RNA, 38 nt, Artificial Sequence
  Description of Artificial Sequence:  Enzymatic Nucleic Acid
aacuuuaacugaugaggccguuaggccgaaauuccagu

SEQ ID NO: 10640 - RNA, 38 nt, Artificial Sequence
  Description of Artificial Sequence:  Enzymatic Nucleic Acid
uaacuuuacugaugaggccguuaggccgaaaauuccag

SEQ ID NO: 10641 - RNA, 38 nt, Artificial Sequence
  Description of Artificial Sequence:  Enzymatic Nucleic Acid
guaacuuucugaugaggccguuaggccgaaaaauucca

SEQ ID NO: 10642 - RNA, 38 nt, Artificial Sequence
  Description of Artificial Sequence:  Enzymatic Nucleic Acid
aguaacuucugaugaggccguuaggccgaaaaaauucc

SEQ ID NO: 10643 - RNA, 38 nt, Artificial Sequence
  Description of Artificial Sequence:  Enzymatic Nucleic Acid
auaaaagucugaugaggccguuaggccgaaacuuuaaa

SEQ ID NO: 10644 - RNA, 38 nt, Artificial Sequence
  Description of Artificial Sequence:  Enzymatic Nucleic Acid
uauaaaagcugaugaggccguuaggccgaaaacuuuaa

SEQ ID NO: 10645 - RNA, 38 nt, Artificial Sequence
  Description of Artificial Sequence:  Enzymatic Nucleic Acid
uuguauaacugaugaggccguuaggccgaaaguaacuu

SEQ ID NO: 10646 - RNA, 38 nt, Artificial Sequence
  Description of Artificial Sequence:  Enzymatic Nucleic Acid
uuuguauacugaugaggccguuaggccgaaaaguaacu

SEQ ID NO: 10647 - RNA, 38 nt, Artificial Sequence
  Description of Artificial Sequence:  Enzymatic Nucleic Acid
guuuguaucugaugaggccguuaggccgaaaaaguaac

SEQ ID NO: 10648 - RNA, 38 nt, Artificial Sequence
  Description of Artificial Sequence:  Enzymatic Nucleic Acid
gguuuguacugaugaggccguuaggccgaaaaaaguaa

SEQ ID NO: 10649 - RNA, 38 nt, Artificial Sequence
  Description of Artificial Sequence:  Enzymatic Nucleic Acid
uugguuugcugaugaggccguuaggccgaaauaaaagu

SEQ ID NO: 10650 - RNA, 38 nt, Artificial Sequence
  Description of Artificial Sequence:  Enzymatic Nucleic Acid
guagcauacugaugaggccguuaggccgaaauucuugg

SEQ ID NO: 10651 - RNA, 38 nt, Artificial Sequence
  Description of Artificial Sequence:  Enzymatic Nucleic Acid
cuguagcacugaugaggccguuaggccgaaauauucuu

SEQ ID NO: 10652 - RNA, 38 nt, Artificial Sequence
  Description of Artificial Sequence:  Enzymatic Nucleic Acid
uauaucugcugaugaggccguuaggccgaaagcauaua

SEQ ID NO: 10653 - RNA, 38 nt, Artificial Sequence
  Description of Artificial Sequence:  Enzymatic Nucleic Acid
cugucuuacugaugaggccguuaggccgaaaucuguag

SEQ ID NO: 10654 - RNA, 38 nt, Artificial Sequence
  Description of Artificial Sequence:  Enzymatic Nucleic Acid
gucugucucugaugaggccguuaggccgaaauaucugu

SEQ ID NO: 10655 - RNA, 38 nt, Artificial Sequence
  Description of Artificial Sequence:  Enzymatic Nucleic Acid
uaggaccacugaugaggccguuaggccgaaaccauguc

SEQ ID NO: 10656 - RNA, 38 nt, Artificial Sequence
  Description of Artificial Sequence:  Enzymatic Nucleic Acid
auaggacccugaugaggccguuaggccgaaaaccaugu

SEQ ID NO: 10657 - RNA, 38 nt, Artificial Sequence
  Description of Artificial Sequence:  Enzymatic Nucleic Acid
aaauauagcugaugaggccguuaggccgaaaccaaacc

SEQ ID NO: 10658 - RNA, 38 nt, Artificial Sequence
  Description of Artificial Sequence:  Enzymatic Nucleic Acid
uagaaauacugaugaggccguuaggccgaaaggaccaa

SEQ ID NO: 10659 - RNA, 38 nt, Artificial Sequence
  Description of Artificial Sequence:  Enzymatic Nucleic Acid
acuagaaacugaugaggccguuaggccgaaauaggacc

SEQ ID NO: 10660 - RNA, 38 nt, Artificial Sequence
  Description of Artificial Sequence:  Enzymatic Nucleic Acid
ugacuagacugaugaggccguuaggccgaaauauagga

SEQ ID NO: 10661 - RNA, 38 nt, Artificial Sequence
  Description of Artificial Sequence:  Enzymatic Nucleic Acid
augacuagcugaugaggccguuaggccgaaaauauagg

SEQ ID NO: 10662 - RNA, 38 nt, Artificial Sequence
  Description of Artificial Sequence:  Enzymatic Nucleic Acid
caugacuacugaugaggccguuaggccgaaaaauauag

SEQ ID NO: 10663 - RNA, 38 nt, Artificial Sequence
  Description of Artificial Sequence:  Enzymatic Nucleic Acid
aucaugaccugaugaggccguuaggccgaaagaaauau

SEQ ID NO: 10664 - RNA, 38 nt, Artificial Sequence
  Description of Artificial Sequence:  Enzymatic Nucleic Acid
uucaucaucugaugaggccguuaggccgaaacuagaaa

SEQ ID NO: 10665 - RNA, 38 nt, Artificial Sequence
  Description of Artificial Sequence:  Enzymatic Nucleic Acid
auacaaaacugaugaggccguuaggccgaaacauucau

SEQ ID NO: 10666 - RNA, 38 nt, Artificial Sequence
  Description of Artificial Sequence:  Enzymatic Nucleic Acid
guauacaacugaugaggccguuaggccgaaauacauuc

SEQ ID NO: 10667 - RNA, 38 nt, Artificial Sequence
  Description of Artificial Sequence:  Enzymatic Nucleic Acid
gguauacacugaugaggccguuaggccgaaaauacauu

SEQ ID NO: 10668 - RNA, 38 nt, Artificial Sequence
  Description of Artificial Sequence:  Enzymatic Nucleic Acid
ugguauaccugaugaggccguuaggccgaaaaauacau

SEQ ID NO: 10669 - RNA, 38 nt, Artificial Sequence
  Description of Artificial Sequence:  Enzymatic Nucleic Acid
agaugguacugaugaggccguuaggccgaaacaaaaua

SEQ ID NO: 10670 - RNA, 38 nt, Artificial Sequence
  Description of Artificial Sequence:  Enzymatic Nucleic Acid
gaagauggcugaugaggccguuaggccgaaauacaaaa

SEQ ID NO: 10671 - RNA, 38 nt, Artificial Sequence
  Description of Artificial Sequence:  Enzymatic Nucleic Acid
uauaugaacugaugaggccguuaggccgaaaugguaua

SEQ ID NO: 10672 - RNA, 38 nt, Artificial Sequence
  Description of Artificial Sequence:  Enzymatic Nucleic Acid
auuauaugcugaugaggccguuaggccgaaagauggua

SEQ ID NO: 10673 - RNA, 38 nt, Artificial Sequence
  Description of Artificial Sequence:  Enzymatic Nucleic Acid
uauuauaucugaugaggccguuaggccgaaaagauggu

SEQ ID NO: 10674 - RNA, 38 nt, Artificial Sequence
  Description of Artificial Sequence:  Enzymatic Nucleic Acid
guauauuacugaugaggccguuaggccgaaaugaagau

SEQ ID NO: 10675 - RNA, 38 nt, Artificial Sequence
  Description of Artificial Sequence:  Enzymatic Nucleic Acid
aaguauaucugaugaggccguuaggccgaaauaugaag

SEQ ID NO: 10676 - RNA, 38 nt, Artificial Sequence
  Description of Artificial Sequence:  Enzymatic Nucleic Acid
uuuaaguacugaugaggccguuaggccgaaauuauaug

SEQ ID NO: 10677 - RNA, 38 nt, Artificial Sequence
  Description of Artificial Sequence:  Enzymatic Nucleic Acid
uuuuuaagcugaugaggccguuaggccgaaauauuaua

SEQ ID NO: 10678 - RNA, 38 nt, Artificial Sequence
  Description of Artificial Sequence:  Enzymatic Nucleic Acid
auauuuuucugaugaggccguuaggccgaaaguauauu

SEQ ID NO: 10679 - RNA, 38 nt, Artificial Sequence
  Description of Artificial Sequence:  Enzymatic Nucleic Acid
aauauuuucugaugaggccguuaggccgaaaaguauau

SEQ ID NO: 10680 - RNA, 38 nt, Artificial Sequence
  Description of Artificial Sequence:  Enzymatic Nucleic Acid
uuaagaaacugaugaggccguuaggccgaaauuuuuaa

SEQ ID NO: 10681 - RNA, 38 nt, Artificial Sequence
  Description of Artificial Sequence:  Enzymatic Nucleic Acid
aauuaagacugaugaggccguuaggccgaaauauuuuu

SEQ ID NO: 10682 - RNA, 38 nt, Artificial Sequence
  Description of Artificial Sequence:  Enzymatic Nucleic Acid
caauuaagcugaugaggccguuaggccgaaaauauuuu

SEQ ID NO: 10683 - RNA, 38 nt, Artificial Sequence
  Description of Artificial Sequence:  Enzymatic Nucleic Acid
ccaauuaacugaugaggccguuaggccgaaaaauauuu

SEQ ID NO: 10684 - RNA, 38 nt, Artificial Sequence
  Description of Artificial Sequence:  Enzymatic Nucleic Acid
ucccaauucugaugaggccguuaggccgaaagaaauau

SEQ ID NO: 10685 - RNA, 38 nt, Artificial Sequence
  Description of Artificial Sequence:  Enzymatic Nucleic Acid
aucccaaucugaugaggccguuaggccgaaaagaaaua

SEQ ID NO: 10686 - RNA, 38 nt, Artificial Sequence
  Description of Artificial Sequence:  Enzymatic Nucleic Acid
caaauccccugaugaggccguuaggccgaaauuaagaa

SEQ ID NO: 10687 - RNA, 38 nt, Artificial Sequence
  Description of Artificial Sequence:  Enzymatic Nucleic Acid
cgauuacacugaugaggccguuaggccgaaaucccaau

SEQ ID NO: 10688 - RNA, 38 nt, Artificial Sequence
  Description of Artificial Sequence:  Enzymatic Nucleic Acid
acgauuaccugaugaggccguuaggccgaaaaucccaa

SEQ ID NO: 10689 - RNA, 38 nt, Artificial Sequence
  Description of Artificial Sequence:  Enzymatic Nucleic Acid
gguacgaucugaugaggccguuaggccgaaacaaaucc

SEQ ID NO: 10690 - RNA, 38 nt, Artificial Sequence
  Description of Artificial Sequence:  Enzymatic Nucleic Acid
guugguaccugaugaggccguuaggccgaaauuacaaa

SEQ ID NO: 10691 - RNA, 38 nt, Artificial Sequence
  Description of Artificial Sequence:  Enzymatic Nucleic Acid
uaaguuggcugaugaggccguuaggccgaaacgauuac

SEQ ID NO: 10692 - RNA, 38 nt, Artificial Sequence
  Description of Artificial Sequence:  Enzymatic Nucleic Acid
uaucaauucugaugaggccguuaggccgaaaguuggua

SEQ ID NO: 10693 - RNA, 38 nt, Artificial Sequence
  Description of Artificial Sequence:  Enzymatic Nucleic Acid
uuaucaaucugaugaggccguuaggccgaaaaguuggu

SEQ ID NO: 10694 - RNA, 38 nt, Artificial Sequence
  Description of Artificial Sequence:  Enzymatic Nucleic Acid
aguuuauccugaugaggccguuaggccgaaauuaaguu

SEQ ID NO: 10695 - RNA, 38 nt, Artificial Sequence
  Description of Artificial Sequence:  Enzymatic Nucleic Acid
gccaaguucugaugaggccguuaggccgaaaucaauua

SEQ ID NO: 10696 - RNA, 38 nt, Artificial Sequence
  Description of Artificial Sequence:  Enzymatic Nucleic Acid
caguugcccugaugaggccguuaggccgaaaguuuauc

SEQ ID NO: 10697 - RNA, 38 nt, Artificial Sequence
  Description of Artificial Sequence:  Enzymatic Nucleic Acid
gaacauaacugaugaggccguuaggccgaaagcaguug

SEQ ID NO: 10698 - RNA, 38 nt, Artificial Sequence
  Description of Artificial Sequence:  Enzymatic Nucleic Acid
agaacauacugaugaggccguuaggccgaaaagcaguu

SEQ ID NO: 10699 - RNA, 38 nt, Artificial Sequence
  Description of Artificial Sequence:  Enzymatic Nucleic Acid
cagaacaucugaugaggccguuaggccgaaaaagcagu

SEQ ID NO: 10700 - RNA, 38 nt, Artificial Sequence
  Description of Artificial Sequence:  Enzymatic Nucleic Acid
acagaacacugaugaggccguuaggccgaaaaaagcag

SEQ ID NO: 10701 - RNA, 38 nt, Artificial Sequence
  Description of Artificial Sequence:  Enzymatic Nucleic Acid
ggagacagcugaugaggccguuaggccgaaacauaaaa

SEQ ID NO: 10702 - RNA, 38 nt, Artificial Sequence
  Description of Artificial Sequence:  Enzymatic Nucleic Acid
aggagacacugaugaggccguuaggccgaaaacauaaa

SEQ ID NO: 10703 - RNA, 38 nt, Artificial Sequence
  Description of Artificial Sequence:  Enzymatic Nucleic Acid
uggaaggacugaugaggccguuaggccgaaacagaaca

SEQ ID NO: 10704 - RNA, 38 nt, Artificial Sequence
  Description of Artificial Sequence:  Enzymatic Nucleic Acid
uauggaagcugaugaggccguuaggccgaaagacagaa

SEQ ID NO: 10705 - RNA, 38 nt, Artificial Sequence
  Description of Artificial Sequence:  Enzymatic Nucleic Acid
auuuauggcugaugaggccguuaggccgaaaggagaca

SEQ ID NO: 10706 - RNA, 38 nt, Artificial Sequence
  Description of Artificial Sequence:  Enzymatic Nucleic Acid
aauuuaugcugaugaggccguuaggccgaaaaggagac

SEQ ID NO: 10707 - RNA, 38 nt, Artificial Sequence
  Description of Artificial Sequence:  Enzymatic Nucleic Acid
gaaaaauucugaugaggccguuaggccgaaauggaagg

SEQ ID NO: 10708 - RNA, 38 nt, Artificial Sequence
  Description of Artificial Sequence:  Enzymatic Nucleic Acid
uuuugaaacugaugaggccguuaggccgaaauuuaugg

SEQ ID NO: 10709 - RNA, 38 nt, Artificial Sequence
  Description of Artificial Sequence:  Enzymatic Nucleic Acid
auuuugaacugaugaggccguuaggccgaaaauuuaug

SEQ ID NO: 10710 - RNA, 38 nt, Artificial Sequence
  Description of Artificial Sequence:  Enzymatic Nucleic Acid
uauuuugacugaugaggccguuaggccgaaaaauuuau

SEQ ID NO: 10711 - RNA, 38 nt, Artificial Sequence
  Description of Artificial Sequence:  Enzymatic Nucleic Acid
guauuuugcugaugaggccguuaggccgaaaaaauuua

SEQ ID NO: 10712 - RNA, 38 nt, Artificial Sequence
  Description of Artificial Sequence:  Enzymatic Nucleic Acid
aguauuuucugaugaggccguuaggccgaaaaaaauuu

SEQ ID NO: 10713 - RNA, 38 nt, Artificial Sequence
  Description of Artificial Sequence:  Enzymatic Nucleic Acid
ugaauuagcugaugaggccguuaggccgaaauuuugaa

SEQ ID NO: 10714 - RNA, 38 nt, Artificial Sequence
  Description of Artificial Sequence:  Enzymatic Nucleic Acid
uguugaaucugaugaggccguuaggccgaaaguauuuu

SEQ ID NO: 10715 - RNA, 38 nt, Artificial Sequence
  Description of Artificial Sequence:  Enzymatic Nucleic Acid
cuuuguugcugaugaggccguuaggccgaaauuaguau

SEQ ID NO: 10716 - RNA, 38 nt, Artificial Sequence
  Description of Artificial Sequence:  Enzymatic Nucleic Acid
ucuuuguucugaugaggccguuaggccgaaaauuagua

SEQ ID NO: 10717 - RNA, 38 nt, Artificial Sequence
  Description of Artificial Sequence:  Enzymatic Nucleic Acid
aaaaaaaacugaugaggccguuaggccgaaagcuuuuu

SEQ ID NO: 10718 - RNA, 38 nt, Artificial Sequence
  Description of Artificial Sequence:  Enzymatic Nucleic Acid
ggaaaaaacugaugaggccguuaggccgaaagagcuuu

SEQ ID NO: 10719 - RNA, 38 nt, Artificial Sequence
  Description of Artificial Sequence:  Enzymatic Nucleic Acid
aggaaaaacugaugaggccguuaggccgaaaagagcuu

SEQ ID NO: 10720 - RNA, 38 nt, Artificial Sequence
  Description of Artificial Sequence:  Enzymatic Nucleic Acid
uaggaaaacugaugaggccguuaggccgaaaaagagcu

SEQ ID NO: 10721 - RNA, 38 nt, Artificial Sequence
  Description of Artificial Sequence:  Enzymatic Nucleic Acid
uuaggaaacugaugaggccguuaggccgaaaaaagagc

SEQ ID NO: 10722 - RNA, 38 nt, Artificial Sequence
  Description of Artificial Sequence:  Enzymatic Nucleic Acid
uuuaggaacugaugaggccguuaggccgaaaaaaagag

SEQ ID NO: 10723 - RNA, 38 nt, Artificial Sequence
  Description of Artificial Sequence:  Enzymatic Nucleic Acid
uuuuaggacugaugaggccguuaggccgaaaaaaaaga

SEQ ID NO: 10724 - RNA, 38 nt, Artificial Sequence
  Description of Artificial Sequence:  Enzymatic Nucleic Acid
auuuuaggcugaugaggccguuaggccgaaaaaaaaag

SEQ ID NO: 10725 - RNA, 38 nt, Artificial Sequence
  Description of Artificial Sequence:  Enzymatic Nucleic Acid
uauuuuagcugaugaggccguuaggccgaaaaaaaaaa

SEQ ID NO: 10726 - RNA, 38 nt, Artificial Sequence
  Description of Artificial Sequence:  Enzymatic Nucleic Acid
guuuauuucugaugaggccguuaggccgaaaggaaaaa

SEQ ID NO: 10727 - RNA, 38 nt, Artificial Sequence
  Description of Artificial Sequence:  Enzymatic Nucleic Acid
uuugaguucugaugaggccguuaggccgaaauuuuagg

SEQ ID NO: 10728 - RNA, 38 nt, Artificial Sequence
  Description of Artificial Sequence:  Enzymatic Nucleic Acid
auaaauuucugaugaggccguuaggccgaaaguuuauu

SEQ ID NO: 10729 - RNA, 38 nt, Artificial Sequence
  Description of Artificial Sequence:  Enzymatic Nucleic Acid
caaggauacugaugaggccguuaggccgaaauuugagu

SEQ ID NO: 10730 - RNA, 38 nt, Artificial Sequence
  Description of Artificial Sequence:  Enzymatic Nucleic Acid
acaaggaucugaugaggccguuaggccgaaaauuugag

SEQ ID NO: 10731 - RNA, 38 nt, Artificial Sequence
  Description of Artificial Sequence:  Enzymatic Nucleic Acid
aacaaggacugaugaggccguuaggccgaaaaauuuga

SEQ ID NO: 10732 - RNA, 38 nt, Artificial Sequence
  Description of Artificial Sequence:  Enzymatic Nucleic Acid
uaaacaagcugaugaggccguuaggccgaaauaaauuu

SEQ ID NO: 10733 - RNA, 38 nt, Artificial Sequence
  Description of Artificial Sequence:  Enzymatic Nucleic Acid
cucuaaaccugaugaggccguuaggccgaaaggauaaa

SEQ ID NO: 10734 - RNA, 38 nt, Artificial Sequence
  Description of Artificial Sequence:  Enzymatic Nucleic Acid
cugcucuacugaugaggccguuaggccgaaacaaggau

SEQ ID NO: 10735 - RNA, 38 nt, Artificial Sequence
  Description of Artificial Sequence:  Enzymatic Nucleic Acid
ucugcucucugaugaggccguuaggccgaaaacaagga

SEQ ID NO: 10736 - RNA, 38 nt, Artificial Sequence
  Description of Artificial Sequence:  Enzymatic Nucleic Acid
cucugcuccugaugaggccguuaggccgaaaaacaagg

SEQ ID NO: 10737 - RNA, 38 nt, Artificial Sequence
  Description of Artificial Sequence:  Enzymatic Nucleic Acid
uuuuucuucugaugaggccguuaggccgaaauuuuucu

SEQ ID NO: 10738 - RNA, 38 nt, Artificial Sequence
  Description of Artificial Sequence:  Enzymatic Nucleic Acid
guuuuucucugaugaggccguuaggccgaaaauuuuuc

SEQ ID NO: 10739 - RNA, 38 nt, Artificial Sequence
  Description of Artificial Sequence:  Enzymatic Nucleic Acid
ccauuucacugaugaggccguuaggccgaaaguuuuuc

SEQ ID NO: 10740 - RNA, 38 nt, Artificial Sequence
  Description of Artificial Sequence:  Enzymatic Nucleic Acid
accauuuccugaugaggccguuaggccgaaaaguuuuu

SEQ ID NO: 10741 - RNA, 38 nt, Artificial Sequence
  Description of Artificial Sequence:  Enzymatic Nucleic Acid
uuuuuugacugaugaggccguuaggccgaaaccauuuc

SEQ ID NO: 10742 - RNA, 38 nt, Artificial Sequence
  Description of Artificial Sequence:  Enzymatic Nucleic Acid
aauuuuuucugaugaggccguuaggccgaaagaccauu

SEQ ID NO: 10743 - RNA, 38 nt, Artificial Sequence
  Description of Artificial Sequence:  Enzymatic Nucleic Acid
uauuuagccugaugaggccguuaggccgaaauuuuuug

SEQ ID NO: 10744 - RNA, 38 nt, Artificial Sequence
  Description of Artificial Sequence:  Enzymatic Nucleic Acid
aaaauauucugaugaggccguuaggccgaaagcaauuu

SEQ ID NO: 10745 - RNA, 38 nt, Artificial Sequence
  Description of Artificial Sequence:  Enzymatic Nucleic Acid
auugaaaacugaugaggccguuaggccgaaauuuagca

SEQ ID NO: 10746 - RNA, 38 nt, Artificial Sequence
  Description of Artificial Sequence:  Enzymatic Nucleic Acid
ccauugaacugaugaggccguuaggccgaaauauuuag

SEQ ID NO: 10747 - RNA, 38 nt, Artificial Sequence
  Description of Artificial Sequence:  Enzymatic Nucleic Acid
uccauugacugaugaggccguuaggccgaaaauauuua

SEQ ID NO: 10748 - RNA, 38 nt, Artificial Sequence
  Description of Artificial Sequence:  Enzymatic Nucleic Acid
uuccauugcugaugaggccguuaggccgaaaaauauuu

SEQ ID NO: 10749 - RNA, 38 nt, Artificial Sequence
  Description of Artificial Sequence:  Enzymatic Nucleic Acid
uuuccauucugaugaggccguuaggccgaaaaaauauu

SEQ ID NO: 10750 - RNA, 38 nt, Artificial Sequence
  Description of Artificial Sequence:  Enzymatic Nucleic Acid
cuaacauucugaugaggccguuaggccgaaaguuuucc

SEQ ID NO: 10751 - RNA, 38 nt, Artificial Sequence
  Description of Artificial Sequence:  Enzymatic Nucleic Acid
gcuaaacucugaugaggccguuaggccgaaacauuuag

SEQ ID NO: 10752 - RNA, 38 nt, Artificial Sequence
  Description of Artificial Sequence:  Enzymatic Nucleic Acid
agcuaaaccugaugaggccguuaggccgaaaacauuua

SEQ ID NO: 10753 - RNA, 38 nt, Artificial Sequence
  Description of Artificial Sequence:  Enzymatic Nucleic Acid
aucagcuacugaugaggccguuaggccgaaacuaacau

SEQ ID NO: 10754 - RNA, 38 nt, Artificial Sequence
  Description of Artificial Sequence:  Enzymatic Nucleic Acid
aaucagcucugaugaggccguuaggccgaaaacuaaca

SEQ ID NO: 10755 - RNA, 38 nt, Artificial Sequence
  Description of Artificial Sequence:  Enzymatic Nucleic Acid
caaucagccugaugaggccguuaggccgaaaaacuaac

SEQ ID NO: 10756 - RNA, 38 nt, Artificial Sequence
  Description of Artificial Sequence:  Enzymatic Nucleic Acid
ccccauaccugaugaggccguuaggccgaaaucagcua

SEQ ID NO: 10757 - RNA, 38 nt, Artificial Sequence
  Description of Artificial Sequence:  Enzymatic Nucleic Acid
aaaccccacugaugaggccguuaggccgaaacaaucag

SEQ ID NO: 10758 - RNA, 38 nt, Artificial Sequence
  Description of Artificial Sequence:  Enzymatic Nucleic Acid
gguucgaacugaugaggccguuaggccgaaaccccaua

SEQ ID NO: 10759 - RNA, 38 nt, Artificial Sequence
  Description of Artificial Sequence:  Enzymatic Nucleic Acid
agguucgacugaugaggccguuaggccgaaaaccccau

SEQ ID NO: 10760 - RNA, 38 nt, Artificial Sequence
  Description of Artificial Sequence:  Enzymatic Nucleic Acid
aagguucgcugaugaggccguuaggccgaaaaacccca

SEQ ID NO: 10761 - RNA, 38 nt, Artificial Sequence
  Description of Artificial Sequence:  Enzymatic Nucleic Acid
aaagguuccugaugaggccguuaggccgaaaaaacccc

SEQ ID NO: 10762 - RNA, 38 nt, Artificial Sequence
  Description of Artificial Sequence:  Enzymatic Nucleic Acid
aaaagugacugaugaggccguuaggccgaaagguucga

SEQ ID NO: 10763 - RNA, 38 nt, Artificial Sequence
  Description of Artificial Sequence:  Enzymatic Nucleic Acid
aaaaagugcugaugaggccguuaggccgaaaagguucg

SEQ ID NO: 10764 - RNA, 38 nt, Artificial Sequence
  Description of Artificial Sequence:  Enzymatic Nucleic Acid
caaaaagucugaugaggccguuaggccgaaaaagguuc

SEQ ID NO: 10765 - RNA, 38 nt, Artificial Sequence
  Description of Artificial Sequence:  Enzymatic Nucleic Acid
caaacaaacugaugaggccguuaggccgaaagugaaag

SEQ ID NO: 10766 - RNA, 38 nt, Artificial Sequence
  Description of Artificial Sequence:  Enzymatic Nucleic Acid
acaaacaacugaugaggccguuaggccgaaaagugaaa

SEQ ID NO: 10767 - RNA, 38 nt, Artificial Sequence
  Description of Artificial Sequence:  Enzymatic Nucleic Acid
aacaaacacugaugaggccguuaggccgaaaaagugaa

SEQ ID NO: 10768 - RNA, 38 nt, Artificial Sequence
  Description of Artificial Sequence:  Enzymatic Nucleic Acid
aaacaaaccugaugaggccguuaggccgaaaaaaguga

SEQ ID NO: 10769 - RNA, 38 nt, Artificial Sequence
  Description of Artificial Sequence:  Enzymatic Nucleic Acid
guaaaacacugaugaggccguuaggccgaaacaaaaag

SEQ ID NO: 10770 - RNA, 38 nt, Artificial Sequence
  Description of Artificial Sequence:  Enzymatic Nucleic Acid
gguaaaaccugaugaggccguuaggccgaaaacaaaaa

SEQ ID NO: 10771 - RNA, 38 nt, Artificial Sequence
  Description of Artificial Sequence:  Enzymatic Nucleic Acid
auagguaacugaugaggccguuaggccgaaacaaacaa

SEQ ID NO: 10772 - RNA, 38 nt, Artificial Sequence
  Description of Artificial Sequence:  Enzymatic Nucleic Acid
aauagguacugaugaggccguuaggccgaaaacaaaca

SEQ ID NO: 10773 - RNA, 38 nt, Artificial Sequence
  Description of Artificial Sequence:  Enzymatic Nucleic Acid
aaauaggucugaugaggccguuaggccgaaaaacaaac

SEQ ID NO: 10774 - RNA, 38 nt, Artificial Sequence
  Description of Artificial Sequence:  Enzymatic Nucleic Acid
gaaauaggcugaugaggccguuaggccgaaaaaacaaa

SEQ ID NO: 10775 - RNA, 38 nt, Artificial Sequence
  Description of Artificial Sequence:  Enzymatic Nucleic Acid
uugugaaacugaugaggccguuaggccgaaagguaaaa

SEQ ID NO: 10776 - RNA, 38 nt, Artificial Sequence
  Description of Artificial Sequence:  Enzymatic Nucleic Acid
aguugugacugaugaggccguuaggccgaaauagguaa

SEQ ID NO: 10777 - RNA, 38 nt, Artificial Sequence
  Description of Artificial Sequence:  Enzymatic Nucleic Acid
caguugugcugaugaggccguuaggccgaaaauaggua

SEQ ID NO: 10778 - RNA, 38 nt, Artificial Sequence
  Description of Artificial Sequence:  Enzymatic Nucleic Acid
acaguugucugaugaggccguuaggccgaaaaauaggu

SEQ ID NO: 10779 - RNA, 38 nt, Artificial Sequence
  Description of Artificial Sequence:  Enzymatic Nucleic Acid
uggcaauucugaugaggccguuaggccgaaacacaguu

SEQ ID NO: 10780 - RNA, 38 nt, Artificial Sequence
  Description of Artificial Sequence:  Enzymatic Nucleic Acid
uuauuggccugaugaggccguuaggccgaaauuuacac

SEQ ID NO: 10781 - RNA, 38 nt, Artificial Sequence
  Description of Artificial Sequence:  Enzymatic Nucleic Acid
acaggaaucugaugaggccguuaggccgaaauuggcaa

SEQ ID NO: 10782 - RNA, 38 nt, Artificial Sequence
  Description of Artificial Sequence:  Enzymatic Nucleic Acid
uggacaggcugaugaggccguuaggccgaaauuauugg

SEQ ID NO: 10783 - RNA, 38 nt, Artificial Sequence
  Description of Artificial Sequence:  Enzymatic Nucleic Acid
auggacagcugaugaggccguuaggccgaaaauuauug

SEQ ID NO: 10784 - RNA, 38 nt, Artificial Sequence
  Description of Artificial Sequence:  Enzymatic Nucleic Acid
uuuucaugcugaugaggccguuaggccgaaacaggaau

SEQ ID NO: 10785 - RNA, 38 nt, Artificial Sequence
  Description of Artificial Sequence:  Enzymatic Nucleic Acid
cacuggaucugaugaggccguuaggccgaaauuugcau

SEQ ID NO: 10786 - RNA, 38 nt, Artificial Sequence
  Description of Artificial Sequence:  Enzymatic Nucleic Acid
acacuggacugaugaggccguuaggccgaaaauuugca

SEQ ID NO: 10787 - RNA, 38 nt, Artificial Sequence
  Description of Artificial Sequence:  Enzymatic Nucleic Acid
cuacacugcugaugaggccguuaggccgaaauaauuug

SEQ ID NO: 10788 - RNA, 38 nt, Artificial Sequence
  Description of Artificial Sequence:  Enzymatic Nucleic Acid
aauauauccugaugaggccguuaggccgaaacacugga

SEQ ID NO: 10789 - RNA, 38 nt, Artificial Sequence
  Description of Artificial Sequence:  Enzymatic Nucleic Acid
gucaaauacugaugaggccguuaggccgaaaucuacac

SEQ ID NO: 10790 - RNA, 38 nt, Artificial Sequence
  Description of Artificial Sequence:  Enzymatic Nucleic Acid
uggucaaacugaugaggccguuaggccgaaauaucuac

SEQ ID NO: 10791 - RNA, 38 nt, Artificial Sequence
  Description of Artificial Sequence:  Enzymatic Nucleic Acid
gauggucacugaugaggccguuaggccgaaauauaucu

SEQ ID NO: 10792 - RNA, 38 nt, Artificial Sequence
  Description of Artificial Sequence:  Enzymatic Nucleic Acid
ugaugguccugaugaggccguuaggccgaaaauauauc

SEQ ID NO: 10793 - RNA, 38 nt, Artificial Sequence
  Description of Artificial Sequence:  Enzymatic Nucleic Acid
cauagggucugaugaggccguuaggccgaaauggucaa

SEQ ID NO: 10794 - RNA, 38 nt, Artificial Sequence
  Description of Artificial Sequence:  Enzymatic Nucleic Acid
aauauccacugaugaggccguuaggccgaaagggugau

SEQ ID NO: 10795 - RNA, 38 nt, Artificial Sequence
  Description of Artificial Sequence:  Enzymatic Nucleic Acid
cuagccaacugaugaggccguuaggccgaaauccauag

SEQ ID NO: 10796 - RNA, 38 nt, Artificial Sequence
  Description of Artificial Sequence:  Enzymatic Nucleic Acid
aacuagcccugaugaggccguuaggccgaaauauccau

SEQ ID NO: 10797 - RNA, 38 nt, Artificial Sequence
  Description of Artificial Sequence:  Enzymatic Nucleic Acid
ggcaaaaccugaugaggccguuaggccgaaagccaaua

SEQ ID NO: 10798 - RNA, 38 nt, Artificial Sequence
  Description of Artificial Sequence:  Enzymatic Nucleic Acid
aaaggcaacugaugaggccguuaggccgaaacuagcca

SEQ ID NO: 10799 - RNA, 38 nt, Artificial Sequence
  Description of Artificial Sequence:  Enzymatic Nucleic Acid
uaaaggcacugaugaggccguuaggccgaaaacuagcc

SEQ ID NO: 10800 - RNA, 38 nt, Artificial Sequence
  Description of Artificial Sequence:  Enzymatic Nucleic Acid
auaaaggccugaugaggccguuaggccgaaaaacuagc

SEQ ID NO: 10801 - RNA, 38 nt, Artificial Sequence
  Description of Artificial Sequence:  Enzymatic Nucleic Acid
gcuuaauacugaugaggccguuaggccgaaaggcaaaa

SEQ ID NO: 10802 - RNA, 38 nt, Artificial Sequence
  Description of Artificial Sequence:  Enzymatic Nucleic Acid
ugcuuaaucugaugaggccguuaggccgaaaaggcaaa

SEQ ID NO: 10803 - RNA, 38 nt, Artificial Sequence
  Description of Artificial Sequence:  Enzymatic Nucleic Acid
uugcuuaacugaugaggccguuaggccgaaaaaggcaa

SEQ ID NO: 10804 - RNA, 38 nt, Artificial Sequence
  Description of Artificial Sequence:  Enzymatic Nucleic Acid
auuugcuucugaugaggccguuaggccgaaauaaaggc

SEQ ID NO: 10805 - RNA, 38 nt, Artificial Sequence
  Description of Artificial Sequence:  Enzymatic Nucleic Acid
aauuugcucugaugaggccguuaggccgaaaauaaagg

SEQ ID NO: 10806 - RNA, 38 nt, Artificial Sequence
  Description of Artificial Sequence:  Enzymatic Nucleic Acid
cugaaaugcugaugaggccguuaggccgaaauuugcuu

SEQ ID NO: 10807 - RNA, 38 nt, Artificial Sequence
  Description of Artificial Sequence:  Enzymatic Nucleic Acid
gcugaaaucugaugaggccguuaggccgaaaauuugcu

SEQ ID NO: 10808 - RNA, 38 nt, Artificial Sequence
  Description of Artificial Sequence:  Enzymatic Nucleic Acid
caggcugacugaugaggccguuaggccgaaaugaauuu

SEQ ID NO: 10809 - RNA, 38 nt, Artificial Sequence
  Description of Artificial Sequence:  Enzymatic Nucleic Acid
ucaggcugcugaugaggccguuaggccgaaaaugaauu

SEQ ID NO: 10810 - RNA, 38 nt, Artificial Sequence
  Description of Artificial Sequence:  Enzymatic Nucleic Acid
uucaggcucugaugaggccguuaggccgaaaaaugaau

SEQ ID NO: 10811 - RNA, 38 nt, Artificial Sequence
  Description of Artificial Sequence:  Enzymatic Nucleic Acid
uauaggcacugaugaggccguuaggccgaaacauucag

SEQ ID NO: 10812 - RNA, 38 nt, Artificial Sequence
  Description of Artificial Sequence:  Enzymatic Nucleic Acid
agaauauacugaugaggccguuaggccgaaaggcagac

SEQ ID NO: 10813 - RNA, 38 nt, Artificial Sequence
  Description of Artificial Sequence:  Enzymatic Nucleic Acid
agagaauacugaugaggccguuaggccgaaauaggcag

SEQ ID NO: 10814 - RNA, 38 nt, Artificial Sequence
  Description of Artificial Sequence:  Enzymatic Nucleic Acid
gcagagaacugaugaggccguuaggccgaaauauaggc

SEQ ID NO: 10815 - RNA, 38 nt, Artificial Sequence
  Description of Artificial Sequence:  Enzymatic Nucleic Acid
gagcagagcugaugaggccguuaggccgaaauauauag

SEQ ID NO: 10816 - RNA, 38 nt, Artificial Sequence
  Description of Artificial Sequence:  Enzymatic Nucleic Acid
agagcagacugaugaggccguuaggccgaaaauauaua

SEQ ID NO: 10817 - RNA, 38 nt, Artificial Sequence
  Description of Artificial Sequence:  Enzymatic Nucleic Acid
aaagagcacugaugaggccguuaggccgaaagaauaua

SEQ ID NO: 10818 - RNA, 38 nt, Artificial Sequence
  Description of Artificial Sequence:  Enzymatic Nucleic Acid
aauacaaacugaugaggccguuaggccgaaagcagaga

SEQ ID NO: 10819 - RNA, 38 nt, Artificial Sequence
  Description of Artificial Sequence:  Enzymatic Nucleic Acid
agaauacacugaugaggccguuaggccgaaagagcaga

SEQ ID NO: 10820 - RNA, 38 nt, Artificial Sequence
  Description of Artificial Sequence:  Enzymatic Nucleic Acid
gagaauaccugaugaggccguuaggccgaaaagagcag

SEQ ID NO: 10821 - RNA, 38 nt, Artificial Sequence
  Description of Artificial Sequence:  Enzymatic Nucleic Acid
aaggagaacugaugaggccguuaggccgaaacaaagag

SEQ ID NO: 10822 - RNA, 38 nt, Artificial Sequence
  Description of Artificial Sequence:  Enzymatic Nucleic Acid
caaaggagcugaugaggccguuaggccgaaauacaaag

SEQ ID NO: 10823 - RNA, 38 nt, Artificial Sequence
  Description of Artificial Sequence:  Enzymatic Nucleic Acid
ucaaaggacugaugaggccguuaggccgaaaauacaaa

SEQ ID NO: 10824 - RNA, 38 nt, Artificial Sequence
  Description of Artificial Sequence:  Enzymatic Nucleic Acid
guucaaagcugaugaggccguuaggccgaaagaauaca

SEQ ID NO: 10825 - RNA, 38 nt, Artificial Sequence
  Description of Artificial Sequence:  Enzymatic Nucleic Acid
cggguucacugaugaggccguuaggccgaaaggagaau

SEQ ID NO: 10826 - RNA, 38 nt, Artificial Sequence
  Description of Artificial Sequence:  Enzymatic Nucleic Acid
acggguuccugaugaggccguuaggccgaaaaggagaa

SEQ ID NO: 10827 - RNA, 38 nt, Artificial Sequence
  Description of Artificial Sequence:  Enzymatic Nucleic Acid
gauguuuucugaugaggccguuaggccgaaacggguuc

SEQ ID NO: 10828 - RNA, 38 nt, Artificial Sequence
  Description of Artificial Sequence:  Enzymatic Nucleic Acid
ggauguuucugaugaggccguuaggccgaaaacggguu

SEQ ID NO: 10829 - RNA, 38 nt, Artificial Sequence
  Description of Artificial Sequence:  Enzymatic Nucleic Acid
ugccacagcugaugaggccguuaggccgaaauguuuua

SEQ ID NO: 10830 - RNA, 54 nt, Artificial Sequence
  Description of Artificial Sequence:  Enzymatic Nucleic Acid
cggggaggagaagagaggaccagagaaacacacguugugguacauuaccuggua

SEQ ID NO: 10831 - RNA, 54 nt, Artificial Sequence
  Description of Artificial Sequence:  Enzymatic Nucleic Acid
ccgcuccgagaagccgccaccagagaaacacacguugugguacauuaccuggua

SEQ ID NO: 10832 - RNA, 54 nt, Artificial Sequence
  Description of Artificial Sequence:  Enzymatic Nucleic Acid
ccgccagaagaaguccucaccagagaaacacacguugugguacauuaccuggua

SEQ ID NO: 10833 - RNA, 54 nt, Artificial Sequence
  Description of Artificial Sequence:  Enzymatic Nucleic Acid
aacgacccagaagccagaaccagagaaacacacguugugguacauuaccuggua

SEQ ID NO: 10834 - RNA, 54 nt, Artificial Sequence
  Description of Artificial Sequence:  Enzymatic Nucleic Acid
gcgcgcacagaaggacccaccagagaaacacacguugugguacauuaccuggua

SEQ ID NO: 10835 - RNA, 54 nt, Artificial Sequence
  Description of Artificial Sequence:  Enzymatic Nucleic Acid
gacagcugagaagcgcgcaccagagaaacacacguugugguacauuaccuggua

SEQ ID NO: 10836 - RNA, 54 nt, Artificial Sequence
  Description of Artificial Sequence:  Enzymatic Nucleic Acid
aagcagacagaagagcagaccagagaaacacacguugugguacauuaccuggua

SEQ ID NO: 10837 - RNA, 54 nt, Artificial Sequence
  Description of Artificial Sequence:  Enzymatic Nucleic Acid
gagaagcaagaagcugagaccagagaaacacacguugugguacauuaccuggua

SEQ ID NO: 10838 - RNA, 54 nt, Artificial Sequence
  Description of Artificial Sequence:  Enzymatic Nucleic Acid
cugugagaagaagacagcaccagagaaacacacguugugguacauuaccuggua

SEQ ID NO: 10839 - RNA, 54 nt, Artificial Sequence
  Description of Artificial Sequence:  Enzymatic Nucleic Acid
cauuuaugagaagcuuccaccagagaaacacacguugugguacauuaccuggua

SEQ ID NO: 10840 - RNA, 54 nt, Artificial Sequence
  Description of Artificial Sequence:  Enzymatic Nucleic Acid
cuuccacaagaagauuuaaccagagaaacacacguugugguacauuaccuggua

SEQ ID NO: 10841 - RNA, 54 nt, Artificial Sequence
  Description of Artificial Sequence:  Enzymatic Nucleic Acid
uuugcuugagaaguguucaccagagaaacacacguugugguacauuaccuggua

SEQ ID NO: 10842 - RNA, 54 nt, Artificial Sequence
  Description of Artificial Sequence:  Enzymatic Nucleic Acid
auauuugcagaaguagaaaccagagaaacacacguugugguacauuaccuggua

SEQ ID NO: 10843 - RNA, 54 nt, Artificial Sequence
  Description of Artificial Sequence:  Enzymatic Nucleic Acid
cguaacccagaagggaauaccagagaaacacacguugugguacauuaccuggua

SEQ ID NO: 10844 - RNA, 54 nt, Artificial Sequence
  Description of Artificial Sequence:  Enzymatic Nucleic Acid
cguuuuccagaagggaucaccagagaaacacacguugugguacauuaccuggua

SEQ ID NO: 10845 - RNA, 54 nt, Artificial Sequence
  Description of Artificial Sequence:  Enzymatic Nucleic Acid
cuucacagagaagaagccaccagagaaacacacguugugguacauuaccuggua

SEQ ID NO: 10846 - RNA, 54 nt, Artificial Sequence
  Description of Artificial Sequence:  Enzymatic Nucleic Acid
uuuuuuucagaaggguaaaccagagaaacacacguugugguacauuaccuggua

SEQ ID NO: 10847 - RNA, 54 nt, Artificial Sequence
  Description of Artificial Sequence:  Enzymatic Nucleic Acid
gccgguaaagaagcuugcaccagagaaacacacguugugguacauuaccuggua

SEQ ID NO: 10848 - RNA, 54 nt, Artificial Sequence
  Description of Artificial Sequence:  Enzymatic Nucleic Acid
ucauagagagaagguaagaccagagaaacacacguugugguacauuaccuggua

SEQ ID NO: 10849 - RNA, 54 nt, Artificial Sequence
  Description of Artificial Sequence:  Enzymatic Nucleic Acid
aaauagcgagaagauuucaccagagaaacacacguugugguacauuaccuggua

SEQ ID NO: 10850 - RNA, 54 nt, Artificial Sequence
  Description of Artificial Sequence:  Enzymatic Nucleic Acid
uuucguaaagaagggguuaccagagaaacacacguugugguacauuaccuggua

SEQ ID NO: 10851 - RNA, 54 nt, Artificial Sequence
  Description of Artificial Sequence:  Enzymatic Nucleic Acid
agagccggagaaggaaacaccagagaaacacacguugugguacauuaccuggua

SEQ ID NO: 10852 - RNA, 54 nt, Artificial Sequence
  Description of Artificial Sequence:  Enzymatic Nucleic Acid
ggguagagagaagggucuaccagagaaacacacguugugguacauuaccuggua

SEQ ID NO: 10853 - RNA, 54 nt, Artificial Sequence
  Description of Artificial Sequence:  Enzymatic Nucleic Acid
cgguacaaagaaggauuuaccagagaaacacacguugugguacauuaccuggua

SEQ ID NO: 10854 - RNA, 54 nt, Artificial Sequence
  Description of Artificial Sequence:  Enzymatic Nucleic Acid
auucuagaagaagccacaaccagagaaacacacguugugguacauuaccuggua

SEQ ID NO: 10855 - RNA, 54 nt, Artificial Sequence
  Description of Artificial Sequence:  Enzymatic Nucleic Acid
uuuggcacagaagugauaaccagagaaacacacguugugguacauuaccuggua

SEQ ID NO: 10856 - RNA, 54 nt, Artificial Sequence
  Description of Artificial Sequence:  Enzymatic Nucleic Acid
cuccuuccagaagcauuuaccagagaaacacacguugugguacauuaccuggua

SEQ ID NO: 10857 - RNA, 54 nt, Artificial Sequence
  Description of Artificial Sequence:  Enzymatic Nucleic Acid
cugugcaaagaaguuucaaccagagaaacacacguugugguacauuaccuggua

SEQ ID NO: 10858 - RNA, 54 nt, Artificial Sequence
  Description of Artificial Sequence:  Enzymatic Nucleic Acid
agugguggagaagcugauaccagagaaacacacguugugguacauuaccuggua

SEQ ID NO: 10859 - RNA, 54 nt, Artificial Sequence
  Description of Artificial Sequence:  Enzymatic Nucleic Acid
accaagugagaagaggcuaccagagaaacacacguugugguacauuaccuggua

SEQ ID NO: 10860 - RNA, 54 nt, Artificial Sequence
  Description of Artificial Sequence:  Enzymatic Nucleic Acid
uuucaauaagaagcgugcaccagagaaacacacguugugguacauuaccuggua

SEQ ID NO: 10861 - RNA, 54 nt, Artificial Sequence
  Description of Artificial Sequence:  Enzymatic Nucleic Acid
guuccuugagaagugaggaccagagaaacacacguugugguacauuaccuggua

SEQ ID NO: 10862 - RNA, 54 nt, Artificial Sequence
  Description of Artificial Sequence:  Enzymatic Nucleic Acid
uuagagugagaagcuccaaccagagaaacacacguugugguacauuaccuggua

SEQ ID NO: 10863 - RNA, 54 nt, Artificial Sequence
  Description of Artificial Sequence:  Enzymatic Nucleic Acid
gauagguaagaagucuuuaccagagaaacacacguugugguacauuaccuggua

SEQ ID NO: 10864 - RNA, 54 nt, Artificial Sequence
  Description of Artificial Sequence:  Enzymatic Nucleic Acid
ggaacuucagaaggguccaccagagaaacacacguugugguacauuaccuggua

SEQ ID NO: 10865 - RNA, 54 nt, Artificial Sequence
  Description of Artificial Sequence:  Enzymatic Nucleic Acid
cauaagggagaagcucacaccagagaaacacacguugugguacauuaccuggua

SEQ ID NO: 10866 - RNA, 54 nt, Artificial Sequence
  Description of Artificial Sequence:  Enzymatic Nucleic Acid
cagccacaagaaggcacgaccagagaaacacacguugugguacauuaccuggua

SEQ ID NO: 10867 - RNA, 54 nt, Artificial Sequence
  Description of Artificial Sequence:  Enzymatic Nucleic Acid
gcucagucagaagagcuuaccagagaaacacacguugugguacauuaccuggua

SEQ ID NO: 10868 - RNA, 54 nt, Artificial Sequence
  Description of Artificial Sequence:  Enzymatic Nucleic Acid
aggcucccagaagguuaaaccagagaaacacacguugugguacauuaccuggua

SEQ ID NO: 10869 - RNA, 54 nt, Artificial Sequence
  Description of Artificial Sequence:  Enzymatic Nucleic Acid
caaucaccagaagaggccaccagagaaacacacguugugguacauuaccuggua

SEQ ID NO: 10870 - RNA, 54 nt, Artificial Sequence
  Description of Artificial Sequence:  Enzymatic Nucleic Acid
uuccugaaagaaggagcuaccagagaaacacacguugugguacauuaccuggua

SEQ ID NO: 10871 - RNA, 54 nt, Artificial Sequence
  Description of Artificial Sequence:  Enzymatic Nucleic Acid
uagaaaccagaagaauccaccagagaaacacacguugugguacauuaccuggua

SEQ ID NO: 10872 - RNA, 54 nt, Artificial Sequence
  Description of Artificial Sequence:  Enzymatic Nucleic Acid
cuuguagaagaagucagaaccagagaaacacacguugugguacauuaccuggua

SEQ ID NO: 10873 - RNA, 54 nt, Artificial Sequence
  Description of Artificial Sequence:  Enzymatic Nucleic Acid
uguaagaaagaagaucuuaccagagaaacacacguugugguacauuaccuggua

SEQ ID NO: 10874 - RNA, 54 nt, Artificial Sequence
  Description of Artificial Sequence:  Enzymatic Nucleic Acid
cacuugaaagaaguaagaaccagagaaacacacguugugguacauuaccuggua

SEQ ID NO: 10875 - RNA, 54 nt, Artificial Sequence
  Description of Artificial Sequence:  Enzymatic Nucleic Acid
uucuggaaagaaggaacuaccagagaaacacacguugugguacauuaccuggua

SEQ ID NO: 10876 - RNA, 54 nt, Artificial Sequence
  Description of Artificial Sequence:  Enzymatic Nucleic Acid
cucacauaagaaggguucaccagagaaacacacguugugguacauuaccuggua

SEQ ID NO: 10877 - RNA, 54 nt, Artificial Sequence
  Description of Artificial Sequence:  Enzymatic Nucleic Acid
ccucaggcagaagcaaaaaccagagaaacacacguugugguacauuaccuggua

SEQ ID NO: 10878 - RNA, 54 nt, Artificial Sequence
  Description of Artificial Sequence:  Enzymatic Nucleic Acid
ccagcaugagaagauagaaccagagaaacacacguugugguacauuaccuggua

SEQ ID NO: 10879 - RNA, 54 nt, Artificial Sequence
  Description of Artificial Sequence:  Enzymatic Nucleic Acid
ucugugccagaaguccagaccagagaaacacacguugugguacauuaccuggua

SEQ ID NO: 10880 - RNA, 54 nt, Artificial Sequence
  Description of Artificial Sequence:  Enzymatic Nucleic Acid
ucagagaaagaaggaguuaccagagaaacacacguugugguacauuaccuggua

SEQ ID NO: 10881 - RNA, 54 nt, Artificial Sequence
  Description of Artificial Sequence:  Enzymatic Nucleic Acid
aacuucggagaagaaauaaccagagaaacacacguugugguacauuaccuggua

SEQ ID NO: 10882 - RNA, 54 nt, Artificial Sequence
  Description of Artificial Sequence:  Enzymatic Nucleic Acid
cugacaucagaagagcuuaccagagaaacacacguugugguacauuaccuggua

SEQ ID NO: 10883 - RNA, 54 nt, Artificial Sequence
  Description of Artificial Sequence:  Enzymatic Nucleic Acid
gagaggccagaagagugcaccagagaaacacacguugugguacauuaccuggua

SEQ ID NO: 10884 - RNA, 54 nt, Artificial Sequence
  Description of Artificial Sequence:  Enzymatic Nucleic Acid
ugacaucaagaagccccgaccagagaaacacacguugugguacauuaccuggua

SEQ ID NO: 10885 - RNA, 54 nt, Artificial Sequence
  Description of Artificial Sequence:  Enzymatic Nucleic Acid
cugcugacagaagacagcaccagagaaacacacguugugguacauuaccuggua

SEQ ID NO: 10886 - RNA, 54 nt, Artificial Sequence
  Description of Artificial Sequence:  Enzymatic Nucleic Acid
auggcagaagaagggccuaccagagaaacacacguugugguacauuaccuggua

SEQ ID NO: 10887 - RNA, 54 nt, Artificial Sequence
  Description of Artificial Sequence:  Enzymatic Nucleic Acid
gugcccacagaaggaaugaccagagaaacacacguugugguacauuaccuggua

SEQ ID NO: 10888 - RNA, 54 nt, Artificial Sequence
  Description of Artificial Sequence:  Enzymatic Nucleic Acid
gggcggggagaagcacgcaccagagaaacacacguugugguacauuaccuggua

SEQ ID NO: 10889 - RNA, 54 nt, Artificial Sequence
  Description of Artificial Sequence:  Enzymatic Nucleic Acid
agucugggagaagggagcaccagagaaacacacguugugguacauuaccuggua

SEQ ID NO: 10890 - RNA, 54 nt, Artificial Sequence
  Description of Artificial Sequence:  Enzymatic Nucleic Acid
gaguuguaagaagggggcaccagagaaacacacguugugguacauuaccuggua

SEQ ID NO: 10891 - RNA, 54 nt, Artificial Sequence
  Description of Artificial Sequence:  Enzymatic Nucleic Acid
caaaaagcagaaggcuccaccagagaaacacacguugugguacauuaccuggua

SEQ ID NO: 10892 - RNA, 54 nt, Artificial Sequence
  Description of Artificial Sequence:  Enzymatic Nucleic Acid
ucacaaaaagaagcuggcaccagagaaacacacguugugguacauuaccuggua

SEQ ID NO: 10893 - RNA, 54 nt, Artificial Sequence
  Description of Artificial Sequence:  Enzymatic Nucleic Acid
gggguuggagaagggaagaccagagaaacacacguugugguacauuaccuggua

SEQ ID NO: 10894 - RNA, 54 nt, Artificial Sequence
  Description of Artificial Sequence:  Enzymatic Nucleic Acid
cucaaucaagaagguccuaccagagaaacacacguugugguacauuaccuggua

SEQ ID NO: 10895 - RNA, 54 nt, Artificial Sequence
  Description of Artificial Sequence:  Enzymatic Nucleic Acid
auugggugagaagugcagaccagagaaacacacguugugguacauuaccuggua

SEQ ID NO: 10896 - RNA, 54 nt, Artificial Sequence
  Description of Artificial Sequence:  Enzymatic Nucleic Acid
ggcugcagagaaggcccaaccagagaaacacacguugugguacauuaccuggua

SEQ ID NO: 10897 - RNA, 54 nt, Artificial Sequence
  Description of Artificial Sequence:  Enzymatic Nucleic Acid
ggguuuugagaagcagggaccagagaaacacacguugugguacauuaccuggua

SEQ ID NO: 10898 - RNA, 54 nt, Artificial Sequence
  Description of Artificial Sequence:  Enzymatic Nucleic Acid
agggucagagaagggaagaccagagaaacacacguugugguacauuaccuggua

SEQ ID NO: 10899 - RNA, 54 nt, Artificial Sequence
  Description of Artificial Sequence:  Enzymatic Nucleic Acid
guagaaggagaagagcugaccagagaaacacacguugugguacauuaccuggua

SEQ ID NO: 10900 - RNA, 54 nt, Artificial Sequence
  Description of Artificial Sequence:  Enzymatic Nucleic Acid
cgcuguccagaagcuccuaccagagaaacacacguugugguacauuaccuggua

SEQ ID NO: 10901 - RNA, 54 nt, Artificial Sequence
  Description of Artificial Sequence:  Enzymatic Nucleic Acid
cugugcaaagaagaauaaaccagagaaacacacguugugguacauuaccuggua

SEQ ID NO: 10902 - RNA, 54 nt, Artificial Sequence
  Description of Artificial Sequence:  Enzymatic Nucleic Acid
cuccucagagaagcauuuaccagagaaacacacguugugguacauuaccuggua

SEQ ID NO: 10903 - RNA, 54 nt, Artificial Sequence
  Description of Artificial Sequence:  Enzymatic Nucleic Acid
uuuccuccagaagcccucaccagagaaacacacguugugguacauuaccuggua

SEQ ID NO: 10904 - RNA, 54 nt, Artificial Sequence
  Description of Artificial Sequence:  Enzymatic Nucleic Acid
gguauagaagaagggucuaccagagaaacacacguugugguacauuaccuggua

SEQ ID NO: 10905 - RNA, 54 nt, Artificial Sequence
  Description of Artificial Sequence:  Enzymatic Nucleic Acid
ugggucccagaaguguugaccagagaaacacacguugugguacauuaccuggua

SEQ ID NO: 10906 - RNA, 54 nt, Artificial Sequence
  Description of Artificial Sequence:  Enzymatic Nucleic Acid
ugagucccagaaggagaaaccagagaaacacacguugugguacauuaccuggua

SEQ ID NO: 10907 - RNA, 54 nt, Artificial Sequence
  Description of Artificial Sequence:  Enzymatic Nucleic Acid
aguuucaaagaaguugaaaccagagaaacacacguugugguacauuaccuggua

SEQ ID NO: 10908 - RNA, 54 nt, Artificial Sequence
  Description of Artificial Sequence:  Enzymatic Nucleic Acid
uagcaucaagaagagccaaccagagaaacacacguugugguacauuaccuggua

SEQ ID NO: 10909 - RNA, 54 nt, Artificial Sequence
  Description of Artificial Sequence:  Enzymatic Nucleic Acid
ccccaagaagaagcaaucaccagagaaacacacguugugguacauuaccuggua

SEQ ID NO: 10910 - RNA, 54 nt, Artificial Sequence
  Description of Artificial Sequence:  Enzymatic Nucleic Acid
cacauaagagaagaggcaaccagagaaacacacguugugguacauuaccuggua

SEQ ID NO: 10911 - RNA, 54 nt, Artificial Sequence
  Description of Artificial Sequence:  Enzymatic Nucleic Acid
uccacaaaagaagcugccaccagagaaacacacguugugguacauuaccuggua

SEQ ID NO: 10912 - RNA, 54 nt, Artificial Sequence
  Description of Artificial Sequence:  Enzymatic Nucleic Acid
guggagagagaagucccaaccagagaaacacacguugugguacauuaccuggua

SEQ ID NO: 10913 - RNA, 54 nt, Artificial Sequence
  Description of Artificial Sequence:  Enzymatic Nucleic Acid
aaauugccagaagucacaaccagagaaacacacguugugguacauuaccuggua

SEQ ID NO: 10914 - RNA, 54 nt, Artificial Sequence
  Description of Artificial Sequence:  Enzymatic Nucleic Acid
aagacaugagaagcuaagaccagagaaacacacguugugguacauuaccuggua

SEQ ID NO: 10915 - RNA, 54 nt, Artificial Sequence
  Description of Artificial Sequence:  Enzymatic Nucleic Acid
uuugaaggagaagaguaaaccagagaaacacacguugugguacauuaccuggua

SEQ ID NO: 10916 - RNA, 54 nt, Artificial Sequence
  Description of Artificial Sequence:  Enzymatic Nucleic Acid
uccacccaagaaguuccaaccagagaaacacacguugugguacauuaccuggua

SEQ ID NO: 10917 - RNA, 54 nt, Artificial Sequence
  Description of Artificial Sequence:  Enzymatic Nucleic Acid
acuucuugagaagacaagaccagagaaacacacguugugguacauuaccuggua

SEQ ID NO: 10918 - RNA, 54 nt, Artificial Sequence
  Description of Artificial Sequence:  Enzymatic Nucleic Acid
aacauaaaagaaguugccaccagagaaacacacguugugguacauuaccuggua

SEQ ID NO: 10919 - RNA, 54 nt, Artificial Sequence
  Description of Artificial Sequence:  Enzymatic Nucleic Acid
uggaaggaagaagaacauaccagagaaacacacguugugguacauuaccuggua

SEQ ID NO: 10920 - RNA, 54 nt, Artificial Sequence
  Description of Artificial Sequence:  Enzymatic Nucleic Acid
cccauacaagaagcuaaaaccagagaaacacacguugugguacauuaccuggua

SEQ ID NO: 10921 - RNA, 54 nt, Artificial Sequence
  Description of Artificial Sequence:  Enzymatic Nucleic Acid
uuuucaugagaaggaauuaccagagaaacacacguugugguacauuaccuggua

SEQ ID NO: 10922 - RNA, 54 nt, Artificial Sequence
  Description of Artificial Sequence:  Enzymatic Nucleic Acid
gacauucaagaagaaaugaccagagaaacacacguugugguacauuaccuggua

SEQ ID NO: 10923 - RNA, 54 nt, Artificial Sequence
  Description of Artificial Sequence:  Enzymatic Nucleic Acid
aauauauaagaagacauuaccagagaaacacacguugugguacauuaccuggua

SEQ ID NO: 10924 - RNA, 54 nt, Artificial Sequence
  Description of Artificial Sequence:  Enzymatic Nucleic Acid
auacaaagagaagagaauaccagagaaacacacguugugguacauuaccuggua

SEQ ID NO: 10925 - RNA, 38 nt, Artificial Sequence
  Description of Artificial Sequence:  Enzymatic Nucleic Acid
cacagggccugaugaggccguuaggccgaaacggccag

SEQ ID NO: 10926 - RNA, 38 nt, Artificial Sequence
  Description of Artificial Sequence:  Enzymatic Nucleic Acid
uccacgcacugaugaggccguuaggccgaaagccacag

SEQ ID NO: 10927 - RNA, 38 nt, Artificial Sequence
  Description of Artificial Sequence:  Enzymatic Nucleic Acid
aacccacacugaugaggccguuaggccgaaaggcggcc

SEQ ID NO: 10928 - RNA, 38 nt, Artificial Sequence
  Description of Artificial Sequence:  Enzymatic Nucleic Acid
acuaggcacugaugaggccguuaggccgaaacccacag

SEQ ID NO: 10929 - RNA, 38 nt, Artificial Sequence
  Description of Artificial Sequence:  Enzymatic Nucleic Acid
cacuaggccugaugaggccguuaggccgaaaacccaca

SEQ ID NO: 10930 - RNA, 38 nt, Artificial Sequence
  Description of Artificial Sequence:  Enzymatic Nucleic Acid
agaaacaccugaugaggccguuaggccgaaaggcaaac

SEQ ID NO: 10931 - RNA, 38 nt, Artificial Sequence
  Description of Artificial Sequence:  Enzymatic Nucleic Acid
ucaagagacugaugaggccguuaggccgaaacacuagg

SEQ ID NO: 10932 - RNA, 38 nt, Artificial Sequence
  Description of Artificial Sequence:  Enzymatic Nucleic Acid
aucaagagcugaugaggccguuaggccgaaaacacuag

SEQ ID NO: 10933 - RNA, 38 nt, Artificial Sequence
  Description of Artificial Sequence:  Enzymatic Nucleic Acid
gaucaagacugaugaggccguuaggccgaaaaacacua

SEQ ID NO: 10934 - RNA, 38 nt, Artificial Sequence
  Description of Artificial Sequence:  Enzymatic Nucleic Acid
cagaucaacugaugaggccguuaggccgaaagaaacac

SEQ ID NO: 10935 - RNA, 38 nt, Artificial Sequence
  Description of Artificial Sequence:  Enzymatic Nucleic Acid
ggcagauccugaugaggccguuaggccgaaagagaaac

SEQ ID NO: 10936 - RNA, 38 nt, Artificial Sequence
  Description of Artificial Sequence:  Enzymatic Nucleic Acid
ccugggcacugaugaggccguuaggccgaaaucaagag

SEQ ID NO: 10937 - RNA, 38 nt, Artificial Sequence
  Description of Artificial Sequence:  Enzymatic Nucleic Acid
uguaugcucugaugaggccguuaggccgaaagccuggg

SEQ ID NO: 10938 - RNA, 38 nt, Artificial Sequence
  Description of Artificial Sequence:  Enzymatic Nucleic Acid
ucuuuuugcugaugaggccguuaggccgaaaugcugag

SEQ ID NO: 10939 - RNA, 38 nt, Artificial Sequence
  Description of Artificial Sequence:  Enzymatic Nucleic Acid
auuguaagcugaugaggccguuaggccgaaaugucuuu

SEQ ID NO: 10940 - RNA, 38 nt, Artificial Sequence
  Description of Artificial Sequence:  Enzymatic Nucleic Acid
uuaauugucugaugaggccguuaggccgaaaguauguc

SEQ ID NO: 10941 - RNA, 38 nt, Artificial Sequence
  Description of Artificial Sequence:  Enzymatic Nucleic Acid
cuuaauugcugaugaggccguuaggccgaaaaguaugu

SEQ ID NO: 10942 - RNA, 38 nt, Artificial Sequence
  Description of Artificial Sequence:  Enzymatic Nucleic Acid
uuagccuucugaugaggccguuaggccgaaauuguaag

SEQ ID NO: 10943 - RNA, 38 nt, Artificial Sequence
  Description of Artificial Sequence:  Enzymatic Nucleic Acid
auuagccucugaugaggccguuaggccgaaaauuguaa

SEQ ID NO: 10944 - RNA, 38 nt, Artificial Sequence
  Description of Artificial Sequence:  Enzymatic Nucleic Acid
aguuguaucugaugaggccguuaggccgaaagccuuaa

SEQ ID NO: 10945 - RNA, 38 nt, Artificial Sequence
  Description of Artificial Sequence:  Enzymatic Nucleic Acid
aagaguugcugaugaggccguuaggccgaaauuagccu

SEQ ID NO: 10946 - RNA, 38 nt, Artificial Sequence
  Description of Artificial Sequence:  Enzymatic Nucleic Acid
aauuugaacugaugaggccguuaggccgaaaguuguau

SEQ ID NO: 10947 - RNA, 38 nt, Artificial Sequence
  Description of Artificial Sequence:  Enzymatic Nucleic Acid
guaauuugcugaugaggccguuaggccgaaagaguugu

SEQ ID NO: 10948 - RNA, 38 nt, Artificial Sequence
  Description of Artificial Sequence:  Enzymatic Nucleic Acid
aguaauuucugaugaggccguuaggccgaaaagaguug

SEQ ID NO: 10949 - RNA, 38 nt, Artificial Sequence
  Description of Artificial Sequence:  Enzymatic Nucleic Acid
cugcaagucugaugaggccguuaggccgaaauuugaag

SEQ ID NO: 10950 - RNA, 38 nt, Artificial Sequence
  Description of Artificial Sequence:  Enzymatic Nucleic Acid
ccugcaagcugaugaggccguuaggccgaaaauuugaa

SEQ ID NO: 10951 - RNA, 38 nt, Artificial Sequence
  Description of Artificial Sequence:  Enzymatic Nucleic Acid
uccccugccugaugaggccguuaggccgaaaguaauuu

SEQ ID NO: 10952 - RNA, 38 nt, Artificial Sequence
  Description of Artificial Sequence:  Enzymatic Nucleic Acid
gccagucccugaugaggccguuaggccgaaagucccuc

SEQ ID NO: 10953 - RNA, 38 nt, Artificial Sequence
  Description of Artificial Sequence:  Enzymatic Nucleic Acid
uugggccacugaugaggccguuaggccgaaagccaguc

SEQ ID NO: 10954 - RNA, 38 nt, Artificial Sequence
  Description of Artificial Sequence:  Enzymatic Nucleic Acid
auugggcccugaugaggccguuaggccgaaaagccagu

SEQ ID NO: 10955 - RNA, 38 nt, Artificial Sequence
  Description of Artificial Sequence:  Enzymatic Nucleic Acid
acucugaucugaugaggccguuaggccgaaauugggcc

SEQ ID NO: 10956 - RNA, 38 nt, Artificial Sequence
  Description of Artificial Sequence:  Enzymatic Nucleic Acid
gccacucucugaugaggccguuaggccgaaauuauugg

SEQ ID NO: 10957 - RNA, 38 nt, Artificial Sequence
  Description of Artificial Sequence:  Enzymatic Nucleic Acid
uuacagaacugaugaggccguuaggccgaaaggccauc

SEQ ID NO: 10958 - RNA, 38 nt, Artificial Sequence
  Description of Artificial Sequence:  Enzymatic Nucleic Acid
ucuuacagcugaugaggccguuaggccgaaagaggcca

SEQ ID NO: 10959 - RNA, 38 nt, Artificial Sequence
  Description of Artificial Sequence:  Enzymatic Nucleic Acid
gucuuacacugaugaggccguuaggccgaaaagaggcc

SEQ ID NO: 10960 - RNA, 38 nt, Artificial Sequence
  Description of Artificial Sequence:  Enzymatic Nucleic Acid
gagugucucugaugaggccguuaggccgaaacagaaga

SEQ ID NO: 10961 - RNA, 38 nt, Artificial Sequence
  Description of Artificial Sequence:  Enzymatic Nucleic Acid
ggaauugucugaugaggccguuaggccgaaagugucuu

SEQ ID NO: 10962 - RNA, 38 nt, Artificial Sequence
  Description of Artificial Sequence:  Enzymatic Nucleic Acid
acuuuuggcugaugaggccguuaggccgaaauugugag

SEQ ID NO: 10963 - RNA, 38 nt, Artificial Sequence
  Description of Artificial Sequence:  Enzymatic Nucleic Acid
cacuuuugcugaugaggccguuaggccgaaaauuguga

SEQ ID NO: 10964 - RNA, 38 nt, Artificial Sequence
  Description of Artificial Sequence:  Enzymatic Nucleic Acid
ucauuucccugaugaggccguuaggccgaaaucacuuu

SEQ ID NO: 10965 - RNA, 38 nt, Artificial Sequence
  Description of Artificial Sequence:  Enzymatic Nucleic Acid
agcacuugcugaugaggccguuaggccgaaaggcucca

SEQ ID NO: 10966 - RNA, 38 nt, Artificial Sequence
  Description of Artificial Sequence:  Enzymatic Nucleic Acid
cccgguagcugaugaggccguuaggccgaaagcacuug

SEQ ID NO: 10967 - RNA, 38 nt, Artificial Sequence
  Description of Artificial Sequence:  Enzymatic Nucleic Acid
ucccgguacugaugaggccguuaggccgaaaagcacuu

SEQ ID NO: 10968 - RNA, 38 nt, Artificial Sequence
  Description of Artificial Sequence:  Enzymatic Nucleic Acid
uuucccggcugaugaggccguuaggccgaaagaagcac

SEQ ID NO: 10969 - RNA, 38 nt, Artificial Sequence
  Description of Artificial Sequence:  Enzymatic Nucleic Acid
ccgaggcccugaugaggccguuaggccgaaagucaguu

SEQ ID NO: 10970 - RNA, 38 nt, Artificial Sequence
  Description of Artificial Sequence:  Enzymatic Nucleic Acid
aaaugacccugaugaggccguuaggccgaaaggccaag

SEQ ID NO: 10971 - RNA, 38 nt, Artificial Sequence
  Description of Artificial Sequence:  Enzymatic Nucleic Acid
acauaaaucugaugaggccguuaggccgaaaccgaggc

SEQ ID NO: 10972 - RNA, 38 nt, Artificial Sequence
  Description of Artificial Sequence:  Enzymatic Nucleic Acid
uagacauacugaugaggccguuaggccgaaaugaccga

SEQ ID NO: 10973 - RNA, 38 nt, Artificial Sequence
  Description of Artificial Sequence:  Enzymatic Nucleic Acid
auagacaucugaugaggccguuaggccgaaaaugaccg

SEQ ID NO: 10974 - RNA, 38 nt, Artificial Sequence
  Description of Artificial Sequence:  Enzymatic Nucleic Acid
cauagacacugaugaggccguuaggccgaaaaaugacc

SEQ ID NO: 10975 - RNA, 38 nt, Artificial Sequence
  Description of Artificial Sequence:  Enzymatic Nucleic Acid
ugaacauacugaugaggccguuaggccgaaacauaaau

SEQ ID NO: 10976 - RNA, 38 nt, Artificial Sequence
  Description of Artificial Sequence:  Enzymatic Nucleic Acid
cuugaacacugaugaggccguuaggccgaaagacauaa

SEQ ID NO: 10977 - RNA, 38 nt, Artificial Sequence
  Description of Artificial Sequence:  Enzymatic Nucleic Acid
uaaucuugcugaugaggccguuaggccgaaacauagac

SEQ ID NO: 10978 - RNA, 38 nt, Artificial Sequence
  Description of Artificial Sequence:  Enzymatic Nucleic Acid
guaaucuucugaugaggccguuaggccgaaaacauaga

SEQ ID NO: 10979 - RNA, 38 nt, Artificial Sequence
  Description of Artificial Sequence:  Enzymatic Nucleic Acid
agaucugucugaugaggccguuaggccgaaaucuugaa

SEQ ID NO: 10980 - RNA, 38 nt, Artificial Sequence
  Description of Artificial Sequence:  Enzymatic Nucleic Acid
gagaucugcugaugaggccguuaggccgaaaaucuuga

SEQ ID NO: 10981 - RNA, 38 nt, Artificial Sequence
  Description of Artificial Sequence:  Enzymatic Nucleic Acid
uaaauggacugaugaggccguuaggccgaaaucuguaa

SEQ ID NO: 10982 - RNA, 38 nt, Artificial Sequence
  Description of Artificial Sequence:  Enzymatic Nucleic Acid
aauaaaugcugaugaggccguuaggccgaaagaucugu

SEQ ID NO: 10983 - RNA, 38 nt, Artificial Sequence
  Description of Artificial Sequence:  Enzymatic Nucleic Acid
aagcaauacugaugaggccguuaggccgaaauggagau

SEQ ID NO: 10984 - RNA, 38 nt, Artificial Sequence
  Description of Artificial Sequence:  Enzymatic Nucleic Acid
gaagcaaucugaugaggccguuaggccgaaaauggaga

SEQ ID NO: 10985 - RNA, 38 nt, Artificial Sequence
  Description of Artificial Sequence:  Enzymatic Nucleic Acid
agaagcaacugaugaggccguuaggccgaaaaauggag

SEQ ID NO: 10986 - RNA, 38 nt, Artificial Sequence
  Description of Artificial Sequence:  Enzymatic Nucleic Acid
acagaagccugaugaggccguuaggccgaaauaaaugg

SEQ ID NO: 10987 - RNA, 38 nt, Artificial Sequence
  Description of Artificial Sequence:  Enzymatic Nucleic Acid
acuaacagcugaugaggccguuaggccgaaagcaauaa

SEQ ID NO: 10988 - RNA, 38 nt, Artificial Sequence
  Description of Artificial Sequence:  Enzymatic Nucleic Acid
cacuaacacugaugaggccguuaggccgaaaagcaaua

SEQ ID NO: 10989 - RNA, 38 nt, Artificial Sequence
  Description of Artificial Sequence:  Enzymatic Nucleic Acid
uggucacucugaugaggccguuaggccgaaacagaagc

SEQ ID NO: 10990 - RNA, 38 nt, Artificial Sequence
  Description of Artificial Sequence:  Enzymatic Nucleic Acid
uuggucaccugaugaggccguuaggccgaaaacagaag

SEQ ID NO: 10991 - RNA, 38 nt, Artificial Sequence
  Description of Artificial Sequence:  Enzymatic Nucleic Acid
auguacaccugaugaggccguuaggccgaaacuccaug

SEQ ID NO: 10992 - RNA, 38 nt, Artificial Sequence
  Description of Artificial Sequence:  Enzymatic Nucleic Acid
caguaaugcugaugaggccguuaggccgaaacacgacu

SEQ ID NO: 10993 - RNA, 38 nt, Artificial Sequence
  Description of Artificial Sequence:  Enzymatic Nucleic Acid
uucucagucugaugaggccguuaggccgaaauguacac

SEQ ID NO: 10994 - RNA, 38 nt, Artificial Sequence
  Description of Artificial Sequence:  Enzymatic Nucleic Acid
guucucagcugaugaggccguuaggccgaaaauguaca

SEQ ID NO: 10995 - RNA, 38 nt, Artificial Sequence
  Description of Artificial Sequence:  Enzymatic Nucleic Acid
agacauggcugaugaggccguuaggccgaaaucaccac

SEQ ID NO: 10996 - RNA, 38 nt, Artificial Sequence
  Description of Artificial Sequence:  Enzymatic Nucleic Acid
gagacaugcugaugaggccguuaggccgaaaaucacca

SEQ ID NO: 10997 - RNA, 38 nt, Artificial Sequence
  Description of Artificial Sequence:  Enzymatic Nucleic Acid
ggacccgacugaugaggccguuaggccgaaacauggaa

SEQ ID NO: 10998 - RNA, 38 nt, Artificial Sequence
  Description of Artificial Sequence:  Enzymatic Nucleic Acid
auggaccccugaugaggccguuaggccgaaagacaugg

SEQ ID NO: 10999 - RNA, 38 nt, Artificial Sequence
  Description of Artificial Sequence:  Enzymatic Nucleic Acid
uugaaaugcugaugaggccguuaggccgaaacccgaga

SEQ ID NO: 11000 - RNA, 38 nt, Artificial Sequence
  Description of Artificial Sequence:  Enzymatic Nucleic Acid
agauuugacugaugaggccguuaggccgaaauggaccc

SEQ ID NO: 11001 - RNA, 38 nt, Artificial Sequence
  Description of Artificial Sequence:  Enzymatic Nucleic Acid
gagauuugcugaugaggccguuaggccgaaaauggacc

SEQ ID NO: 11002 - RNA, 38 nt, Artificial Sequence
  Description of Artificial Sequence:  Enzymatic Nucleic Acid
ugagauuucugaugaggccguuaggccgaaaaauggac

SEQ ID NO: 11003 - RNA, 38 nt, Artificial Sequence
  Description of Artificial Sequence:  Enzymatic Nucleic Acid
cacguugacugaugaggccguuaggccgaaauuugaaa

SEQ ID NO: 11004 - RNA, 38 nt, Artificial Sequence
  Description of Artificial Sequence:  Enzymatic Nucleic Acid
gacacguucugaugaggccguuaggccgaaagauuuga

SEQ ID NO: 11005 - RNA, 38 nt, Artificial Sequence
  Description of Artificial Sequence:  Enzymatic Nucleic Acid
cacaaagucugaugaggccguuaggccgaaacacguug

SEQ ID NO: 11006 - RNA, 38 nt, Artificial Sequence
  Description of Artificial Sequence:  Enzymatic Nucleic Acid
cuugcacacugaugaggccguuaggccgaaagugacac

SEQ ID NO: 11007 - RNA, 38 nt, Artificial Sequence
  Description of Artificial Sequence:  Enzymatic Nucleic Acid
ucuugcaccugaugaggccguuaggccgaaaagugaca

SEQ ID NO: 11008 - RNA, 38 nt, Artificial Sequence
  Description of Artificial Sequence:  Enzymatic Nucleic Acid
uuucugggcugaugaggccguuaggccgaaaucuugca

SEQ ID NO: 11009 - RNA, 38 nt, Artificial Sequence
  Description of Artificial Sequence:  Enzymatic Nucleic Acid
caggaacacugaugaggccguuaggccgaaaucucuuu

SEQ ID NO: 11010 - RNA, 38 nt, Artificial Sequence
  Description of Artificial Sequence:  Enzymatic Nucleic Acid
ucaggaaccugaugaggccguuaggccgaaaaucucuu

SEQ ID NO: 11011 - RNA, 38 nt, Artificial Sequence
  Description of Artificial Sequence:  Enzymatic Nucleic Acid
ccaucaggcugaugaggccguuaggccgaaacaaaucu

SEQ ID NO: 11012 - RNA, 38 nt, Artificial Sequence
  Description of Artificial Sequence:  Enzymatic Nucleic Acid
accaucagcugaugaggccguuaggccgaaaacaaauc

SEQ ID NO: 11013 - RNA, 38 nt, Artificial Sequence
  Description of Artificial Sequence:  Enzymatic Nucleic Acid
aauucugucugaugaggccguuaggccgaaaccaucag

SEQ ID NO: 11014 - RNA, 38 nt, Artificial Sequence
  Description of Artificial Sequence:  Enzymatic Nucleic Acid
ucccaggacugaugaggccguuaggccgaaauucuguu

SEQ ID NO: 11015 - RNA, 38 nt, Artificial Sequence
  Description of Artificial Sequence:  Enzymatic Nucleic Acid
gucccaggcugaugaggccguuaggccgaaaauucugu

SEQ ID NO: 11016 - RNA, 38 nt, Artificial Sequence
  Description of Artificial Sequence:  Enzymatic Nucleic Acid
ugucccagcugaugaggccguuaggccgaaaaauucug

SEQ ID NO: 11017 - RNA, 38 nt, Artificial Sequence
  Description of Artificial Sequence:  Enzymatic Nucleic Acid
gaauaguacugaugaggccguuaggccgaaagcccuuc

SEQ ID NO: 11018 - RNA, 38 nt, Artificial Sequence
  Description of Artificial Sequence:  Enzymatic Nucleic Acid
ggaauagucugaugaggccguuaggccgaaaagcccuu

SEQ ID NO: 11019 - RNA, 38 nt, Artificial Sequence
  Description of Artificial Sequence:  Enzymatic Nucleic Acid
gggaauagcugaugaggccguuaggccgaaaaagcccu

SEQ ID NO: 11020 - RNA, 38 nt, Artificial Sequence
  Description of Artificial Sequence:  Enzymatic Nucleic Acid
gcugggaacugaugaggccguuaggccgaaaguaaagc

SEQ ID NO: 11021 - RNA, 38 nt, Artificial Sequence
  Description of Artificial Sequence:  Enzymatic Nucleic Acid
uagcugggcugaugaggccguuaggccgaaauaguaaa

SEQ ID NO: 11022 - RNA, 38 nt, Artificial Sequence
  Description of Artificial Sequence:  Enzymatic Nucleic Acid
guagcuggcugaugaggccguuaggccgaaaauaguaa

SEQ ID NO: 11023 - RNA, 38 nt, Artificial Sequence
  Description of Artificial Sequence:  Enzymatic Nucleic Acid
ugaucaugcugaugaggccguuaggccgaaagcuggga

SEQ ID NO: 11024 - RNA, 38 nt, Artificial Sequence
  Description of Artificial Sequence:  Enzymatic Nucleic Acid
gcauagcucugaugaggccguuaggccgaaaucaugua

SEQ ID NO: 11025 - RNA, 38 nt, Artificial Sequence
  Description of Artificial Sequence:  Enzymatic Nucleic Acid
ugccagcacugaugaggccguuaggccgaaagcugauc

SEQ ID NO: 11026 - RNA, 38 nt, Artificial Sequence
  Description of Artificial Sequence:  Enzymatic Nucleic Acid
ucacagaacugaugaggccguuaggccgaaaccaugcc

SEQ ID NO: 11027 - RNA, 38 nt, Artificial Sequence
  Description of Artificial Sequence:  Enzymatic Nucleic Acid
cuucacagcugaugaggccguuaggccgaaagaccaug

SEQ ID NO: 11028 - RNA, 38 nt, Artificial Sequence
  Description of Artificial Sequence:  Enzymatic Nucleic Acid
gcuucacacugaugaggccguuaggccgaaaagaccau

SEQ ID NO: 11029 - RNA, 38 nt, Artificial Sequence
  Description of Artificial Sequence:  Enzymatic Nucleic Acid
ucaucauucugaugaggccguuaggccgaaauuuuugc

SEQ ID NO: 11030 - RNA, 38 nt, Artificial Sequence
  Description of Artificial Sequence:  Enzymatic Nucleic Acid
uucaucaucugaugaggccguuaggccgaaaauuuuug

SEQ ID NO: 11031 - RNA, 38 nt, Artificial Sequence
  Description of Artificial Sequence:  Enzymatic Nucleic Acid
agacuggucugaugaggccguuaggccgaaacuuucau

SEQ ID NO: 11032 - RNA, 38 nt, Artificial Sequence
  Description of Artificial Sequence:  Enzymatic Nucleic Acid
uagacuggcugaugaggccguuaggccgaaaacuuuca

SEQ ID NO: 11033 - RNA, 38 nt, Artificial Sequence
  Description of Artificial Sequence:  Enzymatic Nucleic Acid
acauaauacugaugaggccguuaggccgaaacugguaa

SEQ ID NO: 11034 - RNA, 38 nt, Artificial Sequence
  Description of Artificial Sequence:  Enzymatic Nucleic Acid
guacauaacugaugaggccguuaggccgaaagacuggu

SEQ ID NO: 11035 - RNA, 38 nt, Artificial Sequence
  Description of Artificial Sequence:  Enzymatic Nucleic Acid
auguacaucugaugaggccguuaggccgaaauagacug

SEQ ID NO: 11036 - RNA, 38 nt, Artificial Sequence
  Description of Artificial Sequence:  Enzymatic Nucleic Acid
uauguacacugaugaggccguuaggccgaaaauagacu

SEQ ID NO: 11037 - RNA, 38 nt, Artificial Sequence
  Description of Artificial Sequence:  Enzymatic Nucleic Acid
caacuaugcugaugaggccguuaggccgaaacauaaua

SEQ ID NO: 11038 - RNA, 38 nt, Artificial Sequence
  Description of Artificial Sequence:  Enzymatic Nucleic Acid
acgacaaccugaugaggccguuaggccgaaauguacau

SEQ ID NO: 11039 - RNA, 38 nt, Artificial Sequence
  Description of Artificial Sequence:  Enzymatic Nucleic Acid
acaacgaccugaugaggccguuaggccgaaacuaugua

SEQ ID NO: 11040 - RNA, 38 nt, Artificial Sequence
  Description of Artificial Sequence:  Enzymatic Nucleic Acid
ccuacaaccugaugaggccguuaggccgaaacaacuau

SEQ ID NO: 11041 - RNA, 38 nt, Artificial Sequence
  Description of Artificial Sequence:  Enzymatic Nucleic Acid
uacccuaccugaugaggccguuaggccgaaacgacaac

SEQ ID NO: 11042 - RNA, 38 nt, Artificial Sequence
  Description of Artificial Sequence:  Enzymatic Nucleic Acid
cuauaccccugaugaggccguuaggccgaaacaacgac

SEQ ID NO: 11043 - RNA, 38 nt, Artificial Sequence
  Description of Artificial Sequence:  Enzymatic Nucleic Acid
aaauccuacugaugaggccguuaggccgaaacccuaca

SEQ ID NO: 11044 - RNA, 38 nt, Artificial Sequence
  Description of Artificial Sequence:  Enzymatic Nucleic Acid
auaaaucccugaugaggccguuaggccgaaauacccua

SEQ ID NO: 11045 - RNA, 38 nt, Artificial Sequence
  Description of Artificial Sequence:  Enzymatic Nucleic Acid
acaucauacugaugaggccguuaggccgaaauccuaua

SEQ ID NO: 11046 - RNA, 38 nt, Artificial Sequence
  Description of Artificial Sequence:  Enzymatic Nucleic Acid
cacaucaucugaugaggccguuaggccgaaaauccuau

SEQ ID NO: 11047 - RNA, 38 nt, Artificial Sequence
  Description of Artificial Sequence:  Enzymatic Nucleic Acid
ccacaucacugaugaggccguuaggccgaaaaauccua

SEQ ID NO: 11048 - RNA, 38 nt, Artificial Sequence
  Description of Artificial Sequence:  Enzymatic Nucleic Acid
ggacucagcugaugaggccguuaggccgaaaccacauc

SEQ ID NO: 11049 - RNA, 38 nt, Artificial Sequence
  Description of Artificial Sequence:  Enzymatic Nucleic Acid
cggacucacugaugaggccguuaggccgaaaaccacau

SEQ ID NO: 11050 - RNA, 38 nt, Artificial Sequence
  Description of Artificial Sequence:  Enzymatic Nucleic Acid
augagacgcugaugaggccguuaggccgaaacucagaa

SEQ ID NO: 11051 - RNA, 38 nt, Artificial Sequence
  Description of Artificial Sequence:  Enzymatic Nucleic Acid
uuccaugacugaugaggccguuaggccgaaacggacuc

SEQ ID NO: 11052 - RNA, 38 nt, Artificial Sequence
  Description of Artificial Sequence:  Enzymatic Nucleic Acid
aauuccaucugaugaggccguuaggccgaaagacggac

SEQ ID NO: 11053 - RNA, 38 nt, Artificial Sequence
  Description of Artificial Sequence:  Enzymatic Nucleic Acid
gauaguuccugaugaggccguuaggccgaaauuccaug

SEQ ID NO: 11054 - RNA, 38 nt, Artificial Sequence
  Description of Artificial Sequence:  Enzymatic Nucleic Acid
ccaacagacugaugaggccguuaggccgaaaguucaau

SEQ ID NO: 11055 - RNA, 38 nt, Artificial Sequence
  Description of Artificial Sequence:  Enzymatic Nucleic Acid
cuccaacacugaugaggccguuaggccgaaauaguuca

SEQ ID NO: 11056 - RNA, 38 nt, Artificial Sequence
  Description of Artificial Sequence:  Enzymatic Nucleic Acid
uuuucucccugaugaggccguuaggccgaaacagauag

SEQ ID NO: 11057 - RNA, 38 nt, Artificial Sequence
  Description of Artificial Sequence:  Enzymatic Nucleic Acid
uuuaagaccugaugaggccguuaggccgaaagcuuuuc

SEQ ID NO: 11058 - RNA, 38 nt, Artificial Sequence
  Description of Artificial Sequence:  Enzymatic Nucleic Acid
caauuuaacugaugaggccguuaggccgaaacaagcuu

SEQ ID NO: 11059 - RNA, 38 nt, Artificial Sequence
  Description of Artificial Sequence:  Enzymatic Nucleic Acid
uacaauuucugaugaggccguuaggccgaaagacaagc

SEQ ID NO: 11060 - RNA, 38 nt, Artificial Sequence
  Description of Artificial Sequence:  Enzymatic Nucleic Acid
guacaauucugaugaggccguuaggccgaaaagacaag

SEQ ID NO: 11061 - RNA, 38 nt, Artificial Sequence
  Description of Artificial Sequence:  Enzymatic Nucleic Acid
ugcuguaccugaugaggccguuaggccgaaauuuaaga

SEQ ID NO: 11062 - RNA, 38 nt, Artificial Sequence
  Description of Artificial Sequence:  Enzymatic Nucleic Acid
ucuugcugcugaugaggccguuaggccgaaacaauuua

SEQ ID NO: 11063 - RNA, 38 nt, Artificial Sequence
  Description of Artificial Sequence:  Enzymatic Nucleic Acid
cccacauucugaugaggccguuaggccgaaaguucagu

SEQ ID NO: 11064 - RNA, 38 nt, Artificial Sequence
  Description of Artificial Sequence:  Enzymatic Nucleic Acid
uugaaguccugaugaggccguuaggccgaaauccccac

SEQ ID NO: 11065 - RNA, 38 nt, Artificial Sequence
  Description of Artificial Sequence:  Enzymatic Nucleic Acid
cccaguugcugaugaggccguuaggccgaaagucaauc

SEQ ID NO: 11066 - RNA, 38 nt, Artificial Sequence
  Description of Artificial Sequence:  Enzymatic Nucleic Acid
ucccaguucugaugaggccguuaggccgaaaagucaau

SEQ ID NO: 11067 - RNA, 38 nt, Artificial Sequence
  Description of Artificial Sequence:  Enzymatic Nucleic Acid
aagaagggcugaugaggccguuaggccgaaauucccag

SEQ ID NO: 11068 - RNA, 38 nt, Artificial Sequence
  Description of Artificial Sequence:  Enzymatic Nucleic Acid
cuucgaagcugaugaggccguuaggccgaaaggguauu

SEQ ID NO: 11069 - RNA, 38 nt, Artificial Sequence
  Description of Artificial Sequence:  Enzymatic Nucleic Acid
gcuucgaacugaugaggccguuaggccgaaaaggguau

SEQ ID NO: 11070 - RNA, 38 nt, Artificial Sequence
  Description of Artificial Sequence:  Enzymatic Nucleic Acid
augcuucgcugaugaggccguuaggccgaaagaagggu

SEQ ID NO: 11071 - RNA, 38 nt, Artificial Sequence
  Description of Artificial Sequence:  Enzymatic Nucleic Acid
gaugcuuccugaugaggccguuaggccgaaaagaaggg

SEQ ID NO: 11072 - RNA, 38 nt, Artificial Sequence
  Description of Artificial Sequence:  Enzymatic Nucleic Acid
cuuaugcucugaugaggccguuaggccgaaaugcuucg

SEQ ID NO: 11073 - RNA, 38 nt, Artificial Sequence
  Description of Artificial Sequence:  Enzymatic Nucleic Acid
aaguuucucugaugaggccguuaggccgaaaugcugau

SEQ ID NO: 11074 - RNA, 38 nt, Artificial Sequence
  Description of Artificial Sequence:  Enzymatic Nucleic Acid
cgguuuaccugaugaggccguuaggccgaaaguuucuu

SEQ ID NO: 11075 - RNA, 38 nt, Artificial Sequence
  Description of Artificial Sequence:  Enzymatic Nucleic Acid
ucucgguucugaugaggccguuaggccgaaacaaguuu

SEQ ID NO: 11076 - RNA, 38 nt, Artificial Sequence
  Description of Artificial Sequence:  Enzymatic Nucleic Acid
uggguuuucugaugaggccguuaggccgaaaggucucg

SEQ ID NO: 11077 - RNA, 38 nt, Artificial Sequence
  Description of Artificial Sequence:  Enzymatic Nucleic Acid
cacucccacugaugaggccguuaggccgaaacuggguu

SEQ ID NO: 11078 - RNA, 38 nt, Artificial Sequence
  Description of Artificial Sequence:  Enzymatic Nucleic Acid
ugcucaaacugaugaggccguuaggccgaaauuucuuc

SEQ ID NO: 11079 - RNA, 38 nt, Artificial Sequence
  Description of Artificial Sequence:  Enzymatic Nucleic Acid
gugcucaacugaugaggccguuaggccgaaaauuucuu

SEQ ID NO: 11080 - RNA, 38 nt, Artificial Sequence
  Description of Artificial Sequence:  Enzymatic Nucleic Acid
ggugcucacugaugaggccguuaggccgaaaaauuucu

SEQ ID NO: 11081 - RNA, 38 nt, Artificial Sequence
  Description of Artificial Sequence:  Enzymatic Nucleic Acid
aggugcuccugaugaggccguuaggccgaaaaaauuuc

SEQ ID NO: 11082 - RNA, 38 nt, Artificial Sequence
  Description of Artificial Sequence:  Enzymatic Nucleic Acid
cuauaguucugaugaggccguuaggccgaaaggugcuc

SEQ ID NO: 11083 - RNA, 38 nt, Artificial Sequence
  Description of Artificial Sequence:  Enzymatic Nucleic Acid
ucuauagucugaugaggccguuaggccgaaaaggugcu

SEQ ID NO: 11084 - RNA, 38 nt, Artificial Sequence
  Description of Artificial Sequence:  Enzymatic Nucleic Acid
accaucuacugaugaggccguuaggccgaaaguuaagg

SEQ ID NO: 11085 - RNA, 38 nt, Artificial Sequence
  Description of Artificial Sequence:  Enzymatic Nucleic Acid
acaccauccugaugaggccguuaggccgaaauaguuaa

SEQ ID NO: 11086 - RNA, 38 nt, Artificial Sequence
  Description of Artificial Sequence:  Enzymatic Nucleic Acid
cuccgggucugaugaggccguuaggccgaaacaccauc

SEQ ID NO: 11087 - RNA, 38 nt, Artificial Sequence
  Description of Artificial Sequence:  Enzymatic Nucleic Acid
agguguaccugaugaggccguuaggccgaaauccuugg

SEQ ID NO: 11088 - RNA, 38 nt, Artificial Sequence
  Description of Artificial Sequence:  Enzymatic Nucleic Acid
cacaggugcugaugaggccguuaggccgaaacaauccu

SEQ ID NO: 11089 - RNA, 38 nt, Artificial Sequence
  Description of Artificial Sequence:  Enzymatic Nucleic Acid
gcccacugcugaugaggccguuaggccgaaaugcugca

SEQ ID NO: 11090 - RNA, 38 nt, Artificial Sequence
  Description of Artificial Sequence:  Enzymatic Nucleic Acid
cccugacacugaugaggccguuaggccgaaaugugcug

SEQ ID NO: 11091 - RNA, 38 nt, Artificial Sequence
  Description of Artificial Sequence:  Enzymatic Nucleic Acid
acccugaccugaugaggccguuaggccgaaaaugugcu

SEQ ID NO: 11092 - RNA, 38 nt, Artificial Sequence
  Description of Artificial Sequence:  Enzymatic Nucleic Acid
uggacccucugaugaggccguuaggccgaaacaaaugu

SEQ ID NO: 11093 - RNA, 38 nt, Artificial Sequence
  Description of Artificial Sequence:  Enzymatic Nucleic Acid
uuuucaugcugaugaggccguuaggccgaaacccugac

SEQ ID NO: 11094 - RNA, 38 nt, Artificial Sequence
  Description of Artificial Sequence:  Enzymatic Nucleic Acid
agcaacaacugaugaggccguuaggccgaaagguuuuu

SEQ ID NO: 11095 - RNA, 38 nt, Artificial Sequence
  Description of Artificial Sequence:  Enzymatic Nucleic Acid
aagcaacacugaugaggccguuaggccgaaaagguuuu

SEQ ID NO: 11096 - RNA, 38 nt, Artificial Sequence
  Description of Artificial Sequence:  Enzymatic Nucleic Acid
aaagcaaccugaugaggccguuaggccgaaaaagguuu

SEQ ID NO: 11097 - RNA, 38 nt, Artificial Sequence
  Description of Artificial Sequence:  Enzymatic Nucleic Acid
ccaaaagccugaugaggccguuaggccgaaacaaaagg

SEQ ID NO: 11098 - RNA, 38 nt, Artificial Sequence
  Description of Artificial Sequence:  Enzymatic Nucleic Acid
acuuccaacugaugaggccguuaggccgaaagcaacaa

SEQ ID NO: 11099 - RNA, 38 nt, Artificial Sequence
  Description of Artificial Sequence:  Enzymatic Nucleic Acid
cacuuccacugaugaggccguuaggccgaaaagcaaca

SEQ ID NO: 11100 - RNA, 38 nt, Artificial Sequence
  Description of Artificial Sequence:  Enzymatic Nucleic Acid
ccacuucccugaugaggccguuaggccgaaaaagcaac

SEQ ID NO: 11101 - RNA, 38 nt, Artificial Sequence
  Description of Artificial Sequence:  Enzymatic Nucleic Acid
ccaccagacugaugaggccguuaggccgaaauuccaug

SEQ ID NO: 11102 - RNA, 38 nt, Artificial Sequence
  Description of Artificial Sequence:  Enzymatic Nucleic Acid
uuccaccacugaugaggccguuaggccgaaagauucca

SEQ ID NO: 11103 - RNA, 38 nt, Artificial Sequence
  Description of Artificial Sequence:  Enzymatic Nucleic Acid
gggauucucugaugaggccguuaggccgaaacacgcuc

SEQ ID NO: 11104 - RNA, 38 nt, Artificial Sequence
  Description of Artificial Sequence:  Enzymatic Nucleic Acid
uucgcaggcugaugaggccguuaggccgaaauucugac

SEQ ID NO: 11105 - RNA, 38 nt, Artificial Sequence
  Description of Artificial Sequence:  Enzymatic Nucleic Acid
aaccaaggcugaugaggccguuaggccgaaacuucgca

SEQ ID NO: 11106 - RNA, 38 nt, Artificial Sequence
  Description of Artificial Sequence:  Enzymatic Nucleic Acid
ggguaacccugaugaggccguuaggccgaaagguacuu

SEQ ID NO: 11107 - RNA, 38 nt, Artificial Sequence
  Description of Artificial Sequence:  Enzymatic Nucleic Acid
gggugggucugaugaggccguuaggccgaaaccaaggu

SEQ ID NO: 11108 - RNA, 38 nt, Artificial Sequence
  Description of Artificial Sequence:  Enzymatic Nucleic Acid
ggggugggcugaugaggccguuaggccgaaaaccaagg

SEQ ID NO: 11109 - RNA, 38 nt, Artificial Sequence
  Description of Artificial Sequence:  Enzymatic Nucleic Acid
uaccauuucugaugaggccguuaggccgaaauuucugg

SEQ ID NO: 11110 - RNA, 38 nt, Artificial Sequence
  Description of Artificial Sequence:  Enzymatic Nucleic Acid
cauuuuuacugaugaggccguuaggccgaaaccauuuu

SEQ ID NO: 11111 - RNA, 38 nt, Artificial Sequence
  Description of Artificial Sequence:  Enzymatic Nucleic Acid
uccauuuucugaugaggccguuaggccgaaauaccauu

SEQ ID NO: 11112 - RNA, 38 nt, Artificial Sequence
  Description of Artificial Sequence:  Enzymatic Nucleic Acid
ucaaggggcugaugaggccguuaggccgaaauuccauu

SEQ ID NO: 11113 - RNA, 38 nt, Artificial Sequence
  Description of Artificial Sequence:  Enzymatic Nucleic Acid
uuggacuccugaugaggccguuaggccgaaagggguau

SEQ ID NO: 11114 - RNA, 38 nt, Artificial Sequence
  Description of Artificial Sequence:  Enzymatic Nucleic Acid
ugugauugcugaugaggccguuaggccgaaacucaagg

SEQ ID NO: 11115 - RNA, 38 nt, Artificial Sequence
  Description of Artificial Sequence:  Enzymatic Nucleic Acid
aauugugucugaugaggccguuaggccgaaauuggacu

SEQ ID NO: 11116 - RNA, 38 nt, Artificial Sequence
  Description of Artificial Sequence:  Enzymatic Nucleic Acid
cccgcuuucugaugaggccguuaggccgaaauugugug

SEQ ID NO: 11117 - RNA, 38 nt, Artificial Sequence
  Description of Artificial Sequence:  Enzymatic Nucleic Acid
ccccgcuucugaugaggccguuaggccgaaaauugugu

SEQ ID NO: 11118 - RNA, 38 nt, Artificial Sequence
  Description of Artificial Sequence:  Enzymatic Nucleic Acid
aucgucagcugaugaggccguuaggccgaaacaugccc

SEQ ID NO: 11119 - RNA, 38 nt, Artificial Sequence
  Description of Artificial Sequence:  Enzymatic Nucleic Acid
acuuccaucugaugaggccguuaggccgaaaucgucag

SEQ ID NO: 11120 - RNA, 38 nt, Artificial Sequence
  Description of Artificial Sequence:  Enzymatic Nucleic Acid
cacuuccacugaugaggccguuaggccgaaaaucguca

SEQ ID NO: 11121 - RNA, 38 nt, Artificial Sequence
  Description of Artificial Sequence:  Enzymatic Nucleic Acid
gacagugucugaugaggccguuaggccgaaauuuccug

SEQ ID NO: 11122 - RNA, 38 nt, Artificial Sequence
  Description of Artificial Sequence:  Enzymatic Nucleic Acid
ugacagugcugaugaggccguuaggccgaaaauuuccu

SEQ ID NO: 11123 - RNA, 38 nt, Artificial Sequence
  Description of Artificial Sequence:  Enzymatic Nucleic Acid
guaaggaucugaugaggccguuaggccgaaacagugua

SEQ ID NO: 11124 - RNA, 38 nt, Artificial Sequence
  Description of Artificial Sequence:  Enzymatic Nucleic Acid
uugguaagcugaugaggccguuaggccgaaaugacagu

SEQ ID NO: 11125 - RNA, 38 nt, Artificial Sequence
  Description of Artificial Sequence:  Enzymatic Nucleic Acid
ggauuggucugaugaggccguuaggccgaaaggaugac

SEQ ID NO: 11126 - RNA, 38 nt, Artificial Sequence
  Description of Artificial Sequence:  Enzymatic Nucleic Acid
gggauuggcugaugaggccguuaggccgaaaaggauga

SEQ ID NO: 11127 - RNA, 38 nt, Artificial Sequence
  Description of Artificial Sequence:  Enzymatic Nucleic Acid
ugaaauggcugaugaggccguuaggccgaaauugguaa

SEQ ID NO: 11128 - RNA, 38 nt, Artificial Sequence
  Description of Artificial Sequence:  Enzymatic Nucleic Acid
uccuuugacugaugaggccguuaggccgaaaugggauu

SEQ ID NO: 11129 - RNA, 38 nt, Artificial Sequence
  Description of Artificial Sequence:  Enzymatic Nucleic Acid
cuccuuugcugaugaggccguuaggccgaaaaugggau

SEQ ID NO: 11130 - RNA, 38 nt, Artificial Sequence
  Description of Artificial Sequence:  Enzymatic Nucleic Acid
ucuccuuucugaugaggccguuaggccgaaaaauggga

SEQ ID NO: 11131 - RNA, 38 nt, Artificial Sequence
  Description of Artificial Sequence:  Enzymatic Nucleic Acid
accagagacugaugaggccguuaggccgaaaccacaug

SEQ ID NO: 11132 - RNA, 38 nt, Artificial Sequence
  Description of Artificial Sequence:  Enzymatic Nucleic Acid
caaccagacugaugaggccguuaggccgaaagaccaca

SEQ ID NO: 11133 - RNA, 38 nt, Artificial Sequence
  Description of Artificial Sequence:  Enzymatic Nucleic Acid
cacaaccacugaugaggccguuaggccgaaagagacca

SEQ ID NO: 11134 - RNA, 38 nt, Artificial Sequence
  Description of Artificial Sequence:  Enzymatic Nucleic Acid
acauacaccugaugaggccguuaggccgaaaccagaga

SEQ ID NO: 11135 - RNA, 38 nt, Artificial Sequence
  Description of Artificial Sequence:  Enzymatic Nucleic Acid
gugggacacugaugaggccguuaggccgaaacacaacc

SEQ ID NO: 11136 - RNA, 38 nt, Artificial Sequence
  Description of Artificial Sequence:  Enzymatic Nucleic Acid
ugggguggcugaugaggccguuaggccgaaacauacac

SEQ ID NO: 11137 - RNA, 38 nt, Artificial Sequence
  Description of Artificial Sequence:  Enzymatic Nucleic Acid
uucucacccugaugaggccguuaggccgaaaucugggg

SEQ ID NO: 11138 - RNA, 38 nt, Artificial Sequence
  Description of Artificial Sequence:  Enzymatic Nucleic Acid
agauuagacugaugaggccguuaggccgaaauuucuca

SEQ ID NO: 11139 - RNA, 38 nt, Artificial Sequence
  Description of Artificial Sequence:  Enzymatic Nucleic Acid
agagauuacugaugaggccguuaggccgaaagauuucu

SEQ ID NO: 11140 - RNA, 38 nt, Artificial Sequence
  Description of Artificial Sequence:  Enzymatic Nucleic Acid
ggagagaucugaugaggccguuaggccgaaagagauuu

SEQ ID NO: 11141 - RNA, 38 nt, Artificial Sequence
  Description of Artificial Sequence:  Enzymatic Nucleic Acid
acaggagacugaugaggccguuaggccgaaauuagaga

SEQ ID NO: 11142 - RNA, 38 nt, Artificial Sequence
  Description of Artificial Sequence:  Enzymatic Nucleic Acid
ccacaggacugaugaggccguuaggccgaaagauuaga

SEQ ID NO: 11143 - RNA, 38 nt, Artificial Sequence
  Description of Artificial Sequence:  Enzymatic Nucleic Acid
auccacagcugaugaggccguuaggccgaaagagauua

SEQ ID NO: 11144 - RNA, 38 nt, Artificial Sequence
  Description of Artificial Sequence:  Enzymatic Nucleic Acid
cugguaggcugaugaggccguuaggccgaaauccacag

SEQ ID NO: 11145 - RNA, 38 nt, Artificial Sequence
  Description of Artificial Sequence:  Enzymatic Nucleic Acid
acugguagcugaugaggccguuaggccgaaaauccaca

SEQ ID NO: 11146 - RNA, 38 nt, Artificial Sequence
  Description of Artificial Sequence:  Enzymatic Nucleic Acid
cguacuggcugaugaggccguuaggccgaaaggaaucc

SEQ ID NO: 11147 - RNA, 38 nt, Artificial Sequence
  Description of Artificial Sequence:  Enzymatic Nucleic Acid
uggugccgcugaugaggccguuaggccgaaacugguag

SEQ ID NO: 11148 - RNA, 38 nt, Artificial Sequence
  Description of Artificial Sequence:  Enzymatic Nucleic Acid
cagcguuucugaugaggccguuaggccgaaaguggugc

SEQ ID NO: 11149 - RNA, 38 nt, Artificial Sequence
  Description of Artificial Sequence:  Enzymatic Nucleic Acid
auagaccgcugaugaggccguuaggccgaaacauguca

SEQ ID NO: 11150 - RNA, 38 nt, Artificial Sequence
  Description of Artificial Sequence:  Enzymatic Nucleic Acid
auggcauacugaugaggccguuaggccgaaaccguaca

SEQ ID NO: 11151 - RNA, 38 nt, Artificial Sequence
  Description of Artificial Sequence:  Enzymatic Nucleic Acid
gaauggcacugaugaggccguuaggccgaaagaccgua

SEQ ID NO: 11152 - RNA, 38 nt, Artificial Sequence
  Description of Artificial Sequence:  Enzymatic Nucleic Acid
gggggaggcugaugaggccguuaggccgaaauggcaua

SEQ ID NO: 11153 - RNA, 38 nt, Artificial Sequence
  Description of Artificial Sequence:  Enzymatic Nucleic Acid
cgggggagcugaugaggccguuaggccgaaaauggcau

SEQ ID NO: 11154 - RNA, 38 nt, Artificial Sequence
  Description of Artificial Sequence:  Enzymatic Nucleic Acid
augcggggcugaugaggccguuaggccgaaaggaaugg

SEQ ID NO: 11155 - RNA, 38 nt, Artificial Sequence
  Description of Artificial Sequence:  Enzymatic Nucleic Acid
guggaugucugaugaggccguuaggccgaaaugcgggg

SEQ ID NO: 11156 - RNA, 38 nt, Artificial Sequence
  Description of Artificial Sequence:  Enzymatic Nucleic Acid
uaccagugcugaugaggccguuaggccgaaaugugaug

SEQ ID NO: 11157 - RNA, 38 nt, Artificial Sequence
  Description of Artificial Sequence:  Enzymatic Nucleic Acid
acugccaacugaugaggccguuaggccgaaaccagugg

SEQ ID NO: 11158 - RNA, 38 nt, Artificial Sequence
  Description of Artificial Sequence:  Enzymatic Nucleic Acid
caacugcccugaugaggccguuaggccgaaauaccagu

SEQ ID NO: 11159 - RNA, 38 nt, Artificial Sequence
  Description of Artificial Sequence:  Enzymatic Nucleic Acid
cuuccucccugaugaggccguuaggccgaaacugccaa

SEQ ID NO: 11160 - RNA, 38 nt, Artificial Sequence
  Description of Artificial Sequence:  Enzymatic Nucleic Acid
gucacugacugaugaggccguuaggccgaaacagcuug

SEQ ID NO: 11161 - RNA, 38 nt, Artificial Sequence
  Description of Artificial Sequence:  Enzymatic Nucleic Acid
uugucacucugaugaggccguuaggccgaaagacagcu

SEQ ID NO: 11162 - RNA, 38 nt, Artificial Sequence
  Description of Artificial Sequence:  Enzymatic Nucleic Acid
cacaagggcugaugaggccguuaggccgaaauggguuu

SEQ ID NO: 11163 - RNA, 38 nt, Artificial Sequence
  Description of Artificial Sequence:  Enzymatic Nucleic Acid
uucuucaccugaugaggccguuaggccgaaaggguaug

SEQ ID NO: 11164 - RNA, 38 nt, Artificial Sequence
  Description of Artificial Sequence:  Enzymatic Nucleic Acid
cucccuggcugaugaggccguuaggccgaaaguccucc

SEQ ID NO: 11165 - RNA, 38 nt, Artificial Sequence
  Description of Artificial Sequence:  Enzymatic Nucleic Acid
ccucccugcugaugaggccguuaggccgaaaaguccuc

SEQ ID NO: 11166 - RNA, 38 nt, Artificial Sequence
  Description of Artificial Sequence:  Enzymatic Nucleic Acid
uucaauuucugaugaggccguuaggccgaaauuuccuc

SEQ ID NO: 11167 - RNA, 38 nt, Artificial Sequence
  Description of Artificial Sequence:  Enzymatic Nucleic Acid
uuaacuuccugaugaggccguuaggccgaaauuuuauu

SEQ ID NO: 11168 - RNA, 38 nt, Artificial Sequence
  Description of Artificial Sequence:  Enzymatic Nucleic Acid
uuuuuauucugaugaggccguuaggccgaaacuucaau

SEQ ID NO: 11169 - RNA, 38 nt, Artificial Sequence
  Description of Artificial Sequence:  Enzymatic Nucleic Acid
auuuuuaucugaugaggccguuaggccgaaaacuucaa

SEQ ID NO: 11170 - RNA, 38 nt, Artificial Sequence
  Description of Artificial Sequence:  Enzymatic Nucleic Acid
uugauuuucugaugaggccguuaggccgaaauuaacuu

SEQ ID NO: 11171 - RNA, 38 nt, Artificial Sequence
  Description of Artificial Sequence:  Enzymatic Nucleic Acid
agcaaauucugaugaggccguuaggccgaaauuuuuau

SEQ ID NO: 11172 - RNA, 38 nt, Artificial Sequence
  Description of Artificial Sequence:  Enzymatic Nucleic Acid
uuagagcacugaugaggccguuaggccgaaauugauuu

SEQ ID NO: 11173 - RNA, 38 nt, Artificial Sequence
  Description of Artificial Sequence:  Enzymatic Nucleic Acid
auuagagccugaugaggccguuaggccgaaaauugauu

SEQ ID NO: 11174 - RNA, 38 nt, Artificial Sequence
  Description of Artificial Sequence:  Enzymatic Nucleic Acid
uucaauuacugaugaggccguuaggccgaaagcaaauu

SEQ ID NO: 11175 - RNA, 38 nt, Artificial Sequence
  Description of Artificial Sequence:  Enzymatic Nucleic Acid
ccuucaaucugaugaggccguuaggccgaaagagcaaa

SEQ ID NO: 11176 - RNA, 38 nt, Artificial Sequence
  Description of Artificial Sequence:  Enzymatic Nucleic Acid
uuuccuuccugaugaggccguuaggccgaaauuagagc

SEQ ID NO: 11177 - RNA, 38 nt, Artificial Sequence
  Description of Artificial Sequence:  Enzymatic Nucleic Acid
aggguacucugaugaggccguuaggccgaaacaguuuu

SEQ ID NO: 11178 - RNA, 38 nt, Artificial Sequence
  Description of Artificial Sequence:  Enzymatic Nucleic Acid
aacaagggcugaugaggccguuaggccgaaacuuacag

SEQ ID NO: 11179 - RNA, 38 nt, Artificial Sequence
  Description of Artificial Sequence:  Enzymatic Nucleic Acid
uggauaaccugaugaggccguuaggccgaaaggguacu

SEQ ID NO: 11180 - RNA, 38 nt, Artificial Sequence
  Description of Artificial Sequence:  Enzymatic Nucleic Acid
gcuuggaucugaugaggccguuaggccgaaacaagggu

SEQ ID NO: 11181 - RNA, 38 nt, Artificial Sequence
  Description of Artificial Sequence:  Enzymatic Nucleic Acid
cgcuuggacugaugaggccguuaggccgaaaacaaggg

SEQ ID NO: 11182 - RNA, 38 nt, Artificial Sequence
  Description of Artificial Sequence:  Enzymatic Nucleic Acid
gccgcuugcugaugaggccguuaggccgaaauaacaag

SEQ ID NO: 11183 - RNA, 38 nt, Artificial Sequence
  Description of Artificial Sequence:  Enzymatic Nucleic Acid
acaaagcucugaugaggccguuaggccgaaacacauuu

SEQ ID NO: 11184 - RNA, 38 nt, Artificial Sequence
  Description of Artificial Sequence:  Enzymatic Nucleic Acid
uuuguacacugaugaggccguuaggccgaaagcugaca

SEQ ID NO: 11185 - RNA, 38 nt, Artificial Sequence
  Description of Artificial Sequence:  Enzymatic Nucleic Acid
auuuguaccugaugaggccguuaggccgaaaagcugac

SEQ ID NO: 11186 - RNA, 38 nt, Artificial Sequence
  Description of Artificial Sequence:  Enzymatic Nucleic Acid
cacauuugcugaugaggccguuaggccgaaacaaagcu

SEQ ID NO: 11187 - RNA, 38 nt, Artificial Sequence
  Description of Artificial Sequence:  Enzymatic Nucleic Acid
acuuuguucugaugaggccguuaggccgaaaccgcuuc

SEQ ID NO: 11188 - RNA, 38 nt, Artificial Sequence
  Description of Artificial Sequence:  Enzymatic Nucleic Acid
ccucuccccugaugaggccguuaggccgaaacuuuguu

SEQ ID NO: 11189 - RNA, 38 nt, Artificial Sequence
  Description of Artificial Sequence:  Enzymatic Nucleic Acid
uggaaggacugaugaggccguuaggccgaaaucacccu

SEQ ID NO: 11190 - RNA, 38 nt, Artificial Sequence
  Description of Artificial Sequence:  Enzymatic Nucleic Acid
cguggaagcugaugaggccguuaggccgaaagaucacc

SEQ ID NO: 11191 - RNA, 38 nt, Artificial Sequence
  Description of Artificial Sequence:  Enzymatic Nucleic Acid
ucacguggcugaugaggccguuaggccgaaaggagauc

SEQ ID NO: 11192 - RNA, 38 nt, Artificial Sequence
  Description of Artificial Sequence:  Enzymatic Nucleic Acid
gucacgugcugaugaggccguuaggccgaaaaggagau

SEQ ID NO: 11193 - RNA, 38 nt, Artificial Sequence
  Description of Artificial Sequence:  Enzymatic Nucleic Acid
aauuucagcugaugaggccguuaggccgaaaccccugg

SEQ ID NO: 11194 - RNA, 38 nt, Artificial Sequence
  Description of Artificial Sequence:  Enzymatic Nucleic Acid
ugcaaagucugaugaggccguuaggccgaaauuucagg

SEQ ID NO: 11195 - RNA, 38 nt, Artificial Sequence
  Description of Artificial Sequence:  Enzymatic Nucleic Acid
uugcaaagcugaugaggccguuaggccgaaaauuucag

SEQ ID NO: 11196 - RNA, 38 nt, Artificial Sequence
  Description of Artificial Sequence:  Enzymatic Nucleic Acid
agguugcacugaugaggccguuaggccgaaaguaauuu

SEQ ID NO: 11197 - RNA, 38 nt, Artificial Sequence
  Description of Artificial Sequence:  Enzymatic Nucleic Acid
cagguugccugaugaggccguuaggccgaaaaguaauu

SEQ ID NO: 11198 - RNA, 38 nt, Artificial Sequence
  Description of Artificial Sequence:  Enzymatic Nucleic Acid
accacaaacugaugaggccguuaggccgaaacacgcuc

SEQ ID NO: 11199 - RNA, 38 nt, Artificial Sequence
  Description of Artificial Sequence:  Enzymatic Nucleic Acid
gcaccacacugaugaggccguuaggccgaaagacacgc

SEQ ID NO: 11200 - RNA, 38 nt, Artificial Sequence
  Description of Artificial Sequence:  Enzymatic Nucleic Acid
ugcaccaccugaugaggccguuaggccgaaaagacacg

SEQ ID NO: 11201 - RNA, 38 nt, Artificial Sequence
  Description of Artificial Sequence:  Enzymatic Nucleic Acid
caaacguacugaugaggccguuaggccgaaaucugucu

SEQ ID NO: 11202 - RNA, 38 nt, Artificial Sequence
  Description of Artificial Sequence:  Enzymatic Nucleic Acid
cucaaacgcugaugaggccguuaggccgaaagaucugu

SEQ ID NO: 11203 - RNA, 38 nt, Artificial Sequence
  Description of Artificial Sequence:  Enzymatic Nucleic Acid
gguucucacugaugaggccguuaggccgaaacguagau

SEQ ID NO: 11204 - RNA, 38 nt, Artificial Sequence
  Description of Artificial Sequence:  Enzymatic Nucleic Acid
agguucuccugaugaggccguuaggccgaaaacguaga

SEQ ID NO: 11205 - RNA, 38 nt, Artificial Sequence
  Description of Artificial Sequence:  Enzymatic Nucleic Acid
uaccaugucugaugaggccguuaggccgaaagguucuc

SEQ ID NO: 11206 - RNA, 38 nt, Artificial Sequence
  Description of Artificial Sequence:  Enzymatic Nucleic Acid
caagcuugcugaugaggccguuaggccgaaaccaugug

SEQ ID NO: 11207 - RNA, 38 nt, Artificial Sequence
  Description of Artificial Sequence:  Enzymatic Nucleic Acid
ugugggcccugaugaggccguuaggccgaaagcuugua

SEQ ID NO: 11208 - RNA, 38 nt, Artificial Sequence
  Description of Artificial Sequence:  Enzymatic Nucleic Acid
gauuggcacugaugaggccguuaggccgaaaggcugug

SEQ ID NO: 11209 - RNA, 38 nt, Artificial Sequence
  Description of Artificial Sequence:  Enzymatic Nucleic Acid
cccacaugcugaugaggccguuaggccgaaauuggcag

SEQ ID NO: 11210 - RNA, 38 nt, Artificial Sequence
  Description of Artificial Sequence:  Enzymatic Nucleic Acid
gugugggccugaugaggccguuaggccgaaacucuccc

SEQ ID NO: 11211 - RNA, 38 nt, Artificial Sequence
  Description of Artificial Sequence:  Enzymatic Nucleic Acid
uucuugcacugaugaggccguuaggccgaaacaggugu

SEQ ID NO: 11212 - RNA, 38 nt, Artificial Sequence
  Description of Artificial Sequence:  Enzymatic Nucleic Acid
guucuugccugaugaggccguuaggccgaaaacaggug

SEQ ID NO: 11213 - RNA, 38 nt, Artificial Sequence
  Description of Artificial Sequence:  Enzymatic Nucleic Acid
gaguaucccugaugaggccguuaggccgaaaguucuug

SEQ ID NO: 11214 - RNA, 38 nt, Artificial Sequence
  Description of Artificial Sequence:  Enzymatic Nucleic Acid
ccaaagagcugaugaggccguuaggccgaaauccaagu

SEQ ID NO: 11215 - RNA, 38 nt, Artificial Sequence
  Description of Artificial Sequence:  Enzymatic Nucleic Acid
uuuccaaacugaugaggccguuaggccgaaaguaucca

SEQ ID NO: 11216 - RNA, 38 nt, Artificial Sequence
  Description of Artificial Sequence:  Enzymatic Nucleic Acid
aauuuccacugaugaggccguuaggccgaaagaguauc

SEQ ID NO: 11217 - RNA, 38 nt, Artificial Sequence
  Description of Artificial Sequence:  Enzymatic Nucleic Acid
caauuucccugaugaggccguuaggccgaaaagaguau

SEQ ID NO: 11218 - RNA, 38 nt, Artificial Sequence
  Description of Artificial Sequence:  Enzymatic Nucleic Acid
uggcauuccugaugaggccguuaggccgaaauuuccaa

SEQ ID NO: 11219 - RNA, 38 nt, Artificial Sequence
  Description of Artificial Sequence:  Enzymatic Nucleic Acid
uauuagagcugaugaggccguuaggccgaaacauggug

SEQ ID NO: 11220 - RNA, 38 nt, Artificial Sequence
  Description of Artificial Sequence:  Enzymatic Nucleic Acid
cuauuagacugaugaggccguuaggccgaaaacauggu

SEQ ID NO: 11221 - RNA, 38 nt, Artificial Sequence
  Description of Artificial Sequence:  Enzymatic Nucleic Acid
ugcuauuacugaugaggccguuaggccgaaagaacaug

SEQ ID NO: 11222 - RNA, 38 nt, Artificial Sequence
  Description of Artificial Sequence:  Enzymatic Nucleic Acid
ugugcuaucugaugaggccguuaggccgaaagagaaca

SEQ ID NO: 11223 - RNA, 38 nt, Artificial Sequence
  Description of Artificial Sequence:  Enzymatic Nucleic Acid
auuugugccugaugaggccguuaggccgaaauuagaga

SEQ ID NO: 11224 - RNA, 38 nt, Artificial Sequence
  Description of Artificial Sequence:  Enzymatic Nucleic Acid
augaucaacugaugaggccguuaggccgaaaugucauu

SEQ ID NO: 11225 - RNA, 38 nt, Artificial Sequence
  Description of Artificial Sequence:  Enzymatic Nucleic Acid
caugaucacugaugaggccguuaggccgaaaaugucau

SEQ ID NO: 11226 - RNA, 38 nt, Artificial Sequence
  Description of Artificial Sequence:  Enzymatic Nucleic Acid
ccaugauccugaugaggccguuaggccgaaaaauguca

SEQ ID NO: 11227 - RNA, 38 nt, Artificial Sequence
  Description of Artificial Sequence:  Enzymatic Nucleic Acid
agcuccaucugaugaggccguuaggccgaaaucaaaau

SEQ ID NO: 11228 - RNA, 38 nt, Artificial Sequence
  Description of Artificial Sequence:  Enzymatic Nucleic Acid
gcauucuucugaugaggccguuaggccgaaagcuccau

SEQ ID NO: 11229 - RNA, 38 nt, Artificial Sequence
  Description of Artificial Sequence:  Enzymatic Nucleic Acid
ugcauucucugaugaggccguuaggccgaaaagcucca

SEQ ID NO: 11230 - RNA, 38 nt, Artificial Sequence
  Description of Artificial Sequence:  Enzymatic Nucleic Acid
ccugcaagcugaugaggccguuaggccgaaaugcauuc

SEQ ID NO: 11231 - RNA, 38 nt, Artificial Sequence
  Description of Artificial Sequence:  Enzymatic Nucleic Acid
gguccugccugaugaggccguuaggccgaaaggaugca

SEQ ID NO: 11232 - RNA, 38 nt, Artificial Sequence
  Description of Artificial Sequence:  Enzymatic Nucleic Acid
ggcagacacugaugaggccguuaggccgaaagucuccu

SEQ ID NO: 11233 - RNA, 38 nt, Artificial Sequence
  Description of Artificial Sequence:  Enzymatic Nucleic Acid
gcaaggcacugaugaggccguuaggccgaaacauaguc

SEQ ID NO: 11234 - RNA, 38 nt, Artificial Sequence
  Description of Artificial Sequence:  Enzymatic Nucleic Acid
ucuugagccugaugaggccguuaggccgaaaggcagac

SEQ ID NO: 11235 - RNA, 38 nt, Artificial Sequence
  Description of Artificial Sequence:  Enzymatic Nucleic Acid
ccugucuucugaugaggccguuaggccgaaagcaaggc

SEQ ID NO: 11236 - RNA, 38 nt, Artificial Sequence
  Description of Artificial Sequence:  Enzymatic Nucleic Acid
gaccacgccugaugaggccguuaggccgaaaugucuuu

SEQ ID NO: 11237 - RNA, 38 nt, Artificial Sequence
  Description of Artificial Sequence:  Enzymatic Nucleic Acid
agcugccucugaugaggccguuaggccgaaaccacgca

SEQ ID NO: 11238 - RNA, 38 nt, Artificial Sequence
  Description of Artificial Sequence:  Enzymatic Nucleic Acid
aggacugucugaugaggccguuaggccgaaagcugccu

SEQ ID NO: 11239 - RNA, 38 nt, Artificial Sequence
  Description of Artificial Sequence:  Enzymatic Nucleic Acid
cgcucuagcugaugaggccguuaggccgaaacugugag

SEQ ID NO: 11240 - RNA, 38 nt, Artificial Sequence
  Description of Artificial Sequence:  Enzymatic Nucleic Acid
acacgcuccugaugaggccguuaggccgaaaggacugu

SEQ ID NO: 11241 - RNA, 38 nt, Artificial Sequence
  Description of Artificial Sequence:  Enzymatic Nucleic Acid
uuuccugucugaugaggccguuaggccgaaaucguggg

SEQ ID NO: 11242 - RNA, 38 nt, Artificial Sequence
  Description of Artificial Sequence:  Enzymatic Nucleic Acid
ugucgucucugaugaggccguuaggccgaaauucucca

SEQ ID NO: 11243 - RNA, 38 nt, Artificial Sequence
  Description of Artificial Sequence:  Enzymatic Nucleic Acid
uuccccaacugaugaggccguuaggccgaaacuugucg

SEQ ID NO: 11244 - RNA, 38 nt, Artificial Sequence
  Description of Artificial Sequence:  Enzymatic Nucleic Acid
cuuucccccugaugaggccguuaggccgaaauacuugu

SEQ ID NO: 11245 - RNA, 38 nt, Artificial Sequence
  Description of Artificial Sequence:  Enzymatic Nucleic Acid
gagacuuccugaugaggccguuaggccgaaaugcuuuc

SEQ ID NO: 11246 - RNA, 38 nt, Artificial Sequence
  Description of Artificial Sequence:  Enzymatic Nucleic Acid
gugcaugacugaugaggccguuaggccgaaacuucgau

SEQ ID NO: 11247 - RNA, 38 nt, Artificial Sequence
  Description of Artificial Sequence:  Enzymatic Nucleic Acid
ccgugcaucugaugaggccguuaggccgaaagacuucg

SEQ ID NO: 11248 - RNA, 38 nt, Artificial Sequence
  Description of Artificial Sequence:  Enzymatic Nucleic Acid
gauucccacugaugaggccguuaggccgaaaugccgug

SEQ ID NO: 11249 - RNA, 38 nt, Artificial Sequence
  Description of Artificial Sequence:  Enzymatic Nucleic Acid
uggaggggcugaugaggccguuaggccgaaauucccag

SEQ ID NO: 11250 - RNA, 38 nt, Artificial Sequence
  Description of Artificial Sequence:  Enzymatic Nucleic Acid
gaucugugcugaugaggccguuaggccgaaagggggau

SEQ ID NO: 11251 - RNA, 38 nt, Artificial Sequence
  Description of Artificial Sequence:  Enzymatic Nucleic Acid
aaccacaucugaugaggccguuaggccgaaaucugugg

SEQ ID NO: 11252 - RNA, 38 nt, Artificial Sequence
  Description of Artificial Sequence:  Enzymatic Nucleic Acid
uaucuuuacugaugaggccguuaggccgaaaccacaug

SEQ ID NO: 11253 - RNA, 38 nt, Artificial Sequence
  Description of Artificial Sequence:  Enzymatic Nucleic Acid
uuaucuuucugaugaggccguuaggccgaaaaccacau

SEQ ID NO: 11254 - RNA, 38 nt, Artificial Sequence
  Description of Artificial Sequence:  Enzymatic Nucleic Acid
auuaucuucugaugaggccguuaggccgaaaaaccaca

SEQ ID NO: 11255 - RNA, 38 nt, Artificial Sequence
  Description of Artificial Sequence:  Enzymatic Nucleic Acid
ggucucaucugaugaggccguuaggccgaaaucuuuaa

SEQ ID NO: 11256 - RNA, 38 nt, Artificial Sequence
  Description of Artificial Sequence:  Enzymatic Nucleic Acid
ucuucuaccugaugaggccguuaggccgaaagggucuc

SEQ ID NO: 11257 - RNA, 38 nt, Artificial Sequence
  Description of Artificial Sequence:  Enzymatic Nucleic Acid
gagucuuccugaugaggccguuaggccgaaacaagggu

SEQ ID NO: 11258 - RNA, 38 nt, Artificial Sequence
  Description of Artificial Sequence:  Enzymatic Nucleic Acid
caaugccucugaugaggccguuaggccgaaagucuucu

SEQ ID NO: 11259 - RNA, 38 nt, Artificial Sequence
  Description of Artificial Sequence:  Enzymatic Nucleic Acid
uucaauaccugaugaggccguuaggccgaaaugccuga

SEQ ID NO: 11260 - RNA, 38 nt, Artificial Sequence
  Description of Artificial Sequence:  Enzymatic Nucleic Acid
uccuucaacugaugaggccguuaggccgaaacaaugcc

SEQ ID NO: 11261 - RNA, 38 nt, Artificial Sequence
  Description of Artificial Sequence:  Enzymatic Nucleic Acid
cauccuuccugaugaggccguuaggccgaaauacaaug

SEQ ID NO: 11262 - RNA, 38 nt, Artificial Sequence
  Description of Artificial Sequence:  Enzymatic Nucleic Acid
cggauagucugaugaggccguuaggccgaaagguuccg

SEQ ID NO: 11263 - RNA, 38 nt, Artificial Sequence
  Description of Artificial Sequence:  Enzymatic Nucleic Acid
ucugcggacugaugaggccguuaggccgaaagugaggu

SEQ ID NO: 11264 - RNA, 38 nt, Artificial Sequence
  Description of Artificial Sequence:  Enzymatic Nucleic Acid
acucugcgcugaugaggccguuaggccgaaauagugag

SEQ ID NO: 11265 - RNA, 38 nt, Artificial Sequence
  Description of Artificial Sequence:  Enzymatic Nucleic Acid
cagguguacugaugaggccguuaggccgaaaggccuuc

SEQ ID NO: 11266 - RNA, 38 nt, Artificial Sequence
  Description of Artificial Sequence:  Enzymatic Nucleic Acid
ggcaggugcugaugaggccguuaggccgaaagaggccu

SEQ ID NO: 11267 - RNA, 38 nt, Artificial Sequence
  Description of Artificial Sequence:  Enzymatic Nucleic Acid
cagccaagcugaugaggccguuaggccgaaacacugca

SEQ ID NO: 11268 - RNA, 38 nt, Artificial Sequence
  Description of Artificial Sequence:  Enzymatic Nucleic Acid
acagccaacugaugaggccguuaggccgaaaacacugc

SEQ ID NO: 11269 - RNA, 38 nt, Artificial Sequence
  Description of Artificial Sequence:  Enzymatic Nucleic Acid
gcacagcccugaugaggccguuaggccgaaagaacacu

SEQ ID NO: 11270 - RNA, 38 nt, Artificial Sequence
  Description of Artificial Sequence:  Enzymatic Nucleic Acid
uuaugaaacugaugaggccguuaggccgaaaugccucc

SEQ ID NO: 11271 - RNA, 38 nt, Artificial Sequence
  Description of Artificial Sequence:  Enzymatic Nucleic Acid
auuaugaacugaugaggccguuaggccgaaaaugccuc

SEQ ID NO: 11272 - RNA, 38 nt, Artificial Sequence
  Description of Artificial Sequence:  Enzymatic Nucleic Acid
uauuaugacugaugaggccguuaggccgaaaaaugccu

SEQ ID NO: 11273 - RNA, 38 nt, Artificial Sequence
  Description of Artificial Sequence:  Enzymatic Nucleic Acid
cuauuaugcugaugaggccguuaggccgaaaaaaugcc

SEQ ID NO: 11274 - RNA, 38 nt, Artificial Sequence
  Description of Artificial Sequence:  Enzymatic Nucleic Acid
ucuauuaucugaugaggccguuaggccgaaaaaaaugc

SEQ ID NO: 11275 - RNA, 38 nt, Artificial Sequence
  Description of Artificial Sequence:  Enzymatic Nucleic Acid
ccuucuaucugaugaggccguuaggccgaaaugaaaaa

SEQ ID NO: 11276 - RNA, 38 nt, Artificial Sequence
  Description of Artificial Sequence:  Enzymatic Nucleic Acid
gcaccuuccugaugaggccguuaggccgaaauuaugaa

SEQ ID NO: 11277 - RNA, 38 nt, Artificial Sequence
  Description of Artificial Sequence:  Enzymatic Nucleic Acid
ugauuucccugaugaggccguuaggccgaaaguucguc

SEQ ID NO: 11278 - RNA, 38 nt, Artificial Sequence
  Description of Artificial Sequence:  Enzymatic Nucleic Acid
agaauaaucugaugaggccguuaggccgaaauuuccaa

SEQ ID NO: 11279 - RNA, 38 nt, Artificial Sequence
  Description of Artificial Sequence:  Enzymatic Nucleic Acid
acuagaaucugaugaggccguuaggccgaaaugauuuc

SEQ ID NO: 11280 - RNA, 38 nt, Artificial Sequence
  Description of Artificial Sequence:  Enzymatic Nucleic Acid
uacuagaacugaugaggccguuaggccgaaaaugauuu

SEQ ID NO: 11281 - RNA, 38 nt, Artificial Sequence
  Description of Artificial Sequence:  Enzymatic Nucleic Acid
ccuacuagcugaugaggccguuaggccgaaauaaugau

SEQ ID NO: 11282 - RNA, 38 nt, Artificial Sequence
  Description of Artificial Sequence:  Enzymatic Nucleic Acid
gccuacuacugaugaggccguuaggccgaaaauaauga

SEQ ID NO: 11283 - RNA, 38 nt, Artificial Sequence
  Description of Artificial Sequence:  Enzymatic Nucleic Acid
gugccuaccugaugaggccguuaggccgaaagaauaau

SEQ ID NO: 11284 - RNA, 38 nt, Artificial Sequence
  Description of Artificial Sequence:  Enzymatic Nucleic Acid
gucgugcccugaugaggccguuaggccgaaacuagaau

SEQ ID NO: 11285 - RNA, 38 nt, Artificial Sequence
  Description of Artificial Sequence:  Enzymatic Nucleic Acid
aacauggccugaugaggccguuaggccgaaaucaccgu

SEQ ID NO: 11286 - RNA, 38 nt, Artificial Sequence
  Description of Artificial Sequence:  Enzymatic Nucleic Acid
gccagaagcugaugaggccguuaggccgaaacauggca

SEQ ID NO: 11287 - RNA, 38 nt, Artificial Sequence
  Description of Artificial Sequence:  Enzymatic Nucleic Acid
agccagaacugaugaggccguuaggccgaaaacauggc

SEQ ID NO: 11288 - RNA, 38 nt, Artificial Sequence
  Description of Artificial Sequence:  Enzymatic Nucleic Acid
guagccagcugaugaggccguuaggccgaaagaacaug

SEQ ID NO: 11289 - RNA, 38 nt, Artificial Sequence
  Description of Artificial Sequence:  Enzymatic Nucleic Acid
aguagccacugaugaggccguuaggccgaaaagaacau

SEQ ID NO: 11290 - RNA, 38 nt, Artificial Sequence
  Description of Artificial Sequence:  Enzymatic Nucleic Acid
acaagaagcugaugaggccguuaggccgaaagccagaa

SEQ ID NO: 11291 - RNA, 38 nt, Artificial Sequence
  Description of Artificial Sequence:  Enzymatic Nucleic Acid
augacaagcugaugaggccguuaggccgaaaguagcca

SEQ ID NO: 11292 - RNA, 38 nt, Artificial Sequence
  Description of Artificial Sequence:  Enzymatic Nucleic Acid
gaugacaacugaugaggccguuaggccgaaaaguagcc

SEQ ID NO: 11293 - RNA, 38 nt, Artificial Sequence
  Description of Artificial Sequence:  Enzymatic Nucleic Acid
augaugaccugaugaggccguuaggccgaaagaaguag

SEQ ID NO: 11294 - RNA, 38 nt, Artificial Sequence
  Description of Artificial Sequence:  Enzymatic Nucleic Acid
aggaugaucugaugaggccguuaggccgaaacaagaag

SEQ ID NO: 11295 - RNA, 38 nt, Artificial Sequence
  Description of Artificial Sequence:  Enzymatic Nucleic Acid
ccuaggaucugaugaggccguuaggccgaaaugacaag

SEQ ID NO: 11296 - RNA, 38 nt, Artificial Sequence
  Description of Artificial Sequence:  Enzymatic Nucleic Acid
gucccuagcugaugaggccguuaggccgaaaugaugac

SEQ ID NO: 11297 - RNA, 38 nt, Artificial Sequence
  Description of Artificial Sequence:  Enzymatic Nucleic Acid
acgguccccugaugaggccguuaggccgaaaggaugau

SEQ ID NO: 11298 - RNA, 38 nt, Artificial Sequence
  Description of Artificial Sequence:  Enzymatic Nucleic Acid
gcccgcuucugaugaggccguuaggccgaaacgguccc

SEQ ID NO: 11299 - RNA, 38 nt, Artificial Sequence
  Description of Artificial Sequence:  Enzymatic Nucleic Acid
ggcccgcucugaugaggccguuaggccgaaaacggucc

SEQ ID NO: 11300 - RNA, 38 nt, Artificial Sequence
  Description of Artificial Sequence:  Enzymatic Nucleic Acid
uggacaagcugaugaggccguuaggccgaaagccuguc

SEQ ID NO: 11301 - RNA, 38 nt, Artificial Sequence
  Description of Artificial Sequence:  Enzymatic Nucleic Acid
cgauggaccugaugaggccguuaggccgaaaguagccu

SEQ ID NO: 11302 - RNA, 38 nt, Artificial Sequence
  Description of Artificial Sequence:  Enzymatic Nucleic Acid
ugacgaugcugaugaggccguuaggccgaaacaaguag

SEQ ID NO: 11303 - RNA, 38 nt, Artificial Sequence
  Description of Artificial Sequence:  Enzymatic Nucleic Acid
uccaugaccugaugaggccguuaggccgaaauggacaa

SEQ ID NO: 11304 - RNA, 38 nt, Artificial Sequence
  Description of Artificial Sequence:  Enzymatic Nucleic Acid
ggauccaucugaugaggccguuaggccgaaacgaugga

SEQ ID NO: 11305 - RNA, 38 nt, Artificial Sequence
  Description of Artificial Sequence:  Enzymatic Nucleic Acid
uucaucugcugaugaggccguuaggccgaaauccauga

SEQ ID NO: 11306 - RNA, 38 nt, Artificial Sequence
  Description of Artificial Sequence:  Enzymatic Nucleic Acid
uccaauggcugaugaggccguuaggccgaaaguucauc

SEQ ID NO: 11307 - RNA, 38 nt, Artificial Sequence
  Description of Artificial Sequence:  Enzymatic Nucleic Acid
guucaucccugaugaggccguuaggccgaaaugggagu

SEQ ID NO: 11308 - RNA, 38 nt, Artificial Sequence
  Description of Artificial Sequence:  Enzymatic Nucleic Acid
ucguucaccugaugaggccguuaggccgaaauguucau

SEQ ID NO: 11309 - RNA, 38 nt, Artificial Sequence
  Description of Artificial Sequence:  Enzymatic Nucleic Acid
ggcaucaucugaugaggccguuaggccgaaaggcaguc

SEQ ID NO: 11310 - RNA, 38 nt, Artificial Sequence
  Description of Artificial Sequence:  Enzymatic Nucleic Acid
uggcaucacugaugaggccguuaggccgaaaaggcagu

SEQ ID NO: 11311 - RNA, 38 nt, Artificial Sequence
  Description of Artificial Sequence:  Enzymatic Nucleic Acid
cucuggggcugaugaggccguuaggccgaaauucccau

SEQ ID NO: 11312 - RNA, 38 nt, Artificial Sequence
  Description of Artificial Sequence:  Enzymatic Nucleic Acid
ucucugggcugaugaggccguuaggccgaaaauuccca

SEQ ID NO: 11313 - RNA, 38 nt, Artificial Sequence
  Description of Artificial Sequence:  Enzymatic Nucleic Acid
ggcuuacccugaugaggccguuaggccgaaagguucag

SEQ ID NO: 11314 - RNA, 38 nt, Artificial Sequence
  Description of Artificial Sequence:  Enzymatic Nucleic Acid
aagaggcucugaugaggccguuaggccgaaaccuaggu

SEQ ID NO: 11315 - RNA, 38 nt, Artificial Sequence
  Description of Artificial Sequence:  Enzymatic Nucleic Acid
acggccaacugaugaggccguuaggccgaaaggcuuac

SEQ ID NO: 11316 - RNA, 38 nt, Artificial Sequence
  Description of Artificial Sequence:  Enzymatic Nucleic Acid
ccacggcccugaugaggccguuaggccgaaagaggcuu

SEQ ID NO: 11317 - RNA, 38 nt, Artificial Sequence
  Description of Artificial Sequence:  Enzymatic Nucleic Acid
cuuggccacugaugaggccguuaggccgaaaggcacca

SEQ ID NO: 11318 - RNA, 38 nt, Artificial Sequence
  Description of Artificial Sequence:  Enzymatic Nucleic Acid
ucuuggcccugaugaggccguuaggccgaaaaggcacc

SEQ ID NO: 11319 - RNA, 38 nt, Artificial Sequence
  Description of Artificial Sequence:  Enzymatic Nucleic Acid
ucugcuuccugaugaggccguuaggccgaaaucucuug

SEQ ID NO: 11320 - RNA, 38 nt, Artificial Sequence
  Description of Artificial Sequence:  Enzymatic Nucleic Acid
caauuccacugaugaggccguuaggccgaaaggcaucu

SEQ ID NO: 11321 - RNA, 38 nt, Artificial Sequence
  Description of Artificial Sequence:  Enzymatic Nucleic Acid
ucaauucccugaugaggccguuaggccgaaaaggcauc

SEQ ID NO: 11322 - RNA, 38 nt, Artificial Sequence
  Description of Artificial Sequence:  Enzymatic Nucleic Acid
gucuuguccugaugaggccguuaggccgaaauuccaaa

SEQ ID NO: 11323 - RNA, 38 nt, Artificial Sequence
  Description of Artificial Sequence:  Enzymatic Nucleic Acid
uguccugccugaugaggccguuaggccgaaaguugcug

SEQ ID NO: 11324 - RNA, 38 nt, Artificial Sequence
  Description of Artificial Sequence:  Enzymatic Nucleic Acid
uugacugccugaugaggccguuaggccgaaacuguccu

SEQ ID NO: 11325 - RNA, 38 nt, Artificial Sequence
  Description of Artificial Sequence:  Enzymatic Nucleic Acid
aacauuuucugaugaggccguuaggccgaaacugcuac

SEQ ID NO: 11326 - RNA, 38 nt, Artificial Sequence
  Description of Artificial Sequence:  Enzymatic Nucleic Acid
cuucuuuccugaugaggccguuaggccgaaacauuuug

SEQ ID NO: 11327 - RNA, 38 nt, Artificial Sequence
  Description of Artificial Sequence:  Enzymatic Nucleic Acid
gagagcuccugaugaggccguuaggccgaaaugcucac

SEQ ID NO: 11328 - RNA, 38 nt, Artificial Sequence
  Description of Artificial Sequence:  Enzymatic Nucleic Acid
agacaugacugaugaggccguuaggccgaaagcucgau

SEQ ID NO: 11329 - RNA, 38 nt, Artificial Sequence
  Description of Artificial Sequence:  Enzymatic Nucleic Acid
ucagacaucugaugaggccguuaggccgaaagagcucg

SEQ ID NO: 11330 - RNA, 38 nt, Artificial Sequence
  Description of Artificial Sequence:  Enzymatic Nucleic Acid
ugaguucacugaugaggccguuaggccgaaacaugaga

SEQ ID NO: 11331 - RNA, 38 nt, Artificial Sequence
  Description of Artificial Sequence:  Enzymatic Nucleic Acid
aggaucuucugaugaggccguuaggccgaaaguucaga

SEQ ID NO: 11332 - RNA, 38 nt, Artificial Sequence
  Description of Artificial Sequence:  Enzymatic Nucleic Acid
ugaaugagcugaugaggccguuaggccgaaaucuugag

SEQ ID NO: 11333 - RNA, 38 nt, Artificial Sequence
  Description of Artificial Sequence:  Enzymatic Nucleic Acid
auaugaaucugaugaggccguuaggccgaaaggaucuu

SEQ ID NO: 11334 - RNA, 38 nt, Artificial Sequence
  Description of Artificial Sequence:  Enzymatic Nucleic Acid
ccaauaugcugaugaggccguuaggccgaaaugaggau

SEQ ID NO: 11335 - RNA, 38 nt, Artificial Sequence
  Description of Artificial Sequence:  Enzymatic Nucleic Acid
accaauaucugaugaggccguuaggccgaaaaugagga

SEQ ID NO: 11336 - RNA, 38 nt, Artificial Sequence
  Description of Artificial Sequence:  Enzymatic Nucleic Acid
gugaccaacugaugaggccguuaggccgaaaugaauga

SEQ ID NO: 11337 - RNA, 38 nt, Artificial Sequence
  Description of Artificial Sequence:  Enzymatic Nucleic Acid
uggugacccugaugaggccguuaggccgaaauaugaau

SEQ ID NO: 11338 - RNA, 38 nt, Artificial Sequence
  Description of Artificial Sequence:  Enzymatic Nucleic Acid
gagauggucugaugaggccguuaggccgaaaccaauau

SEQ ID NO: 11339 - RNA, 38 nt, Artificial Sequence
  Description of Artificial Sequence:  Enzymatic Nucleic Acid
cacauugacugaugaggccguuaggccgaaauggugac

SEQ ID NO: 11340 - RNA, 38 nt, Artificial Sequence
  Description of Artificial Sequence:  Enzymatic Nucleic Acid
accacauucugaugaggccguuaggccgaaagauggug

SEQ ID NO: 11341 - RNA, 38 nt, Artificial Sequence
  Description of Artificial Sequence:  Enzymatic Nucleic Acid
agaagguucugaugaggccguuaggccgaaaccacauu

SEQ ID NO: 11342 - RNA, 38 nt, Artificial Sequence
  Description of Artificial Sequence:  Enzymatic Nucleic Acid
gcaccuagcugaugaggccguuaggccgaaagguugac

SEQ ID NO: 11343 - RNA, 38 nt, Artificial Sequence
  Description of Artificial Sequence:  Enzymatic Nucleic Acid
ggcaccuacugaugaggccguuaggccgaaaagguuga

SEQ ID NO: 11344 - RNA, 38 nt, Artificial Sequence
  Description of Artificial Sequence:  Enzymatic Nucleic Acid
caggcacccugaugaggccguuaggccgaaagaagguu

SEQ ID NO: 11345 - RNA, 38 nt, Artificial Sequence
  Description of Artificial Sequence:  Enzymatic Nucleic Acid
uggcuuggcugaugaggccguuaggccgaaacaggcac

SEQ ID NO: 11346 - RNA, 38 nt, Artificial Sequence
  Description of Artificial Sequence:  Enzymatic Nucleic Acid
aucaccaucugaugaggccguuaggccgaaaguggccc

SEQ ID NO: 11347 - RNA, 38 nt, Artificial Sequence
  Description of Artificial Sequence:  Enzymatic Nucleic Acid
aauuccaccugaugaggccguuaggccgaaaucaccau

SEQ ID NO: 11348 - RNA, 38 nt, Artificial Sequence
  Description of Artificial Sequence:  Enzymatic Nucleic Acid
auuugcagcugaugaggccguuaggccgaaauuccaca

SEQ ID NO: 11349 - RNA, 38 nt, Artificial Sequence
  Description of Artificial Sequence:  Enzymatic Nucleic Acid
aauuugcacugaugaggccguuaggccgaaaauuccac

SEQ ID NO: 11350 - RNA, 38 nt, Artificial Sequence
  Description of Artificial Sequence:  Enzymatic Nucleic Acid
gguuuccacugaugaggccguuaggccgaaauuugcag

SEQ ID NO: 11351 - RNA, 38 nt, Artificial Sequence
  Description of Artificial Sequence:  Enzymatic Nucleic Acid
agguuucccugaugaggccguuaggccgaaaauuugca

SEQ ID NO: 11352 - RNA, 38 nt, Artificial Sequence
  Description of Artificial Sequence:  Enzymatic Nucleic Acid
gguaagugcugaugaggccguuaggccgaaacagguuu

SEQ ID NO: 11353 - RNA, 38 nt, Artificial Sequence
  Description of Artificial Sequence:  Enzymatic Nucleic Acid
ccucaggucugaugaggccguuaggccgaaaguggaca

SEQ ID NO: 11354 - RNA, 38 nt, Artificial Sequence
  Description of Artificial Sequence:  Enzymatic Nucleic Acid
uccucaggcugaugaggccguuaggccgaaaaguggac

SEQ ID NO: 11355 - RNA, 38 nt, Artificial Sequence
  Description of Artificial Sequence:  Enzymatic Nucleic Acid
aggggacacugaugaggccguuaggccgaaauucauuu

SEQ ID NO: 11356 - RNA, 38 nt, Artificial Sequence
  Description of Artificial Sequence:  Enzymatic Nucleic Acid
uaggggaccugaugaggccguuaggccgaaaauucauu

SEQ ID NO: 11357 - RNA, 38 nt, Artificial Sequence
  Description of Artificial Sequence:  Enzymatic Nucleic Acid
uuguagggcugaugaggccguuaggccgaaacaaauuc

SEQ ID NO: 11358 - RNA, 38 nt, Artificial Sequence
  Description of Artificial Sequence:  Enzymatic Nucleic Acid
uggucuugcugaugaggccguuaggccgaaaggggaca

SEQ ID NO: 11359 - RNA, 38 nt, Artificial Sequence
  Description of Artificial Sequence:  Enzymatic Nucleic Acid
cuugacggcugaugaggccguuaggccgaaaucgugcc

SEQ ID NO: 11360 - RNA, 38 nt, Artificial Sequence
  Description of Artificial Sequence:  Enzymatic Nucleic Acid
ccuugacgcugaugaggccguuaggccgaaaaucgugc

SEQ ID NO: 11361 - RNA, 38 nt, Artificial Sequence
  Description of Artificial Sequence:  Enzymatic Nucleic Acid
uuucccuucugaugaggccguuaggccgaaacggaauc

SEQ ID NO: 11362 - RNA, 38 nt, Artificial Sequence
  Description of Artificial Sequence:  Enzymatic Nucleic Acid
cuccaacgcugaugaggccguuaggccgaaagucuuuc

SEQ ID NO: 11363 - RNA, 38 nt, Artificial Sequence
  Description of Artificial Sequence:  Enzymatic Nucleic Acid
auugcucccugaugaggccguuaggccgaaacguaguc

SEQ ID NO: 11364 - RNA, 38 nt, Artificial Sequence
  Description of Artificial Sequence:  Enzymatic Nucleic Acid
uccacaggcugaugaggccguuaggccgaaauugcucc

SEQ ID NO: 11365 - RNA, 38 nt, Artificial Sequence
  Description of Artificial Sequence:  Enzymatic Nucleic Acid
ccguuucacugaugaggccguuaggccgaaauccacag

SEQ ID NO: 11366 - RNA, 38 nt, Artificial Sequence
  Description of Artificial Sequence:  Enzymatic Nucleic Acid
ugcugucccugaugaggccguuaggccgaaagcgccgu

SEQ ID NO: 11367 - RNA, 38 nt, Artificial Sequence
  Description of Artificial Sequence:  Enzymatic Nucleic Acid
cuacuggucugaugaggccguuaggccgaaaugcuguc

SEQ ID NO: 11368 - RNA, 38 nt, Artificial Sequence
  Description of Artificial Sequence:  Enzymatic Nucleic Acid
gcucuggccugaugaggccguuaggccgaaacugguga

SEQ ID NO: 11369 - RNA, 38 nt, Artificial Sequence
  Description of Artificial Sequence:  Enzymatic Nucleic Acid
agcuggcucugaugaggccguuaggccgaaagcucugg

SEQ ID NO: 11370 - RNA, 38 nt, Artificial Sequence
  Description of Artificial Sequence:  Enzymatic Nucleic Acid
caaauccacugaugaggccguuaggccgaaagcuggcu

SEQ ID NO: 11371 - RNA, 38 nt, Artificial Sequence
  Description of Artificial Sequence:  Enzymatic Nucleic Acid
ccuccacacugaugaggccguuaggccgaaauccagag

SEQ ID NO: 11372 - RNA, 38 nt, Artificial Sequence
  Description of Artificial Sequence:  Enzymatic Nucleic Acid
uccuccaccugaugaggccguuaggccgaaaauccaga

SEQ ID NO: 11373 - RNA, 38 nt, Artificial Sequence
  Description of Artificial Sequence:  Enzymatic Nucleic Acid
cacugaggcugaugaggccguuaggccgaaacuucucc

SEQ ID NO: 11374 - RNA, 38 nt, Artificial Sequence
  Description of Artificial Sequence:  Enzymatic Nucleic Acid
acaucacucugaugaggccguuaggccgaaagggacuu

SEQ ID NO: 11375 - RNA, 38 nt, Artificial Sequence
  Description of Artificial Sequence:  Enzymatic Nucleic Acid
ucuucuuccugaugaggccguuaggccgaaacaucacu

SEQ ID NO: 11376 - RNA, 38 nt, Artificial Sequence
  Description of Artificial Sequence:  Enzymatic Nucleic Acid
aucuucagcugaugaggccguuaggccgaaagcuuccu

SEQ ID NO: 11377 - RNA, 38 nt, Artificial Sequence
  Description of Artificial Sequence:  Enzymatic Nucleic Acid
cuuauacacugaugaggccguuaggccgaaaucuucag

SEQ ID NO: 11378 - RNA, 38 nt, Artificial Sequence
  Description of Artificial Sequence:  Enzymatic Nucleic Acid
aguccuuacugaugaggccguuaggccgaaacagaucu

SEQ ID NO: 11379 - RNA, 38 nt, Artificial Sequence
  Description of Artificial Sequence:  Enzymatic Nucleic Acid
gaaguccucugaugaggccguuaggccgaaauacagau

SEQ ID NO: 11380 - RNA, 38 nt, Artificial Sequence
  Description of Artificial Sequence:  Enzymatic Nucleic Acid
aggucaggcugaugaggccguuaggccgaaaguccuua

SEQ ID NO: 11381 - RNA, 38 nt, Artificial Sequence
  Description of Artificial Sequence:  Enzymatic Nucleic Acid
aaggucagcugaugaggccguuaggccgaaaaguccuu

SEQ ID NO: 11382 - RNA, 38 nt, Artificial Sequence
  Description of Artificial Sequence:  Enzymatic Nucleic Acid
gaugcucccugaugaggccguuaggccgaaaggucagg

SEQ ID NO: 11383 - RNA, 38 nt, Artificial Sequence
  Description of Artificial Sequence:  Enzymatic Nucleic Acid
acagaugacugaugaggccguuaggccgaaaugcucca

SEQ ID NO: 11384 - RNA, 38 nt, Artificial Sequence
  Description of Artificial Sequence:  Enzymatic Nucleic Acid
uaacagaucugaugaggccguuaggccgaaagaugcuc

SEQ ID NO: 11385 - RNA, 38 nt, Artificial Sequence
  Description of Artificial Sequence:  Enzymatic Nucleic Acid
cuguaacacugaugaggccguuaggccgaaaugagaug

SEQ ID NO: 11386 - RNA, 38 nt, Artificial Sequence
  Description of Artificial Sequence:  Enzymatic Nucleic Acid
gaagcugucugaugaggccguuaggccgaaacagauga

SEQ ID NO: 11387 - RNA, 38 nt, Artificial Sequence
  Description of Artificial Sequence:  Enzymatic Nucleic Acid
ggaagcugcugaugaggccguuaggccgaaaacagaug

SEQ ID NO: 11388 - RNA, 38 nt, Artificial Sequence
  Description of Artificial Sequence:  Enzymatic Nucleic Acid
ccacuuggcugaugaggccguuaggccgaaagcuguaa

SEQ ID NO: 11389 - RNA, 38 nt, Artificial Sequence
  Description of Artificial Sequence:  Enzymatic Nucleic Acid
gccacuugcugaugaggccguuaggccgaaaagcugua

SEQ ID NO: 11390 - RNA, 38 nt, Artificial Sequence
  Description of Artificial Sequence:  Enzymatic Nucleic Acid
caugcccucugaugaggccguuaggccgaaagccacuu

SEQ ID NO: 11391 - RNA, 38 nt, Artificial Sequence
  Description of Artificial Sequence:  Enzymatic Nucleic Acid
augccaagcugaugaggccguuaggccgaaacuccaug

SEQ ID NO: 11392 - RNA, 38 nt, Artificial Sequence
  Description of Artificial Sequence:  Enzymatic Nucleic Acid
gaugccaacugaugaggccguuaggccgaaaacuccau

SEQ ID NO: 11393 - RNA, 38 nt, Artificial Sequence
  Description of Artificial Sequence:  Enzymatic Nucleic Acid
gcgaugcccugaugaggccguuaggccgaaagaacucc

SEQ ID NO: 11394 - RNA, 38 nt, Artificial Sequence
  Description of Artificial Sequence:  Enzymatic Nucleic Acid
acuuucgccugaugaggccguuaggccgaaaugccaag

SEQ ID NO: 11395 - RNA, 38 nt, Artificial Sequence
  Description of Artificial Sequence:  Enzymatic Nucleic Acid
ccuguggacugaugaggccguuaggccgaaacacuuuc

SEQ ID NO: 11396 - RNA, 38 nt, Artificial Sequence
  Description of Artificial Sequence:  Enzymatic Nucleic Acid
ucccugugcugaugaggccguuaggccgaaauacacuu

SEQ ID NO: 11397 - RNA, 38 nt, Artificial Sequence
  Description of Artificial Sequence:  Enzymatic Nucleic Acid
uaagaggacugaugaggccguuaggccgaaauuucgug

SEQ ID NO: 11398 - RNA, 38 nt, Artificial Sequence
  Description of Artificial Sequence:  Enzymatic Nucleic Acid
gauaagagcugaugaggccguuaggccgaaauauuucg

SEQ ID NO: 11399 - RNA, 38 nt, Artificial Sequence
  Description of Artificial Sequence:  Enzymatic Nucleic Acid
uccgauaacugaugaggccguuaggccgaaaggauauu

SEQ ID NO: 11400 - RNA, 38 nt, Artificial Sequence
  Description of Artificial Sequence:  Enzymatic Nucleic Acid
ucuccgaucugaugaggccguuaggccgaaagaggaua

SEQ ID NO: 11401 - RNA, 38 nt, Artificial Sequence
  Description of Artificial Sequence:  Enzymatic Nucleic Acid
uucuccgacugaugaggccguuaggccgaaaagaggau

SEQ ID NO: 11402 - RNA, 38 nt, Artificial Sequence
  Description of Artificial Sequence:  Enzymatic Nucleic Acid
ucuucucccugaugaggccguuaggccgaaauaagagg

SEQ ID NO: 11403 - RNA, 38 nt, Artificial Sequence
  Description of Artificial Sequence:  Enzymatic Nucleic Acid
cagauuuucugaugaggccguuaggccgaaaccacguu

SEQ ID NO: 11404 - RNA, 38 nt, Artificial Sequence
  Description of Artificial Sequence:  Enzymatic Nucleic Acid
acagauuucugaugaggccguuaggccgaaaaccacgu

SEQ ID NO: 11405 - RNA, 38 nt, Artificial Sequence
  Description of Artificial Sequence:  Enzymatic Nucleic Acid
aagucacacugaugaggccguuaggccgaaauuuuaac

SEQ ID NO: 11406 - RNA, 38 nt, Artificial Sequence
  Description of Artificial Sequence:  Enzymatic Nucleic Acid
ccaagccacugaugaggccguuaggccgaaagucacag

SEQ ID NO: 11407 - RNA, 38 nt, Artificial Sequence
  Description of Artificial Sequence:  Enzymatic Nucleic Acid
gccaagcccugaugaggccguuaggccgaaaagucaca

SEQ ID NO: 11408 - RNA, 38 nt, Artificial Sequence
  Description of Artificial Sequence:  Enzymatic Nucleic Acid
cccgggcccugaugaggccguuaggccgaaagccaaag

SEQ ID NO: 11409 - RNA, 38 nt, Artificial Sequence
  Description of Artificial Sequence:  Enzymatic Nucleic Acid
uuuauaaacugaugaggccguuaggccgaaaucccggg

SEQ ID NO: 11410 - RNA, 38 nt, Artificial Sequence
  Description of Artificial Sequence:  Enzymatic Nucleic Acid
ucuuuauacugaugaggccguuaggccgaaauaucccg

SEQ ID NO: 11411 - RNA, 38 nt, Artificial Sequence
  Description of Artificial Sequence:  Enzymatic Nucleic Acid
aucuuuaucugaugaggccguuaggccgaaaauauccc

SEQ ID NO: 11412 - RNA, 38 nt, Artificial Sequence
  Description of Artificial Sequence:  Enzymatic Nucleic Acid
gaucuuuacugaugaggccguuaggccgaaaaauaucc

SEQ ID NO: 11413 - RNA, 38 nt, Artificial Sequence
  Description of Artificial Sequence:  Enzymatic Nucleic Acid
uggaucuucugaugaggccguuaggccgaaauaaauau

SEQ ID NO: 11414 - RNA, 38 nt, Artificial Sequence
  Description of Artificial Sequence:  Enzymatic Nucleic Acid
auaaucugcugaugaggccguuaggccgaaaucuuuau

SEQ ID NO: 11415 - RNA, 38 nt, Artificial Sequence
  Description of Artificial Sequence:  Enzymatic Nucleic Acid
ucugacaucugaugaggccguuaggccgaaaucuggau

SEQ ID NO: 11416 - RNA, 38 nt, Artificial Sequence
  Description of Artificial Sequence:  Enzymatic Nucleic Acid
uucugacacugaugaggccguuaggccgaaaaucugga

SEQ ID NO: 11417 - RNA, 38 nt, Artificial Sequence
  Description of Artificial Sequence:  Enzymatic Nucleic Acid
ccuuuucucugaugaggccguuaggccgaaacauaauc

SEQ ID NO: 11418 - RNA, 38 nt, Artificial Sequence
  Description of Artificial Sequence:  Enzymatic Nucleic Acid
agggaggccugaugaggccguuaggccgaaagcaucuc

SEQ ID NO: 11419 - RNA, 38 nt, Artificial Sequence
  Description of Artificial Sequence:  Enzymatic Nucleic Acid
uucaaaggcugaugaggccguuaggccgaaaggcgagc

SEQ ID NO: 11420 - RNA, 38 nt, Artificial Sequence
  Description of Artificial Sequence:  Enzymatic Nucleic Acid
ccauuucacugaugaggccguuaggccgaaagggaggc

SEQ ID NO: 11421 - RNA, 38 nt, Artificial Sequence
  Description of Artificial Sequence:  Enzymatic Nucleic Acid
uccauuuccugaugaggccguuaggccgaaaagggagg

SEQ ID NO: 11422 - RNA, 38 nt, Artificial Sequence
  Description of Artificial Sequence:  Enzymatic Nucleic Acid
cugucaaacugaugaggccguuaggccgaaauuguuuc

SEQ ID NO: 11423 - RNA, 38 nt, Artificial Sequence
  Description of Artificial Sequence:  Enzymatic Nucleic Acid
ucugucaacugaugaggccguuaggccgaaaauuguuu

SEQ ID NO: 11424 - RNA, 38 nt, Artificial Sequence
  Description of Artificial Sequence:  Enzymatic Nucleic Acid
cucugucacugaugaggccguuaggccgaaaaauuguu

SEQ ID NO: 11425 - RNA, 38 nt, Artificial Sequence
  Description of Artificial Sequence:  Enzymatic Nucleic Acid
acucuguccugaugaggccguuaggccgaaaaaauugu

SEQ ID NO: 11426 - RNA, 38 nt, Artificial Sequence
  Description of Artificial Sequence:  Enzymatic Nucleic Acid
ggauugugcugaugaggccguuaggccgaaacacucug

SEQ ID NO: 11427 - RNA, 38 nt, Artificial Sequence
  Description of Artificial Sequence:  Enzymatic Nucleic Acid
ucacucugcugaugaggccguuaggccgaaauugugua

SEQ ID NO: 11428 - RNA, 38 nt, Artificial Sequence
  Description of Artificial Sequence:  Enzymatic Nucleic Acid
aaagaccacugaugaggccguuaggccgaaacgucacu

SEQ ID NO: 11429 - RNA, 38 nt, Artificial Sequence
  Description of Artificial Sequence:  Enzymatic Nucleic Acid
caccaaaacugaugaggccguuaggccgaaaccagacg

SEQ ID NO: 11430 - RNA, 38 nt, Artificial Sequence
  Description of Artificial Sequence:  Enzymatic Nucleic Acid
aacaccaacugaugaggccguuaggccgaaagaccaga

SEQ ID NO: 11431 - RNA, 38 nt, Artificial Sequence
  Description of Artificial Sequence:  Enzymatic Nucleic Acid
aaacaccacugaugaggccguuaggccgaaaagaccag

SEQ ID NO: 11432 - RNA, 38 nt, Artificial Sequence
  Description of Artificial Sequence:  Enzymatic Nucleic Acid
aaaacacccugaugaggccguuaggccgaaaaagacca

SEQ ID NO: 11433 - RNA, 38 nt, Artificial Sequence
  Description of Artificial Sequence:  Enzymatic Nucleic Acid
cacagcaacugaugaggccguuaggccgaaacaccaaa

SEQ ID NO: 11434 - RNA, 38 nt, Artificial Sequence
  Description of Artificial Sequence:  Enzymatic Nucleic Acid
ccacagcacugaugaggccguuaggccgaaaacaccaa

SEQ ID NO: 11435 - RNA, 38 nt, Artificial Sequence
  Description of Artificial Sequence:  Enzymatic Nucleic Acid
cccacagccugaugaggccguuaggccgaaaaacacca

SEQ ID NO: 11436 - RNA, 38 nt, Artificial Sequence
  Description of Artificial Sequence:  Enzymatic Nucleic Acid
aaggaaaacugaugaggccguuaggccgaaauuuccca

SEQ ID NO: 11437 - RNA, 38 nt, Artificial Sequence
  Description of Artificial Sequence:  Enzymatic Nucleic Acid
cuaaggaacugaugaggccguuaggccgaaauauuucc

SEQ ID NO: 11438 - RNA, 38 nt, Artificial Sequence
  Description of Artificial Sequence:  Enzymatic Nucleic Acid
ccuaaggacugaugaggccguuaggccgaaaauauuuc

SEQ ID NO: 11439 - RNA, 38 nt, Artificial Sequence
  Description of Artificial Sequence:  Enzymatic Nucleic Acid
accuaaggcugaugaggccguuaggccgaaaaauauuu

SEQ ID NO: 11440 - RNA, 38 nt, Artificial Sequence
  Description of Artificial Sequence:  Enzymatic Nucleic Acid
caccuaagcugaugaggccguuaggccgaaaaaauauu

SEQ ID NO: 11441 - RNA, 38 nt, Artificial Sequence
  Description of Artificial Sequence:  Enzymatic Nucleic Acid
aagcaccucugaugaggccguuaggccgaaaggaaaau

SEQ ID NO: 11442 - RNA, 38 nt, Artificial Sequence
  Description of Artificial Sequence:  Enzymatic Nucleic Acid
gaagcacccugaugaggccguuaggccgaaaaggaaaa

SEQ ID NO: 11443 - RNA, 38 nt, Artificial Sequence
  Description of Artificial Sequence:  Enzymatic Nucleic Acid
auauggagcugaugaggccguuaggccgaaagcaccua

SEQ ID NO: 11444 - RNA, 38 nt, Artificial Sequence
  Description of Artificial Sequence:  Enzymatic Nucleic Acid
gauauggacugaugaggccguuaggccgaaaagcaccu

SEQ ID NO: 11445 - RNA, 38 nt, Artificial Sequence
  Description of Artificial Sequence:  Enzymatic Nucleic Acid
aggauaugcugaugaggccguuaggccgaaagaagcac

SEQ ID NO: 11446 - RNA, 38 nt, Artificial Sequence
  Description of Artificial Sequence:  Enzymatic Nucleic Acid
ccccaggacugaugaggccguuaggccgaaauggagaa

SEQ ID NO: 11447 - RNA, 38 nt, Artificial Sequence
  Description of Artificial Sequence:  Enzymatic Nucleic Acid
uaccccagcugaugaggccguuaggccgaaauauggag

SEQ ID NO: 11448 - RNA, 38 nt, Artificial Sequence
  Description of Artificial Sequence:  Enzymatic Nucleic Acid
ucaaucuucugaugaggccguuaggccgaaaccccagg

SEQ ID NO: 11449 - RNA, 38 nt, Artificial Sequence
  Description of Artificial Sequence:  Enzymatic Nucleic Acid
ucuucauccugaugaggccguuaggccgaaaucuuuac

SEQ ID NO: 11450 - RNA, 38 nt, Artificial Sequence
  Description of Artificial Sequence:  Enzymatic Nucleic Acid
gccuacaacugaugaggccguuaggccgaaauucuuca

SEQ ID NO: 11451 - RNA, 38 nt, Artificial Sequence
  Description of Artificial Sequence:  Enzymatic Nucleic Acid
cgccuacacugaugaggccguuaggccgaaaauucuuc

SEQ ID NO: 11452 - RNA, 38 nt, Artificial Sequence
  Description of Artificial Sequence:  Enzymatic Nucleic Acid
ucgccuaccugaugaggccguuaggccgaaaaauucuu

SEQ ID NO: 11453 - RNA, 38 nt, Artificial Sequence
  Description of Artificial Sequence:  Enzymatic Nucleic Acid
caaucgcccugaugaggccguuaggccgaaacaaaauu

SEQ ID NO: 11454 - RNA, 38 nt, Artificial Sequence
  Description of Artificial Sequence:  Enzymatic Nucleic Acid
cuucuuuccugaugaggccguuaggccgaaaucgccua

SEQ ID NO: 11455 - RNA, 38 nt, Artificial Sequence
  Description of Artificial Sequence:  Enzymatic Nucleic Acid
ccucauuccugaugaggccguuaggccgaaaguuccuu

SEQ ID NO: 11456 - RNA, 38 nt, Artificial Sequence
  Description of Artificial Sequence:  Enzymatic Nucleic Acid
uguaguaucugaugaggccguuaggccgaaaucagggg

SEQ ID NO: 11457 - RNA, 38 nt, Artificial Sequence
  Description of Artificial Sequence:  Enzymatic Nucleic Acid
guguaguacugaugaggccguuaggccgaaaaucaggg

SEQ ID NO: 11458 - RNA, 38 nt, Artificial Sequence
  Description of Artificial Sequence:  Enzymatic Nucleic Acid
ugguguagcugaugaggccguuaggccgaaauaaucag

SEQ ID NO: 11459 - RNA, 38 nt, Artificial Sequence
  Description of Artificial Sequence:  Enzymatic Nucleic Acid
uucuggugcugaugaggccguuaggccgaaaguauaau

SEQ ID NO: 11460 - RNA, 38 nt, Artificial Sequence
  Description of Artificial Sequence:  Enzymatic Nucleic Acid
uggucuggcugaugaggccguuaggccgaaacauuucu

SEQ ID NO: 11461 - RNA, 38 nt, Artificial Sequence
  Description of Artificial Sequence:  Enzymatic Nucleic Acid
gggucucucugaugaggccguuaggccgaaacugggcu

SEQ ID NO: 11462 - RNA, 38 nt, Artificial Sequence
  Description of Artificial Sequence:  Enzymatic Nucleic Acid
acucugaacugaugaggccguuaggccgaaacgugggu

SEQ ID NO: 11463 - RNA, 38 nt, Artificial Sequence
  Description of Artificial Sequence:  Enzymatic Nucleic Acid
aacucugacugaugaggccguuaggccgaaaacguggg

SEQ ID NO: 11464 - RNA, 38 nt, Artificial Sequence
  Description of Artificial Sequence:  Enzymatic Nucleic Acid
caacucugcugaugaggccguuaggccgaaaaacgugg

SEQ ID NO: 11465 - RNA, 38 nt, Artificial Sequence
  Description of Artificial Sequence:  Enzymatic Nucleic Acid
ccaacucucugaugaggccguuaggccgaaaaaacgug

SEQ ID NO: 11466 - RNA, 38 nt, Artificial Sequence
  Description of Artificial Sequence:  Enzymatic Nucleic Acid
guuccacccugaugaggccguuaggccgaaacucugaa

SEQ ID NO: 11467 - RNA, 38 nt, Artificial Sequence
  Description of Artificial Sequence:  Enzymatic Nucleic Acid
auuucccacugaugaggccguuaggccgaaauguucca

SEQ ID NO: 11468 - RNA, 38 nt, Artificial Sequence
  Description of Artificial Sequence:  Enzymatic Nucleic Acid
gauuuccccugaugaggccguuaggccgaaaauguucc

SEQ ID NO: 11469 - RNA, 38 nt, Artificial Sequence
  Description of Artificial Sequence:  Enzymatic Nucleic Acid
uugcaagacugaugaggccguuaggccgaaauuuccca

SEQ ID NO: 11470 - RNA, 38 nt, Artificial Sequence
  Description of Artificial Sequence:  Enzymatic Nucleic Acid
gcuugcaacugaugaggccguuaggccgaaagauuucc

SEQ ID NO: 11471 - RNA, 38 nt, Artificial Sequence
  Description of Artificial Sequence:  Enzymatic Nucleic Acid
uagcuugccugaugaggccguuaggccgaaagagauuu

SEQ ID NO: 11472 - RNA, 38 nt, Artificial Sequence
  Description of Artificial Sequence:  Enzymatic Nucleic Acid
cugagcaucugaugaggccguuaggccgaaagcuugca

SEQ ID NO: 11473 - RNA, 38 nt, Artificial Sequence
  Description of Artificial Sequence:  Enzymatic Nucleic Acid
auccugcucugaugaggccguuaggccgaaagcauuag

SEQ ID NO: 11474 - RNA, 38 nt, Artificial Sequence
  Description of Artificial Sequence:  Enzymatic Nucleic Acid
gaacaaugcugaugaggccguuaggccgaaagucuuug

SEQ ID NO: 11475 - RNA, 38 nt, Artificial Sequence
  Description of Artificial Sequence:  Enzymatic Nucleic Acid
ggaagaaccugaugaggccguuaggccgaaauguaguc

SEQ ID NO: 11476 - RNA, 38 nt, Artificial Sequence
  Description of Artificial Sequence:  Enzymatic Nucleic Acid
aucggaagcugaugaggccguuaggccgaaacaaugua

SEQ ID NO: 11477 - RNA, 38 nt, Artificial Sequence
  Description of Artificial Sequence:  Enzymatic Nucleic Acid
uaucggaacugaugaggccguuaggccgaaaacaaugu

SEQ ID NO: 11478 - RNA, 38 nt, Artificial Sequence
  Description of Artificial Sequence:  Enzymatic Nucleic Acid
gauaucggcugaugaggccguuaggccgaaagaacaau

SEQ ID NO: 11479 - RNA, 38 nt, Artificial Sequence
  Description of Artificial Sequence:  Enzymatic Nucleic Acid
ugauaucgcugaugaggccguuaggccgaaaagaacaa

SEQ ID NO: 11480 - RNA, 38 nt, Artificial Sequence
  Description of Artificial Sequence:  Enzymatic Nucleic Acid
gucucugacugaugaggccguuaggccgaaaucggaag

SEQ ID NO: 11481 - RNA, 38 nt, Artificial Sequence
  Description of Artificial Sequence:  Enzymatic Nucleic Acid
aagucucucugaugaggccguuaggccgaaauaucgga

SEQ ID NO: 11482 - RNA, 38 nt, Artificial Sequence
  Description of Artificial Sequence:  Enzymatic Nucleic Acid
caugcucacugaugaggccguuaggccgaaagucucug

SEQ ID NO: 11483 - RNA, 38 nt, Artificial Sequence
  Description of Artificial Sequence:  Enzymatic Nucleic Acid
ccaugcuccugaugaggccguuaggccgaaaagucucu

SEQ ID NO: 11484 - RNA, 38 nt, Artificial Sequence
  Description of Artificial Sequence:  Enzymatic Nucleic Acid
gaguccagcugaugaggccguuaggccgaaauccucuu

SEQ ID NO: 11485 - RNA, 38 nt, Artificial Sequence
  Description of Artificial Sequence:  Enzymatic Nucleic Acid
agaguccacugaugaggccguuaggccgaaaauccucu

SEQ ID NO: 11486 - RNA, 38 nt, Artificial Sequence
  Description of Artificial Sequence:  Enzymatic Nucleic Acid
ggcagagacugaugaggccguuaggccgaaaguccaga

SEQ ID NO: 11487 - RNA, 38 nt, Artificial Sequence
  Description of Artificial Sequence:  Enzymatic Nucleic Acid
uaggcagacugaugaggccguuaggccgaaagagucca

SEQ ID NO: 11488 - RNA, 38 nt, Artificial Sequence
  Description of Artificial Sequence:  Enzymatic Nucleic Acid
gguaggcacugaugaggccguuaggccgaaagagaguc

SEQ ID NO: 11489 - RNA, 38 nt, Artificial Sequence
  Description of Artificial Sequence:  Enzymatic Nucleic Acid
aggugaggcugaugaggccguuaggccgaaaggcagag

SEQ ID NO: 11490 - RNA, 38 nt, Artificial Sequence
  Description of Artificial Sequence:  Enzymatic Nucleic Acid
aaacaggucugaugaggccguuaggccgaaagguaggc

SEQ ID NO: 11491 - RNA, 38 nt, Artificial Sequence
  Description of Artificial Sequence:  Enzymatic Nucleic Acid
auacaggacugaugaggccguuaggccgaaacagguga

SEQ ID NO: 11492 - RNA, 38 nt, Artificial Sequence
  Description of Artificial Sequence:  Enzymatic Nucleic Acid
cauacaggcugaugaggccguuaggccgaaaacaggug

SEQ ID NO: 11493 - RNA, 38 nt, Artificial Sequence
  Description of Artificial Sequence:  Enzymatic Nucleic Acid
ccauacagcugaugaggccguuaggccgaaaaacaggu

SEQ ID NO: 11494 - RNA, 38 nt, Artificial Sequence
  Description of Artificial Sequence:  Enzymatic Nucleic Acid
cuccuccacugaugaggccguuaggccgaaacaggaaa

SEQ ID NO: 11495 - RNA, 38 nt, Artificial Sequence
  Description of Artificial Sequence:  Enzymatic Nucleic Acid
gggucacacugaugaggccguuaggccgaaacuuccuc

SEQ ID NO: 11496 - RNA, 38 nt, Artificial Sequence
  Description of Artificial Sequence:  Enzymatic Nucleic Acid
cauaauggcugaugaggccguuaggccgaaauuugggg

SEQ ID NO: 11497 - RNA, 38 nt, Artificial Sequence
  Description of Artificial Sequence:  Enzymatic Nucleic Acid
ucauaaugcugaugaggccguuaggccgaaaauuuggg

SEQ ID NO: 11498 - RNA, 38 nt, Artificial Sequence
  Description of Artificial Sequence:  Enzymatic Nucleic Acid
guugucaucugaugaggccguuaggccgaaauggaauu

SEQ ID NO: 11499 - RNA, 38 nt, Artificial Sequence
  Description of Artificial Sequence:  Enzymatic Nucleic Acid
uguugucacugaugaggccguuaggccgaaaauggaau

SEQ ID NO: 11500 - RNA, 38 nt, Artificial Sequence
  Description of Artificial Sequence:  Enzymatic Nucleic Acid
uacugacucugaugaggccguuaggccgaaauuccugc

SEQ ID NO: 11501 - RNA, 38 nt, Artificial Sequence
  Description of Artificial Sequence:  Enzymatic Nucleic Acid
cagauacucugaugaggccguuaggccgaaacugauuc

SEQ ID NO: 11502 - RNA, 38 nt, Artificial Sequence
  Description of Artificial Sequence:  Enzymatic Nucleic Acid
ucugcagacugaugaggccguuaggccgaaacugacug

SEQ ID NO: 11503 - RNA, 38 nt, Artificial Sequence
  Description of Artificial Sequence:  Enzymatic Nucleic Acid
guucugcacugaugaggccguuaggccgaaauacugac

SEQ ID NO: 11504 - RNA, 38 nt, Artificial Sequence
  Description of Artificial Sequence:  Enzymatic Nucleic Acid
cuuucgcucugaugaggccguuaggccgaaacuguucu

SEQ ID NO: 11505 - RNA, 38 nt, Artificial Sequence
  Description of Artificial Sequence:  Enzymatic Nucleic Acid
aauguuuucugaugaggccguuaggccgaaacacucac

SEQ ID NO: 11506 - RNA, 38 nt, Artificial Sequence
  Description of Artificial Sequence:  Enzymatic Nucleic Acid
uaucuucacugaugaggccguuaggccgaaauguuuuu

SEQ ID NO: 11507 - RNA, 38 nt, Artificial Sequence
  Description of Artificial Sequence:  Enzymatic Nucleic Acid
auaucuuccugaugaggccguuaggccgaaaauguuuu

SEQ ID NO: 11508 - RNA, 38 nt, Artificial Sequence
  Description of Artificial Sequence:  Enzymatic Nucleic Acid
uaacgggacugaugaggccguuaggccgaaaucuucaa

SEQ ID NO: 11509 - RNA, 38 nt, Artificial Sequence
  Description of Artificial Sequence:  Enzymatic Nucleic Acid
ucuaacggcugaugaggccguuaggccgaaauaucuuc

SEQ ID NO: 11510 - RNA, 38 nt, Artificial Sequence
  Description of Artificial Sequence:  Enzymatic Nucleic Acid
guucuucucugaugaggccguuaggccgaaacgggaua

SEQ ID NO: 11511 - RNA, 38 nt, Artificial Sequence
  Description of Artificial Sequence:  Enzymatic Nucleic Acid
gguucuuccugaugaggccguuaggccgaaaacgggau

SEQ ID NO: 11512 - RNA, 38 nt, Artificial Sequence
  Description of Artificial Sequence:  Enzymatic Nucleic Acid
auuacuuucugaugaggccguuaggccgaaacuucugg

SEQ ID NO: 11513 - RNA, 38 nt, Artificial Sequence
  Description of Artificial Sequence:  Enzymatic Nucleic Acid
ucugggaucugaugaggccguuaggccgaaacuuuuac

SEQ ID NO: 11514 - RNA, 38 nt, Artificial Sequence
  Description of Artificial Sequence:  Enzymatic Nucleic Acid
ucaucuggcugaugaggccguuaggccgaaauuacuuu

SEQ ID NO: 11515 - RNA, 38 nt, Artificial Sequence
  Description of Artificial Sequence:  Enzymatic Nucleic Acid
aagaaccacugaugaggccguuaggccgaaaccacugu

SEQ ID NO: 11516 - RNA, 38 nt, Artificial Sequence
  Description of Artificial Sequence:  Enzymatic Nucleic Acid
gaggcaagcugaugaggccguuaggccgaaaccauacc

SEQ ID NO: 11517 - RNA, 38 nt, Artificial Sequence
  Description of Artificial Sequence:  Enzymatic Nucleic Acid
ugaggcaacugaugaggccguuaggccgaaaaccauac

SEQ ID NO: 11518 - RNA, 38 nt, Artificial Sequence
  Description of Artificial Sequence:  Enzymatic Nucleic Acid
ucugaggccugaugaggccguuaggccgaaagaaccau

SEQ ID NO: 11519 - RNA, 38 nt, Artificial Sequence
  Description of Artificial Sequence:  Enzymatic Nucleic Acid
gcucuucucugaugaggccguuaggccgaaaggcaaga

SEQ ID NO: 11520 - RNA, 38 nt, Artificial Sequence
  Description of Artificial Sequence:  Enzymatic Nucleic Acid
gucuuccacugaugaggccguuaggccgaaaguuuuca

SEQ ID NO: 11521 - RNA, 38 nt, Artificial Sequence
  Description of Artificial Sequence:  Enzymatic Nucleic Acid
ugucuucccugaugaggccguuaggccgaaaaguuuuc

SEQ ID NO: 11522 - RNA, 38 nt, Artificial Sequence
  Description of Artificial Sequence:  Enzymatic Nucleic Acid
auggagaucugaugaggccguuaggccgaaauuugguu

SEQ ID NO: 11523 - RNA, 38 nt, Artificial Sequence
  Description of Artificial Sequence:  Enzymatic Nucleic Acid
gauggagacugaugaggccguuaggccgaaaauuuggu

SEQ ID NO: 11524 - RNA, 38 nt, Artificial Sequence
  Description of Artificial Sequence:  Enzymatic Nucleic Acid
aagauggacugaugaggccguuaggccgaaauaauuug

SEQ ID NO: 11525 - RNA, 38 nt, Artificial Sequence
  Description of Artificial Sequence:  Enzymatic Nucleic Acid
aaaagaugcugaugaggccguuaggccgaaagauaauu

SEQ ID NO: 11526 - RNA, 38 nt, Artificial Sequence
  Description of Artificial Sequence:  Enzymatic Nucleic Acid
caccaaaacugaugaggccguuaggccgaaauggagau

SEQ ID NO: 11527 - RNA, 38 nt, Artificial Sequence
  Description of Artificial Sequence:  Enzymatic Nucleic Acid
uccaccaacugaugaggccguuaggccgaaagauggag

SEQ ID NO: 11528 - RNA, 38 nt, Artificial Sequence
  Description of Artificial Sequence:  Enzymatic Nucleic Acid
uuccaccacugaugaggccguuaggccgaaaagaugga

SEQ ID NO: 11529 - RNA, 38 nt, Artificial Sequence
  Description of Artificial Sequence:  Enzymatic Nucleic Acid
auuccacccugaugaggccguuaggccgaaaaagaugg

SEQ ID NO: 11530 - RNA, 38 nt, Artificial Sequence
  Description of Artificial Sequence:  Enzymatic Nucleic Acid
augccacacugaugaggccguuaggccgaaacucccug

SEQ ID NO: 11531 - RNA, 38 nt, Artificial Sequence
  Description of Artificial Sequence:  Enzymatic Nucleic Acid
agccuucacugaugaggccguuaggccgaaaugccaca

SEQ ID NO: 11532 - RNA, 38 nt, Artificial Sequence
  Description of Artificial Sequence:  Enzymatic Nucleic Acid
ucugguuucugaugaggccguuaggccgaaagccuuca

SEQ ID NO: 11533 - RNA, 38 nt, Artificial Sequence
  Description of Artificial Sequence:  Enzymatic Nucleic Acid
cggacuggcugaugaggccguuaggccgaaagccgcuu

SEQ ID NO: 11534 - RNA, 38 nt, Artificial Sequence
  Description of Artificial Sequence:  Enzymatic Nucleic Acid
gauauccgcugaugaggccguuaggccgaaacugguag

SEQ ID NO: 11535 - RNA, 38 nt, Artificial Sequence
  Description of Artificial Sequence:  Enzymatic Nucleic Acid
cggagugacugaugaggccguuaggccgaaauccggac

SEQ ID NO: 11536 - RNA, 38 nt, Artificial Sequence
  Description of Artificial Sequence:  Enzymatic Nucleic Acid
aucggagucugaugaggccguuaggccgaaauauccgg

SEQ ID NO: 11537 - RNA, 38 nt, Artificial Sequence
  Description of Artificial Sequence:  Enzymatic Nucleic Acid
ugucaucgcugaugaggccguuaggccgaaagugauau

SEQ ID NO: 11538 - RNA, 38 nt, Artificial Sequence
  Description of Artificial Sequence:  Enzymatic Nucleic Acid
cacuggagcugaugaggccguuaggccgaaacacggug

SEQ ID NO: 11539 - RNA, 38 nt, Artificial Sequence
  Description of Artificial Sequence:  Enzymatic Nucleic Acid
ccucacugcugaugaggccguuaggccgaaaguacacg

SEQ ID NO: 11540 - RNA, 38 nt, Artificial Sequence
  Description of Artificial Sequence:  Enzymatic Nucleic Acid
agcuuuaacugaugaggccguuaggccgaaaguucugc

SEQ ID NO: 11541 - RNA, 38 nt, Artificial Sequence
  Description of Artificial Sequence:  Enzymatic Nucleic Acid
cagcuuuacugaugaggccguuaggccgaaaaguucug

SEQ ID NO: 11542 - RNA, 38 nt, Artificial Sequence
  Description of Artificial Sequence:  Enzymatic Nucleic Acid
ucagcuuucugaugaggccguuaggccgaaaaaguucu

SEQ ID NO: 11543 - RNA, 38 nt, Artificial Sequence
  Description of Artificial Sequence:  Enzymatic Nucleic Acid
aucagcuucugaugaggccguuaggccgaaaaaaguuc

SEQ ID NO: 11544 - RNA, 38 nt, Artificial Sequence
  Description of Artificial Sequence:  Enzymatic Nucleic Acid
ccaaucuccugaugaggccguuaggccgaaaucagcuu

SEQ ID NO: 11545 - RNA, 38 nt, Artificial Sequence
  Description of Artificial Sequence:  Enzymatic Nucleic Acid
ugcacucccugaugaggccguuaggccgaaaucucuau

SEQ ID NO: 11546 - RNA, 38 nt, Artificial Sequence
  Description of Artificial Sequence:  Enzymatic Nucleic Acid
ggcugugccugaugaggccguuaggccgaaaccgguuu

SEQ ID NO: 11547 - RNA, 38 nt, Artificial Sequence
  Description of Artificial Sequence:  Enzymatic Nucleic Acid
ggcuggagcugaugaggccguuaggccgaaaucugggc

SEQ ID NO: 11548 - RNA, 38 nt, Artificial Sequence
  Description of Artificial Sequence:  Enzymatic Nucleic Acid
aggcuggacugaugaggccguuaggccgaaaaucuggg

SEQ ID NO: 11549 - RNA, 38 nt, Artificial Sequence
  Description of Artificial Sequence:  Enzymatic Nucleic Acid
ucaggcugcugaugaggccguuaggccgaaagaaucug

SEQ ID NO: 11550 - RNA, 38 nt, Artificial Sequence
  Description of Artificial Sequence:  Enzymatic Nucleic Acid
caggaggacugaugaggccguuaggccgaaagcucagu

SEQ ID NO: 11551 - RNA, 38 nt, Artificial Sequence
  Description of Artificial Sequence:  Enzymatic Nucleic Acid
aacaggagcugaugaggccguuaggccgaaagagcuca

SEQ ID NO: 11552 - RNA, 38 nt, Artificial Sequence
  Description of Artificial Sequence:  Enzymatic Nucleic Acid
uuaaacagcugaugaggccguuaggccgaaaggagagc

SEQ ID NO: 11553 - RNA, 38 nt, Artificial Sequence
  Description of Artificial Sequence:  Enzymatic Nucleic Acid
uccuuuuacugaugaggccguuaggccgaaacaggagg

SEQ ID NO: 11554 - RNA, 38 nt, Artificial Sequence
  Description of Artificial Sequence:  Enzymatic Nucleic Acid
uuccuuuucugaugaggccguuaggccgaaaacaggag

SEQ ID NO: 11555 - RNA, 38 nt, Artificial Sequence
  Description of Artificial Sequence:  Enzymatic Nucleic Acid
cuuccuuucugaugaggccguuaggccgaaaaacagga

SEQ ID NO: 11556 - RNA, 38 nt, Artificial Sequence
  Description of Artificial Sequence:  Enzymatic Nucleic Acid
ggggugugcugaugaggccguuaggccgaaaugcuucc

SEQ ID NO: 11557 - RNA, 38 nt, Artificial Sequence
  Description of Artificial Sequence:  Enzymatic Nucleic Acid
auguccggcugaugaggccguuaggccgaaaguugggg

SEQ ID NO: 11558 - RNA, 38 nt, Artificial Sequence
  Description of Artificial Sequence:  Enzymatic Nucleic Acid
ucucaugucugaugaggccguuaggccgaaauguccgg

SEQ ID NO: 11559 - RNA, 38 nt, Artificial Sequence
  Description of Artificial Sequence:  Enzymatic Nucleic Acid
ucugagcacugaugaggccguuaggccgaaaccucuca

SEQ ID NO: 11560 - RNA, 38 nt, Artificial Sequence
  Description of Artificial Sequence:  Enzymatic Nucleic Acid
caaaaucucugaugaggccguuaggccgaaagcagacc

SEQ ID NO: 11561 - RNA, 38 nt, Artificial Sequence
  Description of Artificial Sequence:  Enzymatic Nucleic Acid
cacuucaacugaugaggccguuaggccgaaaucugagc

SEQ ID NO: 11562 - RNA, 38 nt, Artificial Sequence
  Description of Artificial Sequence:  Enzymatic Nucleic Acid
acacuucacugaugaggccguuaggccgaaaaucugag

SEQ ID NO: 11563 - RNA, 38 nt, Artificial Sequence
  Description of Artificial Sequence:  Enzymatic Nucleic Acid
aacacuuccugaugaggccguuaggccgaaaaaucuga

SEQ ID NO: 11564 - RNA, 38 nt, Artificial Sequence
  Description of Artificial Sequence:  Enzymatic Nucleic Acid
gaaagaaccugaugaggccguuaggccgaaacacuuca

SEQ ID NO: 11565 - RNA, 38 nt, Artificial Sequence
  Description of Artificial Sequence:  Enzymatic Nucleic Acid
guggaaagcugaugaggccguuaggccgaaacaacacu

SEQ ID NO: 11566 - RNA, 38 nt, Artificial Sequence
  Description of Artificial Sequence:  Enzymatic Nucleic Acid
gguggaaacugaugaggccguuaggccgaaaacaacac

SEQ ID NO: 11567 - RNA, 38 nt, Artificial Sequence
  Description of Artificial Sequence:  Enzymatic Nucleic Acid
cugguggacugaugaggccguuaggccgaaagaacaac

SEQ ID NO: 11568 - RNA, 38 nt, Artificial Sequence
  Description of Artificial Sequence:  Enzymatic Nucleic Acid
gcugguggcugaugaggccguuaggccgaaaagaacaa

SEQ ID NO: 11569 - RNA, 38 nt, Artificial Sequence
  Description of Artificial Sequence:  Enzymatic Nucleic Acid
ugcuggugcugaugaggccguuaggccgaaaaagaaca

SEQ ID NO: 11570 - RNA, 38 nt, Artificial Sequence
  Description of Artificial Sequence:  Enzymatic Nucleic Acid
aaugcggccugaugaggccguuaggccgaaacuuccug

SEQ ID NO: 11571 - RNA, 38 nt, Artificial Sequence
  Description of Artificial Sequence:  Enzymatic Nucleic Acid
gaaaaucacugaugaggccguuaggccgaaaugcggcu

SEQ ID NO: 11572 - RNA, 38 nt, Artificial Sequence
  Description of Artificial Sequence:  Enzymatic Nucleic Acid
ugaaaauccugaugaggccguuaggccgaaaaugcggc

SEQ ID NO: 11573 - RNA, 38 nt, Artificial Sequence
  Description of Artificial Sequence:  Enzymatic Nucleic Acid
gaaaugaacugaugaggccguuaggccgaaaucaaaug

SEQ ID NO: 11574 - RNA, 38 nt, Artificial Sequence
  Description of Artificial Sequence:  Enzymatic Nucleic Acid
cgaaaugacugaugaggccguuaggccgaaaaucaaau

SEQ ID NO: 11575 - RNA, 38 nt, Artificial Sequence
  Description of Artificial Sequence:  Enzymatic Nucleic Acid
ucgaaaugcugaugaggccguuaggccgaaaaaucaaa

SEQ ID NO: 11576 - RNA, 38 nt, Artificial Sequence
  Description of Artificial Sequence:  Enzymatic Nucleic Acid
gucgaaaucugaugaggccguuaggccgaaaaaaucaa

SEQ ID NO: 11577 - RNA, 38 nt, Artificial Sequence
  Description of Artificial Sequence:  Enzymatic Nucleic Acid
guugucgacugaugaggccguuaggccgaaaugaaaau

SEQ ID NO: 11578 - RNA, 38 nt, Artificial Sequence
  Description of Artificial Sequence:  Enzymatic Nucleic Acid
uguugucgcugaugaggccguuaggccgaaaaugaaaa

SEQ ID NO: 11579 - RNA, 38 nt, Artificial Sequence
  Description of Artificial Sequence:  Enzymatic Nucleic Acid
cuguuguccugaugaggccguuaggccgaaaaaugaaa

SEQ ID NO: 11580 - RNA, 38 nt, Artificial Sequence
  Description of Artificial Sequence:  Enzymatic Nucleic Acid
ugcagucccugaugaggccguuaggccgaaagguccuu

SEQ ID NO: 11581 - RNA, 38 nt, Artificial Sequence
  Description of Artificial Sequence:  Enzymatic Nucleic Acid
gccuagaacugaugaggccguuaggccgaaagcuggcu

SEQ ID NO: 11582 - RNA, 38 nt, Artificial Sequence
  Description of Artificial Sequence:  Enzymatic Nucleic Acid
aagccuagcugaugaggccguuaggccgaaagagcugg

SEQ ID NO: 11583 - RNA, 38 nt, Artificial Sequence
  Description of Artificial Sequence:  Enzymatic Nucleic Acid
caagccuacugaugaggccguuaggccgaaaagagcug

SEQ ID NO: 11584 - RNA, 38 nt, Artificial Sequence
  Description of Artificial Sequence:  Enzymatic Nucleic Acid
cacaagcccugaugaggccguuaggccgaaagaagagc

SEQ ID NO: 11585 - RNA, 54 nt, Artificial Sequence
  Description of Artificial Sequence:  Enzymatic Nucleic Acid
cgacggccagaagcaccuaccagagaaacacacguugugguacauuaccuggua

SEQ ID NO: 11586 - RNA, 54 nt, Artificial Sequence
  Description of Artificial Sequence:  Enzymatic Nucleic Acid
cacagggcagaagccagcaccagagaaacacacguugugguacauuaccuggua

SEQ ID NO: 11587 - RNA, 54 nt, Artificial Sequence
  Description of Artificial Sequence:  Enzymatic Nucleic Acid
cccacagaagaagcccggaccagagaaacacacguugugguacauuaccuggua

SEQ ID NO: 11588 - RNA, 54 nt, Artificial Sequence
  Description of Artificial Sequence:  Enzymatic Nucleic Acid
ugagccugagaagaucaaaccagagaaacacacguugugguacauuaccuggua

SEQ ID NO: 11589 - RNA, 54 nt, Artificial Sequence
  Description of Artificial Sequence:  Enzymatic Nucleic Acid
gaggccaaagaaguuuccaccagagaaacacacguugugguacauuaccuggua

SEQ ID NO: 11590 - RNA, 54 nt, Artificial Sequence
  Description of Artificial Sequence:  Enzymatic Nucleic Acid
aaauggagagaaguaaucaccagagaaacacacguugugguacauuaccuggua

SEQ ID NO: 11591 - RNA, 54 nt, Artificial Sequence
  Description of Artificial Sequence:  Enzymatic Nucleic Acid
cuguuaccagaaggaacaaccagagaaacacacguugugguacauuaccuggua

SEQ ID NO: 11592 - RNA, 54 nt, Artificial Sequence
  Description of Artificial Sequence:  Enzymatic Nucleic Acid
acauaauaagaagguaacaccagagaaacacacguugugguacauuaccuggua

SEQ ID NO: 11593 - RNA, 54 nt, Artificial Sequence
  Description of Artificial Sequence:  Enzymatic Nucleic Acid
uuccaugaagaagacucaaccagagaaacacacguugugguacauuaccuggua

SEQ ID NO: 11594 - RNA, 54 nt, Artificial Sequence
  Description of Artificial Sequence:  Enzymatic Nucleic Acid
uuuucuccagaagauaguaccagagaaacacacguugugguacauuaccuggua

SEQ ID NO: 11595 - RNA, 54 nt, Artificial Sequence
  Description of Artificial Sequence:  Enzymatic Nucleic Acid
cacucccaagaaggguuuaccagagaaacacacguugugguacauuaccuggua

SEQ ID NO: 11596 - RNA, 54 nt, Artificial Sequence
  Description of Artificial Sequence:  Enzymatic Nucleic Acid
ucuuggucagaagcccacaccagagaaacacacguugugguacauuaccuggua

SEQ ID NO: 11597 - RNA, 54 nt, Artificial Sequence
  Description of Artificial Sequence:  Enzymatic Nucleic Acid
ccauaaucagaaguacauaccagagaaacacacguugugguacauuaccuggua

SEQ ID NO: 11598 - RNA, 54 nt, Artificial Sequence
  Description of Artificial Sequence:  Enzymatic Nucleic Acid
ucucaccaagaaggggugaccagagaaacacacguugugguacauuaccuggua

SEQ ID NO: 11599 - RNA, 54 nt, Artificial Sequence
  Description of Artificial Sequence:  Enzymatic Nucleic Acid
auggcauaagaaguacauaccagagaaacacacguugugguacauuaccuggua

SEQ ID NO: 11600 - RNA, 54 nt, Artificial Sequence
  Description of Artificial Sequence:  Enzymatic Nucleic Acid
cuuccuccagaagccaauaccagagaaacacacguugugguacauuaccuggua

SEQ ID NO: 11601 - RNA, 54 nt, Artificial Sequence
  Description of Artificial Sequence:  Enzymatic Nucleic Acid
gucacugaagaagcuuggaccagagaaacacacguugugguacauuaccuggua

SEQ ID NO: 11602 - RNA, 54 nt, Artificial Sequence
  Description of Artificial Sequence:  Enzymatic Nucleic Acid
uuguacaaagaagacacaaccagagaaacacacguugugguacauuaccuggua

SEQ ID NO: 11603 - RNA, 54 nt, Artificial Sequence
  Description of Artificial Sequence:  Enzymatic Nucleic Acid
gcucagugagaagcauguaccagagaaacacacguugugguacauuaccuggua

SEQ ID NO: 11604 - RNA, 54 nt, Artificial Sequence
  Description of Artificial Sequence:  Enzymatic Nucleic Acid
aaacguagagaagucugcaccagagaaacacacguugugguacauuaccuggua

SEQ ID NO: 11605 - RNA, 54 nt, Artificial Sequence
  Description of Artificial Sequence:  Enzymatic Nucleic Acid
uuggcagaagaagugggcaccagagaaacacacguugugguacauuaccuggua

SEQ ID NO: 11606 - RNA, 54 nt, Artificial Sequence
  Description of Artificial Sequence:  Enzymatic Nucleic Acid
uucuugcaagaaggugugaccagagaaacacacguugugguacauuaccuggua

SEQ ID NO: 11607 - RNA, 54 nt, Artificial Sequence
  Description of Artificial Sequence:  Enzymatic Nucleic Acid
uugagcaaagaagacauaaccagagaaacacacguugugguacauuaccuggua

SEQ ID NO: 11608 - RNA, 54 nt, Artificial Sequence
  Description of Artificial Sequence:  Enzymatic Nucleic Acid
ggacugugagaagccugaaccagagaaacacacguugugguacauuaccuggua

SEQ ID NO: 11609 - RNA, 54 nt, Artificial Sequence
  Description of Artificial Sequence:  Enzymatic Nucleic Acid
cgcucuagagaagugagcaccagagaaacacacguugugguacauuaccuggua

SEQ ID NO: 11610 - RNA, 54 nt, Artificial Sequence
  Description of Artificial Sequence:  Enzymatic Nucleic Acid
uacuugucagaagauucuaccagagaaacacacguugugguacauuaccuggua

SEQ ID NO: 11611 - RNA, 54 nt, Artificial Sequence
  Description of Artificial Sequence:  Enzymatic Nucleic Acid
accacaugagaaguggagaccagagaaacacacguugugguacauuaccuggua

SEQ ID NO: 11612 - RNA, 54 nt, Artificial Sequence
  Description of Artificial Sequence:  Enzymatic Nucleic Acid
gggaguucagaaggauccaccagagaaacacacguugugguacauuaccuggua

SEQ ID NO: 11613 - RNA, 54 nt, Artificial Sequence
  Description of Artificial Sequence:  Enzymatic Nucleic Acid
caucauaaagaagucguuaccagagaaacacacguugugguacauuaccuggua

SEQ ID NO: 11614 - RNA, 54 nt, Artificial Sequence
  Description of Artificial Sequence:  Enzymatic Nucleic Acid
cuagguucagaaggucucaccagagaaacacacguugugguacauuaccuggua

SEQ ID NO: 11615 - RNA, 54 nt, Artificial Sequence
  Description of Artificial Sequence:  Enzymatic Nucleic Acid
ccaaaggcagaagcuucaaccagagaaacacacguugugguacauuaccuggua

SEQ ID NO: 11616 - RNA, 54 nt, Artificial Sequence
  Description of Artificial Sequence:  Enzymatic Nucleic Acid
gguaagugagaagguuucaccagagaaacacacguugugguacauuaccuggua

SEQ ID NO: 11617 - RNA, 54 nt, Artificial Sequence
  Description of Artificial Sequence:  Enzymatic Nucleic Acid
aaauccagagaaggcugaaccagagaaacacacguugugguacauuaccuggua

SEQ ID NO: 11618 - RNA, 54 nt, Artificial Sequence
  Description of Artificial Sequence:  Enzymatic Nucleic Acid
gcuccaagagaaggaaguaccagagaaacacacguugugguacauuaccuggua

SEQ ID NO: 11619 - RNA, 54 nt, Artificial Sequence
  Description of Artificial Sequence:  Enzymatic Nucleic Acid
cacuuggaagaaguaacaaccagagaaacacacguugugguacauuaccuggua

SEQ ID NO: 11620 - RNA, 54 nt, Artificial Sequence
  Description of Artificial Sequence:  Enzymatic Nucleic Acid
cugacauaagaaggaucuaccagagaaacacacguugugguacauuaccuggua

SEQ ID NO: 11621 - RNA, 54 nt, Artificial Sequence
  Description of Artificial Sequence:  Enzymatic Nucleic Acid
guaguauaagaaggggccaccagagaaacacacguugugguacauuaccuggua

SEQ ID NO: 11622 - RNA, 54 nt, Artificial Sequence
  Description of Artificial Sequence:  Enzymatic Nucleic Acid
ccagcaugagaagguacaaccagagaaacacacguugugguacauuaccuggua

SEQ ID NO: 11623 - RNA, 54 nt, Artificial Sequence
  Description of Artificial Sequence:  Enzymatic Nucleic Acid
cccgugccagaaguccagaccagagaaacacacguugugguacauuaccuggua

SEQ ID NO: 11624 - RNA, 54 nt, Artificial Sequence
  Description of Artificial Sequence:  Enzymatic Nucleic Acid
gugagguaagaagagagaaccagagaaacacacguugugguacauuaccuggua

SEQ ID NO: 11625 - RNA, 54 nt, Artificial Sequence
  Description of Artificial Sequence:  Enzymatic Nucleic Acid
auacaggaagaaggugagaccagagaaacacacguugugguacauuaccuggua

SEQ ID NO: 11626 - RNA, 54 nt, Artificial Sequence
  Description of Artificial Sequence:  Enzymatic Nucleic Acid
cacucacaagaaggcucuaccagagaaacacacguugugguacauuaccuggua

SEQ ID NO: 11627 - RNA, 54 nt, Artificial Sequence
  Description of Artificial Sequence:  Enzymatic Nucleic Acid
ugguugucagaagggauuaccagagaaacacacguugugguacauuaccuggua

SEQ ID NO: 11628 - RNA, 54 nt, Artificial Sequence
  Description of Artificial Sequence:  Enzymatic Nucleic Acid
cacuguccagaagguuguaccagagaaacacacguugugguacauuaccuggua

SEQ ID NO: 11629 - RNA, 54 nt, Artificial Sequence
  Description of Artificial Sequence:  Enzymatic Nucleic Acid
gauauccgagaagguagcaccagagaaacacacguugugguacauuaccuggua

SEQ ID NO: 11630 - RNA, 54 nt, Artificial Sequence
  Description of Artificial Sequence:  Enzymatic Nucleic Acid
ucugugucagaagagugaaccagagaaacacacguugugguacauuaccuggua

SEQ ID NO: 11631 - RNA, 54 nt, Artificial Sequence
  Description of Artificial Sequence:  Enzymatic Nucleic Acid
agaaucugagaagugcuaaccagagaaacacacguugugguacauuaccuggua

SEQ ID NO: 11632 - RNA, 54 nt, Artificial Sequence
  Description of Artificial Sequence:  Enzymatic Nucleic Acid
gcuggagaagaagggcugaccagagaaacacacguugugguacauuaccuggua

SEQ ID NO: 11633 - RNA, 54 nt, Artificial Sequence
  Description of Artificial Sequence:  Enzymatic Nucleic Acid
ccgugucaagaaggagaaaccagagaaacacacguugugguacauuaccuggua

SEQ ID NO: 11634 - RNA, 54 nt, Artificial Sequence
  Description of Artificial Sequence:  Enzymatic Nucleic Acid
uccuuuuaagaaggaggaaccagagaaacacacguugugguacauuaccuggua

SEQ ID NO: 11635 - RNA, 54 nt, Artificial Sequence
  Description of Artificial Sequence:  Enzymatic Nucleic Acid
aaaaucugagaagaccucaccagagaaacacacguugugguacauuaccuggua

SEQ ID NO: 11636 - RNA, 54 nt, Artificial Sequence
  Description of Artificial Sequence:  Enzymatic Nucleic Acid
acuucaaaagaagagcagaccagagaaacacacguugugguacauuaccuggua

SEQ ID NO: 11637 - RNA, 54 nt, Artificial Sequence
  Description of Artificial Sequence:  Enzymatic Nucleic Acid
ucccugcaagaagaggucaccagagaaacacacguugugguacauuaccuggua

SEQ ID NO: 11638 - RNA, 54 nt, Artificial Sequence
  Description of Artificial Sequence:  Enzymatic Nucleic Acid
ccuagaagagaaggcuccaccagagaaacacacguugugguacauuaccuggua

SEQ ID NO: 11639 - RNA, 38 nt, Artificial Sequence
  Description of Artificial Sequence:  Enzymatic Nucleic Acid
ccguaccccugaugaggccguuaggccgaaauucgccc

SEQ ID NO: 11640 - RNA, 38 nt, Artificial Sequence
  Description of Artificial Sequence:  Enzymatic Nucleic Acid
gggucccgcugaugaggccguuaggccgaaacccaauu

SEQ ID NO: 11641 - RNA, 38 nt, Artificial Sequence
  Description of Artificial Sequence:  Enzymatic Nucleic Acid
ucgaccuccugaugaggccguuaggccgaaaggggggu

SEQ ID NO: 11642 - RNA, 38 nt, Artificial Sequence
  Description of Artificial Sequence:  Enzymatic Nucleic Acid
auaccguccugaugaggccguuaggccgaaaccucgag

SEQ ID NO: 11643 - RNA, 38 nt, Artificial Sequence
  Description of Artificial Sequence:  Enzymatic Nucleic Acid
cuuaucgacugaugaggccguuaggccgaaaccgucga

SEQ ID NO: 11644 - RNA, 38 nt, Artificial Sequence
  Description of Artificial Sequence:  Enzymatic Nucleic Acid
agcuuauccugaugaggccguuaggccgaaauaccguc

SEQ ID NO: 11645 - RNA, 38 nt, Artificial Sequence
  Description of Artificial Sequence:  Enzymatic Nucleic Acid
aucaagcucugaugaggccguuaggccgaaaucgauac

SEQ ID NO: 11646 - RNA, 38 nt, Artificial Sequence
  Description of Artificial Sequence:  Enzymatic Nucleic Acid
ucgauauccugaugaggccguuaggccgaaagcuuauc

SEQ ID NO: 11647 - RNA, 38 nt, Artificial Sequence
  Description of Artificial Sequence:  Enzymatic Nucleic Acid
gaauucgacugaugaggccguuaggccgaaaucaagcu

SEQ ID NO: 11648 - RNA, 38 nt, Artificial Sequence
  Description of Artificial Sequence:  Enzymatic Nucleic Acid
ccgaauuccugaugaggccguuaggccgaaauaucaag

SEQ ID NO: 11649 - RNA, 38 nt, Artificial Sequence
  Description of Artificial Sequence:  Enzymatic Nucleic Acid
ugggcccgcugaugaggccguuaggccgaaauucgaua

SEQ ID NO: 11650 - RNA, 38 nt, Artificial Sequence
  Description of Artificial Sequence:  Enzymatic Nucleic Acid
cugggccccugaugaggccguuaggccgaaaauucgau

SEQ ID NO: 11651 - RNA, 38 nt, Artificial Sequence
  Description of Artificial Sequence:  Enzymatic Nucleic Acid
ggcugcggcugaugaggccguuaggccgaaacacaguc

SEQ ID NO: 11652 - RNA, 38 nt, Artificial Sequence
  Description of Artificial Sequence:  Enzymatic Nucleic Acid
agccaggucugaugaggccguuaggccgaaaucccggc

SEQ ID NO: 11653 - RNA, 38 nt, Artificial Sequence
  Description of Artificial Sequence:  Enzymatic Nucleic Acid
guccgcggcugaugaggccguuaggccgaaaucggguc

SEQ ID NO: 11654 - RNA, 38 nt, Artificial Sequence
  Description of Artificial Sequence:  Enzymatic Nucleic Acid
uguccgcgcugaugaggccguuaggccgaaaaucgggu

SEQ ID NO: 11655 - RNA, 38 nt, Artificial Sequence
  Description of Artificial Sequence:  Enzymatic Nucleic Acid
accggggacugaugaggccguuaggccgaaagcgcggg

SEQ ID NO: 11656 - RNA, 38 nt, Artificial Sequence
  Description of Artificial Sequence:  Enzymatic Nucleic Acid
agaccgggcugaugaggccguuaggccgaaagagcgcg

SEQ ID NO: 11657 - RNA, 38 nt, Artificial Sequence
  Description of Artificial Sequence:  Enzymatic Nucleic Acid
cagcgcaacugaugaggccguuaggccgaaaccgggga

SEQ ID NO: 11658 - RNA, 38 nt, Artificial Sequence
  Description of Artificial Sequence:  Enzymatic Nucleic Acid
cgcagcgccugaugaggccguuaggccgaaagaccggg

SEQ ID NO: 11659 - RNA, 38 nt, Artificial Sequence
  Description of Artificial Sequence:  Enzymatic Nucleic Acid
agaggcggcugaugaggccguuaggccgaaauggcccc

SEQ ID NO: 11660 - RNA, 38 nt, Artificial Sequence
  Description of Artificial Sequence:  Enzymatic Nucleic Acid
aagucacacugaugaggccguuaggccgaaaggcggua

SEQ ID NO: 11661 - RNA, 38 nt, Artificial Sequence
  Description of Artificial Sequence:  Enzymatic Nucleic Acid
ccgcaaagcugaugaggccguuaggccgaaagucacag

SEQ ID NO: 11662 - RNA, 38 nt, Artificial Sequence
  Description of Artificial Sequence:  Enzymatic Nucleic Acid
cccgcaaacugaugaggccguuaggccgaaaagucaca

SEQ ID NO: 11663 - RNA, 38 nt, Artificial Sequence
  Description of Artificial Sequence:  Enzymatic Nucleic Acid
ggcccgcacugaugaggccguuaggccgaaagaaguca

SEQ ID NO: 11664 - RNA, 38 nt, Artificial Sequence
  Description of Artificial Sequence:  Enzymatic Nucleic Acid
uggcccgccugaugaggccguuaggccgaaaagaaguc

SEQ ID NO: 11665 - RNA, 38 nt, Artificial Sequence
  Description of Artificial Sequence:  Enzymatic Nucleic Acid
caggcacacugaugaggccguuaggccgaaacuccuuc

SEQ ID NO: 11666 - RNA, 38 nt, Artificial Sequence
  Description of Artificial Sequence:  Enzymatic Nucleic Acid
ugggcacacugaugaggccguuaggccgaaagcccagu

SEQ ID NO: 11667 - RNA, 38 nt, Artificial Sequence
  Description of Artificial Sequence:  Enzymatic Nucleic Acid
gcgacagccugaugaggccguuaggccgaaagcagcgc

SEQ ID NO: 11668 - RNA, 38 nt, Artificial Sequence
  Description of Artificial Sequence:  Enzymatic Nucleic Acid
cacagagccugaugaggccguuaggccgaaacagcuag

SEQ ID NO: 11669 - RNA, 38 nt, Artificial Sequence
  Description of Artificial Sequence:  Enzymatic Nucleic Acid
gaaccacacugaugaggccguuaggccgaaagcgacag

SEQ ID NO: 11670 - RNA, 38 nt, Artificial Sequence
  Description of Artificial Sequence:  Enzymatic Nucleic Acid
ccacgcagcugaugaggccguuaggccgaaaccacaga

SEQ ID NO: 11671 - RNA, 38 nt, Artificial Sequence
  Description of Artificial Sequence:  Enzymatic Nucleic Acid
uccacgcacugaugaggccguuaggccgaaaaccacag

SEQ ID NO: 11672 - RNA, 38 nt, Artificial Sequence
  Description of Artificial Sequence:  Enzymatic Nucleic Acid
aacccacacugaugaggccguuaggccgaaaggcggcu

SEQ ID NO: 11673 - RNA, 38 nt, Artificial Sequence
  Description of Artificial Sequence:  Enzymatic Nucleic Acid
gccagucacugaugaggccguuaggccgaaacccacag

SEQ ID NO: 11674 - RNA, 38 nt, Artificial Sequence
  Description of Artificial Sequence:  Enzymatic Nucleic Acid
cgccaguccugaugaggccguuaggccgaaaacccaca

SEQ ID NO: 11675 - RNA, 38 nt, Artificial Sequence
  Description of Artificial Sequence:  Enzymatic Nucleic Acid
auggagaacugaugaggccguuaggccgaaaucgccag

SEQ ID NO: 11676 - RNA, 38 nt, Artificial Sequence
  Description of Artificial Sequence:  Enzymatic Nucleic Acid
gauggagacugaugaggccguuaggccgaaaaucgcca

SEQ ID NO: 11677 - RNA, 38 nt, Artificial Sequence
  Description of Artificial Sequence:  Enzymatic Nucleic Acid
ggauggagcugaugaggccguuaggccgaaaaaucgcc

SEQ ID NO: 11678 - RNA, 38 nt, Artificial Sequence
  Description of Artificial Sequence:  Enzymatic Nucleic Acid
gggauggacugaugaggccguuaggccgaaaaaaucgc

SEQ ID NO: 11679 - RNA, 38 nt, Artificial Sequence
  Description of Artificial Sequence:  Enzymatic Nucleic Acid
gggggaugcugaugaggccguuaggccgaaagaaaauc

SEQ ID NO: 11680 - RNA, 38 nt, Artificial Sequence
  Description of Artificial Sequence:  Enzymatic Nucleic Acid
cuugggggcugaugaggccguuaggccgaaauggagaa

SEQ ID NO: 11681 - RNA, 38 nt, Artificial Sequence
  Description of Artificial Sequence:  Enzymatic Nucleic Acid
ugugugcucugaugaggccguuaggccgaaagcuuggg

SEQ ID NO: 11682 - RNA, 38 nt, Artificial Sequence
  Description of Artificial Sequence:  Enzymatic Nucleic Acid
auugucagcugaugaggccguuaggccgaaaugucuuu

SEQ ID NO: 11683 - RNA, 38 nt, Artificial Sequence
  Description of Artificial Sequence:  Enzymatic Nucleic Acid
uuugccaacugaugaggccguuaggccgaaauugucag

SEQ ID NO: 11684 - RNA, 38 nt, Artificial Sequence
  Description of Artificial Sequence:  Enzymatic Nucleic Acid
auuugccacugaugaggccguuaggccgaaaauuguca

SEQ ID NO: 11685 - RNA, 38 nt, Artificial Sequence
  Description of Artificial Sequence:  Enzymatic Nucleic Acid
uauuugcccugaugaggccguuaggccgaaaaauuguc

SEQ ID NO: 11686 - RNA, 38 nt, Artificial Sequence
  Description of Artificial Sequence:  Enzymatic Nucleic Acid
aaggguugcugaugaggccguuaggccgaaauuugcca

SEQ ID NO: 11687 - RNA, 38 nt, Artificial Sequence
  Description of Artificial Sequence:  Enzymatic Nucleic Acid
guaaucugcugaugaggccguuaggccgaaaggguugu

SEQ ID NO: 11688 - RNA, 38 nt, Artificial Sequence
  Description of Artificial Sequence:  Enzymatic Nucleic Acid
aguaaucucugaugaggccguuaggccgaaaaggguug

SEQ ID NO: 11689 - RNA, 38 nt, Artificial Sequence
  Description of Artificial Sequence:  Enzymatic Nucleic Acid
cugcaagucugaugaggccguuaggccgaaaucugaag

SEQ ID NO: 11690 - RNA, 38 nt, Artificial Sequence
  Description of Artificial Sequence:  Enzymatic Nucleic Acid
ccugcaagcugaugaggccguuaggccgaaaaucugaa

SEQ ID NO: 11691 - RNA, 38 nt, Artificial Sequence
  Description of Artificial Sequence:  Enzymatic Nucleic Acid
uccccugccugaugaggccguuaggccgaaaguaaucu

SEQ ID NO: 11692 - RNA, 38 nt, Artificial Sequence
  Description of Artificial Sequence:  Enzymatic Nucleic Acid
aucacgcucugaugaggccguuaggccgaaagcauugg

SEQ ID NO: 11693 - RNA, 38 nt, Artificial Sequence
  Description of Artificial Sequence:  Enzymatic Nucleic Acid
uuccucagcugaugaggccguuaggccgaaaucacgcu

SEQ ID NO: 11694 - RNA, 38 nt, Artificial Sequence
  Description of Artificial Sequence:  Enzymatic Nucleic Acid
uuuccucacugaugaggccguuaggccgaaaaucacgc

SEQ ID NO: 11695 - RNA, 38 nt, Artificial Sequence
  Description of Artificial Sequence:  Enzymatic Nucleic Acid
gucaccaacugaugaggccguuaggccgaaacccuuuc

SEQ ID NO: 11696 - RNA, 38 nt, Artificial Sequence
  Description of Artificial Sequence:  Enzymatic Nucleic Acid
cagucacccugaugaggccguuaggccgaaauacccuu

SEQ ID NO: 11697 - RNA, 38 nt, Artificial Sequence
  Description of Artificial Sequence:  Enzymatic Nucleic Acid
gcagaagacugaugaggccguuaggccgaaacugucac

SEQ ID NO: 11698 - RNA, 38 nt, Artificial Sequence
  Description of Artificial Sequence:  Enzymatic Nucleic Acid
uugcagaacugaugaggccguuaggccgaaauacuguc

SEQ ID NO: 11699 - RNA, 38 nt, Artificial Sequence
  Description of Artificial Sequence:  Enzymatic Nucleic Acid
uuuugcagcugaugaggccguuaggccgaaagauacug

SEQ ID NO: 11700 - RNA, 38 nt, Artificial Sequence
  Description of Artificial Sequence:  Enzymatic Nucleic Acid
guuuugcacugaugaggccguuaggccgaaaagauacu

SEQ ID NO: 11701 - RNA, 38 nt, Artificial Sequence
  Description of Artificial Sequence:  Enzymatic Nucleic Acid
ggaauggucugaugaggccguuaggccgaaaguguuuu

SEQ ID NO: 11702 - RNA, 38 nt, Artificial Sequence
  Description of Artificial Sequence:  Enzymatic Nucleic Acid
acccugggcugaugaggccguuaggccgaaauggugag

SEQ ID NO: 11703 - RNA, 38 nt, Artificial Sequence
  Description of Artificial Sequence:  Enzymatic Nucleic Acid
cacccuggcugaugaggccguuaggccgaaaaugguga

SEQ ID NO: 11704 - RNA, 38 nt, Artificial Sequence
  Description of Artificial Sequence:  Enzymatic Nucleic Acid
ucauuucccugaugaggccguuaggccgaaaccacccu

SEQ ID NO: 11705 - RNA, 38 nt, Artificial Sequence
  Description of Artificial Sequence:  Enzymatic Nucleic Acid
ggcuccagcugaugaggccguuaggccgaaaucauuuc

SEQ ID NO: 11706 - RNA, 38 nt, Artificial Sequence
  Description of Artificial Sequence:  Enzymatic Nucleic Acid
cccgguaccugaugaggccguuaggccgaaagcacuug

SEQ ID NO: 11707 - RNA, 38 nt, Artificial Sequence
  Description of Artificial Sequence:  Enzymatic Nucleic Acid
cgucccggcugaugaggccguuaggccgaaacgagcac

SEQ ID NO: 11708 - RNA, 38 nt, Artificial Sequence
  Description of Artificial Sequence:  Enzymatic Nucleic Acid
gcuauguccugaugaggccguuaggccgaaacgucccg

SEQ ID NO: 11709 - RNA, 38 nt, Artificial Sequence
  Description of Artificial Sequence:  Enzymatic Nucleic Acid
guggaggccugaugaggccguuaggccgaaaugucgac

SEQ ID NO: 11710 - RNA, 38 nt, Artificial Sequence
  Description of Artificial Sequence:  Enzymatic Nucleic Acid
aaacagugcugaugaggccguuaggccgaaaggcuaug

SEQ ID NO: 11711 - RNA, 38 nt, Artificial Sequence
  Description of Artificial Sequence:  Enzymatic Nucleic Acid
uagacauacugaugaggccguuaggccgaaacagugga

SEQ ID NO: 11712 - RNA, 38 nt, Artificial Sequence
  Description of Artificial Sequence:  Enzymatic Nucleic Acid
auagacaucugaugaggccguuaggccgaaaacagugg

SEQ ID NO: 11713 - RNA, 38 nt, Artificial Sequence
  Description of Artificial Sequence:  Enzymatic Nucleic Acid
cauagacacugaugaggccguuaggccgaaaaacagug

SEQ ID NO: 11714 - RNA, 38 nt, Artificial Sequence
  Description of Artificial Sequence:  Enzymatic Nucleic Acid
cgaacauacugaugaggccguuaggccgaaacauaaac

SEQ ID NO: 11715 - RNA, 38 nt, Artificial Sequence
  Description of Artificial Sequence:  Enzymatic Nucleic Acid
cucgaacacugaugaggccguuaggccgaaagacauaa

SEQ ID NO: 11716 - RNA, 38 nt, Artificial Sequence
  Description of Artificial Sequence:  Enzymatic Nucleic Acid
uaaucucgcugaugaggccguuaggccgaaacauagac

SEQ ID NO: 11717 - RNA, 38 nt, Artificial Sequence
  Description of Artificial Sequence:  Enzymatic Nucleic Acid
guaaucuccugaugaggccguuaggccgaaaacauaga

SEQ ID NO: 11718 - RNA, 38 nt, Artificial Sequence
  Description of Artificial Sequence:  Enzymatic Nucleic Acid
ugaucugucugaugaggccguuaggccgaaaucucgaa

SEQ ID NO: 11719 - RNA, 38 nt, Artificial Sequence
  Description of Artificial Sequence:  Enzymatic Nucleic Acid
gugaucugcugaugaggccguuaggccgaaaaucucga

SEQ ID NO: 11720 - RNA, 38 nt, Artificial Sequence
  Description of Artificial Sequence:  Enzymatic Nucleic Acid
ugaauggucugaugaggccguuaggccgaaaucuguaa

SEQ ID NO: 11721 - RNA, 38 nt, Artificial Sequence
  Description of Artificial Sequence:  Enzymatic Nucleic Acid
aggcgaugcugaugaggccguuaggccgaaauggugau

SEQ ID NO: 11722 - RNA, 38 nt, Artificial Sequence
  Description of Artificial Sequence:  Enzymatic Nucleic Acid
gaggcgaucugaugaggccguuaggccgaaaaugguga

SEQ ID NO: 11723 - RNA, 38 nt, Artificial Sequence
  Description of Artificial Sequence:  Enzymatic Nucleic Acid
acagaggccugaugaggccguuaggccgaaaugaaugg

SEQ ID NO: 11724 - RNA, 38 nt, Artificial Sequence
  Description of Artificial Sequence:  Enzymatic Nucleic Acid
cacugacacugaugaggccguuaggccgaaaggcgaug

SEQ ID NO: 11725 - RNA, 38 nt, Artificial Sequence
  Description of Artificial Sequence:  Enzymatic Nucleic Acid
uggucacucugaugaggccguuaggccgaaacagaggc

SEQ ID NO: 11726 - RNA, 38 nt, Artificial Sequence
  Description of Artificial Sequence:  Enzymatic Nucleic Acid
auguacaccugaugaggccguuaggccgaaaugccaug

SEQ ID NO: 11727 - RNA, 38 nt, Artificial Sequence
  Description of Artificial Sequence:  Enzymatic Nucleic Acid
cggugaugcugaugaggccguuaggccgaaacacgaug

SEQ ID NO: 11728 - RNA, 38 nt, Artificial Sequence
  Description of Artificial Sequence:  Enzymatic Nucleic Acid
uucucggucugaugaggccguuaggccgaaauguacac

SEQ ID NO: 11729 - RNA, 38 nt, Artificial Sequence
  Description of Artificial Sequence:  Enzymatic Nucleic Acid
cggcagggcugaugaggccguuaggccgaaaucaccac

SEQ ID NO: 11730 - RNA, 38 nt, Artificial Sequence
  Description of Artificial Sequence:  Enzymatic Nucleic Acid
uugaaauccugaugaggccguuaggccgaaacccucgg

SEQ ID NO: 11731 - RNA, 38 nt, Artificial Sequence
  Description of Artificial Sequence:  Enzymatic Nucleic Acid
agguuugacugaugaggccguuaggccgaaaucgaccc

SEQ ID NO: 11732 - RNA, 38 nt, Artificial Sequence
  Description of Artificial Sequence:  Enzymatic Nucleic Acid
gagguuugcugaugaggccguuaggccgaaaaucgacc

SEQ ID NO: 11733 - RNA, 38 nt, Artificial Sequence
  Description of Artificial Sequence:  Enzymatic Nucleic Acid
ugagguuucugaugaggccguuaggccgaaaaaucgac

SEQ ID NO: 11734 - RNA, 38 nt, Artificial Sequence
  Description of Artificial Sequence:  Enzymatic Nucleic Acid
gacacauucugaugaggccguuaggccgaaagguuuga

SEQ ID NO: 11735 - RNA, 38 nt, Artificial Sequence
  Description of Artificial Sequence:  Enzymatic Nucleic Acid
cgcaaagacugaugaggccguuaggccgaaacacauug

SEQ ID NO: 11736 - RNA, 38 nt, Artificial Sequence
  Description of Artificial Sequence:  Enzymatic Nucleic Acid
agcgcaaacugaugaggccguuaggccgaaagacacau

SEQ ID NO: 11737 - RNA, 38 nt, Artificial Sequence
  Description of Artificial Sequence:  Enzymatic Nucleic Acid
cuagcgcacugaugaggccguuaggccgaaagagacac

SEQ ID NO: 11738 - RNA, 38 nt, Artificial Sequence
  Description of Artificial Sequence:  Enzymatic Nucleic Acid
ccuagcgccugaugaggccguuaggccgaaaagagaca

SEQ ID NO: 11739 - RNA, 38 nt, Artificial Sequence
  Description of Artificial Sequence:  Enzymatic Nucleic Acid
uggauacccugaugaggccguuaggccgaaagcgcaaa

SEQ ID NO: 11740 - RNA, 38 nt, Artificial Sequence
  Description of Artificial Sequence:  Enzymatic Nucleic Acid
uuucuggacugaugaggccguuaggccgaaaccuagcg

SEQ ID NO: 11741 - RNA, 38 nt, Artificial Sequence
  Description of Artificial Sequence:  Enzymatic Nucleic Acid
cuuuucugcugaugaggccguuaggccgaaauaccuag

SEQ ID NO: 11742 - RNA, 38 nt, Artificial Sequence
  Description of Artificial Sequence:  Enzymatic Nucleic Acid
ccggaacacugaugaggccguuaggccgaaaucucuuu

SEQ ID NO: 11743 - RNA, 38 nt, Artificial Sequence
  Description of Artificial Sequence:  Enzymatic Nucleic Acid
uccggaaccugaugaggccguuaggccgaaaaucucuu

SEQ ID NO: 11744 - RNA, 38 nt, Artificial Sequence
  Description of Artificial Sequence:  Enzymatic Nucleic Acid
ccauccggcugaugaggccguuaggccgaaacaaaucu

SEQ ID NO: 11745 - RNA, 38 nt, Artificial Sequence
  Description of Artificial Sequence:  Enzymatic Nucleic Acid
uccauccgcugaugaggccguuaggccgaaaacaaauc

SEQ ID NO: 11746 - RNA, 38 nt, Artificial Sequence
  Description of Artificial Sequence:  Enzymatic Nucleic Acid
guaaagcccugaugaggccguuaggccgaaaucucgcu

SEQ ID NO: 11747 - RNA, 38 nt, Artificial Sequence
  Description of Artificial Sequence:  Enzymatic Nucleic Acid
ggagaguacugaugaggccguuaggccgaaagccuauc

SEQ ID NO: 11748 - RNA, 38 nt, Artificial Sequence
  Description of Artificial Sequence:  Enzymatic Nucleic Acid
gggagagucugaugaggccguuaggccgaaaagccuau

SEQ ID NO: 11749 - RNA, 38 nt, Artificial Sequence
  Description of Artificial Sequence:  Enzymatic Nucleic Acid
ggggagagcugaugaggccguuaggccgaaaaagccua

SEQ ID NO: 11750 - RNA, 38 nt, Artificial Sequence
  Description of Artificial Sequence:  Enzymatic Nucleic Acid
acuggggacugaugaggccguuaggccgaaaguaaagc

SEQ ID NO: 11751 - RNA, 38 nt, Artificial Sequence
  Description of Artificial Sequence:  Enzymatic Nucleic Acid
uaacugggcugaugaggccguuaggccgaaagaguaaa

SEQ ID NO: 11752 - RNA, 38 nt, Artificial Sequence
  Description of Artificial Sequence:  Enzymatic Nucleic Acid
gaucaugucugaugaggccguuaggccgaaacugggga

SEQ ID NO: 11753 - RNA, 38 nt, Artificial Sequence
  Description of Artificial Sequence:  Enzymatic Nucleic Acid
ugaucaugcugaugaggccguuaggccgaaaacugggg

SEQ ID NO: 11754 - RNA, 38 nt, Artificial Sequence
  Description of Artificial Sequence:  Enzymatic Nucleic Acid
ugccggcacugaugaggccguuaggccgaaagcugauc

SEQ ID NO: 11755 - RNA, 38 nt, Artificial Sequence
  Description of Artificial Sequence:  Enzymatic Nucleic Acid
ccucacagcugaugaggccguuaggccgaaagaccaug

SEQ ID NO: 11756 - RNA, 38 nt, Artificial Sequence
  Description of Artificial Sequence:  Enzymatic Nucleic Acid
gccucacacugaugaggccguuaggccgaaaagaccau

SEQ ID NO: 11757 - RNA, 38 nt, Artificial Sequence
  Description of Artificial Sequence:  Enzymatic Nucleic Acid
ucaucauucugaugaggccguuaggccgaaaucuuugc

SEQ ID NO: 11758 - RNA, 38 nt, Artificial Sequence
  Description of Artificial Sequence:  Enzymatic Nucleic Acid
uagacugacugaugaggccguuaggccgaaagguuuca

SEQ ID NO: 11759 - RNA, 38 nt, Artificial Sequence
  Description of Artificial Sequence:  Enzymatic Nucleic Acid
gauagacucugaugaggccguuaggccgaaauagguuu

SEQ ID NO: 11760 - RNA, 38 nt, Artificial Sequence
  Description of Artificial Sequence:  Enzymatic Nucleic Acid
acaugauacugaugaggccguuaggccgaaacugauag

SEQ ID NO: 11761 - RNA, 38 nt, Artificial Sequence
  Description of Artificial Sequence:  Enzymatic Nucleic Acid
guacaugacugaugaggccguuaggccgaaagacugau

SEQ ID NO: 11762 - RNA, 38 nt, Artificial Sequence
  Description of Artificial Sequence:  Enzymatic Nucleic Acid
caacuaugcugaugaggccguuaggccgaaacaugaua

SEQ ID NO: 11763 - RNA, 38 nt, Artificial Sequence
  Description of Artificial Sequence:  Enzymatic Nucleic Acid
accacaaccugaugaggccguuaggccgaaauguacau

SEQ ID NO: 11764 - RNA, 38 nt, Artificial Sequence
  Description of Artificial Sequence:  Enzymatic Nucleic Acid
acaaccaccugaugaggccguuaggccgaaacuaugua

SEQ ID NO: 11765 - RNA, 38 nt, Artificial Sequence
  Description of Artificial Sequence:  Enzymatic Nucleic Acid
uauccuaccugaugaggccguuaggccgaaaccacaac

SEQ ID NO: 11766 - RNA, 38 nt, Artificial Sequence
  Description of Artificial Sequence:  Enzymatic Nucleic Acid
cuauaucccugaugaggccguuaggccgaaacaaccac

SEQ ID NO: 11767 - RNA, 38 nt, Artificial Sequence
  Description of Artificial Sequence:  Enzymatic Nucleic Acid
aaauccuacugaugaggccguuaggccgaaauccuaca

SEQ ID NO: 11768 - RNA, 38 nt, Artificial Sequence
  Description of Artificial Sequence:  Enzymatic Nucleic Acid
auaaaucccugaugaggccguuaggccgaaauauccua

SEQ ID NO: 11769 - RNA, 38 nt, Artificial Sequence
  Description of Artificial Sequence:  Enzymatic Nucleic Acid
ucacaucacugaugaggccguuaggccgaaaaauccua

SEQ ID NO: 11770 - RNA, 38 nt, Artificial Sequence
  Description of Artificial Sequence:  Enzymatic Nucleic Acid
gggcucagcugaugaggccguuaggccgaaaucacauc

SEQ ID NO: 11771 - RNA, 38 nt, Artificial Sequence
  Description of Artificial Sequence:  Enzymatic Nucleic Acid
ggggcucacugaugaggccguuaggccgaaaaucacau

SEQ ID NO: 11772 - RNA, 38 nt, Artificial Sequence
  Description of Artificial Sequence:  Enzymatic Nucleic Acid
gauagcuccugaugaggccguuaggccgaaauuucaug

SEQ ID NO: 11773 - RNA, 38 nt, Artificial Sequence
  Description of Artificial Sequence:  Enzymatic Nucleic Acid
ccggcagacugaugaggccguuaggccgaaagcucaau

SEQ ID NO: 11774 - RNA, 38 nt, Artificial Sequence
  Description of Artificial Sequence:  Enzymatic Nucleic Acid
cuccggcacugaugaggccguuaggccgaaauagcuca

SEQ ID NO: 11775 - RNA, 38 nt, Artificial Sequence
  Description of Artificial Sequence:  Enzymatic Nucleic Acid
uuuaagaccugaugaggccguuaggccgaaaguuuuuc

SEQ ID NO: 11776 - RNA, 38 nt, Artificial Sequence
  Description of Artificial Sequence:  Enzymatic Nucleic Acid
caauuuaacugaugaggccguuaggccgaaacaaguuu

SEQ ID NO: 11777 - RNA, 38 nt, Artificial Sequence
  Description of Artificial Sequence:  Enzymatic Nucleic Acid
uacaauuucugaugaggccguuaggccgaaagacaagu

SEQ ID NO: 11778 - RNA, 38 nt, Artificial Sequence
  Description of Artificial Sequence:  Enzymatic Nucleic Acid
cgcuguaccugaugaggccguuaggccgaaauuuaaga

SEQ ID NO: 11779 - RNA, 38 nt, Artificial Sequence
  Description of Artificial Sequence:  Enzymatic Nucleic Acid
ucucgcugcugaugaggccguuaggccgaaacaauuua

SEQ ID NO: 11780 - RNA, 38 nt, Artificial Sequence
  Description of Artificial Sequence:  Enzymatic Nucleic Acid
cccacauucugaugaggccguuaggccgaaagcucugu

SEQ ID NO: 11781 - RNA, 38 nt, Artificial Sequence
  Description of Artificial Sequence:  Enzymatic Nucleic Acid
gugaaauccugaugaggccguuaggccgaaagccccac

SEQ ID NO: 11782 - RNA, 38 nt, Artificial Sequence
  Description of Artificial Sequence:  Enzymatic Nucleic Acid
ccaggugacugaugaggccguuaggccgaaaucaagcc

SEQ ID NO: 11783 - RNA, 38 nt, Artificial Sequence
  Description of Artificial Sequence:  Enzymatic Nucleic Acid
gccaggugcugaugaggccguuaggccgaaaaucaagc

SEQ ID NO: 11784 - RNA, 38 nt, Artificial Sequence
  Description of Artificial Sequence:  Enzymatic Nucleic Acid
ugccaggucugaugaggccguuaggccgaaaaaucaag

SEQ ID NO: 11785 - RNA, 38 nt, Artificial Sequence
  Description of Artificial Sequence:  Enzymatic Nucleic Acid
aagguggacugaugaggccguuaggccgaaagugccag

SEQ ID NO: 11786 - RNA, 38 nt, Artificial Sequence
  Description of Artificial Sequence:  Enzymatic Nucleic Acid
ugaaggugcugaugaggccguuaggccgaaagagugcc

SEQ ID NO: 11787 - RNA, 38 nt, Artificial Sequence
  Description of Artificial Sequence:  Enzymatic Nucleic Acid
agacuuugcugaugaggccguuaggccgaaagguggag

SEQ ID NO: 11788 - RNA, 38 nt, Artificial Sequence
  Description of Artificial Sequence:  Enzymatic Nucleic Acid
gagacuuucugaugaggccguuaggccgaaaaggugga

SEQ ID NO: 11789 - RNA, 38 nt, Artificial Sequence
  Description of Artificial Sequence:  Enzymatic Nucleic Acid
uaugaugacugaugaggccguuaggccgaaacuuugaa

SEQ ID NO: 11790 - RNA, 38 nt, Artificial Sequence
  Description of Artificial Sequence:  Enzymatic Nucleic Acid
cuuaugaucugaugaggccguuaggccgaaagacuuug

SEQ ID NO: 11791 - RNA, 38 nt, Artificial Sequence
  Description of Artificial Sequence:  Enzymatic Nucleic Acid
cuucuuaucugaugaggccguuaggccgaaaugagacu

SEQ ID NO: 11792 - RNA, 38 nt, Artificial Sequence
  Description of Artificial Sequence:  Enzymatic Nucleic Acid
aaucuucucugaugaggccguuaggccgaaaugaugag

SEQ ID NO: 11793 - RNA, 38 nt, Artificial Sequence
  Description of Artificial Sequence:  Enzymatic Nucleic Acid
cgguuuaccugaugaggccguuaggccgaaaucuucuu

SEQ ID NO: 11794 - RNA, 38 nt, Artificial Sequence
  Description of Artificial Sequence:  Enzymatic Nucleic Acid
ucccgguucugaugaggccguuaggccgaaacaaucuu

SEQ ID NO: 11795 - RNA, 38 nt, Artificial Sequence
  Description of Artificial Sequence:  Enzymatic Nucleic Acid
ucccaggacugaugaggccguuaggccgaaaggguuuc

SEQ ID NO: 11796 - RNA, 38 nt, Artificial Sequence
  Description of Artificial Sequence:  Enzymatic Nucleic Acid
gucccaggcugaugaggccguuaggccgaaaaggguuu

SEQ ID NO: 11797 - RNA, 38 nt, Artificial Sequence
  Description of Artificial Sequence:  Enzymatic Nucleic Acid
agucccagcugaugaggccguuaggccgaaaaaggguu

SEQ ID NO: 11798 - RNA, 38 nt, Artificial Sequence
  Description of Artificial Sequence:  Enzymatic Nucleic Acid
ugcucaaacugaugaggccguuaggccgaaacaucuuc

SEQ ID NO: 11799 - RNA, 38 nt, Artificial Sequence
  Description of Artificial Sequence:  Enzymatic Nucleic Acid
gugcucaacugaugaggccguuaggccgaaaacaucuu

SEQ ID NO: 11800 - RNA, 38 nt, Artificial Sequence
  Description of Artificial Sequence:  Enzymatic Nucleic Acid
ggugcucacugaugaggccguuaggccgaaaaacaucu

SEQ ID NO: 11801 - RNA, 38 nt, Artificial Sequence
  Description of Artificial Sequence:  Enzymatic Nucleic Acid
aggugcuccugaugaggccguuaggccgaaaaaacauc

SEQ ID NO: 11802 - RNA, 38 nt, Artificial Sequence
  Description of Artificial Sequence:  Enzymatic Nucleic Acid
cuauuguccugaugaggccguuaggccgaaaggugcuc

SEQ ID NO: 11803 - RNA, 38 nt, Artificial Sequence
  Description of Artificial Sequence:  Enzymatic Nucleic Acid
acacuuuccugaugaggccguuaggccgaaauugucaa

SEQ ID NO: 11804 - RNA, 38 nt, Artificial Sequence
  Description of Artificial Sequence:  Enzymatic Nucleic Acid
cacaggugcugaugaggccguuaggccgaaauuccccu

SEQ ID NO: 11805 - RNA, 38 nt, Artificial Sequence
  Description of Artificial Sequence:  Enzymatic Nucleic Acid
cuggacgccugaugaggccguuaggccgaaacacaggu

SEQ ID NO: 11806 - RNA, 38 nt, Artificial Sequence
  Description of Artificial Sequence:  Enzymatic Nucleic Acid
guccacugcugaugaggccguuaggccgaaacgcuaca

SEQ ID NO: 11807 - RNA, 38 nt, Artificial Sequence
  Description of Artificial Sequence:  Enzymatic Nucleic Acid
uuucucuucugaugaggccguuaggccgaaaucauccg

SEQ ID NO: 11808 - RNA, 38 nt, Artificial Sequence
  Description of Artificial Sequence:  Enzymatic Nucleic Acid
aaauguuccugaugaggccguuaggccgaaauuucucu

SEQ ID NO: 11809 - RNA, 38 nt, Artificial Sequence
  Description of Artificial Sequence:  Enzymatic Nucleic Acid
cucggacacugaugaggccguuaggccgaaauguucua

SEQ ID NO: 11810 - RNA, 38 nt, Artificial Sequence
  Description of Artificial Sequence:  Enzymatic Nucleic Acid
acucggaccugaugaggccguuaggccgaaaauguucu

SEQ ID NO: 11811 - RNA, 38 nt, Artificial Sequence
  Description of Artificial Sequence:  Enzymatic Nucleic Acid
ugaacucgcugaugaggccguuaggccgaaacaaaugu

SEQ ID NO: 11812 - RNA, 38 nt, Artificial Sequence
  Description of Artificial Sequence:  Enzymatic Nucleic Acid
uuugugugcugaugaggccguuaggccgaaacucggac

SEQ ID NO: 11813 - RNA, 38 nt, Artificial Sequence
  Description of Artificial Sequence:  Enzymatic Nucleic Acid
cuuugugucugaugaggccguuaggccgaaaacucgga

SEQ ID NO: 11814 - RNA, 38 nt, Artificial Sequence
  Description of Artificial Sequence:  Enzymatic Nucleic Acid
agcaauaacugaugaggccguuaggccgaaaggcuuug

SEQ ID NO: 11815 - RNA, 38 nt, Artificial Sequence
  Description of Artificial Sequence:  Enzymatic Nucleic Acid
aagcaauacugaugaggccguuaggccgaaaaggcuuu

SEQ ID NO: 11816 - RNA, 38 nt, Artificial Sequence
  Description of Artificial Sequence:  Enzymatic Nucleic Acid
aaagcaaucugaugaggccguuaggccgaaaaaggcuu

SEQ ID NO: 11817 - RNA, 38 nt, Artificial Sequence
  Description of Artificial Sequence:  Enzymatic Nucleic Acid
gaaagcaacugaugaggccguuaggccgaaaaaaggcu

SEQ ID NO: 11818 - RNA, 38 nt, Artificial Sequence
  Description of Artificial Sequence:  Enzymatic Nucleic Acid
ccgaaagccugaugaggccguuaggccgaaauaaaagg

SEQ ID NO: 11819 - RNA, 38 nt, Artificial Sequence
  Description of Artificial Sequence:  Enzymatic Nucleic Acid
acuaccgacugaugaggccguuaggccgaaagcaauaa

SEQ ID NO: 11820 - RNA, 38 nt, Artificial Sequence
  Description of Artificial Sequence:  Enzymatic Nucleic Acid
cacuaccgcugaugaggccguuaggccgaaaagcaaua

SEQ ID NO: 11821 - RNA, 38 nt, Artificial Sequence
  Description of Artificial Sequence:  Enzymatic Nucleic Acid
ccacuacccugaugaggccguuaggccgaaaaagcaau

SEQ ID NO: 11822 - RNA, 38 nt, Artificial Sequence
  Description of Artificial Sequence:  Enzymatic Nucleic Acid
caucccaccugaugaggccguuaggccgaaaccgaaag

SEQ ID NO: 11823 - RNA, 38 nt, Artificial Sequence
  Description of Artificial Sequence:  Enzymatic Nucleic Acid
ccaccaaacugaugaggccguuaggccgaaauuucauc

SEQ ID NO: 11824 - RNA, 38 nt, Artificial Sequence
  Description of Artificial Sequence:  Enzymatic Nucleic Acid
uuccaccacugaugaggccguuaggccgaaagauuuca

SEQ ID NO: 11825 - RNA, 38 nt, Artificial Sequence
  Description of Artificial Sequence:  Enzymatic Nucleic Acid
cuuccacccugaugaggccguuaggccgaaaagauuuc

SEQ ID NO: 11826 - RNA, 38 nt, Artificial Sequence
  Description of Artificial Sequence:  Enzymatic Nucleic Acid
ucggacuucugaugaggccguuaggccgaaacugccca

SEQ ID NO: 11827 - RNA, 38 nt, Artificial Sequence
  Description of Artificial Sequence:  Enzymatic Nucleic Acid
gggauucgcugaugaggccguuaggccgaaacuugacu

SEQ ID NO: 11828 - RNA, 38 nt, Artificial Sequence
  Description of Artificial Sequence:  Enzymatic Nucleic Acid
uucacaggcugaugaggccguuaggccgaaauucggac

SEQ ID NO: 11829 - RNA, 38 nt, Artificial Sequence
  Description of Artificial Sequence:  Enzymatic Nucleic Acid
aacugagacugaugaggccguuaggccgaaacuucaca

SEQ ID NO: 11830 - RNA, 38 nt, Artificial Sequence
  Description of Artificial Sequence:  Enzymatic Nucleic Acid
guaacugacugaugaggccguuaggccgaaauacuuca

SEQ ID NO: 11831 - RNA, 38 nt, Artificial Sequence
  Description of Artificial Sequence:  Enzymatic Nucleic Acid
ggguaacucugaugaggccguuaggccgaaagauacuu

SEQ ID NO: 11832 - RNA, 38 nt, Artificial Sequence
  Description of Artificial Sequence:  Enzymatic Nucleic Acid
agcugggucugaugaggccguuaggccgaaacugagau

SEQ ID NO: 11833 - RNA, 38 nt, Artificial Sequence
  Description of Artificial Sequence:  Enzymatic Nucleic Acid
gagcugggcugaugaggccguuaggccgaaaacugaga

SEQ ID NO: 11834 - RNA, 38 nt, Artificial Sequence
  Description of Artificial Sequence:  Enzymatic Nucleic Acid
gauaucagcugaugaggccguuaggccgaaagcugggu

SEQ ID NO: 11835 - RNA, 38 nt, Artificial Sequence
  Description of Artificial Sequence:  Enzymatic Nucleic Acid
ccauuugacugaugaggccguuaggccgaaaucaggag

SEQ ID NO: 11836 - RNA, 38 nt, Artificial Sequence
  Description of Artificial Sequence:  Enzymatic Nucleic Acid
uaccauuucugaugaggccguuaggccgaaauaucagg

SEQ ID NO: 11837 - RNA, 38 nt, Artificial Sequence
  Description of Artificial Sequence:  Enzymatic Nucleic Acid
cauuucugcugaugaggccguuaggccgaaaccauuug

SEQ ID NO: 11838 - RNA, 38 nt, Artificial Sequence
  Description of Artificial Sequence:  Enzymatic Nucleic Acid
uuggacuccugaugaggccguuaggccgaaaugggccu

SEQ ID NO: 11839 - RNA, 38 nt, Artificial Sequence
  Description of Artificial Sequence:  Enzymatic Nucleic Acid
uguaguugcugaugaggccguuaggccgaaacucaaug

SEQ ID NO: 11840 - RNA, 38 nt, Artificial Sequence
  Description of Artificial Sequence:  Enzymatic Nucleic Acid
ucauugugcugaugaggccguuaggccgaaaguuggac

SEQ ID NO: 11841 - RNA, 38 nt, Artificial Sequence
  Description of Artificial Sequence:  Enzymatic Nucleic Acid
ucgccaaccugaugaggccguuaggccgaaaucauugu

SEQ ID NO: 11842 - RNA, 38 nt, Artificial Sequence
  Description of Artificial Sequence:  Enzymatic Nucleic Acid
ucaucgcccugaugaggccguuaggccgaaacaaucau

SEQ ID NO: 11843 - RNA, 38 nt, Artificial Sequence
  Description of Artificial Sequence:  Enzymatic Nucleic Acid
augauggucugaugaggccguuaggccgaaaguucauc

SEQ ID NO: 11844 - RNA, 38 nt, Artificial Sequence
  Description of Artificial Sequence:  Enzymatic Nucleic Acid
acuuccaucugaugaggccguuaggccgaaauggugag

SEQ ID NO: 11845 - RNA, 38 nt, Artificial Sequence
  Description of Artificial Sequence:  Enzymatic Nucleic Acid
ugaccgugcugaugaggccguuaggccgaaaguuuccu

SEQ ID NO: 11846 - RNA, 38 nt, Artificial Sequence
  Description of Artificial Sequence:  Enzymatic Nucleic Acid
gugaggaucugaugaggccguuaggccgaaaccgugua

SEQ ID NO: 11847 - RNA, 38 nt, Artificial Sequence
  Description of Artificial Sequence:  Enzymatic Nucleic Acid
uuggugagcugaugaggccguuaggccgaaaugaccgu

SEQ ID NO: 11848 - RNA, 38 nt, Artificial Sequence
  Description of Artificial Sequence:  Enzymatic Nucleic Acid
ggguuggucugaugaggccguuaggccgaaaggaugac

SEQ ID NO: 11849 - RNA, 38 nt, Artificial Sequence
  Description of Artificial Sequence:  Enzymatic Nucleic Acid
uccauugacugaugaggccguuaggccgaaaugggguu

SEQ ID NO: 11850 - RNA, 38 nt, Artificial Sequence
  Description of Artificial Sequence:  Enzymatic Nucleic Acid
cuccauugcugaugaggccguuaggccgaaaauggggu

SEQ ID NO: 11851 - RNA, 38 nt, Artificial Sequence
  Description of Artificial Sequence:  Enzymatic Nucleic Acid
ucuccauucugaugaggccguuaggccgaaaaaugggg

SEQ ID NO: 11852 - RNA, 38 nt, Artificial Sequence
  Description of Artificial Sequence:  Enzymatic Nucleic Acid
accagagacugaugaggccguuaggccgaaaccaugug

SEQ ID NO: 11853 - RNA, 38 nt, Artificial Sequence
  Description of Artificial Sequence:  Enzymatic Nucleic Acid
caaccagacugaugaggccguuaggccgaaagaccaug

SEQ ID NO: 11854 - RNA, 38 nt, Artificial Sequence
  Description of Artificial Sequence:  Enzymatic Nucleic Acid
acauucaccugaugaggccguuaggccgaaaccagaga

SEQ ID NO: 11855 - RNA, 38 nt, Artificial Sequence
  Description of Artificial Sequence:  Enzymatic Nucleic Acid
ugggguggcugaugaggccguuaggccgaaacauucac

SEQ ID NO: 11856 - RNA, 38 nt, Artificial Sequence
  Description of Artificial Sequence:  Enzymatic Nucleic Acid
gcgagauccugaugaggccguuaggccgaaaggcuuuc

SEQ ID NO: 11857 - RNA, 38 nt, Artificial Sequence
  Description of Artificial Sequence:  Enzymatic Nucleic Acid
auaggcgacugaugaggccguuaggccgaaaucaaggc

SEQ ID NO: 11858 - RNA, 38 nt, Artificial Sequence
  Description of Artificial Sequence:  Enzymatic Nucleic Acid
ccauaggccugaugaggccguuaggccgaaagaucaag

SEQ ID NO: 11859 - RNA, 38 nt, Artificial Sequence
  Description of Artificial Sequence:  Enzymatic Nucleic Acid
ggaauccacugaugaggccguuaggccgaaaggcgaga

SEQ ID NO: 11860 - RNA, 38 nt, Artificial Sequence
  Description of Artificial Sequence:  Enzymatic Nucleic Acid
cugguaggcugaugaggccguuaggccgaaauccauag

SEQ ID NO: 11861 - RNA, 38 nt, Artificial Sequence
  Description of Artificial Sequence:  Enzymatic Nucleic Acid
acugguagcugaugaggccguuaggccgaaaauccaua

SEQ ID NO: 11862 - RNA, 38 nt, Artificial Sequence
  Description of Artificial Sequence:  Enzymatic Nucleic Acid
cauacuggcugaugaggccguuaggccgaaaggaaucc

SEQ ID NO: 11863 - RNA, 38 nt, Artificial Sequence
  Description of Artificial Sequence:  Enzymatic Nucleic Acid
uggucccacugaugaggccguuaggccgaaacugguag

SEQ ID NO: 11864 - RNA, 38 nt, Artificial Sequence
  Description of Artificial Sequence:  Enzymatic Nucleic Acid
ugcauguccugaugaggccguuaggccgaaaugucugc

SEQ ID NO: 11865 - RNA, 38 nt, Artificial Sequence
  Description of Artificial Sequence:  Enzymatic Nucleic Acid
uuggcguacugaugaggccguuaggccgaaacugugca

SEQ ID NO: 11866 - RNA, 38 nt, Artificial Sequence
  Description of Artificial Sequence:  Enzymatic Nucleic Acid
gguuggcgcugaugaggccguuaggccgaaagacugug

SEQ ID NO: 11867 - RNA, 38 nt, Artificial Sequence
  Description of Artificial Sequence:  Enzymatic Nucleic Acid
gugcagggcugaugaggccguuaggccgaaaggguugg

SEQ ID NO: 11868 - RNA, 38 nt, Artificial Sequence
  Description of Artificial Sequence:  Enzymatic Nucleic Acid
uaccacugcugaugaggccguuaggccgaaauguggug

SEQ ID NO: 11869 - RNA, 38 nt, Artificial Sequence
  Description of Artificial Sequence:  Enzymatic Nucleic Acid
gcugccagcugaugaggccguuaggccgaaaccacugg

SEQ ID NO: 11870 - RNA, 38 nt, Artificial Sequence
  Description of Artificial Sequence:  Enzymatic Nucleic Acid
gcuucuuccugaugaggccguuaggccgaaagcugcca

SEQ ID NO: 11871 - RNA, 38 nt, Artificial Sequence
  Description of Artificial Sequence:  Enzymatic Nucleic Acid
gucuguagcugaugaggccguuaggccgaaagcaggcu

SEQ ID NO: 11872 - RNA, 38 nt, Artificial Sequence
  Description of Artificial Sequence:  Enzymatic Nucleic Acid
cgggucugcugaugaggccguuaggccgaaaggagcag

SEQ ID NO: 11873 - RNA, 38 nt, Artificial Sequence
  Description of Artificial Sequence:  Enzymatic Nucleic Acid
uacaagcacugaugaggccguuaggccgaaacgggcuu

SEQ ID NO: 11874 - RNA, 38 nt, Artificial Sequence
  Description of Artificial Sequence:  Enzymatic Nucleic Acid
uucuuuaccugaugaggccguuaggccgaaagcauacg

SEQ ID NO: 11875 - RNA, 38 nt, Artificial Sequence
  Description of Artificial Sequence:  Enzymatic Nucleic Acid
ccauucuucugaugaggccguuaggccgaaacaagcau

SEQ ID NO: 11876 - RNA, 38 nt, Artificial Sequence
  Description of Artificial Sequence:  Enzymatic Nucleic Acid
ccccuggacugaugaggccguuaggccgaaauccucca

SEQ ID NO: 11877 - RNA, 38 nt, Artificial Sequence
  Description of Artificial Sequence:  Enzymatic Nucleic Acid
cccccuggcugaugaggccguuaggccgaaaauccucc

SEQ ID NO: 11878 - RNA, 38 nt, Artificial Sequence
  Description of Artificial Sequence:  Enzymatic Nucleic Acid
ccccccugcugaugaggccguuaggccgaaaaauccuc

SEQ ID NO: 11879 - RNA, 38 nt, Artificial Sequence
  Description of Artificial Sequence:  Enzymatic Nucleic Acid
gugacuuccugaugaggccguuaggccgaaaucuuguu

SEQ ID NO: 11880 - RNA, 38 nt, Artificial Sequence
  Description of Artificial Sequence:  Enzymatic Nucleic Acid
uuuuuggucugaugaggccguuaggccgaaacuucgau

SEQ ID NO: 11881 - RNA, 38 nt, Artificial Sequence
  Description of Artificial Sequence:  Enzymatic Nucleic Acid
ucagggcacugaugaggccguuaggccgaaauugguuu

SEQ ID NO: 11882 - RNA, 38 nt, Artificial Sequence
  Description of Artificial Sequence:  Enzymatic Nucleic Acid
uuuccuuccugaugaggccguuaggccgaaaucagggc

SEQ ID NO: 11883 - RNA, 38 nt, Artificial Sequence
  Description of Artificial Sequence:  Enzymatic Nucleic Acid
agcguacucugaugaggccguuaggccgaaacaguuuu

SEQ ID NO: 11884 - RNA, 38 nt, Artificial Sequence
  Description of Artificial Sequence:  Enzymatic Nucleic Acid
gaccagcgcugaugaggccguuaggccgaaacuuacag

SEQ ID NO: 11885 - RNA, 38 nt, Artificial Sequence
  Description of Artificial Sequence:  Enzymatic Nucleic Acid
gcuuggaucugaugaggccguuaggccgaaaccagcgu

SEQ ID NO: 11886 - RNA, 38 nt, Artificial Sequence
  Description of Artificial Sequence:  Enzymatic Nucleic Acid
gcagcuugcugaugaggccguuaggccgaaaugaccag

SEQ ID NO: 11887 - RNA, 38 nt, Artificial Sequence
  Description of Artificial Sequence:  Enzymatic Nucleic Acid
acaacgcucugaugaggccguuaggccgaaacacguug

SEQ ID NO: 11888 - RNA, 38 nt, Artificial Sequence
  Description of Artificial Sequence:  Enzymatic Nucleic Acid
auuuguaccugaugaggccguuaggccgaaacgcugac

SEQ ID NO: 11889 - RNA, 38 nt, Artificial Sequence
  Description of Artificial Sequence:  Enzymatic Nucleic Acid
cacauuugcugaugaggccguuaggccgaaacaacgcu

SEQ ID NO: 11890 - RNA, 38 nt, Artificial Sequence
  Description of Artificial Sequence:  Enzymatic Nucleic Acid
gcuuuguucugaugaggccguuaggccgaaauggcuuc

SEQ ID NO: 11891 - RNA, 38 nt, Artificial Sequence
  Description of Artificial Sequence:  Enzymatic Nucleic Acid
aaggagaucugaugaggccguuaggccgaaacccucuc

SEQ ID NO: 11892 - RNA, 38 nt, Artificial Sequence
  Description of Artificial Sequence:  Enzymatic Nucleic Acid
uggaaggacugaugaggccguuaggccgaaaugacccu

SEQ ID NO: 11893 - RNA, 38 nt, Artificial Sequence
  Description of Artificial Sequence:  Enzymatic Nucleic Acid
cauggaagcugaugaggccguuaggccgaaagaugacc

SEQ ID NO: 11894 - RNA, 38 nt, Artificial Sequence
  Description of Artificial Sequence:  Enzymatic Nucleic Acid
ucacauggcugaugaggccguuaggccgaaaggagaug

SEQ ID NO: 11895 - RNA, 38 nt, Artificial Sequence
  Description of Artificial Sequence:  Enzymatic Nucleic Acid
aucacaugcugaugaggccguuaggccgaaaaggagau

SEQ ID NO: 11896 - RNA, 38 nt, Artificial Sequence
  Description of Artificial Sequence:  Enzymatic Nucleic Acid
ggaccccucugaugaggccguuaggccgaaaucacaug

SEQ ID NO: 11897 - RNA, 38 nt, Artificial Sequence
  Description of Artificial Sequence:  Enzymatic Nucleic Acid
aauuucagcugaugaggccguuaggccgaaaccccuga

SEQ ID NO: 11898 - RNA, 38 nt, Artificial Sequence
  Description of Artificial Sequence:  Enzymatic Nucleic Acid
ugcacagucugaugaggccguuaggccgaaauuucagg

SEQ ID NO: 11899 - RNA, 38 nt, Artificial Sequence
  Description of Artificial Sequence:  Enzymatic Nucleic Acid
uugcacagcugaugaggccguuaggccgaaaauuucag

SEQ ID NO: 11900 - RNA, 38 nt, Artificial Sequence
  Description of Artificial Sequence:  Enzymatic Nucleic Acid
acaacaggcugaugaggccguuaggccgaaacacacuc

SEQ ID NO: 11901 - RNA, 38 nt, Artificial Sequence
  Description of Artificial Sequence:  Enzymatic Nucleic Acid
cagugcaccugaugaggccguuaggccgaaacagggac

SEQ ID NO: 11902 - RNA, 38 nt, Artificial Sequence
  Description of Artificial Sequence:  Enzymatic Nucleic Acid
cucaaacgcugaugaggccguuaggccgaaauuucugu

SEQ ID NO: 11903 - RNA, 38 nt, Artificial Sequence
  Description of Artificial Sequence:  Enzymatic Nucleic Acid
gguucucacugaugaggccguuaggccgaaacguauuu

SEQ ID NO: 11904 - RNA, 38 nt, Artificial Sequence
  Description of Artificial Sequence:  Enzymatic Nucleic Acid
agguucuccugaugaggccguuaggccgaaaacguauu

SEQ ID NO: 11905 - RNA, 38 nt, Artificial Sequence
  Description of Artificial Sequence:  Enzymatic Nucleic Acid
uaccacgucugaugaggccguuaggccgaaagguucuc

SEQ ID NO: 11906 - RNA, 38 nt, Artificial Sequence
  Description of Artificial Sequence:  Enzymatic Nucleic Acid
caagcuugcugaugaggccguuaggccgaaaccacgug

SEQ ID NO: 11907 - RNA, 38 nt, Artificial Sequence
  Description of Artificial Sequence:  Enzymatic Nucleic Acid
ugugagcccugaugaggccguuaggccgaaagcuugua

SEQ ID NO: 11908 - RNA, 38 nt, Artificial Sequence
  Description of Artificial Sequence:  Enzymatic Nucleic Acid
uugccugucugaugaggccguuaggccgaaagccaagc

SEQ ID NO: 11909 - RNA, 38 nt, Artificial Sequence
  Description of Artificial Sequence:  Enzymatic Nucleic Acid
uguggacccugaugaggccguuaggccgaaauguugcc

SEQ ID NO: 11910 - RNA, 38 nt, Artificial Sequence
  Description of Artificial Sequence:  Enzymatic Nucleic Acid
cccaugugcugaugaggccguuaggccgaaaccgaugu

SEQ ID NO: 11911 - RNA, 38 nt, Artificial Sequence
  Description of Artificial Sequence:  Enzymatic Nucleic Acid
gugugagucugaugaggccguuaggccgaaauucgccc

SEQ ID NO: 11912 - RNA, 38 nt, Artificial Sequence
  Description of Artificial Sequence:  Enzymatic Nucleic Acid
acuggugucugaugaggccguuaggccgaaagugauuc

SEQ ID NO: 11913 - RNA, 38 nt, Artificial Sequence
  Description of Artificial Sequence:  Enzymatic Nucleic Acid
uucuugcacugaugaggccguuaggccgaaacuggugu

SEQ ID NO: 11914 - RNA, 38 nt, Artificial Sequence
  Description of Artificial Sequence:  Enzymatic Nucleic Acid
guucuugccugaugaggccguuaggccgaaaacuggug

SEQ ID NO: 11915 - RNA, 38 nt, Artificial Sequence
  Description of Artificial Sequence:  Enzymatic Nucleic Acid
gagcaucccugaugaggccguuaggccgaaaguucuug

SEQ ID NO: 11916 - RNA, 38 nt, Artificial Sequence
  Description of Artificial Sequence:  Enzymatic Nucleic Acid
uuuccaaacugaugaggccguuaggccgaaagcaucca

SEQ ID NO: 11917 - RNA, 38 nt, Artificial Sequence
  Description of Artificial Sequence:  Enzymatic Nucleic Acid
aguuuccacugaugaggccguuaggccgaaagagcauc

SEQ ID NO: 11918 - RNA, 38 nt, Artificial Sequence
  Description of Artificial Sequence:  Enzymatic Nucleic Acid
caguuucccugaugaggccguuaggccgaaaagagcau

SEQ ID NO: 11919 - RNA, 38 nt, Artificial Sequence
  Description of Artificial Sequence:  Enzymatic Nucleic Acid
uguuagaacugaugaggccguuaggccgaaacauggug

SEQ ID NO: 11920 - RNA, 38 nt, Artificial Sequence
  Description of Artificial Sequence:  Enzymatic Nucleic Acid
cuguuagacugaugaggccguuaggccgaaaacauggu

SEQ ID NO: 11921 - RNA, 38 nt, Artificial Sequence
  Description of Artificial Sequence:  Enzymatic Nucleic Acid
gcuguuagcugaugaggccguuaggccgaaaaacaugg

SEQ ID NO: 11922 - RNA, 38 nt, Artificial Sequence
  Description of Artificial Sequence:  Enzymatic Nucleic Acid
ugcuguuacugaugaggccguuaggccgaaaaaacaug

SEQ ID NO: 11923 - RNA, 38 nt, Artificial Sequence
  Description of Artificial Sequence:  Enzymatic Nucleic Acid
ugugcugucugaugaggccguuaggccgaaagaaaaca

SEQ ID NO: 11924 - RNA, 38 nt, Artificial Sequence
  Description of Artificial Sequence:  Enzymatic Nucleic Acid
acaaucaacugaugaggccguuaggccgaaaugucauu

SEQ ID NO: 11925 - RNA, 38 nt, Artificial Sequence
  Description of Artificial Sequence:  Enzymatic Nucleic Acid
ccacaauccugaugaggccguuaggccgaaagauguca

SEQ ID NO: 11926 - RNA, 38 nt, Artificial Sequence
  Description of Artificial Sequence:  Enzymatic Nucleic Acid
aaugccaccugaugaggccguuaggccgaaaucaagau

SEQ ID NO: 11927 - RNA, 38 nt, Artificial Sequence
  Description of Artificial Sequence:  Enzymatic Nucleic Acid
cauucugacugaugaggccguuaggccgaaaugccaca

SEQ ID NO: 11928 - RNA, 38 nt, Artificial Sequence
  Description of Artificial Sequence:  Enzymatic Nucleic Acid
gcauucugcugaugaggccguuaggccgaaaaugccac

SEQ ID NO: 11929 - RNA, 38 nt, Artificial Sequence
  Description of Artificial Sequence:  Enzymatic Nucleic Acid
ggcauucucugaugaggccguuaggccgaaaaaugcca

SEQ ID NO: 11930 - RNA, 38 nt, Artificial Sequence
  Description of Artificial Sequence:  Enzymatic Nucleic Acid
ccugcagacugaugaggccguuaggccgaaaggcauuc

SEQ ID NO: 11931 - RNA, 38 nt, Artificial Sequence
  Description of Artificial Sequence:  Enzymatic Nucleic Acid
guccugcacugaugaggccguuaggccgaaagaggcau

SEQ ID NO: 11932 - RNA, 38 nt, Artificial Sequence
  Description of Artificial Sequence:  Enzymatic Nucleic Acid
agcaaacacugaugaggccguuaggccgaaagucgccu

SEQ ID NO: 11933 - RNA, 38 nt, Artificial Sequence
  Description of Artificial Sequence:  Enzymatic Nucleic Acid
gcagagcacugaugaggccguuaggccgaaacauaguc

SEQ ID NO: 11934 - RNA, 38 nt, Artificial Sequence
  Description of Artificial Sequence:  Enzymatic Nucleic Acid
agcagagccugaugaggccguuaggccgaaaacauagu

SEQ ID NO: 11935 - RNA, 38 nt, Artificial Sequence
  Description of Artificial Sequence:  Enzymatic Nucleic Acid
cuugagcacugaugaggccguuaggccgaaagcaaaca

SEQ ID NO: 11936 - RNA, 38 nt, Artificial Sequence
  Description of Artificial Sequence:  Enzymatic Nucleic Acid
cuuaucuucugaugaggccguuaggccgaaagcagagc

SEQ ID NO: 11937 - RNA, 38 nt, Artificial Sequence
  Description of Artificial Sequence:  Enzymatic Nucleic Acid
ggucuucucugaugaggccguuaggccgaaaucuugag

SEQ ID NO: 11938 - RNA, 38 nt, Artificial Sequence
  Description of Artificial Sequence:  Enzymatic Nucleic Acid
gaccaggccugaugaggccguuaggccgaaaugucuuu

SEQ ID NO: 11939 - RNA, 38 nt, Artificial Sequence
  Description of Artificial Sequence:  Enzymatic Nucleic Acid
agcuguuucugaugaggccguuaggccgaaaccaggca

SEQ ID NO: 11940 - RNA, 38 nt, Artificial Sequence
  Description of Artificial Sequence:  Enzymatic Nucleic Acid
aggaugaucugaugaggccguuaggccgaaagcuguuu

SEQ ID NO: 11941 - RNA, 38 nt, Artificial Sequence
  Description of Artificial Sequence:  Enzymatic Nucleic Acid
ucuaggaucugaugaggccguuaggccgaaaugagcug

SEQ ID NO: 11942 - RNA, 38 nt, Artificial Sequence
  Description of Artificial Sequence:  Enzymatic Nucleic Acid
cgcucuagcugaugaggccguuaggccgaaaugaugag

SEQ ID NO: 11943 - RNA, 38 nt, Artificial Sequence
  Description of Artificial Sequence:  Enzymatic Nucleic Acid
augcgcuccugaugaggccguuaggccgaaaggaugau

SEQ ID NO: 11944 - RNA, 38 nt, Artificial Sequence
  Description of Artificial Sequence:  Enzymatic Nucleic Acid
uuuccggucugaugaggccguuaggccgaaaucauggg

SEQ ID NO: 11945 - RNA, 38 nt, Artificial Sequence
  Description of Artificial Sequence:  Enzymatic Nucleic Acid
auucuccacugaugaggccguuaggccgaaauuuccgg

SEQ ID NO: 11946 - RNA, 38 nt, Artificial Sequence
  Description of Artificial Sequence:  Enzymatic Nucleic Acid
uguugucucugaugaggccguuaggccgaaauucucca

SEQ ID NO: 11947 - RNA, 38 nt, Artificial Sequence
  Description of Artificial Sequence:  Enzymatic Nucleic Acid
gucucgcccugaugaggccguuaggccgaaaugguugu

SEQ ID NO: 11948 - RNA, 38 nt, Artificial Sequence
  Description of Artificial Sequence:  Enzymatic Nucleic Acid
gucacuuccugaugaggccguuaggccgaaauggucuc

SEQ ID NO: 11949 - RNA, 38 nt, Artificial Sequence
  Description of Artificial Sequence:  Enzymatic Nucleic Acid
ugcugggccugaugaggccguuaggccgaaagucacuu

SEQ ID NO: 11950 - RNA, 38 nt, Artificial Sequence
  Description of Artificial Sequence:  Enzymatic Nucleic Acid
gauuuccacugaugaggccguuaggccgaaaugcuggg

SEQ ID NO: 11951 - RNA, 38 nt, Artificial Sequence
  Description of Artificial Sequence:  Enzymatic Nucleic Acid
ugggguagcugaugaggccguuaggccgaaauuuccag

SEQ ID NO: 11952 - RNA, 38 nt, Artificial Sequence
  Description of Artificial Sequence:  Enzymatic Nucleic Acid
guguggggcugaugaggccguuaggccgaaaggauuuc

SEQ ID NO: 11953 - RNA, 38 nt, Artificial Sequence
  Description of Artificial Sequence:  Enzymatic Nucleic Acid
aaccaugucugaugaggccguuaggccgaaaugugugg

SEQ ID NO: 11954 - RNA, 38 nt, Artificial Sequence
  Description of Artificial Sequence:  Enzymatic Nucleic Acid
gaaccaugcugaugaggccguuaggccgaaaaugugug

SEQ ID NO: 11955 - RNA, 38 nt, Artificial Sequence
  Description of Artificial Sequence:  Enzymatic Nucleic Acid
ugucuuugcugaugaggccguuaggccgaaaccaugua

SEQ ID NO: 11956 - RNA, 38 nt, Artificial Sequence
  Description of Artificial Sequence:  Enzymatic Nucleic Acid
uugucuuucugaugaggccguuaggccgaaaaccaugu

SEQ ID NO: 11957 - RNA, 38 nt, Artificial Sequence
  Description of Artificial Sequence:  Enzymatic Nucleic Acid
gaaucuuccugaugaggccguuaggccgaaaccagggu

SEQ ID NO: 11958 - RNA, 38 nt, Artificial Sequence
  Description of Artificial Sequence:  Enzymatic Nucleic Acid
aaugccugcugaugaggccguuaggccgaaaucuucua

SEQ ID NO: 11959 - RNA, 38 nt, Artificial Sequence
  Description of Artificial Sequence:  Enzymatic Nucleic Acid
caaugccucugaugaggccguuaggccgaaaaucuucu

SEQ ID NO: 11960 - RNA, 38 nt, Artificial Sequence
  Description of Artificial Sequence:  Enzymatic Nucleic Acid
cucaguaccugaugaggccguuaggccgaaaugccuga

SEQ ID NO: 11961 - RNA, 38 nt, Artificial Sequence
  Description of Artificial Sequence:  Enzymatic Nucleic Acid
ucucucagcugaugaggccguuaggccgaaacaaugcc

SEQ ID NO: 11962 - RNA, 38 nt, Artificial Sequence
  Description of Artificial Sequence:  Enzymatic Nucleic Acid
ccugcggacugaugaggccguuaggccgaaagucaggu

SEQ ID NO: 11963 - RNA, 38 nt, Artificial Sequence
  Description of Artificial Sequence:  Enzymatic Nucleic Acid
acccugcgcugaugaggccguuaggccgaaauagucag

SEQ ID NO: 11964 - RNA, 38 nt, Artificial Sequence
  Description of Artificial Sequence:  Enzymatic Nucleic Acid
cagguguacugaugaggccguuaggccgaaaggccucc

SEQ ID NO: 11965 - RNA, 38 nt, Artificial Sequence
  Description of Artificial Sequence:  Enzymatic Nucleic Acid
cagccaagcugaugaggccguuaggccgaaacauugca

SEQ ID NO: 11966 - RNA, 38 nt, Artificial Sequence
  Description of Artificial Sequence:  Enzymatic Nucleic Acid
gcacagcccugaugaggccguuaggccgaaaggacauu

SEQ ID NO: 11967 - RNA, 38 nt, Artificial Sequence
  Description of Artificial Sequence:  Enzymatic Nucleic Acid
auuaugaacugaugaggccguuaggccgaaagcgucuc

SEQ ID NO: 11968 - RNA, 38 nt, Artificial Sequence
  Description of Artificial Sequence:  Enzymatic Nucleic Acid
cuauuaugcugaugaggccguuaggccgaaagagcguc

SEQ ID NO: 11969 - RNA, 38 nt, Artificial Sequence
  Description of Artificial Sequence:  Enzymatic Nucleic Acid
ucuauuaucugaugaggccguuaggccgaaaagagcgu

SEQ ID NO: 11970 - RNA, 38 nt, Artificial Sequence
  Description of Artificial Sequence:  Enzymatic Nucleic Acid
ccuucuaucugaugaggccguuaggccgaaaugaagag

SEQ ID NO: 11971 - RNA, 38 nt, Artificial Sequence
  Description of Artificial Sequence:  Enzymatic Nucleic Acid
ugacuucccugaugaggccguuaggccgaaaguugguc

SEQ ID NO: 11972 - RNA, 38 nt, Artificial Sequence
  Description of Artificial Sequence:  Enzymatic Nucleic Acid
aggauaaucugaugaggccguuaggccgaaacuuccaa

SEQ ID NO: 11973 - RNA, 38 nt, Artificial Sequence
  Description of Artificial Sequence:  Enzymatic Nucleic Acid
acgaggaucugaugaggccguuaggccgaaaugacuuc

SEQ ID NO: 11974 - RNA, 38 nt, Artificial Sequence
  Description of Artificial Sequence:  Enzymatic Nucleic Acid
gacgaggacugaugaggccguuaggccgaaaaugacuu

SEQ ID NO: 11975 - RNA, 38 nt, Artificial Sequence
  Description of Artificial Sequence:  Enzymatic Nucleic Acid
ccgacgagcugaugaggccguuaggccgaaauaaugac

SEQ ID NO: 11976 - RNA, 38 nt, Artificial Sequence
  Description of Artificial Sequence:  Enzymatic Nucleic Acid
gugccgaccugaugaggccguuaggccgaaaggauaau

SEQ ID NO: 11977 - RNA, 38 nt, Artificial Sequence
  Description of Artificial Sequence:  Enzymatic Nucleic Acid
gcagugcccugaugaggccguuaggccgaaacgaggau

SEQ ID NO: 11978 - RNA, 38 nt, Artificial Sequence
  Description of Artificial Sequence:  Enzymatic Nucleic Acid
aacauggccugaugaggccguuaggccgaaaucacugc

SEQ ID NO: 11979 - RNA, 38 nt, Artificial Sequence
  Description of Artificial Sequence:  Enzymatic Nucleic Acid
ggagccagcugaugaggccguuaggccgaaagaacaug

SEQ ID NO: 11980 - RNA, 38 nt, Artificial Sequence
  Description of Artificial Sequence:  Enzymatic Nucleic Acid
aggagccacugaugaggccguuaggccgaaaagaacau

SEQ ID NO: 11981 - RNA, 38 nt, Artificial Sequence
  Description of Artificial Sequence:  Enzymatic Nucleic Acid
augacaagcugaugaggccguuaggccgaaaggagcca

SEQ ID NO: 11982 - RNA, 38 nt, Artificial Sequence
  Description of Artificial Sequence:  Enzymatic Nucleic Acid
aaugacaacugaugaggccguuaggccgaaaaggagcc

SEQ ID NO: 11983 - RNA, 38 nt, Artificial Sequence
  Description of Artificial Sequence:  Enzymatic Nucleic Acid
acaaugaccugaugaggccguuaggccgaaagaaggag

SEQ ID NO: 11984 - RNA, 38 nt, Artificial Sequence
  Description of Artificial Sequence:  Enzymatic Nucleic Acid
aggacaaucugaugaggccguuaggccgaaacaagaag

SEQ ID NO: 11985 - RNA, 38 nt, Artificial Sequence
  Description of Artificial Sequence:  Enzymatic Nucleic Acid
cguaggaccugaugaggccguuaggccgaaaugacaag

SEQ ID NO: 11986 - RNA, 38 nt, Artificial Sequence
  Description of Artificial Sequence:  Enzymatic Nucleic Acid
guccguagcugaugaggccguuaggccgaaacaaugac

SEQ ID NO: 11987 - RNA, 38 nt, Artificial Sequence
  Description of Artificial Sequence:  Enzymatic Nucleic Acid
acgguccgcugaugaggccguuaggccgaaaggacaau

SEQ ID NO: 11988 - RNA, 38 nt, Artificial Sequence
  Description of Artificial Sequence:  Enzymatic Nucleic Acid
gcccgcuucugaugaggccguuaggccgaaacgguccg

SEQ ID NO: 11989 - RNA, 38 nt, Artificial Sequence
  Description of Artificial Sequence:  Enzymatic Nucleic Acid
uagacaagcugaugaggccguuaggccgaaagccuguc

SEQ ID NO: 11990 - RNA, 38 nt, Artificial Sequence
  Description of Artificial Sequence:  Enzymatic Nucleic Acid
caauagaccugaugaggccguuaggccgaaaguagccu

SEQ ID NO: 11991 - RNA, 38 nt, Artificial Sequence
  Description of Artificial Sequence:  Enzymatic Nucleic Acid
ugacaauacugaugaggccguuaggccgaaacaaguag

SEQ ID NO: 11992 - RNA, 38 nt, Artificial Sequence
  Description of Artificial Sequence:  Enzymatic Nucleic Acid
caugacaacugaugaggccguuaggccgaaagacaagu

SEQ ID NO: 11993 - RNA, 38 nt, Artificial Sequence
  Description of Artificial Sequence:  Enzymatic Nucleic Acid
uccaugaccugaugaggccguuaggccgaaauagacaa

SEQ ID NO: 11994 - RNA, 38 nt, Artificial Sequence
  Description of Artificial Sequence:  Enzymatic Nucleic Acid
ggauccaucugaugaggccguuaggccgaaacaauaga

SEQ ID NO: 11995 - RNA, 38 nt, Artificial Sequence
  Description of Artificial Sequence:  Enzymatic Nucleic Acid
ccaagggccugaugaggccguuaggccgaaauucaucu

SEQ ID NO: 11996 - RNA, 38 nt, Artificial Sequence
  Description of Artificial Sequence:  Enzymatic Nucleic Acid
gcucaucccugaugaggccguuaggccgaaagggcaau

SEQ ID NO: 11997 - RNA, 38 nt, Artificial Sequence
  Description of Artificial Sequence:  Enzymatic Nucleic Acid
cauaaggccugaugaggccguuaggccgaaagcguuca

SEQ ID NO: 11998 - RNA, 38 nt, Artificial Sequence
  Description of Artificial Sequence:  Enzymatic Nucleic Acid
ggcaucaucugaugaggccguuaggccgaaaggcaagc

SEQ ID NO: 11999 - RNA, 38 nt, Artificial Sequence
  Description of Artificial Sequence:  Enzymatic Nucleic Acid
uggcaucacugaugaggccguuaggccgaaaaggcaag

SEQ ID NO: 12000 - RNA, 38 nt, Artificial Sequence
  Description of Artificial Sequence:  Enzymatic Nucleic Acid
cccuggggcugaugaggccguuaggccgaaauucccac

SEQ ID NO: 12001 - RNA, 38 nt, Artificial Sequence
  Description of Artificial Sequence:  Enzymatic Nucleic Acid
ucccugggcugaugaggccguuaggccgaaaauuccca

SEQ ID NO: 12002 - RNA, 38 nt, Artificial Sequence
  Description of Artificial Sequence:  Enzymatic Nucleic Acid
gguuuucccugaugaggccguuaggccgaaaguuucag

SEQ ID NO: 12003 - RNA, 38 nt, Artificial Sequence
  Description of Artificial Sequence:  Enzymatic Nucleic Acid
gcggccaacugaugaggccguuaggccgaaagguuuuc

SEQ ID NO: 12004 - RNA, 38 nt, Artificial Sequence
  Description of Artificial Sequence:  Enzymatic Nucleic Acid
ccgcggcccugaugaggccguuaggccgaaagagguuu

SEQ ID NO: 12005 - RNA, 38 nt, Artificial Sequence
  Description of Artificial Sequence:  Enzymatic Nucleic Acid
cuuggccgcugaugaggccguuaggccgaaaggcaccg

SEQ ID NO: 12006 - RNA, 38 nt, Artificial Sequence
  Description of Artificial Sequence:  Enzymatic Nucleic Acid
acuuggcccugaugaggccguuaggccgaaaaggcacc

SEQ ID NO: 12007 - RNA, 38 nt, Artificial Sequence
  Description of Artificial Sequence:  Enzymatic Nucleic Acid
ucugccuccugaugaggccguuaggccgaaaucacuug

SEQ ID NO: 12008 - RNA, 38 nt, Artificial Sequence
  Description of Artificial Sequence:  Enzymatic Nucleic Acid
aauuccaacugaugaggccguuaggccgaaagcgucug

SEQ ID NO: 12009 - RNA, 38 nt, Artificial Sequence
  Description of Artificial Sequence:  Enzymatic Nucleic Acid
caauuccacugaugaggccguuaggccgaaaagcgucu

SEQ ID NO: 12010 - RNA, 38 nt, Artificial Sequence
  Description of Artificial Sequence:  Enzymatic Nucleic Acid
ucaauucccugaugaggccguuaggccgaaaaagcguc

SEQ ID NO: 12011 - RNA, 38 nt, Artificial Sequence
  Description of Artificial Sequence:  Enzymatic Nucleic Acid
uguuuugccugaugaggccguuaggccgaaagucgcug

SEQ ID NO: 12012 - RNA, 38 nt, Artificial Sequence
  Description of Artificial Sequence:  Enzymatic Nucleic Acid
uugacggccugaugaggccguuaggccgaaacuguuuu

SEQ ID NO: 12013 - RNA, 38 nt, Artificial Sequence
  Description of Artificial Sequence:  Enzymatic Nucleic Acid
aacaucuucugaugaggccguuaggccgaaacggcuac

SEQ ID NO: 12014 - RNA, 38 nt, Artificial Sequence
  Description of Artificial Sequence:  Enzymatic Nucleic Acid
cuucuuuccugaugaggccguuaggccgaaacaucuug

SEQ ID NO: 12015 - RNA, 38 nt, Artificial Sequence
  Description of Artificial Sequence:  Enzymatic Nucleic Acid
gagggcuccugaugaggccguuaggccgaaaugcucgc

SEQ ID NO: 12016 - RNA, 38 nt, Artificial Sequence
  Description of Artificial Sequence:  Enzymatic Nucleic Acid
ucagacaucugaugaggccguuaggccgaaagggcucg

SEQ ID NO: 12017 - RNA, 38 nt, Artificial Sequence
  Description of Artificial Sequence:  Enzymatic Nucleic Acid
ugaguucacugaugaggccguuaggccgaaacaugagg

SEQ ID NO: 12018 - RNA, 38 nt, Artificial Sequence
  Description of Artificial Sequence:  Enzymatic Nucleic Acid
uggaugagcugaugaggccguuaggccgaaaucuugag

SEQ ID NO: 12019 - RNA, 38 nt, Artificial Sequence
  Description of Artificial Sequence:  Enzymatic Nucleic Acid
auguggaucugaugaggccguuaggccgaaaggaucuu

SEQ ID NO: 12020 - RNA, 38 nt, Artificial Sequence
  Description of Artificial Sequence:  Enzymatic Nucleic Acid
ccaaugugcugaugaggccguuaggccgaaaugaggau

SEQ ID NO: 12021 - RNA, 38 nt, Artificial Sequence
  Description of Artificial Sequence:  Enzymatic Nucleic Acid
uggugacccugaugaggccguuaggccgaaauguggau

SEQ ID NO: 12022 - RNA, 38 nt, Artificial Sequence
  Description of Artificial Sequence:  Enzymatic Nucleic Acid
gagauggucugaugaggccguuaggccgaaaccaaugu

SEQ ID NO: 12023 - RNA, 38 nt, Artificial Sequence
  Description of Artificial Sequence:  Enzymatic Nucleic Acid
gcgccuagcugaugaggccguuaggccgaaagguucac

SEQ ID NO: 12024 - RNA, 38 nt, Artificial Sequence
  Description of Artificial Sequence:  Enzymatic Nucleic Acid
caggcgcccugaugaggccguuaggccgaaaggagguu

SEQ ID NO: 12025 - RNA, 38 nt, Artificial Sequence
  Description of Artificial Sequence:  Enzymatic Nucleic Acid
caccaugacugaugaggccguuaggccgaaaggcccuc

SEQ ID NO: 12026 - RNA, 38 nt, Artificial Sequence
  Description of Artificial Sequence:  Enzymatic Nucleic Acid
aucaccaucugaugaggccguuaggccgaaagaggccc

SEQ ID NO: 12027 - RNA, 38 nt, Artificial Sequence
  Description of Artificial Sequence:  Enzymatic Nucleic Acid
acuugcagcugaugaggccguuaggccgaaauuccaca

SEQ ID NO: 12028 - RNA, 38 nt, Artificial Sequence
  Description of Artificial Sequence:  Enzymatic Nucleic Acid
aacuugcacugaugaggccguuaggccgaaaauuccac

SEQ ID NO: 12029 - RNA, 38 nt, Artificial Sequence
  Description of Artificial Sequence:  Enzymatic Nucleic Acid
gguuuccacugaugaggccguuaggccgaaacuugcag

SEQ ID NO: 12030 - RNA, 38 nt, Artificial Sequence
  Description of Artificial Sequence:  Enzymatic Nucleic Acid
agguuucccugaugaggccguuaggccgaaaacuugca

SEQ ID NO: 12031 - RNA, 38 nt, Artificial Sequence
  Description of Artificial Sequence:  Enzymatic Nucleic Acid
uaaguugacugaugaggccguuaggccgaaagguuucc

SEQ ID NO: 12032 - RNA, 38 nt, Artificial Sequence
  Description of Artificial Sequence:  Enzymatic Nucleic Acid
aguaaguucugaugaggccguuaggccgaaauagguuu

SEQ ID NO: 12033 - RNA, 38 nt, Artificial Sequence
  Description of Artificial Sequence:  Enzymatic Nucleic Acid
ccguaagucugaugaggccguuaggccgaaaguugaua

SEQ ID NO: 12034 - RNA, 38 nt, Artificial Sequence
  Description of Artificial Sequence:  Enzymatic Nucleic Acid
cccguaagcugaugaggccguuaggccgaaaaguugau

SEQ ID NO: 12035 - RNA, 38 nt, Artificial Sequence
  Description of Artificial Sequence:  Enzymatic Nucleic Acid
ugccccgucugaugaggccguuaggccgaaaguaaguu

SEQ ID NO: 12036 - RNA, 38 nt, Artificial Sequence
  Description of Artificial Sequence:  Enzymatic Nucleic Acid
uugccccgcugaugaggccguuaggccgaaaaguaagu

SEQ ID NO: 12037 - RNA, 38 nt, Artificial Sequence
  Description of Artificial Sequence:  Enzymatic Nucleic Acid
agggaacacugaugaggccguuaggccgaaauucauuu

SEQ ID NO: 12038 - RNA, 38 nt, Artificial Sequence
  Description of Artificial Sequence:  Enzymatic Nucleic Acid
uagggaaccugaugaggccguuaggccgaaaauucauu

SEQ ID NO: 12039 - RNA, 38 nt, Artificial Sequence
  Description of Artificial Sequence:  Enzymatic Nucleic Acid
uuauagggcugaugaggccguuaggccgaaacaaauuc

SEQ ID NO: 12040 - RNA, 38 nt, Artificial Sequence
  Description of Artificial Sequence:  Enzymatic Nucleic Acid
cuuauaggcugaugaggccguuaggccgaaaacaaauu

SEQ ID NO: 12041 - RNA, 38 nt, Artificial Sequence
  Description of Artificial Sequence:  Enzymatic Nucleic Acid
ugcucuuacugaugaggccguuaggccgaaagggaaca

SEQ ID NO: 12042 - RNA, 38 nt, Artificial Sequence
  Description of Artificial Sequence:  Enzymatic Nucleic Acid
uuugcucucugaugaggccguuaggccgaaauagggaa

SEQ ID NO: 12043 - RNA, 38 nt, Artificial Sequence
  Description of Artificial Sequence:  Enzymatic Nucleic Acid
ccuggcggcugaugaggccguuaggccgaaagcgugcc

SEQ ID NO: 12044 - RNA, 38 nt, Artificial Sequence
  Description of Artificial Sequence:  Enzymatic Nucleic Acid
cccuggcgcugaugaggccguuaggccgaaaagcgugc

SEQ ID NO: 12045 - RNA, 38 nt, Artificial Sequence
  Description of Artificial Sequence:  Enzymatic Nucleic Acid
ccccaacgcugaugaggccguuaggccgaaaguccuug

SEQ ID NO: 12046 - RNA, 38 nt, Artificial Sequence
  Description of Artificial Sequence:  Enzymatic Nucleic Acid
agcucccccugaugaggccguuaggccgaaacguaguc

SEQ ID NO: 12047 - RNA, 38 nt, Artificial Sequence
  Description of Artificial Sequence:  Enzymatic Nucleic Acid
uccacggacugaugaggccguuaggccgaaagcucccc

SEQ ID NO: 12048 - RNA, 38 nt, Artificial Sequence
  Description of Artificial Sequence:  Enzymatic Nucleic Acid
gauccacgcugaugaggccguuaggccgaaagagcucc

SEQ ID NO: 12049 - RNA, 38 nt, Artificial Sequence
  Description of Artificial Sequence:  Enzymatic Nucleic Acid
ucuuuucacugaugaggccguuaggccgaaauccacgg

SEQ ID NO: 12050 - RNA, 38 nt, Artificial Sequence
  Description of Artificial Sequence:  Enzymatic Nucleic Acid
ugcugucccugaugaggccguuaggccgaaagcgucuu

SEQ ID NO: 12051 - RNA, 38 nt, Artificial Sequence
  Description of Artificial Sequence:  Enzymatic Nucleic Acid
cugcuggucugaugaggccguuaggccgaaaugcuguc

SEQ ID NO: 12052 - RNA, 38 nt, Artificial Sequence
  Description of Artificial Sequence:  Enzymatic Nucleic Acid
agcuggcacugaugaggccguuaggccgaaagcucugg

SEQ ID NO: 12053 - RNA, 38 nt, Artificial Sequence
  Description of Artificial Sequence:  Enzymatic Nucleic Acid
caaagccucugaugaggccguuaggccgaaagcuggca

SEQ ID NO: 12054 - RNA, 38 nt, Artificial Sequence
  Description of Artificial Sequence:  Enzymatic Nucleic Acid
ccucaacacugaugaggccguuaggccgaaagccugag

SEQ ID NO: 12055 - RNA, 38 nt, Artificial Sequence
  Description of Artificial Sequence:  Enzymatic Nucleic Acid
uccucaaccugaugaggccguuaggccgaaaagccuga

SEQ ID NO: 12056 - RNA, 38 nt, Artificial Sequence
  Description of Artificial Sequence:  Enzymatic Nucleic Acid
uucuccuccugaugaggccguuaggccgaaacaaagcc

SEQ ID NO: 12057 - RNA, 38 nt, Artificial Sequence
  Description of Artificial Sequence:  Enzymatic Nucleic Acid
cacugagccugaugaggccguuaggccgaaauuucucc

SEQ ID NO: 12058 - RNA, 38 nt, Artificial Sequence
  Description of Artificial Sequence:  Enzymatic Nucleic Acid
acaucacucugaugaggccguuaggccgaaagcgauuu

SEQ ID NO: 12059 - RNA, 38 nt, Artificial Sequence
  Description of Artificial Sequence:  Enzymatic Nucleic Acid
uucuucagcugaugaggccguuaggccgaaagcuucuu

SEQ ID NO: 12060 - RNA, 38 nt, Artificial Sequence
  Description of Artificial Sequence:  Enzymatic Nucleic Acid
guucuucacugaugaggccguuaggccgaaaagcuucu

SEQ ID NO: 12061 - RNA, 38 nt, Artificial Sequence
  Description of Artificial Sequence:  Enzymatic Nucleic Acid
aguccuugcugaugaggccguuaggccgaaacaguucu

SEQ ID NO: 12062 - RNA, 38 nt, Artificial Sequence
  Description of Artificial Sequence:  Enzymatic Nucleic Acid
aggucaggcugaugaggccguuaggccgaaaguccuug

SEQ ID NO: 12063 - RNA, 38 nt, Artificial Sequence
  Description of Artificial Sequence:  Enzymatic Nucleic Acid
uugaugcccugaugaggccguuaggccgaaagaacucc

SEQ ID NO: 12064 - RNA, 38 nt, Artificial Sequence
  Description of Artificial Sequence:  Enzymatic Nucleic Acid
acuuccuucugaugaggccguuaggccgaaaugccaag

SEQ ID NO: 12065 - RNA, 38 nt, Artificial Sequence
  Description of Artificial Sequence:  Enzymatic Nucleic Acid
ccuguggacugaugaggccguuaggccgaaacacuucc

SEQ ID NO: 12066 - RNA, 38 nt, Artificial Sequence
  Description of Artificial Sequence:  Enzymatic Nucleic Acid
gauaggagcugaugaggccguuaggccgaaauguuucg

SEQ ID NO: 12067 - RNA, 38 nt, Artificial Sequence
  Description of Artificial Sequence:  Enzymatic Nucleic Acid
cgauaggacugaugaggccguuaggccgaaaauguuuc

SEQ ID NO: 12068 - RNA, 38 nt, Artificial Sequence
  Description of Artificial Sequence:  Enzymatic Nucleic Acid
uccgauagcugaugaggccguuaggccgaaagaauguu

SEQ ID NO: 12069 - RNA, 38 nt, Artificial Sequence
  Description of Artificial Sequence:  Enzymatic Nucleic Acid
uucuccgacugaugaggccguuaggccgaaaggagaau

SEQ ID NO: 12070 - RNA, 38 nt, Artificial Sequence
  Description of Artificial Sequence:  Enzymatic Nucleic Acid
ucuucucccugaugaggccguuaggccgaaauaggaga

SEQ ID NO: 12071 - RNA, 38 nt, Artificial Sequence
  Description of Artificial Sequence:  Enzymatic Nucleic Acid
cagaucuucugaugaggccguuaggccgaaaccacauu

SEQ ID NO: 12072 - RNA, 38 nt, Artificial Sequence
  Description of Artificial Sequence:  Enzymatic Nucleic Acid
acagaucucugaugaggccguuaggccgaaaaccacau

SEQ ID NO: 12073 - RNA, 38 nt, Artificial Sequence
  Description of Artificial Sequence:  Enzymatic Nucleic Acid
aagucacacugaugaggccguuaggccgaaaucuuaac

SEQ ID NO: 12074 - RNA, 38 nt, Artificial Sequence
  Description of Artificial Sequence:  Enzymatic Nucleic Acid
ccaagccgcugaugaggccguuaggccgaaagucacag

SEQ ID NO: 12075 - RNA, 38 nt, Artificial Sequence
  Description of Artificial Sequence:  Enzymatic Nucleic Acid
cccgggcccugaugaggccguuaggccgaaagccgaag

SEQ ID NO: 12076 - RNA, 38 nt, Artificial Sequence
  Description of Artificial Sequence:  Enzymatic Nucleic Acid
ucuuuauacugaugaggccguuaggccgaaaugucccg

SEQ ID NO: 12077 - RNA, 38 nt, Artificial Sequence
  Description of Artificial Sequence:  Enzymatic Nucleic Acid
gucuuuaucugaugaggccguuaggccgaaaauguccc

SEQ ID NO: 12078 - RNA, 38 nt, Artificial Sequence
  Description of Artificial Sequence:  Enzymatic Nucleic Acid
ggucuuuacugaugaggccguuaggccgaaaaaugucc

SEQ ID NO: 12079 - RNA, 38 nt, Artificial Sequence
  Description of Artificial Sequence:  Enzymatic Nucleic Acid
cgggucuucugaugaggccguuaggccgaaauaaaugu

SEQ ID NO: 12080 - RNA, 38 nt, Artificial Sequence
  Description of Artificial Sequence:  Enzymatic Nucleic Acid
ucugacaucugaugaggccguuaggccgaaauccgggu

SEQ ID NO: 12081 - RNA, 38 nt, Artificial Sequence
  Description of Artificial Sequence:  Enzymatic Nucleic Acid
uucugacacugaugaggccguuaggccgaaaauccggg

SEQ ID NO: 12082 - RNA, 38 nt, Artificial Sequence
  Description of Artificial Sequence:  Enzymatic Nucleic Acid
uucaaaggcugaugaggccguuaggccgaaagucgggc

SEQ ID NO: 12083 - RNA, 38 nt, Artificial Sequence
  Description of Artificial Sequence:  Enzymatic Nucleic Acid
ccacuucacugaugaggccguuaggccgaaagggaguc

SEQ ID NO: 12084 - RNA, 38 nt, Artificial Sequence
  Description of Artificial Sequence:  Enzymatic Nucleic Acid
uccacuuccugaugaggccguuaggccgaaaagggagu

SEQ ID NO: 12085 - RNA, 38 nt, Artificial Sequence
  Description of Artificial Sequence:  Enzymatic Nucleic Acid
cugucaaacugaugaggccguuaggccgaaaugguuuc

SEQ ID NO: 12086 - RNA, 38 nt, Artificial Sequence
  Description of Artificial Sequence:  Enzymatic Nucleic Acid
ucugucaacugaugaggccguuaggccgaaaaugguuu

SEQ ID NO: 12087 - RNA, 38 nt, Artificial Sequence
  Description of Artificial Sequence:  Enzymatic Nucleic Acid
cucugucacugaugaggccguuaggccgaaaaaugguu

SEQ ID NO: 12088 - RNA, 38 nt, Artificial Sequence
  Description of Artificial Sequence:  Enzymatic Nucleic Acid
acucuguccugaugaggccguuaggccgaaaaaauggu

SEQ ID NO: 12089 - RNA, 38 nt, Artificial Sequence
  Description of Artificial Sequence:  Enzymatic Nucleic Acid
auuguguacugaugaggccguuaggccgaaacucuguc

SEQ ID NO: 12090 - RNA, 38 nt, Artificial Sequence
  Description of Artificial Sequence:  Enzymatic Nucleic Acid
gaauugugcugaugaggccguuaggccgaaauacucug

SEQ ID NO: 12091 - RNA, 38 nt, Artificial Sequence
  Description of Artificial Sequence:  Enzymatic Nucleic Acid
ucgcucugcugaugaggccguuaggccgaaauugugua

SEQ ID NO: 12092 - RNA, 38 nt, Artificial Sequence
  Description of Artificial Sequence:  Enzymatic Nucleic Acid
aucgcucucugaugaggccguuaggccgaaaauugugu

SEQ ID NO: 12093 - RNA, 38 nt, Artificial Sequence
  Description of Artificial Sequence:  Enzymatic Nucleic Acid
caccgaaacugaugaggccguuaggccgaaaccacaca

SEQ ID NO: 12094 - RNA, 38 nt, Artificial Sequence
  Description of Artificial Sequence:  Enzymatic Nucleic Acid
cacaccgacugaugaggccguuaggccgaaagaccaca

SEQ ID NO: 12095 - RNA, 38 nt, Artificial Sequence
  Description of Artificial Sequence:  Enzymatic Nucleic Acid
acacaccgcugaugaggccguuaggccgaaaagaccac

SEQ ID NO: 12096 - RNA, 38 nt, Artificial Sequence
  Description of Artificial Sequence:  Enzymatic Nucleic Acid
aacacacccugaugaggccguuaggccgaaaaagacca

SEQ ID NO: 12097 - RNA, 38 nt, Artificial Sequence
  Description of Artificial Sequence:  Enzymatic Nucleic Acid
cccagagccugaugaggccguuaggccgaaacacaccg

SEQ ID NO: 12098 - RNA, 38 nt, Artificial Sequence
  Description of Artificial Sequence:  Enzymatic Nucleic Acid
auuucccacugaugaggccguuaggccgaaagcaacac

SEQ ID NO: 12099 - RNA, 38 nt, Artificial Sequence
  Description of Artificial Sequence:  Enzymatic Nucleic Acid
aggcaccucugaugaggccguuaggccgaaaggaaaau

SEQ ID NO: 12100 - RNA, 38 nt, Artificial Sequence
  Description of Artificial Sequence:  Enzymatic Nucleic Acid
gaggcacccugaugaggccguuaggccgaaaaggaaaa

SEQ ID NO: 12101 - RNA, 38 nt, Artificial Sequence
  Description of Artificial Sequence:  Enzymatic Nucleic Acid
gguaugggcugaugaggccguuaggccgaaaggcaccu

SEQ ID NO: 12102 - RNA, 38 nt, Artificial Sequence
  Description of Artificial Sequence:  Enzymatic Nucleic Acid
ccccagggcugaugaggccguuaggccgaaauggggag

SEQ ID NO: 12103 - RNA, 38 nt, Artificial Sequence
  Description of Artificial Sequence:  Enzymatic Nucleic Acid
ucuucauccugaugaggccguuaggccgaaaucuugac

SEQ ID NO: 12104 - RNA, 38 nt, Artificial Sequence
  Description of Artificial Sequence:  Enzymatic Nucleic Acid
uccuacaacugaugaggccguuaggccgaaauucuuca

SEQ ID NO: 12105 - RNA, 38 nt, Artificial Sequence
  Description of Artificial Sequence:  Enzymatic Nucleic Acid
cuccuacacugaugaggccguuaggccgaaaauucuuc

SEQ ID NO: 12106 - RNA, 38 nt, Artificial Sequence
  Description of Artificial Sequence:  Enzymatic Nucleic Acid
ucuccuaccugaugaggccguuaggccgaaaaauucuu

SEQ ID NO: 12107 - RNA, 38 nt, Artificial Sequence
  Description of Artificial Sequence:  Enzymatic Nucleic Acid
caaucucccugaugaggccguuaggccgaaacaaaauu

SEQ ID NO: 12108 - RNA, 38 nt, Artificial Sequence
  Description of Artificial Sequence:  Enzymatic Nucleic Acid
cuucuuuccugaugaggccguuaggccgaaaucuccua

SEQ ID NO: 12109 - RNA, 38 nt, Artificial Sequence
  Description of Artificial Sequence:  Enzymatic Nucleic Acid
ccgcauuccugaugaggccguuaggccgaaaguuccuu

SEQ ID NO: 12110 - RNA, 38 nt, Artificial Sequence
  Description of Artificial Sequence:  Enzymatic Nucleic Acid
guagucagcugaugaggccguuaggccgaaagcccgca

SEQ ID NO: 12111 - RNA, 38 nt, Artificial Sequence
  Description of Artificial Sequence:  Enzymatic Nucleic Acid
ggguagugcugaugaggccguuaggccgaaagucagga

SEQ ID NO: 12112 - RNA, 38 nt, Artificial Sequence
  Description of Artificial Sequence:  Enzymatic Nucleic Acid
uucuggggcugaugaggccguuaggccgaaaguguagu

SEQ ID NO: 12113 - RNA, 38 nt, Artificial Sequence
  Description of Artificial Sequence:  Enzymatic Nucleic Acid
cugaaaaccugaugaggccguuaggccgaaagggucuc

SEQ ID NO: 12114 - RNA, 38 nt, Artificial Sequence
  Description of Artificial Sequence:  Enzymatic Nucleic Acid
acucugaacugaugaggccguuaggccgaaacgagggu

SEQ ID NO: 12115 - RNA, 38 nt, Artificial Sequence
  Description of Artificial Sequence:  Enzymatic Nucleic Acid
aacucugacugaugaggccguuaggccgaaaacgaggg

SEQ ID NO: 12116 - RNA, 38 nt, Artificial Sequence
  Description of Artificial Sequence:  Enzymatic Nucleic Acid
caacucugcugaugaggccguuaggccgaaaaacgagg

SEQ ID NO: 12117 - RNA, 38 nt, Artificial Sequence
  Description of Artificial Sequence:  Enzymatic Nucleic Acid
ccaacucucugaugaggccguuaggccgaaaaaacgag

SEQ ID NO: 12118 - RNA, 38 nt, Artificial Sequence
  Description of Artificial Sequence:  Enzymatic Nucleic Acid
gcuccacccugaugaggccguuaggccgaaacucugaa

SEQ ID NO: 12119 - RNA, 38 nt, Artificial Sequence
  Description of Artificial Sequence:  Enzymatic Nucleic Acid
guuucccacugaugaggccguuaggccgaaaugcucca

SEQ ID NO: 12120 - RNA, 38 nt, Artificial Sequence
  Description of Artificial Sequence:  Enzymatic Nucleic Acid
gguuuccccugaugaggccguuaggccgaaaaugcucc

SEQ ID NO: 12121 - RNA, 38 nt, Artificial Sequence
  Description of Artificial Sequence:  Enzymatic Nucleic Acid
gcuugcagcugaugaggccguuaggccgaaagguuucc

SEQ ID NO: 12122 - RNA, 38 nt, Artificial Sequence
  Description of Artificial Sequence:  Enzymatic Nucleic Acid
gaacaauacugaugaggccguuaggccgaaagucuuug

SEQ ID NO: 12123 - RNA, 38 nt, Artificial Sequence
  Description of Artificial Sequence:  Enzymatic Nucleic Acid
aagaacaacugaugaggccguuaggccgaaauagucuu

SEQ ID NO: 12124 - RNA, 38 nt, Artificial Sequence
  Description of Artificial Sequence:  Enzymatic Nucleic Acid
ggaagaaccugaugaggccguuaggccgaaauauaguc

SEQ ID NO: 12125 - RNA, 38 nt, Artificial Sequence
  Description of Artificial Sequence:  Enzymatic Nucleic Acid
auuggaagcugaugaggccguuaggccgaaacaauaua

SEQ ID NO: 12126 - RNA, 38 nt, Artificial Sequence
  Description of Artificial Sequence:  Enzymatic Nucleic Acid
cauuggaacugaugaggccguuaggccgaaaacaauau

SEQ ID NO: 12127 - RNA, 38 nt, Artificial Sequence
  Description of Artificial Sequence:  Enzymatic Nucleic Acid
gacauuggcugaugaggccguuaggccgaaagaacaau

SEQ ID NO: 12128 - RNA, 38 nt, Artificial Sequence
  Description of Artificial Sequence:  Enzymatic Nucleic Acid
ugacauugcugaugaggccguuaggccgaaaagaacaa

SEQ ID NO: 12129 - RNA, 38 nt, Artificial Sequence
  Description of Artificial Sequence:  Enzymatic Nucleic Acid
gugucucucugaugaggccguuaggccgaaacauugga

SEQ ID NO: 12130 - RNA, 38 nt, Artificial Sequence
  Description of Artificial Sequence:  Enzymatic Nucleic Acid
ggcagggacugaugaggccguuaggccgaaaguccaga

SEQ ID NO: 12131 - RNA, 38 nt, Artificial Sequence
  Description of Artificial Sequence:  Enzymatic Nucleic Acid
uaggcaggcugaugaggccguuaggccgaaagagucca

SEQ ID NO: 12132 - RNA, 38 nt, Artificial Sequence
  Description of Artificial Sequence:  Enzymatic Nucleic Acid
aggugaggcugaugaggccguuaggccgaaaggcaggg

SEQ ID NO: 12133 - RNA, 38 nt, Artificial Sequence
  Description of Artificial Sequence:  Enzymatic Nucleic Acid
uuccuccacugaugaggccguuaggccgaaacaggaaa

SEQ ID NO: 12134 - RNA, 38 nt, Artificial Sequence
  Description of Artificial Sequence:  Enzymatic Nucleic Acid
uaaugacucugaugaggccguuaggccgaaauuccugc

SEQ ID NO: 12135 - RNA, 38 nt, Artificial Sequence
  Description of Artificial Sequence:  Enzymatic Nucleic Acid
gagauaaucugaugaggccguuaggccgaaacugauuc

SEQ ID NO: 12136 - RNA, 38 nt, Artificial Sequence
  Description of Artificial Sequence:  Enzymatic Nucleic Acid
cuggagaucugaugaggccguuaggccgaaaugacuga

SEQ ID NO: 12137 - RNA, 38 nt, Artificial Sequence
  Description of Artificial Sequence:  Enzymatic Nucleic Acid
ucuggagacugaugaggccguuaggccgaaaaugacug

SEQ ID NO: 12138 - RNA, 38 nt, Artificial Sequence
  Description of Artificial Sequence:  Enzymatic Nucleic Acid
guucuggacugaugaggccguuaggccgaaauaaugac

SEQ ID NO: 12139 - RNA, 38 nt, Artificial Sequence
  Description of Artificial Sequence:  Enzymatic Nucleic Acid
cuguucugcugaugaggccguuaggccgaaagauaaug

SEQ ID NO: 12140 - RNA, 38 nt, Artificial Sequence
  Description of Artificial Sequence:  Enzymatic Nucleic Acid
caaugggacugaugaggccguuaggccgaaaucuucaa

SEQ ID NO: 12141 - RNA, 38 nt, Artificial Sequence
  Description of Artificial Sequence:  Enzymatic Nucleic Acid
uccaauggcugaugaggccguuaggccgaaauaucuuc

SEQ ID NO: 12142 - RNA, 38 nt, Artificial Sequence
  Description of Artificial Sequence:  Enzymatic Nucleic Acid
guuccucccugaugaggccguuaggccgaaaugggaua

SEQ ID NO: 12143 - RNA, 38 nt, Artificial Sequence
  Description of Artificial Sequence:  Enzymatic Nucleic Acid
aucacuuucugaugaggccguuaggccgaaacuucugg

SEQ ID NO: 12144 - RNA, 38 nt, Artificial Sequence
  Description of Artificial Sequence:  Enzymatic Nucleic Acid
ucaucuggcugaugaggccguuaggccgaaaucacuuu

SEQ ID NO: 12145 - RNA, 38 nt, Artificial Sequence
  Description of Artificial Sequence:  Enzymatic Nucleic Acid
gaugcaagcugaugaggccguuaggccgaaaccauccc

SEQ ID NO: 12146 - RNA, 38 nt, Artificial Sequence
  Description of Artificial Sequence:  Enzymatic Nucleic Acid
ucugaugccugaugaggccguuaggccgaaaggaccau

SEQ ID NO: 12147 - RNA, 38 nt, Artificial Sequence
  Description of Artificial Sequence:  Enzymatic Nucleic Acid
gcucuucucugaugaggccguuaggccgaaaugcaagg

SEQ ID NO: 12148 - RNA, 38 nt, Artificial Sequence
  Description of Artificial Sequence:  Enzymatic Nucleic Acid
auggagaucugaugaggccguuaggccgaaauuuguuc

SEQ ID NO: 12149 - RNA, 38 nt, Artificial Sequence
  Description of Artificial Sequence:  Enzymatic Nucleic Acid
gauggagacugaugaggccguuaggccgaaaauuuguu

SEQ ID NO: 12150 - RNA, 38 nt, Artificial Sequence
  Description of Artificial Sequence:  Enzymatic Nucleic Acid
ccugcuuucugaugaggccguuaggccgaaacugggca

SEQ ID NO: 12151 - RNA, 38 nt, Artificial Sequence
  Description of Artificial Sequence:  Enzymatic Nucleic Acid
aggccacacugaugaggccguuaggccgaaacucccug

SEQ ID NO: 12152 - RNA, 38 nt, Artificial Sequence
  Description of Artificial Sequence:  Enzymatic Nucleic Acid
agccuucccugaugaggccguuaggccgaaaggccaca

SEQ ID NO: 12153 - RNA, 38 nt, Artificial Sequence
  Description of Artificial Sequence:  Enzymatic Nucleic Acid
ucugguugcugaugaggccguuaggccgaaagccuucc

SEQ ID NO: 12154 - RNA, 38 nt, Artificial Sequence
  Description of Artificial Sequence:  Enzymatic Nucleic Acid
cagacuggcugaugaggccguuaggccgaaagccacug

SEQ ID NO: 12155 - RNA, 38 nt, Artificial Sequence
  Description of Artificial Sequence:  Enzymatic Nucleic Acid
gauacccacugaugaggccguuaggccgaaacugguag

SEQ ID NO: 12156 - RNA, 38 nt, Artificial Sequence
  Description of Artificial Sequence:  Enzymatic Nucleic Acid
cugagugacugaugaggccguuaggccgaaacccagac

SEQ ID NO: 12157 - RNA, 38 nt, Artificial Sequence
  Description of Artificial Sequence:  Enzymatic Nucleic Acid
aucugagucugaugaggccguuaggccgaaauacccag

SEQ ID NO: 12158 - RNA, 38 nt, Artificial Sequence
  Description of Artificial Sequence:  Enzymatic Nucleic Acid
ugucaucucugaugaggccguuaggccgaaagugauac

SEQ ID NO: 12159 - RNA, 38 nt, Artificial Sequence
  Description of Artificial Sequence:  Enzymatic Nucleic Acid
cgcuggagcugaugaggccguuaggccgaaacacggug

SEQ ID NO: 12160 - RNA, 38 nt, Artificial Sequence
  Description of Artificial Sequence:  Enzymatic Nucleic Acid
cgucgcugcugaugaggccguuaggccgaaaguacacg

SEQ ID NO: 12161 - RNA, 38 nt, Artificial Sequence
  Description of Artificial Sequence:  Enzymatic Nucleic Acid
aucuuuaacugaugaggccguuaggccgaaaguccugc

SEQ ID NO: 12162 - RNA, 38 nt, Artificial Sequence
  Description of Artificial Sequence:  Enzymatic Nucleic Acid
caucuuuacugaugaggccguuaggccgaaaaguccug

SEQ ID NO: 12163 - RNA, 38 nt, Artificial Sequence
  Description of Artificial Sequence:  Enzymatic Nucleic Acid
ccaucuuucugaugaggccguuaggccgaaaaaguccu

SEQ ID NO: 12164 - RNA, 38 nt, Artificial Sequence
  Description of Artificial Sequence:  Enzymatic Nucleic Acid
accaucuucugaugaggccguuaggccgaaaaaagucc

SEQ ID NO: 12165 - RNA, 38 nt, Artificial Sequence
  Description of Artificial Sequence:  Enzymatic Nucleic Acid
ucagcgugcugaugaggccguuaggccgaaacugcagc

SEQ ID NO: 12166 - RNA, 38 nt, Artificial Sequence
  Description of Artificial Sequence:  Enzymatic Nucleic Acid
gucagcgucugaugaggccguuaggccgaaaacugcag

SEQ ID NO: 12167 - RNA, 38 nt, Artificial Sequence
  Description of Artificial Sequence:  Enzymatic Nucleic Acid
uggucccucugaugaggccguuaggccgaaagucagcg

SEQ ID NO: 12168 - RNA, 38 nt, Artificial Sequence
  Description of Artificial Sequence:  Enzymatic Nucleic Acid
caggaggucugaugaggccguuaggccgaaagcugcag

SEQ ID NO: 12169 - RNA, 38 nt, Artificial Sequence
  Description of Artificial Sequence:  Enzymatic Nucleic Acid
uuaaacagcugaugaggccguuaggccgaaaggugagc

SEQ ID NO: 12170 - RNA, 38 nt, Artificial Sequence
  Description of Artificial Sequence:  Enzymatic Nucleic Acid
uccauuuacugaugaggccguuaggccgaaacaggagg

SEQ ID NO: 12171 - RNA, 38 nt, Artificial Sequence
  Description of Artificial Sequence:  Enzymatic Nucleic Acid
uuccauuucugaugaggccguuaggccgaaaacaggag

SEQ ID NO: 12172 - RNA, 38 nt, Artificial Sequence
  Description of Artificial Sequence:  Enzymatic Nucleic Acid
cuuccauucugaugaggccguuaggccgaaaaacagga

SEQ ID NO: 12173 - RNA, 38 nt, Artificial Sequence
  Description of Artificial Sequence:  Enzymatic Nucleic Acid
cgggacagcugaugaggccguuaggccgaaaccacuuc

SEQ ID NO: 12174 - RNA, 38 nt, Artificial Sequence
  Description of Artificial Sequence:  Enzymatic Nucleic Acid
ggagccggcugaugaggccguuaggccgaaacaggacc

SEQ ID NO: 12175 - RNA, 38 nt, Artificial Sequence
  Description of Artificial Sequence:  Enzymatic Nucleic Acid
ugggggcgcugaugaggccguuaggccgaaagccggga

SEQ ID NO: 12176 - RNA, 38 nt, Artificial Sequence
  Description of Artificial Sequence:  Enzymatic Nucleic Acid
auuuccagcugaugaggccguuaggccgaaaguugggg

SEQ ID NO: 12177 - RNA, 38 nt, Artificial Sequence
  Description of Artificial Sequence:  Enzymatic Nucleic Acid
ucucucgucugaugaggccguuaggccgaaauuuccag

SEQ ID NO: 12178 - RNA, 38 nt, Artificial Sequence
  Description of Artificial Sequence:  Enzymatic Nucleic Acid
gaaaaucucugaugaggccguuaggccgaaagcagcac

SEQ ID NO: 12179 - RNA, 38 nt, Artificial Sequence
  Description of Artificial Sequence:  Enzymatic Nucleic Acid
ugaaaauccugaugaggccguuaggccgaaaagcagca

SEQ ID NO: 12180 - RNA, 38 nt, Artificial Sequence
  Description of Artificial Sequence:  Enzymatic Nucleic Acid
cacuugaacugaugaggccguuaggccgaaaucuaagc

SEQ ID NO: 12181 - RNA, 38 nt, Artificial Sequence
  Description of Artificial Sequence:  Enzymatic Nucleic Acid
acacuugacugaugaggccguuaggccgaaaaucuaag

SEQ ID NO: 12182 - RNA, 38 nt, Artificial Sequence
  Description of Artificial Sequence:  Enzymatic Nucleic Acid
aacacuugcugaugaggccguuaggccgaaaaaucuaa

SEQ ID NO: 12183 - RNA, 38 nt, Artificial Sequence
  Description of Artificial Sequence:  Enzymatic Nucleic Acid
caacacuucugaugaggccguuaggccgaaaaaaucua

SEQ ID NO: 12184 - RNA, 38 nt, Artificial Sequence
  Description of Artificial Sequence:  Enzymatic Nucleic Acid
gaaagaaccugaugaggccguuaggccgaaacacuuga

SEQ ID NO: 12185 - RNA, 38 nt, Artificial Sequence
  Description of Artificial Sequence:  Enzymatic Nucleic Acid
gugguggacugaugaggccguuaggccgaaagaacaac

SEQ ID NO: 12186 - RNA, 38 nt, Artificial Sequence
  Description of Artificial Sequence:  Enzymatic Nucleic Acid
ggugguggcugaugaggccguuaggccgaaaagaacaa

SEQ ID NO: 12187 - RNA, 38 nt, Artificial Sequence
  Description of Artificial Sequence:  Enzymatic Nucleic Acid
ggguggugcugaugaggccguuaggccgaaaaagaaca

SEQ ID NO: 12188 - RNA, 38 nt, Artificial Sequence
  Description of Artificial Sequence:  Enzymatic Nucleic Acid
aauguggccugaugaggccguuaggccgaaacuuccgg

SEQ ID NO: 12189 - RNA, 38 nt, Artificial Sequence
  Description of Artificial Sequence:  Enzymatic Nucleic Acid
gaaaaucacugaugaggccguuaggccgaaauguggcu

SEQ ID NO: 12190 - RNA, 38 nt, Artificial Sequence
  Description of Artificial Sequence:  Enzymatic Nucleic Acid
ugaaaauccugaugaggccguuaggccgaaaauguggc

SEQ ID NO: 12191 - RNA, 38 nt, Artificial Sequence
  Description of Artificial Sequence:  Enzymatic Nucleic Acid
aaaaugaacugaugaggccguuaggccgaaaucaaaug

SEQ ID NO: 12192 - RNA, 38 nt, Artificial Sequence
  Description of Artificial Sequence:  Enzymatic Nucleic Acid
aaaaaugacugaugaggccguuaggccgaaaaucaaau

SEQ ID NO: 12193 - RNA, 38 nt, Artificial Sequence
  Description of Artificial Sequence:  Enzymatic Nucleic Acid
caaaaaugcugaugaggccguuaggccgaaaaaucaaa

SEQ ID NO: 12194 - RNA, 38 nt, Artificial Sequence
  Description of Artificial Sequence:  Enzymatic Nucleic Acid
ccaaaaaucugaugaggccguuaggccgaaaaaaucaa

SEQ ID NO: 12195 - RNA, 38 nt, Artificial Sequence
  Description of Artificial Sequence:  Enzymatic Nucleic Acid
ccuccaaacugaugaggccguuaggccgaaaugaaaau

SEQ ID NO: 12196 - RNA, 38 nt, Artificial Sequence
  Description of Artificial Sequence:  Enzymatic Nucleic Acid
uccuccaacugaugaggccguuaggccgaaaaugaaaa

SEQ ID NO: 12197 - RNA, 38 nt, Artificial Sequence
  Description of Artificial Sequence:  Enzymatic Nucleic Acid
cuccuccacugaugaggccguuaggccgaaaaaugaaa

SEQ ID NO: 12198 - RNA, 38 nt, Artificial Sequence
  Description of Artificial Sequence:  Enzymatic Nucleic Acid
ccuccucccugaugaggccguuaggccgaaaaaaugaa

SEQ ID NO: 12199 - RNA, 38 nt, Artificial Sequence
  Description of Artificial Sequence:  Enzymatic Nucleic Acid
ugcagucucugaugaggccguuaggccgaaaggucccu

SEQ ID NO: 12200 - RNA, 38 nt, Artificial Sequence
  Description of Artificial Sequence:  Enzymatic Nucleic Acid
cugaggaccugaugaggccguuaggccgaaagcuccuu

SEQ ID NO: 12201 - RNA, 38 nt, Artificial Sequence
  Description of Artificial Sequence:  Enzymatic Nucleic Acid
gcccugagcugaugaggccguuaggccgaaacaagcuc

SEQ ID NO: 12202 - RNA, 38 nt, Artificial Sequence
  Description of Artificial Sequence:  Enzymatic Nucleic Acid
aaugcccucugaugaggccguuaggccgaaaggacaag

SEQ ID NO: 12203 - RNA, 38 nt, Artificial Sequence
  Description of Artificial Sequence:  Enzymatic Nucleic Acid
ucucuggacugaugaggccguuaggccgaaaugcccug

SEQ ID NO: 12204 - RNA, 38 nt, Artificial Sequence
  Description of Artificial Sequence:  Enzymatic Nucleic Acid
uucucuggcugaugaggccguuaggccgaaaaugcccu

SEQ ID NO: 12205 - RNA, 38 nt, Artificial Sequence
  Description of Artificial Sequence:  Enzymatic Nucleic Acid
cuucucugcugaugaggccguuaggccgaaaaaugccc

SEQ ID NO: 12206 - RNA, 38 nt, Artificial Sequence
  Description of Artificial Sequence:  Enzymatic Nucleic Acid
guagaguccugaugaggccguuaggccgaaacacauuc

SEQ ID NO: 12207 - RNA, 38 nt, Artificial Sequence
  Description of Artificial Sequence:  Enzymatic Nucleic Acid
agagaguacugaugaggccguuaggccgaaagucaaca

SEQ ID NO: 12208 - RNA, 38 nt, Artificial Sequence
  Description of Artificial Sequence:  Enzymatic Nucleic Acid
aaagagagcugaugaggccguuaggccgaaagagucaa

SEQ ID NO: 12209 - RNA, 38 nt, Artificial Sequence
  Description of Artificial Sequence:  Enzymatic Nucleic Acid
ggaaaagacugaugaggccguuaggccgaaaguagagu

SEQ ID NO: 12210 - RNA, 38 nt, Artificial Sequence
  Description of Artificial Sequence:  Enzymatic Nucleic Acid
auggaaaacugaugaggccguuaggccgaaagaguaga

SEQ ID NO: 12211 - RNA, 38 nt, Artificial Sequence
  Description of Artificial Sequence:  Enzymatic Nucleic Acid
gaauggaacugaugaggccguuaggccgaaagagagua

SEQ ID NO: 12212 - RNA, 38 nt, Artificial Sequence
  Description of Artificial Sequence:  Enzymatic Nucleic Acid
ugaauggacugaugaggccguuaggccgaaaagagagu

SEQ ID NO: 12213 - RNA, 38 nt, Artificial Sequence
  Description of Artificial Sequence:  Enzymatic Nucleic Acid
augaauggcugaugaggccguuaggccgaaaaagagag

SEQ ID NO: 12214 - RNA, 38 nt, Artificial Sequence
  Description of Artificial Sequence:  Enzymatic Nucleic Acid
aaugaaugcugaugaggccguuaggccgaaaaaagaga

SEQ ID NO: 12215 - RNA, 38 nt, Artificial Sequence
  Description of Artificial Sequence:  Enzymatic Nucleic Acid
uuuaaaugcugaugaggccguuaggccgaaauggaaaa

SEQ ID NO: 12216 - RNA, 38 nt, Artificial Sequence
  Description of Artificial Sequence:  Enzymatic Nucleic Acid
uuuuaaaucugaugaggccguuaggccgaaaauggaaa

SEQ ID NO: 12217 - RNA, 38 nt, Artificial Sequence
  Description of Artificial Sequence:  Enzymatic Nucleic Acid
gacuuuuacugaugaggccguuaggccgaaaugaaugg

SEQ ID NO: 12218 - RNA, 38 nt, Artificial Sequence
  Description of Artificial Sequence:  Enzymatic Nucleic Acid
ggacuuuucugaugaggccguuaggccgaaaaugaaug

SEQ ID NO: 12219 - RNA, 38 nt, Artificial Sequence
  Description of Artificial Sequence:  Enzymatic Nucleic Acid
aggacuuucugaugaggccguuaggccgaaaaaugaau

SEQ ID NO: 12220 - RNA, 38 nt, Artificial Sequence
  Description of Artificial Sequence:  Enzymatic Nucleic Acid
uuauauagcugaugaggccguuaggccgaaacuuuuaa

SEQ ID NO: 12221 - RNA, 38 nt, Artificial Sequence
  Description of Artificial Sequence:  Enzymatic Nucleic Acid
acauuauacugaugaggccguuaggccgaaaggacuuu

SEQ ID NO: 12222 - RNA, 38 nt, Artificial Sequence
  Description of Artificial Sequence:  Enzymatic Nucleic Acid
gcacauuacugaugaggccguuaggccgaaauaggacu

SEQ ID NO: 12223 - RNA, 38 nt, Artificial Sequence
  Description of Artificial Sequence:  Enzymatic Nucleic Acid
gggcacaucugaugaggccguuaggccgaaauauagga

SEQ ID NO: 12224 - RNA, 38 nt, Artificial Sequence
  Description of Artificial Sequence:  Enzymatic Nucleic Acid
gguagugacugaugaggccguuaggccgaaaccacagc

SEQ ID NO: 12225 - RNA, 38 nt, Artificial Sequence
  Description of Artificial Sequence:  Enzymatic Nucleic Acid
cugguagucugaugaggccguuaggccgaaagaccaca

SEQ ID NO: 12226 - RNA, 38 nt, Artificial Sequence
  Description of Artificial Sequence:  Enzymatic Nucleic Acid
uuaacuggcugaugaggccguuaggccgaaagugagac

SEQ ID NO: 12227 - RNA, 38 nt, Artificial Sequence
  Description of Artificial Sequence:  Enzymatic Nucleic Acid
uuugcuuucugaugaggccguuaggccgaaacugguag

SEQ ID NO: 12228 - RNA, 38 nt, Artificial Sequence
  Description of Artificial Sequence:  Enzymatic Nucleic Acid
uuuugcuucugaugaggccguuaggccgaaaacuggua

SEQ ID NO: 12229 - RNA, 38 nt, Artificial Sequence
  Description of Artificial Sequence:  Enzymatic Nucleic Acid
guguuugacugaugaggccguuaggccgaaagucuuuu

SEQ ID NO: 12230 - RNA, 38 nt, Artificial Sequence
  Description of Artificial Sequence:  Enzymatic Nucleic Acid
cguguuugcugaugaggccguuaggccgaaaagucuuu

SEQ ID NO: 12231 - RNA, 38 nt, Artificial Sequence
  Description of Artificial Sequence:  Enzymatic Nucleic Acid
acguguuucugaugaggccguuaggccgaaaaagucuu

SEQ ID NO: 12232 - RNA, 38 nt, Artificial Sequence
  Description of Artificial Sequence:  Enzymatic Nucleic Acid
ggaggacacugaugaggccguuaggccgaaaguccacg

SEQ ID NO: 12233 - RNA, 38 nt, Artificial Sequence
  Description of Artificial Sequence:  Enzymatic Nucleic Acid
ucuuggagcugaugaggccguuaggccgaaacagaguc

SEQ ID NO: 12234 - RNA, 38 nt, Artificial Sequence
  Description of Artificial Sequence:  Enzymatic Nucleic Acid
acuucuugcugaugaggccguuaggccgaaaggacaga

SEQ ID NO: 12235 - RNA, 38 nt, Artificial Sequence
  Description of Artificial Sequence:  Enzymatic Nucleic Acid
guuucacacugaugaggccguuaggccgaaaggugccg

SEQ ID NO: 12236 - RNA, 38 nt, Artificial Sequence
  Description of Artificial Sequence:  Enzymatic Nucleic Acid
gcccauuccugaugaggccguuaggccgaaauccaguu

SEQ ID NO: 12237 - RNA, 38 nt, Artificial Sequence
  Description of Artificial Sequence:  Enzymatic Nucleic Acid
aacacacacugaugaggccguuaggccgaaagcauugc

SEQ ID NO: 12238 - RNA, 38 nt, Artificial Sequence
  Description of Artificial Sequence:  Enzymatic Nucleic Acid
caacacaccugaugaggccguuaggccgaaaagcauug

SEQ ID NO: 12239 - RNA, 38 nt, Artificial Sequence
  Description of Artificial Sequence:  Enzymatic Nucleic Acid
ccauccuccugaugaggccguuaggccgaaacacacaa

SEQ ID NO: 12240 - RNA, 38 nt, Artificial Sequence
  Description of Artificial Sequence:  Enzymatic Nucleic Acid
ggcccuggcugaugaggccguuaggccgaaacaucuca

SEQ ID NO: 12241 - RNA, 38 nt, Artificial Sequence
  Description of Artificial Sequence:  Enzymatic Nucleic Acid
gguagacacugaugaggccguuaggccgaaacucggcc

SEQ ID NO: 12242 - RNA, 38 nt, Artificial Sequence
  Description of Artificial Sequence:  Enzymatic Nucleic Acid
ccaagguacugaugaggccguuaggccgaaacagacuc

SEQ ID NO: 12243 - RNA, 38 nt, Artificial Sequence
  Description of Artificial Sequence:  Enzymatic Nucleic Acid
cuccaaggcugaugaggccguuaggccgaaagacagac

SEQ ID NO: 12244 - RNA, 38 nt, Artificial Sequence
  Description of Artificial Sequence:  Enzymatic Nucleic Acid
aagccucccugaugaggccguuaggccgaaagguagac

SEQ ID NO: 12245 - RNA, 38 nt, Artificial Sequence
  Description of Artificial Sequence:  Enzymatic Nucleic Acid
ccuccacacugaugaggccguuaggccgaaagccucca

SEQ ID NO: 12246 - RNA, 38 nt, Artificial Sequence
  Description of Artificial Sequence:  Enzymatic Nucleic Acid
uccuccaccugaugaggccguuaggccgaaaagccucc

SEQ ID NO: 12247 - RNA, 38 nt, Artificial Sequence
  Description of Artificial Sequence:  Enzymatic Nucleic Acid
uuggcucacugaugaggccguuaggccgaaagcccgca

SEQ ID NO: 12248 - RNA, 38 nt, Artificial Sequence
  Description of Artificial Sequence:  Enzymatic Nucleic Acid
ccacacuucugaugaggccguuaggccgaaacacuugg

SEQ ID NO: 12249 - RNA, 38 nt, Artificial Sequence
  Description of Artificial Sequence:  Enzymatic Nucleic Acid
cccacacucugaugaggccguuaggccgaaaacacuug

SEQ ID NO: 12250 - RNA, 38 nt, Artificial Sequence
  Description of Artificial Sequence:  Enzymatic Nucleic Acid
cuccgagccugaugaggccguuaggccgaaacuugcgc

SEQ ID NO: 12251 - RNA, 38 nt, Artificial Sequence
  Description of Artificial Sequence:  Enzymatic Nucleic Acid
cgcucucccugaugaggccguuaggccgaaagcgacuu

SEQ ID NO: 12252 - RNA, 38 nt, Artificial Sequence
  Description of Artificial Sequence:  Enzymatic Nucleic Acid
caggcucccugaugaggccguuaggccgaaaccgcucu

SEQ ID NO: 12253 - RNA, 38 nt, Artificial Sequence
  Description of Artificial Sequence:  Enzymatic Nucleic Acid
gccagcaccugaugaggccguuaggccgaaaugcaucu

SEQ ID NO: 12254 - RNA, 38 nt, Artificial Sequence
  Description of Artificial Sequence:  Enzymatic Nucleic Acid
cuccaccacugaugaggccguuaggccgaaagccagca

SEQ ID NO: 12255 - RNA, 38 nt, Artificial Sequence
  Description of Artificial Sequence:  Enzymatic Nucleic Acid
caggccaccugaugaggccguuaggccgaaagcccacc

SEQ ID NO: 12256 - RNA, 38 nt, Artificial Sequence
  Description of Artificial Sequence:  Enzymatic Nucleic Acid
cguuuccucugaugaggccguuaggccgaaacaggcca

SEQ ID NO: 12257 - RNA, 38 nt, Artificial Sequence
  Description of Artificial Sequence:  Enzymatic Nucleic Acid
caaaaccacugaugaggccguuaggccgaaacccugcc

SEQ ID NO: 12258 - RNA, 38 nt, Artificial Sequence
  Description of Artificial Sequence:  Enzymatic Nucleic Acid
ccaaaacccugaugaggccguuaggccgaaaacccugc

SEQ ID NO: 12259 - RNA, 38 nt, Artificial Sequence
  Description of Artificial Sequence:  Enzymatic Nucleic Acid
ccuuccaacugaugaggccguuaggccgaaaccaaacc

SEQ ID NO: 12260 - RNA, 38 nt, Artificial Sequence
  Description of Artificial Sequence:  Enzymatic Nucleic Acid
accuuccacugaugaggccguuaggccgaaaaccaaac

SEQ ID NO: 12261 - RNA, 38 nt, Artificial Sequence
  Description of Artificial Sequence:  Enzymatic Nucleic Acid
aaccuucccugaugaggccguuaggccgaaaaaccaaa

SEQ ID NO: 12262 - RNA, 38 nt, Artificial Sequence
  Description of Artificial Sequence:  Enzymatic Nucleic Acid
agcacgcacugaugaggccguuaggccgaaaccuucca

SEQ ID NO: 12263 - RNA, 38 nt, Artificial Sequence
  Description of Artificial Sequence:  Enzymatic Nucleic Acid
gagcacgccugaugaggccguuaggccgaaaaccuucc

SEQ ID NO: 12264 - RNA, 38 nt, Artificial Sequence
  Description of Artificial Sequence:  Enzymatic Nucleic Acid
acugugaacugaugaggccguuaggccgaaagcacgca

SEQ ID NO: 12265 - RNA, 38 nt, Artificial Sequence
  Description of Artificial Sequence:  Enzymatic Nucleic Acid
cgacugugcugaugaggccguuaggccgaaagagcacg

SEQ ID NO: 12266 - RNA, 38 nt, Artificial Sequence
  Description of Artificial Sequence:  Enzymatic Nucleic Acid
ccgacugucugaugaggccguuaggccgaaaagagcac

SEQ ID NO: 12267 - RNA, 38 nt, Artificial Sequence
  Description of Artificial Sequence:  Enzymatic Nucleic Acid
uguaaccccugaugaggccguuaggccgaaacugugaa

SEQ ID NO: 12268 - RNA, 38 nt, Artificial Sequence
  Description of Artificial Sequence:  Enzymatic Nucleic Acid
ucgccugucugaugaggccguuaggccgaaacccgacu

SEQ ID NO: 12269 - RNA, 38 nt, Artificial Sequence
  Description of Artificial Sequence:  Enzymatic Nucleic Acid
cucgccugcugaugaggccguuaggccgaaaacccgac

SEQ ID NO: 12270 - RNA, 38 nt, Artificial Sequence
  Description of Artificial Sequence:  Enzymatic Nucleic Acid
ccacagggcugaugaggccguuaggccgaaacucgccu

SEQ ID NO: 12271 - RNA, 38 nt, Artificial Sequence
  Description of Artificial Sequence:  Enzymatic Nucleic Acid
gccacaggcugaugaggccguuaggccgaaaacucgcc

SEQ ID NO: 12272 - RNA, 38 nt, Artificial Sequence
  Description of Artificial Sequence:  Enzymatic Nucleic Acid
gaguaggacugaugaggccguuaggccgaaacgccaca

SEQ ID NO: 12273 - RNA, 38 nt, Artificial Sequence
  Description of Artificial Sequence:  Enzymatic Nucleic Acid
ggaguaggcugaugaggccguuaggccgaaaacgccac

SEQ ID NO: 12274 - RNA, 38 nt, Artificial Sequence
  Description of Artificial Sequence:  Enzymatic Nucleic Acid
aggaguagcugaugaggccguuaggccgaaaaacgcca

SEQ ID NO: 12275 - RNA, 38 nt, Artificial Sequence
  Description of Artificial Sequence:  Enzymatic Nucleic Acid
auuaggagcugaugaggccguuaggccgaaaggaaacg

SEQ ID NO: 12276 - RNA, 38 nt, Artificial Sequence
  Description of Artificial Sequence:  Enzymatic Nucleic Acid
cucauuagcugaugaggccguuaggccgaaaguaggaa

SEQ ID NO: 12277 - RNA, 38 nt, Artificial Sequence
  Description of Artificial Sequence:  Enzymatic Nucleic Acid
acucucaucugaugaggccguuaggccgaaaggaguag

SEQ ID NO: 12278 - RNA, 38 nt, Artificial Sequence
  Description of Artificial Sequence:  Enzymatic Nucleic Acid
ccggaaggcugaugaggccguuaggccgaaacucucau

SEQ ID NO: 12279 - RNA, 38 nt, Artificial Sequence
  Description of Artificial Sequence:  Enzymatic Nucleic Acid
uccggaagcugaugaggccguuaggccgaaaacucuca

SEQ ID NO: 12280 - RNA, 38 nt, Artificial Sequence
  Description of Artificial Sequence:  Enzymatic Nucleic Acid
gaguccggcugaugaggccguuaggccgaaaggaacuc

SEQ ID NO: 12281 - RNA, 38 nt, Artificial Sequence
  Description of Artificial Sequence:  Enzymatic Nucleic Acid
agaguccgcugaugaggccguuaggccgaaaaggaacu

SEQ ID NO: 12282 - RNA, 38 nt, Artificial Sequence
  Description of Artificial Sequence:  Enzymatic Nucleic Acid
acacguaacugaugaggccguuaggccgaaaguccgga

SEQ ID NO: 12283 - RNA, 38 nt, Artificial Sequence
  Description of Artificial Sequence:  Enzymatic Nucleic Acid
agacacgucugaugaggccguuaggccgaaagaguccg

SEQ ID NO: 12284 - RNA, 38 nt, Artificial Sequence
  Description of Artificial Sequence:  Enzymatic Nucleic Acid
gagacacgcugaugaggccguuaggccgaaaagagucc

SEQ ID NO: 12285 - RNA, 38 nt, Artificial Sequence
  Description of Artificial Sequence:  Enzymatic Nucleic Acid
ggccaggacugaugaggccguuaggccgaaacacguaa

SEQ ID NO: 12286 - RNA, 38 nt, Artificial Sequence
  Description of Artificial Sequence:  Enzymatic Nucleic Acid
caggccagcugaugaggccguuaggccgaaagacacgu

SEQ ID NO: 12287 - RNA, 38 nt, Artificial Sequence
  Description of Artificial Sequence:  Enzymatic Nucleic Acid
gaaggagccugaugaggccguuaggccgaaagcugcau

SEQ ID NO: 12288 - RNA, 38 nt, Artificial Sequence
  Description of Artificial Sequence:  Enzymatic Nucleic Acid
ugaggaagcugaugaggccguuaggccgaaagcaagcu

SEQ ID NO: 12289 - RNA, 38 nt, Artificial Sequence
  Description of Artificial Sequence:  Enzymatic Nucleic Acid
agaugaggcugaugaggccguuaggccgaaaggagcaa

SEQ ID NO: 12290 - RNA, 38 nt, Artificial Sequence
  Description of Artificial Sequence:  Enzymatic Nucleic Acid
gagaugagcugaugaggccguuaggccgaaaaggagca

SEQ ID NO: 12291 - RNA, 38 nt, Artificial Sequence
  Description of Artificial Sequence:  Enzymatic Nucleic Acid
ugagagaucugaugaggccguuaggccgaaaggaagga

SEQ ID NO: 12292 - RNA, 38 nt, Artificial Sequence
  Description of Artificial Sequence:  Enzymatic Nucleic Acid
gccugagacugaugaggccguuaggccgaaaugaggaa

SEQ ID NO: 12293 - RNA, 38 nt, Artificial Sequence
  Description of Artificial Sequence:  Enzymatic Nucleic Acid
cagccugacugaugaggccguuaggccgaaagaugagg

SEQ ID NO: 12294 - RNA, 38 nt, Artificial Sequence
  Description of Artificial Sequence:  Enzymatic Nucleic Acid
cacagccucugaugaggccguuaggccgaaagagauga

SEQ ID NO: 12295 - RNA, 38 nt, Artificial Sequence
  Description of Artificial Sequence:  Enzymatic Nucleic Acid
ucugaauucugaugaggccguuaggccgaaaggcacag

SEQ ID NO: 12296 - RNA, 38 nt, Artificial Sequence
  Description of Artificial Sequence:  Enzymatic Nucleic Acid
uucugaaucugaugaggccguuaggccgaaaaggcaca

SEQ ID NO: 12297 - RNA, 38 nt, Artificial Sequence
  Description of Artificial Sequence:  Enzymatic Nucleic Acid
guguucugcugaugaggccguuaggccgaaauuaaggc

SEQ ID NO: 12298 - RNA, 38 nt, Artificial Sequence
  Description of Artificial Sequence:  Enzymatic Nucleic Acid
gguguucucugaugaggccguuaggccgaaaauuaagg

SEQ ID NO: 12299 - RNA, 38 nt, Artificial Sequence
  Description of Artificial Sequence:  Enzymatic Nucleic Acid
ccucugcccugaugaggccguuaggccgaaacguuccu

SEQ ID NO: 12300 - RNA, 38 nt, Artificial Sequence
  Description of Artificial Sequence:  Enzymatic Nucleic Acid
cccgucagcugaugaggccguuaggccgaaagccucug

SEQ ID NO: 12301 - RNA, 38 nt, Artificial Sequence
  Description of Artificial Sequence:  Enzymatic Nucleic Acid
guucucaccugaugaggccguuaggccgaaauucuucg

SEQ ID NO: 12302 - RNA, 38 nt, Artificial Sequence
  Description of Artificial Sequence:  Enzymatic Nucleic Acid
gaaacccucugaugaggccguuaggccgaaaguuucug

SEQ ID NO: 12303 - RNA, 38 nt, Artificial Sequence
  Description of Artificial Sequence:  Enzymatic Nucleic Acid
ccagcagacugaugaggccguuaggccgaaacccugag

SEQ ID NO: 12304 - RNA, 38 nt, Artificial Sequence
  Description of Artificial Sequence:  Enzymatic Nucleic Acid
cccagcagcugaugaggccguuaggccgaaaacccuga

SEQ ID NO: 12305 - RNA, 38 nt, Artificial Sequence
  Description of Artificial Sequence:  Enzymatic Nucleic Acid
acccagcacugaugaggccguuaggccgaaaaacccug

SEQ ID NO: 12306 - RNA, 38 nt, Artificial Sequence
  Description of Artificial Sequence:  Enzymatic Nucleic Acid
aacccucacugaugaggccguuaggccgaaaccugcca

SEQ ID NO: 12307 - RNA, 38 nt, Artificial Sequence
  Description of Artificial Sequence:  Enzymatic Nucleic Acid
ugacagagcugaugaggccguuaggccgaaacccucag

SEQ ID NO: 12308 - RNA, 38 nt, Artificial Sequence
  Description of Artificial Sequence:  Enzymatic Nucleic Acid
uugacagacugaugaggccguuaggccgaaaacccuca

SEQ ID NO: 12309 - RNA, 38 nt, Artificial Sequence
  Description of Artificial Sequence:  Enzymatic Nucleic Acid
acuugacacugaugaggccguuaggccgaaagaacccu

SEQ ID NO: 12310 - RNA, 38 nt, Artificial Sequence
  Description of Artificial Sequence:  Enzymatic Nucleic Acid
cgccacuucugaugaggccguuaggccgaaacagagaa

SEQ ID NO: 12311 - RNA, 38 nt, Artificial Sequence
  Description of Artificial Sequence:  Enzymatic Nucleic Acid
ugagccuucugaugaggccguuaggccgaaaccgccac

SEQ ID NO: 12312 - RNA, 38 nt, Artificial Sequence
  Description of Artificial Sequence:  Enzymatic Nucleic Acid
accagccucugaugaggccguuaggccgaaagccuuua

SEQ ID NO: 12313 - RNA, 38 nt, Artificial Sequence
  Description of Artificial Sequence:  Enzymatic Nucleic Acid
agaggaagcugaugaggccguuaggccgaaacaccagc

SEQ ID NO: 12314 - RNA, 38 nt, Artificial Sequence
  Description of Artificial Sequence:  Enzymatic Nucleic Acid
uagaggaacugaugaggccguuaggccgaaaacaccag

SEQ ID NO: 12315 - RNA, 38 nt, Artificial Sequence
  Description of Artificial Sequence:  Enzymatic Nucleic Acid
gauagaggcugaugaggccguuaggccgaaagaacacc

SEQ ID NO: 12316 - RNA, 38 nt, Artificial Sequence
  Description of Artificial Sequence:  Enzymatic Nucleic Acid
agauagagcugaugaggccguuaggccgaaaagaacac

SEQ ID NO: 12317 - RNA, 38 nt, Artificial Sequence
  Description of Artificial Sequence:  Enzymatic Nucleic Acid
uggagauacugaugaggccguuaggccgaaaggaagaa

SEQ ID NO: 12318 - RNA, 38 nt, Artificial Sequence
  Description of Artificial Sequence:  Enzymatic Nucleic Acid
aguggagacugaugaggccguuaggccgaaagaggaag

SEQ ID NO: 12319 - RNA, 38 nt, Artificial Sequence
  Description of Artificial Sequence:  Enzymatic Nucleic Acid
ggaguggacugaugaggccguuaggccgaaauagagga

SEQ ID NO: 12320 - RNA, 38 nt, Artificial Sequence
  Description of Artificial Sequence:  Enzymatic Nucleic Acid
caggagugcugaugaggccguuaggccgaaagauagag

SEQ ID NO: 12321 - RNA, 38 nt, Artificial Sequence
  Description of Artificial Sequence:  Enzymatic Nucleic Acid
ccugacagcugaugaggccguuaggccgaaaguggaga

SEQ ID NO: 12322 - RNA, 38 nt, Artificial Sequence
  Description of Artificial Sequence:  Enzymatic Nucleic Acid
gggggccucugaugaggccguuaggccgaaacaggagu

SEQ ID NO: 12323 - RNA, 38 nt, Artificial Sequence
  Description of Artificial Sequence:  Enzymatic Nucleic Acid
auacugagcugaugaggccguuaggccgaaacuugggg

SEQ ID NO: 12324 - RNA, 38 nt, Artificial Sequence
  Description of Artificial Sequence:  Enzymatic Nucleic Acid
aaaauacucugaugaggccguuaggccgaaaggacuug

SEQ ID NO: 12325 - RNA, 38 nt, Artificial Sequence
  Description of Artificial Sequence:  Enzymatic Nucleic Acid
agcuaaaacugaugaggccguuaggccgaaacugagga

SEQ ID NO: 12326 - RNA, 38 nt, Artificial Sequence
  Description of Artificial Sequence:  Enzymatic Nucleic Acid
aaagcuaacugaugaggccguuaggccgaaauacugag

SEQ ID NO: 12327 - RNA, 38 nt, Artificial Sequence
  Description of Artificial Sequence:  Enzymatic Nucleic Acid
caaagcuacugaugaggccguuaggccgaaaauacuga

SEQ ID NO: 12328 - RNA, 38 nt, Artificial Sequence
  Description of Artificial Sequence:  Enzymatic Nucleic Acid
acaaagcucugaugaggccguuaggccgaaaaauacug

SEQ ID NO: 12329 - RNA, 38 nt, Artificial Sequence
  Description of Artificial Sequence:  Enzymatic Nucleic Acid
cacaaagccugaugaggccguuaggccgaaaaaauacu

SEQ ID NO: 12330 - RNA, 38 nt, Artificial Sequence
  Description of Artificial Sequence:  Enzymatic Nucleic Acid
aagccacacugaugaggccguuaggccgaaagcuaaaa

SEQ ID NO: 12331 - RNA, 38 nt, Artificial Sequence
  Description of Artificial Sequence:  Enzymatic Nucleic Acid
gaagccaccugaugaggccguuaggccgaaaagcuaaa

SEQ ID NO: 12332 - RNA, 38 nt, Artificial Sequence
  Description of Artificial Sequence:  Enzymatic Nucleic Acid
ccaucaggcugaugaggccguuaggccgaaagccacaa

SEQ ID NO: 12333 - RNA, 38 nt, Artificial Sequence
  Description of Artificial Sequence:  Enzymatic Nucleic Acid
gccaucagcugaugaggccguuaggccgaaaagccaca

SEQ ID NO: 12334 - RNA, 38 nt, Artificial Sequence
  Description of Artificial Sequence:  Enzymatic Nucleic Acid
ccaauuaacugaugaggccguuaggccgaaauuuuucu

SEQ ID NO: 12335 - RNA, 38 nt, Artificial Sequence
  Description of Artificial Sequence:  Enzymatic Nucleic Acid
aaccaauucugaugaggccguuaggccgaaagauuuuu

SEQ ID NO: 12336 - RNA, 38 nt, Artificial Sequence
  Description of Artificial Sequence:  Enzymatic Nucleic Acid
caaccaaucugaugaggccguuaggccgaaaagauuuu

SEQ ID NO: 12337 - RNA, 38 nt, Artificial Sequence
  Description of Artificial Sequence:  Enzymatic Nucleic Acid
aaccaacccugaugaggccguuaggccgaaauuaagau

SEQ ID NO: 12338 - RNA, 38 nt, Artificial Sequence
  Description of Artificial Sequence:  Enzymatic Nucleic Acid
agcaaacccugaugaggccguuaggccgaaaccaauua

SEQ ID NO: 12339 - RNA, 38 nt, Artificial Sequence
  Description of Artificial Sequence:  Enzymatic Nucleic Acid
ggagagcacugaugaggccguuaggccgaaaccaacca

SEQ ID NO: 12340 - RNA, 38 nt, Artificial Sequence
  Description of Artificial Sequence:  Enzymatic Nucleic Acid
uggagagccugaugaggccguuaggccgaaaaccaacc

SEQ ID NO: 12341 - RNA, 38 nt, Artificial Sequence
  Description of Artificial Sequence:  Enzymatic Nucleic Acid
uaucuggacugaugaggccguuaggccgaaagcaaacc

SEQ ID NO: 12342 - RNA, 38 nt, Artificial Sequence
  Description of Artificial Sequence:  Enzymatic Nucleic Acid
auuaucugcugaugaggccguuaggccgaaagagcaaa

SEQ ID NO: 12343 - RNA, 38 nt, Artificial Sequence
  Description of Artificial Sequence:  Enzymatic Nucleic Acid
cuagugaucugaugaggccguuaggccgaaaucuggag

SEQ ID NO: 12344 - RNA, 38 nt, Artificial Sequence
  Description of Artificial Sequence:  Enzymatic Nucleic Acid
uggcuagucugaugaggccguuaggccgaaauuaucug

SEQ ID NO: 12345 - RNA, 38 nt, Artificial Sequence
  Description of Artificial Sequence:  Enzymatic Nucleic Acid
aaucuggccugaugaggccguuaggccgaaagugauua

SEQ ID NO: 12346 - RNA, 38 nt, Artificial Sequence
  Description of Artificial Sequence:  Enzymatic Nucleic Acid
aauuucgacugaugaggccguuaggccgaaaucuggcu

SEQ ID NO: 12347 - RNA, 38 nt, Artificial Sequence
  Description of Artificial Sequence:  Enzymatic Nucleic Acid
uaauuucgcugaugaggccguuaggccgaaaaucuggc

SEQ ID NO: 12348 - RNA, 38 nt, Artificial Sequence
  Description of Artificial Sequence:  Enzymatic Nucleic Acid
guaauuuccugaugaggccguuaggccgaaaaaucugg

SEQ ID NO: 12349 - RNA, 38 nt, Artificial Sequence
  Description of Artificial Sequence:  Enzymatic Nucleic Acid
uaaaaagucugaugaggccguuaggccgaaauuucgaa

SEQ ID NO: 12350 - RNA, 38 nt, Artificial Sequence
  Description of Artificial Sequence:  Enzymatic Nucleic Acid
cuaaaaagcugaugaggccguuaggccgaaaauuucga

SEQ ID NO: 12351 - RNA, 38 nt, Artificial Sequence
  Description of Artificial Sequence:  Enzymatic Nucleic Acid
cggcuaaacugaugaggccguuaggccgaaaguaauuu

SEQ ID NO: 12352 - RNA, 38 nt, Artificial Sequence
  Description of Artificial Sequence:  Enzymatic Nucleic Acid
ucggcuaacugaugaggccguuaggccgaaaaguaauu

SEQ ID NO: 12353 - RNA, 38 nt, Artificial Sequence
  Description of Artificial Sequence:  Enzymatic Nucleic Acid
cucggcuacugaugaggccguuaggccgaaaaaguaau

SEQ ID NO: 12354 - RNA, 38 nt, Artificial Sequence
  Description of Artificial Sequence:  Enzymatic Nucleic Acid
ccucggcucugaugaggccguuaggccgaaaaaaguaa

SEQ ID NO: 12355 - RNA, 38 nt, Artificial Sequence
  Description of Artificial Sequence:  Enzymatic Nucleic Acid
accucggccugaugaggccguuaggccgaaaaaaagua

SEQ ID NO: 12356 - RNA, 38 nt, Artificial Sequence
  Description of Artificial Sequence:  Enzymatic Nucleic Acid
guuaucaucugaugaggccguuaggccgaaaccucggc

SEQ ID NO: 12357 - RNA, 38 nt, Artificial Sequence
  Description of Artificial Sequence:  Enzymatic Nucleic Acid
uguuaucacugaugaggccguuaggccgaaaaccucgg

SEQ ID NO: 12358 - RNA, 38 nt, Artificial Sequence
  Description of Artificial Sequence:  Enzymatic Nucleic Acid
guagaugucugaugaggccguuaggccgaaaucauaac

SEQ ID NO: 12359 - RNA, 38 nt, Artificial Sequence
  Description of Artificial Sequence:  Enzymatic Nucleic Acid
auacaguacugaugaggccguuaggccgaaauguuauc

SEQ ID NO: 12360 - RNA, 38 nt, Artificial Sequence
  Description of Artificial Sequence:  Enzymatic Nucleic Acid
ggauacagcugaugaggccguuaggccgaaagauguua

SEQ ID NO: 12361 - RNA, 38 nt, Artificial Sequence
  Description of Artificial Sequence:  Enzymatic Nucleic Acid
cuaaaggacugaugaggccguuaggccgaaacaguaga

SEQ ID NO: 12362 - RNA, 38 nt, Artificial Sequence
  Description of Artificial Sequence:  Enzymatic Nucleic Acid
uucuaaagcugaugaggccguuaggccgaaauacagua

SEQ ID NO: 12363 - RNA, 38 nt, Artificial Sequence
  Description of Artificial Sequence:  Enzymatic Nucleic Acid
aaauucuacugaugaggccguuaggccgaaaggauaca

SEQ ID NO: 12364 - RNA, 38 nt, Artificial Sequence
  Description of Artificial Sequence:  Enzymatic Nucleic Acid
aaaauucucugaugaggccguuaggccgaaaaggauac

SEQ ID NO: 12365 - RNA, 38 nt, Artificial Sequence
  Description of Artificial Sequence:  Enzymatic Nucleic Acid
uaaaauuccugaugaggccguuaggccgaaaaaggaua

SEQ ID NO: 12366 - RNA, 38 nt, Artificial Sequence
  Description of Artificial Sequence:  Enzymatic Nucleic Acid
uagguuaacugaugaggccguuaggccgaaauucuaaa

SEQ ID NO: 12367 - RNA, 38 nt, Artificial Sequence
  Description of Artificial Sequence:  Enzymatic Nucleic Acid
auagguuacugaugaggccguuaggccgaaaauucuaa

SEQ ID NO: 12368 - RNA, 38 nt, Artificial Sequence
  Description of Artificial Sequence:  Enzymatic Nucleic Acid
uauagguucugaugaggccguuaggccgaaaaauucua

SEQ ID NO: 12369 - RNA, 38 nt, Artificial Sequence
  Description of Artificial Sequence:  Enzymatic Nucleic Acid
uuauaggucugaugaggccguuaggccgaaaaaauucu

SEQ ID NO: 12370 - RNA, 38 nt, Artificial Sequence
  Description of Artificial Sequence:  Enzymatic Nucleic Acid
uaguuuuacugaugaggccguuaggccgaaagguuaaa

SEQ ID NO: 12371 - RNA, 38 nt, Artificial Sequence
  Description of Artificial Sequence:  Enzymatic Nucleic Acid
cauaguuucugaugaggccguuaggccgaaauagguua

SEQ ID NO: 12372 - RNA, 38 nt, Artificial Sequence
  Description of Artificial Sequence:  Enzymatic Nucleic Acid
aguagacacugaugaggccguuaggccgaaaguuuuau

SEQ ID NO: 12373 - RNA, 38 nt, Artificial Sequence
  Description of Artificial Sequence:  Enzymatic Nucleic Acid
aaccaguacugaugaggccguuaggccgaaacauaguu

SEQ ID NO: 12374 - RNA, 38 nt, Artificial Sequence
  Description of Artificial Sequence:  Enzymatic Nucleic Acid
gaaaccagcugaugaggccguuaggccgaaagacauag

SEQ ID NO: 12375 - RNA, 38 nt, Artificial Sequence
  Description of Artificial Sequence:  Enzymatic Nucleic Acid
caggcagacugaugaggccguuaggccgaaaccaguag

SEQ ID NO: 12376 - RNA, 38 nt, Artificial Sequence
  Description of Artificial Sequence:  Enzymatic Nucleic Acid
acaggcagcugaugaggccguuaggccgaaaaccagua

SEQ ID NO: 12377 - RNA, 38 nt, Artificial Sequence
  Description of Artificial Sequence:  Enzymatic Nucleic Acid
cacaggcacugaugaggccguuaggccgaaaaaccagu

SEQ ID NO: 12378 - RNA, 54 nt, Artificial Sequence
  Description of Artificial Sequence:  Enzymatic Nucleic Acid
gggacacaagaagggcccaccagagaaacacacguugugguacauuaccuggua

SEQ ID NO: 12379 - RNA, 54 nt, Artificial Sequence
  Description of Artificial Sequence:  Enzymatic Nucleic Acid
guuaucccagaagcgggaaccagagaaacacacguugugguacauuaccuggua

SEQ ID NO: 12380 - RNA, 54 nt, Artificial Sequence
  Description of Artificial Sequence:  Enzymatic Nucleic Acid
ggaaucggagaagccaggaccagagaaacacacguugugguacauuaccuggua

SEQ ID NO: 12381 - RNA, 54 nt, Artificial Sequence
  Description of Artificial Sequence:  Enzymatic Nucleic Acid
uccgcggaagaaggucagaccagagaaacacacguugugguacauuaccuggua

SEQ ID NO: 12382 - RNA, 54 nt, Artificial Sequence
  Description of Artificial Sequence:  Enzymatic Nucleic Acid
cggcugucagaaguguccaccagagaaacacacguugugguacauuaccuggua

SEQ ID NO: 12383 - RNA, 54 nt, Artificial Sequence
  Description of Artificial Sequence:  Enzymatic Nucleic Acid
ccagccgcagaagucagcaccagagaaacacacguugugguacauuaccuggua

SEQ ID NO: 12384 - RNA, 54 nt, Artificial Sequence
  Description of Artificial Sequence:  Enzymatic Nucleic Acid
cuggcuccagaagcggcuaccagagaaacacacguugugguacauuaccuggua

SEQ ID NO: 12385 - RNA, 54 nt, Artificial Sequence
  Description of Artificial Sequence:  Enzymatic Nucleic Acid
cagcgcaaagaaggggagaccagagaaacacacguugugguacauuaccuggua

SEQ ID NO: 12386 - RNA, 54 nt, Artificial Sequence
  Description of Artificial Sequence:  Enzymatic Nucleic Acid
gucacagaagaaguauggaccagagaaacacacguugugguacauuaccuggua

SEQ ID NO: 12387 - RNA, 54 nt, Artificial Sequence
  Description of Artificial Sequence:  Enzymatic Nucleic Acid
cacagagcagaagcuagcaccagagaaacacacguugugguacauuaccuggua

SEQ ID NO: 12388 - RNA, 54 nt, Artificial Sequence
  Description of Artificial Sequence:  Enzymatic Nucleic Acid
cccacagaagaagcucggaccagagaaacacacguugugguacauuaccuggua

SEQ ID NO: 12389 - RNA, 54 nt, Artificial Sequence
  Description of Artificial Sequence:  Enzymatic Nucleic Acid
ugcaaguaagaagaagggaccagagaaacacacguugugguacauuaccuggua

SEQ ID NO: 12390 - RNA, 54 nt, Artificial Sequence
  Description of Artificial Sequence:  Enzymatic Nucleic Acid
uagacauaagaaguggagaccagagaaacacacguugugguacauuaccuggua

SEQ ID NO: 12391 - RNA, 54 nt, Artificial Sequence
  Description of Artificial Sequence:  Enzymatic Nucleic Acid
gaauggugagaaguaaucaccagagaaacacacguugugguacauuaccuggua

SEQ ID NO: 12392 - RNA, 54 nt, Artificial Sequence
  Description of Artificial Sequence:  Enzymatic Nucleic Acid
cgacccucagaaggggauaccagagaaacacacguugugguacauuaccuggua

SEQ ID NO: 12393 - RNA, 54 nt, Artificial Sequence
  Description of Artificial Sequence:  Enzymatic Nucleic Acid
cuguuuccagaaggaacaaccagagaaacacacguugugguacauuaccuggua

SEQ ID NO: 12394 - RNA, 54 nt, Artificial Sequence
  Description of Artificial Sequence:  Enzymatic Nucleic Acid
acaugauaagaagauaggaccagagaaacacacguugugguacauuaccuggua

SEQ ID NO: 12395 - RNA, 54 nt, Artificial Sequence
  Description of Artificial Sequence:  Enzymatic Nucleic Acid
uuuucuccagaagauagcaccagagaaacacacguugugguacauuaccuggua

SEQ ID NO: 12396 - RNA, 54 nt, Artificial Sequence
  Description of Artificial Sequence:  Enzymatic Nucleic Acid
ucuugaucagaaguccacaccagagaaacacacguugugguacauuaccuggua

SEQ ID NO: 12397 - RNA, 54 nt, Artificial Sequence
  Description of Artificial Sequence:  Enzymatic Nucleic Acid
auaucaggagaaggguaaaccagagaaacacacguugugguacauuaccuggua

SEQ ID NO: 12398 - RNA, 54 nt, Artificial Sequence
  Description of Artificial Sequence:  Enzymatic Nucleic Acid
ucucaccgagaaggggugaccagagaaacacacguugugguacauuaccuggua

SEQ ID NO: 12399 - RNA, 54 nt, Artificial Sequence
  Description of Artificial Sequence:  Enzymatic Nucleic Acid
uuggcguaagaagugcauaccagagaaacacacguugugguacauuaccuggua

SEQ ID NO: 12400 - RNA, 54 nt, Artificial Sequence
  Description of Artificial Sequence:  Enzymatic Nucleic Acid
ucuguaggagaaggcuucaccagagaaacacacguugugguacauuaccuggua

SEQ ID NO: 12401 - RNA, 54 nt, Artificial Sequence
  Description of Artificial Sequence:  Enzymatic Nucleic Acid
uuggccggagaaguaggaaccagagaaacacacguugugguacauuaccuggua

SEQ ID NO: 12402 - RNA, 54 nt, Artificial Sequence
  Description of Artificial Sequence:  Enzymatic Nucleic Acid
uuccuucaagaagggcauaccagagaaacacacguugugguacauuaccuggua

SEQ ID NO: 12403 - RNA, 54 nt, Artificial Sequence
  Description of Artificial Sequence:  Enzymatic Nucleic Acid
ggcugggcagaagguugcaccagagaaacacacguugugguacauuaccuggua

SEQ ID NO: 12404 - RNA, 54 nt, Artificial Sequence
  Description of Artificial Sequence:  Enzymatic Nucleic Acid
guuggcugagaagcagguaccagagaaacacacguugugguacauuaccuggua

SEQ ID NO: 12405 - RNA, 54 nt, Artificial Sequence
  Description of Artificial Sequence:  Enzymatic Nucleic Acid
cagugcacagaagggacaaccagagaaacacacguugugguacauuaccuggua

SEQ ID NO: 12406 - RNA, 54 nt, Artificial Sequence
  Description of Artificial Sequence:  Enzymatic Nucleic Acid
cccaugugagaagauguuaccagagaaacacacguugugguacauuaccuggua

SEQ ID NO: 12407 - RNA, 54 nt, Artificial Sequence
  Description of Artificial Sequence:  Enzymatic Nucleic Acid
uuaucuugagaagagcaaaccagagaaacacacguugugguacauuaccuggua

SEQ ID NO: 12408 - RNA, 54 nt, Artificial Sequence
  Description of Artificial Sequence:  Enzymatic Nucleic Acid
ggaugaugagaaguuugaaccagagaaacacacguugugguacauuaccuggua

SEQ ID NO: 12409 - RNA, 54 nt, Artificial Sequence
  Description of Artificial Sequence:  Enzymatic Nucleic Acid
ugcggauaagaagguuccaccagagaaacacacguugugguacauuaccuggua

SEQ ID NO: 12410 - RNA, 54 nt, Artificial Sequence
  Description of Artificial Sequence:  Enzymatic Nucleic Acid
gcuuaacgagaaguaggaaccagagaaacacacguugugguacauuaccuggua

SEQ ID NO: 12411 - RNA, 54 nt, Artificial Sequence
  Description of Artificial Sequence:  Enzymatic Nucleic Acid
ggcaauucagaaggauccaccagagaaacacacguugugguacauuaccuggua

SEQ ID NO: 12412 - RNA, 54 nt, Artificial Sequence
  Description of Artificial Sequence:  Enzymatic Nucleic Acid
cuaguuucagaaggucccaccagagaaacacacguugugguacauuaccuggua

SEQ ID NO: 12413 - RNA, 54 nt, Artificial Sequence
  Description of Artificial Sequence:  Enzymatic Nucleic Acid
ccaaaagcagaagccucaaccagagaaacacacguugugguacauuaccuggua

SEQ ID NO: 12414 - RNA, 54 nt, Artificial Sequence
  Description of Artificial Sequence:  Enzymatic Nucleic Acid
aaagccugagaaggcagaaccagagaaacacacguugugguacauuaccuggua

SEQ ID NO: 12415 - RNA, 54 nt, Artificial Sequence
  Description of Artificial Sequence:  Enzymatic Nucleic Acid
ccgggccaagaagaagucaccagagaaacacacguugugguacauuaccuggua

SEQ ID NO: 12416 - RNA, 54 nt, Artificial Sequence
  Description of Artificial Sequence:  Enzymatic Nucleic Acid
cugacauaagaagggucuaccagagaaacacacguugugguacauuaccuggua

SEQ ID NO: 12417 - RNA, 54 nt, Artificial Sequence
  Description of Artificial Sequence:  Enzymatic Nucleic Acid
caaagggaagaaggcaucaccagagaaacacacguugugguacauuaccuggua

SEQ ID NO: 12418 - RNA, 54 nt, Artificial Sequence
  Description of Artificial Sequence:  Enzymatic Nucleic Acid
guaguguaagaaggagccaccagagaaacacacguugugguacauuaccuggua

SEQ ID NO: 12419 - RNA, 54 nt, Artificial Sequence
  Description of Artificial Sequence:  Enzymatic Nucleic Acid
cucaugccagaaguccagaccagagaaacacacguugugguacauuaccuggua

SEQ ID NO: 12420 - RNA, 54 nt, Artificial Sequence
  Description of Artificial Sequence:  Enzymatic Nucleic Acid
gugagguaagaagggagaaccagagaaacacacguugugguacauuaccuggua

SEQ ID NO: 12421 - RNA, 54 nt, Artificial Sequence
  Description of Artificial Sequence:  Enzymatic Nucleic Acid
uggcugucagaagggaucaccagagaaacacacguugugguacauuaccuggua

SEQ ID NO: 12422 - RNA, 54 nt, Artificial Sequence
  Description of Artificial Sequence:  Enzymatic Nucleic Acid
agccacugagaagguuggaccagagaaacacacguugugguacauuaccuggua

SEQ ID NO: 12423 - RNA, 54 nt, Artificial Sequence
  Description of Artificial Sequence:  Enzymatic Nucleic Acid
gauacccaagaagguagcaccagagaaacacacguugugguacauuaccuggua

SEQ ID NO: 12424 - RNA, 54 nt, Artificial Sequence
  Description of Artificial Sequence:  Enzymatic Nucleic Acid
ucagcgugagaagcagcaaccagagaaacacacguugugguacauuaccuggua

SEQ ID NO: 12425 - RNA, 54 nt, Artificial Sequence
  Description of Artificial Sequence:  Enzymatic Nucleic Acid
gucccugaagaagcgugaaccagagaaacacacguugugguacauuaccuggua

SEQ ID NO: 12426 - RNA, 54 nt, Artificial Sequence
  Description of Artificial Sequence:  Enzymatic Nucleic Acid
aggaggugagaagcagugaccagagaaacacacguugugguacauuaccuggua

SEQ ID NO: 12427 - RNA, 54 nt, Artificial Sequence
  Description of Artificial Sequence:  Enzymatic Nucleic Acid
uccauuuaagaaggagguaccagagaaacacacguugugguacauuaccuggua

SEQ ID NO: 12428 - RNA, 54 nt, Artificial Sequence
  Description of Artificial Sequence:  Enzymatic Nucleic Acid
ggagccggagaaggaccaaccagagaaacacacguugugguacauuaccuggua

SEQ ID NO: 12429 - RNA, 54 nt, Artificial Sequence
  Description of Artificial Sequence:  Enzymatic Nucleic Acid
gggggcggagaagggacaaccagagaaacacacguugugguacauuaccuggua

SEQ ID NO: 12430 - RNA, 54 nt, Artificial Sequence
  Description of Artificial Sequence:  Enzymatic Nucleic Acid
gaguugggagaagagccgaccagagaaacacacguugugguacauuaccuggua

SEQ ID NO: 12431 - RNA, 54 nt, Artificial Sequence
  Description of Artificial Sequence:  Enzymatic Nucleic Acid
aaaaucuaagaagcaccuaccagagaaacacacguugugguacauuaccuggua

SEQ ID NO: 12432 - RNA, 54 nt, Artificial Sequence
  Description of Artificial Sequence:  Enzymatic Nucleic Acid
uccuugcaagaagaggucaccagagaaacacacguugugguacauuaccuggua

SEQ ID NO: 12433 - RNA, 54 nt, Artificial Sequence
  Description of Artificial Sequence:  Enzymatic Nucleic Acid
gagaccacagaagggcacaccagagaaacacacguugugguacauuaccuggua

SEQ ID NO: 12434 - RNA, 54 nt, Artificial Sequence
  Description of Artificial Sequence:  Enzymatic Nucleic Acid
ucuuggagagaagaguccaccagagaaacacacguugugguacauuaccuggua

SEQ ID NO: 12435 - RNA, 54 nt, Artificial Sequence
  Description of Artificial Sequence:  Enzymatic Nucleic Acid
ccaagguaagaagacucgaccagagaaacacacguugugguacauuaccuggua

SEQ ID NO: 12436 - RNA, 54 nt, Artificial Sequence
  Description of Artificial Sequence:  Enzymatic Nucleic Acid
caggcuccagaagcucucaccagagaaacacacguugugguacauuaccuggua

SEQ ID NO: 12437 - RNA, 54 nt, Artificial Sequence
  Description of Artificial Sequence:  Enzymatic Nucleic Acid
cacaaugcagaagcaggcaccagagaaacacacguugugguacauuaccuggua

SEQ ID NO: 12438 - RNA, 54 nt, Artificial Sequence
  Description of Artificial Sequence:  Enzymatic Nucleic Acid
acccugccagaagccuuuaccagagaaacacacguugugguacauuaccuggua

SEQ ID NO: 12439 - RNA, 54 nt, Artificial Sequence
  Description of Artificial Sequence:  Enzymatic Nucleic Acid
uguaacccagaagugaagaccagagaaacacacguugugguacauuaccuggua

SEQ ID NO: 12440 - RNA, 54 nt, Artificial Sequence
  Description of Artificial Sequence:  Enzymatic Nucleic Acid
acguaagaagaaggaaggaccagagaaacacacguugugguacauuaccuggua

SEQ ID NO: 12441 - RNA, 54 nt, Artificial Sequence
  Description of Artificial Sequence:  Enzymatic Nucleic Acid
aaggagcaagaagcaucaaccagagaaacacacguugugguacauuaccuggua

SEQ ID NO: 12442 - RNA, 54 nt, Artificial Sequence
  Description of Artificial Sequence:  Enzymatic Nucleic Acid
ucggccccagaaggagccaccagagaaacacacguugugguacauuaccuggua

SEQ ID NO: 12443 - RNA, 54 nt, Artificial Sequence
  Description of Artificial Sequence:  Enzymatic Nucleic Acid
cuccacccagaagaaaccaccagagaaacacacguugugguacauuaccuggua

SEQ ID NO: 12444 - RNA, 54 nt, Artificial Sequence
  Description of Artificial Sequence:  Enzymatic Nucleic Acid
uuucugccagaaggaagcaccagagaaacacacguugugguacauuaccuggua

SEQ ID NO: 12445 - RNA, 54 nt, Artificial Sequence
  Description of Artificial Sequence:  Enzymatic Nucleic Acid
auuucgaaagaaggcuagaccagagaaacacacguugugguacauuaccuggua

SEQ ID NO: 12446 - RNA, 54 nt, Artificial Sequence
  Description of Artificial Sequence:  Enzymatic Nucleic Acid
agcacacaagaagaaaccaccagagaaacacacguugugguacauuaccuggua

SEQ ID NO: 12447 - RNA, 38 nt, Artificial Sequence
  Description of Artificial Sequence:  Enzymatic Nucleic Acid
gugagcaacugaugaggccguuaggccgaaacgcggcc

SEQ ID NO: 12448 - RNA, 38 nt, Artificial Sequence
  Description of Artificial Sequence:  Enzymatic Nucleic Acid
uggugagccugaugaggccguuaggccgaaagacgcgg

SEQ ID NO: 12449 - RNA, 38 nt, Artificial Sequence
  Description of Artificial Sequence:  Enzymatic Nucleic Acid
accauggucugaugaggccguuaggccgaaagcaagac

SEQ ID NO: 12450 - RNA, 38 nt, Artificial Sequence
  Description of Artificial Sequence:  Enzymatic Nucleic Acid
cagcagcucugaugaggccguuaggccgaaaccauggu

SEQ ID NO: 12451 - RNA, 38 nt, Artificial Sequence
  Description of Artificial Sequence:  Enzymatic Nucleic Acid
uaaggcaacugaugaggccguuaggccgaaaccgcggu

SEQ ID NO: 12452 - RNA, 38 nt, Artificial Sequence
  Description of Artificial Sequence:  Enzymatic Nucleic Acid
cguaaggccugaugaggccguuaggccgaaagaccgcg

SEQ ID NO: 12453 - RNA, 38 nt, Artificial Sequence
  Description of Artificial Sequence:  Enzymatic Nucleic Acid
cagcgcgucugaugaggccguuaggccgaaaggcaaga

SEQ ID NO: 12454 - RNA, 38 nt, Artificial Sequence
  Description of Artificial Sequence:  Enzymatic Nucleic Acid
gcagcgcgcugaugaggccguuaggccgaaaaggcaag

SEQ ID NO: 12455 - RNA, 38 nt, Artificial Sequence
  Description of Artificial Sequence:  Enzymatic Nucleic Acid
agacaccccugaugaggccguuaggccgaaagcagcgc

SEQ ID NO: 12456 - RNA, 38 nt, Artificial Sequence
  Description of Artificial Sequence:  Enzymatic Nucleic Acid
gagaagcacugaugaggccguuaggccgaaacacccga

SEQ ID NO: 12457 - RNA, 38 nt, Artificial Sequence
  Description of Artificial Sequence:  Enzymatic Nucleic Acid
uauccugucugaugaggccguuaggccgaaagaagcag

SEQ ID NO: 12458 - RNA, 38 nt, Artificial Sequence
  Description of Artificial Sequence:  Enzymatic Nucleic Acid
cugagccacugaugaggccguuaggccgaaauccugug

SEQ ID NO: 12459 - RNA, 38 nt, Artificial Sequence
  Description of Artificial Sequence:  Enzymatic Nucleic Acid
ucgacccucugaugaggccguuaggccgaaagccauau

SEQ ID NO: 12460 - RNA, 38 nt, Artificial Sequence
  Description of Artificial Sequence:  Enzymatic Nucleic Acid
uuaacuuccugaugaggccguuaggccgaaacccugag

SEQ ID NO: 12461 - RNA, 38 nt, Artificial Sequence
  Description of Artificial Sequence:  Enzymatic Nucleic Acid
gcacuuuucugaugaggccguuaggccgaaacuucgac

SEQ ID NO: 12462 - RNA, 38 nt, Artificial Sequence
  Description of Artificial Sequence:  Enzymatic Nucleic Acid
ggcacuuucugaugaggccguuaggccgaaaacuucga

SEQ ID NO: 12463 - RNA, 38 nt, Artificial Sequence
  Description of Artificial Sequence:  Enzymatic Nucleic Acid
gcuugcaucugaugaggccguuaggccgaaacaugcug

SEQ ID NO: 12464 - RNA, 38 nt, Artificial Sequence
  Description of Artificial Sequence:  Enzymatic Nucleic Acid
gagaaagacugaugaggccguuaggccgaaagucuggc

SEQ ID NO: 12465 - RNA, 38 nt, Artificial Sequence
  Description of Artificial Sequence:  Enzymatic Nucleic Acid
uugagaaacugaugaggccguuaggccgaaagagucug

SEQ ID NO: 12466 - RNA, 38 nt, Artificial Sequence
  Description of Artificial Sequence:  Enzymatic Nucleic Acid
acuugagacugaugaggccguuaggccgaaagagaguc

SEQ ID NO: 12467 - RNA, 38 nt, Artificial Sequence
  Description of Artificial Sequence:  Enzymatic Nucleic Acid
cacuugagcugaugaggccguuaggccgaaaagagagu

SEQ ID NO: 12468 - RNA, 38 nt, Artificial Sequence
  Description of Artificial Sequence:  Enzymatic Nucleic Acid
gcacuugacugaugaggccguuaggccgaaaaagagag

SEQ ID NO: 12469 - RNA, 38 nt, Artificial Sequence
  Description of Artificial Sequence:  Enzymatic Nucleic Acid
cugcacuucugaugaggccguuaggccgaaagaaagag

SEQ ID NO: 12470 - RNA, 38 nt, Artificial Sequence
  Description of Artificial Sequence:  Enzymatic Nucleic Acid
gagaccaucugaugaggccguuaggccgaaagugggcu

SEQ ID NO: 12471 - RNA, 38 nt, Artificial Sequence
  Description of Artificial Sequence:  Enzymatic Nucleic Acid
ugggcagacugaugaggccguuaggccgaaaccaugag

SEQ ID NO: 12472 - RNA, 38 nt, Artificial Sequence
  Description of Artificial Sequence:  Enzymatic Nucleic Acid
cgugggcacugaugaggccguuaggccgaaagaccaug

SEQ ID NO: 12473 - RNA, 38 nt, Artificial Sequence
  Description of Artificial Sequence:  Enzymatic Nucleic Acid
gggggagucugaugaggccguuaggccgaaaugcucag

SEQ ID NO: 12474 - RNA, 38 nt, Artificial Sequence
  Description of Artificial Sequence:  Enzymatic Nucleic Acid
cgauggggcugaugaggccguuaggccgaaagugaugc

SEQ ID NO: 12475 - RNA, 38 nt, Artificial Sequence
  Description of Artificial Sequence:  Enzymatic Nucleic Acid
cacaggcccugaugaggccguuaggccgaaauggggga

SEQ ID NO: 12476 - RNA, 38 nt, Artificial Sequence
  Description of Artificial Sequence:  Enzymatic Nucleic Acid
uugccugucugaugaggccguuaggccgaaaucccucc

SEQ ID NO: 12477 - RNA, 38 nt, Artificial Sequence
  Description of Artificial Sequence:  Enzymatic Nucleic Acid
ugcugcagcugaugaggccguuaggccgaaauugccug

SEQ ID NO: 12478 - RNA, 38 nt, Artificial Sequence
  Description of Artificial Sequence:  Enzymatic Nucleic Acid
gugcugcacugaugaggccguuaggccgaaaauugccu

SEQ ID NO: 12479 - RNA, 38 nt, Artificial Sequence
  Description of Artificial Sequence:  Enzymatic Nucleic Acid
ccaagguccugaugaggccguuaggccgaaaggugcug

SEQ ID NO: 12480 - RNA, 38 nt, Artificial Sequence
  Description of Artificial Sequence:  Enzymatic Nucleic Acid
ccgugucccugaugaggccguuaggccgaaaggucaag

SEQ ID NO: 12481 - RNA, 38 nt, Artificial Sequence
  Description of Artificial Sequence:  Enzymatic Nucleic Acid
cagguguacugaugaggccguuaggccgaaaggcccgu

SEQ ID NO: 12482 - RNA, 38 nt, Artificial Sequence
  Description of Artificial Sequence:  Enzymatic Nucleic Acid
uacaggugcugaugaggccguuaggccgaaagaggccc

SEQ ID NO: 12483 - RNA, 38 nt, Artificial Sequence
  Description of Artificial Sequence:  Enzymatic Nucleic Acid
gagguauccugaugaggccguuaggccgaaacaggugu

SEQ ID NO: 12484 - RNA, 38 nt, Artificial Sequence
  Description of Artificial Sequence:  Enzymatic Nucleic Acid
uagggaggcugaugaggccguuaggccgaaaucuacag

SEQ ID NO: 12485 - RNA, 38 nt, Artificial Sequence
  Description of Artificial Sequence:  Enzymatic Nucleic Acid
gauguaggcugaugaggccguuaggccgaaagguaucu

SEQ ID NO: 12486 - RNA, 38 nt, Artificial Sequence
  Description of Artificial Sequence:  Enzymatic Nucleic Acid
aguagaugcugaugaggccguuaggccgaaagggaggu

SEQ ID NO: 12487 - RNA, 38 nt, Artificial Sequence
  Description of Artificial Sequence:  Enzymatic Nucleic Acid
ucgaaguacugaugaggccguuaggccgaaauguaggg

SEQ ID NO: 12488 - RNA, 38 nt, Artificial Sequence
  Description of Artificial Sequence:  Enzymatic Nucleic Acid
cuucgaagcugaugaggccguuaggccgaaagauguag

SEQ ID NO: 12489 - RNA, 38 nt, Artificial Sequence
  Description of Artificial Sequence:  Enzymatic Nucleic Acid
uuucuucgcugaugaggccguuaggccgaaaguagaug

SEQ ID NO: 12490 - RNA, 38 nt, Artificial Sequence
  Description of Artificial Sequence:  Enzymatic Nucleic Acid
uuuucuuccugaugaggccguuaggccgaaaaguagau

SEQ ID NO: 12491 - RNA, 38 nt, Artificial Sequence
  Description of Artificial Sequence:  Enzymatic Nucleic Acid
agauugaacugaugaggccguuaggccgaaauuccgcu

SEQ ID NO: 12492 - RNA, 38 nt, Artificial Sequence
  Description of Artificial Sequence:  Enzymatic Nucleic Acid
guagauugcugaugaggccguuaggccgaaagauuccg

SEQ ID NO: 12493 - RNA, 38 nt, Artificial Sequence
  Description of Artificial Sequence:  Enzymatic Nucleic Acid
uguagauucugaugaggccguuaggccgaaaagauucc

SEQ ID NO: 12494 - RNA, 38 nt, Artificial Sequence
  Description of Artificial Sequence:  Enzymatic Nucleic Acid
aauauguacugaugaggccguuaggccgaaauugaaga

SEQ ID NO: 12495 - RNA, 38 nt, Artificial Sequence
  Description of Artificial Sequence:  Enzymatic Nucleic Acid
caaauaugcugaugaggccguuaggccgaaagauugaa

SEQ ID NO: 12496 - RNA, 38 nt, Artificial Sequence
  Description of Artificial Sequence:  Enzymatic Nucleic Acid
cuaacaaacugaugaggccguuaggccgaaauguagau

SEQ ID NO: 12497 - RNA, 38 nt, Artificial Sequence
  Description of Artificial Sequence:  Enzymatic Nucleic Acid
cacuaacacugaugaggccguuaggccgaaauauguag

SEQ ID NO: 12498 - RNA, 38 nt, Artificial Sequence
  Description of Artificial Sequence:  Enzymatic Nucleic Acid
ucacuaaccugaugaggccguuaggccgaaaauaugua

SEQ ID NO: 12499 - RNA, 38 nt, Artificial Sequence
  Description of Artificial Sequence:  Enzymatic Nucleic Acid
gcaucacucugaugaggccguuaggccgaaacaaauau

SEQ ID NO: 12500 - RNA, 38 nt, Artificial Sequence
  Description of Artificial Sequence:  Enzymatic Nucleic Acid
ugcaucaccugaugaggccguuaggccgaaaacaaaua

SEQ ID NO: 12501 - RNA, 38 nt, Artificial Sequence
  Description of Artificial Sequence:  Enzymatic Nucleic Acid
uaugaaagcugaugaggccguuaggccgaaacucccug

SEQ ID NO: 12502 - RNA, 38 nt, Artificial Sequence
  Description of Artificial Sequence:  Enzymatic Nucleic Acid
cucuaugacugaugaggccguuaggccgaaaggacucc

SEQ ID NO: 12503 - RNA, 38 nt, Artificial Sequence
  Description of Artificial Sequence:  Enzymatic Nucleic Acid
ucucuaugcugaugaggccguuaggccgaaaaggacuc

SEQ ID NO: 12504 - RNA, 38 nt, Artificial Sequence
  Description of Artificial Sequence:  Enzymatic Nucleic Acid
aucucuaucugaugaggccguuaggccgaaaaaggacu

SEQ ID NO: 12505 - RNA, 38 nt, Artificial Sequence
  Description of Artificial Sequence:  Enzymatic Nucleic Acid
ugcaucuccugaugaggccguuaggccgaaaugaaagg

SEQ ID NO: 12506 - RNA, 38 nt, Artificial Sequence
  Description of Artificial Sequence:  Enzymatic Nucleic Acid
aguuugggcugaugaggccguuaggccgaaaugucagu

SEQ ID NO: 12507 - RNA, 38 nt, Artificial Sequence
  Description of Artificial Sequence:  Enzymatic Nucleic Acid
augugcaccugaugaggccguuaggccgaaaguuuggg

SEQ ID NO: 12508 - RNA, 38 nt, Artificial Sequence
  Description of Artificial Sequence:  Enzymatic Nucleic Acid
gggaugaucugaugaggccguuaggccgaaagcugucu

SEQ ID NO: 12509 - RNA, 38 nt, Artificial Sequence
  Description of Artificial Sequence:  Enzymatic Nucleic Acid
caggggaucugaugaggccguuaggccgaaaugagcug

SEQ ID NO: 12510 - RNA, 38 nt, Artificial Sequence
  Description of Artificial Sequence:  Enzymatic Nucleic Acid
cggcagggcugaugaggccguuaggccgaaaugaugag

SEQ ID NO: 12511 - RNA, 38 nt, Artificial Sequence
  Description of Artificial Sequence:  Enzymatic Nucleic Acid
cguugggucugaugaggccguuaggccgaaacgucacc

SEQ ID NO: 12512 - RNA, 38 nt, Artificial Sequence
  Description of Artificial Sequence:  Enzymatic Nucleic Acid
gugacugucugaugaggccguuaggccgaaacguuggg

SEQ ID NO: 12513 - RNA, 38 nt, Artificial Sequence
  Description of Artificial Sequence:  Enzymatic Nucleic Acid
uuuagggucugaugaggccguuaggccgaaacugugac

SEQ ID NO: 12514 - RNA, 38 nt, Artificial Sequence
  Description of Artificial Sequence:  Enzymatic Nucleic Acid
aacuuuuucugaugaggccguuaggccgaaagggugac

SEQ ID NO: 12515 - RNA, 38 nt, Artificial Sequence
  Description of Artificial Sequence:  Enzymatic Nucleic Acid
caaauggacugaugaggccguuaggccgaaacuuuuuu

SEQ ID NO: 12516 - RNA, 38 nt, Artificial Sequence
  Description of Artificial Sequence:  Enzymatic Nucleic Acid
ucaaauggcugaugaggccguuaggccgaaaacuuuuu

SEQ ID NO: 12517 - RNA, 38 nt, Artificial Sequence
  Description of Artificial Sequence:  Enzymatic Nucleic Acid
aucaaaugcugaugaggccguuaggccgaaaaacuuuu

SEQ ID NO: 12518 - RNA, 38 nt, Artificial Sequence
  Description of Artificial Sequence:  Enzymatic Nucleic Acid
gaguaucacugaugaggccguuaggccgaaauggaaac

SEQ ID NO: 12519 - RNA, 38 nt, Artificial Sequence
  Description of Artificial Sequence:  Enzymatic Nucleic Acid
agaguauccugaugaggccguuaggccgaaaauggaaa

SEQ ID NO: 12520 - RNA, 38 nt, Artificial Sequence
  Description of Artificial Sequence:  Enzymatic Nucleic Acid
gguaagagcugaugaggccguuaggccgaaaucaaaug

SEQ ID NO: 12521 - RNA, 38 nt, Artificial Sequence
  Description of Artificial Sequence:  Enzymatic Nucleic Acid
agggguaacugaugaggccguuaggccgaaaguaucaa

SEQ ID NO: 12522 - RNA, 38 nt, Artificial Sequence
  Description of Artificial Sequence:  Enzymatic Nucleic Acid
ucaggggucugaugaggccguuaggccgaaagaguauc

SEQ ID NO: 12523 - RNA, 38 nt, Artificial Sequence
  Description of Artificial Sequence:  Enzymatic Nucleic Acid
aucaggggcugaugaggccguuaggccgaaaagaguau

SEQ ID NO: 12524 - RNA, 38 nt, Artificial Sequence
  Description of Artificial Sequence:  Enzymatic Nucleic Acid
ucccaugucugaugaggccguuaggccgaaauucuuug

SEQ ID NO: 12525 - RNA, 38 nt, Artificial Sequence
  Description of Artificial Sequence:  Enzymatic Nucleic Acid
gccucucccugaugaggccguuaggccgaaacuguccc

SEQ ID NO: 12526 - RNA, 38 nt, Artificial Sequence
  Description of Artificial Sequence:  Enzymatic Nucleic Acid
cuauuauacugaugaggccguuaggccgaaagccucuc

SEQ ID NO: 12527 - RNA, 38 nt, Artificial Sequence
  Description of Artificial Sequence:  Enzymatic Nucleic Acid
gcuauuaucugaugaggccguuaggccgaaaagccucu

SEQ ID NO: 12528 - RNA, 38 nt, Artificial Sequence
  Description of Artificial Sequence:  Enzymatic Nucleic Acid
ugcuauuacugaugaggccguuaggccgaaaaagccuc

SEQ ID NO: 12529 - RNA, 38 nt, Artificial Sequence
  Description of Artificial Sequence:  Enzymatic Nucleic Acid
uuugcuaucugaugaggccguuaggccgaaauaaagcc

SEQ ID NO: 12530 - RNA, 38 nt, Artificial Sequence
  Description of Artificial Sequence:  Enzymatic Nucleic Acid
gcauuugccugaugaggccguuaggccgaaauuauaaa

SEQ ID NO: 12531 - RNA, 38 nt, Artificial Sequence
  Description of Artificial Sequence:  Enzymatic Nucleic Acid
ucucuuugcugaugaggccguuaggccgaaacguugca

SEQ ID NO: 12532 - RNA, 38 nt, Artificial Sequence
  Description of Artificial Sequence:  Enzymatic Nucleic Acid
agcagucccugaugaggccguuaggccgaaaucucuuu

SEQ ID NO: 12533 - RNA, 38 nt, Artificial Sequence
  Description of Artificial Sequence:  Enzymatic Nucleic Acid
ugcccguucugaugaggccguuaggccgaaacgguggc

SEQ ID NO: 12534 - RNA, 38 nt, Artificial Sequence
  Description of Artificial Sequence:  Enzymatic Nucleic Acid
uugucuggcugaugaggccguuaggccgaaacaggugc

SEQ ID NO: 12535 - RNA, 38 nt, Artificial Sequence
  Description of Artificial Sequence:  Enzymatic Nucleic Acid
gggucagacugaugaggccguuaggccgaaaguuuguc

SEQ ID NO: 12536 - RNA, 38 nt, Artificial Sequence
  Description of Artificial Sequence:  Enzymatic Nucleic Acid
augggucacugaugaggccguuaggccgaaauaguuug

SEQ ID NO: 12537 - RNA, 38 nt, Artificial Sequence
  Description of Artificial Sequence:  Enzymatic Nucleic Acid
ggucugcccugaugaggccguuaggccgaaauggguca

SEQ ID NO: 12538 - RNA, 38 nt, Artificial Sequence
  Description of Artificial Sequence:  Enzymatic Nucleic Acid
uaggauugcugaugaggccguuaggccgaaauuggucu

SEQ ID NO: 12539 - RNA, 38 nt, Artificial Sequence
  Description of Artificial Sequence:  Enzymatic Nucleic Acid
acaucuagcugaugaggccguuaggccgaaauuguauu

SEQ ID NO: 12540 - RNA, 38 nt, Artificial Sequence
  Description of Artificial Sequence:  Enzymatic Nucleic Acid
uggacauccugaugaggccguuaggccgaaaggauugu

SEQ ID NO: 12541 - RNA, 38 nt, Artificial Sequence
  Description of Artificial Sequence:  Enzymatic Nucleic Acid
cguauuugcugaugaggccguuaggccgaaacaucuag

SEQ ID NO: 12542 - RNA, 38 nt, Artificial Sequence
  Description of Artificial Sequence:  Enzymatic Nucleic Acid
ggcgggcgcugaugaggccguuaggccgaaauuuggac

SEQ ID NO: 12543 - RNA, 38 nt, Artificial Sequence
  Description of Artificial Sequence:  Enzymatic Nucleic Acid
ugcccgugcugaugaggccguuaggccgaaagcagucu

SEQ ID NO: 12544 - RNA, 38 nt, Artificial Sequence
  Description of Artificial Sequence:  Enzymatic Nucleic Acid
gaggacaacugaugaggccguuaggccgaaagucugcc

SEQ ID NO: 12545 - RNA, 38 nt, Artificial Sequence
  Description of Artificial Sequence:  Enzymatic Nucleic Acid
uugaggaccugaugaggccguuaggccgaaagagucug

SEQ ID NO: 12546 - RNA, 38 nt, Artificial Sequence
  Description of Artificial Sequence:  Enzymatic Nucleic Acid
caguugagcugaugaggccguuaggccgaaacaagagu

SEQ ID NO: 12547 - RNA, 38 nt, Artificial Sequence
  Description of Artificial Sequence:  Enzymatic Nucleic Acid
gugcaguucugaugaggccguuaggccgaaaggacaag

SEQ ID NO: 12548 - RNA, 38 nt, Artificial Sequence
  Description of Artificial Sequence:  Enzymatic Nucleic Acid
cucguauucugaugaggccguuaggccgaaagcuccgu

SEQ ID NO: 12549 - RNA, 38 nt, Artificial Sequence
  Description of Artificial Sequence:  Enzymatic Nucleic Acid
cacccucgcugaugaggccguuaggccgaaauugagcu

SEQ ID NO: 12550 - RNA, 38 nt, Artificial Sequence
  Description of Artificial Sequence:  Enzymatic Nucleic Acid
accagggucugaugaggccguuaggccgaaauuccagc

SEQ ID NO: 12551 - RNA, 38 nt, Artificial Sequence
  Description of Artificial Sequence:  Enzymatic Nucleic Acid
uaccagggcugaugaggccguuaggccgaaaauuccag

SEQ ID NO: 12552 - RNA, 38 nt, Artificial Sequence
  Description of Artificial Sequence:  Enzymatic Nucleic Acid
aguugcuucugaugaggccguuaggccgaaaccagggu

SEQ ID NO: 12553 - RNA, 38 nt, Artificial Sequence
  Description of Artificial Sequence:  Enzymatic Nucleic Acid
ugcucucucugaugaggccguuaggccgaaaguugcuu

SEQ ID NO: 12554 - RNA, 38 nt, Artificial Sequence
  Description of Artificial Sequence:  Enzymatic Nucleic Acid
gccuuauacugaugaggccguuaggccgaaaugcucuc

SEQ ID NO: 12555 - RNA, 38 nt, Artificial Sequence
  Description of Artificial Sequence:  Enzymatic Nucleic Acid
cugccuuacugaugaggccguuaggccgaaagaugcuc

SEQ ID NO: 12556 - RNA, 38 nt, Artificial Sequence
  Description of Artificial Sequence:  Enzymatic Nucleic Acid
cgcugccucugaugaggccguuaggccgaaauagaugc

SEQ ID NO: 12557 - RNA, 38 nt, Artificial Sequence
  Description of Artificial Sequence:  Enzymatic Nucleic Acid
cuccgguccugaugaggccguuaggccgaaauccgcug

SEQ ID NO: 12558 - RNA, 38 nt, Artificial Sequence
  Description of Artificial Sequence:  Enzymatic Nucleic Acid
guugugggcugaugaggccguuaggccgaaauggcucc

SEQ ID NO: 12559 - RNA, 38 nt, Artificial Sequence
  Description of Artificial Sequence:  Enzymatic Nucleic Acid
uguuguggcugaugaggccguuaggccgaaaauggcuc

SEQ ID NO: 12560 - RNA, 38 nt, Artificial Sequence
  Description of Artificial Sequence:  Enzymatic Nucleic Acid
cacuguggcugaugaggccguuaggccgaaacacauug

SEQ ID NO: 12561 - RNA, 38 nt, Artificial Sequence
  Description of Artificial Sequence:  Enzymatic Nucleic Acid
acacugugcugaugaggccguuaggccgaaaacacauu

SEQ ID NO: 12562 - RNA, 38 nt, Artificial Sequence
  Description of Artificial Sequence:  Enzymatic Nucleic Acid
aucuuaagcugaugaggccguuaggccgaaacacugug

SEQ ID NO: 12563 - RNA, 38 nt, Artificial Sequence
  Description of Artificial Sequence:  Enzymatic Nucleic Acid
gaucuuaacugaugaggccguuaggccgaaaacacugu

SEQ ID NO: 12564 - RNA, 38 nt, Artificial Sequence
  Description of Artificial Sequence:  Enzymatic Nucleic Acid
uugaucuucugaugaggccguuaggccgaaagaacacu

SEQ ID NO: 12565 - RNA, 38 nt, Artificial Sequence
  Description of Artificial Sequence:  Enzymatic Nucleic Acid
guugaucucugaugaggccguuaggccgaaaagaacac

SEQ ID NO: 12566 - RNA, 38 nt, Artificial Sequence
  Description of Artificial Sequence:  Enzymatic Nucleic Acid
acauuguucugaugaggccguuaggccgaaaucuuaag

SEQ ID NO: 12567 - RNA, 38 nt, Artificial Sequence
  Description of Artificial Sequence:  Enzymatic Nucleic Acid
cagguguacugaugaggccguuaggccgaaagccccuu

SEQ ID NO: 12568 - RNA, 38 nt, Artificial Sequence
  Description of Artificial Sequence:  Enzymatic Nucleic Acid
gacaggugcugaugaggccguuaggccgaaagagcccc

SEQ ID NO: 12569 - RNA, 38 nt, Artificial Sequence
  Description of Artificial Sequence:  Enzymatic Nucleic Acid
cuucacgccugaugaggccguuaggccgaaacaggugu

SEQ ID NO: 12570 - RNA, 38 nt, Artificial Sequence
  Description of Artificial Sequence:  Enzymatic Nucleic Acid
ggaacgagcugaugaggccguuaggccgaaacccacuc

SEQ ID NO: 12571 - RNA, 38 nt, Artificial Sequence
  Description of Artificial Sequence:  Enzymatic Nucleic Acid
acuggaaccugaugaggccguuaggccgaaaggaccca

SEQ ID NO: 12572 - RNA, 38 nt, Artificial Sequence
  Description of Artificial Sequence:  Enzymatic Nucleic Acid
aagacuggcugaugaggccguuaggccgaaacgaggac

SEQ ID NO: 12573 - RNA, 38 nt, Artificial Sequence
  Description of Artificial Sequence:  Enzymatic Nucleic Acid
aaagacugcugaugaggccguuaggccgaaaacgagga

SEQ ID NO: 12574 - RNA, 38 nt, Artificial Sequence
  Description of Artificial Sequence:  Enzymatic Nucleic Acid
uguugaaacugaugaggccguuaggccgaaacuggaac

SEQ ID NO: 12575 - RNA, 38 nt, Artificial Sequence
  Description of Artificial Sequence:  Enzymatic Nucleic Acid
gguguugacugaugaggccguuaggccgaaagacugga

SEQ ID NO: 12576 - RNA, 38 nt, Artificial Sequence
  Description of Artificial Sequence:  Enzymatic Nucleic Acid
agguguugcugaugaggccguuaggccgaaaagacugg

SEQ ID NO: 12577 - RNA, 38 nt, Artificial Sequence
  Description of Artificial Sequence:  Enzymatic Nucleic Acid
gagguguucugaugaggccguuaggccgaaaaagacug

SEQ ID NO: 12578 - RNA, 38 nt, Artificial Sequence
  Description of Artificial Sequence:  Enzymatic Nucleic Acid
caugcacgcugaugaggccguuaggccgaaagguguug

SEQ ID NO: 12579 - RNA, 38 nt, Artificial Sequence
  Description of Artificial Sequence:  Enzymatic Nucleic Acid
cuuuuucacugaugaggccguuaggccgaaacacaugc

SEQ ID NO: 12580 - RNA, 38 nt, Artificial Sequence
  Description of Artificial Sequence:  Enzymatic Nucleic Acid
cacugaugcugaugaggccguuaggccgaaauccuuuu

SEQ ID NO: 12581 - RNA, 38 nt, Artificial Sequence
  Description of Artificial Sequence:  Enzymatic Nucleic Acid
acacugaucugaugaggccguuaggccgaaaauccuuu

SEQ ID NO: 12582 - RNA, 38 nt, Artificial Sequence
  Description of Artificial Sequence:  Enzymatic Nucleic Acid
uucacacucugaugaggccguuaggccgaaaugaaucc

SEQ ID NO: 12583 - RNA, 38 nt, Artificial Sequence
  Description of Artificial Sequence:  Enzymatic Nucleic Acid
cugcuucccugaugaggccguuaggccgaaauguuuca

SEQ ID NO: 12584 - RNA, 38 nt, Artificial Sequence
  Description of Artificial Sequence:  Enzymatic Nucleic Acid
gccgauagcugaugaggccguuaggccgaaaccgucuu

SEQ ID NO: 12585 - RNA, 38 nt, Artificial Sequence
  Description of Artificial Sequence:  Enzymatic Nucleic Acid
acagccgacugaugaggccguuaggccgaaaggaccgu

SEQ ID NO: 12586 - RNA, 38 nt, Artificial Sequence
  Description of Artificial Sequence:  Enzymatic Nucleic Acid
ggacagcccugaugaggccguuaggccgaaauaggacc

SEQ ID NO: 12587 - RNA, 38 nt, Artificial Sequence
  Description of Artificial Sequence:  Enzymatic Nucleic Acid
cuuucaugcugaugaggccguuaggccgaaacagccga

SEQ ID NO: 12588 - RNA, 38 nt, Artificial Sequence
  Description of Artificial Sequence:  Enzymatic Nucleic Acid
gggaggggcugaugaggccguuaggccgaaaggccuuc

SEQ ID NO: 12589 - RNA, 38 nt, Artificial Sequence
  Description of Artificial Sequence:  Enzymatic Nucleic Acid
ggggagggcugaugaggccguuaggccgaaaaggccuu

SEQ ID NO: 12590 - RNA, 38 nt, Artificial Sequence
  Description of Artificial Sequence:  Enzymatic Nucleic Acid
uuucugggcugaugaggccguuaggccgaaaggggaag

SEQ ID NO: 12591 - RNA, 38 nt, Artificial Sequence
  Description of Artificial Sequence:  Enzymatic Nucleic Acid
aaccauaccugaugaggccguuaggccgaaauuucugg

SEQ ID NO: 12592 - RNA, 38 nt, Artificial Sequence
  Description of Artificial Sequence:  Enzymatic Nucleic Acid
uuuaaccacugaugaggccguuaggccgaaacgauuuc

SEQ ID NO: 12593 - RNA, 38 nt, Artificial Sequence
  Description of Artificial Sequence:  Enzymatic Nucleic Acid
caucuuuucugaugaggccguuaggccgaaaccauacg

SEQ ID NO: 12594 - RNA, 38 nt, Artificial Sequence
  Description of Artificial Sequence:  Enzymatic Nucleic Acid
uugcaggccugaugaggccguuaggccgaaagccaucu

SEQ ID NO: 12595 - RNA, 38 nt, Artificial Sequence
  Description of Artificial Sequence:  Enzymatic Nucleic Acid
cagacuuccugaugaggccguuaggccgaaauguugca

SEQ ID NO: 12596 - RNA, 38 nt, Artificial Sequence
  Description of Artificial Sequence:  Enzymatic Nucleic Acid
agcgagcacugaugaggccguuaggccgaaacuucaau

SEQ ID NO: 12597 - RNA, 38 nt, Artificial Sequence
  Description of Artificial Sequence:  Enzymatic Nucleic Acid
caaauagccugaugaggccguuaggccgaaagcagacu

SEQ ID NO: 12598 - RNA, 38 nt, Artificial Sequence
  Description of Artificial Sequence:  Enzymatic Nucleic Acid
guaccaaacugaugaggccguuaggccgaaagcgagca

SEQ ID NO: 12599 - RNA, 38 nt, Artificial Sequence
  Description of Artificial Sequence:  Enzymatic Nucleic Acid
auguaccacugaugaggccguuaggccgaaauagcgag

SEQ ID NO: 12600 - RNA, 38 nt, Artificial Sequence
  Description of Artificial Sequence:  Enzymatic Nucleic Acid
cauguacccugaugaggccguuaggccgaaaauagcga

SEQ ID NO: 12601 - RNA, 38 nt, Artificial Sequence
  Description of Artificial Sequence:  Enzymatic Nucleic Acid
uagccaugcugaugaggccguuaggccgaaaccaaaua

SEQ ID NO: 12602 - RNA, 38 nt, Artificial Sequence
  Description of Artificial Sequence:  Enzymatic Nucleic Acid
uuaaugagcugaugaggccguuaggccgaaagccaugu

SEQ ID NO: 12603 - RNA, 38 nt, Artificial Sequence
  Description of Artificial Sequence:  Enzymatic Nucleic Acid
uaauuaaucugaugaggccguuaggccgaaaguagcca

SEQ ID NO: 12604 - RNA, 38 nt, Artificial Sequence
  Description of Artificial Sequence:  Enzymatic Nucleic Acid
ugauaauucugaugaggccguuaggccgaaaugaguag

SEQ ID NO: 12605 - RNA, 38 nt, Artificial Sequence
  Description of Artificial Sequence:  Enzymatic Nucleic Acid
uugauaaucugaugaggccguuaggccgaaaaugagua

SEQ ID NO: 12606 - RNA, 38 nt, Artificial Sequence
  Description of Artificial Sequence:  Enzymatic Nucleic Acid
ucuuugaucugaugaggccguuaggccgaaauuaauga

SEQ ID NO: 12607 - RNA, 38 nt, Artificial Sequence
  Description of Artificial Sequence:  Enzymatic Nucleic Acid
aucuuugacugaugaggccguuaggccgaaaauuaaug

SEQ ID NO: 12608 - RNA, 38 nt, Artificial Sequence
  Description of Artificial Sequence:  Enzymatic Nucleic Acid
acaucuuucugaugaggccguuaggccgaaauaauuaa

SEQ ID NO: 12609 - RNA, 38 nt, Artificial Sequence
  Description of Artificial Sequence:  Enzymatic Nucleic Acid
agaucguacugaugaggccguuaggccgaaaguccccu

SEQ ID NO: 12610 - RNA, 38 nt, Artificial Sequence
  Description of Artificial Sequence:  Enzymatic Nucleic Acid
caagaucgcugaugaggccguuaggccgaaauaguccc

SEQ ID NO: 12611 - RNA, 38 nt, Artificial Sequence
  Description of Artificial Sequence:  Enzymatic Nucleic Acid
cccagcaacugaugaggccguuaggccgaaaucguaua

SEQ ID NO: 12612 - RNA, 38 nt, Artificial Sequence
  Description of Artificial Sequence:  Enzymatic Nucleic Acid
ugcccagccugaugaggccguuaggccgaaagaucgua

SEQ ID NO: 12613 - RNA, 38 nt, Artificial Sequence
  Description of Artificial Sequence:  Enzymatic Nucleic Acid
gacugcuucugaugaggccguuaggccgaaaugcccag

SEQ ID NO: 12614 - RNA, 38 nt, Artificial Sequence
  Description of Artificial Sequence:  Enzymatic Nucleic Acid
auagccuucugaugaggccguuaggccgaaacugcuuu

SEQ ID NO: 12615 - RNA, 38 nt, Artificial Sequence
  Description of Artificial Sequence:  Enzymatic Nucleic Acid
uuuuuaaacugaugaggccguuaggccgaaagccuuga

SEQ ID NO: 12616 - RNA, 38 nt, Artificial Sequence
  Description of Artificial Sequence:  Enzymatic Nucleic Acid
gguuuuuacugaugaggccguuaggccgaaauagccuu

SEQ ID NO: 12617 - RNA, 38 nt, Artificial Sequence
  Description of Artificial Sequence:  Enzymatic Nucleic Acid
agguuuuucugaugaggccguuaggccgaaaauagccu

SEQ ID NO: 12618 - RNA, 38 nt, Artificial Sequence
  Description of Artificial Sequence:  Enzymatic Nucleic Acid
gagguuuucugaugaggccguuaggccgaaaaauagcc

SEQ ID NO: 12619 - RNA, 38 nt, Artificial Sequence
  Description of Artificial Sequence:  Enzymatic Nucleic Acid
uacaaugacugaugaggccguuaggccgaaaguggcag

SEQ ID NO: 12620 - RNA, 38 nt, Artificial Sequence
  Description of Artificial Sequence:  Enzymatic Nucleic Acid
uuuacaaucugaugaggccguuaggccgaaagaguggc

SEQ ID NO: 12621 - RNA, 38 nt, Artificial Sequence
  Description of Artificial Sequence:  Enzymatic Nucleic Acid
acguuuaccugaugaggccguuaggccgaaaugagagu

SEQ ID NO: 12622 - RNA, 38 nt, Artificial Sequence
  Description of Artificial Sequence:  Enzymatic Nucleic Acid
uucacguucugaugaggccguuaggccgaaacaaugag

SEQ ID NO: 12623 - RNA, 38 nt, Artificial Sequence
  Description of Artificial Sequence:  Enzymatic Nucleic Acid
guagaucucugaugaggccguuaggccgaaagguuuca

SEQ ID NO: 12624 - RNA, 38 nt, Artificial Sequence
  Description of Artificial Sequence:  Enzymatic Nucleic Acid
uuuucguacugaugaggccguuaggccgaaaucugagg

SEQ ID NO: 12625 - RNA, 38 nt, Artificial Sequence
  Description of Artificial Sequence:  Enzymatic Nucleic Acid
acuuuucgcugaugaggccguuaggccgaaagaucuga

SEQ ID NO: 12626 - RNA, 38 nt, Artificial Sequence
  Description of Artificial Sequence:  Enzymatic Nucleic Acid
aggacacgcugaugaggccguuaggccgaaacuuuucg

SEQ ID NO: 12627 - RNA, 38 nt, Artificial Sequence
  Description of Artificial Sequence:  Enzymatic Nucleic Acid
gaagcgagcugaugaggccguuaggccgaaacacggac

SEQ ID NO: 12628 - RNA, 38 nt, Artificial Sequence
  Description of Artificial Sequence:  Enzymatic Nucleic Acid
uuggaagccugaugaggccguuaggccgaaaggacacg

SEQ ID NO: 12629 - RNA, 38 nt, Artificial Sequence
  Description of Artificial Sequence:  Enzymatic Nucleic Acid
gggcuuggcugaugaggccguuaggccgaaagcgagga

SEQ ID NO: 12630 - RNA, 38 nt, Artificial Sequence
  Description of Artificial Sequence:  Enzymatic Nucleic Acid
ugggcuugcugaugaggccguuaggccgaaaagcgagg

SEQ ID NO: 12631 - RNA, 38 nt, Artificial Sequence
  Description of Artificial Sequence:  Enzymatic Nucleic Acid
cggauagacugaugaggccguuaggccgaaaggugggc

SEQ ID NO: 12632 - RNA, 38 nt, Artificial Sequence
  Description of Artificial Sequence:  Enzymatic Nucleic Acid
agcggauacugaugaggccguuaggccgaaagaggugg

SEQ ID NO: 12633 - RNA, 38 nt, Artificial Sequence
  Description of Artificial Sequence:  Enzymatic Nucleic Acid
ccagcggacugaugaggccguuaggccgaaagagaggu

SEQ ID NO: 12634 - RNA, 38 nt, Artificial Sequence
  Description of Artificial Sequence:  Enzymatic Nucleic Acid
gcccagcgcugaugaggccguuaggccgaaauagagag

SEQ ID NO: 12635 - RNA, 38 nt, Artificial Sequence
  Description of Artificial Sequence:  Enzymatic Nucleic Acid
caagugagcugaugaggccguuaggccgaaacuugucu

SEQ ID NO: 12636 - RNA, 38 nt, Artificial Sequence
  Description of Artificial Sequence:  Enzymatic Nucleic Acid
gugcaagucugaugaggccguuaggccgaaaggacuug

SEQ ID NO: 12637 - RNA, 38 nt, Artificial Sequence
  Description of Artificial Sequence:  Enzymatic Nucleic Acid
cacggugccugaugaggccguuaggccgaaagugagga

SEQ ID NO: 12638 - RNA, 38 nt, Artificial Sequence
  Description of Artificial Sequence:  Enzymatic Nucleic Acid
ggaugccacugaugaggccguuaggccgaaacacggug

SEQ ID NO: 12639 - RNA, 38 nt, Artificial Sequence
  Description of Artificial Sequence:  Enzymatic Nucleic Acid
ggccgaggcugaugaggccguuaggccgaaaugccaua

SEQ ID NO: 12640 - RNA, 38 nt, Artificial Sequence
  Description of Artificial Sequence:  Enzymatic Nucleic Acid
uguuggcccugaugaggccguuaggccgaaagggaugc

SEQ ID NO: 12641 - RNA, 38 nt, Artificial Sequence
  Description of Artificial Sequence:  Enzymatic Nucleic Acid
agccacgucugaugaggccguuaggccgaaauuguugg

SEQ ID NO: 12642 - RNA, 38 nt, Artificial Sequence
  Description of Artificial Sequence:  Enzymatic Nucleic Acid
gggugccacugaugaggccguuaggccgaaagccacgu

SEQ ID NO: 12643 - RNA, 38 nt, Artificial Sequence
  Description of Artificial Sequence:  Enzymatic Nucleic Acid
auuguggucugaugaggccguuaggccgaaacaggggu

SEQ ID NO: 12644 - RNA, 38 nt, Artificial Sequence
  Description of Artificial Sequence:  Enzymatic Nucleic Acid
uuuggagucugaugaggccguuaggccgaaauuguggu

SEQ ID NO: 12645 - RNA, 38 nt, Artificial Sequence
  Description of Artificial Sequence:  Enzymatic Nucleic Acid
uuucuuugcugaugaggccguuaggccgaaagugauug

SEQ ID NO: 12646 - RNA, 38 nt, Artificial Sequence
  Description of Artificial Sequence:  Enzymatic Nucleic Acid
agaagucacugaugaggccguuaggccgaaaccuuucu

SEQ ID NO: 12647 - RNA, 38 nt, Artificial Sequence
  Description of Artificial Sequence:  Enzymatic Nucleic Acid
cagugcagcugaugaggccguuaggccgaaagucauac

SEQ ID NO: 12648 - RNA, 38 nt, Artificial Sequence
  Description of Artificial Sequence:  Enzymatic Nucleic Acid
ucagugcacugaugaggccguuaggccgaaaagucaua

SEQ ID NO: 12649 - RNA, 38 nt, Artificial Sequence
  Description of Artificial Sequence:  Enzymatic Nucleic Acid
ggauaaagcugaugaggccguuaggccgaaauucuuca

SEQ ID NO: 12650 - RNA, 38 nt, Artificial Sequence
  Description of Artificial Sequence:  Enzymatic Nucleic Acid
ccaggauacugaugaggccguuaggccgaaaggauucu

SEQ ID NO: 12651 - RNA, 38 nt, Artificial Sequence
  Description of Artificial Sequence:  Enzymatic Nucleic Acid
uccaggaucugaugaggccguuaggccgaaaaggauuc

SEQ ID NO: 12652 - RNA, 38 nt, Artificial Sequence
  Description of Artificial Sequence:  Enzymatic Nucleic Acid
auccaggacugaugaggccguuaggccgaaaaaggauu

SEQ ID NO: 12653 - RNA, 38 nt, Artificial Sequence
  Description of Artificial Sequence:  Enzymatic Nucleic Acid
ggauccagcugaugaggccguuaggccgaaauaaagga

SEQ ID NO: 12654 - RNA, 38 nt, Artificial Sequence
  Description of Artificial Sequence:  Enzymatic Nucleic Acid
gcugcuggcugaugaggccguuaggccgaaauccagga

SEQ ID NO: 12655 - RNA, 38 nt, Artificial Sequence
  Description of Artificial Sequence:  Enzymatic Nucleic Acid
uguuuccucugaugaggccguuaggccgaaaguugcug

SEQ ID NO: 12656 - RNA, 38 nt, Artificial Sequence
  Description of Artificial Sequence:  Enzymatic Nucleic Acid
cuguuucccugaugaggccguuaggccgaaaaguugcu

SEQ ID NO: 12657 - RNA, 38 nt, Artificial Sequence
  Description of Artificial Sequence:  Enzymatic Nucleic Acid
cgcugagacugaugaggccguuaggccgaaaugcucuc

SEQ ID NO: 12658 - RNA, 38 nt, Artificial Sequence
  Description of Artificial Sequence:  Enzymatic Nucleic Acid
ugcgcugacugaugaggccguuaggccgaaagaugcuc

SEQ ID NO: 12659 - RNA, 38 nt, Artificial Sequence
  Description of Artificial Sequence:  Enzymatic Nucleic Acid
caugcgcucugaugaggccguuaggccgaaagagaugc

SEQ ID NO: 12660 - RNA, 38 nt, Artificial Sequence
  Description of Artificial Sequence:  Enzymatic Nucleic Acid
ccuucuaucugaugaggccguuaggccgaaaccgucau

SEQ ID NO: 12661 - RNA, 38 nt, Artificial Sequence
  Description of Artificial Sequence:  Enzymatic Nucleic Acid
guuccuuccugaugaggccguuaggccgaaaugaccgu

SEQ ID NO: 12662 - RNA, 38 nt, Artificial Sequence
  Description of Artificial Sequence:  Enzymatic Nucleic Acid
aaccgucucugaugaggccguuaggccgaaauuuguuc

SEQ ID NO: 12663 - RNA, 38 nt, Artificial Sequence
  Description of Artificial Sequence:  Enzymatic Nucleic Acid
aaugugcucugaugaggccguuaggccgaaaccgucuu

SEQ ID NO: 12664 - RNA, 38 nt, Artificial Sequence
  Description of Artificial Sequence:  Enzymatic Nucleic Acid
caaugugccugaugaggccguuaggccgaaaaccgucu

SEQ ID NO: 12665 - RNA, 38 nt, Artificial Sequence
  Description of Artificial Sequence:  Enzymatic Nucleic Acid
ccaccacccugaugaggccguuaggccgaaaugugcua

SEQ ID NO: 12666 - RNA, 38 nt, Artificial Sequence
  Description of Artificial Sequence:  Enzymatic Nucleic Acid
gggucugacugaugaggccguuaggccgaaagucagcc

SEQ ID NO: 12667 - RNA, 38 nt, Artificial Sequence
  Description of Artificial Sequence:  Enzymatic Nucleic Acid
aggggucucugaugaggccguuaggccgaaagagucag

SEQ ID NO: 12668 - RNA, 38 nt, Artificial Sequence
  Description of Artificial Sequence:  Enzymatic Nucleic Acid
cagcuguacugaugaggccguuaggccgaaauuccagg

SEQ ID NO: 12669 - RNA, 38 nt, Artificial Sequence
  Description of Artificial Sequence:  Enzymatic Nucleic Acid
ggcagcugcugaugaggccguuaggccgaaagauucca

SEQ ID NO: 12670 - RNA, 38 nt, Artificial Sequence
  Description of Artificial Sequence:  Enzymatic Nucleic Acid
uuuuauugcugaugaggccguuaggccgaaaggcccgg

SEQ ID NO: 12671 - RNA, 38 nt, Artificial Sequence
  Description of Artificial Sequence:  Enzymatic Nucleic Acid
auuuuauucugaugaggccguuaggccgaaaaggcccg

SEQ ID NO: 12672 - RNA, 38 nt, Artificial Sequence
  Description of Artificial Sequence:  Enzymatic Nucleic Acid
cccuauuucugaugaggccguuaggccgaaauugaagg

SEQ ID NO: 12673 - RNA, 38 nt, Artificial Sequence
  Description of Artificial Sequence:  Enzymatic Nucleic Acid
acaguccccugaugaggccguuaggccgaaauuuuauu

SEQ ID NO: 12674 - RNA, 38 nt, Artificial Sequence
  Description of Artificial Sequence:  Enzymatic Nucleic Acid
uaaaauuucugaugaggccguuaggccgaaauguuucu

SEQ ID NO: 12675 - RNA, 38 nt, Artificial Sequence
  Description of Artificial Sequence:  Enzymatic Nucleic Acid
ugacauaacugaugaggccguuaggccgaaauuuuaug

SEQ ID NO: 12676 - RNA, 38 nt, Artificial Sequence
  Description of Artificial Sequence:  Enzymatic Nucleic Acid
gugacauacugaugaggccguuaggccgaaaauuuuau

SEQ ID NO: 12677 - RNA, 38 nt, Artificial Sequence
  Description of Artificial Sequence:  Enzymatic Nucleic Acid
ugugacaucugaugaggccguuaggccgaaaaauuuua

SEQ ID NO: 12678 - RNA, 38 nt, Artificial Sequence
  Description of Artificial Sequence:  Enzymatic Nucleic Acid
cugugacacugaugaggccguuaggccgaaaaaauuuu

SEQ ID NO: 12679 - RNA, 38 nt, Artificial Sequence
  Description of Artificial Sequence:  Enzymatic Nucleic Acid
acaucugucugaugaggccguuaggccgaaacauaaaa

SEQ ID NO: 12680 - RNA, 38 nt, Artificial Sequence
  Description of Artificial Sequence:  Enzymatic Nucleic Acid
aaacgugacugaugaggccguuaggccgaaagccauuc

SEQ ID NO: 12681 - RNA, 38 nt, Artificial Sequence
  Description of Artificial Sequence:  Enzymatic Nucleic Acid
gaaacgugcugaugaggccguuaggccgaaaagccauu

SEQ ID NO: 12682 - RNA, 38 nt, Artificial Sequence
  Description of Artificial Sequence:  Enzymatic Nucleic Acid
ggaaacgucugaugaggccguuaggccgaaaaagccau

SEQ ID NO: 12683 - RNA, 38 nt, Artificial Sequence
  Description of Artificial Sequence:  Enzymatic Nucleic Acid
uccaaggacugaugaggccguuaggccgaaacgugaaa

SEQ ID NO: 12684 - RNA, 38 nt, Artificial Sequence
  Description of Artificial Sequence:  Enzymatic Nucleic Acid
uuccaaggcugaugaggccguuaggccgaaaacgugaa

SEQ ID NO: 12685 - RNA, 38 nt, Artificial Sequence
  Description of Artificial Sequence:  Enzymatic Nucleic Acid
uuuccaagcugaugaggccguuaggccgaaaaacguga

SEQ ID NO: 12686 - RNA, 38 nt, Artificial Sequence
  Description of Artificial Sequence:  Enzymatic Nucleic Acid
ucuuuucccugaugaggccguuaggccgaaaggaaacg

SEQ ID NO: 12687 - RNA, 38 nt, Artificial Sequence
  Description of Artificial Sequence:  Enzymatic Nucleic Acid
ccacacagcugaugaggccguuaggccgaaacaguuuc

SEQ ID NO: 12688 - RNA, 38 nt, Artificial Sequence
  Description of Artificial Sequence:  Enzymatic Nucleic Acid
aauuuauucugaugaggccguuaggccgaaaccacaca

SEQ ID NO: 12689 - RNA, 38 nt, Artificial Sequence
  Description of Artificial Sequence:  Enzymatic Nucleic Acid
caggaauucugaugaggccguuaggccgaaauugacca

SEQ ID NO: 12690 - RNA, 38 nt, Artificial Sequence
  Description of Artificial Sequence:  Enzymatic Nucleic Acid
uguacaggcugaugaggccguuaggccgaaauuuauug

SEQ ID NO: 12691 - RNA, 38 nt, Artificial Sequence
  Description of Artificial Sequence:  Enzymatic Nucleic Acid
cuguacagcugaugaggccguuaggccgaaaauuuauu

SEQ ID NO: 12692 - RNA, 38 nt, Artificial Sequence
  Description of Artificial Sequence:  Enzymatic Nucleic Acid
ugucucugcugaugaggccguuaggccgaaacaggaau

SEQ ID NO: 12693 - RNA, 38 nt, Artificial Sequence
  Description of Artificial Sequence:  Enzymatic Nucleic Acid
auccaggucugaugaggccguuaggccgaaaugucucu

SEQ ID NO: 12694 - RNA, 38 nt, Artificial Sequence
  Description of Artificial Sequence:  Enzymatic Nucleic Acid
aauccaggcugaugaggccguuaggccgaaaaugucuc

SEQ ID NO: 12695 - RNA, 38 nt, Artificial Sequence
  Description of Artificial Sequence:  Enzymatic Nucleic Acid
cguagcagcugaugaggccguuaggccgaaauccaggu

SEQ ID NO: 12696 - RNA, 38 nt, Artificial Sequence
  Description of Artificial Sequence:  Enzymatic Nucleic Acid
ccguagcacugaugaggccguuaggccgaaaauccagg

SEQ ID NO: 12697 - RNA, 38 nt, Artificial Sequence
  Description of Artificial Sequence:  Enzymatic Nucleic Acid
acuguccgcugaugaggccguuaggccgaaagcagaau

SEQ ID NO: 12698 - RNA, 38 nt, Artificial Sequence
  Description of Artificial Sequence:  Enzymatic Nucleic Acid
cuguuguucugaugaggccguuaggccgaaacuguccg

SEQ ID NO: 12699 - RNA, 38 nt, Artificial Sequence
  Description of Artificial Sequence:  Enzymatic Nucleic Acid
ucuguugucugaugaggccguuaggccgaaaacugucc

SEQ ID NO: 12700 - RNA, 38 nt, Artificial Sequence
  Description of Artificial Sequence:  Enzymatic Nucleic Acid
gcugauaccugaugaggccguuaggccgaaauggugca

SEQ ID NO: 12701 - RNA, 38 nt, Artificial Sequence
  Description of Artificial Sequence:  Enzymatic Nucleic Acid
cuugcugacugaugaggccguuaggccgaaacuauggu

SEQ ID NO: 12702 - RNA, 38 nt, Artificial Sequence
  Description of Artificial Sequence:  Enzymatic Nucleic Acid
ugcuugcucugaugaggccguuaggccgaaauacuaug

SEQ ID NO: 12703 - RNA, 38 nt, Artificial Sequence
  Description of Artificial Sequence:  Enzymatic Nucleic Acid
guaaucuucugaugaggccguuaggccgaaaguggugg

SEQ ID NO: 12704 - RNA, 38 nt, Artificial Sequence
  Description of Artificial Sequence:  Enzymatic Nucleic Acid
gauggagucugaugaggccguuaggccgaaaucuugag

SEQ ID NO: 12705 - RNA, 38 nt, Artificial Sequence
  Description of Artificial Sequence:  Enzymatic Nucleic Acid
ugauggagcugaugaggccguuaggccgaaaaucuuga

SEQ ID NO: 12706 - RNA, 38 nt, Artificial Sequence
  Description of Artificial Sequence:  Enzymatic Nucleic Acid
gagugaugcugaugaggccguuaggccgaaaguaaucu

SEQ ID NO: 12707 - RNA, 38 nt, Artificial Sequence
  Description of Artificial Sequence:  Enzymatic Nucleic Acid
uucagagucugaugaggccguuaggccgaaauggagua

SEQ ID NO: 12708 - RNA, 38 nt, Artificial Sequence
  Description of Artificial Sequence:  Enzymatic Nucleic Acid
aagguucacugaugaggccguuaggccgaaagugaugg

SEQ ID NO: 12709 - RNA, 38 nt, Artificial Sequence
  Description of Artificial Sequence:  Enzymatic Nucleic Acid
uugaugaccugaugaggccguuaggccgaaagguucag

SEQ ID NO: 12710 - RNA, 38 nt, Artificial Sequence
  Description of Artificial Sequence:  Enzymatic Nucleic Acid
uucuugaucugaugaggccguuaggccgaaacaagguu

SEQ ID NO: 12711 - RNA, 38 nt, Artificial Sequence
  Description of Artificial Sequence:  Enzymatic Nucleic Acid
acguucuucugaugaggccguuaggccgaaaugacaag

SEQ ID NO: 12712 - RNA, 38 nt, Artificial Sequence
  Description of Artificial Sequence:  Enzymatic Nucleic Acid
cuucuagacugaugaggccguuaggccgaaacacguuc

SEQ ID NO: 12713 - RNA, 38 nt, Artificial Sequence
  Description of Artificial Sequence:  Enzymatic Nucleic Acid
gucuucuacugaugaggccguuaggccgaaagacacgu

SEQ ID NO: 12714 - RNA, 38 nt, Artificial Sequence
  Description of Artificial Sequence:  Enzymatic Nucleic Acid
gagucuuccugaugaggccguuaggccgaaagagacac

SEQ ID NO: 12715 - RNA, 38 nt, Artificial Sequence
  Description of Artificial Sequence:  Enzymatic Nucleic Acid
aggugccccugaugaggccguuaggccgaaagucuucu

SEQ ID NO: 12716 - RNA, 38 nt, Artificial Sequence
  Description of Artificial Sequence:  Enzymatic Nucleic Acid
ugcacgcacugaugaggccguuaggccgaaaggugccc

SEQ ID NO: 12717 - RNA, 38 nt, Artificial Sequence
  Description of Artificial Sequence:  Enzymatic Nucleic Acid
ccuguguacugaugaggccguuaggccgaaauguuccu

SEQ ID NO: 12718 - RNA, 38 nt, Artificial Sequence
  Description of Artificial Sequence:  Enzymatic Nucleic Acid
ccccugugcugaugaggccguuaggccgaaauauguuc

SEQ ID NO: 12719 - RNA, 38 nt, Artificial Sequence
  Description of Artificial Sequence:  Enzymatic Nucleic Acid
uuccgaagcugaugaggccguuaggccgaaaugucuuc

SEQ ID NO: 12720 - RNA, 38 nt, Artificial Sequence
  Description of Artificial Sequence:  Enzymatic Nucleic Acid
gucuuccgcugaugaggccguuaggccgaaaggauguc

SEQ ID NO: 12721 - RNA, 38 nt, Artificial Sequence
  Description of Artificial Sequence:  Enzymatic Nucleic Acid
ugucuucccugaugaggccguuaggccgaaaaggaugu

SEQ ID NO: 12722 - RNA, 38 nt, Artificial Sequence
  Description of Artificial Sequence:  Enzymatic Nucleic Acid
cuaacgagcugaugaggccguuaggccgaaacuucugu

SEQ ID NO: 12723 - RNA, 38 nt, Artificial Sequence
  Description of Artificial Sequence:  Enzymatic Nucleic Acid
ucuaacgacugaugaggccguuaggccgaaaacuucug

SEQ ID NO: 12724 - RNA, 38 nt, Artificial Sequence
  Description of Artificial Sequence:  Enzymatic Nucleic Acid
ucucuaaccugaugaggccguuaggccgaaagaacuuc

SEQ ID NO: 12725 - RNA, 38 nt, Artificial Sequence
  Description of Artificial Sequence:  Enzymatic Nucleic Acid
gaaucucucugaugaggccguuaggccgaaacgagaac

SEQ ID NO: 12726 - RNA, 38 nt, Artificial Sequence
  Description of Artificial Sequence:  Enzymatic Nucleic Acid
cgaaucuccugaugaggccguuaggccgaaaacgagaa

SEQ ID NO: 12727 - RNA, 38 nt, Artificial Sequence
  Description of Artificial Sequence:  Enzymatic Nucleic Acid
cgcuuccgcugaugaggccguuaggccgaaaucucuaa

SEQ ID NO: 12728 - RNA, 38 nt, Artificial Sequence
  Description of Artificial Sequence:  Enzymatic Nucleic Acid
gcgcuucccugaugaggccguuaggccgaaaaucucua

SEQ ID NO: 12729 - RNA, 38 nt, Artificial Sequence
  Description of Artificial Sequence:  Enzymatic Nucleic Acid
agguuuugcugaugaggccguuaggccgaaagcaggug

SEQ ID NO: 12730 - RNA, 38 nt, Artificial Sequence
  Description of Artificial Sequence:  Enzymatic Nucleic Acid
gagguuuucugaugaggccguuaggccgaaaagcaggu

SEQ ID NO: 12731 - RNA, 38 nt, Artificial Sequence
  Description of Artificial Sequence:  Enzymatic Nucleic Acid
uagucacucugaugaggccguuaggccgaaagguuuug

SEQ ID NO: 12732 - RNA, 38 nt, Artificial Sequence
  Description of Artificial Sequence:  Enzymatic Nucleic Acid
agaccucgcugaugaggccguuaggccgaaagucacug

SEQ ID NO: 12733 - RNA, 38 nt, Artificial Sequence
  Description of Artificial Sequence:  Enzymatic Nucleic Acid
cugauggacugaugaggccguuaggccgaaaccucgua

SEQ ID NO: 12734 - RNA, 38 nt, Artificial Sequence
  Description of Artificial Sequence:  Enzymatic Nucleic Acid
cacugaugcugaugaggccguuaggccgaaagaccucg

SEQ ID NO: 12735 - RNA, 38 nt, Artificial Sequence
  Description of Artificial Sequence:  Enzymatic Nucleic Acid
gagccacucugaugaggccguuaggccgaaauggagac

SEQ ID NO: 12736 - RNA, 38 nt, Artificial Sequence
  Description of Artificial Sequence:  Enzymatic Nucleic Acid
aggucguacugaugaggccguuaggccgaaagccacug

SEQ ID NO: 12737 - RNA, 38 nt, Artificial Sequence
  Description of Artificial Sequence:  Enzymatic Nucleic Acid
uaaggucgcugaugaggccguuaggccgaaagagccac

SEQ ID NO: 12738 - RNA, 38 nt, Artificial Sequence
  Description of Artificial Sequence:  Enzymatic Nucleic Acid
gacagucucugaugaggccguuaggccgaaaggucgua

SEQ ID NO: 12739 - RNA, 38 nt, Artificial Sequence
  Description of Artificial Sequence:  Enzymatic Nucleic Acid
ugacaguccugaugaggccguuaggccgaaaaggucgu

SEQ ID NO: 12740 - RNA, 38 nt, Artificial Sequence
  Description of Artificial Sequence:  Enzymatic Nucleic Acid
ucuagcuucugaugaggccguuaggccgaaacagucua

SEQ ID NO: 12741 - RNA, 38 nt, Artificial Sequence
  Description of Artificial Sequence:  Enzymatic Nucleic Acid
gacaccuccugaugaggccguuaggccgaaagcuugac

SEQ ID NO: 12742 - RNA, 38 nt, Artificial Sequence
  Description of Artificial Sequence:  Enzymatic Nucleic Acid
ggcgcgggcugaugaggccguuaggccgaaacaccucu

SEQ ID NO: 12743 - RNA, 38 nt, Artificial Sequence
  Description of Artificial Sequence:  Enzymatic Nucleic Acid
agugaucucugaugaggccguuaggccgaaaggcgcgg

SEQ ID NO: 12744 - RNA, 38 nt, Artificial Sequence
  Description of Artificial Sequence:  Enzymatic Nucleic Acid
uuugaacccugaugaggccguuaggccgaaagugaucu

SEQ ID NO: 12745 - RNA, 38 nt, Artificial Sequence
  Description of Artificial Sequence:  Enzymatic Nucleic Acid
uguuuuugcugaugaggccguuaggccgaaaccaagug

SEQ ID NO: 12746 - RNA, 38 nt, Artificial Sequence
  Description of Artificial Sequence:  Enzymatic Nucleic Acid
ccuaaaaucugaugaggccguuaggccgaaauucccgg

SEQ ID NO: 12747 - RNA, 38 nt, Artificial Sequence
  Description of Artificial Sequence:  Enzymatic Nucleic Acid
uccuaaaacugaugaggccguuaggccgaaaauucccg

SEQ ID NO: 12748 - RNA, 38 nt, Artificial Sequence
  Description of Artificial Sequence:  Enzymatic Nucleic Acid
uccucugucugaugaggccguuaggccgaaacucuuuc

SEQ ID NO: 12749 - RNA, 38 nt, Artificial Sequence
  Description of Artificial Sequence:  Enzymatic Nucleic Acid
caccuauacugaugaggccguuaggccgaaacacccuc

SEQ ID NO: 12750 - RNA, 38 nt, Artificial Sequence
  Description of Artificial Sequence:  Enzymatic Nucleic Acid
ggcaccuacugaugaggccguuaggccgaaagacaccc

SEQ ID NO: 12751 - RNA, 38 nt, Artificial Sequence
  Description of Artificial Sequence:  Enzymatic Nucleic Acid
ucggcacccugaugaggccguuaggccgaaauagacac

SEQ ID NO: 12752 - RNA, 38 nt, Artificial Sequence
  Description of Artificial Sequence:  Enzymatic Nucleic Acid
cggugaggcugaugaggccguuaggccgaaaggcugcg

SEQ ID NO: 12753 - RNA, 38 nt, Artificial Sequence
  Description of Artificial Sequence:  Enzymatic Nucleic Acid
ugcacggucugaugaggccguuaggccgaaagguaggc

SEQ ID NO: 12754 - RNA, 38 nt, Artificial Sequence
  Description of Artificial Sequence:  Enzymatic Nucleic Acid
acuugucucugaugaggccguuaggccgaaagguuccu

SEQ ID NO: 12755 - RNA, 38 nt, Artificial Sequence
  Description of Artificial Sequence:  Enzymatic Nucleic Acid
ccagguuucugaugaggccguuaggccgaaacuugucu

SEQ ID NO: 12756 - RNA, 38 nt, Artificial Sequence
  Description of Artificial Sequence:  Enzymatic Nucleic Acid
gugagcgucugaugaggccguuaggccgaaaucagcuc

SEQ ID NO: 12757 - RNA, 38 nt, Artificial Sequence
  Description of Artificial Sequence:  Enzymatic Nucleic Acid
gugcacgucugaugaggccguuaggccgaaagcgugau

SEQ ID NO: 12758 - RNA, 38 nt, Artificial Sequence
  Description of Artificial Sequence:  Enzymatic Nucleic Acid
agccaaaacugaugaggccguuaggccgaaagggucgc

SEQ ID NO: 12759 - RNA, 38 nt, Artificial Sequence
  Description of Artificial Sequence:  Enzymatic Nucleic Acid
ggagccaacugaugaggccguuaggccgaaagaggguc

SEQ ID NO: 12760 - RNA, 38 nt, Artificial Sequence
  Description of Artificial Sequence:  Enzymatic Nucleic Acid
aggagccacugaugaggccguuaggccgaaaagagggu

SEQ ID NO: 12761 - RNA, 38 nt, Artificial Sequence
  Description of Artificial Sequence:  Enzymatic Nucleic Acid
aaggagcccugaugaggccguuaggccgaaaaagaggg

SEQ ID NO: 12762 - RNA, 38 nt, Artificial Sequence
  Description of Artificial Sequence:  Enzymatic Nucleic Acid
guuagaagcugaugaggccguuaggccgaaagccaaaa

SEQ ID NO: 12763 - RNA, 38 nt, Artificial Sequence
  Description of Artificial Sequence:  Enzymatic Nucleic Acid
agaguuagcugaugaggccguuaggccgaaaggagcca

SEQ ID NO: 12764 - RNA, 38 nt, Artificial Sequence
  Description of Artificial Sequence:  Enzymatic Nucleic Acid
gagaguuacugaugaggccguuaggccgaaaaggagcc

SEQ ID NO: 12765 - RNA, 38 nt, Artificial Sequence
  Description of Artificial Sequence:  Enzymatic Nucleic Acid
aagagagucugaugaggccguuaggccgaaagaaggag

SEQ ID NO: 12766 - RNA, 38 nt, Artificial Sequence
  Description of Artificial Sequence:  Enzymatic Nucleic Acid
gaugaagacugaugaggccguuaggccgaaaguuagaa

SEQ ID NO: 12767 - RNA, 38 nt, Artificial Sequence
  Description of Artificial Sequence:  Enzymatic Nucleic Acid
cugaugaacugaugaggccguuaggccgaaagaguuag

SEQ ID NO: 12768 - RNA, 38 nt, Artificial Sequence
  Description of Artificial Sequence:  Enzymatic Nucleic Acid
uucugaugcugaugaggccguuaggccgaaagagaguu

SEQ ID NO: 12769 - RNA, 38 nt, Artificial Sequence
  Description of Artificial Sequence:  Enzymatic Nucleic Acid
uuucugaucugaugaggccguuaggccgaaaagagagu

SEQ ID NO: 12770 - RNA, 38 nt, Artificial Sequence
  Description of Artificial Sequence:  Enzymatic Nucleic Acid
aguuuucucugaugaggccguuaggccgaaaugaagag

SEQ ID NO: 12771 - RNA, 38 nt, Artificial Sequence
  Description of Artificial Sequence:  Enzymatic Nucleic Acid
cggaagaacugaugaggccguuaggccgaaaccgcuuc

SEQ ID NO: 12772 - RNA, 38 nt, Artificial Sequence
  Description of Artificial Sequence:  Enzymatic Nucleic Acid
uucggaagcugaugaggccguuaggccgaaagaccgcu

SEQ ID NO: 12773 - RNA, 38 nt, Artificial Sequence
  Description of Artificial Sequence:  Enzymatic Nucleic Acid
cuucggaacugaugaggccguuaggccgaaaagaccgc

SEQ ID NO: 12774 - RNA, 38 nt, Artificial Sequence
  Description of Artificial Sequence:  Enzymatic Nucleic Acid
uacuucggcugaugaggccguuaggccgaaagaagacc

SEQ ID NO: 12775 - RNA, 38 nt, Artificial Sequence
  Description of Artificial Sequence:  Enzymatic Nucleic Acid
uuacuucgcugaugaggccguuaggccgaaaagaagac

SEQ ID NO: 12776 - RNA, 38 nt, Artificial Sequence
  Description of Artificial Sequence:  Enzymatic Nucleic Acid
ucugucuucugaugaggccguuaggccgaaacuucgga

SEQ ID NO: 12777 - RNA, 38 nt, Artificial Sequence
  Description of Artificial Sequence:  Enzymatic Nucleic Acid
uugacaggcugaugaggccguuaggccgaaagucuguc

SEQ ID NO: 12778 - RNA, 38 nt, Artificial Sequence
  Description of Artificial Sequence:  Enzymatic Nucleic Acid
uaaugauucugaugaggccguuaggccgaaacagguag

SEQ ID NO: 12779 - RNA, 38 nt, Artificial Sequence
  Description of Artificial Sequence:  Enzymatic Nucleic Acid
uccauaaucugaugaggccguuaggccgaaauugacag

SEQ ID NO: 12780 - RNA, 38 nt, Artificial Sequence
  Description of Artificial Sequence:  Enzymatic Nucleic Acid
ggguccaucugaugaggccguuaggccgaaaugauuga

SEQ ID NO: 12781 - RNA, 38 nt, Artificial Sequence
  Description of Artificial Sequence:  Enzymatic Nucleic Acid
uggguccacugaugaggccguuaggccgaaaaugauug

SEQ ID NO: 12782 - RNA, 38 nt, Artificial Sequence
  Description of Artificial Sequence:  Enzymatic Nucleic Acid
uccaggggcugaugaggccguuaggccgaaacuucauc

SEQ ID NO: 12783 - RNA, 38 nt, Artificial Sequence
  Description of Artificial Sequence:  Enzymatic Nucleic Acid
auccagggcugaugaggccguuaggccgaaaacuucau

SEQ ID NO: 12784 - RNA, 38 nt, Artificial Sequence
  Description of Artificial Sequence:  Enzymatic Nucleic Acid
uggcaucacugaugaggccguuaggccgaaagggcagc

SEQ ID NO: 12785 - RNA, 38 nt, Artificial Sequence
  Description of Artificial Sequence:  Enzymatic Nucleic Acid
cccgugcacugaugaggccguuaggccgaaacucccac

SEQ ID NO: 12786 - RNA, 38 nt, Artificial Sequence
  Description of Artificial Sequence:  Enzymatic Nucleic Acid
ucccgugccugaugaggccguuaggccgaaaacuccca

SEQ ID NO: 12787 - RNA, 38 nt, Artificial Sequence
  Description of Artificial Sequence:  Enzymatic Nucleic Acid
gauuugcccugaugaggccguuaggccgaaaguuucag

SEQ ID NO: 12788 - RNA, 38 nt, Artificial Sequence
  Description of Artificial Sequence:  Enzymatic Nucleic Acid
uuccgagccugaugaggccguuaggccgaaauuugccu

SEQ ID NO: 12789 - RNA, 38 nt, Artificial Sequence
  Description of Artificial Sequence:  Enzymatic Nucleic Acid
ccucuucccugaugaggccguuaggccgaaagcgauuu

SEQ ID NO: 12790 - RNA, 38 nt, Artificial Sequence
  Description of Artificial Sequence:  Enzymatic Nucleic Acid
uuucccaacugaugaggccguuaggccgaaagccccuc

SEQ ID NO: 12791 - RNA, 38 nt, Artificial Sequence
  Description of Artificial Sequence:  Enzymatic Nucleic Acid
cuuucccacugaugaggccguuaggccgaaaagccccu

SEQ ID NO: 12792 - RNA, 38 nt, Artificial Sequence
  Description of Artificial Sequence:  Enzymatic Nucleic Acid
acuuuccccugaugaggccguuaggccgaaaaagcccc

SEQ ID NO: 12793 - RNA, 38 nt, Artificial Sequence
  Description of Artificial Sequence:  Enzymatic Nucleic Acid
gcuugaaccugaugaggccguuaggccgaaacuuuccc

SEQ ID NO: 12794 - RNA, 38 nt, Artificial Sequence
  Description of Artificial Sequence:  Enzymatic Nucleic Acid
gaggcuugcugaugaggccguuaggccgaaacgacuuu

SEQ ID NO: 12795 - RNA, 38 nt, Artificial Sequence
  Description of Artificial Sequence:  Enzymatic Nucleic Acid
agaggcuucugaugaggccguuaggccgaaaacgacuu

SEQ ID NO: 12796 - RNA, 38 nt, Artificial Sequence
  Description of Artificial Sequence:  Enzymatic Nucleic Acid
caaaugcacugaugaggccguuaggccgaaaggcuuga

SEQ ID NO: 12797 - RNA, 38 nt, Artificial Sequence
  Description of Artificial Sequence:  Enzymatic Nucleic Acid
uaaugccacugaugaggccguuaggccgaaaugcagag

SEQ ID NO: 12798 - RNA, 38 nt, Artificial Sequence
  Description of Artificial Sequence:  Enzymatic Nucleic Acid
uuaaugcccugaugaggccguuaggccgaaaaugcaga

SEQ ID NO: 12799 - RNA, 38 nt, Artificial Sequence
  Description of Artificial Sequence:  Enzymatic Nucleic Acid
aggugggucugaugaggccguuaggccgaaauuucuua

SEQ ID NO: 12800 - RNA, 38 nt, Artificial Sequence
  Description of Artificial Sequence:  Enzymatic Nucleic Acid
ccucuuuccugaugaggccguuaggccgaaacaucuuc

SEQ ID NO: 12801 - RNA, 38 nt, Artificial Sequence
  Description of Artificial Sequence:  Enzymatic Nucleic Acid
gagcuuugcugaugaggccguuaggccgaaacucacug

SEQ ID NO: 12802 - RNA, 38 nt, Artificial Sequence
  Description of Artificial Sequence:  Enzymatic Nucleic Acid
ggucaucacugaugaggccguuaggccgaaagcuuugu

SEQ ID NO: 12803 - RNA, 38 nt, Artificial Sequence
  Description of Artificial Sequence:  Enzymatic Nucleic Acid
aagaucuucugaugaggccguuaggccgaaaguucggu

SEQ ID NO: 12804 - RNA, 38 nt, Artificial Sequence
  Description of Artificial Sequence:  Enzymatic Nucleic Acid
ugggucaacugaugaggccguuaggccgaaaucuugag

SEQ ID NO: 12805 - RNA, 38 nt, Artificial Sequence
  Description of Artificial Sequence:  Enzymatic Nucleic Acid
uguggguccugaugaggccguuaggccgaaagaucuug

SEQ ID NO: 12806 - RNA, 38 nt, Artificial Sequence
  Description of Artificial Sequence:  Enzymatic Nucleic Acid
ugauggcccugaugaggccguuaggccgaaaugugggu

SEQ ID NO: 12807 - RNA, 38 nt, Artificial Sequence
  Description of Artificial Sequence:  Enzymatic Nucleic Acid
auucagaucugaugaggccguuaggccgaaauggccga

SEQ ID NO: 12808 - RNA, 38 nt, Artificial Sequence
  Description of Artificial Sequence:  Enzymatic Nucleic Acid
cacauucacugaugaggccguuaggccgaaaugauggc

SEQ ID NO: 12809 - RNA, 38 nt, Artificial Sequence
  Description of Artificial Sequence:  Enzymatic Nucleic Acid
aggagguucugaugaggccguuaggccgaaaccacauu

SEQ ID NO: 12810 - RNA, 38 nt, Artificial Sequence
  Description of Artificial Sequence:  Enzymatic Nucleic Acid
caggaggucugaugaggccguuaggccgaaaaccacau

SEQ ID NO: 12811 - RNA, 38 nt, Artificial Sequence
  Description of Artificial Sequence:  Enzymatic Nucleic Acid
gcucccagcugaugaggccguuaggccgaaagguuaac

SEQ ID NO: 12812 - RNA, 38 nt, Artificial Sequence
  Description of Artificial Sequence:  Enzymatic Nucleic Acid
uauuccaccugaugaggccguuaggccgaaaucaccau

SEQ ID NO: 12813 - RNA, 38 nt, Artificial Sequence
  Description of Artificial Sequence:  Enzymatic Nucleic Acid
auuugcagcugaugaggccguuaggccgaaauuccacg

SEQ ID NO: 12814 - RNA, 38 nt, Artificial Sequence
  Description of Artificial Sequence:  Enzymatic Nucleic Acid
gguuuccgcugaugaggccguuaggccgaaauuugcag

SEQ ID NO: 12815 - RNA, 38 nt, Artificial Sequence
  Description of Artificial Sequence:  Enzymatic Nucleic Acid
gguaguugcugaugaggccguuaggccgaaacagguuu

SEQ ID NO: 12816 - RNA, 38 nt, Artificial Sequence
  Description of Artificial Sequence:  Enzymatic Nucleic Acid
ucuugaggcugaugaggccguuaggccgaaaguuggac

SEQ ID NO: 12817 - RNA, 38 nt, Artificial Sequence
  Description of Artificial Sequence:  Enzymatic Nucleic Acid
gacagaaucugaugaggccguuaggccgaaagucacgu

SEQ ID NO: 12818 - RNA, 38 nt, Artificial Sequence
  Description of Artificial Sequence:  Enzymatic Nucleic Acid
agacagaacugaugaggccguuaggccgaaaagucacg

SEQ ID NO: 12819 - RNA, 38 nt, Artificial Sequence
  Description of Artificial Sequence:  Enzymatic Nucleic Acid
ugagacagcugaugaggccguuaggccgaaauaaguca

SEQ ID NO: 12820 - RNA, 38 nt, Artificial Sequence
  Description of Artificial Sequence:  Enzymatic Nucleic Acid
uugagacacugaugaggccguuaggccgaaaauaaguc

SEQ ID NO: 12821 - RNA, 38 nt, Artificial Sequence
  Description of Artificial Sequence:  Enzymatic Nucleic Acid
cuuguugacugaugaggccguuaggccgaaacagaaua

SEQ ID NO: 12822 - RNA, 38 nt, Artificial Sequence
  Description of Artificial Sequence:  Enzymatic Nucleic Acid
uccuuguucugaugaggccguuaggccgaaagacagaa

SEQ ID NO: 12823 - RNA, 38 nt, Artificial Sequence
  Description of Artificial Sequence:  Enzymatic Nucleic Acid
ccauaugccugaugaggccguuaggccgaaaggcugcg

SEQ ID NO: 12824 - RNA, 38 nt, Artificial Sequence
  Description of Artificial Sequence:  Enzymatic Nucleic Acid
gagcuccacugaugaggccguuaggccgaaaugcaagg

SEQ ID NO: 12825 - RNA, 38 nt, Artificial Sequence
  Description of Artificial Sequence:  Enzymatic Nucleic Acid
ucuuucuucugaugaggccguuaggccgaaagcuccau

SEQ ID NO: 12826 - RNA, 38 nt, Artificial Sequence
  Description of Artificial Sequence:  Enzymatic Nucleic Acid
acacuguccugaugaggccguuaggccgaaaggcgggg

SEQ ID NO: 12827 - RNA, 38 nt, Artificial Sequence
  Description of Artificial Sequence:  Enzymatic Nucleic Acid
gagcugcucugaugaggccguuaggccgaaacacuguc

SEQ ID NO: 12828 - RNA, 38 nt, Artificial Sequence
  Description of Artificial Sequence:  Enzymatic Nucleic Acid
ugacacuucugaugaggccguuaggccgaaagcugcug

SEQ ID NO: 12829 - RNA, 38 nt, Artificial Sequence
  Description of Artificial Sequence:  Enzymatic Nucleic Acid
gagcuggucugaugaggccguuaggccgaaacacuuga

SEQ ID NO: 12830 - RNA, 38 nt, Artificial Sequence
  Description of Artificial Sequence:  Enzymatic Nucleic Acid
ggaagcugcugaugaggccguuaggccgaaagcuggug

SEQ ID NO: 12831 - RNA, 38 nt, Artificial Sequence
  Description of Artificial Sequence:  Enzymatic Nucleic Acid
cuucagggcugaugaggccguuaggccgaaagcuggag

SEQ ID NO: 12832 - RNA, 38 nt, Artificial Sequence
  Description of Artificial Sequence:  Enzymatic Nucleic Acid
ucuucaggcugaugaggccguuaggccgaaaagcugga

SEQ ID NO: 12833 - RNA, 38 nt, Artificial Sequence
  Description of Artificial Sequence:  Enzymatic Nucleic Acid
cucacugucugaugaggccguuaggccgaaauccucgu

SEQ ID NO: 12834 - RNA, 38 nt, Artificial Sequence
  Description of Artificial Sequence:  Enzymatic Nucleic Acid
ucucacugcugaugaggccguuaggccgaaaauccucg

SEQ ID NO: 12835 - RNA, 38 nt, Artificial Sequence
  Description of Artificial Sequence:  Enzymatic Nucleic Acid
ugcuuggacugaugaggccguuaggccgaaaucucacu

SEQ ID NO: 12836 - RNA, 38 nt, Artificial Sequence
  Description of Artificial Sequence:  Enzymatic Nucleic Acid
gcugcuugcugaugaggccguuaggccgaaagaucuca

SEQ ID NO: 12837 - RNA, 38 nt, Artificial Sequence
  Description of Artificial Sequence:  Enzymatic Nucleic Acid
uccauggucugaugaggccguuaggccgaaaggggcug

SEQ ID NO: 12838 - RNA, 38 nt, Artificial Sequence
  Description of Artificial Sequence:  Enzymatic Nucleic Acid
cuguaggacugaugaggccguuaggccgaaaucagguc

SEQ ID NO: 12839 - RNA, 38 nt, Artificial Sequence
  Description of Artificial Sequence:  Enzymatic Nucleic Acid
acuguaggcugaugaggccguuaggccgaaaaucaggu

SEQ ID NO: 12840 - RNA, 38 nt, Artificial Sequence
  Description of Artificial Sequence:  Enzymatic Nucleic Acid
aacuguagcugaugaggccguuaggccgaaaaaucagg

SEQ ID NO: 12841 - RNA, 38 nt, Artificial Sequence
  Description of Artificial Sequence:  Enzymatic Nucleic Acid
ggaaacugcugaugaggccguuaggccgaaaggaaauc

SEQ ID NO: 12842 - RNA, 38 nt, Artificial Sequence
  Description of Artificial Sequence:  Enzymatic Nucleic Acid
cacuuggacugaugaggccguuaggccgaaacuguagg

SEQ ID NO: 12843 - RNA, 38 nt, Artificial Sequence
  Description of Artificial Sequence:  Enzymatic Nucleic Acid
ccacuuggcugaugaggccguuaggccgaaaacuguag

SEQ ID NO: 12844 - RNA, 38 nt, Artificial Sequence
  Description of Artificial Sequence:  Enzymatic Nucleic Acid
aggacagacugaugaggccguuaggccgaaacuccaug

SEQ ID NO: 12845 - RNA, 38 nt, Artificial Sequence
  Description of Artificial Sequence:  Enzymatic Nucleic Acid
gaggacagcugaugaggccguuaggccgaaaacuccau

SEQ ID NO: 12846 - RNA, 38 nt, Artificial Sequence
  Description of Artificial Sequence:  Enzymatic Nucleic Acid
ggaggacacugaugaggccguuaggccgaaaaacucca

SEQ ID NO: 12847 - RNA, 38 nt, Artificial Sequence
  Description of Artificial Sequence:  Enzymatic Nucleic Acid
uucuggagcugaugaggccguuaggccgaaacagaaac

SEQ ID NO: 12848 - RNA, 38 nt, Artificial Sequence
  Description of Artificial Sequence:  Enzymatic Nucleic Acid
acuuucugcugaugaggccguuaggccgaaaggacaga

SEQ ID NO: 12849 - RNA, 38 nt, Artificial Sequence
  Description of Artificial Sequence:  Enzymatic Nucleic Acid
ucagauaacugaugaggccguuaggccgaaaggauguu

SEQ ID NO: 12850 - RNA, 38 nt, Artificial Sequence
  Description of Artificial Sequence:  Enzymatic Nucleic Acid
cucagauacugaugaggccguuaggccgaaaaggaugu

SEQ ID NO: 12851 - RNA, 38 nt, Artificial Sequence
  Description of Artificial Sequence:  Enzymatic Nucleic Acid
ucucagaucugaugaggccguuaggccgaaaaaggaug

SEQ ID NO: 12852 - RNA, 38 nt, Artificial Sequence
  Description of Artificial Sequence:  Enzymatic Nucleic Acid
uucucagacugaugaggccguuaggccgaaaaaaggau

SEQ ID NO: 12853 - RNA, 38 nt, Artificial Sequence
  Description of Artificial Sequence:  Enzymatic Nucleic Acid
uguucucacugaugaggccguuaggccgaaauaaaagg

SEQ ID NO: 12854 - RNA, 38 nt, Artificial Sequence
  Description of Artificial Sequence:  Enzymatic Nucleic Acid
aagucgcacugaugaggccguuaggccgaaaucuucac

SEQ ID NO: 12855 - RNA, 38 nt, Artificial Sequence
  Description of Artificial Sequence:  Enzymatic Nucleic Acid
aaagucgccugaugaggccguuaggccgaaaaucuuca

SEQ ID NO: 12856 - RNA, 38 nt, Artificial Sequence
  Description of Artificial Sequence:  Enzymatic Nucleic Acid
ccaggccacugaugaggccguuaggccgaaagucgcaa

SEQ ID NO: 12857 - RNA, 38 nt, Artificial Sequence
  Description of Artificial Sequence:  Enzymatic Nucleic Acid
gccaggcccugaugaggccguuaggccgaaaagucgca

SEQ ID NO: 12858 - RNA, 38 nt, Artificial Sequence
  Description of Artificial Sequence:  Enzymatic Nucleic Acid
aggguucucugaugaggccguuaggccgaaauaaauau

SEQ ID NO: 12859 - RNA, 38 nt, Artificial Sequence
  Description of Artificial Sequence:  Enzymatic Nucleic Acid
ccucacaucugaugaggccguuaggccgaaaucagggu

SEQ ID NO: 12860 - RNA, 38 nt, Artificial Sequence
  Description of Artificial Sequence:  Enzymatic Nucleic Acid
uccucacacugaugaggccguuaggccgaaaaucaggg

SEQ ID NO: 12861 - RNA, 38 nt, Artificial Sequence
  Description of Artificial Sequence:  Enzymatic Nucleic Acid
aagucgagcugaugaggccguuaggccgaaaucuccuc

SEQ ID NO: 12862 - RNA, 38 nt, Artificial Sequence
  Description of Artificial Sequence:  Enzymatic Nucleic Acid
gggaaguccugaugaggccguuaggccgaaaguaucuc

SEQ ID NO: 12863 - RNA, 38 nt, Artificial Sequence
  Description of Artificial Sequence:  Enzymatic Nucleic Acid
uuuaggggcugaugaggccguuaggccgaaagucgagu

SEQ ID NO: 12864 - RNA, 38 nt, Artificial Sequence
  Description of Artificial Sequence:  Enzymatic Nucleic Acid
uuuuagggcugaugaggccguuaggccgaaaagucgag

SEQ ID NO: 12865 - RNA, 38 nt, Artificial Sequence
  Description of Artificial Sequence:  Enzymatic Nucleic Acid
auccauuucugaugaggccguuaggccgaaaggggaag

SEQ ID NO: 12866 - RNA, 38 nt, Artificial Sequence
  Description of Artificial Sequence:  Enzymatic Nucleic Acid
ggauucagcugaugaggccguuaggccgaaagccaucc

SEQ ID NO: 12867 - RNA, 38 nt, Artificial Sequence
  Description of Artificial Sequence:  Enzymatic Nucleic Acid
caaagaugcugaugaggccguuaggccgaaauucagga

SEQ ID NO: 12868 - RNA, 38 nt, Artificial Sequence
  Description of Artificial Sequence:  Enzymatic Nucleic Acid
uugucaaacugaugaggccguuaggccgaaauggauuc

SEQ ID NO: 12869 - RNA, 38 nt, Artificial Sequence
  Description of Artificial Sequence:  Enzymatic Nucleic Acid
ccuugucacugaugaggccguuaggccgaaagauggau

SEQ ID NO: 12870 - RNA, 38 nt, Artificial Sequence
  Description of Artificial Sequence:  Enzymatic Nucleic Acid
accuuguccugaugaggccguuaggccgaaaagaugga

SEQ ID NO: 12871 - RNA, 38 nt, Artificial Sequence
  Description of Artificial Sequence:  Enzymatic Nucleic Acid
gugcuguacugaugaggccguuaggccgaaaccuuguc

SEQ ID NO: 12872 - RNA, 38 nt, Artificial Sequence
  Description of Artificial Sequence:  Enzymatic Nucleic Acid
uggugcugcugaugaggccguuaggccgaaagaccuug

SEQ ID NO: 12873 - RNA, 38 nt, Artificial Sequence
  Description of Artificial Sequence:  Enzymatic Nucleic Acid
cgccauagcugaugaggccguuaggccgaaaccacaca

SEQ ID NO: 12874 - RNA, 38 nt, Artificial Sequence
  Description of Artificial Sequence:  Enzymatic Nucleic Acid
acacgccacugaugaggccguuaggccgaaaggaccac

SEQ ID NO: 12875 - RNA, 38 nt, Artificial Sequence
  Description of Artificial Sequence:  Enzymatic Nucleic Acid
cccacagccugaugaggccguuaggccgaaacacgcca

SEQ ID NO: 12876 - RNA, 38 nt, Artificial Sequence
  Description of Artificial Sequence:  Enzymatic Nucleic Acid
aaggagaacugaugaggccguuaggccgaaaucuccca

SEQ ID NO: 12877 - RNA, 38 nt, Artificial Sequence
  Description of Artificial Sequence:  Enzymatic Nucleic Acid
cuaaggagcugaugaggccguuaggccgaaagaucucc

SEQ ID NO: 12878 - RNA, 38 nt, Artificial Sequence
  Description of Artificial Sequence:  Enzymatic Nucleic Acid
ccuaaggacugaugaggccguuaggccgaaaagaucuc

SEQ ID NO: 12879 - RNA, 38 nt, Artificial Sequence
  Description of Artificial Sequence:  Enzymatic Nucleic Acid
ccccuaagcugaugaggccguuaggccgaaagaagauc

SEQ ID NO: 12880 - RNA, 38 nt, Artificial Sequence
  Description of Artificial Sequence:  Enzymatic Nucleic Acid
aacccccucugaugaggccguuaggccgaaaggagaag

SEQ ID NO: 12881 - RNA, 38 nt, Artificial Sequence
  Description of Artificial Sequence:  Enzymatic Nucleic Acid
gaaccccccugaugaggccguuaggccgaaaaggagaa

SEQ ID NO: 12882 - RNA, 38 nt, Artificial Sequence
  Description of Artificial Sequence:  Enzymatic Nucleic Acid
guauggagcugaugaggccguuaggccgaaacccccua

SEQ ID NO: 12883 - RNA, 38 nt, Artificial Sequence
  Description of Artificial Sequence:  Enzymatic Nucleic Acid
gguauggacugaugaggccguuaggccgaaaacccccu

SEQ ID NO: 12884 - RNA, 38 nt, Artificial Sequence
  Description of Artificial Sequence:  Enzymatic Nucleic Acid
uggguaugcugaugaggccguuaggccgaaagaacccc

SEQ ID NO: 12885 - RNA, 38 nt, Artificial Sequence
  Description of Artificial Sequence:  Enzymatic Nucleic Acid
cuccugggcugaugaggccguuaggccgaaauggagaa

SEQ ID NO: 12886 - RNA, 38 nt, Artificial Sequence
  Description of Artificial Sequence:  Enzymatic Nucleic Acid
ggcugcagcugaugaggccguuaggccgaaagucuuca

SEQ ID NO: 12887 - RNA, 38 nt, Artificial Sequence
  Description of Artificial Sequence:  Enzymatic Nucleic Acid
cggcugcacugaugaggccguuaggccgaaaagucuuc

SEQ ID NO: 12888 - RNA, 38 nt, Artificial Sequence
  Description of Artificial Sequence:  Enzymatic Nucleic Acid
guguggcacugaugaggccguuaggccgaaacuccggg

SEQ ID NO: 12889 - RNA, 38 nt, Artificial Sequence
  Description of Artificial Sequence:  Enzymatic Nucleic Acid
auuugguacugaugaggccguuaggccgaaauuucagg

SEQ ID NO: 12890 - RNA, 38 nt, Artificial Sequence
  Description of Artificial Sequence:  Enzymatic Nucleic Acid
ugauuuggcugaugaggccguuaggccgaaagauuuca

SEQ ID NO: 12891 - RNA, 38 nt, Artificial Sequence
  Description of Artificial Sequence:  Enzymatic Nucleic Acid
uccaacaucugaugaggccguuaggccgaaauuuggua

SEQ ID NO: 12892 - RNA, 38 nt, Artificial Sequence
  Description of Artificial Sequence:  Enzymatic Nucleic Acid
agcaaucccugaugaggccguuaggccgaaacaugauu

SEQ ID NO: 12893 - RNA, 38 nt, Artificial Sequence
  Description of Artificial Sequence:  Enzymatic Nucleic Acid
gugccagccugaugaggccguuaggccgaaauccaaca

SEQ ID NO: 12894 - RNA, 38 nt, Artificial Sequence
  Description of Artificial Sequence:  Enzymatic Nucleic Acid
guucagcacugaugaggccguuaggccgaaaccggggc

SEQ ID NO: 12895 - RNA, 38 nt, Artificial Sequence
  Description of Artificial Sequence:  Enzymatic Nucleic Acid
aguucagccugaugaggccguuaggccgaaaaccgggg

SEQ ID NO: 12896 - RNA, 38 nt, Artificial Sequence
  Description of Artificial Sequence:  Enzymatic Nucleic Acid
uucuccaccugaugaggccguuaggccgaaaguucagc

SEQ ID NO: 12897 - RNA, 38 nt, Artificial Sequence
  Description of Artificial Sequence:  Enzymatic Nucleic Acid
aggucacccugaugaggccguuaggccgaaaguuucuc

SEQ ID NO: 12898 - RNA, 38 nt, Artificial Sequence
  Description of Artificial Sequence:  Enzymatic Nucleic Acid
uuggcuugcugaugaggccguuaggccgaaagcagguc

SEQ ID NO: 12899 - RNA, 38 nt, Artificial Sequence
  Description of Artificial Sequence:  Enzymatic Nucleic Acid
guuggcuucugaugaggccguuaggccgaaaagcaggu

SEQ ID NO: 12900 - RNA, 38 nt, Artificial Sequence
  Description of Artificial Sequence:  Enzymatic Nucleic Acid
uccuguugcugaugaggccguuaggccgaaacguuggc

SEQ ID NO: 12901 - RNA, 38 nt, Artificial Sequence
  Description of Artificial Sequence:  Enzymatic Nucleic Acid
ggggaugucugaugaggccguuaggccgaaaucuuucc

SEQ ID NO: 12902 - RNA, 38 nt, Artificial Sequence
  Description of Artificial Sequence:  Enzymatic Nucleic Acid
gggggaugcugaugaggccguuaggccgaaaaucuuuc

SEQ ID NO: 12903 - RNA, 38 nt, Artificial Sequence
  Description of Artificial Sequence:  Enzymatic Nucleic Acid
uugaggggcugaugaggccguuaggccgaaauguaauc

SEQ ID NO: 12904 - RNA, 38 nt, Artificial Sequence
  Description of Artificial Sequence:  Enzymatic Nucleic Acid
auggcauucugaugaggccguuaggccgaaagggggau

SEQ ID NO: 12905 - RNA, 38 nt, Artificial Sequence
  Description of Artificial Sequence:  Enzymatic Nucleic Acid
cuagucagcugaugaggccguuaggccgaaauggcauu

SEQ ID NO: 12906 - RNA, 38 nt, Artificial Sequence
  Description of Artificial Sequence:  Enzymatic Nucleic Acid
acuguuuccugaugaggccguuaggccgaaagucagua

SEQ ID NO: 12907 - RNA, 38 nt, Artificial Sequence
  Description of Artificial Sequence:  Enzymatic Nucleic Acid
ugugaagccugaugaggccguuaggccgaaacuguuuc

SEQ ID NO: 12908 - RNA, 38 nt, Artificial Sequence
  Description of Artificial Sequence:  Enzymatic Nucleic Acid
aguaugugcugaugaggccguuaggccgaaagcuacug

SEQ ID NO: 12909 - RNA, 38 nt, Artificial Sequence
  Description of Artificial Sequence:  Enzymatic Nucleic Acid
gaguaugucugaugaggccguuaggccgaaaagcuacu

SEQ ID NO: 12910 - RNA, 38 nt, Artificial Sequence
  Description of Artificial Sequence:  Enzymatic Nucleic Acid
gggucgagcugaugaggccguuaggccgaaaugugaag

SEQ ID NO: 12911 - RNA, 38 nt, Artificial Sequence
  Description of Artificial Sequence:  Enzymatic Nucleic Acid
uggggguccugaugaggccguuaggccgaaaguaugug

SEQ ID NO: 12912 - RNA, 38 nt, Artificial Sequence
  Description of Artificial Sequence:  Enzymatic Nucleic Acid
ccucagagcugaugaggccguuaggccgaaaggugggg

SEQ ID NO: 12913 - RNA, 38 nt, Artificial Sequence
  Description of Artificial Sequence:  Enzymatic Nucleic Acid
uccucagacugaugaggccguuaggccgaaaagguggg

SEQ ID NO: 12914 - RNA, 38 nt, Artificial Sequence
  Description of Artificial Sequence:  Enzymatic Nucleic Acid
gguccucacugaugaggccguuaggccgaaagaaggug

SEQ ID NO: 12915 - RNA, 38 nt, Artificial Sequence
  Description of Artificial Sequence:  Enzymatic Nucleic Acid
uccuugaacugaugaggccguuaggccgaaagguccuc

SEQ ID NO: 12916 - RNA, 38 nt, Artificial Sequence
  Description of Artificial Sequence:  Enzymatic Nucleic Acid
guccuugacugaugaggccguuaggccgaaaagguccu

SEQ ID NO: 12917 - RNA, 38 nt, Artificial Sequence
  Description of Artificial Sequence:  Enzymatic Nucleic Acid
cguccuugcugaugaggccguuaggccgaaaaaggucc

SEQ ID NO: 12918 - RNA, 38 nt, Artificial Sequence
  Description of Artificial Sequence:  Enzymatic Nucleic Acid
ccguccuucugaugaggccguuaggccgaaaaaagguc

SEQ ID NO: 12919 - RNA, 38 nt, Artificial Sequence
  Description of Artificial Sequence:  Enzymatic Nucleic Acid
gaucugcacugaugaggccguuaggccgaaagccgucc

SEQ ID NO: 12920 - RNA, 38 nt, Artificial Sequence
  Description of Artificial Sequence:  Enzymatic Nucleic Acid
ggaucugccugaugaggccguuaggccgaaaagccguc

SEQ ID NO: 12921 - RNA, 38 nt, Artificial Sequence
  Description of Artificial Sequence:  Enzymatic Nucleic Acid
aaaaugugcugaugaggccguuaggccgaaaucugcaa

SEQ ID NO: 12922 - RNA, 38 nt, Artificial Sequence
  Description of Artificial Sequence:  Enzymatic Nucleic Acid
ggaaugaacugaugaggccguuaggccgaaauguggau

SEQ ID NO: 12923 - RNA, 38 nt, Artificial Sequence
  Description of Artificial Sequence:  Enzymatic Nucleic Acid
cggaaugacugaugaggccguuaggccgaaaaugugga

SEQ ID NO: 12924 - RNA, 38 nt, Artificial Sequence
  Description of Artificial Sequence:  Enzymatic Nucleic Acid
ccggaaugcugaugaggccguuaggccgaaaaaugugg

SEQ ID NO: 12925 - RNA, 38 nt, Artificial Sequence
  Description of Artificial Sequence:  Enzymatic Nucleic Acid
uccggaaucugaugaggccguuaggccgaaaaaaugug

SEQ ID NO: 12926 - RNA, 38 nt, Artificial Sequence
  Description of Artificial Sequence:  Enzymatic Nucleic Acid
gcuuccggcugaugaggccguuaggccgaaaugaaaau

SEQ ID NO: 12927 - RNA, 38 nt, Artificial Sequence
  Description of Artificial Sequence:  Enzymatic Nucleic Acid
agcuuccgcugaugaggccguuaggccgaaaaugaaaa

SEQ ID NO: 12928 - RNA, 38 nt, Artificial Sequence
  Description of Artificial Sequence:  Enzymatic Nucleic Acid
caucaucacugaugaggccguuaggccgaaagcuuccg

SEQ ID NO: 12929 - RNA, 38 nt, Artificial Sequence
  Description of Artificial Sequence:  Enzymatic Nucleic Acid
cguuuacacugaugaggccguuaggccgaaaucucaca

SEQ ID NO: 12930 - RNA, 38 nt, Artificial Sequence
  Description of Artificial Sequence:  Enzymatic Nucleic Acid
aaagcguucugaugaggccguuaggccgaaacauaucu

SEQ ID NO: 12931 - RNA, 38 nt, Artificial Sequence
  Description of Artificial Sequence:  Enzymatic Nucleic Acid
gaauuugacugaugaggccguuaggccgaaagcguuua

SEQ ID NO: 12932 - RNA, 38 nt, Artificial Sequence
  Description of Artificial Sequence:  Enzymatic Nucleic Acid
ugaauuugcugaugaggccguuaggccgaaaagcguuu

SEQ ID NO: 12933 - RNA, 38 nt, Artificial Sequence
  Description of Artificial Sequence:  Enzymatic Nucleic Acid
augaauuucugaugaggccguuaggccgaaaaagcguu

SEQ ID NO: 12934 - RNA, 38 nt, Artificial Sequence
  Description of Artificial Sequence:  Enzymatic Nucleic Acid
ggcucaugcugaugaggccguuaggccgaaauuugaaa

SEQ ID NO: 12935 - RNA, 38 nt, Artificial Sequence
  Description of Artificial Sequence:  Enzymatic Nucleic Acid
aggcucaucugaugaggccguuaggccgaaaauuugaa

SEQ ID NO: 12936 - RNA, 38 nt, Artificial Sequence
  Description of Artificial Sequence:  Enzymatic Nucleic Acid
gcuccucacugaugaggccguuaggccgaaagguuuug

SEQ ID NO: 12937 - RNA, 38 nt, Artificial Sequence
  Description of Artificial Sequence:  Enzymatic Nucleic Acid
agcuccuccugaugaggccguuaggccgaaaagguuuu

SEQ ID NO: 12938 - RNA, 38 nt, Artificial Sequence
  Description of Artificial Sequence:  Enzymatic Nucleic Acid
uucggugacugaugaggccguuaggccgaaagcuccuc

SEQ ID NO: 12939 - RNA, 38 nt, Artificial Sequence
  Description of Artificial Sequence:  Enzymatic Nucleic Acid
guucggugcugaugaggccguuaggccgaaaagcuccu

SEQ ID NO: 12940 - RNA, 38 nt, Artificial Sequence
  Description of Artificial Sequence:  Enzymatic Nucleic Acid
aguucggucugaugaggccguuaggccgaaaaagcucc

SEQ ID NO: 12941 - RNA, 38 nt, Artificial Sequence
  Description of Artificial Sequence:  Enzymatic Nucleic Acid
uggaggugcugaugaggccguuaggccgaaaguucggu

SEQ ID NO: 12942 - RNA, 38 nt, Artificial Sequence
  Description of Artificial Sequence:  Enzymatic Nucleic Acid
caaacaugcugaugaggccguuaggccgaaagguggag

SEQ ID NO: 12943 - RNA, 38 nt, Artificial Sequence
  Description of Artificial Sequence:  Enzymatic Nucleic Acid
aguccucacugaugaggccguuaggccgaaacauggag

SEQ ID NO: 12944 - RNA, 38 nt, Artificial Sequence
  Description of Artificial Sequence:  Enzymatic Nucleic Acid
uaguccuccugaugaggccguuaggccgaaaacaugga

SEQ ID NO: 12945 - RNA, 38 nt, Artificial Sequence
  Description of Artificial Sequence:  Enzymatic Nucleic Acid
ccagcugacugaugaggccguuaggccgaaaguccuca

SEQ ID NO: 12946 - RNA, 38 nt, Artificial Sequence
  Description of Artificial Sequence:  Enzymatic Nucleic Acid
guccagcucugaugaggccguuaggccgaaauaguccu

SEQ ID NO: 12947 - RNA, 38 nt, Artificial Sequence
  Description of Artificial Sequence:  Enzymatic Nucleic Acid
cagagugccugaugaggccguuaggccgaaagugucca

SEQ ID NO: 12948 - RNA, 38 nt, Artificial Sequence
  Description of Artificial Sequence:  Enzymatic Nucleic Acid
gcccagcacugaugaggccguuaggccgaaagugcuag

SEQ ID NO: 12949 - RNA, 38 nt, Artificial Sequence
  Description of Artificial Sequence:  Enzymatic Nucleic Acid
gcaaggggcugaugaggccguuaggccgaaagcccagc

SEQ ID NO: 12950 - RNA, 38 nt, Artificial Sequence
  Description of Artificial Sequence:  Enzymatic Nucleic Acid
gcuucagccugaugaggccguuaggccgaaagggggag

SEQ ID NO: 12951 - RNA, 38 nt, Artificial Sequence
  Description of Artificial Sequence:  Enzymatic Nucleic Acid
uccaggugcugaugaggccguuaggccgaaaccgcuuc

SEQ ID NO: 12952 - RNA, 38 nt, Artificial Sequence
  Description of Artificial Sequence:  Enzymatic Nucleic Acid
guccaggucugaugaggccguuaggccgaaaaccgcuu

SEQ ID NO: 12953 - RNA, 38 nt, Artificial Sequence
  Description of Artificial Sequence:  Enzymatic Nucleic Acid
ucuucaugcugaugaggccguuaggccgaaaggccuug

SEQ ID NO: 12954 - RNA, 38 nt, Artificial Sequence
  Description of Artificial Sequence:  Enzymatic Nucleic Acid
cucaaguccugaugaggccguuaggccgaaaucuucau

SEQ ID NO: 12955 - RNA, 38 nt, Artificial Sequence
  Description of Artificial Sequence:  Enzymatic Nucleic Acid
cuauucuccugaugaggccguuaggccgaaagucuauc

SEQ ID NO: 12956 - RNA, 38 nt, Artificial Sequence
  Description of Artificial Sequence:  Enzymatic Nucleic Acid
uuacucgccugaugaggccguuaggccgaaauucucaa

SEQ ID NO: 12957 - RNA, 38 nt, Artificial Sequence
  Description of Artificial Sequence:  Enzymatic Nucleic Acid
cuugcuuucugaugaggccguuaggccgaaacucgcua

SEQ ID NO: 12958 - RNA, 38 nt, Artificial Sequence
  Description of Artificial Sequence:  Enzymatic Nucleic Acid
agaucggacugaugaggccguuaggccgaaagucccgc

SEQ ID NO: 12959 - RNA, 38 nt, Artificial Sequence
  Description of Artificial Sequence:  Enzymatic Nucleic Acid
cagaucggcugaugaggccguuaggccgaaaagucccg

SEQ ID NO: 12960 - RNA, 38 nt, Artificial Sequence
  Description of Artificial Sequence:  Enzymatic Nucleic Acid
gcagaucgcugaugaggccguuaggccgaaaaaguccc

SEQ ID NO: 12961 - RNA, 38 nt, Artificial Sequence
  Description of Artificial Sequence:  Enzymatic Nucleic Acid
ccucggcacugaugaggccguuaggccgaaaucggaaa

SEQ ID NO: 12962 - RNA, 38 nt, Artificial Sequence
  Description of Artificial Sequence:  Enzymatic Nucleic Acid
agaagcagcugaugaggccguuaggccgaaagcugggc

SEQ ID NO: 12963 - RNA, 38 nt, Artificial Sequence
  Description of Artificial Sequence:  Enzymatic Nucleic Acid
gagaagcacugaugaggccguuaggccgaaaagcuggg

SEQ ID NO: 12964 - RNA, 38 nt, Artificial Sequence
  Description of Artificial Sequence:  Enzymatic Nucleic Acid
agcuggagcugaugaggccguuaggccgaaagcagaag

SEQ ID NO: 12965 - RNA, 38 nt, Artificial Sequence
  Description of Artificial Sequence:  Enzymatic Nucleic Acid
cagcuggacugaugaggccguuaggccgaaaagcagaa

SEQ ID NO: 12966 - RNA, 38 nt, Artificial Sequence
  Description of Artificial Sequence:  Enzymatic Nucleic Acid
cacagcugcugaugaggccguuaggccgaaagaagcag

SEQ ID NO: 12967 - RNA, 38 nt, Artificial Sequence
  Description of Artificial Sequence:  Enzymatic Nucleic Acid
acgggccucugaugaggccguuaggccgaaauguggcc

SEQ ID NO: 12968 - RNA, 38 nt, Artificial Sequence
  Description of Artificial Sequence:  Enzymatic Nucleic Acid
ccagcucacugaugaggccguuaggccgaaauucaucg

SEQ ID NO: 12969 - RNA, 38 nt, Artificial Sequence
  Description of Artificial Sequence:  Enzymatic Nucleic Acid
aacagcagcugaugaggccguuaggccgaaacuccuuu

SEQ ID NO: 12970 - RNA, 38 nt, Artificial Sequence
  Description of Artificial Sequence:  Enzymatic Nucleic Acid
ggguggagcugaugaggccguuaggccgaaacagcagg

SEQ ID NO: 12971 - RNA, 38 nt, Artificial Sequence
  Description of Artificial Sequence:  Enzymatic Nucleic Acid
gggguggacugaugaggccguuaggccgaaaacagcag

SEQ ID NO: 12972 - RNA, 38 nt, Artificial Sequence
  Description of Artificial Sequence:  Enzymatic Nucleic Acid
ugggggugcugaugaggccguuaggccgaaagaacagc

SEQ ID NO: 12973 - RNA, 38 nt, Artificial Sequence
  Description of Artificial Sequence:  Enzymatic Nucleic Acid
cggaguugcugaugaggccguuaggccgaaagucuggg

SEQ ID NO: 12974 - RNA, 38 nt, Artificial Sequence
  Description of Artificial Sequence:  Enzymatic Nucleic Acid
acaccacgcugaugaggccguuaggccgaaaguuguag

SEQ ID NO: 12975 - RNA, 38 nt, Artificial Sequence
  Description of Artificial Sequence:  Enzymatic Nucleic Acid
aggaguaccugaugaggccguuaggccgaaacaccacg

SEQ ID NO: 12976 - RNA, 38 nt, Artificial Sequence
  Description of Artificial Sequence:  Enzymatic Nucleic Acid
gggaggagcugaugaggccguuaggccgaaacaacacc

SEQ ID NO: 12977 - RNA, 38 nt, Artificial Sequence
  Description of Artificial Sequence:  Enzymatic Nucleic Acid
gcggggagcugaugaggccguuaggccgaaaguacaac

SEQ ID NO: 12978 - RNA, 38 nt, Artificial Sequence
  Description of Artificial Sequence:  Enzymatic Nucleic Acid
cgggcgggcugaugaggccguuaggccgaaaggaguac

SEQ ID NO: 12979 - RNA, 38 nt, Artificial Sequence
  Description of Artificial Sequence:  Enzymatic Nucleic Acid
agaagcuucugaugaggccguuaggccgaaaggcgggc

SEQ ID NO: 12980 - RNA, 38 nt, Artificial Sequence
  Description of Artificial Sequence:  Enzymatic Nucleic Acid
cuggugagcugaugaggccguuaggccgaaagcuuuag

SEQ ID NO: 12981 - RNA, 38 nt, Artificial Sequence
  Description of Artificial Sequence:  Enzymatic Nucleic Acid
gcuggugacugaugaggccguuaggccgaaaagcuuua

SEQ ID NO: 12982 - RNA, 38 nt, Artificial Sequence
  Description of Artificial Sequence:  Enzymatic Nucleic Acid
gggcuggucugaugaggccguuaggccgaaagaagcuu

SEQ ID NO: 12983 - RNA, 38 nt, Artificial Sequence
  Description of Artificial Sequence:  Enzymatic Nucleic Acid
auguauaacugaugaggccguuaggccgaaacugucag

SEQ ID NO: 12984 - RNA, 38 nt, Artificial Sequence
  Description of Artificial Sequence:  Enzymatic Nucleic Acid
agauguaucugaugaggccguuaggccgaaauacuguc

SEQ ID NO: 12985 - RNA, 38 nt, Artificial Sequence
  Description of Artificial Sequence:  Enzymatic Nucleic Acid
uagauguacugaugaggccguuaggccgaaaauacugu

SEQ ID NO: 12986 - RNA, 38 nt, Artificial Sequence
  Description of Artificial Sequence:  Enzymatic Nucleic Acid
cauagaugcugaugaggccguuaggccgaaauaauacu

SEQ ID NO: 12987 - RNA, 38 nt, Artificial Sequence
  Description of Artificial Sequence:  Enzymatic Nucleic Acid
aacucauacugaugaggccguuaggccgaaauguauaa

SEQ ID NO: 12988 - RNA, 38 nt, Artificial Sequence
  Description of Artificial Sequence:  Enzymatic Nucleic Acid
uaaacucacugaugaggccguuaggccgaaagauguau

SEQ ID NO: 12989 - RNA, 38 nt, Artificial Sequence
  Description of Artificial Sequence:  Enzymatic Nucleic Acid
uagguguacugaugaggccguuaggccgaaacucauag

SEQ ID NO: 12990 - RNA, 38 nt, Artificial Sequence
  Description of Artificial Sequence:  Enzymatic Nucleic Acid
auaggugucugaugaggccguuaggccgaaaacucaua

SEQ ID NO: 12991 - RNA, 38 nt, Artificial Sequence
  Description of Artificial Sequence:  Enzymatic Nucleic Acid
aauaggugcugaugaggccguuaggccgaaaaacucau

SEQ ID NO: 12992 - RNA, 38 nt, Artificial Sequence
  Description of Artificial Sequence:  Enzymatic Nucleic Acid
gagcggaacugaugaggccguuaggccgaaagguguaa

SEQ ID NO: 12993 - RNA, 38 nt, Artificial Sequence
  Description of Artificial Sequence:  Enzymatic Nucleic Acid
uggagcggcugaugaggccguuaggccgaaauaggugu

SEQ ID NO: 12994 - RNA, 38 nt, Artificial Sequence
  Description of Artificial Sequence:  Enzymatic Nucleic Acid
guggagcgcugaugaggccguuaggccgaaaauaggug

SEQ ID NO: 12995 - RNA, 38 nt, Artificial Sequence
  Description of Artificial Sequence:  Enzymatic Nucleic Acid
cuccugugcugaugaggccguuaggccgaaagcggaau

SEQ ID NO: 12996 - RNA, 38 nt, Artificial Sequence
  Description of Artificial Sequence:  Enzymatic Nucleic Acid
gucacgaacugaugaggccguuaggccgaaagcagcug

SEQ ID NO: 12997 - RNA, 38 nt, Artificial Sequence
  Description of Artificial Sequence:  Enzymatic Nucleic Acid
ggucacgacugaugaggccguuaggccgaaaagcagcu

SEQ ID NO: 12998 - RNA, 38 nt, Artificial Sequence
  Description of Artificial Sequence:  Enzymatic Nucleic Acid
aggucacgcugaugaggccguuaggccgaaaaagcagc

SEQ ID NO: 12999 - RNA, 38 nt, Artificial Sequence
  Description of Artificial Sequence:  Enzymatic Nucleic Acid
aaggucaccugaugaggccguuaggccgaaaaaagcag

SEQ ID NO: 13000 - RNA, 38 nt, Artificial Sequence
  Description of Artificial Sequence:  Enzymatic Nucleic Acid
cacgauuacugaugaggccguuaggccgaaaggucacg

SEQ ID NO: 13001 - RNA, 38 nt, Artificial Sequence
  Description of Artificial Sequence:  Enzymatic Nucleic Acid
gcacgauucugaugaggccguuaggccgaaaaggucac

SEQ ID NO: 13002 - RNA, 38 nt, Artificial Sequence
  Description of Artificial Sequence:  Enzymatic Nucleic Acid
agcacgaucugaugaggccguuaggccgaaaaagguca

SEQ ID NO: 13003 - RNA, 38 nt, Artificial Sequence
  Description of Artificial Sequence:  Enzymatic Nucleic Acid
aaaagcaccugaugaggccguuaggccgaaauuaaagg

SEQ ID NO: 13004 - RNA, 38 nt, Artificial Sequence
  Description of Artificial Sequence:  Enzymatic Nucleic Acid
aaacaaaacugaugaggccguuaggccgaaagcacgau

SEQ ID NO: 13005 - RNA, 38 nt, Artificial Sequence
  Description of Artificial Sequence:  Enzymatic Nucleic Acid
aaaacaaacugaugaggccguuaggccgaaaagcacga

SEQ ID NO: 13006 - RNA, 38 nt, Artificial Sequence
  Description of Artificial Sequence:  Enzymatic Nucleic Acid
aaaaacaacugaugaggccguuaggccgaaaaagcacg

SEQ ID NO: 13007 - RNA, 38 nt, Artificial Sequence
  Description of Artificial Sequence:  Enzymatic Nucleic Acid
aaaaaacacugaugaggccguuaggccgaaaaaagcac

SEQ ID NO: 13008 - RNA, 38 nt, Artificial Sequence
  Description of Artificial Sequence:  Enzymatic Nucleic Acid
caaaaaaccugaugaggccguuaggccgaaaaaaagca

SEQ ID NO: 13009 - RNA, 38 nt, Artificial Sequence
  Description of Artificial Sequence:  Enzymatic Nucleic Acid
aaacaaaacugaugaggccguuaggccgaaacaaaaaa

SEQ ID NO: 13010 - RNA, 38 nt, Artificial Sequence
  Description of Artificial Sequence:  Enzymatic Nucleic Acid
aaaacaaacugaugaggccguuaggccgaaaacaaaaa

SEQ ID NO: 13011 - RNA, 38 nt, Artificial Sequence
  Description of Artificial Sequence:  Enzymatic Nucleic Acid
caaaacaacugaugaggccguuaggccgaaaaacaaaa

SEQ ID NO: 13012 - RNA, 38 nt, Artificial Sequence
  Description of Artificial Sequence:  Enzymatic Nucleic Acid
acaaaacacugaugaggccguuaggccgaaaaaacaaa

SEQ ID NO: 13013 - RNA, 38 nt, Artificial Sequence
  Description of Artificial Sequence:  Enzymatic Nucleic Acid
aacaaaaccugaugaggccguuaggccgaaaaaaacaa

SEQ ID NO: 13014 - RNA, 38 nt, Artificial Sequence
  Description of Artificial Sequence:  Enzymatic Nucleic Acid
acaaacaacugaugaggccguuaggccgaaacaaaaaa

SEQ ID NO: 13015 - RNA, 38 nt, Artificial Sequence
  Description of Artificial Sequence:  Enzymatic Nucleic Acid
aacaaacacugaugaggccguuaggccgaaaacaaaaa

SEQ ID NO: 13016 - RNA, 38 nt, Artificial Sequence
  Description of Artificial Sequence:  Enzymatic Nucleic Acid
caacaaaccugaugaggccguuaggccgaaaaacaaaa

SEQ ID NO: 13017 - RNA, 38 nt, Artificial Sequence
  Description of Artificial Sequence:  Enzymatic Nucleic Acid
caacaacacugaugaggccguuaggccgaaacaaaaca

SEQ ID NO: 13018 - RNA, 38 nt, Artificial Sequence
  Description of Artificial Sequence:  Enzymatic Nucleic Acid
gcaacaaccugaugaggccguuaggccgaaaacaaaac

SEQ ID NO: 13019 - RNA, 38 nt, Artificial Sequence
  Description of Artificial Sequence:  Enzymatic Nucleic Acid
acagcaaccugaugaggccguuaggccgaaacaaacaa

SEQ ID NO: 13020 - RNA, 38 nt, Artificial Sequence
  Description of Artificial Sequence:  Enzymatic Nucleic Acid
aaaacagccugaugaggccguuaggccgaaacaacaaa

SEQ ID NO: 13021 - RNA, 38 nt, Artificial Sequence
  Description of Artificial Sequence:  Enzymatic Nucleic Acid
uuagucaacugaugaggccguuaggccgaaacagcaac

SEQ ID NO: 13022 - RNA, 38 nt, Artificial Sequence
  Description of Artificial Sequence:  Enzymatic Nucleic Acid
guuagucacugaugaggccguuaggccgaaaacagcaa

SEQ ID NO: 13023 - RNA, 38 nt, Artificial Sequence
  Description of Artificial Sequence:  Enzymatic Nucleic Acid
uguuaguccugaugaggccguuaggccgaaaaacagca

SEQ ID NO: 13024 - RNA, 38 nt, Artificial Sequence
  Description of Artificial Sequence:  Enzymatic Nucleic Acid
acuggggucugaugaggccguuaggccgaaacauucuu

SEQ ID NO: 13025 - RNA, 38 nt, Artificial Sequence
  Description of Artificial Sequence:  Enzymatic Nucleic Acid
acgucacucugaugaggccguuaggccgaaacuggggu

SEQ ID NO: 13026 - RNA, 38 nt, Artificial Sequence
  Description of Artificial Sequence:  Enzymatic Nucleic Acid
cacgucaccugaugaggccguuaggccgaaaacugggg

SEQ ID NO: 13027 - RNA, 38 nt, Artificial Sequence
  Description of Artificial Sequence:  Enzymatic Nucleic Acid
aacaauagcugaugaggccguuaggccgaaauucuuca

SEQ ID NO: 13028 - RNA, 38 nt, Artificial Sequence
  Description of Artificial Sequence:  Enzymatic Nucleic Acid
ucuaacaacugaugaggccguuaggccgaaaguauucu

SEQ ID NO: 13029 - RNA, 38 nt, Artificial Sequence
  Description of Artificial Sequence:  Enzymatic Nucleic Acid
ucucuaaccugaugaggccguuaggccgaaauaguauu

SEQ ID NO: 13030 - RNA, 38 nt, Artificial Sequence
  Description of Artificial Sequence:  Enzymatic Nucleic Acid
auuucucucugaugaggccguuaggccgaaacaauagu

SEQ ID NO: 13031 - RNA, 38 nt, Artificial Sequence
  Description of Artificial Sequence:  Enzymatic Nucleic Acid
gauuucuccugaugaggccguuaggccgaaaacaauag

SEQ ID NO: 13032 - RNA, 38 nt, Artificial Sequence
  Description of Artificial Sequence:  Enzymatic Nucleic Acid
gcggggggcugaugaggccguuaggccgaaauuucucu

SEQ ID NO: 13033 - RNA, 38 nt, Artificial Sequence
  Description of Artificial Sequence:  Enzymatic Nucleic Acid
guuacccucugaugaggccguuaggccgaaaggcuuug

SEQ ID NO: 13034 - RNA, 38 nt, Artificial Sequence
  Description of Artificial Sequence:  Enzymatic Nucleic Acid
guccaggucugaugaggccguuaggccgaaacccugag

SEQ ID NO: 13035 - RNA, 38 nt, Artificial Sequence
  Description of Artificial Sequence:  Enzymatic Nucleic Acid
ggucgccacugaugaggccguuaggccgaaaggcaccu

SEQ ID NO: 13036 - RNA, 38 nt, Artificial Sequence
  Description of Artificial Sequence:  Enzymatic Nucleic Acid
gcugcaggcugaugaggccguuaggccgaaaggguggg

SEQ ID NO: 13037 - RNA, 38 nt, Artificial Sequence
  Description of Artificial Sequence:  Enzymatic Nucleic Acid
acugccuccugaugaggccguuaggccgaaagucccac

SEQ ID NO: 13038 - RNA, 38 nt, Artificial Sequence
  Description of Artificial Sequence:  Enzymatic Nucleic Acid
aaugggcucugaugaggccguuaggccgaaacugccuc

SEQ ID NO: 13039 - RNA, 38 nt, Artificial Sequence
  Description of Artificial Sequence:  Enzymatic Nucleic Acid
caugagcucugaugaggccguuaggccgaaaugggcuu

SEQ ID NO: 13040 - RNA, 38 nt, Artificial Sequence
  Description of Artificial Sequence:  Enzymatic Nucleic Acid
ccaugagccugaugaggccguuaggccgaaaaugggcu

SEQ ID NO: 13041 - RNA, 38 nt, Artificial Sequence
  Description of Artificial Sequence:  Enzymatic Nucleic Acid
gcagccaucugaugaggccguuaggccgaaagcuaaug

SEQ ID NO: 13042 - RNA, 38 nt, Artificial Sequence
  Description of Artificial Sequence:  Enzymatic Nucleic Acid
gagagacacugaugaggccguuaggccgaaagcagguc

SEQ ID NO: 13043 - RNA, 38 nt, Artificial Sequence
  Description of Artificial Sequence:  Enzymatic Nucleic Acid
auaagagacugaugaggccguuaggccgaaacagagca

SEQ ID NO: 13044 - RNA, 38 nt, Artificial Sequence
  Description of Artificial Sequence:  Enzymatic Nucleic Acid
ccauaagacugaugaggccguuaggccgaaagacagag

SEQ ID NO: 13045 - RNA, 38 nt, Artificial Sequence
  Description of Artificial Sequence:  Enzymatic Nucleic Acid
cuccauaacugaugaggccguuaggccgaaagagacag

SEQ ID NO: 13046 - RNA, 38 nt, Artificial Sequence
  Description of Artificial Sequence:  Enzymatic Nucleic Acid
uccuccaucugaugaggccguuaggccgaaagagagac

SEQ ID NO: 13047 - RNA, 38 nt, Artificial Sequence
  Description of Artificial Sequence:  Enzymatic Nucleic Acid
uuccuccacugaugaggccguuaggccgaaaagagaga

SEQ ID NO: 13048 - RNA, 38 nt, Artificial Sequence
  Description of Artificial Sequence:  Enzymatic Nucleic Acid
gcaucccacugaugaggccguuaggccgaaagccuuuu

SEQ ID NO: 13049 - RNA, 38 nt, Artificial Sequence
  Description of Artificial Sequence:  Enzymatic Nucleic Acid
cgcauccccugaugaggccguuaggccgaaaagccuuu

SEQ ID NO: 13050 - RNA, 38 nt, Artificial Sequence
  Description of Artificial Sequence:  Enzymatic Nucleic Acid
acaggacgcugaugaggccguuaggccgaaacgcaucc

SEQ ID NO: 13051 - RNA, 38 nt, Artificial Sequence
  Description of Artificial Sequence:  Enzymatic Nucleic Acid
cuccacagcugaugaggccguuaggccgaaacggacgc

SEQ ID NO: 13052 - RNA, 38 nt, Artificial Sequence
  Description of Artificial Sequence:  Enzymatic Nucleic Acid
gcauagcgcugaugaggccguuaggccgaaagcccccu

SEQ ID NO: 13053 - RNA, 38 nt, Artificial Sequence
  Description of Artificial Sequence:  Enzymatic Nucleic Acid
aaguggcacugaugaggccguuaggccgaaagcggagc

SEQ ID NO: 13054 - RNA, 38 nt, Artificial Sequence
  Description of Artificial Sequence:  Enzymatic Nucleic Acid
agucacugcugaugaggccguuaggccgaaaguggcau

SEQ ID NO: 13055 - RNA, 38 nt, Artificial Sequence
  Description of Artificial Sequence:  Enzymatic Nucleic Acid
aagucacucugaugaggccguuaggccgaaaaguggca

SEQ ID NO: 13056 - RNA, 38 nt, Artificial Sequence
  Description of Artificial Sequence:  Enzymatic Nucleic Acid
ggagugagcugaugaggccguuaggccgaaagucacug

SEQ ID NO: 13057 - RNA, 38 nt, Artificial Sequence
  Description of Artificial Sequence:  Enzymatic Nucleic Acid
aggagugacugaugaggccguuaggccgaaaagucacu

SEQ ID NO: 13058 - RNA, 38 nt, Artificial Sequence
  Description of Artificial Sequence:  Enzymatic Nucleic Acid
ccaggagucugaugaggccguuaggccgaaagaaguca

SEQ ID NO: 13059 - RNA, 38 nt, Artificial Sequence
  Description of Artificial Sequence:  Enzymatic Nucleic Acid
gaggccagcugaugaggccguuaggccgaaagugagaa

SEQ ID NO: 13060 - RNA, 38 nt, Artificial Sequence
  Description of Artificial Sequence:  Enzymatic Nucleic Acid
aaacagcgcugaugaggccguuaggccgaaaggccagg

SEQ ID NO: 13061 - RNA, 38 nt, Artificial Sequence
  Description of Artificial Sequence:  Enzymatic Nucleic Acid
gggcccgacugaugaggccguuaggccgaaacagcgga

SEQ ID NO: 13062 - RNA, 38 nt, Artificial Sequence
  Description of Artificial Sequence:  Enzymatic Nucleic Acid
ggggcccgcugaugaggccguuaggccgaaaacagcgg

SEQ ID NO: 13063 - RNA, 38 nt, Artificial Sequence
  Description of Artificial Sequence:  Enzymatic Nucleic Acid
gggggccccugaugaggccguuaggccgaaaaacagcg

SEQ ID NO: 13064 - RNA, 38 nt, Artificial Sequence
  Description of Artificial Sequence:  Enzymatic Nucleic Acid
ccucuuggcugaugaggccguuaggccgaaagggggcc

SEQ ID NO: 13065 - RNA, 38 nt, Artificial Sequence
  Description of Artificial Sequence:  Enzymatic Nucleic Acid
accucuugcugaugaggccguuaggccgaaaagggggc

SEQ ID NO: 13066 - RNA, 38 nt, Artificial Sequence
  Description of Artificial Sequence:  Enzymatic Nucleic Acid
ugcucugacugaugaggccguuaggccgaaaccucuug

SEQ ID NO: 13067 - RNA, 38 nt, Artificial Sequence
  Description of Artificial Sequence:  Enzymatic Nucleic Acid
ucugcucucugaugaggccguuaggccgaaauaccucu

SEQ ID NO: 13068 - RNA, 38 nt, Artificial Sequence
  Description of Artificial Sequence:  Enzymatic Nucleic Acid
gucuaggacugaugaggccguuaggccgaaacgucccu

SEQ ID NO: 13069 - RNA, 38 nt, Artificial Sequence
  Description of Artificial Sequence:  Enzymatic Nucleic Acid
ggucuaggcugaugaggccguuaggccgaaaacguccc

SEQ ID NO: 13070 - RNA, 38 nt, Artificial Sequence
  Description of Artificial Sequence:  Enzymatic Nucleic Acid
uggucuagcugaugaggccguuaggccgaaaaacgucc

SEQ ID NO: 13071 - RNA, 38 nt, Artificial Sequence
  Description of Artificial Sequence:  Enzymatic Nucleic Acid
cccugguccugaugaggccguuaggccgaaaggaaacg

SEQ ID NO: 13072 - RNA, 38 nt, Artificial Sequence
  Description of Artificial Sequence:  Enzymatic Nucleic Acid
uucccgagcugaugaggccguuaggccgaaacaugugc

SEQ ID NO: 13073 - RNA, 38 nt, Artificial Sequence
  Description of Artificial Sequence:  Enzymatic Nucleic Acid
guucccgacugaugaggccguuaggccgaaaacaugug

SEQ ID NO: 13074 - RNA, 38 nt, Artificial Sequence
  Description of Artificial Sequence:  Enzymatic Nucleic Acid
ugguuccccugaugaggccguuaggccgaaagaacaug

SEQ ID NO: 13075 - RNA, 38 nt, Artificial Sequence
  Description of Artificial Sequence:  Enzymatic Nucleic Acid
uuaagauucugaugaggccguuaggccgaaacuguggu

SEQ ID NO: 13076 - RNA, 38 nt, Artificial Sequence
  Description of Artificial Sequence:  Enzymatic Nucleic Acid
uuuaagaucugaugaggccguuaggccgaaaacugugg

SEQ ID NO: 13077 - RNA, 38 nt, Artificial Sequence
  Description of Artificial Sequence:  Enzymatic Nucleic Acid
agauuuaacugaugaggccguuaggccgaaauuaacug

SEQ ID NO: 13078 - RNA, 38 nt, Artificial Sequence
  Description of Artificial Sequence:  Enzymatic Nucleic Acid
aaagauuucugaugaggccguuaggccgaaagauuaac

SEQ ID NO: 13079 - RNA, 38 nt, Artificial Sequence
  Description of Artificial Sequence:  Enzymatic Nucleic Acid
aaaagauucugaugaggccguuaggccgaaaagauuaa

SEQ ID NO: 13080 - RNA, 38 nt, Artificial Sequence
  Description of Artificial Sequence:  Enzymatic Nucleic Acid
cgggaaaacugaugaggccguuaggccgaaauuuaaga

SEQ ID NO: 13081 - RNA, 38 nt, Artificial Sequence
  Description of Artificial Sequence:  Enzymatic Nucleic Acid
cccgggaacugaugaggccguuaggccgaaagauuuaa

SEQ ID NO: 13082 - RNA, 38 nt, Artificial Sequence
  Description of Artificial Sequence:  Enzymatic Nucleic Acid
ucccgggacugaugaggccguuaggccgaaaagauuua

SEQ ID NO: 13083 - RNA, 38 nt, Artificial Sequence
  Description of Artificial Sequence:  Enzymatic Nucleic Acid
cucccgggcugaugaggccguuaggccgaaaaagauuu

SEQ ID NO: 13084 - RNA, 38 nt, Artificial Sequence
  Description of Artificial Sequence:  Enzymatic Nucleic Acid
acucccggcugaugaggccguuaggccgaaaaaagauu

SEQ ID NO: 13085 - RNA, 38 nt, Artificial Sequence
  Description of Artificial Sequence:  Enzymatic Nucleic Acid
caacagaacugaugaggccguuaggccgaaacucccgg

SEQ ID NO: 13086 - RNA, 38 nt, Artificial Sequence
  Description of Artificial Sequence:  Enzymatic Nucleic Acid
gacaacagcugaugaggccguuaggccgaaagacuccc

SEQ ID NO: 13087 - RNA, 38 nt, Artificial Sequence
  Description of Artificial Sequence:  Enzymatic Nucleic Acid
agacaacacugaugaggccguuaggccgaaaagacucc

SEQ ID NO: 13088 - RNA, 38 nt, Artificial Sequence
  Description of Artificial Sequence:  Enzymatic Nucleic Acid
aaacagaccugaugaggccguuaggccgaaacagaaga

SEQ ID NO: 13089 - RNA, 38 nt, Artificial Sequence
  Description of Artificial Sequence:  Enzymatic Nucleic Acid
gguaaacacugaugaggccguuaggccgaaacaacaga

SEQ ID NO: 13090 - RNA, 38 nt, Artificial Sequence
  Description of Artificial Sequence:  Enzymatic Nucleic Acid
ggaugguacugaugaggccguuaggccgaaacagacaa

SEQ ID NO: 13091 - RNA, 38 nt, Artificial Sequence
  Description of Artificial Sequence:  Enzymatic Nucleic Acid
uggauggucugaugaggccguuaggccgaaaacagaca

SEQ ID NO: 13092 - RNA, 38 nt, Artificial Sequence
  Description of Artificial Sequence:  Enzymatic Nucleic Acid
uuggauggcugaugaggccguuaggccgaaaaacagac

SEQ ID NO: 13093 - RNA, 38 nt, Artificial Sequence
  Description of Artificial Sequence:  Enzymatic Nucleic Acid
augcuuugcugaugaggccguuaggccgaaaugguaaa

SEQ ID NO: 13094 - RNA, 38 nt, Artificial Sequence
  Description of Artificial Sequence:  Enzymatic Nucleic Acid
auguuaaacugaugaggccguuaggccgaaaugcuuug

SEQ ID NO: 13095 - RNA, 38 nt, Artificial Sequence
  Description of Artificial Sequence:  Enzymatic Nucleic Acid
acauguuacugaugaggccguuaggccgaaauaugcuu

SEQ ID NO: 13096 - RNA, 38 nt, Artificial Sequence
  Description of Artificial Sequence:  Enzymatic Nucleic Acid
cacauguucugaugaggccguuaggccgaaaauaugcu

SEQ ID NO: 13097 - RNA, 38 nt, Artificial Sequence
  Description of Artificial Sequence:  Enzymatic Nucleic Acid
acacaugucugaugaggccguuaggccgaaaaauaugc

SEQ ID NO: 13098 - RNA, 38 nt, Artificial Sequence
  Description of Artificial Sequence:  Enzymatic Nucleic Acid
cccccacucugaugaggccguuaggccgaaacacaugu

SEQ ID NO: 13099 - RNA, 38 nt, Artificial Sequence
  Description of Artificial Sequence:  Enzymatic Nucleic Acid
cagaagcccugaugaggccguuaggccgaaagcgccac

SEQ ID NO: 13100 - RNA, 38 nt, Artificial Sequence
  Description of Artificial Sequence:  Enzymatic Nucleic Acid
ggccucagcugaugaggccguuaggccgaaagccaagc

SEQ ID NO: 13101 - RNA, 38 nt, Artificial Sequence
  Description of Artificial Sequence:  Enzymatic Nucleic Acid
uggccucacugaugaggccguuaggccgaaaagccaag

SEQ ID NO: 13102 - RNA, 38 nt, Artificial Sequence
  Description of Artificial Sequence:  Enzymatic Nucleic Acid
gaacugaucugaugaggccguuaggccgaaauggcucu

SEQ ID NO: 13103 - RNA, 38 nt, Artificial Sequence
  Description of Artificial Sequence:  Enzymatic Nucleic Acid
gaggaacucugaugaggccguuaggccgaaaugauggc

SEQ ID NO: 13104 - RNA, 38 nt, Artificial Sequence
  Description of Artificial Sequence:  Enzymatic Nucleic Acid
acuagaggcugaugaggccguuaggccgaaacugauga

SEQ ID NO: 13105 - RNA, 38 nt, Artificial Sequence
  Description of Artificial Sequence:  Enzymatic Nucleic Acid
cacuagagcugaugaggccguuaggccgaaaacugaug

SEQ ID NO: 13106 - RNA, 38 nt, Artificial Sequence
  Description of Artificial Sequence:  Enzymatic Nucleic Acid
ucucacuacugaugaggccguuaggccgaaaggaacug

SEQ ID NO: 13107 - RNA, 38 nt, Artificial Sequence
  Description of Artificial Sequence:  Enzymatic Nucleic Acid
caucucaccugaugaggccguuaggccgaaagaggaac

SEQ ID NO: 13108 - RNA, 38 nt, Artificial Sequence
  Description of Artificial Sequence:  Enzymatic Nucleic Acid
augaccuccugaugaggccguuaggccgaaaugcaucu

SEQ ID NO: 13109 - RNA, 38 nt, Artificial Sequence
  Description of Artificial Sequence:  Enzymatic Nucleic Acid
uuggguaucugaugaggccguuaggccgaaaccucaau

SEQ ID NO: 13110 - RNA, 38 nt, Artificial Sequence
  Description of Artificial Sequence:  Enzymatic Nucleic Acid
agcuugggcugaugaggccguuaggccgaaaugaccuc

SEQ ID NO: 13111 - RNA, 38 nt, Artificial Sequence
  Description of Artificial Sequence:  Enzymatic Nucleic Acid
aggccugccugaugaggccguuaggccgaaagcuuggg

SEQ ID NO: 13112 - RNA, 38 nt, Artificial Sequence
  Description of Artificial Sequence:  Enzymatic Nucleic Acid
aguaugcgcugaugaggccguuaggccgaaaggucagg

SEQ ID NO: 13113 - RNA, 38 nt, Artificial Sequence
  Description of Artificial Sequence:  Enzymatic Nucleic Acid
caguaugccugaugaggccguuaggccgaaaaggucag

SEQ ID NO: 13114 - RNA, 38 nt, Artificial Sequence
  Description of Artificial Sequence:  Enzymatic Nucleic Acid
gugagcagcugaugaggccguuaggccgaaaugcgaag

SEQ ID NO: 13115 - RNA, 38 nt, Artificial Sequence
  Description of Artificial Sequence:  Enzymatic Nucleic Acid
cuccccgucugaugaggccguuaggccgaaagcaguau

SEQ ID NO: 13116 - RNA, 38 nt, Artificial Sequence
  Description of Artificial Sequence:  Enzymatic Nucleic Acid
gaccacuucugaugaggccguuaggccgaaacuccccg

SEQ ID NO: 13117 - RNA, 38 nt, Artificial Sequence
  Description of Artificial Sequence:  Enzymatic Nucleic Acid
ggaccacucugaugaggccguuaggccgaaaacucccc

SEQ ID NO: 13118 - RNA, 38 nt, Artificial Sequence
  Description of Artificial Sequence:  Enzymatic Nucleic Acid
ccaaacugcugaugaggccguuaggccgaaaccacuua

SEQ ID NO: 13119 - RNA, 38 nt, Artificial Sequence
  Description of Artificial Sequence:  Enzymatic Nucleic Acid
cuaggccacugaugaggccguuaggccgaaacuggacc

SEQ ID NO: 13120 - RNA, 38 nt, Artificial Sequence
  Description of Artificial Sequence:  Enzymatic Nucleic Acid
acuaggcccugaugaggccguuaggccgaaaacuggac

SEQ ID NO: 13121 - RNA, 38 nt, Artificial Sequence
  Description of Artificial Sequence:  Enzymatic Nucleic Acid
aaccuuaccugaugaggccguuaggccgaaaggccaaa

SEQ ID NO: 13122 - RNA, 38 nt, Artificial Sequence
  Description of Artificial Sequence:  Enzymatic Nucleic Acid
ggcaaccucugaugaggccguuaggccgaaacuaggcc

SEQ ID NO: 13123 - RNA, 38 nt, Artificial Sequence
  Description of Artificial Sequence:  Enzymatic Nucleic Acid
caguaggccugaugaggccguuaggccgaaaccuuacu

SEQ ID NO: 13124 - RNA, 38 nt, Artificial Sequence
  Description of Artificial Sequence:  Enzymatic Nucleic Acid
cccaucagcugaugaggccguuaggccgaaaggcaacc

SEQ ID NO: 13125 - RNA, 38 nt, Artificial Sequence
  Description of Artificial Sequence:  Enzymatic Nucleic Acid
uggcuuuucugaugaggccguuaggccgaaagcccauc

SEQ ID NO: 13126 - RNA, 38 nt, Artificial Sequence
  Description of Artificial Sequence:  Enzymatic Nucleic Acid
cuguuuaacugaugaggccguuaggccgaaauguggcu

SEQ ID NO: 13127 - RNA, 38 nt, Artificial Sequence
  Description of Artificial Sequence:  Enzymatic Nucleic Acid
ccuguuuacugaugaggccguuaggccgaaaauguggc

SEQ ID NO: 13128 - RNA, 38 nt, Artificial Sequence
  Description of Artificial Sequence:  Enzymatic Nucleic Acid
accuguuucugaugaggccguuaggccgaaaaaugugg

SEQ ID NO: 13129 - RNA, 38 nt, Artificial Sequence
  Description of Artificial Sequence:  Enzymatic Nucleic Acid
aaccuguucugaugaggccguuaggccgaaaaaaugug

SEQ ID NO: 13130 - RNA, 38 nt, Artificial Sequence
  Description of Artificial Sequence:  Enzymatic Nucleic Acid
ugagauaacugaugaggccguuaggccgaaaccuguuu

SEQ ID NO: 13131 - RNA, 38 nt, Artificial Sequence
  Description of Artificial Sequence:  Enzymatic Nucleic Acid
uugagauacugaugaggccguuaggccgaaaaccuguu

SEQ ID NO: 13132 - RNA, 38 nt, Artificial Sequence
  Description of Artificial Sequence:  Enzymatic Nucleic Acid
cuugagaucugaugaggccguuaggccgaaaaaccugu

SEQ ID NO: 13133 - RNA, 38 nt, Artificial Sequence
  Description of Artificial Sequence:  Enzymatic Nucleic Acid
acuugagacugaugaggccguuaggccgaaaaaaccug

SEQ ID NO: 13134 - RNA, 38 nt, Artificial Sequence
  Description of Artificial Sequence:  Enzymatic Nucleic Acid
auacuugacugaugaggccguuaggccgaaauaaaacc

SEQ ID NO: 13135 - RNA, 38 nt, Artificial Sequence
  Description of Artificial Sequence:  Enzymatic Nucleic Acid
uaauacuucugaugaggccguuaggccgaaagauaaaa

SEQ ID NO: 13136 - RNA, 38 nt, Artificial Sequence
  Description of Artificial Sequence:  Enzymatic Nucleic Acid
uauauuaacugaugaggccguuaggccgaaacuugaga

SEQ ID NO: 13137 - RNA, 38 nt, Artificial Sequence
  Description of Artificial Sequence:  Enzymatic Nucleic Acid
uauauauucugaugaggccguuaggccgaaauacuuga

SEQ ID NO: 13138 - RNA, 38 nt, Artificial Sequence
  Description of Artificial Sequence:  Enzymatic Nucleic Acid
cuauauaucugaugaggccguuaggccgaaaauacuug

SEQ ID NO: 13139 - RNA, 38 nt, Artificial Sequence
  Description of Artificial Sequence:  Enzymatic Nucleic Acid
ugucuauacugaugaggccguuaggccgaaauuaauac

SEQ ID NO: 13140 - RNA, 38 nt, Artificial Sequence
  Description of Artificial Sequence:  Enzymatic Nucleic Acid
cuugucuacugaugaggccguuaggccgaaauauuaau

SEQ ID NO: 13141 - RNA, 38 nt, Artificial Sequence
  Description of Artificial Sequence:  Enzymatic Nucleic Acid
gucuuguccugaugaggccguuaggccgaaauauauua

SEQ ID NO: 13142 - RNA, 38 nt, Artificial Sequence
  Description of Artificial Sequence:  Enzymatic Nucleic Acid
uaaugcaucugaugaggccguuaggccgaaagugucuu

SEQ ID NO: 13143 - RNA, 38 nt, Artificial Sequence
  Description of Artificial Sequence:  Enzymatic Nucleic Acid
auaaugcacugaugaggccguuaggccgaaaagugucu

SEQ ID NO: 13144 - RNA, 38 nt, Artificial Sequence
  Description of Artificial Sequence:  Enzymatic Nucleic Acid
aacaggaucugaugaggccguuaggccgaaaugcauaa

SEQ ID NO: 13145 - RNA, 38 nt, Artificial Sequence
  Description of Artificial Sequence:  Enzymatic Nucleic Acid
aaacaggacugaugaggccguuaggccgaaaaugcaua

SEQ ID NO: 13146 - RNA, 38 nt, Artificial Sequence
  Description of Artificial Sequence:  Enzymatic Nucleic Acid
uaaaacagcugaugaggccguuaggccgaaauaaugca

SEQ ID NO: 13147 - RNA, 38 nt, Artificial Sequence
  Description of Artificial Sequence:  Enzymatic Nucleic Acid
auauauaacugaugaggccguuaggccgaaacaggaua

SEQ ID NO: 13148 - RNA, 38 nt, Artificial Sequence
  Description of Artificial Sequence:  Enzymatic Nucleic Acid
gauauauacugaugaggccguuaggccgaaaacaggau

SEQ ID NO: 13149 - RNA, 38 nt, Artificial Sequence
  Description of Artificial Sequence:  Enzymatic Nucleic Acid
ggauauaucugaugaggccguuaggccgaaaaacagga

SEQ ID NO: 13150 - RNA, 38 nt, Artificial Sequence
  Description of Artificial Sequence:  Enzymatic Nucleic Acid
uggauauacugaugaggccguuaggccgaaaaaacagg

SEQ ID NO: 13151 - RNA, 38 nt, Artificial Sequence
  Description of Artificial Sequence:  Enzymatic Nucleic Acid
auuggauacugaugaggccguuaggccgaaauaaaaca

SEQ ID NO: 13152 - RNA, 38 nt, Artificial Sequence
  Description of Artificial Sequence:  Enzymatic Nucleic Acid
ucauuggacugaugaggccguuaggccgaaauauaaaa

SEQ ID NO: 13153 - RNA, 38 nt, Artificial Sequence
  Description of Artificial Sequence:  Enzymatic Nucleic Acid
auucauugcugaugaggccguuaggccgaaauauauaa

SEQ ID NO: 13154 - RNA, 38 nt, Artificial Sequence
  Description of Artificial Sequence:  Enzymatic Nucleic Acid
cccaguuacugaugaggccguuaggccgaaauucauug

SEQ ID NO: 13155 - RNA, 38 nt, Artificial Sequence
  Description of Artificial Sequence:  Enzymatic Nucleic Acid
gccccagucugaugaggccguuaggccgaaauauucau

SEQ ID NO: 13156 - RNA, 38 nt, Artificial Sequence
  Description of Artificial Sequence:  Enzymatic Nucleic Acid
ugacucuucugaugaggccguuaggccgaaacucgccc

SEQ ID NO: 13157 - RNA, 38 nt, Artificial Sequence
  Description of Artificial Sequence:  Enzymatic Nucleic Acid
augacucucugaugaggccguuaggccgaaaacucgcc

SEQ ID NO: 13158 - RNA, 38 nt, Artificial Sequence
  Description of Artificial Sequence:  Enzymatic Nucleic Acid
uagaccaucugaugaggccguuaggccgaaacucuuaa

SEQ ID NO: 13159 - RNA, 38 nt, Artificial Sequence
  Description of Artificial Sequence:  Enzymatic Nucleic Acid
cuuuucuacugaugaggccguuaggccgaaaccaugac

SEQ ID NO: 13160 - RNA, 38 nt, Artificial Sequence
  Description of Artificial Sequence:  Enzymatic Nucleic Acid
cccuuuuccugaugaggccguuaggccgaaagaccaug

SEQ ID NO: 13161 - RNA, 38 nt, Artificial Sequence
  Description of Artificial Sequence:  Enzymatic Nucleic Acid
uacagagacugaugaggccguuaggccgaaaccccuuu

SEQ ID NO: 13162 - RNA, 38 nt, Artificial Sequence
  Description of Artificial Sequence:  Enzymatic Nucleic Acid
guacagagcugaugaggccguuaggccgaaaaccccuu

SEQ ID NO: 13163 - RNA, 38 nt, Artificial Sequence
  Description of Artificial Sequence:  Enzymatic Nucleic Acid
gguacagacugaugaggccguuaggccgaaaaaccccu

SEQ ID NO: 13164 - RNA, 38 nt, Artificial Sequence
  Description of Artificial Sequence:  Enzymatic Nucleic Acid
uggguacacugaugaggccguuaggccgaaagaaaccc

SEQ ID NO: 13165 - RNA, 38 nt, Artificial Sequence
  Description of Artificial Sequence:  Enzymatic Nucleic Acid
gauuugggcugaugaggccguuaggccgaaacagagaa

SEQ ID NO: 13166 - RNA, 38 nt, Artificial Sequence
  Description of Artificial Sequence:  Enzymatic Nucleic Acid
accagccccugaugaggccguuaggccgaaauuugggu

SEQ ID NO: 13167 - RNA, 38 nt, Artificial Sequence
  Description of Artificial Sequence:  Enzymatic Nucleic Acid
cuuggucccugaugaggccguuaggccgaaaccagccc

SEQ ID NO: 13168 - RNA, 38 nt, Artificial Sequence
  Description of Artificial Sequence:  Enzymatic Nucleic Acid
gcugggaccugaugaggccguuaggccgaaaccacucu

SEQ ID NO: 13169 - RNA, 38 nt, Artificial Sequence
  Description of Artificial Sequence:  Enzymatic Nucleic Acid
auagcuggcugaugaggccguuaggccgaaacaaccac

SEQ ID NO: 13170 - RNA, 38 nt, Artificial Sequence
  Description of Artificial Sequence:  Enzymatic Nucleic Acid
aguaacuacugaugaggccguuaggccgaaagcuggga

SEQ ID NO: 13171 - RNA, 38 nt, Artificial Sequence
  Description of Artificial Sequence:  Enzymatic Nucleic Acid
uuaguaaccugaugaggccguuaggccgaaauagcugg

SEQ ID NO: 13172 - RNA, 38 nt, Artificial Sequence
  Description of Artificial Sequence:  Enzymatic Nucleic Acid
aguuuagucugaugaggccguuaggccgaaacuauagc

SEQ ID NO: 13173 - RNA, 38 nt, Artificial Sequence
  Description of Artificial Sequence:  Enzymatic Nucleic Acid
uaguuuagcugaugaggccguuaggccgaaaacuauag

SEQ ID NO: 13174 - RNA, 38 nt, Artificial Sequence
  Description of Artificial Sequence:  Enzymatic Nucleic Acid
gaguaguucugaugaggccguuaggccgaaaguaacua

SEQ ID NO: 13175 - RNA, 38 nt, Artificial Sequence
  Description of Artificial Sequence:  Enzymatic Nucleic Acid
ugggugagcugaugaggccguuaggccgaaaguuuagu

SEQ ID NO: 13176 - RNA, 38 nt, Artificial Sequence
  Description of Artificial Sequence:  Enzymatic Nucleic Acid
cuuugggucugaugaggccguuaggccgaaaguaguuu

SEQ ID NO: 13177 - RNA, 38 nt, Artificial Sequence
  Description of Artificial Sequence:  Enzymatic Nucleic Acid
gagguccccugaugaggccguuaggccgaaacuuuggg

SEQ ID NO: 13178 - RNA, 38 nt, Artificial Sequence
  Description of Artificial Sequence:  Enzymatic Nucleic Acid
aagccagucugaugaggccguuaggccgaaagguccca

SEQ ID NO: 13179 - RNA, 38 nt, Artificial Sequence
  Description of Artificial Sequence:  Enzymatic Nucleic Acid
guaaagagcugaugaggccguuaggccgaaagccagug

SEQ ID NO: 13180 - RNA, 38 nt, Artificial Sequence
  Description of Artificial Sequence:  Enzymatic Nucleic Acid
aguaaagacugaugaggccguuaggccgaaaagccagu

SEQ ID NO: 13181 - RNA, 38 nt, Artificial Sequence
  Description of Artificial Sequence:  Enzymatic Nucleic Acid
gaaguaaacugaugaggccguuaggccgaaagaagcca

SEQ ID NO: 13182 - RNA, 38 nt, Artificial Sequence
  Description of Artificial Sequence:  Enzymatic Nucleic Acid
augaaguacugaugaggccguuaggccgaaagagaagc

SEQ ID NO: 13183 - RNA, 38 nt, Artificial Sequence
  Description of Artificial Sequence:  Enzymatic Nucleic Acid
gaugaagucugaugaggccguuaggccgaaaagagaag

SEQ ID NO: 13184 - RNA, 38 nt, Artificial Sequence
  Description of Artificial Sequence:  Enzymatic Nucleic Acid
ugaugaagcugaugaggccguuaggccgaaaaagagaa

SEQ ID NO: 13185 - RNA, 38 nt, Artificial Sequence
  Description of Artificial Sequence:  Enzymatic Nucleic Acid
ccaugaugcugaugaggccguuaggccgaaaguaaaga

SEQ ID NO: 13186 - RNA, 38 nt, Artificial Sequence
  Description of Artificial Sequence:  Enzymatic Nucleic Acid
uccaugaucugaugaggccguuaggccgaaaaguaaag

SEQ ID NO: 13187 - RNA, 38 nt, Artificial Sequence
  Description of Artificial Sequence:  Enzymatic Nucleic Acid
aaauccaucugaugaggccguuaggccgaaaugaagua

SEQ ID NO: 13188 - RNA, 38 nt, Artificial Sequence
  Description of Artificial Sequence:  Enzymatic Nucleic Acid
gauggugacugaugaggccguuaggccgaaauccauga

SEQ ID NO: 13189 - RNA, 38 nt, Artificial Sequence
  Description of Artificial Sequence:  Enzymatic Nucleic Acid
ggauggugcugaugaggccguuaggccgaaaauccaug

SEQ ID NO: 13190 - RNA, 38 nt, Artificial Sequence
  Description of Artificial Sequence:  Enzymatic Nucleic Acid
gggauggucugaugaggccguuaggccgaaaaauccau

SEQ ID NO: 13191 - RNA, 38 nt, Artificial Sequence
  Description of Artificial Sequence:  Enzymatic Nucleic Acid
ugccuuggcugaugaggccguuaggccgaaauggugaa

SEQ ID NO: 13192 - RNA, 38 nt, Artificial Sequence
  Description of Artificial Sequence:  Enzymatic Nucleic Acid
uccucucacugaugaggccguuaggccgaaacugccuu

SEQ ID NO: 13193 - RNA, 38 nt, Artificial Sequence
  Description of Artificial Sequence:  Enzymatic Nucleic Acid
auacucuucugaugaggccguuaggccgaaagcuccuc

SEQ ID NO: 13194 - RNA, 38 nt, Artificial Sequence
  Description of Artificial Sequence:  Enzymatic Nucleic Acid
ugggcugacugaugaggccguuaggccgaaacucuuua

SEQ ID NO: 13195 - RNA, 38 nt, Artificial Sequence
  Description of Artificial Sequence:  Enzymatic Nucleic Acid
uaugggcucugaugaggccguuaggccgaaauacucuu

SEQ ID NO: 13196 - RNA, 38 nt, Artificial Sequence
  Description of Artificial Sequence:  Enzymatic Nucleic Acid
uuaauaaacugaugaggccguuaggccgaaaugggcug

SEQ ID NO: 13197 - RNA, 38 nt, Artificial Sequence
  Description of Artificial Sequence:  Enzymatic Nucleic Acid
gcuuaauacugaugaggccguuaggccgaaauaugggc

SEQ ID NO: 13198 - RNA, 38 nt, Artificial Sequence
  Description of Artificial Sequence:  Enzymatic Nucleic Acid
ugcuuaaucugaugaggccguuaggccgaaaauauggg

SEQ ID NO: 13199 - RNA, 38 nt, Artificial Sequence
  Description of Artificial Sequence:  Enzymatic Nucleic Acid
gugcuuaacugaugaggccguuaggccgaaaaauaugg

SEQ ID NO: 13200 - RNA, 38 nt, Artificial Sequence
  Description of Artificial Sequence:  Enzymatic Nucleic Acid
aagugcuucugaugaggccguuaggccgaaauaaauau

SEQ ID NO: 13201 - RNA, 38 nt, Artificial Sequence
  Description of Artificial Sequence:  Enzymatic Nucleic Acid
aaagugcucugaugaggccguuaggccgaaaauaaaua

SEQ ID NO: 13202 - RNA, 38 nt, Artificial Sequence
  Description of Artificial Sequence:  Enzymatic Nucleic Acid
ggagcauacugaugaggccguuaggccgaaagugcuua

SEQ ID NO: 13203 - RNA, 38 nt, Artificial Sequence
  Description of Artificial Sequence:  Enzymatic Nucleic Acid
aggagcaucugaugaggccguuaggccgaaaagugcuu

SEQ ID NO: 13204 - RNA, 38 nt, Artificial Sequence
  Description of Artificial Sequence:  Enzymatic Nucleic Acid
aaggagcacugaugaggccguuaggccgaaaaagugcu

SEQ ID NO: 13205 - RNA, 38 nt, Artificial Sequence
  Description of Artificial Sequence:  Enzymatic Nucleic Acid
gugccaagcugaugaggccguuaggccgaaagcauaaa

SEQ ID NO: 13206 - RNA, 38 nt, Artificial Sequence
  Description of Artificial Sequence:  Enzymatic Nucleic Acid
gcugugcccugaugaggccguuaggccgaaaggagcau

SEQ ID NO: 13207 - RNA, 38 nt, Artificial Sequence
  Description of Artificial Sequence:  Enzymatic Nucleic Acid
gcauaaaucugaugaggccguuaggccgaaacacauca

SEQ ID NO: 13208 - RNA, 38 nt, Artificial Sequence
  Description of Artificial Sequence:  Enzymatic Nucleic Acid
cuugcauacugaugaggccguuaggccgaaauuacaca

SEQ ID NO: 13209 - RNA, 38 nt, Artificial Sequence
  Description of Artificial Sequence:  Enzymatic Nucleic Acid
gcuugcaucugaugaggccguuaggccgaaaauuacac

SEQ ID NO: 13210 - RNA, 38 nt, Artificial Sequence
  Description of Artificial Sequence:  Enzymatic Nucleic Acid
agcuugcacugaugaggccguuaggccgaaaaauuaca

SEQ ID NO: 13211 - RNA, 38 nt, Artificial Sequence
  Description of Artificial Sequence:  Enzymatic Nucleic Acid
uggagaggcugaugaggccguuaggccgaaagcuugca

SEQ ID NO: 13212 - RNA, 38 nt, Artificial Sequence
  Description of Artificial Sequence:  Enzymatic Nucleic Acid
uagcuggacugaugaggccguuaggccgaaagggagcu

SEQ ID NO: 13213 - RNA, 38 nt, Artificial Sequence
  Description of Artificial Sequence:  Enzymatic Nucleic Acid
ccuagcugcugaugaggccguuaggccgaaagagggag

SEQ ID NO: 13214 - RNA, 38 nt, Artificial Sequence
  Description of Artificial Sequence:  Enzymatic Nucleic Acid
cugagucccugaugaggccguuaggccgaaagcuggag

SEQ ID NO: 13215 - RNA, 38 nt, Artificial Sequence
  Description of Artificial Sequence:  Enzymatic Nucleic Acid
aauauccucugaugaggccguuaggccgaaaguccuag

SEQ ID NO: 13216 - RNA, 38 nt, Artificial Sequence
  Description of Artificial Sequence:  Enzymatic Nucleic Acid
uugacuaacugaugaggccguuaggccgaaauccugag

SEQ ID NO: 13217 - RNA, 38 nt, Artificial Sequence
  Description of Artificial Sequence:  Enzymatic Nucleic Acid
cauugacucugaugaggccguuaggccgaaauauccug

SEQ ID NO: 13218 - RNA, 38 nt, Artificial Sequence
  Description of Artificial Sequence:  Enzymatic Nucleic Acid
ucauugaccugaugaggccguuaggccgaaaauauccu

SEQ ID NO: 13219 - RNA, 38 nt, Artificial Sequence
  Description of Artificial Sequence:  Enzymatic Nucleic Acid
uuccuuuucugaugaggccguuaggccgaaauggcuca

SEQ ID NO: 13220 - RNA, 38 nt, Artificial Sequence
  Description of Artificial Sequence:  Enzymatic Nucleic Acid
aaauaagacugaugaggccguuaggccgaaagguuuuu

SEQ ID NO: 13221 - RNA, 38 nt, Artificial Sequence
  Description of Artificial Sequence:  Enzymatic Nucleic Acid
gaaaauaacugaugaggccguuaggccgaaauagguuu

SEQ ID NO: 13222 - RNA, 38 nt, Artificial Sequence
  Description of Artificial Sequence:  Enzymatic Nucleic Acid
augaaaaucugaugaggccguuaggccgaaagauaggu

SEQ ID NO: 13223 - RNA, 38 nt, Artificial Sequence
  Description of Artificial Sequence:  Enzymatic Nucleic Acid
gaugaaaacugaugaggccguuaggccgaaaagauagg

SEQ ID NO: 13224 - RNA, 38 nt, Artificial Sequence
  Description of Artificial Sequence:  Enzymatic Nucleic Acid
cagaugaacugaugaggccguuaggccgaaauaagaua

SEQ ID NO: 13225 - RNA, 38 nt, Artificial Sequence
  Description of Artificial Sequence:  Enzymatic Nucleic Acid
acagaugacugaugaggccguuaggccgaaaauaagau

SEQ ID NO: 13226 - RNA, 38 nt, Artificial Sequence
  Description of Artificial Sequence:  Enzymatic Nucleic Acid
aacagaugcugaugaggccguuaggccgaaaaauaaga

SEQ ID NO: 13227 - RNA, 38 nt, Artificial Sequence
  Description of Artificial Sequence:  Enzymatic Nucleic Acid
aaacagaucugaugaggccguuaggccgaaaaaauaag

SEQ ID NO: 13228 - RNA, 38 nt, Artificial Sequence
  Description of Artificial Sequence:  Enzymatic Nucleic Acid
augaaacacugaugaggccguuaggccgaaaugaaaau

SEQ ID NO: 13229 - RNA, 38 nt, Artificial Sequence
  Description of Artificial Sequence:  Enzymatic Nucleic Acid
agguaugacugaugaggccguuaggccgaaacagauga

SEQ ID NO: 13230 - RNA, 38 nt, Artificial Sequence
  Description of Artificial Sequence:  Enzymatic Nucleic Acid
aagguaugcugaugaggccguuaggccgaaaacagaug

SEQ ID NO: 13231 - RNA, 38 nt, Artificial Sequence
  Description of Artificial Sequence:  Enzymatic Nucleic Acid
caagguaucugaugaggccguuaggccgaaaaacagau

SEQ ID NO: 13232 - RNA, 38 nt, Artificial Sequence
  Description of Artificial Sequence:  Enzymatic Nucleic Acid
agacaaggcugaugaggccguuaggccgaaaugaaaca

SEQ ID NO: 13233 - RNA, 38 nt, Artificial Sequence
  Description of Artificial Sequence:  Enzymatic Nucleic Acid
ccccagaccugaugaggccguuaggccgaaagguauga

SEQ ID NO: 13234 - RNA, 38 nt, Artificial Sequence
  Description of Artificial Sequence:  Enzymatic Nucleic Acid
agaccccacugaugaggccguuaggccgaaacaaggua

SEQ ID NO: 13235 - RNA, 38 nt, Artificial Sequence
  Description of Artificial Sequence:  Enzymatic Nucleic Acid
cgucauuacugaugaggccguuaggccgaaaccccaga

SEQ ID NO: 13236 - RNA, 38 nt, Artificial Sequence
  Description of Artificial Sequence:  Enzymatic Nucleic Acid
aucgucaucugaugaggccguuaggccgaaagacccca

SEQ ID NO: 13237 - RNA, 38 nt, Artificial Sequence
  Description of Artificial Sequence:  Enzymatic Nucleic Acid
cccauguccugaugaggccguuaggccgaaacccuguu

SEQ ID NO: 13238 - RNA, 38 nt, Artificial Sequence
  Description of Artificial Sequence:  Enzymatic Nucleic Acid
cccuuuuccugaugaggccguuaggccgaaacccuguc

SEQ ID NO: 13239 - RNA, 38 nt, Artificial Sequence
  Description of Artificial Sequence:  Enzymatic Nucleic Acid
accccaaacugaugaggccguuaggccgaaagcgggca

SEQ ID NO: 13240 - RNA, 38 nt, Artificial Sequence
  Description of Artificial Sequence:  Enzymatic Nucleic Acid
agaccccacugaugaggccguuaggccgaaagagcggg

SEQ ID NO: 13241 - RNA, 38 nt, Artificial Sequence
  Description of Artificial Sequence:  Enzymatic Nucleic Acid
uagacccccugaugaggccguuaggccgaaaagagcgg

SEQ ID NO: 13242 - RNA, 38 nt, Artificial Sequence
  Description of Artificial Sequence:  Enzymatic Nucleic Acid
caucucuacugaugaggccguuaggccgaaaccccaaa

SEQ ID NO: 13243 - RNA, 38 nt, Artificial Sequence
  Description of Artificial Sequence:  Enzymatic Nucleic Acid
cucaucuccugaugaggccguuaggccgaaagacccca

SEQ ID NO: 13244 - RNA, 38 nt, Artificial Sequence
  Description of Artificial Sequence:  Enzymatic Nucleic Acid
auuuuagacugaugaggccguuaggccgaaacccaggg

SEQ ID NO: 13245 - RNA, 38 nt, Artificial Sequence
  Description of Artificial Sequence:  Enzymatic Nucleic Acid
ccauuuuacugaugaggccguuaggccgaaagacccag

SEQ ID NO: 13246 - RNA, 38 nt, Artificial Sequence
  Description of Artificial Sequence:  Enzymatic Nucleic Acid
agccauuucugaugaggccguuaggccgaaagagaccc

SEQ ID NO: 13247 - RNA, 38 nt, Artificial Sequence
  Description of Artificial Sequence:  Enzymatic Nucleic Acid
uucuaagacugaugaggccguuaggccgaaagccauuu

SEQ ID NO: 13248 - RNA, 38 nt, Artificial Sequence
  Description of Artificial Sequence:  Enzymatic Nucleic Acid
acuucuaacugaugaggccguuaggccgaaagagccau

SEQ ID NO: 13249 - RNA, 38 nt, Artificial Sequence
  Description of Artificial Sequence:  Enzymatic Nucleic Acid
caacuucucugaugaggccguuaggccgaaagagagcc

SEQ ID NO: 13250 - RNA, 38 nt, Artificial Sequence
  Description of Artificial Sequence:  Enzymatic Nucleic Acid
acaacuuccugaugaggccguuaggccgaaaagagagc

SEQ ID NO: 13251 - RNA, 38 nt, Artificial Sequence
  Description of Artificial Sequence:  Enzymatic Nucleic Acid
gcacauaccugaugaggccguuaggccgaaacuucuaa

SEQ ID NO: 13252 - RNA, 38 nt, Artificial Sequence
  Description of Artificial Sequence:  Enzymatic Nucleic Acid
uuugcacacugaugaggccguuaggccgaaacaacuuc

SEQ ID NO: 13253 - RNA, 38 nt, Artificial Sequence
  Description of Artificial Sequence:  Enzymatic Nucleic Acid
cagaccaucugaugaggccguuaggccgaaauuugcac

SEQ ID NO: 13254 - RNA, 38 nt, Artificial Sequence
  Description of Artificial Sequence:  Enzymatic Nucleic Acid
acagaccacugaugaggccguuaggccgaaaauuugca

SEQ ID NO: 13255 - RNA, 38 nt, Artificial Sequence
  Description of Artificial Sequence:  Enzymatic Nucleic Acid
agcacacacugaugaggccguuaggccgaaaccauaau

SEQ ID NO: 13256 - RNA, 38 nt, Artificial Sequence
  Description of Artificial Sequence:  Enzymatic Nucleic Acid
cacgaccucugaugaggccguuaggccgaaagcacaca

SEQ ID NO: 13257 - RNA, 38 nt, Artificial Sequence
  Description of Artificial Sequence:  Enzymatic Nucleic Acid
gcacgacccugaugaggccguuaggccgaaaagcacac

SEQ ID NO: 13258 - RNA, 38 nt, Artificial Sequence
  Description of Artificial Sequence:  Enzymatic Nucleic Acid
gugugcaccugaugaggccguuaggccgaaaccuaagc

SEQ ID NO: 13259 - RNA, 38 nt, Artificial Sequence
  Description of Artificial Sequence:  Enzymatic Nucleic Acid
ccagcugucugaugaggccguuaggccgaaaccggcuc

SEQ ID NO: 13260 - RNA, 38 nt, Artificial Sequence
  Description of Artificial Sequence:  Enzymatic Nucleic Acid
aaagcagccugaugaggccguuaggccgaaauucaucg

SEQ ID NO: 13261 - RNA, 38 nt, Artificial Sequence
  Description of Artificial Sequence:  Enzymatic Nucleic Acid
cucucccacugaugaggccguuaggccgaaagcagcua

SEQ ID NO: 13262 - RNA, 38 nt, Artificial Sequence
  Description of Artificial Sequence:  Enzymatic Nucleic Acid
gcucuccccugaugaggccguuaggccgaaaagcagcu

SEQ ID NO: 13263 - RNA, 38 nt, Artificial Sequence
  Description of Artificial Sequence:  Enzymatic Nucleic Acid
uaaguggccugaugaggccguuaggccgaaagcaugcu

SEQ ID NO: 13264 - RNA, 38 nt, Artificial Sequence
  Description of Artificial Sequence:  Enzymatic Nucleic Acid
agagaauucugaugaggccguuaggccgaaaguggcua

SEQ ID NO: 13265 - RNA, 38 nt, Artificial Sequence
  Description of Artificial Sequence:  Enzymatic Nucleic Acid
cagagaaucugaugaggccguuaggccgaaaaguggcu

SEQ ID NO: 13266 - RNA, 38 nt, Artificial Sequence
  Description of Artificial Sequence:  Enzymatic Nucleic Acid
ggucagagcugaugaggccguuaggccgaaauuaagug

SEQ ID NO: 13267 - RNA, 38 nt, Artificial Sequence
  Description of Artificial Sequence:  Enzymatic Nucleic Acid
cggucagacugaugaggccguuaggccgaaaauuaagu

SEQ ID NO: 13268 - RNA, 38 nt, Artificial Sequence
  Description of Artificial Sequence:  Enzymatic Nucleic Acid
cccggucacugaugaggccguuaggccgaaagaauuaa

SEQ ID NO: 13269 - RNA, 38 nt, Artificial Sequence
  Description of Artificial Sequence:  Enzymatic Nucleic Acid
guacccaucugaugaggccguuaggccgaaaugcuggc

SEQ ID NO: 13270 - RNA, 38 nt, Artificial Sequence
  Description of Artificial Sequence:  Enzymatic Nucleic Acid
ggagcaggcugaugaggccguuaggccgaaacccauga

SEQ ID NO: 13271 - RNA, 38 nt, Artificial Sequence
  Description of Artificial Sequence:  Enzymatic Nucleic Acid
acacagggcugaugaggccguuaggccgaaagcaggua

SEQ ID NO: 13272 - RNA, 38 nt, Artificial Sequence
  Description of Artificial Sequence:  Enzymatic Nucleic Acid
ggauggggcugaugaggccguuaggccgaaacacaggg

SEQ ID NO: 13273 - RNA, 38 nt, Artificial Sequence
  Description of Artificial Sequence:  Enzymatic Nucleic Acid
accuuaagcugaugaggccguuaggccgaaauggggua

SEQ ID NO: 13274 - RNA, 38 nt, Artificial Sequence
  Description of Artificial Sequence:  Enzymatic Nucleic Acid
aaaaccuucugaugaggccguuaggccgaaaggauggg

SEQ ID NO: 13275 - RNA, 38 nt, Artificial Sequence
  Description of Artificial Sequence:  Enzymatic Nucleic Acid
gaaaaccucugaugaggccguuaggccgaaaaggaugg

SEQ ID NO: 13276 - RNA, 38 nt, Artificial Sequence
  Description of Artificial Sequence:  Enzymatic Nucleic Acid
agacagaacugaugaggccguuaggccgaaaccuuaag

SEQ ID NO: 13277 - RNA, 38 nt, Artificial Sequence
  Description of Artificial Sequence:  Enzymatic Nucleic Acid
cagacagacugaugaggccguuaggccgaaaaccuuaa

SEQ ID NO: 13278 - RNA, 38 nt, Artificial Sequence
  Description of Artificial Sequence:  Enzymatic Nucleic Acid
ucagacagcugaugaggccguuaggccgaaaaaccuua

SEQ ID NO: 13279 - RNA, 38 nt, Artificial Sequence
  Description of Artificial Sequence:  Enzymatic Nucleic Acid
aucagacacugaugaggccguuaggccgaaaaaaccuu

SEQ ID NO: 13280 - RNA, 38 nt, Artificial Sequence
  Description of Artificial Sequence:  Enzymatic Nucleic Acid
ucucaucacugaugaggccguuaggccgaaacagaaaa

SEQ ID NO: 13281 - RNA, 38 nt, Artificial Sequence
  Description of Artificial Sequence:  Enzymatic Nucleic Acid
ucagugggcugaugaggccguuaggccgaaauugcacu

SEQ ID NO: 13282 - RNA, 38 nt, Artificial Sequence
  Description of Artificial Sequence:  Enzymatic Nucleic Acid
ugcaccaacugaugaggccguuaggccgaaagccacag

SEQ ID NO: 13283 - RNA, 38 nt, Artificial Sequence
  Description of Artificial Sequence:  Enzymatic Nucleic Acid
agugcacccugaugaggccguuaggccgaaagagccac

SEQ ID NO: 13284 - RNA, 38 nt, Artificial Sequence
  Description of Artificial Sequence:  Enzymatic Nucleic Acid
uggcuggucugaugaggccguuaggccgaaagugcacc

SEQ ID NO: 13285 - RNA, 38 nt, Artificial Sequence
  Description of Artificial Sequence:  Enzymatic Nucleic Acid
uacuuguccugaugaggccguuaggccgaaaguccugg

SEQ ID NO: 13286 - RNA, 38 nt, Artificial Sequence
  Description of Artificial Sequence:  Enzymatic Nucleic Acid
cccuuucccugaugaggccguuaggccgaaacuugucu

SEQ ID NO: 13287 - RNA, 38 nt, Artificial Sequence
  Description of Artificial Sequence:  Enzymatic Nucleic Acid
guggcuagcugaugaggccguuaggccgaaagcccuuu

SEQ ID NO: 13288 - RNA, 38 nt, Artificial Sequence
  Description of Artificial Sequence:  Enzymatic Nucleic Acid
uguggcuacugaugaggccguuaggccgaaaagcccuu

SEQ ID NO: 13289 - RNA, 38 nt, Artificial Sequence
  Description of Artificial Sequence:  Enzymatic Nucleic Acid
aguguggccugaugaggccguuaggccgaaagaagccc

SEQ ID NO: 13290 - RNA, 38 nt, Artificial Sequence
  Description of Artificial Sequence:  Enzymatic Nucleic Acid
cccuaccucugaugaggccguuaggccgaaauuuucuu

SEQ ID NO: 13291 - RNA, 38 nt, Artificial Sequence
  Description of Artificial Sequence:  Enzymatic Nucleic Acid
gccagccccugaugaggccguuaggccgaaaccugauu

SEQ ID NO: 13292 - RNA, 38 nt, Artificial Sequence
  Description of Artificial Sequence:  Enzymatic Nucleic Acid
uggacaaacugaugaggccguuaggccgaaaugucuuu

SEQ ID NO: 13293 - RNA, 38 nt, Artificial Sequence
  Description of Artificial Sequence:  Enzymatic Nucleic Acid
aauggacacugaugaggccguuaggccgaaagaugucu

SEQ ID NO: 13294 - RNA, 38 nt, Artificial Sequence
  Description of Artificial Sequence:  Enzymatic Nucleic Acid
gaauggaccugaugaggccguuaggccgaaaagauguc

SEQ ID NO: 13295 - RNA, 38 nt, Artificial Sequence
  Description of Artificial Sequence:  Enzymatic Nucleic Acid
ugcgaaugcugaugaggccguuaggccgaaacaaagau

SEQ ID NO: 13296 - RNA, 38 nt, Artificial Sequence
  Description of Artificial Sequence:  Enzymatic Nucleic Acid
cuuuugcgcugaugaggccguuaggccgaaauggacaa

SEQ ID NO: 13297 - RNA, 38 nt, Artificial Sequence
  Description of Artificial Sequence:  Enzymatic Nucleic Acid
gcuuuugccugaugaggccguuaggccgaaaauggaca

SEQ ID NO: 13298 - RNA, 38 nt, Artificial Sequence
  Description of Artificial Sequence:  Enzymatic Nucleic Acid
gccgacaacugaugaggccguuaggccgaaagcuuuug

SEQ ID NO: 13299 - RNA, 38 nt, Artificial Sequence
  Description of Artificial Sequence:  Enzymatic Nucleic Acid
cagccgaccugaugaggccguuaggccgaaagagcuuu

SEQ ID NO: 13300 - RNA, 38 nt, Artificial Sequence
  Description of Artificial Sequence:  Enzymatic Nucleic Acid
cugcagcccugaugaggccguuaggccgaaacaagagc

SEQ ID NO: 13301 - RNA, 38 nt, Artificial Sequence
  Description of Artificial Sequence:  Enzymatic Nucleic Acid
gccugacucugaugaggccguuaggccgaaacacacug

SEQ ID NO: 13302 - RNA, 38 nt, Artificial Sequence
  Description of Artificial Sequence:  Enzymatic Nucleic Acid
caucgccucugaugaggccguuaggccgaaacuuacac

SEQ ID NO: 13303 - RNA, 38 nt, Artificial Sequence
  Description of Artificial Sequence:  Enzymatic Nucleic Acid
uucucuggcugaugaggccguuaggccgaaagccucug

SEQ ID NO: 13304 - RNA, 38 nt, Artificial Sequence
  Description of Artificial Sequence:  Enzymatic Nucleic Acid
ggaugagacugaugaggccguuaggccgaaaccucagg

SEQ ID NO: 13305 - RNA, 38 nt, Artificial Sequence
  Description of Artificial Sequence:  Enzymatic Nucleic Acid
uggaugagcugaugaggccguuaggccgaaaaccucag

SEQ ID NO: 13306 - RNA, 38 nt, Artificial Sequence
  Description of Artificial Sequence:  Enzymatic Nucleic Acid
cuggaugacugaugaggccguuaggccgaaaaaccuca

SEQ ID NO: 13307 - RNA, 38 nt, Artificial Sequence
  Description of Artificial Sequence:  Enzymatic Nucleic Acid
aucuggaucugaugaggccguuaggccgaaagaaaccu

SEQ ID NO: 13308 - RNA, 38 nt, Artificial Sequence
  Description of Artificial Sequence:  Enzymatic Nucleic Acid
gauaucugcugaugaggccguuaggccgaaaugagaaa

SEQ ID NO: 13309 - RNA, 38 nt, Artificial Sequence
  Description of Artificial Sequence:  Enzymatic Nucleic Acid
uugcuggacugaugaggccguuaggccgaaaucuggau

SEQ ID NO: 13310 - RNA, 38 nt, Artificial Sequence
  Description of Artificial Sequence:  Enzymatic Nucleic Acid
aauugcugcugaugaggccguuaggccgaaauaucugg

SEQ ID NO: 13311 - RNA, 38 nt, Artificial Sequence
  Description of Artificial Sequence:  Enzymatic Nucleic Acid
cacccccccugaugaggccguuaggccgaaauugcugg

SEQ ID NO: 13312 - RNA, 38 nt, Artificial Sequence
  Description of Artificial Sequence:  Enzymatic Nucleic Acid
ggaccauccugaugaggccguuaggccgaaauggucuu

SEQ ID NO: 13313 - RNA, 38 nt, Artificial Sequence
  Description of Artificial Sequence:  Enzymatic Nucleic Acid
uaauacagcugaugaggccguuaggccgaaaccaucua

SEQ ID NO: 13314 - RNA, 38 nt, Artificial Sequence
  Description of Artificial Sequence:  Enzymatic Nucleic Acid
cggaauaacugaugaggccguuaggccgaaacaggacc

SEQ ID NO: 13315 - RNA, 38 nt, Artificial Sequence
  Description of Artificial Sequence:  Enzymatic Nucleic Acid
aucggaaucugaugaggccguuaggccgaaauacagga

SEQ ID NO: 13316 - RNA, 38 nt, Artificial Sequence
  Description of Artificial Sequence:  Enzymatic Nucleic Acid
aaucggaacugaugaggccguuaggccgaaaauacagg

SEQ ID NO: 13317 - RNA, 38 nt, Artificial Sequence
  Description of Artificial Sequence:  Enzymatic Nucleic Acid
aaaaucggcugaugaggccguuaggccgaaauaauaca

SEQ ID NO: 13318 - RNA, 38 nt, Artificial Sequence
  Description of Artificial Sequence:  Enzymatic Nucleic Acid
uaaaaucgcugaugaggccguuaggccgaaaauaauac

SEQ ID NO: 13319 - RNA, 38 nt, Artificial Sequence
  Description of Artificial Sequence:  Enzymatic Nucleic Acid
auuauuaacugaugaggccguuaggccgaaaucggaau

SEQ ID NO: 13320 - RNA, 38 nt, Artificial Sequence
  Description of Artificial Sequence:  Enzymatic Nucleic Acid
gauuauuacugaugaggccguuaggccgaaaaucggaa

SEQ ID NO: 13321 - RNA, 38 nt, Artificial Sequence
  Description of Artificial Sequence:  Enzymatic Nucleic Acid
agauuauucugaugaggccguuaggccgaaaaaucgga

SEQ ID NO: 13322 - RNA, 38 nt, Artificial Sequence
  Description of Artificial Sequence:  Enzymatic Nucleic Acid
uagauuaucugaugaggccguuaggccgaaaaaaucgg

SEQ ID NO: 13323 - RNA, 38 nt, Artificial Sequence
  Description of Artificial Sequence:  Enzymatic Nucleic Acid
aauuagaucugaugaggccguuaggccgaaauuaaaau

SEQ ID NO: 13324 - RNA, 38 nt, Artificial Sequence
  Description of Artificial Sequence:  Enzymatic Nucleic Acid
acgaauuacugaugaggccguuaggccgaaauuauuaa

SEQ ID NO: 13325 - RNA, 38 nt, Artificial Sequence
  Description of Artificial Sequence:  Enzymatic Nucleic Acid
ucacgaaucugaugaggccguuaggccgaaagauuauu

SEQ ID NO: 13326 - RNA, 38 nt, Artificial Sequence
  Description of Artificial Sequence:  Enzymatic Nucleic Acid
ugaucacgcugaugaggccguuaggccgaaauuagauu

SEQ ID NO: 13327 - RNA, 38 nt, Artificial Sequence
  Description of Artificial Sequence:  Enzymatic Nucleic Acid
augaucaccugaugaggccguuaggccgaaaauuagau

SEQ ID NO: 13328 - RNA, 38 nt, Artificial Sequence
  Description of Artificial Sequence:  Enzymatic Nucleic Acid
cucuuaaucugaugaggccguuaggccgaaaucacgaa

SEQ ID NO: 13329 - RNA, 38 nt, Artificial Sequence
  Description of Artificial Sequence:  Enzymatic Nucleic Acid
agucucuucugaugaggccguuaggccgaaaugaucac

SEQ ID NO: 13330 - RNA, 38 nt, Artificial Sequence
  Description of Artificial Sequence:  Enzymatic Nucleic Acid
aagucucucugaugaggccguuaggccgaaaaugauca

SEQ ID NO: 13331 - RNA, 38 nt, Artificial Sequence
  Description of Artificial Sequence:  Enzymatic Nucleic Acid
auuuacuacugaugaggccguuaggccgaaagucucuu

SEQ ID NO: 13332 - RNA, 38 nt, Artificial Sequence
  Description of Artificial Sequence:  Enzymatic Nucleic Acid
cauuuacucugaugaggccguuaggccgaaaagucucu

SEQ ID NO: 13333 - RNA, 38 nt, Artificial Sequence
  Description of Artificial Sequence:  Enzymatic Nucleic Acid
acauuuaccugaugaggccguuaggccgaaaaagucuc

SEQ ID NO: 13334 - RNA, 38 nt, Artificial Sequence
  Description of Artificial Sequence:  Enzymatic Nucleic Acid
gggacauucugaugaggccguuaggccgaaacuaaagu

SEQ ID NO: 13335 - RNA, 38 nt, Artificial Sequence
  Description of Artificial Sequence:  Enzymatic Nucleic Acid
ggaaaaggcugaugaggccguuaggccgaaacauuuac

SEQ ID NO: 13336 - RNA, 38 nt, Artificial Sequence
  Description of Artificial Sequence:  Enzymatic Nucleic Acid
ugugggaacugaugaggccguuaggccgaaagggacau

SEQ ID NO: 13337 - RNA, 38 nt, Artificial Sequence
  Description of Artificial Sequence:  Enzymatic Nucleic Acid
uugugggacugaugaggccguuaggccgaaaagggaca

SEQ ID NO: 13338 - RNA, 38 nt, Artificial Sequence
  Description of Artificial Sequence:  Enzymatic Nucleic Acid
uuugugggcugaugaggccguuaggccgaaaaagggac

SEQ ID NO: 13339 - RNA, 38 nt, Artificial Sequence
  Description of Artificial Sequence:  Enzymatic Nucleic Acid
uuuuguggcugaugaggccguuaggccgaaaaaaggga

SEQ ID NO: 13340 - RNA, 38 nt, Artificial Sequence
  Description of Artificial Sequence:  Enzymatic Nucleic Acid
cuuuucuucugaugaggccguuaggccgaaacuuuugu

SEQ ID NO: 13341 - RNA, 38 nt, Artificial Sequence
  Description of Artificial Sequence:  Enzymatic Nucleic Acid
aaucccgacugaugaggccguuaggccgaaagcuuuuc

SEQ ID NO: 13342 - RNA, 38 nt, Artificial Sequence
  Description of Artificial Sequence:  Enzymatic Nucleic Acid
agaauccccugaugaggccguuaggccgaaauagcuuu

SEQ ID NO: 13343 - RNA, 38 nt, Artificial Sequence
  Description of Artificial Sequence:  Enzymatic Nucleic Acid
aaccagagcugaugaggccguuaggccgaaaucccgau

SEQ ID NO: 13344 - RNA, 38 nt, Artificial Sequence
  Description of Artificial Sequence:  Enzymatic Nucleic Acid
gaaccagacugaugaggccguuaggccgaaaaucccga

SEQ ID NO: 13345 - RNA, 38 nt, Artificial Sequence
  Description of Artificial Sequence:  Enzymatic Nucleic Acid
cagaaccacugaugaggccguuaggccgaaagaauccc

SEQ ID NO: 13346 - RNA, 38 nt, Artificial Sequence
  Description of Artificial Sequence:  Enzymatic Nucleic Acid
uuaagcagcugaugaggccguuaggccgaaaccagaga

SEQ ID NO: 13347 - RNA, 38 nt, Artificial Sequence
  Description of Artificial Sequence:  Enzymatic Nucleic Acid
uuuaagcacugaugaggccguuaggccgaaaaccagag

SEQ ID NO: 13348 - RNA, 38 nt, Artificial Sequence
  Description of Artificial Sequence:  Enzymatic Nucleic Acid
aagucuuucugaugaggccguuaggccgaaagcagaac

SEQ ID NO: 13349 - RNA, 38 nt, Artificial Sequence
  Description of Artificial Sequence:  Enzymatic Nucleic Acid
uaagucuucugaugaggccguuaggccgaaaagcagaa

SEQ ID NO: 13350 - RNA, 38 nt, Artificial Sequence
  Description of Artificial Sequence:  Enzymatic Nucleic Acid
ccaaagcucugaugaggccguuaggccgaaagucuuua

SEQ ID NO: 13351 - RNA, 38 nt, Artificial Sequence
  Description of Artificial Sequence:  Enzymatic Nucleic Acid
uccaaagccugaugaggccguuaggccgaaaagucuuu

SEQ ID NO: 13352 - RNA, 38 nt, Artificial Sequence
  Description of Artificial Sequence:  Enzymatic Nucleic Acid
aggcuccacugaugaggccguuaggccgaaagcuaagu

SEQ ID NO: 13353 - RNA, 38 nt, Artificial Sequence
  Description of Artificial Sequence:  Enzymatic Nucleic Acid
uaggcucccugaugaggccguuaggccgaaaagcuaag

SEQ ID NO: 13354 - RNA, 38 nt, Artificial Sequence
  Description of Artificial Sequence:  Enzymatic Nucleic Acid
aacuuucacugaugaggccguuaggccgaaaggcucca

SEQ ID NO: 13355 - RNA, 38 nt, Artificial Sequence
  Description of Artificial Sequence:  Enzymatic Nucleic Acid
ggcugauccugaugaggccguuaggccgaaacuuucau

SEQ ID NO: 13356 - RNA, 54 nt, Artificial Sequence
  Description of Artificial Sequence:  Enzymatic Nucleic Acid
gucccagcagaagaccauaccagagaaacacacguugugguacauuaccuggua

SEQ ID NO: 13357 - RNA, 54 nt, Artificial Sequence
  Description of Artificial Sequence:  Enzymatic Nucleic Acid
ggugucccagaagcugacaccagagaaacacacguugugguacauuaccuggua

SEQ ID NO: 13358 - RNA, 54 nt, Artificial Sequence
  Description of Artificial Sequence:  Enzymatic Nucleic Acid
uaaggcaaagaagcggugaccagagaaacacacguugugguacauuaccuggua

SEQ ID NO: 13359 - RNA, 54 nt, Artificial Sequence
  Description of Artificial Sequence:  Enzymatic Nucleic Acid
gacacccgagaagcgcguaccagagaaacacacguugugguacauuaccuggua

SEQ ID NO: 13360 - RNA, 54 nt, Artificial Sequence
  Description of Artificial Sequence:  Enzymatic Nucleic Acid
cugugagaagaagacaccaccagagaaacacacguugugguacauuaccuggua

SEQ ID NO: 13361 - RNA, 54 nt, Artificial Sequence
  Description of Artificial Sequence:  Enzymatic Nucleic Acid
gaaagagaagaaggccugaccagagaaacacacguugugguacauuaccuggua

SEQ ID NO: 13362 - RNA, 54 nt, Artificial Sequence
  Description of Artificial Sequence:  Enzymatic Nucleic Acid
caugagugagaagccuccaccagagaaacacacguugugguacauuaccuggua

SEQ ID NO: 13363 - RNA, 54 nt, Artificial Sequence
  Description of Artificial Sequence:  Enzymatic Nucleic Acid
cggucgugagaagagaccaccagagaaacacacguugugguacauuaccuggua

SEQ ID NO: 13364 - RNA, 54 nt, Artificial Sequence
  Description of Artificial Sequence:  Enzymatic Nucleic Acid
cucccacaagaagaugggaccagagaaacacacguugugguacauuaccuggua

SEQ ID NO: 13365 - RNA, 54 nt, Artificial Sequence
  Description of Artificial Sequence:  Enzymatic Nucleic Acid
ggaugaugagaagucuucaccagagaaacacacguugugguacauuaccuggua

SEQ ID NO: 13366 - RNA, 54 nt, Artificial Sequence
  Description of Artificial Sequence:  Enzymatic Nucleic Acid
cgucacccagaaggggauaccagagaaacacacguugugguacauuaccuggua

SEQ ID NO: 13367 - RNA, 54 nt, Artificial Sequence
  Description of Artificial Sequence:  Enzymatic Nucleic Acid
cuuugcccagaagggguaaccagagaaacacacguugugguacauuaccuggua

SEQ ID NO: 13368 - RNA, 54 nt, Artificial Sequence
  Description of Artificial Sequence:  Enzymatic Nucleic Acid
cgcaguucagaaguccuaaccagagaaacacacguugugguacauuaccuggua

SEQ ID NO: 13369 - RNA, 54 nt, Artificial Sequence
  Description of Artificial Sequence:  Enzymatic Nucleic Acid
gccgauggagaagauaguaccagagaaacacacguugugguacauuaccuggua

SEQ ID NO: 13370 - RNA, 54 nt, Artificial Sequence
  Description of Artificial Sequence:  Enzymatic Nucleic Acid
uuguauugagaagccgauaccagagaaacacacguugugguacauuaccuggua

SEQ ID NO: 13371 - RNA, 54 nt, Artificial Sequence
  Description of Artificial Sequence:  Enzymatic Nucleic Acid
cugggcucagaaggcguaaccagagaaacacacguugugguacauuaccuggua

SEQ ID NO: 13372 - RNA, 54 nt, Artificial Sequence
  Description of Artificial Sequence:  Enzymatic Nucleic Acid
gcccguggagaagucucaaccagagaaacacacguugugguacauuaccuggua

SEQ ID NO: 13373 - RNA, 54 nt, Artificial Sequence
  Description of Artificial Sequence:  Enzymatic Nucleic Acid
ggacaagaagaagcccguaccagagaaacacacguugugguacauuaccuggua

SEQ ID NO: 13374 - RNA, 54 nt, Artificial Sequence
  Description of Artificial Sequence:  Enzymatic Nucleic Acid
uccggucaagaagcugccaccagagaaacacacguugugguacauuaccuggua

SEQ ID NO: 13375 - RNA, 54 nt, Artificial Sequence
  Description of Artificial Sequence:  Enzymatic Nucleic Acid
cuucacgcagaagguguaaccagagaaacacacguugugguacauuaccuggua

SEQ ID NO: 13376 - RNA, 54 nt, Artificial Sequence
  Description of Artificial Sequence:  Enzymatic Nucleic Acid
uguugaaaagaaggaacgaccagagaaacacacguugugguacauuaccuggua

SEQ ID NO: 13377 - RNA, 54 nt, Artificial Sequence
  Description of Artificial Sequence:  Enzymatic Nucleic Acid
ccugcaccagaagcuuccaccagagaaacacacguugugguacauuaccuggua

SEQ ID NO: 13378 - RNA, 54 nt, Artificial Sequence
  Description of Artificial Sequence:  Enzymatic Nucleic Acid
gccgauagagaagucuucaccagagaaacacacguugugguacauuaccuggua

SEQ ID NO: 13379 - RNA, 54 nt, Artificial Sequence
  Description of Artificial Sequence:  Enzymatic Nucleic Acid
ucauggacagaagauaggaccagagaaacacacguugugguacauuaccuggua

SEQ ID NO: 13380 - RNA, 54 nt, Artificial Sequence
  Description of Artificial Sequence:  Enzymatic Nucleic Acid
cuuucaugagaagccgauaccagagaaacacacguugugguacauuaccuggua

SEQ ID NO: 13381 - RNA, 54 nt, Artificial Sequence
  Description of Artificial Sequence:  Enzymatic Nucleic Acid
aaauagcgagaagacuucaccagagaaacacacguugugguacauuaccuggua

SEQ ID NO: 13382 - RNA, 54 nt, Artificial Sequence
  Description of Artificial Sequence:  Enzymatic Nucleic Acid
uuucguagagaagagguuaccagagaaacacacguugugguacauuaccuggua

SEQ ID NO: 13383 - RNA, 54 nt, Artificial Sequence
  Description of Artificial Sequence:  Enzymatic Nucleic Acid
ugcugcccagaagauagaaccagagaaacacacguugugguacauuaccuggua

SEQ ID NO: 13384 - RNA, 54 nt, Artificial Sequence
  Description of Artificial Sequence:  Enzymatic Nucleic Acid
gucugagaagaagccaccaccagagaaacacacguugugguacauuaccuggua

SEQ ID NO: 13385 - RNA, 54 nt, Artificial Sequence
  Description of Artificial Sequence:  Enzymatic Nucleic Acid
uuccagggagaagagaguaccagagaaacacacguugugguacauuaccuggua

SEQ ID NO: 13386 - RNA, 54 nt, Artificial Sequence
  Description of Artificial Sequence:  Enzymatic Nucleic Acid
ggcccggcagaaguagauaccagagaaacacacguugugguacauuaccuggua

SEQ ID NO: 13387 - RNA, 54 nt, Artificial Sequence
  Description of Artificial Sequence:  Enzymatic Nucleic Acid
gaaggcccagaagcuguaaccagagaaacacacguugugguacauuaccuggua

SEQ ID NO: 13388 - RNA, 54 nt, Artificial Sequence
  Description of Artificial Sequence:  Enzymatic Nucleic Acid
uucggcacagaagugacaaccagagaaacacacguugugguacauuaccuggua

SEQ ID NO: 13389 - RNA, 54 nt, Artificial Sequence
  Description of Artificial Sequence:  Enzymatic Nucleic Acid
ucuccuucagaaggcaucaccagagaaacacacguugugguacauuaccuggua

SEQ ID NO: 13390 - RNA, 54 nt, Artificial Sequence
  Description of Artificial Sequence:  Enzymatic Nucleic Acid
ccacacagagaaguuucaaccagagaaacacacguugugguacauuaccuggua

SEQ ID NO: 13391 - RNA, 54 nt, Artificial Sequence
  Description of Artificial Sequence:  Enzymatic Nucleic Acid
gguuuugaagaaggugugaccagagaaacacacguugugguacauuaccuggua

SEQ ID NO: 13392 - RNA, 54 nt, Artificial Sequence
  Description of Artificial Sequence:  Enzymatic Nucleic Acid
accaagugagaagaggcgaccagagaaacacacguugugguacauuaccuggua

SEQ ID NO: 13393 - RNA, 54 nt, Artificial Sequence
  Description of Artificial Sequence:  Enzymatic Nucleic Acid
gugagguaagaagcgcuuaccagagaaacacacguugugguacauuaccuggua

SEQ ID NO: 13394 - RNA, 54 nt, Artificial Sequence
  Description of Artificial Sequence:  Enzymatic Nucleic Acid
ugagcgugagaagcuccaaccagagaaacacacguugugguacauuaccuggua

SEQ ID NO: 13395 - RNA, 54 nt, Artificial Sequence
  Description of Artificial Sequence:  Enzymatic Nucleic Acid
cggaagaaagaagcuucaaccagagaaacacacguugugguacauuaccuggua

SEQ ID NO: 13396 - RNA, 54 nt, Artificial Sequence
  Description of Artificial Sequence:  Enzymatic Nucleic Acid
gacagguaagaagucuuuaccagagaaacacacguugugguacauuaccuggua

SEQ ID NO: 13397 - RNA, 54 nt, Artificial Sequence
  Description of Artificial Sequence:  Enzymatic Nucleic Acid
cauagggcagaaguucacaccagagaaacacacguugugguacauuaccuggua

SEQ ID NO: 13398 - RNA, 54 nt, Artificial Sequence
  Description of Artificial Sequence:  Enzymatic Nucleic Acid
caucauagagaagccguuaccagagaaacacacguugugguacauuaccuggua

SEQ ID NO: 13399 - RNA, 54 nt, Artificial Sequence
  Description of Artificial Sequence:  Enzymatic Nucleic Acid
cacaguccagaaggugggaccagagaaacacacguugugguacauuaccuggua

SEQ ID NO: 13400 - RNA, 54 nt, Artificial Sequence
  Description of Artificial Sequence:  Enzymatic Nucleic Acid
cagccacaagaaggcaggaccagagaaacacacguugugguacauuaccuggua

SEQ ID NO: 13401 - RNA, 54 nt, Artificial Sequence
  Description of Artificial Sequence:  Enzymatic Nucleic Acid
guucggucagaagagcuuaccagagaaacacacguugugguacauuaccuggua

SEQ ID NO: 13402 - RNA, 54 nt, Artificial Sequence
  Description of Artificial Sequence:  Enzymatic Nucleic Acid
cgaucaccagaagaggccaccagagaaacacacguugugguacauuaccuggua

SEQ ID NO: 13403 - RNA, 54 nt, Artificial Sequence
  Description of Artificial Sequence:  Enzymatic Nucleic Acid
gguaguugagaagguuucaccagagaaacacacguugugguacauuaccuggua

SEQ ID NO: 13404 - RNA, 54 nt, Artificial Sequence
  Description of Artificial Sequence:  Enzymatic Nucleic Acid
cuuguugaagaagaauaaaccagagaaacacacguugugguacauuaccuggua

SEQ ID NO: 13405 - RNA, 54 nt, Artificial Sequence
  Description of Artificial Sequence:  Enzymatic Nucleic Acid
auaugcaaagaagcguccaccagagaaacacacguugugguacauuaccuggua

SEQ ID NO: 13406 - RNA, 54 nt, Artificial Sequence
  Description of Artificial Sequence:  Enzymatic Nucleic Acid
acugucuaagaagggcuuaccagagaaacacacguugugguacauuaccuggua

SEQ ID NO: 13407 - RNA, 54 nt, Artificial Sequence
  Description of Artificial Sequence:  Enzymatic Nucleic Acid
gacacuugagaagcugacaccagagaaacacacguugugguacauuaccuggua

SEQ ID NO: 13408 - RNA, 54 nt, Artificial Sequence
  Description of Artificial Sequence:  Enzymatic Nucleic Acid
gaagcuggagaaggugacaccagagaaacacacguugugguacauuaccuggua

SEQ ID NO: 13409 - RNA, 54 nt, Artificial Sequence
  Description of Artificial Sequence:  Enzymatic Nucleic Acid
uucagggaagaaggagcuaccagagaaacacacguugugguacauuaccuggua

SEQ ID NO: 13410 - RNA, 54 nt, Artificial Sequence
  Description of Artificial Sequence:  Enzymatic Nucleic Acid
uggugaggagaagcuuggaccagagaaacacacguugugguacauuaccuggua

SEQ ID NO: 13411 - RNA, 54 nt, Artificial Sequence
  Description of Artificial Sequence:  Enzymatic Nucleic Acid
uguaggaaagaaggucuuaccagagaaacacacguugugguacauuaccuggua

SEQ ID NO: 13412 - RNA, 54 nt, Artificial Sequence
  Description of Artificial Sequence:  Enzymatic Nucleic Acid
cacuuggaagaaguaggaaccagagaaacacacguugugguacauuaccuggua

SEQ ID NO: 13413 - RNA, 54 nt, Artificial Sequence
  Description of Artificial Sequence:  Enzymatic Nucleic Acid
uucuggagagaagaaacuaccagagaaacacacguugugguacauuaccuggua

SEQ ID NO: 13414 - RNA, 54 nt, Artificial Sequence
  Description of Artificial Sequence:  Enzymatic Nucleic Acid
cuucaggcagaagcagaaaccagagaaacacacguugugguacauuaccuggua

SEQ ID NO: 13415 - RNA, 54 nt, Artificial Sequence
  Description of Artificial Sequence:  Enzymatic Nucleic Acid
uuccuucaagaagcugcaaccagagaaacacacguugugguacauuaccuggua

SEQ ID NO: 13416 - RNA, 54 nt, Artificial Sequence
  Description of Artificial Sequence:  Enzymatic Nucleic Acid
ggguucucagaagcaugcaccagagaaacacacguugugguacauuaccuggua

SEQ ID NO: 13417 - RNA, 54 nt, Artificial Sequence
  Description of Artificial Sequence:  Enzymatic Nucleic Acid
guucagcaagaaggggccaccagagaaacacacguugugguacauuaccuggua

SEQ ID NO: 13418 - RNA, 54 nt, Artificial Sequence
  Description of Artificial Sequence:  Enzymatic Nucleic Acid
uggcuugaagaaggucacaccagagaaacacacguugugguacauuaccuggua

SEQ ID NO: 13419 - RNA, 54 nt, Artificial Sequence
  Description of Artificial Sequence:  Enzymatic Nucleic Acid
uguuucuaagaaguauggaccagagaaacacacguugugguacauuaccuggua

SEQ ID NO: 13420 - RNA, 54 nt, Artificial Sequence
  Description of Artificial Sequence:  Enzymatic Nucleic Acid
aucugcaaagaaguccuuaccagagaaacacacguugugguacauuaccuggua

SEQ ID NO: 13421 - RNA, 54 nt, Artificial Sequence
  Description of Artificial Sequence:  Enzymatic Nucleic Acid
aaauguggagaagcaaagaccagagaaacacacguugugguacauuaccuggua

SEQ ID NO: 13422 - RNA, 54 nt, Artificial Sequence
  Description of Artificial Sequence:  Enzymatic Nucleic Acid
cucacaucagaagagcuuaccagagaaacacacguugugguacauuaccuggua

SEQ ID NO: 13423 - RNA, 54 nt, Artificial Sequence
  Description of Artificial Sequence:  Enzymatic Nucleic Acid
uaguguccagaagauaguaccagagaaacacacguugugguacauuaccuggua

SEQ ID NO: 13424 - RNA, 54 nt, Artificial Sequence
  Description of Artificial Sequence:  Enzymatic Nucleic Acid
gggagcccagaagagugcaccagagaaacacacguugugguacauuaccuggua

SEQ ID NO: 13425 - RNA, 54 nt, Artificial Sequence
  Description of Artificial Sequence:  Enzymatic Nucleic Acid
uccaggugagaagcuucaaccagagaaacacacguugugguacauuaccuggua

SEQ ID NO: 13426 - RNA, 54 nt, Artificial Sequence
  Description of Artificial Sequence:  Enzymatic Nucleic Acid
cucggcagagaagaaaguaccagagaaacacacguugugguacauuaccuggua

SEQ ID NO: 13427 - RNA, 54 nt, Artificial Sequence
  Description of Artificial Sequence:  Enzymatic Nucleic Acid
ugggccucagaagaucggaccagagaaacacacguugugguacauuaccuggua

SEQ ID NO: 13428 - RNA, 54 nt, Artificial Sequence
  Description of Artificial Sequence:  Enzymatic Nucleic Acid
gaagcagaagaagggccuaccagagaaacacacguugugguacauuaccuggua

SEQ ID NO: 13429 - RNA, 54 nt, Artificial Sequence
  Description of Artificial Sequence:  Enzymatic Nucleic Acid
gcuggagaagaagaagcuaccagagaaacacacguugugguacauuaccuggua

SEQ ID NO: 13430 - RNA, 54 nt, Artificial Sequence
  Description of Artificial Sequence:  Enzymatic Nucleic Acid
guggccacagaaggagaaaccagagaaacacacguugugguacauuaccuggua

SEQ ID NO: 13431 - RNA, 54 nt, Artificial Sequence
  Description of Artificial Sequence:  Enzymatic Nucleic Acid
uggagaacagaaggacucaccagagaaacacacguugugguacauuaccuggua

SEQ ID NO: 13432 - RNA, 54 nt, Artificial Sequence
  Description of Artificial Sequence:  Enzymatic Nucleic Acid
ggguggagagaagcaggaaccagagaaacacacguugugguacauuaccuggua

SEQ ID NO: 13433 - RNA, 54 nt, Artificial Sequence
  Description of Artificial Sequence:  Enzymatic Nucleic Acid
gaguuguaagaaggggguaccagagaaacacacguugugguacauuaccuggua

SEQ ID NO: 13434 - RNA, 54 nt, Artificial Sequence
  Description of Artificial Sequence:  Enzymatic Nucleic Acid
uuuaggcgagaagggaggaccagagaaacacacguugugguacauuaccuggua

SEQ ID NO: 13435 - RNA, 54 nt, Artificial Sequence
  Description of Artificial Sequence:  Enzymatic Nucleic Acid
aagcuuuaagaaggcgggaccagagaaacacacguugugguacauuaccuggua

SEQ ID NO: 13436 - RNA, 54 nt, Artificial Sequence
  Description of Artificial Sequence:  Enzymatic Nucleic Acid
guugucggagaaggugagaccagagaaacacacguugugguacauuaccuggua

SEQ ID NO: 13437 - RNA, 54 nt, Artificial Sequence
  Description of Artificial Sequence:  Enzymatic Nucleic Acid
cugucaggagaagguuguaccagagaaacacacguugugguacauuaccuggua

SEQ ID NO: 13438 - RNA, 54 nt, Artificial Sequence
  Description of Artificial Sequence:  Enzymatic Nucleic Acid
uccuguggagaagaauagaccagagaaacacacguugugguacauuaccuggua

SEQ ID NO: 13439 - RNA, 54 nt, Artificial Sequence
  Description of Artificial Sequence:  Enzymatic Nucleic Acid
cgaaaagcagaaggcuccaccagagaaacacacguugugguacauuaccuggua

SEQ ID NO: 13440 - RNA, 54 nt, Artificial Sequence
  Description of Artificial Sequence:  Enzymatic Nucleic Acid
ucacgaaaagaagcuggcaccagagaaacacacguugugguacauuaccuggua

SEQ ID NO: 13441 - RNA, 54 nt, Artificial Sequence
  Description of Artificial Sequence:  Enzymatic Nucleic Acid
uuagucaaagaagcaacaaccagagaaacacacguugugguacauuaccuggua

SEQ ID NO: 13442 - RNA, 54 nt, Artificial Sequence
  Description of Artificial Sequence:  Enzymatic Nucleic Acid
ggugggcgagaagucgccaccagagaaacacacguugugguacauuaccuggua

SEQ ID NO: 13443 - RNA, 54 nt, Artificial Sequence
  Description of Artificial Sequence:  Enzymatic Nucleic Acid
ggccggugagaaggcgguaccagagaaacacacguugugguacauuaccuggua

SEQ ID NO: 13444 - RNA, 54 nt, Artificial Sequence
  Description of Artificial Sequence:  Enzymatic Nucleic Acid
agucccacagaagcagggaccagagaaacacacguugugguacauuaccuggua

SEQ ID NO: 13445 - RNA, 54 nt, Artificial Sequence
  Description of Artificial Sequence:  Enzymatic Nucleic Acid
cagagcagagaagugcauaccagagaaacacacguugugguacauuaccuggua

SEQ ID NO: 13446 - RNA, 54 nt, Artificial Sequence
  Description of Artificial Sequence:  Enzymatic Nucleic Acid
agagacagagaaggucagaccagagaaacacacguugugguacauuaccuggua

SEQ ID NO: 13447 - RNA, 54 nt, Artificial Sequence
  Description of Artificial Sequence:  Enzymatic Nucleic Acid
auaagagaagaagagcagaccagagaaacacacguugugguacauuaccuggua

SEQ ID NO: 13448 - RNA, 54 nt, Artificial Sequence
  Description of Artificial Sequence:  Enzymatic Nucleic Acid
cuccacagagaagacgcaaccagagaaacacacguugugguacauuaccuggua

SEQ ID NO: 13449 - RNA, 54 nt, Artificial Sequence
  Description of Artificial Sequence:  Enzymatic Nucleic Acid
cccgaaacagaagaggccaccagagaaacacacguugugguacauuaccuggua

SEQ ID NO: 13450 - RNA, 54 nt, Artificial Sequence
  Description of Artificial Sequence:  Enzymatic Nucleic Acid
gggcccgaagaagcggagaccagagaaacacacguugugguacauuaccuggua

SEQ ID NO: 13451 - RNA, 54 nt, Artificial Sequence
  Description of Artificial Sequence:  Enzymatic Nucleic Acid
aaacagacagaagaagacaccagagaaacacacguugugguacauuaccuggua

SEQ ID NO: 13452 - RNA, 54 nt, Artificial Sequence
  Description of Artificial Sequence:  Enzymatic Nucleic Acid
ggaugguaagaagacaacaccagagaaacacacguugugguacauuaccuggua

SEQ ID NO: 13453 - RNA, 54 nt, Artificial Sequence
  Description of Artificial Sequence:  Enzymatic Nucleic Acid
acuagaggagaagaugauaccagagaaacacacguugugguacauuaccuggua

SEQ ID NO: 13454 - RNA, 54 nt, Artificial Sequence
  Description of Artificial Sequence:  Enzymatic Nucleic Acid
augcgaagagaaggccugaccagagaaacacacguugugguacauuaccuggua

SEQ ID NO: 13455 - RNA, 54 nt, Artificial Sequence
  Description of Artificial Sequence:  Enzymatic Nucleic Acid
uccccgugagaaguaugcaccagagaaacacacguugugguacauuaccuggua

SEQ ID NO: 13456 - RNA, 54 nt, Artificial Sequence
  Description of Artificial Sequence:  Enzymatic Nucleic Acid
cuaggccaagaaggaccaaccagagaaacacacguugugguacauuaccuggua

SEQ ID NO: 13457 - RNA, 54 nt, Artificial Sequence
  Description of Artificial Sequence:  Enzymatic Nucleic Acid
uugagcccagaaguaggcaccagagaaacacacguugugguacauuaccuggua

SEQ ID NO: 13458 - RNA, 54 nt, Artificial Sequence
  Description of Artificial Sequence:  Enzymatic Nucleic Acid
auauauaaagaaggauaaaccagagaaacacacguugugguacauuaccuggua

SEQ ID NO: 13459 - RNA, 54 nt, Artificial Sequence
  Description of Artificial Sequence:  Enzymatic Nucleic Acid
uccucucaagaagccuugaccagagaaacacacguugugguacauuaccuggua

SEQ ID NO: 13460 - RNA, 54 nt, Artificial Sequence
  Description of Artificial Sequence:  Enzymatic Nucleic Acid
uaaauaugagaagauacuaccagagaaacacacguugugguacauuaccuggua

SEQ ID NO: 13461 - RNA, 54 nt, Artificial Sequence
  Description of Artificial Sequence:  Enzymatic Nucleic Acid
agguaugaagaagaugaaaccagagaaacacacguugugguacauuaccuggua

SEQ ID NO: 13462 - RNA, 54 nt, Artificial Sequence
  Description of Artificial Sequence:  Enzymatic Nucleic Acid
ccccaaagagaaggcaccaccagagaaacacacguugugguacauuaccuggua

SEQ ID NO: 13463 - RNA, 54 nt, Artificial Sequence
  Description of Artificial Sequence:  Enzymatic Nucleic Acid
ccggcuccagaaggugugaccagagaaacacacguugugguacauuaccuggua

SEQ ID NO: 13464 - RNA, 54 nt, Artificial Sequence
  Description of Artificial Sequence:  Enzymatic Nucleic Acid
gucugcccagaagugaccaccagagaaacacacguugugguacauuaccuggua

SEQ ID NO: 13465 - RNA, 54 nt, Artificial Sequence
  Description of Artificial Sequence:  Enzymatic Nucleic Acid
uauucaucagaagcccagaccagagaaacacacguugugguacauuaccuggua

SEQ ID NO: 13466 - RNA, 54 nt, Artificial Sequence
  Description of Artificial Sequence:  Enzymatic Nucleic Acid
ucucccaaagaagcuauuaccagagaaacacacguugugguacauuaccuggua

SEQ ID NO: 13467 - RNA, 54 nt, Artificial Sequence
  Description of Artificial Sequence:  Enzymatic Nucleic Acid
cuggcccgagaagagaauaccagagaaacacacguugugguacauuaccuggua

SEQ ID NO: 13468 - RNA, 54 nt, Artificial Sequence
  Description of Artificial Sequence:  Enzymatic Nucleic Acid
cacaggggagaagguaccaccagagaaacacacguugugguacauuaccuggua

SEQ ID NO: 13469 - RNA, 54 nt, Artificial Sequence
  Description of Artificial Sequence:  Enzymatic Nucleic Acid
ucucaucaagaagaaaacaccagagaaacacacguugugguacauuaccuggua

SEQ ID NO: 13470 - RNA, 54 nt, Artificial Sequence
  Description of Artificial Sequence:  Enzymatic Nucleic Acid
ccagucucagaagacagaaccagagaaacacacguugugguacauuaccuggua

SEQ ID NO: 13471 - RNA, 54 nt, Artificial Sequence
  Description of Artificial Sequence:  Enzymatic Nucleic Acid
gggcugcaagaagucucaaccagagaaacacacguugugguacauuaccuggua

SEQ ID NO: 13472 - RNA, 54 nt, Artificial Sequence
  Description of Artificial Sequence:  Enzymatic Nucleic Acid
ccacagugagaagcaggcaccagagaaacacacguugugguacauuaccuggua

SEQ ID NO: 13473 - RNA, 54 nt, Artificial Sequence
  Description of Artificial Sequence:  Enzymatic Nucleic Acid
cacacugcagaagacaagaccagagaaacacacguugugguacauuaccuggua

SEQ ID NO: 13474 - RNA, 54 nt, Artificial Sequence
  Description of Artificial Sequence:  Enzymatic Nucleic Acid
cuguucucagaaguuucuaccagagaaacacacguugugguacauuaccuggua

SEQ ID NO: 13475 - RNA, 54 nt, Artificial Sequence
  Description of Artificial Sequence:  Enzymatic Nucleic Acid
aaaccucaagaagcuguuaccagagaaacacacguugugguacauuaccuggua

SEQ ID NO: 13476 - RNA, 54 nt, Artificial Sequence
  Description of Artificial Sequence:  Enzymatic Nucleic Acid
uuauuaaaagaagaauaaaccagagaaacacacguugugguacauuaccuggua

SEQ ID NO: 13477 - RNA, 54 nt, Artificial Sequence
  Description of Artificial Sequence:  Enzymatic Nucleic Acid
agucuuuaagaagaaccaaccagagaaacacacguugugguacauuaccuggua

SEQ ID NO: 13478 - RNA, 35 nt, Artificial Sequence
  Description of Artificial Sequence:  Enzymatic Nucleic Acid
  misc_feature (1)..(4): Phosphorothioate 3'-Internucleotide Linkage
  misc_feature (1)..(8): 2'-O-Methyl
  misc_feature (14)..(24): 2'-O-Methyl
  misc_feature (26)..(27): 2'-O-Methyl
  misc_feature (29)..(34): 2'-O-Methyl
  misc_feature (9)..(9): 2'-deoxy-2'-amino
  misc_feature (12)..(12): 2'-deoxy-2'-amino
  misc_feature (35)..(35): n stands for inverted deoxyabasic derivative
aucuuuucugaugaggcgaaagccgaaaccauacn

SEQ ID NO: 13479 - RNA, 35 nt, Artificial Sequence
  Description of Artificial Sequence:  Enzymatic Nucleic Acid
  misc_feature (1)..(4): Phosphorothioate 3'-Internucleotide Linkage
  misc_feature (1)..(8): 2'-O-Methyl
  misc_feature (10)..(10): 2'-O-Methyl
  misc_feature (14)..(24): 2'-O-Methyl
  misc_feature (26)..(27): 2'-O-Methyl
  misc_feature (29)..(34): 2'-O-Methyl
  misc_feature (9)..(9): 2'-deoxy-2'-amino
  misc_feature (12)..(12): 2'-deoxy-2'-amino
  misc_feature (35)..(35): n stands for inverted deoxyabasic derivative
aucuuuucuuaugaggcgaaagccgauaccauacn

SEQ ID NO: 13480 - RNA, 35 nt, Artificial Sequence; identical to SEQ ID NO: 13478
  Description of Artificial Sequence:  Enzymatic Nucleic Acid
  misc_feature (1)..(4): Phosphorothioate 3'-Internucleotide Linkage
  misc_feature (1)..(8): 2'-O-Methyl
  misc_feature (12)..(12): 2'-O-Methyl
  misc_feature (14)..(24): 2'-O-Methyl
  misc_feature (26)..(27): 2'-O-Methyl
  misc_feature (29)..(34): 2'-O-Methyl
  misc_feature (9)..(9): 2'-deoxy-2'- C-Allyl
  misc_feature (35)..(35): n stands for inverted deoxyabasic derivative

SEQ ID NO: 13481 - RNA, 35 nt, Artificial Sequence; identical to SEQ ID NO: 13479
  Description of Artificial Sequence:  Enzymatic Nucleic Acid
  misc_feature (1)..(4): Phosphorothioate 3'-Internucleotide Linkage
  misc_feature (1)..(8): 2'-O-Methyl
  misc_feature (10)..(10): 2'-O-Methyl
  misc_feature (12)..(12): 2'-O-Methyl
  misc_feature (14)..(24): 2'-O-Methyl
  misc_feature (26)..(27): 2'-O-Methyl
  misc_feature (29)..(34): 2'-O-Methyl
  misc_feature (9)..(9): 2'-deoxy-2'- C-Allyl
  misc_feature (35)..(35): n stands for inverted deoxyabasic derivative

SEQ ID NO: 13482 - RNA, 33 nt, Artificial Sequence
  Description of Artificial Sequence:  Enzymatic Nucleic Acid
  misc_feature (1)..(4): Phosphorothioate 3'-Internucleotide Linkage
  misc_feature (1)..(7): 2'-O-Methyl
  misc_feature (13)..(23): 2'-O-Methyl
  misc_feature (25)..(26): 2'-O-Methyl
  misc_feature (28)..(32): 2'-O-Methyl
  misc_feature (8)..(8): 2'-deoxy-2'-amino
  misc_feature (11)..(11): 2'-deoxy-2'-amino
  misc_feature (33)..(33): n stands for inverted deoxyabasic derivative
gaguugcugaugaggcgaaagccgaaagucugn

SEQ ID NO: 13483 - RNA, 33 nt, Artificial Sequence
  Description of Artificial Sequence:  Enzymatic Nucleic Acid
  misc_feature (1)..(4): Phosphorothioate 3'-Internucleotide Linkage
  misc_feature (1)..(7): 2'-O-Methyl
  misc_feature (9)..(9): 2'-O-Methyl
  misc_feature (13)..(23): 2'-O-Methyl
  misc_feature (25)..(26): 2'-O-Methyl
  misc_feature (28)..(32): 2'-O-Methyl
  misc_feature (8)..(8): 2'-deoxy-2'-amino
  misc_feature (11)..(11): 2'-deoxy-2'-amino
  misc_feature (33)..(33): n stands for inverted deoxyabasic derivative
gaguugcuuaugaggcgaaagccgauagucugn

SEQ ID NO: 13484 - RNA, 33 nt, Artificial Sequence; identical to SEQ ID NO: 13482
  Description of Artificial Sequence:  Enzymatic Nucleic Acid
  misc_feature (1)..(4): Phosphorothioate 3'-Internucleotide Linkage
  misc_feature (1)..(7): 2'-O-Methyl
  misc_feature (11)..(11): 2'-O-Methyl
  misc_feature (13)..(23): 2'-O-Methyl
  misc_feature (25)..(26): 2'-O-Methyl
  misc_feature (28)..(32): 2'-O-Methyl
  misc_feature (8)..(8): 2'-deoxy-2'- C-Allyl
  misc_feature (33)..(33): n stands for inverted deoxyabasic derivative

SEQ ID NO: 13485 - RNA, 33 nt, Artificial Sequence; identical to SEQ ID NO: 13483
  Description of Artificial Sequence:  Enzymatic Nucleic Acid
  misc_feature (1)..(4): Phosphorothioate 3'-Internucleotide Linkage
  misc_feature (1)..(7): 2'-O-Methyl
  misc_feature (9)..(9): 2'-O-Methyl
  misc_feature (11)..(11): 2'-O-Methyl
  misc_feature (13)..(23): 2'-O-Methyl
  misc_feature (25)..(26): 2'-O-Methyl
  misc_feature (28)..(32): 2'-O-Methyl
  misc_feature (8)..(8): 2'-deoxy-2'- C-Allyl
  misc_feature (33)..(33): n stands for inverted deoxyabasic derivative

SEQ ID NO: 13486 - RNA, 35 nt, Artificial Sequence
  Description of Artificial Sequence:  Enzymatic Nucleic Acid
  misc_feature (1)..(4): Phosphorothioate 3'-Internucleotide Linkage
  misc_feature (1)..(8): 2'-O-Methyl
  misc_feature (14)..(24): 2'-O-Methyl
  misc_feature (26)..(27): 2'-O-Methyl
  misc_feature (29)..(34): 2'-O-Methyl
  misc_feature (9)..(9): 2'-deoxy-2'-amino
  misc_feature (12)..(12): 2'-deoxy-2'-amino
  misc_feature (35)..(35): n stands for inverted deoxyabasic derivative
uacaauucugaugaggcgaaagccgaaaagacaan

SEQ ID NO: 13487 - RNA, 35 nt, Artificial Sequence
  Description of Artificial Sequence:  Enzymatic Nucleic Acid
  misc_feature (1)..(4): Phosphorothioate 3'-Internucleotide Linkage
  misc_feature (1)..(8): 2'-O-Methyl
  misc_feature (10)..(10): 2'-O-Methyl
  misc_feature (14)..(24): 2'-O-Methyl
  misc_feature (26)..(27): 2'-O-Methyl
  misc_feature (29)..(34): 2'-O-Methyl
  misc_feature (9)..(9): 2'-deoxy-2'-amino
  misc_feature (12)..(12): 2'-deoxy-2'-amino
  misc_feature (35)..(35): n stands for inverted deoxyabasic derivative
uacaauucuuaugaggcgaaagccgauaagacaan

SEQ ID NO: 13488 - RNA, 35 nt, Artificial Sequence; identical to SEQ ID NO: 13486
  Description of Artificial Sequence:  Enzymatic Nucleic Acid
  misc_feature (1)..(4): Phosphorothioate 3'-Internucleotide Linkage
  misc_feature (1)..(8): 2'-O-Methyl
  misc_feature (12)..(12): 2'-O-Methyl
  misc_feature (14)..(24): 2'-O-Methyl
  misc_feature (26)..(27): 2'-O-Methyl
  misc_feature (29)..(34): 2'-O-Methyl
  misc_feature (9)..(9): 2'-deoxy-2'- C-Allyl
  misc_feature (35)..(35): n stands for inverted deoxyabasic derivative

SEQ ID NO: 13489 - RNA, 35 nt, Artificial Sequence; identical to SEQ ID NO: 13487
  Description of Artificial Sequence:  Enzymatic Nucleic Acid
  misc_feature (1)..(4): Phosphorothioate 3'-Internucleotide Linkage
  misc_feature (1)..(8): 2'-O-Methyl
  misc_feature (10)..(10): 2'-O-Methyl
  misc_feature (12)..(12): 2'-O-Methyl
  misc_feature (14)..(24): 2'-O-Methyl
  misc_feature (26)..(27): 2'-O-Methyl
  misc_feature (29)..(34): 2'-O-Methyl
  misc_feature (9)..(9): 2'-deoxy-2'- C-Allyl
  misc_feature (35)..(35): n stands for inverted deoxyabasic derivative

SEQ ID NO: 13490 - RNA, 33 nt, Artificial Sequence
  Description of Artificial Sequence:  Enzymatic Nucleic Acid
  misc_feature (1)..(4): Phosphorothioate 3'-Internucleotide Linkage
  misc_feature (1)..(7): 2'-O-Methyl
  misc_feature (13)..(23): 2'-O-Methyl
  misc_feature (25)..(26): 2'-O-Methyl
  misc_feature (28)..(32): 2'-O-Methyl
  misc_feature (8)..(8): 2'-deoxy-2'-amino
  misc_feature (11)..(11): 2'-deoxy-2'-amino
  misc_feature (33)..(33): n stands for inverted deoxyabasic derivative
cuggagcugaugaggcgaaagccgaaacacggn

SEQ ID NO: 13491 - RNA, 33 nt, Artificial Sequence
  Description of Artificial Sequence:  Enzymatic Nucleic Acid
  misc_feature (1)..(4): Phosphorothioate 3'-Internucleotide Linkage
  misc_feature (1)..(7): 2'-O-Methyl
  misc_feature (9)..(9): 2'-O-Methyl
  misc_feature (13)..(23): 2'-O-Methyl
  misc_feature (25)..(26): 2'-O-Methyl
  misc_feature (28)..(32): 2'-O-Methyl
  misc_feature (8)..(8): 2'-deoxy-2'-amino
  misc_feature (11)..(11): 2'-deoxy-2'-amino
  misc_feature (33)..(33): n stands for inverted deoxyabasic derivative
cuggagcuuaugaggcgaaagccgauacacggn

SEQ ID NO: 13492 - RNA, 33 nt, Artificial Sequence; identical to SEQ ID NO: 13490
  Description of Artificial Sequence:  Enzymatic Nucleic Acid
  misc_feature (1)..(4): Phosphorothioate 3'-Internucleotide Linkage
  misc_feature (1)..(7): 2'-O-Methyl
  misc_feature (11)..(11): 2'-O-Methyl
  misc_feature (13)..(23): 2'-O-Methyl
  misc_feature (25)..(26): 2'-O-Methyl
  misc_feature (28)..(32): 2'-O-Methyl
  misc_feature (8)..(8): 2'-deoxy-2'- C-Allyl
  misc_feature (33)..(33): n stands for inverted deoxyabasic derivative

SEQ ID NO: 13493 - RNA, 33 nt, Artificial Sequence; identical to SEQ ID NO: 13491
  Description of Artificial Sequence:  Enzymatic Nucleic Acid
  misc_feature (1)..(4): Phosphorothioate 3'-Internucleotide Linkage
  misc_feature (1)..(7): 2'-O-Methyl
  misc_feature (9)..(9): 2'-O-Methyl
  misc_feature (11)..(11): 2'-O-Methyl
  misc_feature (13)..(23): 2'-O-Methyl
  misc_feature (25)..(26): 2'-O-Methyl
  misc_feature (28)..(32): 2'-O-Methyl
  misc_feature (8)..(8): 2'-deoxy-2'- C-Allyl
  misc_feature (33)..(33): n stands for inverted deoxyabasic derivative

SEQ ID NO: 13494 - RNA, 35 nt, Artificial Sequence
  Description of Artificial Sequence:  Enzymatic Nucleic Acid
  misc_feature (1)..(4): Phosphorothioate 3'-Internucleotide Linkage
  misc_feature (1)..(7): 2'-O-Methyl
  misc_feature (11)..(11): 2'-O-Methyl
  misc_feature (13)..(25): 2'-O-Methyl
  misc_feature (27)..(28): 2'-O-Methyl
  misc_feature (30)..(34): 2'-O-Methyl
  misc_feature (8)..(8): 2'-deoxy-2'-amino
  misc_feature (35)..(35): n stands for inverted deoxyabasic derivative
gaguugcugaugaggccgaaaggccgaaagucugn

SEQ ID NO: 13495 - RNA, 35 nt, Artificial Sequence
  Description of Artificial Sequence:  Enzymatic Nucleic Acid
  misc_feature (1)..(4): Phosphorothioate 3'-Internucleotide Linkage
  misc_feature (1)..(7): 2'-O-Methyl
  misc_feature (11)..(11): 2'-O-Methyl
  misc_feature (13)..(25): 2'-O-Methyl
  misc_feature (27)..(28): 2'-O-Methyl
  misc_feature (30)..(34): 2'-O-Methyl
  misc_feature (8)..(8): 2'-deoxy-2'-amino
  misc_feature (35)..(35): n stands for inverted deoxyabasic derivative
gaguugcuagagaggccgaaaggccgauagucugn

SEQ ID NO: 13496 - RNA, 34 nt, Artificial Sequence
  Description of Artificial Sequence:  Enzymatic Nucleic Acid
  misc_feature (1)..(4): Phosphorothioate 3'-Internucleotide Linkage
  misc_feature (1)..(7): 2'-O-Methyl
  misc_feature (11)..(11): 2'-O-Methyl
  misc_feature (13)..(25): 2'-O-Methyl
  misc_feature (27)..(28): 2'-O-Methyl
  misc_feature (30)..(33): 2'-O-Methyl
  misc_feature (8)..(8): 2'-deoxy-2'-amino
  misc_feature (34)..(34): n stands for inverted deoxyabasic derivative
gaaggucuagugaggccgaaaggccgauaugucn

SEQ ID NO: 13497 - RNA, 38 nt, Artificial Sequence
  Description of Artificial Sequence:  Enzymatic Nucleic Acid
  misc_feature (31)..(31): n stands for inosine
ccgagaggcugaugaggccguuaggccgaanuguccgc

SEQ ID NO: 13498 - RNA, 38 nt, Artificial Sequence
  Description of Artificial Sequence:  Enzymatic Nucleic Acid
  misc_feature (31)..(31): n stands for inosine
agccgagacugaugaggccguuaggccgaanagugucc

SEQ ID NO: 13499 - RNA, 38 nt, Artificial Sequence
  Description of Artificial Sequence:  Enzymatic Nucleic Acid
  misc_feature (31)..(31): n stands for inosine
gagccgagcugaugaggccguuaggccgaangaguguc

SEQ ID NO: 13500 - RNA, 38 nt, Artificial Sequence
  Description of Artificial Sequence:  Enzymatic Nucleic Acid
  misc_feature (31)..(31): n stands for inosine
aggagccgcugaugaggccguuaggccgaanaggagug

SEQ ID NO: 13501 - RNA, 38 nt, Artificial Sequence
  Description of Artificial Sequence:  Enzymatic Nucleic Acid
  misc_feature (31)..(31): n stands for inosine
cggggaggcugaugaggccguuaggccgaanccgagag

SEQ ID NO: 13502 - RNA, 38 nt, Artificial Sequence
  Description of Artificial Sequence:  Enzymatic Nucleic Acid
  misc_feature (31)..(31): n stands for inosine
gccggggacugaugaggccguuaggccgaanagccgag

SEQ ID NO: 13503 - RNA, 38 nt, Artificial Sequence
  Description of Artificial Sequence:  Enzymatic Nucleic Acid
  misc_feature (31)..(31): n stands for inosine
ugccggggcugaugaggccguuaggccgaangagccga

SEQ ID NO: 13504 - RNA, 38 nt, Artificial Sequence
  Description of Artificial Sequence:  Enzymatic Nucleic Acid
  misc_feature (31)..(31): n stands for inosine
gcugccggcugaugaggccguuaggccgaanaggagcc

SEQ ID NO: 13505 - RNA, 38 nt, Artificial Sequence
  Description of Artificial Sequence:  Enzymatic Nucleic Acid
  misc_feature (31)..(31): n stands for inosine
cgcugccgcugaugaggccguuaggccgaangaggagc

SEQ ID NO: 13506 - RNA, 38 nt, Artificial Sequence
  Description of Artificial Sequence:  Enzymatic Nucleic Acid
  misc_feature (31)..(31): n stands for inosine
ccgcugcccugaugaggccguuaggccgaanggaggag

SEQ ID NO: 13507 - RNA, 38 nt, Artificial Sequence
  Description of Artificial Sequence:  Enzymatic Nucleic Acid
  misc_feature (31)..(31): n stands for inosine
gccgccgccugaugaggccguuaggccgaanccgggga

SEQ ID NO: 13508 - RNA, 38 nt, Artificial Sequence
  Description of Artificial Sequence:  Enzymatic Nucleic Acid
  misc_feature (31)..(31): n stands for inosine
ccgcuccgcugaugaggccguuaggccgaanccgccgc

SEQ ID NO: 13509 - RNA, 38 nt, Artificial Sequence
  Description of Artificial Sequence:  Enzymatic Nucleic Acid
  misc_feature (31)..(31): n stands for inosine
agccccggcugaugaggccguuaggccgaancccgcuc

SEQ ID NO: 13510 - RNA, 38 nt, Artificial Sequence
  Description of Artificial Sequence:  Enzymatic Nucleic Acid
  misc_feature (31)..(31): n stands for inosine
cgagcccccugaugaggccguuaggccgaanagcccgc

SEQ ID NO: 13511 - RNA, 38 nt, Artificial Sequence
  Description of Artificial Sequence:  Enzymatic Nucleic Acid
  misc_feature (31)..(31): n stands for inosine
ugcacccgcugaugaggccguuaggccgaanccccgga

SEQ ID NO: 13512 - RNA, 38 nt, Artificial Sequence
  Description of Artificial Sequence:  Enzymatic Nucleic Acid
  misc_feature (31)..(31): n stands for inosine
cuggccgccugaugaggccguuaggccgaancacccga

SEQ ID NO: 13513 - RNA, 38 nt, Artificial Sequence
  Description of Artificial Sequence:  Enzymatic Nucleic Acid
  misc_feature (31)..(31): n stands for inosine
ggcccgcucugaugaggccguuaggccgaanccgcugc

SEQ ID NO: 13514 - RNA, 38 nt, Artificial Sequence
  Description of Artificial Sequence:  Enzymatic Nucleic Acid
  misc_feature (31)..(31): n stands for inosine
aggcccgccugaugaggccguuaggccgaangccgcug

SEQ ID NO: 13515 - RNA, 38 nt, Artificial Sequence
  Description of Artificial Sequence:  Enzymatic Nucleic Acid
  misc_feature (31)..(31): n stands for inosine
cgccgccacugaugaggccguuaggccgaancccgcug

SEQ ID NO: 13516 - RNA, 38 nt, Artificial Sequence
  Description of Artificial Sequence:  Enzymatic Nucleic Acid
  misc_feature (31)..(31): n stands for inosine
ucgccgcccugaugaggccguuaggccgaangcccgcu

SEQ ID NO: 13517 - RNA, 38 nt, Artificial Sequence
  Description of Artificial Sequence:  Enzymatic Nucleic Acid
  misc_feature (31)..(31): n stands for inosine
cuuccccgcugaugaggccguuaggccgaanuaauccu

SEQ ID NO: 13518 - RNA, 38 nt, Artificial Sequence
  Description of Artificial Sequence:  Enzymatic Nucleic Acid
  misc_feature (31)..(31): n stands for inosine
acuucccccugaugaggccguuaggccgaanguaaucc

SEQ ID NO: 13519 - RNA, 38 nt, Artificial Sequence
  Description of Artificial Sequence:  Enzymatic Nucleic Acid
  misc_feature (31)..(31): n stands for inosine
cagccaggcugaugaggccguuaggccgaanacaacca

SEQ ID NO: 13520 - RNA, 38 nt, Artificial Sequence
  Description of Artificial Sequence:  Enzymatic Nucleic Acid
  misc_feature (31)..(31): n stands for inosine
uccagccacugaugaggccguuaggccgaanagacaac

SEQ ID NO: 13521 - RNA, 38 nt, Artificial Sequence
  Description of Artificial Sequence:  Enzymatic Nucleic Acid
  misc_feature (31)..(31): n stands for inosine
cuccagcccugaugaggccguuaggccgaangagacaa

SEQ ID NO: 13522 - RNA, 38 nt, Artificial Sequence
  Description of Artificial Sequence:  Enzymatic Nucleic Acid
  misc_feature (31)..(31): n stands for inosine
gcggcucccugaugaggccguuaggccgaanccaggag

SEQ ID NO: 13523 - RNA, 38 nt, Artificial Sequence
  Description of Artificial Sequence:  Enzymatic Nucleic Acid
  misc_feature (31)..(31): n stands for inosine
cgucucgccugaugaggccguuaggccgaancuccagc

SEQ ID NO: 13524 - RNA, 38 nt, Artificial Sequence
  Description of Artificial Sequence:  Enzymatic Nucleic Acid
  misc_feature (31)..(31): n stands for inosine
gcgcccugcugaugaggccguuaggccgaancgcccgu

SEQ ID NO: 13525 - RNA, 38 nt, Artificial Sequence
  Description of Artificial Sequence:  Enzymatic Nucleic Acid
  misc_feature (31)..(31): n stands for inosine
ccgcgccccugaugaggccguuaggccgaanagcgccc

SEQ ID NO: 13526 - RNA, 38 nt, Artificial Sequence
  Description of Artificial Sequence:  Enzymatic Nucleic Acid
  misc_feature (31)..(31): n stands for inosine
ccgccgcccugaugaggccguuaggccgaanccccgcg

SEQ ID NO: 13527 - RNA, 38 nt, Artificial Sequence
  Description of Artificial Sequence:  Enzymatic Nucleic Acid
  misc_feature (31)..(31): n stands for inosine
gccgccagcugaugaggccguuaggccgaanuccgucc

SEQ ID NO: 13528 - RNA, 38 nt, Artificial Sequence
  Description of Artificial Sequence:  Enzymatic Nucleic Acid
  misc_feature (31)..(31): n stands for inosine
cggccgcccugaugaggccguuaggccgaanaguccgu

SEQ ID NO: 13529 - RNA, 38 nt, Artificial Sequence
  Description of Artificial Sequence:  Enzymatic Nucleic Acid
  misc_feature (31)..(31): n stands for inosine
aacgaccccugaugaggccguuaggccgaanccgccag

SEQ ID NO: 13530 - RNA, 38 nt, Artificial Sequence
  Description of Artificial Sequence:  Enzymatic Nucleic Acid
  misc_feature (31)..(31): n stands for inosine
gcuccccccugaugaggccguuaggccgaanccaacga

SEQ ID NO: 13531 - RNA, 38 nt, Artificial Sequence
  Description of Artificial Sequence:  Enzymatic Nucleic Acid
  misc_feature (31)..(31): n stands for inosine
ucgcccggcugaugaggccguuaggccgaancccgcgc

SEQ ID NO: 13532 - RNA, 38 nt, Artificial Sequence
  Description of Artificial Sequence:  Enzymatic Nucleic Acid
  misc_feature (31)..(31): n stands for inosine
gcucgccccugaugaggccguuaggccgaanugcccgc

SEQ ID NO: 13533 - RNA, 38 nt, Artificial Sequence
  Description of Artificial Sequence:  Enzymatic Nucleic Acid
  misc_feature (31)..(31): n stands for inosine
acgcggcccugaugaggccguuaggccgaancucgccc

SEQ ID NO: 13534 - RNA, 38 nt, Artificial Sequence
  Description of Artificial Sequence:  Enzymatic Nucleic Acid
  misc_feature (31)..(31): n stands for inosine
cgcgacgccugaugaggccguuaggccgaanccugcuc

SEQ ID NO: 13535 - RNA, 38 nt, Artificial Sequence
  Description of Artificial Sequence:  Enzymatic Nucleic Acid
  misc_feature (31)..(31): n stands for inosine
ccauggugcugaugaggccguuaggccgaancgcgacg

SEQ ID NO: 13536 - RNA, 38 nt, Artificial Sequence
  Description of Artificial Sequence:  Enzymatic Nucleic Acid
  misc_feature (31)..(31): n stands for inosine
gaccauggcugaugaggccguuaggccgaanagcgcga

SEQ ID NO: 13537 - RNA, 38 nt, Artificial Sequence
  Description of Artificial Sequence:  Enzymatic Nucleic Acid
  misc_feature (31)..(31): n stands for inosine
cugaccaucugaugaggccguuaggccgaanugagcgc

SEQ ID NO: 13538 - RNA, 38 nt, Artificial Sequence
  Description of Artificial Sequence:  Enzymatic Nucleic Acid
  misc_feature (31)..(31): n stands for inosine
gcugaccacugaugaggccguuaggccgaangugagcg

SEQ ID NO: 13539 - RNA, 38 nt, Artificial Sequence
  Description of Artificial Sequence:  Enzymatic Nucleic Acid
  misc_feature (31)..(31): n stands for inosine
ccaguagccugaugaggccguuaggccgaanaccaugg

SEQ ID NO: 13540 - RNA, 38 nt, Artificial Sequence
  Description of Artificial Sequence:  Enzymatic Nucleic Acid
  misc_feature (31)..(31): n stands for inosine
gucccagucugaugaggccguuaggccgaancugacca

SEQ ID NO: 13541 - RNA, 38 nt, Artificial Sequence
  Description of Artificial Sequence:  Enzymatic Nucleic Acid
  misc_feature (31)..(31): n stands for inosine
gguguccccugaugaggccguuaggccgaanuagcuga

SEQ ID NO: 13542 - RNA, 38 nt, Artificial Sequence
  Description of Artificial Sequence:  Enzymatic Nucleic Acid
  misc_feature (31)..(31): n stands for inosine
gaccccggcugaugaggccguuaggccgaanucccagu

SEQ ID NO: 13543 - RNA, 38 nt, Artificial Sequence
  Description of Artificial Sequence:  Enzymatic Nucleic Acid
  misc_feature (31)..(31): n stands for inosine
aggacccccugaugaggccguuaggccgaanuguccca

SEQ ID NO: 13544 - RNA, 38 nt, Artificial Sequence
  Description of Artificial Sequence:  Enzymatic Nucleic Acid
  misc_feature (31)..(31): n stands for inosine
gcacagcacugaugaggccguuaggccgaanaccccgg

SEQ ID NO: 13545 - RNA, 38 nt, Artificial Sequence
  Description of Artificial Sequence:  Enzymatic Nucleic Acid
  misc_feature (31)..(31): n stands for inosine
cgcacagccugaugaggccguuaggccgaangaccccg

SEQ ID NO: 13546 - RNA, 38 nt, Artificial Sequence
  Description of Artificial Sequence:  Enzymatic Nucleic Acid
  misc_feature (31)..(31): n stands for inosine
gcgcgcaccugaugaggccguuaggccgaancaggacc

SEQ ID NO: 13547 - RNA, 38 nt, Artificial Sequence
  Description of Artificial Sequence:  Enzymatic Nucleic Acid
  misc_feature (31)..(31): n stands for inosine
agcugagccugaugaggccguuaggccgaancgcgcac

SEQ ID NO: 13548 - RNA, 38 nt, Artificial Sequence
  Description of Artificial Sequence:  Enzymatic Nucleic Acid
  misc_feature (31)..(31): n stands for inosine
gacagcugcugaugaggccguuaggccgaancagcgcg

SEQ ID NO: 13549 - RNA, 38 nt, Artificial Sequence
  Description of Artificial Sequence:  Enzymatic Nucleic Acid
  misc_feature (31)..(31): n stands for inosine
cagacagccugaugaggccguuaggccgaanagcagcg

SEQ ID NO: 13550 - RNA, 38 nt, Artificial Sequence
  Description of Artificial Sequence:  Enzymatic Nucleic Acid
  misc_feature (31)..(31): n stands for inosine
aagcagaccugaugaggccguuaggccgaancugagca

SEQ ID NO: 13551 - RNA, 38 nt, Artificial Sequence
  Description of Artificial Sequence:  Enzymatic Nucleic Acid
  misc_feature (31)..(31): n stands for inosine
ugagaagccugaugaggccguuaggccgaanacagcug

SEQ ID NO: 13552 - RNA, 38 nt, Artificial Sequence
  Description of Artificial Sequence:  Enzymatic Nucleic Acid
  misc_feature (31)..(31): n stands for inosine
cugugagacugaugaggccguuaggccgaancagacag

SEQ ID NO: 13553 - RNA, 38 nt, Artificial Sequence
  Description of Artificial Sequence:  Enzymatic Nucleic Acid
  misc_feature (31)..(31): n stands for inosine
auccugugcugaugaggccguuaggccgaanaagcaga

SEQ ID NO: 13554 - RNA, 38 nt, Artificial Sequence
  Description of Artificial Sequence:  Enzymatic Nucleic Acid
  misc_feature (31)..(31): n stands for inosine
agauccugcugaugaggccguuaggccgaanagaagca

SEQ ID NO: 13555 - RNA, 38 nt, Artificial Sequence
  Description of Artificial Sequence:  Enzymatic Nucleic Acid
  misc_feature (31)..(31): n stands for inosine
cuagaucccugaugaggccguuaggccgaanugagaag

SEQ ID NO: 13556 - RNA, 38 nt, Artificial Sequence
  Description of Artificial Sequence:  Enzymatic Nucleic Acid
  misc_feature (31)..(31): n stands for inosine
ccugaacucugaugaggccguuaggccgaanauccugu

SEQ ID NO: 13557 - RNA, 38 nt, Artificial Sequence
  Description of Artificial Sequence:  Enzymatic Nucleic Acid
  misc_feature (31)..(31): n stands for inosine
uuugaacccugaugaggccguuaggccgaanaacuaga

SEQ ID NO: 13558 - RNA, 38 nt, Artificial Sequence
  Description of Artificial Sequence:  Enzymatic Nucleic Acid
  misc_feature (31)..(31): n stands for inosine
uuuaauuucugaugaggccguuaggccgaanaaccuga

SEQ ID NO: 13559 - RNA, 38 nt, Artificial Sequence
  Description of Artificial Sequence:  Enzymatic Nucleic Acid
  misc_feature (31)..(31): n stands for inosine
ucaguucacugaugaggccguuaggccgaanaucuuuu

SEQ ID NO: 13560 - RNA, 38 nt, Artificial Sequence
  Description of Artificial Sequence:  Enzymatic Nucleic Acid
  misc_feature (31)..(31): n stands for inosine
cucaguuccugaugaggccguuaggccgaangaucuuu

SEQ ID NO: 13561 - RNA, 38 nt, Artificial Sequence
  Description of Artificial Sequence:  Enzymatic Nucleic Acid
  misc_feature (31)..(31): n stands for inosine
uuaaacuccugaugaggccguuaggccgaanuucagga

SEQ ID NO: 13562 - RNA, 38 nt, Artificial Sequence
  Description of Artificial Sequence:  Enzymatic Nucleic Acid
  misc_feature (31)..(31): n stands for inosine
gugcugggcugaugaggccguuaggccgaanccuuuua

SEQ ID NO: 13563 - RNA, 38 nt, Artificial Sequence
  Description of Artificial Sequence:  Enzymatic Nucleic Acid
  misc_feature (31)..(31): n stands for inosine
augugcugcugaugaggccguuaggccgaanugccuuu

SEQ ID NO: 13564 - RNA, 38 nt, Artificial Sequence
  Description of Artificial Sequence:  Enzymatic Nucleic Acid
  misc_feature (31)..(31): n stands for inosine
gaugugcucugaugaggccguuaggccgaangugccuu

SEQ ID NO: 13565 - RNA, 38 nt, Artificial Sequence
  Description of Artificial Sequence:  Enzymatic Nucleic Acid
  misc_feature (31)..(31): n stands for inosine
ugaugugccugaugaggccguuaggccgaanggugccu

SEQ ID NO: 13566 - RNA, 38 nt, Artificial Sequence
  Description of Artificial Sequence:  Enzymatic Nucleic Acid
  misc_feature (31)..(31): n stands for inosine
gcaugaugcugaugaggccguuaggccgaancugggug

SEQ ID NO: 13567 - RNA, 38 nt, Artificial Sequence
  Description of Artificial Sequence:  Enzymatic Nucleic Acid
  misc_feature (31)..(31): n stands for inosine
uugcaugacugaugaggccguuaggccgaanugcuggg

SEQ ID NO: 13568 - RNA, 38 nt, Artificial Sequence
  Description of Artificial Sequence:  Enzymatic Nucleic Acid
  misc_feature (31)..(31): n stands for inosine
ugcuugcacugaugaggccguuaggccgaanaugugcu

SEQ ID NO: 13569 - RNA, 38 nt, Artificial Sequence
  Description of Artificial Sequence:  Enzymatic Nucleic Acid
  misc_feature (31)..(31): n stands for inosine
ggccugcucugaugaggccguuaggccgaancaugaug

SEQ ID NO: 13570 - RNA, 38 nt, Artificial Sequence
  Description of Artificial Sequence:  Enzymatic Nucleic Acid
  misc_feature (31)..(31): n stands for inosine
gucuggcccugaugaggccguuaggccgaancuugcau

SEQ ID NO: 13571 - RNA, 38 nt, Artificial Sequence
  Description of Artificial Sequence:  Enzymatic Nucleic Acid
  misc_feature (31)..(31): n stands for inosine
cagugucucugaugaggccguuaggccgaanccugcuu

SEQ ID NO: 13572 - RNA, 38 nt, Artificial Sequence
  Description of Artificial Sequence:  Enzymatic Nucleic Acid
  misc_feature (31)..(31): n stands for inosine
gcaguguccugaugaggccguuaggccgaangccugcu

SEQ ID NO: 13573 - RNA, 38 nt, Artificial Sequence
  Description of Artificial Sequence:  Enzymatic Nucleic Acid
  misc_feature (31)..(31): n stands for inosine
agaugcagcugaugaggccguuaggccgaanucuggcc

SEQ ID NO: 13574 - RNA, 38 nt, Artificial Sequence
  Description of Artificial Sequence:  Enzymatic Nucleic Acid
  misc_feature (31)..(31): n stands for inosine
ggagaugccugaugaggccguuaggccgaanugucugg

SEQ ID NO: 13575 - RNA, 38 nt, Artificial Sequence
  Description of Artificial Sequence:  Enzymatic Nucleic Acid
  misc_feature (31)..(31): n stands for inosine
auuggagacugaugaggccguuaggccgaancaguguc

SEQ ID NO: 13576 - RNA, 38 nt, Artificial Sequence
  Description of Artificial Sequence:  Enzymatic Nucleic Acid
  misc_feature (31)..(31): n stands for inosine
ugcauuggcugaugaggccguuaggccgaanaugcagu

SEQ ID NO: 13577 - RNA, 38 nt, Artificial Sequence
  Description of Artificial Sequence:  Enzymatic Nucleic Acid
  misc_feature (31)..(31): n stands for inosine
ccugcauucugaugaggccguuaggccgaanagaugca

SEQ ID NO: 13578 - RNA, 38 nt, Artificial Sequence
  Description of Artificial Sequence:  Enzymatic Nucleic Acid
  misc_feature (31)..(31): n stands for inosine
cccugcaucugaugaggccguuaggccgaangagaugc

SEQ ID NO: 13579 - RNA, 38 nt, Artificial Sequence
  Description of Artificial Sequence:  Enzymatic Nucleic Acid
  misc_feature (31)..(31): n stands for inosine
uucccccccugaugaggccguuaggccgaancauugga

SEQ ID NO: 13580 - RNA, 38 nt, Artificial Sequence
  Description of Artificial Sequence:  Enzymatic Nucleic Acid
  misc_feature (31)..(31): n stands for inosine
uuaugggccugaugaggccguuaggccgaancuucccc

SEQ ID NO: 13581 - RNA, 38 nt, Artificial Sequence
  Description of Artificial Sequence:  Enzymatic Nucleic Acid
  misc_feature (31)..(31): n stands for inosine
cauuuaugcugaugaggccguuaggccgaancugcuuc

SEQ ID NO: 13582 - RNA, 38 nt, Artificial Sequence
  Description of Artificial Sequence:  Enzymatic Nucleic Acid
  misc_feature (31)..(31): n stands for inosine
ccauuuaucugaugaggccguuaggccgaangcugcuu

SEQ ID NO: 13583 - RNA, 38 nt, Artificial Sequence
  Description of Artificial Sequence:  Enzymatic Nucleic Acid
  misc_feature (31)..(31): n stands for inosine
accauuuacugaugaggccguuaggccgaanggcugcu

SEQ ID NO: 13584 - RNA, 38 nt, Artificial Sequence
  Description of Artificial Sequence:  Enzymatic Nucleic Acid
  misc_feature (31)..(31): n stands for inosine
ucaggcaacugaugaggccguuaggccgaanaccauuu

SEQ ID NO: 13585 - RNA, 38 nt, Artificial Sequence
  Description of Artificial Sequence:  Enzymatic Nucleic Acid
  misc_feature (31)..(31): n stands for inosine
ccauuucacugaugaggccguuaggccgaancaaagac

SEQ ID NO: 13586 - RNA, 38 nt, Artificial Sequence
  Description of Artificial Sequence:  Enzymatic Nucleic Acid
  misc_feature (31)..(31): n stands for inosine
accauuuccugaugaggccguuaggccgaangcaaaga

SEQ ID NO: 13587 - RNA, 38 nt, Artificial Sequence
  Description of Artificial Sequence:  Enzymatic Nucleic Acid
  misc_feature (31)..(31): n stands for inosine
uuaugcuccugaugaggccguuaggccgaanccuuucg

SEQ ID NO: 13588 - RNA, 38 nt, Artificial Sequence
  Description of Artificial Sequence:  Enzymatic Nucleic Acid
  misc_feature (31)..(31): n stands for inosine
uuuaguuacugaugaggccguuaggccgaancucagcc

SEQ ID NO: 13589 - RNA, 38 nt, Artificial Sequence
  Description of Artificial Sequence:  Enzymatic Nucleic Acid
  misc_feature (31)..(31): n stands for inosine
gcagauuucugaugaggccguuaggccgaanuuaugcu

SEQ ID NO: 13590 - RNA, 38 nt, Artificial Sequence
  Description of Artificial Sequence:  Enzymatic Nucleic Acid
  misc_feature (31)..(31): n stands for inosine
ccacaggccugaugaggccguuaggccgaanauuuagu

SEQ ID NO: 13591 - RNA, 38 nt, Artificial Sequence
  Description of Artificial Sequence:  Enzymatic Nucleic Acid
  misc_feature (31)..(31): n stands for inosine
cuuccacacugaugaggccguuaggccgaancagauuu

SEQ ID NO: 13592 - RNA, 38 nt, Artificial Sequence
  Description of Artificial Sequence:  Enzymatic Nucleic Acid
  misc_feature (31)..(31): n stands for inosine
ucuuccaccugaugaggccguuaggccgaangcagauu

SEQ ID NO: 13593 - RNA, 38 nt, Artificial Sequence
  Description of Artificial Sequence:  Enzymatic Nucleic Acid
  misc_feature (31)..(31): n stands for inosine
gaauuguucugaugaggccguuaggccgaanccauuuc

SEQ ID NO: 13594 - RNA, 38 nt, Artificial Sequence
  Description of Artificial Sequence:  Enzymatic Nucleic Acid
  misc_feature (31)..(31): n stands for inosine
ugcagaaucugaugaggccguuaggccgaanuuugcca

SEQ ID NO: 13595 - RNA, 38 nt, Artificial Sequence
  Description of Artificial Sequence:  Enzymatic Nucleic Acid
  misc_feature (31)..(31): n stands for inosine
aguacugccugaugaggccguuaggccgaanaauuguu

SEQ ID NO: 13596 - RNA, 38 nt, Artificial Sequence
  Description of Artificial Sequence:  Enzymatic Nucleic Acid
  misc_feature (31)..(31): n stands for inosine
uaaaguaccugaugaggccguuaggccgaancagaauu

SEQ ID NO: 13597 - RNA, 38 nt, Artificial Sequence
  Description of Artificial Sequence:  Enzymatic Nucleic Acid
  misc_feature (31)..(31): n stands for inosine
aagguuaacugaugaggccguuaggccgaanuacugca

SEQ ID NO: 13598 - RNA, 38 nt, Artificial Sequence
  Description of Artificial Sequence:  Enzymatic Nucleic Acid
  misc_feature (31)..(31): n stands for inosine
guguucaacugaugaggccguuaggccgaanuuaaagu

SEQ ID NO: 13599 - RNA, 38 nt, Artificial Sequence
  Description of Artificial Sequence:  Enzymatic Nucleic Acid
  misc_feature (31)..(31): n stands for inosine
uguguucacugaugaggccguuaggccgaanguuaaag

SEQ ID NO: 13600 - RNA, 38 nt, Artificial Sequence
  Description of Artificial Sequence:  Enzymatic Nucleic Acid
  misc_feature (31)..(31): n stands for inosine
uugagcugcugaugaggccguuaggccgaanuucaagg

SEQ ID NO: 13601 - RNA, 38 nt, Artificial Sequence
  Description of Artificial Sequence:  Enzymatic Nucleic Acid
  misc_feature (31)..(31): n stands for inosine
gcuugagccugaugaggccguuaggccgaanuguucaa

SEQ ID NO: 13602 - RNA, 38 nt, Artificial Sequence
  Description of Artificial Sequence:  Enzymatic Nucleic Acid
  misc_feature (31)..(31): n stands for inosine
uuugcuugcugaugaggccguuaggccgaancuguguu

SEQ ID NO: 13603 - RNA, 38 nt, Artificial Sequence
  Description of Artificial Sequence:  Enzymatic Nucleic Acid
  misc_feature (31)..(31): n stands for inosine
gguuugcucugaugaggccguuaggccgaanagcugug

SEQ ID NO: 13604 - RNA, 38 nt, Artificial Sequence
  Description of Artificial Sequence:  Enzymatic Nucleic Acid
  misc_feature (31)..(31): n stands for inosine
gugugguucugaugaggccguuaggccgaancuugagc

SEQ ID NO: 13605 - RNA, 38 nt, Artificial Sequence
  Description of Artificial Sequence:  Enzymatic Nucleic Acid
  misc_feature (31)..(31): n stands for inosine
gccagugucugaugaggccguuaggccgaanuuugcuu

SEQ ID NO: 13606 - RNA, 38 nt, Artificial Sequence
  Description of Artificial Sequence:  Enzymatic Nucleic Acid
  misc_feature (31)..(31): n stands for inosine
agccagugcugaugaggccguuaggccgaanguuugcu

SEQ ID NO: 13607 - RNA, 38 nt, Artificial Sequence
  Description of Artificial Sequence:  Enzymatic Nucleic Acid
  misc_feature (31)..(31): n stands for inosine
gaagccagcugaugaggccguuaggccgaanugguuug

SEQ ID NO: 13608 - RNA, 38 nt, Artificial Sequence
  Description of Artificial Sequence:  Enzymatic Nucleic Acid
  misc_feature (31)..(31): n stands for inosine
uagaagcccugaugaggccguuaggccgaanugugguu

SEQ ID NO: 13609 - RNA, 38 nt, Artificial Sequence
  Description of Artificial Sequence:  Enzymatic Nucleic Acid
  misc_feature (31)..(31): n stands for inosine
gcuguagacugaugaggccguuaggccgaanccagugu

SEQ ID NO: 13610 - RNA, 38 nt, Artificial Sequence
  Description of Artificial Sequence:  Enzymatic Nucleic Acid
  misc_feature (31)..(31): n stands for inosine
gcagcugucugaugaggccguuaggccgaanaagccag

SEQ ID NO: 13611 - RNA, 38 nt, Artificial Sequence
  Description of Artificial Sequence:  Enzymatic Nucleic Acid
  misc_feature (31)..(31): n stands for inosine
uuugcagccugaugaggccguuaggccgaanuagaagc

SEQ ID NO: 13612 - RNA, 38 nt, Artificial Sequence
  Description of Artificial Sequence:  Enzymatic Nucleic Acid
  misc_feature (31)..(31): n stands for inosine
auauuugccugaugaggccguuaggccgaancuguaga

SEQ ID NO: 13613 - RNA, 38 nt, Artificial Sequence
  Description of Artificial Sequence:  Enzymatic Nucleic Acid
  misc_feature (31)..(31): n stands for inosine
uagauauucugaugaggccguuaggccgaancagcugu

SEQ ID NO: 13614 - RNA, 38 nt, Artificial Sequence
  Description of Artificial Sequence:  Enzymatic Nucleic Acid
  misc_feature (31)..(31): n stands for inosine
guacagcucugaugaggccguuaggccgaanauauuug

SEQ ID NO: 13615 - RNA, 38 nt, Artificial Sequence
  Description of Artificial Sequence:  Enzymatic Nucleic Acid
  misc_feature (31)..(31): n stands for inosine
guagguaccugaugaggccguuaggccgaancuagaua

SEQ ID NO: 13616 - RNA, 38 nt, Artificial Sequence
  Description of Artificial Sequence:  Enzymatic Nucleic Acid
  misc_feature (31)..(31): n stands for inosine
uugaaguacugaugaggccguuaggccgaanuacagcu

SEQ ID NO: 13617 - RNA, 38 nt, Artificial Sequence
  Description of Artificial Sequence:  Enzymatic Nucleic Acid
  misc_feature (31)..(31): n stands for inosine
uuugaagucugaugaggccguuaggccgaanguacagc

SEQ ID NO: 13618 - RNA, 38 nt, Artificial Sequence
  Description of Artificial Sequence:  Enzymatic Nucleic Acid
  misc_feature (31)..(31): n stands for inosine
uucuuugacugaugaggccguuaggccgaanuagguac

SEQ ID NO: 13619 - RNA, 38 nt, Artificial Sequence
  Description of Artificial Sequence:  Enzymatic Nucleic Acid
  misc_feature (31)..(31): n stands for inosine
uucuucuucugaugaggccguuaggccgaanaaguagg

SEQ ID NO: 13620 - RNA, 38 nt, Artificial Sequence
  Description of Artificial Sequence:  Enzymatic Nucleic Acid
  misc_feature (31)..(31): n stands for inosine
gcagauuccugaugaggccguuaggccgaanuuuccuu

SEQ ID NO: 13621 - RNA, 38 nt, Artificial Sequence
  Description of Artificial Sequence:  Enzymatic Nucleic Acid
  misc_feature (31)..(31): n stands for inosine
uagauugccugaugaggccguuaggccgaanauucugu

SEQ ID NO: 13622 - RNA, 38 nt, Artificial Sequence
  Description of Artificial Sequence:  Enzymatic Nucleic Acid
  misc_feature (31)..(31): n stands for inosine
auauagaucugaugaggccguuaggccgaancagauuc

SEQ ID NO: 13623 - RNA, 38 nt, Artificial Sequence
  Description of Artificial Sequence:  Enzymatic Nucleic Acid
  misc_feature (31)..(31): n stands for inosine
aaauauaucugaugaggccguuaggccgaanauugcag

SEQ ID NO: 13624 - RNA, 38 nt, Artificial Sequence
  Description of Artificial Sequence:  Enzymatic Nucleic Acid
  misc_feature (31)..(31): n stands for inosine
ggucuacccugaugaggccguuaggccgaanuaucacu

SEQ ID NO: 13625 - RNA, 38 nt, Artificial Sequence
  Description of Artificial Sequence:  Enzymatic Nucleic Acid
  misc_feature (31)..(31): n stands for inosine
cuacgaaacugaugaggccguuaggccgaanucuaccu

SEQ ID NO: 13626 - RNA, 38 nt, Artificial Sequence
  Description of Artificial Sequence:  Enzymatic Nucleic Acid
  misc_feature (31)..(31): n stands for inosine
ucuacgaacugaugaggccguuaggccgaangucuacc

SEQ ID NO: 13627 - RNA, 38 nt, Artificial Sequence
  Description of Artificial Sequence:  Enzymatic Nucleic Acid
  misc_feature (31)..(31): n stands for inosine
gauuucaccugaugaggccguuaggccgaanuacaucu

SEQ ID NO: 13628 - RNA, 38 nt, Artificial Sequence
  Description of Artificial Sequence:  Enzymatic Nucleic Acid
  misc_feature (31)..(31): n stands for inosine
aauuucggcugaugaggccguuaggccgaanauuucac

SEQ ID NO: 13629 - RNA, 38 nt, Artificial Sequence
  Description of Artificial Sequence:  Enzymatic Nucleic Acid
  misc_feature (31)..(31): n stands for inosine
uaauuucgcugaugaggccguuaggccgaangauuuca

SEQ ID NO: 13630 - RNA, 38 nt, Artificial Sequence
  Description of Artificial Sequence:  Enzymatic Nucleic Acid
  misc_feature (31)..(31): n stands for inosine
auaauuuccugaugaggccguuaggccgaanggauuuc

SEQ ID NO: 13631 - RNA, 38 nt, Artificial Sequence
  Description of Artificial Sequence:  Enzymatic Nucleic Acid
  misc_feature (31)..(31): n stands for inosine
cagucaugcugaugaggccguuaggccgaanuauaauu

SEQ ID NO: 13632 - RNA, 38 nt, Artificial Sequence
  Description of Artificial Sequence:  Enzymatic Nucleic Acid
  misc_feature (31)..(31): n stands for inosine
uucagucacugaugaggccguuaggccgaanuguauaa

SEQ ID NO: 13633 - RNA, 38 nt, Artificial Sequence
  Description of Artificial Sequence:  Enzymatic Nucleic Acid
  misc_feature (31)..(31): n stands for inosine
cuuccuuccugaugaggccguuaggccgaanucaugug

SEQ ID NO: 13634 - RNA, 38 nt, Artificial Sequence
  Description of Artificial Sequence:  Enzymatic Nucleic Acid
  misc_feature (31)..(31): n stands for inosine
gaaugacgcugaugaggccguuaggccgaancucccuu

SEQ ID NO: 13635 - RNA, 38 nt, Artificial Sequence
  Description of Artificial Sequence:  Enzymatic Nucleic Acid
  misc_feature (31)..(31): n stands for inosine
gcagggaacugaugaggccguuaggccgaanacgagcu

SEQ ID NO: 13636 - RNA, 38 nt, Artificial Sequence
  Description of Artificial Sequence:  Enzymatic Nucleic Acid
  misc_feature (31)..(31): n stands for inosine
cccggcagcugaugaggccguuaggccgaanaaugacg

SEQ ID NO: 13637 - RNA, 38 nt, Artificial Sequence
  Description of Artificial Sequence:  Enzymatic Nucleic Acid
  misc_feature (31)..(31): n stands for inosine
acccggcacugaugaggccguuaggccgaangaaugac

SEQ ID NO: 13638 - RNA, 38 nt, Artificial Sequence
  Description of Artificial Sequence:  Enzymatic Nucleic Acid
  misc_feature (31)..(31): n stands for inosine
aacccggccugaugaggccguuaggccgaanggaauga

SEQ ID NO: 13639 - RNA, 38 nt, Artificial Sequence
  Description of Artificial Sequence:  Enzymatic Nucleic Acid
  misc_feature (31)..(31): n stands for inosine
cguaaccccugaugaggccguuaggccgaancagggaa

SEQ ID NO: 13640 - RNA, 38 nt, Artificial Sequence
  Description of Artificial Sequence:  Enzymatic Nucleic Acid
  misc_feature (31)..(31): n stands for inosine
auguuaggcugaugaggccguuaggccgaanacguaac

SEQ ID NO: 13641 - RNA, 38 nt, Artificial Sequence
  Description of Artificial Sequence:  Enzymatic Nucleic Acid
  misc_feature (31)..(31): n stands for inosine
ugauguuacugaugaggccguuaggccgaanugacgua

SEQ ID NO: 13642 - RNA, 38 nt, Artificial Sequence
  Description of Artificial Sequence:  Enzymatic Nucleic Acid
  misc_feature (31)..(31): n stands for inosine
gugauguucugaugaggccguuaggccgaangugacgu

SEQ ID NO: 13643 - RNA, 38 nt, Artificial Sequence
  Description of Artificial Sequence:  Enzymatic Nucleic Acid
  misc_feature (31)..(31): n stands for inosine
aacagugacugaugaggccguuaggccgaanuuaggug

SEQ ID NO: 13644 - RNA, 38 nt, Artificial Sequence
  Description of Artificial Sequence:  Enzymatic Nucleic Acid
  misc_feature (31)..(31): n stands for inosine
aguaacagcugaugaggccguuaggccgaanauguuag

SEQ ID NO: 13645 - RNA, 38 nt, Artificial Sequence
  Description of Artificial Sequence:  Enzymatic Nucleic Acid
  misc_feature (31)..(31): n stands for inosine
aaaguaaccugaugaggccguuaggccgaanugauguu

SEQ ID NO: 13646 - RNA, 38 nt, Artificial Sequence
  Description of Artificial Sequence:  Enzymatic Nucleic Acid
  misc_feature (31)..(31): n stands for inosine
uuuuuuaacugaugaggccguuaggccgaanuaacagu

SEQ ID NO: 13647 - RNA, 38 nt, Artificial Sequence
  Description of Artificial Sequence:  Enzymatic Nucleic Acid
  misc_feature (31)..(31): n stands for inosine
ugucaagucugaugaggccguuaggccgaanaaacuuu

SEQ ID NO: 13648 - RNA, 38 nt, Artificial Sequence
  Description of Artificial Sequence:  Enzymatic Nucleic Acid
  misc_feature (31)..(31): n stands for inosine
gugucaagcugaugaggccguuaggccgaangaaacuu

SEQ ID NO: 13649 - RNA, 38 nt, Artificial Sequence
  Description of Artificial Sequence:  Enzymatic Nucleic Acid
  misc_feature (31)..(31): n stands for inosine
aagugucacugaugaggccguuaggccgaanuggaaac

SEQ ID NO: 13650 - RNA, 38 nt, Artificial Sequence
  Description of Artificial Sequence:  Enzymatic Nucleic Acid
  misc_feature (31)..(31): n stands for inosine
gaucaaagcugaugaggccguuaggccgaanucaagug

SEQ ID NO: 13651 - RNA, 38 nt, Artificial Sequence
  Description of Artificial Sequence:  Enzymatic Nucleic Acid
  misc_feature (31)..(31): n stands for inosine
gggaucaacugaugaggccguuaggccgaanugucaag

SEQ ID NO: 13652 - RNA, 38 nt, Artificial Sequence
  Description of Artificial Sequence:  Enzymatic Nucleic Acid
  misc_feature (31)..(31): n stands for inosine
uccaucagcugaugaggccguuaggccgaanaucaaag

SEQ ID NO: 13653 - RNA, 38 nt, Artificial Sequence
  Description of Artificial Sequence:  Enzymatic Nucleic Acid
  misc_feature (31)..(31): n stands for inosine
uuccaucacugaugaggccguuaggccgaangaucaaa

SEQ ID NO: 13654 - RNA, 38 nt, Artificial Sequence
  Description of Artificial Sequence:  Enzymatic Nucleic Acid
  misc_feature (31)..(31): n stands for inosine
uuuccauccugaugaggccguuaggccgaanggaucaa

SEQ ID NO: 13655 - RNA, 38 nt, Artificial Sequence
  Description of Artificial Sequence:  Enzymatic Nucleic Acid
  misc_feature (31)..(31): n stands for inosine
ccagauuacugaugaggccguuaggccgaancguuuuc

SEQ ID NO: 13656 - RNA, 38 nt, Artificial Sequence
  Description of Artificial Sequence:  Enzymatic Nucleic Acid
  misc_feature (31)..(31): n stands for inosine
acuguccccugaugaggccguuaggccgaanauuaugc

SEQ ID NO: 13657 - RNA, 38 nt, Artificial Sequence
  Description of Artificial Sequence:  Enzymatic Nucleic Acid
  misc_feature (31)..(31): n stands for inosine
cuuucuaccugaugaggccguuaggccgaanucccaga

SEQ ID NO: 13658 - RNA, 38 nt, Artificial Sequence
  Description of Artificial Sequence:  Enzymatic Nucleic Acid
  misc_feature (31)..(31): n stands for inosine
uaugaugacugaugaggccguuaggccgaancccuuuc

SEQ ID NO: 13659 - RNA, 38 nt, Artificial Sequence
  Description of Artificial Sequence:  Enzymatic Nucleic Acid
  misc_feature (31)..(31): n stands for inosine
ugauaugacugaugaggccguuaggccgaanaagcccu

SEQ ID NO: 13660 - RNA, 38 nt, Artificial Sequence
  Description of Artificial Sequence:  Enzymatic Nucleic Acid
  misc_feature (31)..(31): n stands for inosine
auuugauacugaugaggccguuaggccgaanaugaagc

SEQ ID NO: 13661 - RNA, 38 nt, Artificial Sequence
  Description of Artificial Sequence:  Enzymatic Nucleic Acid
  misc_feature (31)..(31): n stands for inosine
guugcauucugaugaggccguuaggccgaanauaugau

SEQ ID NO: 13662 - RNA, 38 nt, Artificial Sequence
  Description of Artificial Sequence:  Enzymatic Nucleic Acid
  misc_feature (31)..(31): n stands for inosine
uuguacgucugaugaggccguuaggccgaancauuuga

SEQ ID NO: 13663 - RNA, 38 nt, Artificial Sequence
  Description of Artificial Sequence:  Enzymatic Nucleic Acid
  misc_feature (31)..(31): n stands for inosine
uauuucuucugaugaggccguuaggccgaanuacguug

SEQ ID NO: 13664 - RNA, 38 nt, Artificial Sequence
  Description of Artificial Sequence:  Enzymatic Nucleic Acid
  misc_feature (31)..(31): n stands for inosine
aggucagacugaugaggccguuaggccgaancccuauu

SEQ ID NO: 13665 - RNA, 38 nt, Artificial Sequence
  Description of Artificial Sequence:  Enzymatic Nucleic Acid
  misc_feature (31)..(31): n stands for inosine
cacagguccugaugaggccguuaggccgaanaagcccu

SEQ ID NO: 13666 - RNA, 38 nt, Artificial Sequence
  Description of Artificial Sequence:  Enzymatic Nucleic Acid
  misc_feature (31)..(31): n stands for inosine
gcuucacacugaugaggccguuaggccgaanucagaag

SEQ ID NO: 13667 - RNA, 38 nt, Artificial Sequence
  Description of Artificial Sequence:  Enzymatic Nucleic Acid
  misc_feature (31)..(31): n stands for inosine
ugcuucaccugaugaggccguuaggccgaangucagaa

SEQ ID NO: 13668 - RNA, 38 nt, Artificial Sequence
  Description of Artificial Sequence:  Enzymatic Nucleic Acid
  misc_feature (31)..(31): n stands for inosine
uugacugucugaugaggccguuaggccgaancuucaca

SEQ ID NO: 13669 - RNA, 38 nt, Artificial Sequence
  Description of Artificial Sequence:  Enzymatic Nucleic Acid
  misc_feature (31)..(31): n stands for inosine
ccauugaccugaugaggccguuaggccgaanuugcuuc

SEQ ID NO: 13670 - RNA, 38 nt, Artificial Sequence
  Description of Artificial Sequence:  Enzymatic Nucleic Acid
  misc_feature (31)..(31): n stands for inosine
augcccaucugaugaggccguuaggccgaanacuguug

SEQ ID NO: 13671 - RNA, 38 nt, Artificial Sequence
  Description of Artificial Sequence:  Enzymatic Nucleic Acid
  misc_feature (31)..(31): n stands for inosine
uauacaaacugaugaggccguuaggccgaancccauug

SEQ ID NO: 13672 - RNA, 38 nt, Artificial Sequence
  Description of Artificial Sequence:  Enzymatic Nucleic Acid
  misc_feature (31)..(31): n stands for inosine
agauaguucugaugaggccguuaggccgaanucuuaua

SEQ ID NO: 13673 - RNA, 38 nt, Artificial Sequence
  Description of Artificial Sequence:  Enzymatic Nucleic Acid
  misc_feature (31)..(31): n stands for inosine
ugugagaucugaugaggccguuaggccgaanuuugucu

SEQ ID NO: 13674 - RNA, 38 nt, Artificial Sequence
  Description of Artificial Sequence:  Enzymatic Nucleic Acid
  misc_feature (31)..(31): n stands for inosine
gaugugugcugaugaggccguuaggccgaanauaguuu

SEQ ID NO: 13675 - RNA, 38 nt, Artificial Sequence
  Description of Artificial Sequence:  Enzymatic Nucleic Acid
  misc_feature (31)..(31): n stands for inosine
ucgaugugcugaugaggccguuaggccgaanagauagu

SEQ ID NO: 13676 - RNA, 38 nt, Artificial Sequence
  Description of Artificial Sequence:  Enzymatic Nucleic Acid
  misc_feature (31)..(31): n stands for inosine
ugucgaugcugaugaggccguuaggccgaanugagaua

SEQ ID NO: 13677 - RNA, 38 nt, Artificial Sequence
  Description of Artificial Sequence:  Enzymatic Nucleic Acid
  misc_feature (31)..(31): n stands for inosine
uuugucgacugaugaggccguuaggccgaanugugaga

SEQ ID NO: 13678 - RNA, 38 nt, Artificial Sequence
  Description of Artificial Sequence:  Enzymatic Nucleic Acid
  misc_feature (31)..(31): n stands for inosine
uauugguucugaugaggccguuaggccgaanucgaugu

SEQ ID NO: 13679 - RNA, 38 nt, Artificial Sequence
  Description of Artificial Sequence:  Enzymatic Nucleic Acid
  misc_feature (31)..(31): n stands for inosine
auuguauucugaugaggccguuaggccgaanuuugucg

SEQ ID NO: 13680 - RNA, 38 nt, Artificial Sequence
  Description of Artificial Sequence:  Enzymatic Nucleic Acid
  misc_feature (31)..(31): n stands for inosine
gauuguaucugaugaggccguuaggccgaanguuuguc

SEQ ID NO: 13681 - RNA, 38 nt, Artificial Sequence
  Description of Artificial Sequence:  Enzymatic Nucleic Acid
  misc_feature (31)..(31): n stands for inosine
ucuaugaucugaugaggccguuaggccgaanuauuggu

SEQ ID NO: 13682 - RNA, 38 nt, Artificial Sequence
  Description of Artificial Sequence:  Enzymatic Nucleic Acid
  misc_feature (31)..(31): n stands for inosine
gacaucuacugaugaggccguuaggccgaanauuguau

SEQ ID NO: 13683 - RNA, 38 nt, Artificial Sequence
  Description of Artificial Sequence:  Enzymatic Nucleic Acid
  misc_feature (31)..(31): n stands for inosine
gcuuauuucugaugaggccguuaggccgaanacaucua

SEQ ID NO: 13684 - RNA, 38 nt, Artificial Sequence
  Description of Artificial Sequence:  Enzymatic Nucleic Acid
  misc_feature (31)..(31): n stands for inosine
ugcuuauucugaugaggccguuaggccgaangacaucu

SEQ ID NO: 13685 - RNA, 38 nt, Artificial Sequence
  Description of Artificial Sequence:  Enzymatic Nucleic Acid
  misc_feature (31)..(31): n stands for inosine
gcguggugcugaugaggccguuaggccgaancuuauuu

SEQ ID NO: 13686 - RNA, 38 nt, Artificial Sequence
  Description of Artificial Sequence:  Enzymatic Nucleic Acid
  misc_feature (31)..(31): n stands for inosine
gggcguggcugaugaggccguuaggccgaanugcuuau

SEQ ID NO: 13687 - RNA, 38 nt, Artificial Sequence
  Description of Artificial Sequence:  Enzymatic Nucleic Acid
  misc_feature (31)..(31): n stands for inosine
cugggcgucugaugaggccguuaggccgaanugugcuu

SEQ ID NO: 13688 - RNA, 38 nt, Artificial Sequence
  Description of Artificial Sequence:  Enzymatic Nucleic Acid
  misc_feature (31)..(31): n stands for inosine
acugggcgcugaugaggccguuaggccgaangugugcu

SEQ ID NO: 13689 - RNA, 38 nt, Artificial Sequence
  Description of Artificial Sequence:  Enzymatic Nucleic Acid
  misc_feature (31)..(31): n stands for inosine
uuugacugcugaugaggccguuaggccgaancguggug

SEQ ID NO: 13690 - RNA, 38 nt, Artificial Sequence
  Description of Artificial Sequence:  Enzymatic Nucleic Acid
  misc_feature (31)..(31): n stands for inosine
auuugacucugaugaggccguuaggccgaangcguggu

SEQ ID NO: 13691 - RNA, 38 nt, Artificial Sequence
  Description of Artificial Sequence:  Enzymatic Nucleic Acid
  misc_feature (31)..(31): n stands for inosine
aauuugaccugaugaggccguuaggccgaanggcgugg

SEQ ID NO: 13692 - RNA, 38 nt, Artificial Sequence
  Description of Artificial Sequence:  Enzymatic Nucleic Acid
  misc_feature (31)..(31): n stands for inosine
aaguaauucugaugaggccguuaggccgaanacugggc

SEQ ID NO: 13693 - RNA, 38 nt, Artificial Sequence
  Description of Artificial Sequence:  Enzymatic Nucleic Acid
  misc_feature (31)..(31): n stands for inosine
ggccucuacugaugaggccguuaggccgaanuaauuug

SEQ ID NO: 13694 - RNA, 38 nt, Artificial Sequence
  Description of Artificial Sequence:  Enzymatic Nucleic Acid
  misc_feature (31)..(31): n stands for inosine
aagaguaucugaugaggccguuaggccgaanccucuaa

SEQ ID NO: 13695 - RNA, 38 nt, Artificial Sequence
  Description of Artificial Sequence:  Enzymatic Nucleic Acid
  misc_feature (31)..(31): n stands for inosine
caagaguacugaugaggccguuaggccgaangccucua

SEQ ID NO: 13696 - RNA, 38 nt, Artificial Sequence
  Description of Artificial Sequence:  Enzymatic Nucleic Acid
  misc_feature (31)..(31): n stands for inosine
aggacaagcugaugaggccguuaggccgaanuauggcc

SEQ ID NO: 13697 - RNA, 38 nt, Artificial Sequence
  Description of Artificial Sequence:  Enzymatic Nucleic Acid
  misc_feature (31)..(31): n stands for inosine
ugaggacacugaugaggccguuaggccgaanaguaugg

SEQ ID NO: 13698 - RNA, 38 nt, Artificial Sequence
  Description of Artificial Sequence:  Enzymatic Nucleic Acid
  misc_feature (31)..(31): n stands for inosine
acaauugacugaugaggccguuaggccgaanacaagag

SEQ ID NO: 13699 - RNA, 38 nt, Artificial Sequence
  Description of Artificial Sequence:  Enzymatic Nucleic Acid
  misc_feature (31)..(31): n stands for inosine
uacaauugcugaugaggccguuaggccgaangacaaga

SEQ ID NO: 13700 - RNA, 38 nt, Artificial Sequence
  Description of Artificial Sequence:  Enzymatic Nucleic Acid
  misc_feature (31)..(31): n stands for inosine
aguacaaucugaugaggccguuaggccgaanaggacaa

SEQ ID NO: 13701 - RNA, 38 nt, Artificial Sequence
  Description of Artificial Sequence:  Enzymatic Nucleic Acid
  misc_feature (31)..(31): n stands for inosine
gugguagccugaugaggccguuaggccgaanuacaauu

SEQ ID NO: 13702 - RNA, 38 nt, Artificial Sequence
  Description of Artificial Sequence:  Enzymatic Nucleic Acid
  misc_feature (31)..(31): n stands for inosine
ggaguggucugaugaggccguuaggccgaancaguaca

SEQ ID NO: 13703 - RNA, 38 nt, Artificial Sequence
  Description of Artificial Sequence:  Enzymatic Nucleic Acid
  misc_feature (31)..(31): n stands for inosine
aagggagucugaugaggccguuaggccgaanuagcagu

SEQ ID NO: 13704 - RNA, 38 nt, Artificial Sequence
  Description of Artificial Sequence:  Enzymatic Nucleic Acid
  misc_feature (31)..(31): n stands for inosine
caagggagcugaugaggccguuaggccgaanguagcag

SEQ ID NO: 13705 - RNA, 38 nt, Artificial Sequence
  Description of Artificial Sequence:  Enzymatic Nucleic Acid
  misc_feature (31)..(31): n stands for inosine
uucaagggcugaugaggccguuaggccgaanugguagc

SEQ ID NO: 13706 - RNA, 38 nt, Artificial Sequence
  Description of Artificial Sequence:  Enzymatic Nucleic Acid
  misc_feature (31)..(31): n stands for inosine
uguucaagcugaugaggccguuaggccgaanaguggua

SEQ ID NO: 13707 - RNA, 38 nt, Artificial Sequence
  Description of Artificial Sequence:  Enzymatic Nucleic Acid
  misc_feature (31)..(31): n stands for inosine
guguucaacugaugaggccguuaggccgaangaguggu

SEQ ID NO: 13708 - RNA, 38 nt, Artificial Sequence
  Description of Artificial Sequence:  Enzymatic Nucleic Acid
  misc_feature (31)..(31): n stands for inosine
cguguucacugaugaggccguuaggccgaanggagugg

SEQ ID NO: 13709 - RNA, 38 nt, Artificial Sequence
  Description of Artificial Sequence:  Enzymatic Nucleic Acid
  misc_feature (31)..(31): n stands for inosine
aacucucgcugaugaggccguuaggccgaanuucaagg

SEQ ID NO: 13710 - RNA, 38 nt, Artificial Sequence
  Description of Artificial Sequence:  Enzymatic Nucleic Acid
  misc_feature (31)..(31): n stands for inosine
aggucauucugaugaggccguuaggccgaanaacucuc

SEQ ID NO: 13711 - RNA, 38 nt, Artificial Sequence
  Description of Artificial Sequence:  Enzymatic Nucleic Acid
  misc_feature (31)..(31): n stands for inosine
uaacuccacugaugaggccguuaggccgaanucauuug

SEQ ID NO: 13712 - RNA, 38 nt, Artificial Sequence
  Description of Artificial Sequence:  Enzymatic Nucleic Acid
  misc_feature (31)..(31): n stands for inosine
guaacucccugaugaggccguuaggccgaangucauuu

SEQ ID NO: 13713 - RNA, 38 nt, Artificial Sequence
  Description of Artificial Sequence:  Enzymatic Nucleic Acid
  misc_feature (31)..(31): n stands for inosine
uucaucagcugaugaggccguuaggccgaanuaacucc

SEQ ID NO: 13714 - RNA, 38 nt, Artificial Sequence
  Description of Artificial Sequence:  Enzymatic Nucleic Acid
  misc_feature (31)..(31): n stands for inosine
uuucaucacugaugaggccguuaggccgaanguaacuc

SEQ ID NO: 13715 - RNA, 38 nt, Artificial Sequence
  Description of Artificial Sequence:  Enzymatic Nucleic Acid
  misc_feature (31)..(31): n stands for inosine
uuuucauccugaugaggccguuaggccgaangguaacu

SEQ ID NO: 13716 - RNA, 38 nt, Artificial Sequence
  Description of Artificial Sequence:  Enzymatic Nucleic Acid
  misc_feature (31)..(31): n stands for inosine
cuuacggacugaugaggccguuaggccgaancucucuu

SEQ ID NO: 13717 - RNA, 38 nt, Artificial Sequence
  Description of Artificial Sequence:  Enzymatic Nucleic Acid
  misc_feature (31)..(31): n stands for inosine
cgccuuaccugaugaggccguuaggccgaanaagcucu

SEQ ID NO: 13718 - RNA, 38 nt, Artificial Sequence
  Description of Artificial Sequence:  Enzymatic Nucleic Acid
  misc_feature (31)..(31): n stands for inosine
auugcuuucugaugaggccguuaggccgaanucaauuc

SEQ ID NO: 13719 - RNA, 38 nt, Artificial Sequence
  Description of Artificial Sequence:  Enzymatic Nucleic Acid
  misc_feature (31)..(31): n stands for inosine
aauugcuucugaugaggccguuaggccgaangucaauu

SEQ ID NO: 13720 - RNA, 38 nt, Artificial Sequence
  Description of Artificial Sequence:  Enzymatic Nucleic Acid
  misc_feature (31)..(31): n stands for inosine
augggaaucugaugaggccguuaggccgaancuuuggu

SEQ ID NO: 13721 - RNA, 38 nt, Artificial Sequence
  Description of Artificial Sequence:  Enzymatic Nucleic Acid
  misc_feature (31)..(31): n stands for inosine
uuggcaugcugaugaggccguuaggccgaanaauugcu

SEQ ID NO: 13722 - RNA, 38 nt, Artificial Sequence
  Description of Artificial Sequence:  Enzymatic Nucleic Acid
  misc_feature (31)..(31): n stands for inosine
guuggcaucugaugaggccguuaggccgaangaauugc

SEQ ID NO: 13723 - RNA, 38 nt, Artificial Sequence
  Description of Artificial Sequence:  Enzymatic Nucleic Acid
  misc_feature (31)..(31): n stands for inosine
uguuggcacugaugaggccguuaggccgaanggaauug

SEQ ID NO: 13724 - RNA, 38 nt, Artificial Sequence
  Description of Artificial Sequence:  Enzymatic Nucleic Acid
  misc_feature (31)..(31): n stands for inosine
aauauguucugaugaggccguuaggccgaancauggga

SEQ ID NO: 13725 - RNA, 38 nt, Artificial Sequence
  Description of Artificial Sequence:  Enzymatic Nucleic Acid
  misc_feature (31)..(31): n stands for inosine
gaauaugucugaugaggccguuaggccgaangcauggg

SEQ ID NO: 13726 - RNA, 38 nt, Artificial Sequence
  Description of Artificial Sequence:  Enzymatic Nucleic Acid
  misc_feature (31)..(31): n stands for inosine
guagaauacugaugaggccguuaggccgaanuuggcau

SEQ ID NO: 13727 - RNA, 38 nt, Artificial Sequence
  Description of Artificial Sequence:  Enzymatic Nucleic Acid
  misc_feature (31)..(31): n stands for inosine
aacacugucugaugaggccguuaggccgaanaauaugu

SEQ ID NO: 13728 - RNA, 38 nt, Artificial Sequence
  Description of Artificial Sequence:  Enzymatic Nucleic Acid
  misc_feature (31)..(31): n stands for inosine
aagaacaccugaugaggccguuaggccgaanuagaaua

SEQ ID NO: 13729 - RNA, 38 nt, Artificial Sequence
  Description of Artificial Sequence:  Enzymatic Nucleic Acid
  misc_feature (31)..(31): n stands for inosine
caauaguacugaugaggccguuaggccgaanaacacug

SEQ ID NO: 13730 - RNA, 38 nt, Artificial Sequence
  Description of Artificial Sequence:  Enzymatic Nucleic Acid
  misc_feature (31)..(31): n stands for inosine
uugucaaucugaugaggccguuaggccgaanuaagaac

SEQ ID NO: 13731 - RNA, 38 nt, Artificial Sequence
  Description of Artificial Sequence:  Enzymatic Nucleic Acid
  misc_feature (31)..(31): n stands for inosine
cugcauuucugaugaggccguuaggccgaanucaauag

SEQ ID NO: 13732 - RNA, 38 nt, Artificial Sequence
  Description of Artificial Sequence:  Enzymatic Nucleic Acid
  misc_feature (31)..(31): n stands for inosine
cuuuguuccugaugaggccguuaggccgaancauuuug

SEQ ID NO: 13733 - RNA, 38 nt, Artificial Sequence
  Description of Artificial Sequence:  Enzymatic Nucleic Acid
  misc_feature (31)..(31): n stands for inosine
uuugucuucugaugaggccguuaggccgaanuucugca

SEQ ID NO: 13734 - RNA, 38 nt, Artificial Sequence
  Description of Artificial Sequence:  Enzymatic Nucleic Acid
  misc_feature (31)..(31): n stands for inosine
aaguccuucugaugaggccguuaggccgaanucuuugu

SEQ ID NO: 13735 - RNA, 38 nt, Artificial Sequence
  Description of Artificial Sequence:  Enzymatic Nucleic Acid
  misc_feature (31)..(31): n stands for inosine
aaguauaacugaugaggccguuaggccgaanuccuuug

SEQ ID NO: 13736 - RNA, 38 nt, Artificial Sequence
  Description of Artificial Sequence:  Enzymatic Nucleic Acid
  misc_feature (31)..(31): n stands for inosine
acacgacacugaugaggccguuaggccgaanuauaaag

SEQ ID NO: 13737 - RNA, 38 nt, Artificial Sequence
  Description of Artificial Sequence:  Enzymatic Nucleic Acid
  misc_feature (31)..(31): n stands for inosine
ugaaugaucugaugaggccguuaggccgaanuccacuc

SEQ ID NO: 13738 - RNA, 38 nt, Artificial Sequence
  Description of Artificial Sequence:  Enzymatic Nucleic Acid
  misc_feature (31)..(31): n stands for inosine
uugaaugacugaugaggccguuaggccgaanguccacu

SEQ ID NO: 13739 - RNA, 38 nt, Artificial Sequence
  Description of Artificial Sequence:  Enzymatic Nucleic Acid
  misc_feature (31)..(31): n stands for inosine
gauuugaacugaugaggccguuaggccgaanauggucc

SEQ ID NO: 13740 - RNA, 38 nt, Artificial Sequence
  Description of Artificial Sequence:  Enzymatic Nucleic Acid
  misc_feature (31)..(31): n stands for inosine
aacagauucugaugaggccguuaggccgaanaaugaug

SEQ ID NO: 13741 - RNA, 38 nt, Artificial Sequence
  Description of Artificial Sequence:  Enzymatic Nucleic Acid
  misc_feature (31)..(31): n stands for inosine
guguuaaccugaugaggccguuaggccgaanauuugaa

SEQ ID NO: 13742 - RNA, 38 nt, Artificial Sequence
  Description of Artificial Sequence:  Enzymatic Nucleic Acid
  misc_feature (31)..(31): n stands for inosine
cacugaggcugaugaggccguuaggccgaanuuaacag

SEQ ID NO: 13743 - RNA, 38 nt, Artificial Sequence
  Description of Artificial Sequence:  Enzymatic Nucleic Acid
  misc_feature (31)..(31): n stands for inosine
ugcacugacugaugaggccguuaggccgaanuguuaac

SEQ ID NO: 13744 - RNA, 38 nt, Artificial Sequence
  Description of Artificial Sequence:  Enzymatic Nucleic Acid
  misc_feature (31)..(31): n stands for inosine
augcacugcugaugaggccguuaggccgaanguguuaa

SEQ ID NO: 13745 - RNA, 38 nt, Artificial Sequence
  Description of Artificial Sequence:  Enzymatic Nucleic Acid
  misc_feature (31)..(31): n stands for inosine
auaugcaccugaugaggccguuaggccgaanagguguu

SEQ ID NO: 13746 - RNA, 38 nt, Artificial Sequence
  Description of Artificial Sequence:  Enzymatic Nucleic Acid
  misc_feature (31)..(31): n stands for inosine
cauauauacugaugaggccguuaggccgaancacugag

SEQ ID NO: 13747 - RNA, 38 nt, Artificial Sequence
  Description of Artificial Sequence:  Enzymatic Nucleic Acid
  misc_feature (31)..(31): n stands for inosine
gugaugaacugaugaggccguuaggccgaancuuuauc

SEQ ID NO: 13748 - RNA, 38 nt, Artificial Sequence
  Description of Artificial Sequence:  Enzymatic Nucleic Acid
  misc_feature (31)..(31): n stands for inosine
cacagugacugaugaggccguuaggccgaanaaugcuu

SEQ ID NO: 13749 - RNA, 38 nt, Artificial Sequence
  Description of Artificial Sequence:  Enzymatic Nucleic Acid
  misc_feature (31)..(31): n stands for inosine
uuucacagcugaugaggccguuaggccgaanaugaaug

SEQ ID NO: 13750 - RNA, 38 nt, Artificial Sequence
  Description of Artificial Sequence:  Enzymatic Nucleic Acid
  misc_feature (31)..(31): n stands for inosine
uguuucaccugaugaggccguuaggccgaanugaugaa

SEQ ID NO: 13751 - RNA, 38 nt, Artificial Sequence
  Description of Artificial Sequence:  Enzymatic Nucleic Acid
  misc_feature (31)..(31): n stands for inosine
guuuucgacugaugaggccguuaggccgaanuuucaca

SEQ ID NO: 13752 - RNA, 38 nt, Artificial Sequence
  Description of Artificial Sequence:  Enzymatic Nucleic Acid
  misc_feature (31)..(31): n stands for inosine
gcaccugccugaugaggccguuaggccgaanuuuucga

SEQ ID NO: 13753 - RNA, 38 nt, Artificial Sequence
  Description of Artificial Sequence:  Enzymatic Nucleic Acid
  misc_feature (31)..(31): n stands for inosine
caagcacccugaugaggccguuaggccgaancuguuuu

SEQ ID NO: 13754 - RNA, 38 nt, Artificial Sequence
  Description of Artificial Sequence:  Enzymatic Nucleic Acid
  misc_feature (31)..(31): n stands for inosine
cgguuucacugaugaggccguuaggccgaancaccugc

SEQ ID NO: 13755 - RNA, 38 nt, Artificial Sequence
  Description of Artificial Sequence:  Enzymatic Nucleic Acid
  misc_feature (31)..(31): n stands for inosine
ccagcuaccugaugaggccguuaggccgaanuuucaag

SEQ ID NO: 13756 - RNA, 38 nt, Artificial Sequence
  Description of Artificial Sequence:  Enzymatic Nucleic Acid
  misc_feature (31)..(31): n stands for inosine
cgcuugcccugaugaggccguuaggccgaancuacggu

SEQ ID NO: 13757 - RNA, 38 nt, Artificial Sequence
  Description of Artificial Sequence:  Enzymatic Nucleic Acid
  misc_feature (31)..(31): n stands for inosine
agaccgcucugaugaggccguuaggccgaanccagcua

SEQ ID NO: 13758 - RNA, 38 nt, Artificial Sequence
  Description of Artificial Sequence:  Enzymatic Nucleic Acid
  misc_feature (31)..(31): n stands for inosine
agccgguacugaugaggccguuaggccgaanaccgcuu

SEQ ID NO: 13759 - RNA, 38 nt, Artificial Sequence
  Description of Artificial Sequence:  Enzymatic Nucleic Acid
  misc_feature (31)..(31): n stands for inosine
agagagcccugaugaggccguuaggccgaanuaagacc

SEQ ID NO: 13760 - RNA, 38 nt, Artificial Sequence
  Description of Artificial Sequence:  Enzymatic Nucleic Acid
  misc_feature (31)..(31): n stands for inosine
ucauagagcugaugaggccguuaggccgaanccgguaa

SEQ ID NO: 13761 - RNA, 38 nt, Artificial Sequence
  Description of Artificial Sequence:  Enzymatic Nucleic Acid
  misc_feature (31)..(31): n stands for inosine
uuucauagcugaugaggccguuaggccgaanagccggu

SEQ ID NO: 13762 - RNA, 38 nt, Artificial Sequence
  Description of Artificial Sequence:  Enzymatic Nucleic Acid
  misc_feature (31)..(31): n stands for inosine
acuuucaucugaugaggccguuaggccgaanagagccg

SEQ ID NO: 13763 - RNA, 38 nt, Artificial Sequence
  Description of Artificial Sequence:  Enzymatic Nucleic Acid
  misc_feature (31)..(31): n stands for inosine
gagggaaacugaugaggccguuaggccgaanccuucac

SEQ ID NO: 13764 - RNA, 38 nt, Artificial Sequence
  Description of Artificial Sequence:  Enzymatic Nucleic Acid
  misc_feature (31)..(31): n stands for inosine
ccggcgagcugaugaggccguuaggccgaanaaaugcc

SEQ ID NO: 13765 - RNA, 38 nt, Artificial Sequence
  Description of Artificial Sequence:  Enzymatic Nucleic Acid
  misc_feature (31)..(31): n stands for inosine
uccggcgacugaugaggccguuaggccgaangaaaugc

SEQ ID NO: 13766 - RNA, 38 nt, Artificial Sequence
  Description of Artificial Sequence:  Enzymatic Nucleic Acid
  misc_feature (31)..(31): n stands for inosine
uuccggcgcugaugaggccguuaggccgaanggaaaug

SEQ ID NO: 13767 - RNA, 38 nt, Artificial Sequence
  Description of Artificial Sequence:  Enzymatic Nucleic Acid
  misc_feature (31)..(31): n stands for inosine
caacuucccugaugaggccguuaggccgaancgaggga

SEQ ID NO: 13768 - RNA, 38 nt, Artificial Sequence
  Description of Artificial Sequence:  Enzymatic Nucleic Acid
  misc_feature (31)..(31): n stands for inosine
cagucgcacugaugaggccguuaggccgaanuaaccca

SEQ ID NO: 13769 - RNA, 38 nt, Artificial Sequence
  Description of Artificial Sequence:  Enzymatic Nucleic Acid
  misc_feature (31)..(31): n stands for inosine
ucagucgccugaugaggccguuaggccgaanguaaccc

SEQ ID NO: 13770 - RNA, 38 nt, Artificial Sequence
  Description of Artificial Sequence:  Enzymatic Nucleic Acid
  misc_feature (31)..(31): n stands for inosine
gauuucuccugaugaggccguuaggccgaanucgcagg

SEQ ID NO: 13771 - RNA, 38 nt, Artificial Sequence
  Description of Artificial Sequence:  Enzymatic Nucleic Acid
  misc_feature (31)..(31): n stands for inosine
uagcgagccugaugaggccguuaggccgaanauuucuc

SEQ ID NO: 13772 - RNA, 38 nt, Artificial Sequence
  Description of Artificial Sequence:  Enzymatic Nucleic Acid
  misc_feature (31)..(31): n stands for inosine
aaauagcgcugaugaggccguuaggccgaancagauuu

SEQ ID NO: 13773 - RNA, 38 nt, Artificial Sequence
  Description of Artificial Sequence:  Enzymatic Nucleic Acid
  misc_feature (31)..(31): n stands for inosine
agucaaaucugaugaggccguuaggccgaancgagcag

SEQ ID NO: 13774 - RNA, 38 nt, Artificial Sequence
  Description of Artificial Sequence:  Enzymatic Nucleic Acid
  misc_feature (31)..(31): n stands for inosine
uagccacgcugaugaggccguuaggccgaanucaaaua

SEQ ID NO: 13775 - RNA, 38 nt, Artificial Sequence
  Description of Artificial Sequence:  Enzymatic Nucleic Acid
  misc_feature (31)..(31): n stands for inosine
uaacgagucugaugaggccguuaggccgaanccacgag

SEQ ID NO: 13776 - RNA, 38 nt, Artificial Sequence
  Description of Artificial Sequence:  Enzymatic Nucleic Acid
  misc_feature (31)..(31): n stands for inosine
aauuaacgcugaugaggccguuaggccgaanuagccac

SEQ ID NO: 13777 - RNA, 38 nt, Artificial Sequence
  Description of Artificial Sequence:  Enzymatic Nucleic Acid
  misc_feature (31)..(31): n stands for inosine
uacguccucugaugaggccguuaggccgaanauaauua

SEQ ID NO: 13778 - RNA, 38 nt, Artificial Sequence
  Description of Artificial Sequence:  Enzymatic Nucleic Acid
  misc_feature (31)..(31): n stands for inosine
uccucuuccugaugaggccguuaggccgaanuuacguc

SEQ ID NO: 13779 - RNA, 38 nt, Artificial Sequence
  Description of Artificial Sequence:  Enzymatic Nucleic Acid
  misc_feature (31)..(31): n stands for inosine
uaauuccccugaugaggccguuaggccgaancauccuc

SEQ ID NO: 13780 - RNA, 38 nt, Artificial Sequence
  Description of Artificial Sequence:  Enzymatic Nucleic Acid
  misc_feature (31)..(31): n stands for inosine
agcaagaucugaugaggccguuaggccgaanuauaauu

SEQ ID NO: 13781 - RNA, 38 nt, Artificial Sequence
  Description of Artificial Sequence:  Enzymatic Nucleic Acid
  misc_feature (31)..(31): n stands for inosine
gcucagcacugaugaggccguuaggccgaanauuguau

SEQ ID NO: 13782 - RNA, 38 nt, Artificial Sequence
  Description of Artificial Sequence:  Enzymatic Nucleic Acid
  misc_feature (31)..(31): n stands for inosine
uuaugcuccugaugaggccguuaggccgaancaagauu

SEQ ID NO: 13783 - RNA, 38 nt, Artificial Sequence
  Description of Artificial Sequence:  Enzymatic Nucleic Acid
  misc_feature (31)..(31): n stands for inosine
cuguuuuacugaugaggccguuaggccgaancucagca

SEQ ID NO: 13784 - RNA, 38 nt, Artificial Sequence
  Description of Artificial Sequence:  Enzymatic Nucleic Acid
  misc_feature (31)..(31): n stands for inosine
cauuugaccugaugaggccguuaggccgaanuuuuaug

SEQ ID NO: 13785 - RNA, 38 nt, Artificial Sequence
  Description of Artificial Sequence:  Enzymatic Nucleic Acid
  misc_feature (31)..(31): n stands for inosine
aacacauucugaugaggccguuaggccgaanacuguuu

SEQ ID NO: 13786 - RNA, 38 nt, Artificial Sequence
  Description of Artificial Sequence:  Enzymatic Nucleic Acid
  misc_feature (31)..(31): n stands for inosine
ggcagugacugaugaggccguuaggccgaanuuuuuaa

SEQ ID NO: 13787 - RNA, 38 nt, Artificial Sequence
  Description of Artificial Sequence:  Enzymatic Nucleic Acid
  misc_feature (31)..(31): n stands for inosine
uggcagugcugaugaggccguuaggccgaanguuuuua

SEQ ID NO: 13788 - RNA, 38 nt, Artificial Sequence
  Description of Artificial Sequence:  Enzymatic Nucleic Acid
  misc_feature (31)..(31): n stands for inosine
aguggcagcugaugaggccguuaggccgaanagguuuu

SEQ ID NO: 13789 - RNA, 38 nt, Artificial Sequence
  Description of Artificial Sequence:  Enzymatic Nucleic Acid
  misc_feature (31)..(31): n stands for inosine
agaguggccugaugaggccguuaggccgaanugagguu

SEQ ID NO: 13790 - RNA, 38 nt, Artificial Sequence
  Description of Artificial Sequence:  Enzymatic Nucleic Acid
  misc_feature (31)..(31): n stands for inosine
auuagagucugaugaggccguuaggccgaancagugag

SEQ ID NO: 13791 - RNA, 38 nt, Artificial Sequence
  Description of Artificial Sequence:  Enzymatic Nucleic Acid
  misc_feature (31)..(31): n stands for inosine
aauuagagcugaugaggccguuaggccgaangcaguga

SEQ ID NO: 13792 - RNA, 38 nt, Artificial Sequence
  Description of Artificial Sequence:  Enzymatic Nucleic Acid
  misc_feature (31)..(31): n stands for inosine
acaauuagcugaugaggccguuaggccgaanuggcagu

SEQ ID NO: 13793 - RNA, 38 nt, Artificial Sequence
  Description of Artificial Sequence:  Enzymatic Nucleic Acid
  misc_feature (31)..(31): n stands for inosine
ugacaauucugaugaggccguuaggccgaanaguggca

SEQ ID NO: 13794 - RNA, 38 nt, Artificial Sequence
  Description of Artificial Sequence:  Enzymatic Nucleic Acid
  misc_feature (31)..(31): n stands for inosine
uuucacaucugaugaggccguuaggccgaanacaauua

SEQ ID NO: 13795 - RNA, 38 nt, Artificial Sequence
  Description of Artificial Sequence:  Enzymatic Nucleic Acid
  misc_feature (31)..(31): n stands for inosine
aaaucuggcugaugaggccguuaggccgaanuuucaca

SEQ ID NO: 13796 - RNA, 38 nt, Artificial Sequence
  Description of Artificial Sequence:  Enzymatic Nucleic Acid
  misc_feature (31)..(31): n stands for inosine
uaaaucugcugaugaggccguuaggccgaanguuucac

SEQ ID NO: 13797 - RNA, 38 nt, Artificial Sequence
  Description of Artificial Sequence:  Enzymatic Nucleic Acid
  misc_feature (31)..(31): n stands for inosine
guaaaucucugaugaggccguuaggccgaangguuuca

SEQ ID NO: 13798 - RNA, 38 nt, Artificial Sequence
  Description of Artificial Sequence:  Enzymatic Nucleic Acid
  misc_feature (31)..(31): n stands for inosine
cguaaauccugaugaggccguuaggccgaanggguuuc

SEQ ID NO: 13799 - RNA, 38 nt, Artificial Sequence
  Description of Artificial Sequence:  Enzymatic Nucleic Acid
  misc_feature (31)..(31): n stands for inosine
gaugacaccugaugaggccguuaggccgaanccuuuuc

SEQ ID NO: 13800 - RNA, 38 nt, Artificial Sequence
  Description of Artificial Sequence:  Enzymatic Nucleic Acid
  misc_feature (31)..(31): n stands for inosine
ggaaacgacugaugaggccguuaggccgaanacacggc

SEQ ID NO: 13801 - RNA, 38 nt, Artificial Sequence
  Description of Artificial Sequence:  Enzymatic Nucleic Acid
  misc_feature (31)..(31): n stands for inosine
ccgggucucugaugaggccguuaggccgaanaaacgau

SEQ ID NO: 13802 - RNA, 38 nt, Artificial Sequence
  Description of Artificial Sequence:  Enzymatic Nucleic Acid
  misc_feature (31)..(31): n stands for inosine
gccggguccugaugaggccguuaggccgaangaaacga

SEQ ID NO: 13803 - RNA, 38 nt, Artificial Sequence
  Description of Artificial Sequence:  Enzymatic Nucleic Acid
  misc_feature (31)..(31): n stands for inosine
gagagccgcugaugaggccguuaggccgaanucuggaa

SEQ ID NO: 13804 - RNA, 38 nt, Artificial Sequence
  Description of Artificial Sequence:  Enzymatic Nucleic Acid
  misc_feature (31)..(31): n stands for inosine
agagagcccugaugaggccguuaggccgaangucugga

SEQ ID NO: 13805 - RNA, 38 nt, Artificial Sequence
  Description of Artificial Sequence:  Enzymatic Nucleic Acid
  misc_feature (31)..(31): n stands for inosine
ggguagagcugaugaggccguuaggccgaanccggguc

SEQ ID NO: 13806 - RNA, 38 nt, Artificial Sequence
  Description of Artificial Sequence:  Enzymatic Nucleic Acid
  misc_feature (31)..(31): n stands for inosine
guggguagcugaugaggccguuaggccgaanagccggg

SEQ ID NO: 13807 - RNA, 38 nt, Artificial Sequence
  Description of Artificial Sequence:  Enzymatic Nucleic Acid
  misc_feature (31)..(31): n stands for inosine
cagugggucugaugaggccguuaggccgaanagagccg

SEQ ID NO: 13808 - RNA, 38 nt, Artificial Sequence
  Description of Artificial Sequence:  Enzymatic Nucleic Acid
  misc_feature (31)..(31): n stands for inosine
gcccagugcugaugaggccguuaggccgaanuagagag

SEQ ID NO: 13809 - RNA, 38 nt, Artificial Sequence
  Description of Artificial Sequence:  Enzymatic Nucleic Acid
  misc_feature (31)..(31): n stands for inosine
ugcccagucugaugaggccguuaggccgaanguagaga

SEQ ID NO: 13810 - RNA, 38 nt, Artificial Sequence
  Description of Artificial Sequence:  Enzymatic Nucleic Acid
  misc_feature (31)..(31): n stands for inosine
cugcccagcugaugaggccguuaggccgaangguagag

SEQ ID NO: 13811 - RNA, 38 nt, Artificial Sequence
  Description of Artificial Sequence:  Enzymatic Nucleic Acid
  misc_feature (31)..(31): n stands for inosine
ugcugccccugaugaggccguuaggccgaanuggguag

SEQ ID NO: 13812 - RNA, 38 nt, Artificial Sequence
  Description of Artificial Sequence:  Enzymatic Nucleic Acid
  misc_feature (31)..(31): n stands for inosine
uugucugccugaugaggccguuaggccgaancccagug

SEQ ID NO: 13813 - RNA, 38 nt, Artificial Sequence
  Description of Artificial Sequence:  Enzymatic Nucleic Acid
  misc_feature (31)..(31): n stands for inosine
gauuuguccugaugaggccguuaggccgaancugccca

SEQ ID NO: 13814 - RNA, 38 nt, Artificial Sequence
  Description of Artificial Sequence:  Enzymatic Nucleic Acid
  misc_feature (31)..(31): n stands for inosine
ucaggauucugaugaggccguuaggccgaanucugcug

SEQ ID NO: 13815 - RNA, 38 nt, Artificial Sequence
  Description of Artificial Sequence:  Enzymatic Nucleic Acid
  misc_feature (31)..(31): n stands for inosine
acaagucacugaugaggccguuaggccgaanauuuguc

SEQ ID NO: 13816 - RNA, 38 nt, Artificial Sequence
  Description of Artificial Sequence:  Enzymatic Nucleic Acid
  misc_feature (31)..(31): n stands for inosine
uacaaguccugaugaggccguuaggccgaangauuugu

SEQ ID NO: 13817 - RNA, 38 nt, Artificial Sequence
  Description of Artificial Sequence:  Enzymatic Nucleic Acid
  misc_feature (31)..(31): n stands for inosine
gcgguacacugaugaggccguuaggccgaanucaggau

SEQ ID NO: 13818 - RNA, 38 nt, Artificial Sequence
  Description of Artificial Sequence:  Enzymatic Nucleic Acid
  misc_feature (31)..(31): n stands for inosine
ccauaugccugaugaggccguuaggccgaanuacaagu

SEQ ID NO: 13819 - RNA, 38 nt, Artificial Sequence
  Description of Artificial Sequence:  Enzymatic Nucleic Acid
  misc_feature (31)..(31): n stands for inosine
auaccauacugaugaggccguuaggccgaancgguaca

SEQ ID NO: 13820 - RNA, 38 nt, Artificial Sequence
  Description of Artificial Sequence:  Enzymatic Nucleic Acid
  misc_feature (31)..(31): n stands for inosine
agguugagcugaugaggccguuaggccgaanauaccau

SEQ ID NO: 13821 - RNA, 38 nt, Artificial Sequence
  Description of Artificial Sequence:  Enzymatic Nucleic Acid
  misc_feature (31)..(31): n stands for inosine
uagguugacugaugaggccguuaggccgaangauacca

SEQ ID NO: 13822 - RNA, 38 nt, Artificial Sequence
  Description of Artificial Sequence:  Enzymatic Nucleic Acid
  misc_feature (31)..(31): n stands for inosine
guagguugcugaugaggccguuaggccgaanggauacc

SEQ ID NO: 13823 - RNA, 38 nt, Artificial Sequence
  Description of Artificial Sequence:  Enzymatic Nucleic Acid
  misc_feature (31)..(31): n stands for inosine
uuguaggucugaugaggccguuaggccgaanagggaua

SEQ ID NO: 13824 - RNA, 38 nt, Artificial Sequence
  Description of Artificial Sequence:  Enzymatic Nucleic Acid
  misc_feature (31)..(31): n stands for inosine
ugauuguacugaugaggccguuaggccgaanuugaggg

SEQ ID NO: 13825 - RNA, 38 nt, Artificial Sequence
  Description of Artificial Sequence:  Enzymatic Nucleic Acid
  misc_feature (31)..(31): n stands for inosine
uugauugucugaugaggccguuaggccgaanguugagg

SEQ ID NO: 13826 - RNA, 38 nt, Artificial Sequence
  Description of Artificial Sequence:  Enzymatic Nucleic Acid
  misc_feature (31)..(31): n stands for inosine
cacuugaucugaugaggccguuaggccgaanuagguug

SEQ ID NO: 13827 - RNA, 38 nt, Artificial Sequence
  Description of Artificial Sequence:  Enzymatic Nucleic Acid
  misc_feature (31)..(31): n stands for inosine
gaaccacucugaugaggccguuaggccgaanauuguag

SEQ ID NO: 13828 - RNA, 38 nt, Artificial Sequence
  Description of Artificial Sequence:  Enzymatic Nucleic Acid
  misc_feature (31)..(31): n stands for inosine
ggggugcccugaugaggccguuaggccgaanaaccacu

SEQ ID NO: 13829 - RNA, 38 nt, Artificial Sequence
  Description of Artificial Sequence:  Enzymatic Nucleic Acid
  misc_feature (31)..(31): n stands for inosine
uacaggggcugaugaggccguuaggccgaanccagaac

SEQ ID NO: 13830 - RNA, 38 nt, Artificial Sequence
  Description of Artificial Sequence:  Enzymatic Nucleic Acid
  misc_feature (31)..(31): n stands for inosine
guuacaggcugaugaggccguuaggccgaanugccaga

SEQ ID NO: 13831 - RNA, 38 nt, Artificial Sequence
  Description of Artificial Sequence:  Enzymatic Nucleic Acid
  misc_feature (31)..(31): n stands for inosine
gguuacagcugaugaggccguuaggccgaangugccag

SEQ ID NO: 13832 - RNA, 38 nt, Artificial Sequence
  Description of Artificial Sequence:  Enzymatic Nucleic Acid
  misc_feature (31)..(31): n stands for inosine
ugguuacacugaugaggccguuaggccgaanggugcca

SEQ ID NO: 13833 - RNA, 38 nt, Artificial Sequence
  Description of Artificial Sequence:  Enzymatic Nucleic Acid
  misc_feature (31)..(31): n stands for inosine
augguuaccugaugaggccguuaggccgaangggugcc

SEQ ID NO: 13834 - RNA, 38 nt, Artificial Sequence
  Description of Artificial Sequence:  Enzymatic Nucleic Acid
  misc_feature (31)..(31): n stands for inosine
augauuaucugaugaggccguuaggccgaanuuacagg

SEQ ID NO: 13835 - RNA, 38 nt, Artificial Sequence
  Description of Artificial Sequence:  Enzymatic Nucleic Acid
  misc_feature (31)..(31): n stands for inosine
aaugauuacugaugaggccguuaggccgaanguuacag

SEQ ID NO: 13836 - RNA, 38 nt, Artificial Sequence
  Description of Artificial Sequence:  Enzymatic Nucleic Acid
  misc_feature (31)..(31): n stands for inosine
cuucggaacugaugaggccguuaggccgaanauuaugg

SEQ ID NO: 13837 - RNA, 38 nt, Artificial Sequence
  Description of Artificial Sequence:  Enzymatic Nucleic Acid
  misc_feature (31)..(31): n stands for inosine
cuugcuuccugaugaggccguuaggccgaanaaugauu

SEQ ID NO: 13838 - RNA, 38 nt, Artificial Sequence
  Description of Artificial Sequence:  Enzymatic Nucleic Acid
  misc_feature (31)..(31): n stands for inosine
ucacaccucugaugaggccguuaggccgaancuucgga

SEQ ID NO: 13839 - RNA, 38 nt, Artificial Sequence
  Description of Artificial Sequence:  Enzymatic Nucleic Acid
  misc_feature (31)..(31): n stands for inosine
ggaacaaacugaugaggccguuaggccgaanucacacc

SEQ ID NO: 13840 - RNA, 38 nt, Artificial Sequence
  Description of Artificial Sequence:  Enzymatic Nucleic Acid
  misc_feature (31)..(31): n stands for inosine
ucauuauucugaugaggccguuaggccgaanaacaaaa

SEQ ID NO: 13841 - RNA, 38 nt, Artificial Sequence
  Description of Artificial Sequence:  Enzymatic Nucleic Acid
  misc_feature (31)..(31): n stands for inosine
uucauuaucugaugaggccguuaggccgaangaacaaa

SEQ ID NO: 13842 - RNA, 38 nt, Artificial Sequence
  Description of Artificial Sequence:  Enzymatic Nucleic Acid
  misc_feature (31)..(31): n stands for inosine
aggauaaacugaugaggccguuaggccgaanacucuuc

SEQ ID NO: 13843 - RNA, 38 nt, Artificial Sequence
  Description of Artificial Sequence:  Enzymatic Nucleic Acid
  misc_feature (31)..(31): n stands for inosine
caggauaacugaugaggccguuaggccgaangacucuu

SEQ ID NO: 13844 - RNA, 38 nt, Artificial Sequence
  Description of Artificial Sequence:  Enzymatic Nucleic Acid
  misc_feature (31)..(31): n stands for inosine
agcauccacugaugaggccguuaggccgaanauaaagg

SEQ ID NO: 13845 - RNA, 38 nt, Artificial Sequence
  Description of Artificial Sequence:  Enzymatic Nucleic Acid
  misc_feature (31)..(31): n stands for inosine
cagcaucccugaugaggccguuaggccgaangauaaag

SEQ ID NO: 13846 - RNA, 38 nt, Artificial Sequence
  Description of Artificial Sequence:  Enzymatic Nucleic Acid
  misc_feature (31)..(31): n stands for inosine
uugcuguccugaugaggccguuaggccgaancauccag

SEQ ID NO: 13847 - RNA, 38 nt, Artificial Sequence
  Description of Artificial Sequence:  Enzymatic Nucleic Acid
  misc_feature (31)..(31): n stands for inosine
cauguugccugaugaggccguuaggccgaanucagcau

SEQ ID NO: 13848 - RNA, 38 nt, Artificial Sequence
  Description of Artificial Sequence:  Enzymatic Nucleic Acid
  misc_feature (31)..(31): n stands for inosine
ucccaugucugaugaggccguuaggccgaancugucag

SEQ ID NO: 13849 - RNA, 38 nt, Artificial Sequence
  Description of Artificial Sequence:  Enzymatic Nucleic Acid
  misc_feature (31)..(31): n stands for inosine
guuucccacugaugaggccguuaggccgaanuugcugu

SEQ ID NO: 13850 - RNA, 38 nt, Artificial Sequence
  Description of Artificial Sequence:  Enzymatic Nucleic Acid
  misc_feature (31)..(31): n stands for inosine
cucaauuccugaugaggccguuaggccgaanuuuccca

SEQ ID NO: 13851 - RNA, 38 nt, Artificial Sequence
  Description of Artificial Sequence:  Enzymatic Nucleic Acid
  misc_feature (31)..(31): n stands for inosine
cugagugacugaugaggccguuaggccgaancucucaa

SEQ ID NO: 13852 - RNA, 38 nt, Artificial Sequence
  Description of Artificial Sequence:  Enzymatic Nucleic Acid
  misc_feature (31)..(31): n stands for inosine
gcgcugagcugaugaggccguuaggccgaanaugcucu

SEQ ID NO: 13853 - RNA, 38 nt, Artificial Sequence
  Description of Artificial Sequence:  Enzymatic Nucleic Acid
  misc_feature (31)..(31): n stands for inosine
augcgcugcugaugaggccguuaggccgaanugaugcu

SEQ ID NO: 13854 - RNA, 38 nt, Artificial Sequence
  Description of Artificial Sequence:  Enzymatic Nucleic Acid
  misc_feature (31)..(31): n stands for inosine
ccaugcgccugaugaggccguuaggccgaanagugaug

SEQ ID NO: 13855 - RNA, 38 nt, Artificial Sequence
  Description of Artificial Sequence:  Enzymatic Nucleic Acid
  misc_feature (31)..(31): n stands for inosine
uauugccacugaugaggccguuaggccgaancgcugag

SEQ ID NO: 13856 - RNA, 38 nt, Artificial Sequence
  Description of Artificial Sequence:  Enzymatic Nucleic Acid
  misc_feature (31)..(31): n stands for inosine
ucuauuaucugaugaggccguuaggccgaanccaugcg

SEQ ID NO: 13857 - RNA, 38 nt, Artificial Sequence
  Description of Artificial Sequence:  Enzymatic Nucleic Acid
  misc_feature (31)..(31): n stands for inosine
aaggugcucugaugaggccguuaggccgaanccaucuu

SEQ ID NO: 13858 - RNA, 38 nt, Artificial Sequence
  Description of Artificial Sequence:  Enzymatic Nucleic Acid
  misc_feature (31)..(31): n stands for inosine
aaccaaggcugaugaggccguuaggccgaancuagcca

SEQ ID NO: 13859 - RNA, 38 nt, Artificial Sequence
  Description of Artificial Sequence:  Enzymatic Nucleic Acid
  misc_feature (31)..(31): n stands for inosine
acaaccaacugaugaggccguuaggccgaanugcuagc

SEQ ID NO: 13860 - RNA, 38 nt, Artificial Sequence
  Description of Artificial Sequence:  Enzymatic Nucleic Acid
  misc_feature (31)..(31): n stands for inosine
cacaaccacugaugaggccguuaggccgaangugcuag

SEQ ID NO: 13861 - RNA, 38 nt, Artificial Sequence
  Description of Artificial Sequence:  Enzymatic Nucleic Acid
  misc_feature (31)..(31): n stands for inosine
cuagaguccugaugaggccguuaggccgaanccacaac

SEQ ID NO: 13862 - RNA, 38 nt, Artificial Sequence
  Description of Artificial Sequence:  Enzymatic Nucleic Acid
  misc_feature (31)..(31): n stands for inosine
aauucuagcugaugaggccguuaggccgaanucagcca

SEQ ID NO: 13863 - RNA, 38 nt, Artificial Sequence
  Description of Artificial Sequence:  Enzymatic Nucleic Acid
  misc_feature (31)..(31): n stands for inosine
gaaauucucugaugaggccguuaggccgaanagucagc

SEQ ID NO: 13864 - RNA, 38 nt, Artificial Sequence
  Description of Artificial Sequence:  Enzymatic Nucleic Acid
  misc_feature (31)..(31): n stands for inosine
uagauucccugaugaggccguuaggccgaanaaauucu

SEQ ID NO: 13865 - RNA, 38 nt, Artificial Sequence
  Description of Artificial Sequence:  Enzymatic Nucleic Acid
  misc_feature (31)..(31): n stands for inosine
gcaaaugucugaugaggccguuaggccgaanauuccag

SEQ ID NO: 13866 - RNA, 38 nt, Artificial Sequence
  Description of Artificial Sequence:  Enzymatic Nucleic Acid
  misc_feature (31)..(31): n stands for inosine
uaugcaaacugaugaggccguuaggccgaanuagauuc

SEQ ID NO: 13867 - RNA, 38 nt, Artificial Sequence
  Description of Artificial Sequence:  Enzymatic Nucleic Acid
  misc_feature (31)..(31): n stands for inosine
ggaagcuacugaugaggccguuaggccgaancaaaugu

SEQ ID NO: 13868 - RNA, 38 nt, Artificial Sequence
  Description of Artificial Sequence:  Enzymatic Nucleic Acid
  misc_feature (31)..(31): n stands for inosine
uuauuggacugaugaggccguuaggccgaancuaugca

SEQ ID NO: 13869 - RNA, 38 nt, Artificial Sequence
  Description of Artificial Sequence:  Enzymatic Nucleic Acid
  misc_feature (31)..(31): n stands for inosine
acuuuauucugaugaggccguuaggccgaanaagcuau

SEQ ID NO: 13870 - RNA, 38 nt, Artificial Sequence
  Description of Artificial Sequence:  Enzymatic Nucleic Acid
  misc_feature (31)..(31): n stands for inosine
aacuuuaucugaugaggccguuaggccgaangaagcua

SEQ ID NO: 13871 - RNA, 38 nt, Artificial Sequence
  Description of Artificial Sequence:  Enzymatic Nucleic Acid
  misc_feature (31)..(31): n stands for inosine
cuucccaccugaugaggccguuaggccgaanucccaac

SEQ ID NO: 13872 - RNA, 38 nt, Artificial Sequence
  Description of Artificial Sequence:  Enzymatic Nucleic Acid
  misc_feature (31)..(31): n stands for inosine
aaagcuuacugaugaggccguuaggccgaanuuucuuc

SEQ ID NO: 13873 - RNA, 38 nt, Artificial Sequence
  Description of Artificial Sequence:  Enzymatic Nucleic Acid
  misc_feature (31)..(31): n stands for inosine
gauauaaacugaugaggccguuaggccgaancuuaugu

SEQ ID NO: 13874 - RNA, 38 nt, Artificial Sequence
  Description of Artificial Sequence:  Enzymatic Nucleic Acid
  misc_feature (31)..(31): n stands for inosine
cacaucugcugaugaggccguuaggccgaanauauaaa

SEQ ID NO: 13875 - RNA, 38 nt, Artificial Sequence
  Description of Artificial Sequence:  Enzymatic Nucleic Acid
  misc_feature (31)..(31): n stands for inosine
ggcacauccugaugaggccguuaggccgaanugauaua

SEQ ID NO: 13876 - RNA, 38 nt, Artificial Sequence
  Description of Artificial Sequence:  Enzymatic Nucleic Acid
  misc_feature (31)..(31): n stands for inosine
acccauuucugaugaggccguuaggccgaancacaucu

SEQ ID NO: 13877 - RNA, 38 nt, Artificial Sequence
  Description of Artificial Sequence:  Enzymatic Nucleic Acid
  misc_feature (31)..(31): n stands for inosine
aacccauucugaugaggccguuaggccgaangcacauc

SEQ ID NO: 13878 - RNA, 38 nt, Artificial Sequence
  Description of Artificial Sequence:  Enzymatic Nucleic Acid
  misc_feature (31)..(31): n stands for inosine
aguuaacacugaugaggccguuaggccgaanaaaccca

SEQ ID NO: 13879 - RNA, 38 nt, Artificial Sequence
  Description of Artificial Sequence:  Enzymatic Nucleic Acid
  misc_feature (31)..(31): n stands for inosine
uuuuuccacugaugaggccguuaggccgaanuuaacau

SEQ ID NO: 13880 - RNA, 38 nt, Artificial Sequence
  Description of Artificial Sequence:  Enzymatic Nucleic Acid
  misc_feature (31)..(31): n stands for inosine
cuuccguccugaugaggccguuaggccgaancauuuuu

SEQ ID NO: 13881 - RNA, 38 nt, Artificial Sequence
  Description of Artificial Sequence:  Enzymatic Nucleic Acid
  misc_feature (31)..(31): n stands for inosine
caguuucacugaugaggccguuaggccgaanuccucuc

SEQ ID NO: 13882 - RNA, 38 nt, Artificial Sequence
  Description of Artificial Sequence:  Enzymatic Nucleic Acid
  misc_feature (31)..(31): n stands for inosine
acaguuuccugaugaggccguuaggccgaanguccucu

SEQ ID NO: 13883 - RNA, 38 nt, Artificial Sequence
  Description of Artificial Sequence:  Enzymatic Nucleic Acid
  misc_feature (31)..(31): n stands for inosine
ugcaagaccugaugaggccguuaggccgaanuuucagg

SEQ ID NO: 13884 - RNA, 38 nt, Artificial Sequence
  Description of Artificial Sequence:  Enzymatic Nucleic Acid
  misc_feature (31)..(31): n stands for inosine
acugugcacugaugaggccguuaggccgaanacaguuu

SEQ ID NO: 13885 - RNA, 38 nt, Artificial Sequence
  Description of Artificial Sequence:  Enzymatic Nucleic Acid
  misc_feature (31)..(31): n stands for inosine
guuaacugcugaugaggccguuaggccgaancaagaca

SEQ ID NO: 13886 - RNA, 38 nt, Artificial Sequence
  Description of Artificial Sequence:  Enzymatic Nucleic Acid
  misc_feature (31)..(31): n stands for inosine
uuguuaaccugaugaggccguuaggccgaanugcaaga

SEQ ID NO: 13887 - RNA, 38 nt, Artificial Sequence
  Description of Artificial Sequence:  Enzymatic Nucleic Acid
  misc_feature (31)..(31): n stands for inosine
uaagaacucugaugaggccguuaggccgaanuuaacug

SEQ ID NO: 13888 - RNA, 38 nt, Artificial Sequence
  Description of Artificial Sequence:  Enzymatic Nucleic Acid
  misc_feature (31)..(31): n stands for inosine
ucuguauacugaugaggccguuaggccgaanaacuugu

SEQ ID NO: 13889 - RNA, 38 nt, Artificial Sequence
  Description of Artificial Sequence:  Enzymatic Nucleic Acid
  misc_feature (31)..(31): n stands for inosine
aacgucuccugaugaggccguuaggccgaanuauaaga

SEQ ID NO: 13890 - RNA, 38 nt, Artificial Sequence
  Description of Artificial Sequence:  Enzymatic Nucleic Acid
  misc_feature (31)..(31): n stands for inosine
aaaauccacugaugaggccguuaggccgaanuaacguc

SEQ ID NO: 13891 - RNA, 38 nt, Artificial Sequence
  Description of Artificial Sequence:  Enzymatic Nucleic Acid
  misc_feature (31)..(31): n stands for inosine
cuguccgccugaugaggccguuaggccgaanuaaaauc

SEQ ID NO: 13892 - RNA, 38 nt, Artificial Sequence
  Description of Artificial Sequence:  Enzymatic Nucleic Acid
  misc_feature (31)..(31): n stands for inosine
uuauuaaccugaugaggccguuaggccgaanuccgcag

SEQ ID NO: 13893 - RNA, 38 nt, Artificial Sequence
  Description of Artificial Sequence:  Enzymatic Nucleic Acid
  misc_feature (31)..(31): n stands for inosine
cauuguuccugaugaggccguuaggccgaanuuauuaa

SEQ ID NO: 13894 - RNA, 38 nt, Artificial Sequence
  Description of Artificial Sequence:  Enzymatic Nucleic Acid
  misc_feature (31)..(31): n stands for inosine
uagugcaucugaugaggccguuaggccgaanuucuguu

SEQ ID NO: 13895 - RNA, 38 nt, Artificial Sequence
  Description of Artificial Sequence:  Enzymatic Nucleic Acid
  misc_feature (31)..(31): n stands for inosine
uacuguagcugaugaggccguuaggccgaancauuguu

SEQ ID NO: 13896 - RNA, 38 nt, Artificial Sequence
  Description of Artificial Sequence:  Enzymatic Nucleic Acid
  misc_feature (31)..(31): n stands for inosine
aauacugucugaugaggccguuaggccgaanugcauug

SEQ ID NO: 13897 - RNA, 38 nt, Artificial Sequence
  Description of Artificial Sequence:  Enzymatic Nucleic Acid
  misc_feature (31)..(31): n stands for inosine
gcuaauaccugaugaggccguuaggccgaanuagugca

SEQ ID NO: 13898 - RNA, 38 nt, Artificial Sequence
  Description of Artificial Sequence:  Enzymatic Nucleic Acid
  misc_feature (31)..(31): n stands for inosine
uuuuugcucugaugaggccguuaggccgaancuaauac

SEQ ID NO: 13899 - RNA, 38 nt, Artificial Sequence
  Description of Artificial Sequence:  Enzymatic Nucleic Acid
  misc_feature (31)..(31): n stands for inosine
ccauuuuucugaugaggccguuaggccgaancuugcua

SEQ ID NO: 13900 - RNA, 38 nt, Artificial Sequence
  Description of Artificial Sequence:  Enzymatic Nucleic Acid
  misc_feature (31)..(31): n stands for inosine
uuagugaucugaugaggccguuaggccgaanccauuuu

SEQ ID NO: 13901 - RNA, 38 nt, Artificial Sequence
  Description of Artificial Sequence:  Enzymatic Nucleic Acid
  misc_feature (31)..(31): n stands for inosine
cuuagugacugaugaggccguuaggccgaangccauuu

SEQ ID NO: 13902 - RNA, 38 nt, Artificial Sequence
  Description of Artificial Sequence:  Enzymatic Nucleic Acid
  misc_feature (31)..(31): n stands for inosine
cuccuuagcugaugaggccguuaggccgaanauggcca

SEQ ID NO: 13903 - RNA, 38 nt, Artificial Sequence
  Description of Artificial Sequence:  Enzymatic Nucleic Acid
  misc_feature (31)..(31): n stands for inosine
ugcuccuucugaugaggccguuaggccgaanugauggc

SEQ ID NO: 13904 - RNA, 38 nt, Artificial Sequence
  Description of Artificial Sequence:  Enzymatic Nucleic Acid
  misc_feature (31)..(31): n stands for inosine
ugauggagcugaugaggccguuaggccgaancuccuua

SEQ ID NO: 13905 - RNA, 38 nt, Artificial Sequence
  Description of Artificial Sequence:  Enzymatic Nucleic Acid
  misc_feature (31)..(31): n stands for inosine
agugauggcugaugaggccguuaggccgaanugcuccu

SEQ ID NO: 13906 - RNA, 38 nt, Artificial Sequence
  Description of Artificial Sequence:  Enzymatic Nucleic Acid
  misc_feature (31)..(31): n stands for inosine
agagugaucugaugaggccguuaggccgaanagugcuc

SEQ ID NO: 13907 - RNA, 38 nt, Artificial Sequence
  Description of Artificial Sequence:  Enzymatic Nucleic Acid
  misc_feature (31)..(31): n stands for inosine
aagagugacugaugaggccguuaggccgaangagugcu

SEQ ID NO: 13908 - RNA, 38 nt, Artificial Sequence
  Description of Artificial Sequence:  Enzymatic Nucleic Acid
  misc_feature (31)..(31): n stands for inosine
auuaagagcugaugaggccguuaggccgaanauggagu

SEQ ID NO: 13909 - RNA, 38 nt, Artificial Sequence
  Description of Artificial Sequence:  Enzymatic Nucleic Acid
  misc_feature (31)..(31): n stands for inosine
agauuaagcugaugaggccguuaggccgaanugaugga

SEQ ID NO: 13910 - RNA, 38 nt, Artificial Sequence
  Description of Artificial Sequence:  Enzymatic Nucleic Acid
  misc_feature (31)..(31): n stands for inosine
uaagauuacugaugaggccguuaggccgaanagugaug

SEQ ID NO: 13911 - RNA, 38 nt, Artificial Sequence
  Description of Artificial Sequence:  Enzymatic Nucleic Acid
  misc_feature (31)..(31): n stands for inosine
ugaugguacugaugaggccguuaggccgaanauuaaga

SEQ ID NO: 13912 - RNA, 38 nt, Artificial Sequence
  Description of Artificial Sequence:  Enzymatic Nucleic Acid
  misc_feature (31)..(31): n stands for inosine
uucaugaucugaugaggccguuaggccgaanuaagauu

SEQ ID NO: 13913 - RNA, 38 nt, Artificial Sequence
  Description of Artificial Sequence:  Enzymatic Nucleic Acid
  misc_feature (31)..(31): n stands for inosine
auucaugacugaugaggccguuaggccgaanguaagau

SEQ ID NO: 13914 - RNA, 38 nt, Artificial Sequence
  Description of Artificial Sequence:  Enzymatic Nucleic Acid
  misc_feature (31)..(31): n stands for inosine
aacauucacugaugaggccguuaggccgaanaugguaa

SEQ ID NO: 13915 - RNA, 38 nt, Artificial Sequence
  Description of Artificial Sequence:  Enzymatic Nucleic Acid
  misc_feature (31)..(31): n stands for inosine
ucuugcagcugaugaggccguuaggccgaanaaacauu

SEQ ID NO: 13916 - RNA, 38 nt, Artificial Sequence
  Description of Artificial Sequence:  Enzymatic Nucleic Acid
  misc_feature (31)..(31): n stands for inosine
aucuugcacugaugaggccguuaggccgaangaaacau

SEQ ID NO: 13917 - RNA, 38 nt, Artificial Sequence
  Description of Artificial Sequence:  Enzymatic Nucleic Acid
  misc_feature (31)..(31): n stands for inosine
aaucuugccugaugaggccguuaggccgaanggaaaca

SEQ ID NO: 13918 - RNA, 38 nt, Artificial Sequence
  Description of Artificial Sequence:  Enzymatic Nucleic Acid
  misc_feature (31)..(31): n stands for inosine
cugaaucucugaugaggccguuaggccgaancagggaa

SEQ ID NO: 13919 - RNA, 38 nt, Artificial Sequence
  Description of Artificial Sequence:  Enzymatic Nucleic Acid
  misc_feature (31)..(31): n stands for inosine
uaggugcccugaugaggccguuaggccgaanaaucuug

SEQ ID NO: 13920 - RNA, 38 nt, Artificial Sequence
  Description of Artificial Sequence:  Enzymatic Nucleic Acid
  misc_feature (31)..(31): n stands for inosine
ggcauaggcugaugaggccguuaggccgaanccugaau

SEQ ID NO: 13921 - RNA, 38 nt, Artificial Sequence
  Description of Artificial Sequence:  Enzymatic Nucleic Acid
  misc_feature (31)..(31): n stands for inosine
caggcauacugaugaggccguuaggccgaanugccuga

SEQ ID NO: 13922 - RNA, 38 nt, Artificial Sequence
  Description of Artificial Sequence:  Enzymatic Nucleic Acid
  misc_feature (31)..(31): n stands for inosine
gcaggcaucugaugaggccguuaggccgaangugccug

SEQ ID NO: 13923 - RNA, 38 nt, Artificial Sequence
  Description of Artificial Sequence:  Enzymatic Nucleic Acid
  misc_feature (31)..(31): n stands for inosine
gcucugcacugaugaggccguuaggccgaancauaggu

SEQ ID NO: 13924 - RNA, 38 nt, Artificial Sequence
  Description of Artificial Sequence:  Enzymatic Nucleic Acid
  misc_feature (31)..(31): n stands for inosine
ggcucugccugaugaggccguuaggccgaangcauagg

SEQ ID NO: 13925 - RNA, 38 nt, Artificial Sequence
  Description of Artificial Sequence:  Enzymatic Nucleic Acid
  misc_feature (31)..(31): n stands for inosine
ccuggcuccugaugaggccguuaggccgaancaggcau

SEQ ID NO: 13926 - RNA, 38 nt, Artificial Sequence
  Description of Artificial Sequence:  Enzymatic Nucleic Acid
  misc_feature (31)..(31): n stands for inosine
acauuccucugaugaggccguuaggccgaancucugca

SEQ ID NO: 13927 - RNA, 38 nt, Artificial Sequence
  Description of Artificial Sequence:  Enzymatic Nucleic Acid
  misc_feature (31)..(31): n stands for inosine
uacauucccugaugaggccguuaggccgaangcucugc

SEQ ID NO: 13928 - RNA, 38 nt, Artificial Sequence
  Description of Artificial Sequence:  Enzymatic Nucleic Acid
  misc_feature (31)..(31): n stands for inosine
uuccccugcugaugaggccguuaggccgaanuauacau

SEQ ID NO: 13929 - RNA, 38 nt, Artificial Sequence
  Description of Artificial Sequence:  Enzymatic Nucleic Acid
  misc_feature (31)..(31): n stands for inosine
ucuucccccugaugaggccguuaggccgaanuguauac

SEQ ID NO: 13930 - RNA, 38 nt, Artificial Sequence
  Description of Artificial Sequence:  Enzymatic Nucleic Acid
  misc_feature (31)..(31): n stands for inosine
cuucuggacugaugaggccguuaggccgaanauuucuu

SEQ ID NO: 13931 - RNA, 38 nt, Artificial Sequence
  Description of Artificial Sequence:  Enzymatic Nucleic Acid
  misc_feature (31)..(31): n stands for inosine
ucuucuggcugaugaggccguuaggccgaangauuucu

SEQ ID NO: 13932 - RNA, 38 nt, Artificial Sequence
  Description of Artificial Sequence:  Enzymatic Nucleic Acid
  misc_feature (31)..(31): n stands for inosine
uuucuucucugaugaggccguuaggccgaanaggauuu

SEQ ID NO: 13933 - RNA, 38 nt, Artificial Sequence
  Description of Artificial Sequence:  Enzymatic Nucleic Acid
  misc_feature (31)..(31): n stands for inosine
cuuucuuccugaugaggccguuaggccgaangaggauu

SEQ ID NO: 13934 - RNA, 38 nt, Artificial Sequence
  Description of Artificial Sequence:  Enzymatic Nucleic Acid
  misc_feature (31)..(31): n stands for inosine
ucucugaucugaugaggccguuaggccgaanuaauuuc

SEQ ID NO: 13935 - RNA, 38 nt, Artificial Sequence
  Description of Artificial Sequence:  Enzymatic Nucleic Acid
  misc_feature (31)..(31): n stands for inosine
cugaucuccugaugaggccguuaggccgaanauuguaa

SEQ ID NO: 13936 - RNA, 38 nt, Artificial Sequence
  Description of Artificial Sequence:  Enzymatic Nucleic Acid
  misc_feature (31)..(31): n stands for inosine
gugcuucccugaugaggccguuaggccgaanaucucug

SEQ ID NO: 13937 - RNA, 38 nt, Artificial Sequence
  Description of Artificial Sequence:  Enzymatic Nucleic Acid
  misc_feature (31)..(31): n stands for inosine
agguauggcugaugaggccguuaggccgaancuuccug

SEQ ID NO: 13938 - RNA, 38 nt, Artificial Sequence
  Description of Artificial Sequence:  Enzymatic Nucleic Acid
  misc_feature (31)..(31): n stands for inosine
ggagguaucugaugaggccguuaggccgaanugcuucc

SEQ ID NO: 13939 - RNA, 38 nt, Artificial Sequence
  Description of Artificial Sequence:  Enzymatic Nucleic Acid
  misc_feature (31)..(31): n stands for inosine
aggagguacugaugaggccguuaggccgaangugcuuc

SEQ ID NO: 13940 - RNA, 38 nt, Artificial Sequence
  Description of Artificial Sequence:  Enzymatic Nucleic Acid
  misc_feature (31)..(31): n stands for inosine
ucgcaggacugaugaggccguuaggccgaanuauggug

SEQ ID NO: 13941 - RNA, 38 nt, Artificial Sequence
  Description of Artificial Sequence:  Enzymatic Nucleic Acid
  misc_feature (31)..(31): n stands for inosine
uucgcaggcugaugaggccguuaggccgaanguauggu

SEQ ID NO: 13942 - RNA, 38 nt, Artificial Sequence
  Description of Artificial Sequence:  Enzymatic Nucleic Acid
  misc_feature (31)..(31): n stands for inosine
guuucgcacugaugaggccguuaggccgaanagguaug

SEQ ID NO: 13943 - RNA, 38 nt, Artificial Sequence
  Description of Artificial Sequence:  Enzymatic Nucleic Acid
  misc_feature (31)..(31): n stands for inosine
gguuucgccugaugaggccguuaggccgaangagguau

SEQ ID NO: 13944 - RNA, 38 nt, Artificial Sequence
  Description of Artificial Sequence:  Enzymatic Nucleic Acid
  misc_feature (31)..(31): n stands for inosine
aucacugacugaugaggccguuaggccgaanuuucgca

SEQ ID NO: 13945 - RNA, 38 nt, Artificial Sequence
  Description of Artificial Sequence:  Enzymatic Nucleic Acid
  misc_feature (31)..(31): n stands for inosine
gaucacugcugaugaggccguuaggccgaanguuucgc

SEQ ID NO: 13946 - RNA, 38 nt, Artificial Sequence
  Description of Artificial Sequence:  Enzymatic Nucleic Acid
  misc_feature (31)..(31): n stands for inosine
gugaucaccugaugaggccguuaggccgaanagguuuc

SEQ ID NO: 13947 - RNA, 38 nt, Artificial Sequence
  Description of Artificial Sequence:  Enzymatic Nucleic Acid
  misc_feature (31)..(31): n stands for inosine
ccacugugcugaugaggccguuaggccgaanaucacug

SEQ ID NO: 13948 - RNA, 38 nt, Artificial Sequence
  Description of Artificial Sequence:  Enzymatic Nucleic Acid
  misc_feature (31)..(31): n stands for inosine
ggccacugcugaugaggccguuaggccgaanugaucac

SEQ ID NO: 13949 - RNA, 38 nt, Artificial Sequence
  Description of Artificial Sequence:  Enzymatic Nucleic Acid
  misc_feature (31)..(31): n stands for inosine
auggccaccugaugaggccguuaggccgaanugugauc

SEQ ID NO: 13950 - RNA, 38 nt, Artificial Sequence
  Description of Artificial Sequence:  Enzymatic Nucleic Acid
  misc_feature (31)..(31): n stands for inosine
cugcugaucugaugaggccguuaggccgaanccacugu

SEQ ID NO: 13951 - RNA, 38 nt, Artificial Sequence
  Description of Artificial Sequence:  Enzymatic Nucleic Acid
  misc_feature (31)..(31): n stands for inosine
acugcugacugaugaggccguuaggccgaangccacug

SEQ ID NO: 13952 - RNA, 38 nt, Artificial Sequence
  Description of Artificial Sequence:  Enzymatic Nucleic Acid
  misc_feature (31)..(31): n stands for inosine
ggaacugccugaugaggccguuaggccgaanauggcca

SEQ ID NO: 13953 - RNA, 38 nt, Artificial Sequence
  Description of Artificial Sequence:  Enzymatic Nucleic Acid
  misc_feature (31)..(31): n stands for inosine
gguggaaccugaugaggccguuaggccgaancugaugg

SEQ ID NO: 13954 - RNA, 38 nt, Artificial Sequence
  Description of Artificial Sequence:  Enzymatic Nucleic Acid
  misc_feature (31)..(31): n stands for inosine
aaaguggucugaugaggccguuaggccgaanaacugcu

SEQ ID NO: 13955 - RNA, 38 nt, Artificial Sequence
  Description of Artificial Sequence:  Enzymatic Nucleic Acid
  misc_feature (31)..(31): n stands for inosine
uaaaguggcugaugaggccguuaggccgaangaacugc

SEQ ID NO: 13956 - RNA, 38 nt, Artificial Sequence
  Description of Artificial Sequence:  Enzymatic Nucleic Acid
  misc_feature (31)..(31): n stands for inosine
ucuaaagucugaugaggccguuaggccgaanuggaacu

SEQ ID NO: 13957 - RNA, 38 nt, Artificial Sequence
  Description of Artificial Sequence:  Enzymatic Nucleic Acid
  misc_feature (31)..(31): n stands for inosine
gucuaaagcugaugaggccguuaggccgaanguggaac

SEQ ID NO: 13958 - RNA, 38 nt, Artificial Sequence
  Description of Artificial Sequence:  Enzymatic Nucleic Acid
  misc_feature (31)..(31): n stands for inosine
cagucuaacugaugaggccguuaggccgaanuggugga

SEQ ID NO: 13959 - RNA, 38 nt, Artificial Sequence
  Description of Artificial Sequence:  Enzymatic Nucleic Acid
  misc_feature (31)..(31): n stands for inosine
agcaugaccugaugaggccguuaggccgaanucuaaag

SEQ ID NO: 13960 - RNA, 38 nt, Artificial Sequence
  Description of Artificial Sequence:  Enzymatic Nucleic Acid
  misc_feature (31)..(31): n stands for inosine
cauuagcacugaugaggccguuaggccgaanacagucu

SEQ ID NO: 13961 - RNA, 38 nt, Artificial Sequence
  Description of Artificial Sequence:  Enzymatic Nucleic Acid
  misc_feature (31)..(31): n stands for inosine
acaccauucugaugaggccguuaggccgaancaugaca

SEQ ID NO: 13962 - RNA, 38 nt, Artificial Sequence
  Description of Artificial Sequence:  Enzymatic Nucleic Acid
  misc_feature (31)..(31): n stands for inosine
aggcucggcugaugaggccguuaggccgaanacaccau

SEQ ID NO: 13963 - RNA, 38 nt, Artificial Sequence
  Description of Artificial Sequence:  Enzymatic Nucleic Acid
  misc_feature (31)..(31): n stands for inosine
gaggcucgcugaugaggccguuaggccgaangacacca

SEQ ID NO: 13964 - RNA, 38 nt, Artificial Sequence
  Description of Artificial Sequence:  Enzymatic Nucleic Acid
  misc_feature (31)..(31): n stands for inosine
ugaggcuccugaugaggccguuaggccgaanggacacc

SEQ ID NO: 13965 - RNA, 38 nt, Artificial Sequence
  Description of Artificial Sequence:  Enzymatic Nucleic Acid
  misc_feature (31)..(31): n stands for inosine
ugaucugacugaugaggccguuaggccgaancucgggg

SEQ ID NO: 13966 - RNA, 38 nt, Artificial Sequence
  Description of Artificial Sequence:  Enzymatic Nucleic Acid
  misc_feature (31)..(31): n stands for inosine
gugaucugcugaugaggccguuaggccgaangcucggg

SEQ ID NO: 13967 - RNA, 38 nt, Artificial Sequence
  Description of Artificial Sequence:  Enzymatic Nucleic Acid
  misc_feature (31)..(31): n stands for inosine
aagugauccugaugaggccguuaggccgaanaggcucg

SEQ ID NO: 13968 - RNA, 38 nt, Artificial Sequence
  Description of Artificial Sequence:  Enzymatic Nucleic Acid
  misc_feature (31)..(31): n stands for inosine
aaaccaagcugaugaggccguuaggccgaanaucugag

SEQ ID NO: 13969 - RNA, 38 nt, Artificial Sequence
  Description of Artificial Sequence:  Enzymatic Nucleic Acid
  misc_feature (31)..(31): n stands for inosine
uuaaaccacugaugaggccguuaggccgaanugaucug

SEQ ID NO: 13970 - RNA, 38 nt, Artificial Sequence
  Description of Artificial Sequence:  Enzymatic Nucleic Acid
  misc_feature (31)..(31): n stands for inosine
uuuguggucugaugaggccguuaggccgaanuuuuuaa

SEQ ID NO: 13971 - RNA, 38 nt, Artificial Sequence
  Description of Artificial Sequence:  Enzymatic Nucleic Acid
  misc_feature (31)..(31): n stands for inosine
uauuuugucugaugaggccguuaggccgaanuuguuuu

SEQ ID NO: 13972 - RNA, 38 nt, Artificial Sequence
  Description of Artificial Sequence:  Enzymatic Nucleic Acid
  misc_feature (31)..(31): n stands for inosine
guauuuugcugaugaggccguuaggccgaanguuguuu

SEQ ID NO: 13973 - RNA, 38 nt, Artificial Sequence
  Description of Artificial Sequence:  Enzymatic Nucleic Acid
  misc_feature (31)..(31): n stands for inosine
uuguauuucugaugaggccguuaggccgaanugguugu

SEQ ID NO: 13974 - RNA, 38 nt, Artificial Sequence
  Description of Artificial Sequence:  Enzymatic Nucleic Acid
  misc_feature (31)..(31): n stands for inosine
gcucuugucugaugaggccguuaggccgaanuauuuug

SEQ ID NO: 13975 - RNA, 38 nt, Artificial Sequence
  Description of Artificial Sequence:  Enzymatic Nucleic Acid
  misc_feature (31)..(31): n stands for inosine
caggcucucugaugaggccguuaggccgaanuuguauu

SEQ ID NO: 13976 - RNA, 38 nt, Artificial Sequence
  Description of Artificial Sequence:  Enzymatic Nucleic Acid
  misc_feature (31)..(31): n stands for inosine
uaauuccacugaugaggccguuaggccgaancucuugu

SEQ ID NO: 13977 - RNA, 38 nt, Artificial Sequence
  Description of Artificial Sequence:  Enzymatic Nucleic Acid
  misc_feature (31)..(31): n stands for inosine
auaauucccugaugaggccguuaggccgaangcucuug

SEQ ID NO: 13978 - RNA, 38 nt, Artificial Sequence
  Description of Artificial Sequence:  Enzymatic Nucleic Acid
  misc_feature (31)..(31): n stands for inosine
ugcuuccucugaugaggccguuaggccgaanuccuaaa

SEQ ID NO: 13979 - RNA, 38 nt, Artificial Sequence
  Description of Artificial Sequence:  Enzymatic Nucleic Acid
  misc_feature (31)..(31): n stands for inosine
cugcuucccugaugaggccguuaggccgaanguccuaa

SEQ ID NO: 13980 - RNA, 38 nt, Artificial Sequence
  Description of Artificial Sequence:  Enzymatic Nucleic Acid
  misc_feature (31)..(31): n stands for inosine
cagcgugccugaugaggccguuaggccgaancuuccug

SEQ ID NO: 13981 - RNA, 38 nt, Artificial Sequence
  Description of Artificial Sequence:  Enzymatic Nucleic Acid
  misc_feature (31)..(31): n stands for inosine
aaacagcgcugaugaggccguuaggccgaancugcuuc

SEQ ID NO: 13982 - RNA, 38 nt, Artificial Sequence
  Description of Artificial Sequence:  Enzymatic Nucleic Acid
  misc_feature (31)..(31): n stands for inosine
caauaaaccugaugaggccguuaggccgaancgugcug

SEQ ID NO: 13983 - RNA, 38 nt, Artificial Sequence
  Description of Artificial Sequence:  Enzymatic Nucleic Acid
  misc_feature (31)..(31): n stands for inosine
cucuucugcugaugaggccguuaggccgaanacucuuu

SEQ ID NO: 13984 - RNA, 38 nt, Artificial Sequence
  Description of Artificial Sequence:  Enzymatic Nucleic Acid
  misc_feature (31)..(31): n stands for inosine
uccucuuccugaugaggccguuaggccgaanugacucu

SEQ ID NO: 13985 - RNA, 38 nt, Artificial Sequence
  Description of Artificial Sequence:  Enzymatic Nucleic Acid
  misc_feature (31)..(31): n stands for inosine
gcagugaucugaugaggccguuaggccgaanacaccuu

SEQ ID NO: 13986 - RNA, 38 nt, Artificial Sequence
  Description of Artificial Sequence:  Enzymatic Nucleic Acid
  misc_feature (31)..(31): n stands for inosine
cuuugcagcugaugaggccguuaggccgaanauagaca

SEQ ID NO: 13987 - RNA, 38 nt, Artificial Sequence
  Description of Artificial Sequence:  Enzymatic Nucleic Acid
  misc_feature (31)..(31): n stands for inosine
ggcuuugccugaugaggccguuaggccgaanugauaga

SEQ ID NO: 13988 - RNA, 38 nt, Artificial Sequence
  Description of Artificial Sequence:  Enzymatic Nucleic Acid
  misc_feature (31)..(31): n stands for inosine
gguggcuucugaugaggccguuaggccgaancagugau

SEQ ID NO: 13989 - RNA, 38 nt, Artificial Sequence
  Description of Artificial Sequence:  Enzymatic Nucleic Acid
  misc_feature (31)..(31): n stands for inosine
ugguuggucugaugaggccguuaggccgaancuuugca

SEQ ID NO: 13990 - RNA, 38 nt, Artificial Sequence
  Description of Artificial Sequence:  Enzymatic Nucleic Acid
  misc_feature (31)..(31): n stands for inosine
cugguuggcugaugaggccguuaggccgaangcuuugc

SEQ ID NO: 13991 - RNA, 38 nt, Artificial Sequence
  Description of Artificial Sequence:  Enzymatic Nucleic Acid
  misc_feature (31)..(31): n stands for inosine
uucugguucugaugaggccguuaggccgaanuggcuuu

SEQ ID NO: 13992 - RNA, 38 nt, Artificial Sequence
  Description of Artificial Sequence:  Enzymatic Nucleic Acid
  misc_feature (31)..(31): n stands for inosine
cuucuggucugaugaggccguuaggccgaanguggcuu

SEQ ID NO: 13993 - RNA, 38 nt, Artificial Sequence
  Description of Artificial Sequence:  Enzymatic Nucleic Acid
  misc_feature (31)..(31): n stands for inosine
gcccuucucugaugaggccguuaggccgaanuuggugg

SEQ ID NO: 13994 - RNA, 38 nt, Artificial Sequence
  Description of Artificial Sequence:  Enzymatic Nucleic Acid
  misc_feature (31)..(31): n stands for inosine
agcccuuccugaugaggccguuaggccgaanguuggug

SEQ ID NO: 13995 - RNA, 38 nt, Artificial Sequence
  Description of Artificial Sequence:  Enzymatic Nucleic Acid
  misc_feature (31)..(31): n stands for inosine
uuccacagcugaugaggccguuaggccgaancccuucu

SEQ ID NO: 13996 - RNA, 38 nt, Artificial Sequence
  Description of Artificial Sequence:  Enzymatic Nucleic Acid
  misc_feature (31)..(31): n stands for inosine
cuuuccaccugaugaggccguuaggccgaanagcccuu

SEQ ID NO: 13997 - RNA, 38 nt, Artificial Sequence
  Description of Artificial Sequence:  Enzymatic Nucleic Acid
  misc_feature (31)..(31): n stands for inosine
agguaugccugaugaggccguuaggccgaanaacuuuc

SEQ ID NO: 13998 - RNA, 38 nt, Artificial Sequence
  Description of Artificial Sequence:  Enzymatic Nucleic Acid
  misc_feature (31)..(31): n stands for inosine
gugagguacugaugaggccguuaggccgaancugaacu

SEQ ID NO: 13999 - RNA, 38 nt, Artificial Sequence
  Description of Artificial Sequence:  Enzymatic Nucleic Acid
  misc_feature (31)..(31): n stands for inosine
aacagugacugaugaggccguuaggccgaanuaugcug

SEQ ID NO: 14000 - RNA, 38 nt, Artificial Sequence
  Description of Artificial Sequence:  Enzymatic Nucleic Acid
  misc_feature (31)..(31): n stands for inosine
gaacagugcugaugaggccguuaggccgaanguaugcu

SEQ ID NO: 14001 - RNA, 38 nt, Artificial Sequence
  Description of Artificial Sequence:  Enzymatic Nucleic Acid
  misc_feature (31)..(31): n stands for inosine
uugaacagcugaugaggccguuaggccgaanagguaug

SEQ ID NO: 14002 - RNA, 38 nt, Artificial Sequence
  Description of Artificial Sequence:  Enzymatic Nucleic Acid
  misc_feature (31)..(31): n stands for inosine
ccuugaaccugaugaggccguuaggccgaanugaggua

SEQ ID NO: 14003 - RNA, 38 nt, Artificial Sequence
  Description of Artificial Sequence:  Enzymatic Nucleic Acid
  misc_feature (31)..(31): n stands for inosine
agguuccucugaugaggccguuaggccgaanaacagug

SEQ ID NO: 14004 - RNA, 38 nt, Artificial Sequence
  Description of Artificial Sequence:  Enzymatic Nucleic Acid
  misc_feature (31)..(31): n stands for inosine
uuguccgacugaugaggccguuaggccgaanuuccuug

SEQ ID NO: 14005 - RNA, 38 nt, Artificial Sequence
  Description of Artificial Sequence:  Enzymatic Nucleic Acid
  misc_feature (31)..(31): n stands for inosine
cuuguccgcugaugaggccguuaggccgaanguuccuu

SEQ ID NO: 14006 - RNA, 38 nt, Artificial Sequence
  Description of Artificial Sequence:  Enzymatic Nucleic Acid
  misc_feature (31)..(31): n stands for inosine
auuagacucugaugaggccguuaggccgaanuccgagg

SEQ ID NO: 14007 - RNA, 38 nt, Artificial Sequence
  Description of Artificial Sequence:  Enzymatic Nucleic Acid
  misc_feature (31)..(31): n stands for inosine
uccagauucugaugaggccguuaggccgaanacuuguc

SEQ ID NO: 14008 - RNA, 38 nt, Artificial Sequence
  Description of Artificial Sequence:  Enzymatic Nucleic Acid
  misc_feature (31)..(31): n stands for inosine
ucagcucccugaugaggccguuaggccgaanauuagac

SEQ ID NO: 14009 - RNA, 38 nt, Artificial Sequence
  Description of Artificial Sequence:  Enzymatic Nucleic Acid
  misc_feature (31)..(31): n stands for inosine
gagugauccugaugaggccguuaggccgaancuccaga

SEQ ID NO: 14010 - RNA, 38 nt, Artificial Sequence
  Description of Artificial Sequence:  Enzymatic Nucleic Acid
  misc_feature (31)..(31): n stands for inosine
uguuagagcugaugaggccguuaggccgaanaucagcu

SEQ ID NO: 14011 - RNA, 38 nt, Artificial Sequence
  Description of Artificial Sequence:  Enzymatic Nucleic Acid
  misc_feature (31)..(31): n stands for inosine
cauguuagcugaugaggccguuaggccgaanugaucag

SEQ ID NO: 14012 - RNA, 38 nt, Artificial Sequence
  Description of Artificial Sequence:  Enzymatic Nucleic Acid
  misc_feature (31)..(31): n stands for inosine
ugcauguucugaugaggccguuaggccgaanagugauc

SEQ ID NO: 14013 - RNA, 38 nt, Artificial Sequence
  Description of Artificial Sequence:  Enzymatic Nucleic Acid
  misc_feature (31)..(31): n stands for inosine
caggugcacugaugaggccguuaggccgaanuuagagu

SEQ ID NO: 14014 - RNA, 38 nt, Artificial Sequence
  Description of Artificial Sequence:  Enzymatic Nucleic Acid
  misc_feature (31)..(31): n stands for inosine
cacacaggcugaugaggccguuaggccgaancauguua

SEQ ID NO: 14015 - RNA, 38 nt, Artificial Sequence
  Description of Artificial Sequence:  Enzymatic Nucleic Acid
  misc_feature (31)..(31): n stands for inosine
gccacacacugaugaggccguuaggccgaanugcaugu

SEQ ID NO: 14016 - RNA, 38 nt, Artificial Sequence
  Description of Artificial Sequence:  Enzymatic Nucleic Acid
  misc_feature (31)..(31): n stands for inosine
agccacaccugaugaggccguuaggccgaangugcaug

SEQ ID NO: 14017 - RNA, 38 nt, Artificial Sequence
  Description of Artificial Sequence:  Enzymatic Nucleic Acid
  misc_feature (31)..(31): n stands for inosine
agagucgccugaugaggccguuaggccgaanccacaca

SEQ ID NO: 14018 - RNA, 38 nt, Artificial Sequence
  Description of Artificial Sequence:  Enzymatic Nucleic Acid
  misc_feature (31)..(31): n stands for inosine
cagaagagcugaugaggccguuaggccgaanucgcagc

SEQ ID NO: 14019 - RNA, 38 nt, Artificial Sequence
  Description of Artificial Sequence:  Enzymatic Nucleic Acid
  misc_feature (31)..(31): n stands for inosine
gccagaagcugaugaggccguuaggccgaanagucgca

SEQ ID NO: 14020 - RNA, 38 nt, Artificial Sequence
  Description of Artificial Sequence:  Enzymatic Nucleic Acid
  misc_feature (31)..(31): n stands for inosine
gagccagacugaugaggccguuaggccgaanagagucg

SEQ ID NO: 14021 - RNA, 38 nt, Artificial Sequence
  Description of Artificial Sequence:  Enzymatic Nucleic Acid
  misc_feature (31)..(31): n stands for inosine
uaggagcccugaugaggccguuaggccgaanaagagag

SEQ ID NO: 14022 - RNA, 38 nt, Artificial Sequence
  Description of Artificial Sequence:  Enzymatic Nucleic Acid
  misc_feature (31)..(31): n stands for inosine
uuaauaggcugaugaggccguuaggccgaanccagaag

SEQ ID NO: 14023 - RNA, 38 nt, Artificial Sequence
  Description of Artificial Sequence:  Enzymatic Nucleic Acid
  misc_feature (31)..(31): n stands for inosine
gguuaauacugaugaggccguuaggccgaanagccaga

SEQ ID NO: 14024 - RNA, 38 nt, Artificial Sequence
  Description of Artificial Sequence:  Enzymatic Nucleic Acid
  misc_feature (31)..(31): n stands for inosine
ggguuaaucugaugaggccguuaggccgaangagccag

SEQ ID NO: 14025 - RNA, 38 nt, Artificial Sequence
  Description of Artificial Sequence:  Enzymatic Nucleic Acid
  misc_feature (31)..(31): n stands for inosine
auaaggagcugaugaggccguuaggccgaanuuaauag

SEQ ID NO: 14026 - RNA, 38 nt, Artificial Sequence
  Description of Artificial Sequence:  Enzymatic Nucleic Acid
  misc_feature (31)..(31): n stands for inosine
gauaaggacugaugaggccguuaggccgaanguuaaua

SEQ ID NO: 14027 - RNA, 38 nt, Artificial Sequence
  Description of Artificial Sequence:  Enzymatic Nucleic Acid
  misc_feature (31)..(31): n stands for inosine
ggauaaggcugaugaggccguuaggccgaangguuaau

SEQ ID NO: 14028 - RNA, 38 nt, Artificial Sequence
  Description of Artificial Sequence:  Enzymatic Nucleic Acid
  misc_feature (31)..(31): n stands for inosine
ucggauaacugaugaggccguuaggccgaanaggguua

SEQ ID NO: 14029 - RNA, 38 nt, Artificial Sequence
  Description of Artificial Sequence:  Enzymatic Nucleic Acid
  misc_feature (31)..(31): n stands for inosine
uucggauacugaugaggccguuaggccgaangaggguu

SEQ ID NO: 14030 - RNA, 38 nt, Artificial Sequence
  Description of Artificial Sequence:  Enzymatic Nucleic Acid
  misc_feature (31)..(31): n stands for inosine
cauuuuuccugaugaggccguuaggccgaanauaagga

SEQ ID NO: 14031 - RNA, 38 nt, Artificial Sequence
  Description of Artificial Sequence:  Enzymatic Nucleic Acid
  misc_feature (31)..(31): n stands for inosine
ucagaagacugaugaggccguuaggccgaanaccuuuu

SEQ ID NO: 14032 - RNA, 38 nt, Artificial Sequence
  Description of Artificial Sequence:  Enzymatic Nucleic Acid
  misc_feature (31)..(31): n stands for inosine
auuucagacugaugaggccguuaggccgaanaagaccu

SEQ ID NO: 14033 - RNA, 38 nt, Artificial Sequence
  Description of Artificial Sequence:  Enzymatic Nucleic Acid
  misc_feature (31)..(31): n stands for inosine
uuuauuuccugaugaggccguuaggccgaanaagaaga

SEQ ID NO: 14034 - RNA, 38 nt, Artificial Sequence
  Description of Artificial Sequence:  Enzymatic Nucleic Acid
  misc_feature (31)..(31): n stands for inosine
agguaguccugaugaggccguuaggccgaanucuuuau

SEQ ID NO: 14035 - RNA, 38 nt, Artificial Sequence
  Description of Artificial Sequence:  Enzymatic Nucleic Acid
  misc_feature (31)..(31): n stands for inosine
ugauaggucugaugaggccguuaggccgaanucagucu

SEQ ID NO: 14036 - RNA, 38 nt, Artificial Sequence
  Description of Artificial Sequence:  Enzymatic Nucleic Acid
  misc_feature (31)..(31): n stands for inosine
aauugauacugaugaggccguuaggccgaanuagucag

SEQ ID NO: 14037 - RNA, 38 nt, Artificial Sequence
  Description of Artificial Sequence:  Enzymatic Nucleic Acid
  misc_feature (31)..(31): n stands for inosine
uaauugaucugaugaggccguuaggccgaanguaguca

SEQ ID NO: 14038 - RNA, 38 nt, Artificial Sequence
  Description of Artificial Sequence:  Enzymatic Nucleic Acid
  misc_feature (31)..(31): n stands for inosine
auuauaaucugaugaggccguuaggccgaanauaggua

SEQ ID NO: 14039 - RNA, 38 nt, Artificial Sequence
  Description of Artificial Sequence:  Enzymatic Nucleic Acid
  misc_feature (31)..(31): n stands for inosine
uucaucugcugaugaggccguuaggccgaanuccauua

SEQ ID NO: 14040 - RNA, 38 nt, Artificial Sequence
  Description of Artificial Sequence:  Enzymatic Nucleic Acid
  misc_feature (31)..(31): n stands for inosine
cuucaucucugaugaggccguuaggccgaanguccauu

SEQ ID NO: 14041 - RNA, 38 nt, Artificial Sequence
  Description of Artificial Sequence:  Enzymatic Nucleic Acid
  misc_feature (31)..(31): n stands for inosine
acuucauccugaugaggccguuaggccgaangguccau

SEQ ID NO: 14042 - RNA, 38 nt, Artificial Sequence
  Description of Artificial Sequence:  Enzymatic Nucleic Acid
  misc_feature (31)..(31): n stands for inosine
cauccaaacugaugaggccguuaggccgaanaacuuca

SEQ ID NO: 14043 - RNA, 38 nt, Artificial Sequence
  Description of Artificial Sequence:  Enzymatic Nucleic Acid
  misc_feature (31)..(31): n stands for inosine
ucauccaacugaugaggccguuaggccgaangaacuuc

SEQ ID NO: 14044 - RNA, 38 nt, Artificial Sequence
  Description of Artificial Sequence:  Enzymatic Nucleic Acid
  misc_feature (31)..(31): n stands for inosine
gcucacaccugaugaggccguuaggccgaancucaucc

SEQ ID NO: 14045 - RNA, 38 nt, Artificial Sequence
  Description of Artificial Sequence:  Enzymatic Nucleic Acid
  misc_feature (31)..(31): n stands for inosine
cauaagggcugaugaggccguuaggccgaanccgcuca

SEQ ID NO: 14046 - RNA, 38 nt, Artificial Sequence
  Description of Artificial Sequence:  Enzymatic Nucleic Acid
  misc_feature (31)..(31): n stands for inosine
aucauaagcugaugaggccguuaggccgaanagccgcu

SEQ ID NO: 14047 - RNA, 38 nt, Artificial Sequence
  Description of Artificial Sequence:  Enzymatic Nucleic Acid
  misc_feature (31)..(31): n stands for inosine
caucauaacugaugaggccguuaggccgaangagccgc

SEQ ID NO: 14048 - RNA, 38 nt, Artificial Sequence
  Description of Artificial Sequence:  Enzymatic Nucleic Acid
  misc_feature (31)..(31): n stands for inosine
gcaucauacugaugaggccguuaggccgaanggagccg

SEQ ID NO: 14049 - RNA, 38 nt, Artificial Sequence
  Description of Artificial Sequence:  Enzymatic Nucleic Acid
  misc_feature (31)..(31): n stands for inosine
cacuugcucugaugaggccguuaggccgaancaucaua

SEQ ID NO: 14050 - RNA, 38 nt, Artificial Sequence
  Description of Artificial Sequence:  Enzymatic Nucleic Acid
  misc_feature (31)..(31): n stands for inosine
ccacuugccugaugaggccguuaggccgaangcaucau

SEQ ID NO: 14051 - RNA, 38 nt, Artificial Sequence
  Description of Artificial Sequence:  Enzymatic Nucleic Acid
  misc_feature (31)..(31): n stands for inosine
cucccacucugaugaggccguuaggccgaancuggcau

SEQ ID NO: 14052 - RNA, 38 nt, Artificial Sequence
  Description of Artificial Sequence:  Enzymatic Nucleic Acid
  misc_feature (31)..(31): n stands for inosine
cucucccgcugaugaggccguuaggccgaancaaacuc

SEQ ID NO: 14053 - RNA, 38 nt, Artificial Sequence
  Description of Artificial Sequence:  Enzymatic Nucleic Acid
  misc_feature (31)..(31): n stands for inosine
ucucuccccugaugaggccguuaggccgaangcaaacu

SEQ ID NO: 14054 - RNA, 38 nt, Artificial Sequence
  Description of Artificial Sequence:  Enzymatic Nucleic Acid
  misc_feature (31)..(31): n stands for inosine
ccaguuuacugaugaggccguuaggccgaanucucucc

SEQ ID NO: 14055 - RNA, 38 nt, Artificial Sequence
  Description of Artificial Sequence:  Enzymatic Nucleic Acid
  misc_feature (31)..(31): n stands for inosine
auuugccccugaugaggccguuaggccgaanuuuaagu

SEQ ID NO: 14056 - RNA, 38 nt, Artificial Sequence
  Description of Artificial Sequence:  Enzymatic Nucleic Acid
  misc_feature (31)..(31): n stands for inosine
aagugauucugaugaggccguuaggccgaancccaguu

SEQ ID NO: 14057 - RNA, 38 nt, Artificial Sequence
  Description of Artificial Sequence:  Enzymatic Nucleic Acid
  misc_feature (31)..(31): n stands for inosine
cuuccaagcugaugaggccguuaggccgaanauuugcc

SEQ ID NO: 14058 - RNA, 38 nt, Artificial Sequence
  Description of Artificial Sequence:  Enzymatic Nucleic Acid
  misc_feature (31)..(31): n stands for inosine
cucuuccacugaugaggccguuaggccgaanugauuug

SEQ ID NO: 14059 - RNA, 38 nt, Artificial Sequence
  Description of Artificial Sequence:  Enzymatic Nucleic Acid
  misc_feature (31)..(31): n stands for inosine
uuuccaaacugaugaggccguuaggccgaanccccucu

SEQ ID NO: 14060 - RNA, 38 nt, Artificial Sequence
  Description of Artificial Sequence:  Enzymatic Nucleic Acid
  misc_feature (31)..(31): n stands for inosine
cugaugcucugaugaggccguuaggccgaanaaccacu

SEQ ID NO: 14061 - RNA, 38 nt, Artificial Sequence
  Description of Artificial Sequence:  Enzymatic Nucleic Acid
  misc_feature (31)..(31): n stands for inosine
aaugcugacugaugaggccguuaggccgaancuugaac

SEQ ID NO: 14062 - RNA, 38 nt, Artificial Sequence
  Description of Artificial Sequence:  Enzymatic Nucleic Acid
  misc_feature (31)..(31): n stands for inosine
ccaaaugccugaugaggccguuaggccgaanaugcuug

SEQ ID NO: 14063 - RNA, 38 nt, Artificial Sequence
  Description of Artificial Sequence:  Enzymatic Nucleic Acid
  misc_feature (31)..(31): n stands for inosine
augccaaacugaugaggccguuaggccgaancugaugc

SEQ ID NO: 14064 - RNA, 38 nt, Artificial Sequence
  Description of Artificial Sequence:  Enzymatic Nucleic Acid
  misc_feature (31)..(31): n stands for inosine
uuucuuaacugaugaggccguuaggccgaanccaaaug

SEQ ID NO: 14065 - RNA, 38 nt, Artificial Sequence
  Description of Artificial Sequence:  Enzymatic Nucleic Acid
  misc_feature (31)..(31): n stands for inosine
cacguaggcugaugaggccguuaggccgaanauuucuu

SEQ ID NO: 14066 - RNA, 38 nt, Artificial Sequence
  Description of Artificial Sequence:  Enzymatic Nucleic Acid
  misc_feature (31)..(31): n stands for inosine
ggcacguacugaugaggccguuaggccgaanugauuuc

SEQ ID NO: 14067 - RNA, 38 nt, Artificial Sequence
  Description of Artificial Sequence:  Enzymatic Nucleic Acid
  misc_feature (31)..(31): n stands for inosine
cggcacgucugaugaggccguuaggccgaangugauuu

SEQ ID NO: 14068 - RNA, 38 nt, Artificial Sequence
  Description of Artificial Sequence:  Enzymatic Nucleic Acid
  misc_feature (31)..(31): n stands for inosine
cacagucccugaugaggccguuaggccgaancacguag

SEQ ID NO: 14069 - RNA, 38 nt, Artificial Sequence
  Description of Artificial Sequence:  Enzymatic Nucleic Acid
  misc_feature (31)..(31): n stands for inosine
acagccaccugaugaggccguuaggccgaanuccggca

SEQ ID NO: 14070 - RNA, 38 nt, Artificial Sequence
  Description of Artificial Sequence:  Enzymatic Nucleic Acid
  misc_feature (31)..(31): n stands for inosine
auuuucaccugaugaggccguuaggccgaanccacagu

SEQ ID NO: 14071 - RNA, 38 nt, Artificial Sequence
  Description of Artificial Sequence:  Enzymatic Nucleic Acid
  misc_feature (31)..(31): n stands for inosine
ccucuuuccugaugaggccguuaggccgaancauuuuc

SEQ ID NO: 14072 - RNA, 38 nt, Artificial Sequence
  Description of Artificial Sequence:  Enzymatic Nucleic Acid
  misc_feature (31)..(31): n stands for inosine
cuggccgucugaugaggccguuaggccgaancccccuc

SEQ ID NO: 14073 - RNA, 38 nt, Artificial Sequence
  Description of Artificial Sequence:  Enzymatic Nucleic Acid
  misc_feature (31)..(31): n stands for inosine
gcuggccgcugaugaggccguuaggccgaangcccccu

SEQ ID NO: 14074 - RNA, 38 nt, Artificial Sequence
  Description of Artificial Sequence:  Enzymatic Nucleic Acid
  misc_feature (31)..(31): n stands for inosine
uacucgcucugaugaggccguuaggccgaanccguggc

SEQ ID NO: 14075 - RNA, 38 nt, Artificial Sequence
  Description of Artificial Sequence:  Enzymatic Nucleic Acid
  misc_feature (31)..(31): n stands for inosine
guacucgccugaugaggccguuaggccgaangccgugg

SEQ ID NO: 14076 - RNA, 38 nt, Artificial Sequence
  Description of Artificial Sequence:  Enzymatic Nucleic Acid
  misc_feature (31)..(31): n stands for inosine
cagagcuucugaugaggccguuaggccgaanuacucgc

SEQ ID NO: 14077 - RNA, 38 nt, Artificial Sequence
  Description of Artificial Sequence:  Enzymatic Nucleic Acid
  misc_feature (31)..(31): n stands for inosine
gucaucagcugaugaggccguuaggccgaancuuugua

SEQ ID NO: 14078 - RNA, 38 nt, Artificial Sequence
  Description of Artificial Sequence:  Enzymatic Nucleic Acid
  misc_feature (31)..(31): n stands for inosine
cagucauccugaugaggccguuaggccgaanagcuuug

SEQ ID NO: 14079 - RNA, 38 nt, Artificial Sequence
  Description of Artificial Sequence:  Enzymatic Nucleic Acid
  misc_feature (31)..(31): n stands for inosine
uuuagcuccugaugaggccguuaggccgaanucaucag

SEQ ID NO: 14080 - RNA, 38 nt, Artificial Sequence
  Description of Artificial Sequence:  Enzymatic Nucleic Acid
  misc_feature (31)..(31): n stands for inosine
agauuuuucugaugaggccguuaggccgaancucaguc

SEQ ID NO: 14081 - RNA, 38 nt, Artificial Sequence
  Description of Artificial Sequence:  Enzymatic Nucleic Acid
  misc_feature (31)..(31): n stands for inosine
gugggucacugaugaggccguuaggccgaanauuuuua

SEQ ID NO: 14082 - RNA, 38 nt, Artificial Sequence
  Description of Artificial Sequence:  Enzymatic Nucleic Acid
  misc_feature (31)..(31): n stands for inosine
ccaaugugcugaugaggccguuaggccgaanucaagau

SEQ ID NO: 14083 - RNA, 38 nt, Artificial Sequence
  Description of Artificial Sequence:  Enzymatic Nucleic Acid
  misc_feature (31)..(31): n stands for inosine
gccaaugucugaugaggccguuaggccgaangucaaga

SEQ ID NO: 14084 - RNA, 38 nt, Artificial Sequence
  Description of Artificial Sequence:  Enzymatic Nucleic Acid
  misc_feature (31)..(31): n stands for inosine
ggccaaugcugaugaggccguuaggccgaanggucaag

SEQ ID NO: 14085 - RNA, 38 nt, Artificial Sequence
  Description of Artificial Sequence:  Enzymatic Nucleic Acid
  misc_feature (31)..(31): n stands for inosine
guggccaacugaugaggccguuaggccgaanuggguca

SEQ ID NO: 14086 - RNA, 38 nt, Artificial Sequence
  Description of Artificial Sequence:  Enzymatic Nucleic Acid
  misc_feature (31)..(31): n stands for inosine
cagauggucugaugaggccguuaggccgaanccaaugu

SEQ ID NO: 14087 - RNA, 38 nt, Artificial Sequence
  Description of Artificial Sequence:  Enzymatic Nucleic Acid
  misc_feature (31)..(31): n stands for inosine
ucagauggcugaugaggccguuaggccgaangccaaug

SEQ ID NO: 14088 - RNA, 38 nt, Artificial Sequence
  Description of Artificial Sequence:  Enzymatic Nucleic Acid
  misc_feature (31)..(31): n stands for inosine
guucagaucugaugaggccguuaggccgaanuggccaa

SEQ ID NO: 14089 - RNA, 38 nt, Artificial Sequence
  Description of Artificial Sequence:  Enzymatic Nucleic Acid
  misc_feature (31)..(31): n stands for inosine
cguucagacugaugaggccguuaggccgaanguggcca

SEQ ID NO: 14090 - RNA, 38 nt, Artificial Sequence
  Description of Artificial Sequence:  Enzymatic Nucleic Acid
  misc_feature (31)..(31): n stands for inosine
ccacguuccugaugaggccguuaggccgaanauggugg

SEQ ID NO: 14091 - RNA, 38 nt, Artificial Sequence
  Description of Artificial Sequence:  Enzymatic Nucleic Acid
  misc_feature (31)..(31): n stands for inosine
ucccagcacugaugaggccguuaggccgaanuuaacca

SEQ ID NO: 14092 - RNA, 38 nt, Artificial Sequence
  Description of Artificial Sequence:  Enzymatic Nucleic Acid
  misc_feature (31)..(31): n stands for inosine
cucccagccugaugaggccguuaggccgaanguuaacc

SEQ ID NO: 14093 - RNA, 38 nt, Artificial Sequence
  Description of Artificial Sequence:  Enzymatic Nucleic Acid
  misc_feature (31)..(31): n stands for inosine
aggcuccccugaugaggccguuaggccgaancagguua

SEQ ID NO: 14094 - RNA, 38 nt, Artificial Sequence
  Description of Artificial Sequence:  Enzymatic Nucleic Acid
  misc_feature (31)..(31): n stands for inosine
uuggugcacugaugaggccguuaggccgaancucccag

SEQ ID NO: 14095 - RNA, 38 nt, Artificial Sequence
  Description of Artificial Sequence:  Enzymatic Nucleic Acid
  misc_feature (31)..(31): n stands for inosine
cuuggugccugaugaggccguuaggccgaangcuccca

SEQ ID NO: 14096 - RNA, 38 nt, Artificial Sequence
  Description of Artificial Sequence:  Enzymatic Nucleic Acid
  misc_feature (31)..(31): n stands for inosine
uugcuuggcugaugaggccguuaggccgaancaggcuc

SEQ ID NO: 14097 - RNA, 38 nt, Artificial Sequence
  Description of Artificial Sequence:  Enzymatic Nucleic Acid
  misc_feature (31)..(31): n stands for inosine
ccuugcuucugaugaggccguuaggccgaanugcaggc

SEQ ID NO: 14098 - RNA, 38 nt, Artificial Sequence
  Description of Artificial Sequence:  Enzymatic Nucleic Acid
  misc_feature (31)..(31): n stands for inosine
uccuugcucugaugaggccguuaggccgaangugcagg

SEQ ID NO: 14099 - RNA, 38 nt, Artificial Sequence
  Description of Artificial Sequence:  Enzymatic Nucleic Acid
  misc_feature (31)..(31): n stands for inosine
gcccuccucugaugaggccguuaggccgaancuuggug

SEQ ID NO: 14100 - RNA, 38 nt, Artificial Sequence
  Description of Artificial Sequence:  Enzymatic Nucleic Acid
  misc_feature (31)..(31): n stands for inosine
ccaucagacugaugaggccguuaggccgaancccuccu

SEQ ID NO: 14101 - RNA, 38 nt, Artificial Sequence
  Description of Artificial Sequence:  Enzymatic Nucleic Acid
  misc_feature (31)..(31): n stands for inosine
accaucagcugaugaggccguuaggccgaangcccucc

SEQ ID NO: 14102 - RNA, 38 nt, Artificial Sequence
  Description of Artificial Sequence:  Enzymatic Nucleic Acid
  misc_feature (31)..(31): n stands for inosine
ucaccauccugaugaggccguuaggccgaanaggcccu

SEQ ID NO: 14103 - RNA, 38 nt, Artificial Sequence
  Description of Artificial Sequence:  Enzymatic Nucleic Acid
  misc_feature (31)..(31): n stands for inosine
auauuugccugaugaggccguuaggccgaanuauucaa

SEQ ID NO: 14104 - RNA, 38 nt, Artificial Sequence
  Description of Artificial Sequence:  Enzymatic Nucleic Acid
  misc_feature (31)..(31): n stands for inosine
uccauauucugaugaggccguuaggccgaancaguauu

SEQ ID NO: 14105 - RNA, 38 nt, Artificial Sequence
  Description of Artificial Sequence:  Enzymatic Nucleic Acid
  misc_feature (31)..(31): n stands for inosine
aguuggagcugaugaggccguuaggccgaanauuucca

SEQ ID NO: 14106 - RNA, 38 nt, Artificial Sequence
  Description of Artificial Sequence:  Enzymatic Nucleic Acid
  misc_feature (31)..(31): n stands for inosine
guaguuggcugaugaggccguuaggccgaanagauuuc

SEQ ID NO: 14107 - RNA, 38 nt, Artificial Sequence
  Description of Artificial Sequence:  Enzymatic Nucleic Acid
  misc_feature (31)..(31): n stands for inosine
agguaguucugaugaggccguuaggccgaanagagauu

SEQ ID NO: 14108 - RNA, 38 nt, Artificial Sequence
  Description of Artificial Sequence:  Enzymatic Nucleic Acid
  misc_feature (31)..(31): n stands for inosine
gagguagucugaugaggccguuaggccgaangagagau

SEQ ID NO: 14109 - RNA, 38 nt, Artificial Sequence
  Description of Artificial Sequence:  Enzymatic Nucleic Acid
  misc_feature (31)..(31): n stands for inosine
cuugaggucugaugaggccguuaggccgaanuuggaga

SEQ ID NO: 14110 - RNA, 38 nt, Artificial Sequence
  Description of Artificial Sequence:  Enzymatic Nucleic Acid
  misc_feature (31)..(31): n stands for inosine
gcucuugacugaugaggccguuaggccgaanuaguugg

SEQ ID NO: 14111 - RNA, 38 nt, Artificial Sequence
  Description of Artificial Sequence:  Enzymatic Nucleic Acid
  misc_feature (31)..(31): n stands for inosine
ugcucuugcugaugaggccguuaggccgaanguaguug

SEQ ID NO: 14112 - RNA, 38 nt, Artificial Sequence
  Description of Artificial Sequence:  Enzymatic Nucleic Acid
  misc_feature (31)..(31): n stands for inosine
uuugcucucugaugaggccguuaggccgaanagguagu

SEQ ID NO: 14113 - RNA, 38 nt, Artificial Sequence
  Description of Artificial Sequence:  Enzymatic Nucleic Acid
  misc_feature (31)..(31): n stands for inosine
gucacguucugaugaggccguuaggccgaancucuuga

SEQ ID NO: 14114 - RNA, 38 nt, Artificial Sequence
  Description of Artificial Sequence:  Enzymatic Nucleic Acid
  misc_feature (31)..(31): n stands for inosine
aaaaaauacugaugaggccguuaggccgaanucacguu

SEQ ID NO: 14115 - RNA, 38 nt, Artificial Sequence
  Description of Artificial Sequence:  Enzymatic Nucleic Acid
  misc_feature (31)..(31): n stands for inosine
ccuuguugcugaugaggccguuaggccgaanaaaaaau

SEQ ID NO: 14116 - RNA, 38 nt, Artificial Sequence
  Description of Artificial Sequence:  Enzymatic Nucleic Acid
  misc_feature (31)..(31): n stands for inosine
auccuugucugaugaggccguuaggccgaanagaaaaa

SEQ ID NO: 14117 - RNA, 38 nt, Artificial Sequence
  Description of Artificial Sequence:  Enzymatic Nucleic Acid
  misc_feature (31)..(31): n stands for inosine
ugcauccucugaugaggccguuaggccgaanuugagaa

SEQ ID NO: 14118 - RNA, 38 nt, Artificial Sequence
  Description of Artificial Sequence:  Enzymatic Nucleic Acid
  misc_feature (31)..(31): n stands for inosine
uguagugccugaugaggccguuaggccgaancauccuu

SEQ ID NO: 14119 - RNA, 38 nt, Artificial Sequence
  Description of Artificial Sequence:  Enzymatic Nucleic Acid
  misc_feature (31)..(31): n stands for inosine
auguguagcugaugaggccguuaggccgaancugcauc

SEQ ID NO: 14120 - RNA, 38 nt, Artificial Sequence
  Description of Artificial Sequence:  Enzymatic Nucleic Acid
  misc_feature (31)..(31): n stands for inosine
ccaugugucugaugaggccguuaggccgaanugcugca

SEQ ID NO: 14121 - RNA, 38 nt, Artificial Sequence
  Description of Artificial Sequence:  Enzymatic Nucleic Acid
  misc_feature (31)..(31): n stands for inosine
gcuccaugcugaugaggccguuaggccgaanuagugcu

SEQ ID NO: 14122 - RNA, 38 nt, Artificial Sequence
  Description of Artificial Sequence:  Enzymatic Nucleic Acid
  misc_feature (31)..(31): n stands for inosine
aggcuccacugaugaggccguuaggccgaanuguagug

SEQ ID NO: 14123 - RNA, 38 nt, Artificial Sequence
  Description of Artificial Sequence:  Enzymatic Nucleic Acid
  misc_feature (31)..(31): n stands for inosine
cuuucuuacugaugaggccguuaggccgaancuccaug

SEQ ID NO: 14124 - RNA, 38 nt, Artificial Sequence
  Description of Artificial Sequence:  Enzymatic Nucleic Acid
  misc_feature (31)..(31): n stands for inosine
ucuuucuucugaugaggccguuaggccgaangcuccau

SEQ ID NO: 14125 - RNA, 38 nt, Artificial Sequence
  Description of Artificial Sequence:  Enzymatic Nucleic Acid
  misc_feature (31)..(31): n stands for inosine
ccaggccucugaugaggccguuaggccgaancuccauu

SEQ ID NO: 14126 - RNA, 38 nt, Artificial Sequence
  Description of Artificial Sequence:  Enzymatic Nucleic Acid
  misc_feature (31)..(31): n stands for inosine
uccaggcccugaugaggccguuaggccgaangcuccau

SEQ ID NO: 14127 - RNA, 38 nt, Artificial Sequence
  Description of Artificial Sequence:  Enzymatic Nucleic Acid
  misc_feature (31)..(31): n stands for inosine
uuguuccacugaugaggccguuaggccgaanccuggcu

SEQ ID NO: 14128 - RNA, 38 nt, Artificial Sequence
  Description of Artificial Sequence:  Enzymatic Nucleic Acid
  misc_feature (31)..(31): n stands for inosine
cuuguucccugaugaggccguuaggccgaangccuggc

SEQ ID NO: 14129 - RNA, 38 nt, Artificial Sequence
  Description of Artificial Sequence:  Enzymatic Nucleic Acid
  misc_feature (31)..(31): n stands for inosine
ucuugccucugaugaggccguuaggccgaanuuccagg

SEQ ID NO: 14130 - RNA, 38 nt, Artificial Sequence
  Description of Artificial Sequence:  Enzymatic Nucleic Acid
  misc_feature (31)..(31): n stands for inosine
ugguuucucugaugaggccguuaggccgaanccuuguu

SEQ ID NO: 14131 - RNA, 38 nt, Artificial Sequence
  Description of Artificial Sequence:  Enzymatic Nucleic Acid
  misc_feature (31)..(31): n stands for inosine
cuagucuucugaugaggccguuaggccgaanuuucuug

SEQ ID NO: 14132 - RNA, 38 nt, Artificial Sequence
  Description of Artificial Sequence:  Enzymatic Nucleic Acid
  misc_feature (31)..(31): n stands for inosine
ucuagucucugaugaggccguuaggccgaanguuucuu

SEQ ID NO: 14133 - RNA, 38 nt, Artificial Sequence
  Description of Artificial Sequence:  Enzymatic Nucleic Acid
  misc_feature (31)..(31): n stands for inosine
cgcuaucucugaugaggccguuaggccgaanucuuggu

SEQ ID NO: 14134 - RNA, 38 nt, Artificial Sequence
  Description of Artificial Sequence:  Enzymatic Nucleic Acid
  misc_feature (31)..(31): n stands for inosine
gcugcuggcugaugaggccguuaggccgaanacgcuau

SEQ ID NO: 14135 - RNA, 38 nt, Artificial Sequence
  Description of Artificial Sequence:  Enzymatic Nucleic Acid
  misc_feature (31)..(31): n stands for inosine
ucgcugcucugaugaggccguuaggccgaanugacgcu

SEQ ID NO: 14136 - RNA, 38 nt, Artificial Sequence
  Description of Artificial Sequence:  Enzymatic Nucleic Acid
  misc_feature (31)..(31): n stands for inosine
uucgcugccugaugaggccguuaggccgaangugacgc

SEQ ID NO: 14137 - RNA, 38 nt, Artificial Sequence
  Description of Artificial Sequence:  Enzymatic Nucleic Acid
  misc_feature (31)..(31): n stands for inosine
gcuuucgccugaugaggccguuaggccgaancugguga

SEQ ID NO: 14138 - RNA, 38 nt, Artificial Sequence
  Description of Artificial Sequence:  Enzymatic Nucleic Acid
  misc_feature (31)..(31): n stands for inosine
gcucgcaacugaugaggccguuaggccgaancuuucgc

SEQ ID NO: 14139 - RNA, 38 nt, Artificial Sequence
  Description of Artificial Sequence:  Enzymatic Nucleic Acid
  misc_feature (31)..(31): n stands for inosine
aaagccggcugaugaggccguuaggccgaancucgcaa

SEQ ID NO: 14140 - RNA, 38 nt, Artificial Sequence
  Description of Artificial Sequence:  Enzymatic Nucleic Acid
  misc_feature (31)..(31): n stands for inosine
ugaaagcccugaugaggccguuaggccgaanagcucgc

SEQ ID NO: 14141 - RNA, 38 nt, Artificial Sequence
  Description of Artificial Sequence:  Enzymatic Nucleic Acid
  misc_feature (31)..(31): n stands for inosine
uuccugaacugaugaggccguuaggccgaanccggagc

SEQ ID NO: 14142 - RNA, 38 nt, Artificial Sequence
  Description of Artificial Sequence:  Enzymatic Nucleic Acid
  misc_feature (31)..(31): n stands for inosine
uaucuucccugaugaggccguuaggccgaanaaagccg

SEQ ID NO: 14143 - RNA, 38 nt, Artificial Sequence
  Description of Artificial Sequence:  Enzymatic Nucleic Acid
  misc_feature (31)..(31): n stands for inosine
caucacuccugaugaggccguuaggccgaanacuuuua

SEQ ID NO: 14144 - RNA, 38 nt, Artificial Sequence
  Description of Artificial Sequence:  Enzymatic Nucleic Acid
  misc_feature (31)..(31): n stands for inosine
aaaccguccugaugaggccguuaggccgaanaauccuc

SEQ ID NO: 14145 - RNA, 38 nt, Artificial Sequence
  Description of Artificial Sequence:  Enzymatic Nucleic Acid
  misc_feature (31)..(31): n stands for inosine
cuccuugucugaugaggccguuaggccgaanaaaccgu

SEQ ID NO: 14146 - RNA, 38 nt, Artificial Sequence
  Description of Artificial Sequence:  Enzymatic Nucleic Acid
  misc_feature (31)..(31): n stands for inosine
gggcuccucugaugaggccguuaggccgaanuagaaac

SEQ ID NO: 14147 - RNA, 38 nt, Artificial Sequence
  Description of Artificial Sequence:  Enzymatic Nucleic Acid
  misc_feature (31)..(31): n stands for inosine
uagugaugcugaugaggccguuaggccgaancuccuug

SEQ ID NO: 14148 - RNA, 38 nt, Artificial Sequence
  Description of Artificial Sequence:  Enzymatic Nucleic Acid
  misc_feature (31)..(31): n stands for inosine
auagugaucugaugaggccguuaggccgaangcuccuu

SEQ ID NO: 14149 - RNA, 38 nt, Artificial Sequence
  Description of Artificial Sequence:  Enzymatic Nucleic Acid
  misc_feature (31)..(31): n stands for inosine
cauagugacugaugaggccguuaggccgaanggcuccu

SEQ ID NO: 14150 - RNA, 38 nt, Artificial Sequence
  Description of Artificial Sequence:  Enzymatic Nucleic Acid
  misc_feature (31)..(31): n stands for inosine
uuccauagcugaugaggccguuaggccgaanaugggcu

SEQ ID NO: 14151 - RNA, 38 nt, Artificial Sequence
  Description of Artificial Sequence:  Enzymatic Nucleic Acid
  misc_feature (31)..(31): n stands for inosine
ucuuccaucugaugaggccguuaggccgaanugauggg

SEQ ID NO: 14152 - RNA, 38 nt, Artificial Sequence
  Description of Artificial Sequence:  Enzymatic Nucleic Acid
  misc_feature (31)..(31): n stands for inosine
aagaaauccugaugaggccguuaggccgaanaucuucc

SEQ ID NO: 14153 - RNA, 38 nt, Artificial Sequence
  Description of Artificial Sequence:  Enzymatic Nucleic Acid
  misc_feature (31)..(31): n stands for inosine
aaacuguacugaugaggccguuaggccgaanaaaucag

SEQ ID NO: 14154 - RNA, 38 nt, Artificial Sequence
  Description of Artificial Sequence:  Enzymatic Nucleic Acid
  misc_feature (31)..(31): n stands for inosine
uugaaaaccugaugaggccguuaggccgaanuaagaaa

SEQ ID NO: 14155 - RNA, 38 nt, Artificial Sequence
  Description of Artificial Sequence:  Enzymatic Nucleic Acid
  misc_feature (31)..(31): n stands for inosine
uggccacucugaugaggccguuaggccgaanaaaacug

SEQ ID NO: 14156 - RNA, 38 nt, Artificial Sequence
  Description of Artificial Sequence:  Enzymatic Nucleic Acid
  misc_feature (31)..(31): n stands for inosine
augccucucugaugaggccguuaggccgaanccacuug

SEQ ID NO: 14157 - RNA, 38 nt, Artificial Sequence
  Description of Artificial Sequence:  Enzymatic Nucleic Acid
  misc_feature (31)..(31): n stands for inosine
caugccuccugaugaggccguuaggccgaangccacuu

SEQ ID NO: 14158 - RNA, 38 nt, Artificial Sequence
  Description of Artificial Sequence:  Enzymatic Nucleic Acid
  misc_feature (31)..(31): n stands for inosine
gaacuccacugaugaggccguuaggccgaanccucugg

SEQ ID NO: 14159 - RNA, 38 nt, Artificial Sequence
  Description of Artificial Sequence:  Enzymatic Nucleic Acid
  misc_feature (31)..(31): n stands for inosine
ggaagacacugaugaggccguuaggccgaanaacucca

SEQ ID NO: 14160 - RNA, 38 nt, Artificial Sequence
  Description of Artificial Sequence:  Enzymatic Nucleic Acid
  misc_feature (31)..(31): n stands for inosine
uggaagaccugaugaggccguuaggccgaangaacucc

SEQ ID NO: 14161 - RNA, 38 nt, Artificial Sequence
  Description of Artificial Sequence:  Enzymatic Nucleic Acid
  misc_feature (31)..(31): n stands for inosine
uuucuggacugaugaggccguuaggccgaanacaggaa

SEQ ID NO: 14162 - RNA, 38 nt, Artificial Sequence
  Description of Artificial Sequence:  Enzymatic Nucleic Acid
  misc_feature (31)..(31): n stands for inosine
cacuuucucugaugaggccguuaggccgaanaagacag

SEQ ID NO: 14163 - RNA, 38 nt, Artificial Sequence
  Description of Artificial Sequence:  Enzymatic Nucleic Acid
  misc_feature (31)..(31): n stands for inosine
gcacuuuccugaugaggccguuaggccgaangaagaca

SEQ ID NO: 14164 - RNA, 38 nt, Artificial Sequence
  Description of Artificial Sequence:  Enzymatic Nucleic Acid
  misc_feature (31)..(31): n stands for inosine
ccgaugaacugaugaggccguuaggccgaancacuuuc

SEQ ID NO: 14165 - RNA, 38 nt, Artificial Sequence
  Description of Artificial Sequence:  Enzymatic Nucleic Acid
  misc_feature (31)..(31): n stands for inosine
ggucccgacugaugaggccguuaggccgaanaaugcac

SEQ ID NO: 14166 - RNA, 38 nt, Artificial Sequence
  Description of Artificial Sequence:  Enzymatic Nucleic Acid
  misc_feature (31)..(31): n stands for inosine
cgcugccacugaugaggccguuaggccgaanucccgau

SEQ ID NO: 14167 - RNA, 38 nt, Artificial Sequence
  Description of Artificial Sequence:  Enzymatic Nucleic Acid
  misc_feature (31)..(31): n stands for inosine
ucgcugcccugaugaggccguuaggccgaangucccga

SEQ ID NO: 14168 - RNA, 38 nt, Artificial Sequence
  Description of Artificial Sequence:  Enzymatic Nucleic Acid
  misc_feature (31)..(31): n stands for inosine
uuucucgccugaugaggccguuaggccgaanccagguc

SEQ ID NO: 14169 - RNA, 38 nt, Artificial Sequence
  Description of Artificial Sequence:  Enzymatic Nucleic Acid
  misc_feature (31)..(31): n stands for inosine
uaaaagaacugaugaggccguuaggccgaanuuucucg

SEQ ID NO: 14170 - RNA, 38 nt, Artificial Sequence
  Description of Artificial Sequence:  Enzymatic Nucleic Acid
  misc_feature (31)..(31): n stands for inosine
cagauaaacugaugaggccguuaggccgaanaauguuu

SEQ ID NO: 14171 - RNA, 38 nt, Artificial Sequence
  Description of Artificial Sequence:  Enzymatic Nucleic Acid
  misc_feature (31)..(31): n stands for inosine
uuguucuccugaugaggccguuaggccgaanauaaaag

SEQ ID NO: 14172 - RNA, 38 nt, Artificial Sequence
  Description of Artificial Sequence:  Enzymatic Nucleic Acid
  misc_feature (31)..(31): n stands for inosine
caccacgucugaugaggccguuaggccgaanuucucag

SEQ ID NO: 14173 - RNA, 38 nt, Artificial Sequence
  Description of Artificial Sequence:  Enzymatic Nucleic Acid
  misc_feature (31)..(31): n stands for inosine
ccgggcaacugaugaggccguuaggccgaanccaaaau

SEQ ID NO: 14174 - RNA, 38 nt, Artificial Sequence
  Description of Artificial Sequence:  Enzymatic Nucleic Acid
  misc_feature (31)..(31): n stands for inosine
cccgggcacugaugaggccguuaggccgaangccaaaa

SEQ ID NO: 14175 - RNA, 38 nt, Artificial Sequence
  Description of Artificial Sequence:  Enzymatic Nucleic Acid
  misc_feature (31)..(31): n stands for inosine
auaucccgcugaugaggccguuaggccgaancaaggcc

SEQ ID NO: 14176 - RNA, 38 nt, Artificial Sequence
  Description of Artificial Sequence:  Enzymatic Nucleic Acid
  misc_feature (31)..(31): n stands for inosine
aauauccccugaugaggccguuaggccgaangcaaggc

SEQ ID NO: 14177 - RNA, 38 nt, Artificial Sequence
  Description of Artificial Sequence:  Enzymatic Nucleic Acid
  misc_feature (31)..(31): n stands for inosine
auaaucggcugaugaggccguuaggccgaanuucuuau

SEQ ID NO: 14178 - RNA, 38 nt, Artificial Sequence
  Description of Artificial Sequence:  Enzymatic Nucleic Acid
  misc_feature (31)..(31): n stands for inosine
cauaaucgcugaugaggccguuaggccgaanguucuua

SEQ ID NO: 14179 - RNA, 38 nt, Artificial Sequence
  Description of Artificial Sequence:  Enzymatic Nucleic Acid
  misc_feature (31)..(31): n stands for inosine
acauaauccugaugaggccguuaggccgaangguucuu

SEQ ID NO: 14180 - RNA, 38 nt, Artificial Sequence
  Description of Artificial Sequence:  Enzymatic Nucleic Acid
  misc_feature (31)..(31): n stands for inosine
ggaagucgcugaugaggccguuaggccgaanuaucucc

SEQ ID NO: 14181 - RNA, 38 nt, Artificial Sequence
  Description of Artificial Sequence:  Enzymatic Nucleic Acid
  misc_feature (31)..(31): n stands for inosine
ucagaggacugaugaggccguuaggccgaanucgagua

SEQ ID NO: 14182 - RNA, 38 nt, Artificial Sequence
  Description of Artificial Sequence:  Enzymatic Nucleic Acid
  misc_feature (31)..(31): n stands for inosine
auuucagacugaugaggccguuaggccgaanaagucga

SEQ ID NO: 14183 - RNA, 38 nt, Artificial Sequence
  Description of Artificial Sequence:  Enzymatic Nucleic Acid
  misc_feature (31)..(31): n stands for inosine
cauuucagcugaugaggccguuaggccgaangaagucg

SEQ ID NO: 14184 - RNA, 38 nt, Artificial Sequence
  Description of Artificial Sequence:  Enzymatic Nucleic Acid
  misc_feature (31)..(31): n stands for inosine
uccauuuccugaugaggccguuaggccgaanaggaagu

SEQ ID NO: 14185 - RNA, 38 nt, Artificial Sequence
  Description of Artificial Sequence:  Enzymatic Nucleic Acid
  misc_feature (31)..(31): n stands for inosine
gauucgggcugaugaggccguuaggccgaanccaucca

SEQ ID NO: 14186 - RNA, 38 nt, Artificial Sequence
  Description of Artificial Sequence:  Enzymatic Nucleic Acid
  misc_feature (31)..(31): n stands for inosine
uagauucgcugaugaggccguuaggccgaanagccauc

SEQ ID NO: 14187 - RNA, 38 nt, Artificial Sequence
  Description of Artificial Sequence:  Enzymatic Nucleic Acid
  misc_feature (31)..(31): n stands for inosine
auagauuccugaugaggccguuaggccgaangagccau

SEQ ID NO: 14188 - RNA, 38 nt, Artificial Sequence
  Description of Artificial Sequence:  Enzymatic Nucleic Acid
  misc_feature (31)..(31): n stands for inosine
ucaaagaucugaugaggccguuaggccgaanauucggg

SEQ ID NO: 14189 - RNA, 38 nt, Artificial Sequence
  Description of Artificial Sequence:  Enzymatic Nucleic Acid
  misc_feature (31)..(31): n stands for inosine
uuugucaacugaugaggccguuaggccgaanauagauu

SEQ ID NO: 14190 - RNA, 38 nt, Artificial Sequence
  Description of Artificial Sequence:  Enzymatic Nucleic Acid
  misc_feature (31)..(31): n stands for inosine
guagauuucugaugaggccguuaggccgaanucaaaga

SEQ ID NO: 14191 - RNA, 38 nt, Artificial Sequence
  Description of Artificial Sequence:  Enzymatic Nucleic Acid
  misc_feature (31)..(31): n stands for inosine
ggugcugucugaugaggccguuaggccgaanauuuugu

SEQ ID NO: 14192 - RNA, 38 nt, Artificial Sequence
  Description of Artificial Sequence:  Enzymatic Nucleic Acid
  misc_feature (31)..(31): n stands for inosine
cuuggugccugaugaggccguuaggccgaanuagauuu

SEQ ID NO: 14193 - RNA, 38 nt, Artificial Sequence
  Description of Artificial Sequence:  Enzymatic Nucleic Acid
  misc_feature (31)..(31): n stands for inosine
gcucuuggcugaugaggccguuaggccgaancuguaga

SEQ ID NO: 14194 - RNA, 38 nt, Artificial Sequence
  Description of Artificial Sequence:  Enzymatic Nucleic Acid
  misc_feature (31)..(31): n stands for inosine
ucgcucuucugaugaggccguuaggccgaanugcugua

SEQ ID NO: 14195 - RNA, 38 nt, Artificial Sequence
  Description of Artificial Sequence:  Enzymatic Nucleic Acid
  misc_feature (31)..(31): n stands for inosine
gucgcucucugaugaggccguuaggccgaangugcugu

SEQ ID NO: 14196 - RNA, 38 nt, Artificial Sequence
  Description of Artificial Sequence:  Enzymatic Nucleic Acid
  misc_feature (31)..(31): n stands for inosine
acuccguacugaugaggccguuaggccgaanaccacac

SEQ ID NO: 14197 - RNA, 38 nt, Artificial Sequence
  Description of Artificial Sequence:  Enzymatic Nucleic Acid
  misc_feature (31)..(31): n stands for inosine
uuucccaccugaugaggccguuaggccgaancaauacu

SEQ ID NO: 14198 - RNA, 38 nt, Artificial Sequence
  Description of Artificial Sequence:  Enzymatic Nucleic Acid
  misc_feature (31)..(31): n stands for inosine
uaaggagacugaugaggccguuaggccgaanauuuccc

SEQ ID NO: 14199 - RNA, 38 nt, Artificial Sequence
  Description of Artificial Sequence:  Enzymatic Nucleic Acid
  misc_feature (31)..(31): n stands for inosine
accuaaggcugaugaggccguuaggccgaanaagauuu

SEQ ID NO: 14200 - RNA, 38 nt, Artificial Sequence
  Description of Artificial Sequence:  Enzymatic Nucleic Acid
  misc_feature (31)..(31): n stands for inosine
ccaccuaacugaugaggccguuaggccgaanagaagau

SEQ ID NO: 14201 - RNA, 38 nt, Artificial Sequence
  Description of Artificial Sequence:  Enzymatic Nucleic Acid
  misc_feature (31)..(31): n stands for inosine
cccaccuacugaugaggccguuaggccgaangagaaga

SEQ ID NO: 14202 - RNA, 38 nt, Artificial Sequence
  Description of Artificial Sequence:  Enzymatic Nucleic Acid
  misc_feature (31)..(31): n stands for inosine
ggguauggcugaugaggccguuaggccgaanacccacc

SEQ ID NO: 14203 - RNA, 38 nt, Artificial Sequence
  Description of Artificial Sequence:  Enzymatic Nucleic Acid
  misc_feature (31)..(31): n stands for inosine
cuggguaucugaugaggccguuaggccgaanagaccca

SEQ ID NO: 14204 - RNA, 38 nt, Artificial Sequence
  Description of Artificial Sequence:  Enzymatic Nucleic Acid
  misc_feature (31)..(31): n stands for inosine
ccuggguacugaugaggccguuaggccgaangagaccc

SEQ ID NO: 14205 - RNA, 38 nt, Artificial Sequence
  Description of Artificial Sequence:  Enzymatic Nucleic Acid
  misc_feature (31)..(31): n stands for inosine
uacuccugcugaugaggccguuaggccgaanuauggag

SEQ ID NO: 14206 - RNA, 38 nt, Artificial Sequence
  Description of Artificial Sequence:  Enzymatic Nucleic Acid
  misc_feature (31)..(31): n stands for inosine
guacuccucugaugaggccguuaggccgaanguaugga

SEQ ID NO: 14207 - RNA, 38 nt, Artificial Sequence
  Description of Artificial Sequence:  Enzymatic Nucleic Acid
  misc_feature (31)..(31): n stands for inosine
uguacucccugaugaggccguuaggccgaangguaugg

SEQ ID NO: 14208 - RNA, 38 nt, Artificial Sequence
  Description of Artificial Sequence:  Enzymatic Nucleic Acid
  misc_feature (31)..(31): n stands for inosine
cauccauucugaugaggccguuaggccgaanuacuccu

SEQ ID NO: 14209 - RNA, 38 nt, Artificial Sequence
  Description of Artificial Sequence:  Enzymatic Nucleic Acid
  misc_feature (31)..(31): n stands for inosine
acugcaaacugaugaggccguuaggccgaanuccucau

SEQ ID NO: 14210 - RNA, 38 nt, Artificial Sequence
  Description of Artificial Sequence:  Enzymatic Nucleic Acid
  misc_feature (31)..(31): n stands for inosine
caggcgaccugaugaggccguuaggccgaancaaaagu

SEQ ID NO: 14211 - RNA, 38 nt, Artificial Sequence
  Description of Artificial Sequence:  Enzymatic Nucleic Acid
  misc_feature (31)..(31): n stands for inosine
uucccucacugaugaggccguuaggccgaancgacugc

SEQ ID NO: 14212 - RNA, 38 nt, Artificial Sequence
  Description of Artificial Sequence:  Enzymatic Nucleic Acid
  misc_feature (31)..(31): n stands for inosine
cuucccuccugaugaggccguuaggccgaangcgacug

SEQ ID NO: 14213 - RNA, 38 nt, Artificial Sequence
  Description of Artificial Sequence:  Enzymatic Nucleic Acid
  misc_feature (31)..(31): n stands for inosine
cauccucacugaugaggccguuaggccgaanccuuccc

SEQ ID NO: 14214 - RNA, 38 nt, Artificial Sequence
  Description of Artificial Sequence:  Enzymatic Nucleic Acid
  misc_feature (31)..(31): n stands for inosine
uacucaggcugaugaggccguuaggccgaancucucau

SEQ ID NO: 14215 - RNA, 38 nt, Artificial Sequence
  Description of Artificial Sequence:  Enzymatic Nucleic Acid
  misc_feature (31)..(31): n stands for inosine
aguacucacugaugaggccguuaggccgaanagcucuc

SEQ ID NO: 14216 - RNA, 38 nt, Artificial Sequence
  Description of Artificial Sequence:  Enzymatic Nucleic Acid
  misc_feature (31)..(31): n stands for inosine
gaguacuccugaugaggccguuaggccgaangagcucu

SEQ ID NO: 14217 - RNA, 38 nt, Artificial Sequence
  Description of Artificial Sequence:  Enzymatic Nucleic Acid
  misc_feature (31)..(31): n stands for inosine
aggaguagcugaugaggccguuaggccgaanuacucag

SEQ ID NO: 14218 - RNA, 38 nt, Artificial Sequence
  Description of Artificial Sequence:  Enzymatic Nucleic Acid
  misc_feature (31)..(31): n stands for inosine
ucaggagucugaugaggccguuaggccgaanaguacuc

SEQ ID NO: 14219 - RNA, 38 nt, Artificial Sequence
  Description of Artificial Sequence:  Enzymatic Nucleic Acid
  misc_feature (31)..(31): n stands for inosine
auuucaggcugaugaggccguuaggccgaanuagagua

SEQ ID NO: 14220 - RNA, 38 nt, Artificial Sequence
  Description of Artificial Sequence:  Enzymatic Nucleic Acid
  misc_feature (31)..(31): n stands for inosine
agauuucacugaugaggccguuaggccgaanaguagag

SEQ ID NO: 14221 - RNA, 38 nt, Artificial Sequence
  Description of Artificial Sequence:  Enzymatic Nucleic Acid
  misc_feature (31)..(31): n stands for inosine
uagauuuccugaugaggccguuaggccgaangaguaga

SEQ ID NO: 14222 - RNA, 38 nt, Artificial Sequence
  Description of Artificial Sequence:  Enzymatic Nucleic Acid
  misc_feature (31)..(31): n stands for inosine
gaucugaucugaugaggccguuaggccgaanauuucag

SEQ ID NO: 14223 - RNA, 38 nt, Artificial Sequence
  Description of Artificial Sequence:  Enzymatic Nucleic Acid
  misc_feature (31)..(31): n stands for inosine
gcaugauccugaugaggccguuaggccgaanauagauu

SEQ ID NO: 14224 - RNA, 38 nt, Artificial Sequence
  Description of Artificial Sequence:  Enzymatic Nucleic Acid
  misc_feature (31)..(31): n stands for inosine
guccagcacugaugaggccguuaggccgaanaucugau

SEQ ID NO: 14225 - RNA, 38 nt, Artificial Sequence
  Description of Artificial Sequence:  Enzymatic Nucleic Acid
  misc_feature (31)..(31): n stands for inosine
agcagucccugaugaggccguuaggccgaancaugauc

SEQ ID NO: 14226 - RNA, 38 nt, Artificial Sequence
  Description of Artificial Sequence:  Enzymatic Nucleic Acid
  misc_feature (31)..(31): n stands for inosine
gugccagccugaugaggccguuaggccgaanuccagca

SEQ ID NO: 14227 - RNA, 38 nt, Artificial Sequence
  Description of Artificial Sequence:  Enzymatic Nucleic Acid
  misc_feature (31)..(31): n stands for inosine
ucugugcccugaugaggccguuaggccgaancagucca

SEQ ID NO: 14228 - RNA, 38 nt, Artificial Sequence
  Description of Artificial Sequence:  Enzymatic Nucleic Acid
  misc_feature (31)..(31): n stands for inosine
ggucucugcugaugaggccguuaggccgaanccagcag

SEQ ID NO: 14229 - RNA, 38 nt, Artificial Sequence
  Description of Artificial Sequence:  Enzymatic Nucleic Acid
  misc_feature (31)..(31): n stands for inosine
ugggucuccugaugaggccguuaggccgaanugccagc

SEQ ID NO: 14230 - RNA, 38 nt, Artificial Sequence
  Description of Artificial Sequence:  Enzymatic Nucleic Acid
  misc_feature (31)..(31): n stands for inosine
uucuuuugcugaugaggccguuaggccgaanucucugu

SEQ ID NO: 14231 - RNA, 38 nt, Artificial Sequence
  Description of Artificial Sequence:  Enzymatic Nucleic Acid
  misc_feature (31)..(31): n stands for inosine
uuucuuuucugaugaggccguuaggccgaangucucug

SEQ ID NO: 14232 - RNA, 38 nt, Artificial Sequence
  Description of Artificial Sequence:  Enzymatic Nucleic Acid
  misc_feature (31)..(31): n stands for inosine
cuuucuuucugaugaggccguuaggccgaanggucucu

SEQ ID NO: 14233 - RNA, 38 nt, Artificial Sequence
  Description of Artificial Sequence:  Enzymatic Nucleic Acid
  misc_feature (31)..(31): n stands for inosine
caaaucuucugaugaggccguuaggccgaanccuuucu

SEQ ID NO: 14234 - RNA, 38 nt, Artificial Sequence
  Description of Artificial Sequence:  Enzymatic Nucleic Acid
  misc_feature (31)..(31): n stands for inosine
gcaaaucucugaugaggccguuaggccgaangccuuuc

SEQ ID NO: 14235 - RNA, 38 nt, Artificial Sequence
  Description of Artificial Sequence:  Enzymatic Nucleic Acid
  misc_feature (31)..(31): n stands for inosine
acaaguuccugaugaggccguuaggccgaancaaaucu

SEQ ID NO: 14236 - RNA, 38 nt, Artificial Sequence
  Description of Artificial Sequence:  Enzymatic Nucleic Acid
  misc_feature (31)..(31): n stands for inosine
uuuccacacugaugaggccguuaggccgaanuucugca

SEQ ID NO: 14237 - RNA, 38 nt, Artificial Sequence
  Description of Artificial Sequence:  Enzymatic Nucleic Acid
  misc_feature (31)..(31): n stands for inosine
aaucaccucugaugaggccguuaggccgaanuuuuucc

SEQ ID NO: 14238 - RNA, 38 nt, Artificial Sequence
  Description of Artificial Sequence:  Enzymatic Nucleic Acid
  misc_feature (31)..(31): n stands for inosine
uugcuugacugaugaggccguuaggccgaancaaauca

SEQ ID NO: 14239 - RNA, 38 nt, Artificial Sequence
  Description of Artificial Sequence:  Enzymatic Nucleic Acid
  misc_feature (31)..(31): n stands for inosine
cauuugcucugaugaggccguuaggccgaanaagcaaa

SEQ ID NO: 14240 - RNA, 38 nt, Artificial Sequence
  Description of Artificial Sequence:  Enzymatic Nucleic Acid
  misc_feature (31)..(31): n stands for inosine
uguacauucugaugaggccguuaggccgaancuugaag

SEQ ID NO: 14241 - RNA, 38 nt, Artificial Sequence
  Description of Artificial Sequence:  Enzymatic Nucleic Acid
  misc_feature (31)..(31): n stands for inosine
cauccugucugaugaggccguuaggccgaanuacauuu

SEQ ID NO: 14242 - RNA, 38 nt, Artificial Sequence
  Description of Artificial Sequence:  Enzymatic Nucleic Acid
  misc_feature (31)..(31): n stands for inosine
uaccaucccugaugaggccguuaggccgaanuuguaca

SEQ ID NO: 14243 - RNA, 38 nt, Artificial Sequence
  Description of Artificial Sequence:  Enzymatic Nucleic Acid
  misc_feature (31)..(31): n stands for inosine
ugggaugucugaugaggccguuaggccgaanucuuuac

SEQ ID NO: 14244 - RNA, 38 nt, Artificial Sequence
  Description of Artificial Sequence:  Enzymatic Nucleic Acid
  misc_feature (31)..(31): n stands for inosine
gauugggacugaugaggccguuaggccgaanuagucuu

SEQ ID NO: 14245 - RNA, 38 nt, Artificial Sequence
  Description of Artificial Sequence:  Enzymatic Nucleic Acid
  misc_feature (31)..(31): n stands for inosine
auugauugcugaugaggccguuaggccgaanauguagu

SEQ ID NO: 14246 - RNA, 38 nt, Artificial Sequence
  Description of Artificial Sequence:  Enzymatic Nucleic Acid
  misc_feature (31)..(31): n stands for inosine
cauugauucugaugaggccguuaggccgaangauguag

SEQ ID NO: 14247 - RNA, 38 nt, Artificial Sequence
  Description of Artificial Sequence:  Enzymatic Nucleic Acid
  misc_feature (31)..(31): n stands for inosine
gcauugaucugaugaggccguuaggccgaanggaugua

SEQ ID NO: 14248 - RNA, 38 nt, Artificial Sequence
  Description of Artificial Sequence:  Enzymatic Nucleic Acid
  misc_feature (31)..(31): n stands for inosine
uauggcaucugaugaggccguuaggccgaanauuggga

SEQ ID NO: 14249 - RNA, 38 nt, Artificial Sequence
  Description of Artificial Sequence:  Enzymatic Nucleic Acid
  misc_feature (31)..(31): n stands for inosine
gucaguaucugaugaggccguuaggccgaancauugau

SEQ ID NO: 14250 - RNA, 38 nt, Artificial Sequence
  Description of Artificial Sequence:  Enzymatic Nucleic Acid
  misc_feature (31)..(31): n stands for inosine
ugucaguacugaugaggccguuaggccgaangcauuga

SEQ ID NO: 14251 - RNA, 38 nt, Artificial Sequence
  Description of Artificial Sequence:  Enzymatic Nucleic Acid
  misc_feature (31)..(31): n stands for inosine
uuccuguccugaugaggccguuaggccgaanuauggca

SEQ ID NO: 14252 - RNA, 38 nt, Artificial Sequence
  Description of Artificial Sequence:  Enzymatic Nucleic Acid
  misc_feature (31)..(31): n stands for inosine
cuauuucccugaugaggccguuaggccgaanucaguau

SEQ ID NO: 14253 - RNA, 38 nt, Artificial Sequence
  Description of Artificial Sequence:  Enzymatic Nucleic Acid
  misc_feature (31)..(31): n stands for inosine
guugaguacugaugaggccguuaggccgaanuaaaccc

SEQ ID NO: 14254 - RNA, 38 nt, Artificial Sequence
  Description of Artificial Sequence:  Enzymatic Nucleic Acid
  misc_feature (31)..(31): n stands for inosine
aggaguugcugaugaggccguuaggccgaanuauguaa

SEQ ID NO: 14255 - RNA, 38 nt, Artificial Sequence
  Description of Artificial Sequence:  Enzymatic Nucleic Acid
  misc_feature (31)..(31): n stands for inosine
gcaggagucugaugaggccguuaggccgaanaguaugu

SEQ ID NO: 14256 - RNA, 38 nt, Artificial Sequence
  Description of Artificial Sequence:  Enzymatic Nucleic Acid
  misc_feature (31)..(31): n stands for inosine
aaggcaggcugaugaggccguuaggccgaanuugagua

SEQ ID NO: 14257 - RNA, 38 nt, Artificial Sequence
  Description of Artificial Sequence:  Enzymatic Nucleic Acid
  misc_feature (31)..(31): n stands for inosine
agaaggcacugaugaggccguuaggccgaanaguugag

SEQ ID NO: 14258 - RNA, 38 nt, Artificial Sequence
  Description of Artificial Sequence:  Enzymatic Nucleic Acid
  misc_feature (31)..(31): n stands for inosine
gagaaggccugaugaggccguuaggccgaangaguuga

SEQ ID NO: 14259 - RNA, 38 nt, Artificial Sequence
  Description of Artificial Sequence:  Enzymatic Nucleic Acid
  misc_feature (31)..(31): n stands for inosine
ucagagaacugaugaggccguuaggccgaancaggagu

SEQ ID NO: 14260 - RNA, 38 nt, Artificial Sequence
  Description of Artificial Sequence:  Enzymatic Nucleic Acid
  misc_feature (31)..(31): n stands for inosine
cucagagacugaugaggccguuaggccgaangcaggag

SEQ ID NO: 14261 - RNA, 38 nt, Artificial Sequence
  Description of Artificial Sequence:  Enzymatic Nucleic Acid
  misc_feature (31)..(31): n stands for inosine
guccucagcugaugaggccguuaggccgaanaaggcag

SEQ ID NO: 14262 - RNA, 38 nt, Artificial Sequence
  Description of Artificial Sequence:  Enzymatic Nucleic Acid
  misc_feature (31)..(31): n stands for inosine
aaguccuccugaugaggccguuaggccgaanagaaggc

SEQ ID NO: 14263 - RNA, 38 nt, Artificial Sequence
  Description of Artificial Sequence:  Enzymatic Nucleic Acid
  misc_feature (31)..(31): n stands for inosine
cuugaagacugaugaggccguuaggccgaanuccucag

SEQ ID NO: 14264 - RNA, 38 nt, Artificial Sequence
  Description of Artificial Sequence:  Enzymatic Nucleic Acid
  misc_feature (31)..(31): n stands for inosine
uuccuugacugaugaggccguuaggccgaanaaguccu

SEQ ID NO: 14265 - RNA, 38 nt, Artificial Sequence
  Description of Artificial Sequence:  Enzymatic Nucleic Acid
  misc_feature (31)..(31): n stands for inosine
acuuuccucugaugaggccguuaggccgaanaagaagu

SEQ ID NO: 14266 - RNA, 38 nt, Artificial Sequence
  Description of Artificial Sequence:  Enzymatic Nucleic Acid
  misc_feature (31)..(31): n stands for inosine
uucggagccugaugaggccguuaggccgaanaaauacu

SEQ ID NO: 14267 - RNA, 38 nt, Artificial Sequence
  Description of Artificial Sequence:  Enzymatic Nucleic Acid
  misc_feature (31)..(31): n stands for inosine
aacuucggcugaugaggccguuaggccgaancugaaau

SEQ ID NO: 14268 - RNA, 38 nt, Artificial Sequence
  Description of Artificial Sequence:  Enzymatic Nucleic Acid
  misc_feature (31)..(31): n stands for inosine
uaaacuuccugaugaggccguuaggccgaanagcugaa

SEQ ID NO: 14269 - RNA, 38 nt, Artificial Sequence
  Description of Artificial Sequence:  Enzymatic Nucleic Acid
  misc_feature (31)..(31): n stands for inosine
gagcuucccugaugaggccguuaggccgaanaauuaaa

SEQ ID NO: 14270 - RNA, 38 nt, Artificial Sequence
  Description of Artificial Sequence:  Enzymatic Nucleic Acid
  misc_feature (31)..(31): n stands for inosine
aucaucagcugaugaggccguuaggccgaancuuccug

SEQ ID NO: 14271 - RNA, 38 nt, Artificial Sequence
  Description of Artificial Sequence:  Enzymatic Nucleic Acid
  misc_feature (31)..(31): n stands for inosine
acaucauccugaugaggccguuaggccgaanagcuucc

SEQ ID NO: 14272 - RNA, 38 nt, Artificial Sequence
  Description of Artificial Sequence:  Enzymatic Nucleic Acid
  misc_feature (31)..(31): n stands for inosine
uacauauccugaugaggccguuaggccgaanacaucau

SEQ ID NO: 14273 - RNA, 38 nt, Artificial Sequence
  Description of Artificial Sequence:  Enzymatic Nucleic Acid
  misc_feature (31)..(31): n stands for inosine
aacuugaacugaugaggccguuaggccgaancauuuac

SEQ ID NO: 14274 - RNA, 38 nt, Artificial Sequence
  Description of Artificial Sequence:  Enzymatic Nucleic Acid
  misc_feature (31)..(31): n stands for inosine
caugaacucugaugaggccguuaggccgaanaaagcau

SEQ ID NO: 14275 - RNA, 38 nt, Artificial Sequence
  Description of Artificial Sequence:  Enzymatic Nucleic Acid
  misc_feature (31)..(31): n stands for inosine
caggcucacugaugaggccguuaggccgaanaacuuga

SEQ ID NO: 14276 - RNA, 38 nt, Artificial Sequence
  Description of Artificial Sequence:  Enzymatic Nucleic Acid
  misc_feature (31)..(31): n stands for inosine
ucuuuccacugaugaggccguuaggccgaancucauga

SEQ ID NO: 14277 - RNA, 38 nt, Artificial Sequence
  Description of Artificial Sequence:  Enzymatic Nucleic Acid
  misc_feature (31)..(31): n stands for inosine
uucuuucccugaugaggccguuaggccgaangcucaug

SEQ ID NO: 14278 - RNA, 38 nt, Artificial Sequence
  Description of Artificial Sequence:  Enzymatic Nucleic Acid
  misc_feature (31)..(31): n stands for inosine
aaagguuucugaugaggccguuaggccgaanauucuuu

SEQ ID NO: 14279 - RNA, 38 nt, Artificial Sequence
  Description of Artificial Sequence:  Enzymatic Nucleic Acid
  misc_feature (31)..(31): n stands for inosine
ucuucaaacugaugaggccguuaggccgaanuuuugau

SEQ ID NO: 14280 - RNA, 38 nt, Artificial Sequence
  Description of Artificial Sequence:  Enzymatic Nucleic Acid
  misc_feature (31)..(31): n stands for inosine
uucuucaacugaugaggccguuaggccgaanguuuuga

SEQ ID NO: 14281 - RNA, 38 nt, Artificial Sequence
  Description of Artificial Sequence:  Enzymatic Nucleic Acid
  misc_feature (31)..(31): n stands for inosine
ucgguaaacugaugaggccguuaggccgaanuucuuca

SEQ ID NO: 14282 - RNA, 38 nt, Artificial Sequence
  Description of Artificial Sequence:  Enzymatic Nucleic Acid
  misc_feature (31)..(31): n stands for inosine
uggcauuccugaugaggccguuaggccgaanuaaaagu

SEQ ID NO: 14283 - RNA, 38 nt, Artificial Sequence
  Description of Artificial Sequence:  Enzymatic Nucleic Acid
  misc_feature (31)..(31): n stands for inosine
auggaggucugaugaggccguuaggccgaancauucgg

SEQ ID NO: 14284 - RNA, 38 nt, Artificial Sequence
  Description of Artificial Sequence:  Enzymatic Nucleic Acid
  misc_feature (31)..(31): n stands for inosine
cauggaggcugaugaggccguuaggccgaangcauucg

SEQ ID NO: 14285 - RNA, 38 nt, Artificial Sequence
  Description of Artificial Sequence:  Enzymatic Nucleic Acid
  misc_feature (31)..(31): n stands for inosine
aacauggacugaugaggccguuaggccgaanuggcauu

SEQ ID NO: 14286 - RNA, 38 nt, Artificial Sequence
  Description of Artificial Sequence:  Enzymatic Nucleic Acid
  misc_feature (31)..(31): n stands for inosine
aaacauggcugaugaggccguuaggccgaanguggcau

SEQ ID NO: 14287 - RNA, 38 nt, Artificial Sequence
  Description of Artificial Sequence:  Enzymatic Nucleic Acid
  misc_feature (31)..(31): n stands for inosine
ucaaacaucugaugaggccguuaggccgaanagguggc

SEQ ID NO: 14288 - RNA, 38 nt, Artificial Sequence
  Description of Artificial Sequence:  Enzymatic Nucleic Acid
  misc_feature (31)..(31): n stands for inosine
aucaaacacugaugaggccguuaggccgaangaggugg

SEQ ID NO: 14289 - RNA, 38 nt, Artificial Sequence
  Description of Artificial Sequence:  Enzymatic Nucleic Acid
  misc_feature (31)..(31): n stands for inosine
gcccuggucugaugaggccguuaggccgaanucaucaa

SEQ ID NO: 14290 - RNA, 38 nt, Artificial Sequence
  Description of Artificial Sequence:  Enzymatic Nucleic Acid
  misc_feature (31)..(31): n stands for inosine
gucgcccucugaugaggccguuaggccgaanuagucau

SEQ ID NO: 14291 - RNA, 38 nt, Artificial Sequence
  Description of Artificial Sequence:  Enzymatic Nucleic Acid
  misc_feature (31)..(31): n stands for inosine
ugucgccccugaugaggccguuaggccgaanguaguca

SEQ ID NO: 14292 - RNA, 38 nt, Artificial Sequence
  Description of Artificial Sequence:  Enzymatic Nucleic Acid
  misc_feature (31)..(31): n stands for inosine
agugcugccugaugaggccguuaggccgaanucgcccu

SEQ ID NO: 14293 - RNA, 38 nt, Artificial Sequence
  Description of Artificial Sequence:  Enzymatic Nucleic Acid
  misc_feature (31)..(31): n stands for inosine
cagagugccugaugaggccguuaggccgaancugucgc

SEQ ID NO: 14294 - RNA, 38 nt, Artificial Sequence
  Description of Artificial Sequence:  Enzymatic Nucleic Acid
  misc_feature (31)..(31): n stands for inosine
caacagagcugaugaggccguuaggccgaancugcugu

SEQ ID NO: 14295 - RNA, 38 nt, Artificial Sequence
  Description of Artificial Sequence:  Enzymatic Nucleic Acid
  misc_feature (31)..(31): n stands for inosine
gccaacagcugaugaggccguuaggccgaanugcugcu

SEQ ID NO: 14296 - RNA, 38 nt, Artificial Sequence
  Description of Artificial Sequence:  Enzymatic Nucleic Acid
  misc_feature (31)..(31): n stands for inosine
aggccaaccugaugaggccguuaggccgaanagugcug

SEQ ID NO: 14297 - RNA, 38 nt, Artificial Sequence
  Description of Artificial Sequence:  Enzymatic Nucleic Acid
  misc_feature (31)..(31): n stands for inosine
augggagacugaugaggccguuaggccgaanccaacag

SEQ ID NO: 14298 - RNA, 38 nt, Artificial Sequence
  Description of Artificial Sequence:  Enzymatic Nucleic Acid
  misc_feature (31)..(31): n stands for inosine
caugggagcugaugaggccguuaggccgaangccaaca

SEQ ID NO: 14299 - RNA, 38 nt, Artificial Sequence
  Description of Artificial Sequence:  Enzymatic Nucleic Acid
  misc_feature (31)..(31): n stands for inosine
agcaugggcugaugaggccguuaggccgaanaggccaa

SEQ ID NO: 14300 - RNA, 38 nt, Artificial Sequence
  Description of Artificial Sequence:  Enzymatic Nucleic Acid
  misc_feature (31)..(31): n stands for inosine
ucagcaugcugaugaggccguuaggccgaanagaggcc

SEQ ID NO: 14301 - RNA, 38 nt, Artificial Sequence
  Description of Artificial Sequence:  Enzymatic Nucleic Acid
  misc_feature (31)..(31): n stands for inosine
uucagcaucugaugaggccguuaggccgaangagaggc

SEQ ID NO: 14302 - RNA, 38 nt, Artificial Sequence
  Description of Artificial Sequence:  Enzymatic Nucleic Acid
  misc_feature (31)..(31): n stands for inosine
cuucagcacugaugaggccguuaggccgaanggagagg

SEQ ID NO: 14303 - RNA, 38 nt, Artificial Sequence
  Description of Artificial Sequence:  Enzymatic Nucleic Acid
  misc_feature (31)..(31): n stands for inosine
agcgcuuccugaugaggccguuaggccgaancauggga

SEQ ID NO: 14304 - RNA, 38 nt, Artificial Sequence
  Description of Artificial Sequence:  Enzymatic Nucleic Acid
  misc_feature (31)..(31): n stands for inosine
ccaggugacugaugaggccguuaggccgaancgcuuca

SEQ ID NO: 14305 - RNA, 38 nt, Artificial Sequence
  Description of Artificial Sequence:  Enzymatic Nucleic Acid
  misc_feature (31)..(31): n stands for inosine
aguccaggcugaugaggccguuaggccgaanaagcgcu

SEQ ID NO: 14306 - RNA, 38 nt, Artificial Sequence
  Description of Artificial Sequence:  Enzymatic Nucleic Acid
  misc_feature (31)..(31): n stands for inosine
ucaguccacugaugaggccguuaggccgaanugaagcg

SEQ ID NO: 14307 - RNA, 38 nt, Artificial Sequence
  Description of Artificial Sequence:  Enzymatic Nucleic Acid
  misc_feature (31)..(31): n stands for inosine
gucagucccugaugaggccguuaggccgaangugaagc

SEQ ID NO: 14308 - RNA, 38 nt, Artificial Sequence
  Description of Artificial Sequence:  Enzymatic Nucleic Acid
  misc_feature (31)..(31): n stands for inosine
uugcuguccugaugaggccguuaggccgaanuccaggu

SEQ ID NO: 14309 - RNA, 38 nt, Artificial Sequence
  Description of Artificial Sequence:  Enzymatic Nucleic Acid
  misc_feature (31)..(31): n stands for inosine
ggguuugccugaugaggccguuaggccgaanucagucc

SEQ ID NO: 14310 - RNA, 38 nt, Artificial Sequence
  Description of Artificial Sequence:  Enzymatic Nucleic Acid
  misc_feature (31)..(31): n stands for inosine
cuuggguucugaugaggccguuaggccgaancugucag

SEQ ID NO: 14311 - RNA, 38 nt, Artificial Sequence
  Description of Artificial Sequence:  Enzymatic Nucleic Acid
  misc_feature (31)..(31): n stands for inosine
aggccuugcugaugaggccguuaggccgaanuuugcug

SEQ ID NO: 14312 - RNA, 38 nt, Artificial Sequence
  Description of Artificial Sequence:  Enzymatic Nucleic Acid
  misc_feature (31)..(31): n stands for inosine
gaggccuucugaugaggccguuaggccgaanguuugcu

SEQ ID NO: 14313 - RNA, 38 nt, Artificial Sequence
  Description of Artificial Sequence:  Enzymatic Nucleic Acid
  misc_feature (31)..(31): n stands for inosine
cgaggccucugaugaggccguuaggccgaangguuugc

SEQ ID NO: 14314 - RNA, 38 nt, Artificial Sequence
  Description of Artificial Sequence:  Enzymatic Nucleic Acid
  misc_feature (31)..(31): n stands for inosine
uugagcgacugaugaggccguuaggccgaanccuuggg

SEQ ID NO: 14315 - RNA, 38 nt, Artificial Sequence
  Description of Artificial Sequence:  Enzymatic Nucleic Acid
  misc_feature (31)..(31): n stands for inosine
cuugagcgcugaugaggccguuaggccgaangccuugg

SEQ ID NO: 14316 - RNA, 38 nt, Artificial Sequence
  Description of Artificial Sequence:  Enzymatic Nucleic Acid
  misc_feature (31)..(31): n stands for inosine
caaucuugcugaugaggccguuaggccgaancgaggcc

SEQ ID NO: 14317 - RNA, 38 nt, Artificial Sequence
  Description of Artificial Sequence:  Enzymatic Nucleic Acid
  misc_feature (31)..(31): n stands for inosine
gucaaucucugaugaggccguuaggccgaanagcgagg

SEQ ID NO: 14318 - RNA, 38 nt, Artificial Sequence
  Description of Artificial Sequence:  Enzymatic Nucleic Acid
  misc_feature (31)..(31): n stands for inosine
uacucucacugaugaggccguuaggccgaanucaaucu

SEQ ID NO: 14319 - RNA, 38 nt, Artificial Sequence
  Description of Artificial Sequence:  Enzymatic Nucleic Acid
  misc_feature (31)..(31): n stands for inosine
cuuuuacucugaugaggccguuaggccgaanuuacucu

SEQ ID NO: 14320 - RNA, 38 nt, Artificial Sequence
  Description of Artificial Sequence:  Enzymatic Nucleic Acid
  misc_feature (31)..(31): n stands for inosine
acuuuuaccugaugaggccguuaggccgaanguuacuc

SEQ ID NO: 14321 - RNA, 38 nt, Artificial Sequence
  Description of Artificial Sequence:  Enzymatic Nucleic Acid
  misc_feature (31)..(31): n stands for inosine
caucagaccugaugaggccguuaggccgaanccccgac

SEQ ID NO: 14322 - RNA, 38 nt, Artificial Sequence
  Description of Artificial Sequence:  Enzymatic Nucleic Acid
  misc_feature (31)..(31): n stands for inosine
cugacauccugaugaggccguuaggccgaanacagccc

SEQ ID NO: 14323 - RNA, 38 nt, Artificial Sequence
  Description of Artificial Sequence:  Enzymatic Nucleic Acid
  misc_feature (31)..(31): n stands for inosine
gggccugccugaugaggccguuaggccgaanacaucag

SEQ ID NO: 14324 - RNA, 38 nt, Artificial Sequence
  Description of Artificial Sequence:  Enzymatic Nucleic Acid
  misc_feature (31)..(31): n stands for inosine
acugggcccugaugaggccguuaggccgaancugacau

SEQ ID NO: 14325 - RNA, 38 nt, Artificial Sequence
  Description of Artificial Sequence:  Enzymatic Nucleic Acid
  misc_feature (31)..(31): n stands for inosine
agaaacugcugaugaggccguuaggccgaanccugcug

SEQ ID NO: 14326 - RNA, 38 nt, Artificial Sequence
  Description of Artificial Sequence:  Enzymatic Nucleic Acid
  misc_feature (31)..(31): n stands for inosine
cagaaacucugaugaggccguuaggccgaangccugcu

SEQ ID NO: 14327 - RNA, 38 nt, Artificial Sequence
  Description of Artificial Sequence:  Enzymatic Nucleic Acid
  misc_feature (31)..(31): n stands for inosine
gcagaaaccugaugaggccguuaggccgaanggccugc

SEQ ID NO: 14328 - RNA, 38 nt, Artificial Sequence
  Description of Artificial Sequence:  Enzymatic Nucleic Acid
  misc_feature (31)..(31): n stands for inosine
ggaauggccugaugaggccguuaggccgaanaaacugg

SEQ ID NO: 14329 - RNA, 38 nt, Artificial Sequence
  Description of Artificial Sequence:  Enzymatic Nucleic Acid
  misc_feature (31)..(31): n stands for inosine
gcuggaaucugaugaggccguuaggccgaancagaaac

SEQ ID NO: 14330 - RNA, 38 nt, Artificial Sequence
  Description of Artificial Sequence:  Enzymatic Nucleic Acid
  misc_feature (31)..(31): n stands for inosine
agcuggaacugaugaggccguuaggccgaangcagaaa

SEQ ID NO: 14331 - RNA, 38 nt, Artificial Sequence
  Description of Artificial Sequence:  Enzymatic Nucleic Acid
  misc_feature (31)..(31): n stands for inosine
ccacagcucugaugaggccguuaggccgaanaauggca

SEQ ID NO: 14332 - RNA, 38 nt, Artificial Sequence
  Description of Artificial Sequence:  Enzymatic Nucleic Acid
  misc_feature (31)..(31): n stands for inosine
cccacagccugaugaggccguuaggccgaangaauggc

SEQ ID NO: 14333 - RNA, 38 nt, Artificial Sequence
  Description of Artificial Sequence:  Enzymatic Nucleic Acid
  misc_feature (31)..(31): n stands for inosine
gugcccaccugaugaggccguuaggccgaancuggaau

SEQ ID NO: 14334 - RNA, 38 nt, Artificial Sequence
  Description of Artificial Sequence:  Enzymatic Nucleic Acid
  misc_feature (31)..(31): n stands for inosine
cgcugacgcugaugaggccguuaggccgaancccacag

SEQ ID NO: 14335 - RNA, 38 nt, Artificial Sequence
  Description of Artificial Sequence:  Enzymatic Nucleic Acid
  misc_feature (31)..(31): n stands for inosine
gccuucgccugaugaggccguuaggccgaanacgugcc

SEQ ID NO: 14336 - RNA, 38 nt, Artificial Sequence
  Description of Artificial Sequence:  Enzymatic Nucleic Acid
  misc_feature (31)..(31): n stands for inosine
ccugcgcucugaugaggccguuaggccgaanccuucgc

SEQ ID NO: 14337 - RNA, 38 nt, Artificial Sequence
  Description of Artificial Sequence:  Enzymatic Nucleic Acid
  misc_feature (31)..(31): n stands for inosine
ggugaacccugaugaggccguuaggccgaancgcuugc

SEQ ID NO: 14338 - RNA, 38 nt, Artificial Sequence
  Description of Artificial Sequence:  Enzymatic Nucleic Acid
  misc_feature (31)..(31): n stands for inosine
gucguaggcugaugaggccguuaggccgaanaaccugc

SEQ ID NO: 14339 - RNA, 38 nt, Artificial Sequence
  Description of Artificial Sequence:  Enzymatic Nucleic Acid
  misc_feature (31)..(31): n stands for inosine
uggucguacugaugaggccguuaggccgaanugaaccu

SEQ ID NO: 14340 - RNA, 38 nt, Artificial Sequence
  Description of Artificial Sequence:  Enzymatic Nucleic Acid
  misc_feature (31)..(31): n stands for inosine
guggucgucugaugaggccguuaggccgaangugaacc

SEQ ID NO: 14341 - RNA, 38 nt, Artificial Sequence
  Description of Artificial Sequence:  Enzymatic Nucleic Acid
  misc_feature (31)..(31): n stands for inosine
cucagcgucugaugaggccguuaggccgaanucguagg

SEQ ID NO: 14342 - RNA, 38 nt, Artificial Sequence
  Description of Artificial Sequence:  Enzymatic Nucleic Acid
  misc_feature (31)..(31): n stands for inosine
gcucagcgcugaugaggccguuaggccgaangucguag

SEQ ID NO: 14343 - RNA, 38 nt, Artificial Sequence
  Description of Artificial Sequence:  Enzymatic Nucleic Acid
  misc_feature (31)..(31): n stands for inosine
uccagcuccugaugaggccguuaggccgaancgugguc

SEQ ID NO: 14344 - RNA, 38 nt, Artificial Sequence
  Description of Artificial Sequence:  Enzymatic Nucleic Acid
  misc_feature (31)..(31): n stands for inosine
uccuuucccugaugaggccguuaggccgaancucagcg

SEQ ID NO: 14345 - RNA, 38 nt, Artificial Sequence
  Description of Artificial Sequence:  Enzymatic Nucleic Acid
  misc_feature (31)..(31): n stands for inosine
cggggagccugaugaggccguuaggccgaancacgcga

SEQ ID NO: 14346 - RNA, 38 nt, Artificial Sequence
  Description of Artificial Sequence:  Enzymatic Nucleic Acid
  misc_feature (31)..(31): n stands for inosine
gggcggggcugaugaggccguuaggccgaancagcacg

SEQ ID NO: 14347 - RNA, 38 nt, Artificial Sequence
  Description of Artificial Sequence:  Enzymatic Nucleic Acid
  misc_feature (31)..(31): n stands for inosine
gggggcggcugaugaggccguuaggccgaanagcagca

SEQ ID NO: 14348 - RNA, 38 nt, Artificial Sequence
  Description of Artificial Sequence:  Enzymatic Nucleic Acid
  misc_feature (31)..(31): n stands for inosine
ugggggcgcugaugaggccguuaggccgaangagcagc

SEQ ID NO: 14349 - RNA, 38 nt, Artificial Sequence
  Description of Artificial Sequence:  Enzymatic Nucleic Acid
  misc_feature (31)..(31): n stands for inosine
cugggggccugaugaggccguuaggccgaanggagcag

SEQ ID NO: 14350 - RNA, 38 nt, Artificial Sequence
  Description of Artificial Sequence:  Enzymatic Nucleic Acid
  misc_feature (31)..(31): n stands for inosine
agucugggcugaugaggccguuaggccgaancggggag

SEQ ID NO: 14351 - RNA, 38 nt, Artificial Sequence
  Description of Artificial Sequence:  Enzymatic Nucleic Acid
  misc_feature (31)..(31): n stands for inosine
uagucuggcugaugaggccguuaggccgaangcgggga

SEQ ID NO: 14352 - RNA, 38 nt, Artificial Sequence
  Description of Artificial Sequence:  Enzymatic Nucleic Acid
  misc_feature (31)..(31): n stands for inosine
guagucugcugaugaggccguuaggccgaanggcgggg

SEQ ID NO: 14353 - RNA, 38 nt, Artificial Sequence
  Description of Artificial Sequence:  Enzymatic Nucleic Acid
  misc_feature (31)..(31): n stands for inosine
uguagucucugaugaggccguuaggccgaangggcggg

SEQ ID NO: 14354 - RNA, 38 nt, Artificial Sequence
  Description of Artificial Sequence:  Enzymatic Nucleic Acid
  misc_feature (31)..(31): n stands for inosine
uuguaguccugaugaggccguuaggccgaanggggcgg

SEQ ID NO: 14355 - RNA, 38 nt, Artificial Sequence
  Description of Artificial Sequence:  Enzymatic Nucleic Acid
  misc_feature (31)..(31): n stands for inosine
cgaguugucugaugaggccguuaggccgaanucugggg

SEQ ID NO: 14356 - RNA, 38 nt, Artificial Sequence
  Description of Artificial Sequence:  Enzymatic Nucleic Acid
  misc_feature (31)..(31): n stands for inosine
caccgagucugaugaggccguuaggccgaanuagucug

SEQ ID NO: 14357 - RNA, 38 nt, Artificial Sequence
  Description of Artificial Sequence:  Enzymatic Nucleic Acid
  misc_feature (31)..(31): n stands for inosine
gaccaccgcugaugaggccguuaggccgaanuuguagu

SEQ ID NO: 14358 - RNA, 38 nt, Artificial Sequence
  Description of Artificial Sequence:  Enzymatic Nucleic Acid
  misc_feature (31)..(31): n stands for inosine
ggaguacacugaugaggccguuaggccgaanaccaccg

SEQ ID NO: 14359 - RNA, 38 nt, Artificial Sequence
  Description of Artificial Sequence:  Enzymatic Nucleic Acid
  misc_feature (31)..(31): n stands for inosine
uggaguaccugaugaggccguuaggccgaangaccacc

SEQ ID NO: 14360 - RNA, 38 nt, Artificial Sequence
  Description of Artificial Sequence:  Enzymatic Nucleic Acid
  misc_feature (31)..(31): n stands for inosine
ugggguggcugaugaggccguuaggccgaanuacagga

SEQ ID NO: 14361 - RNA, 38 nt, Artificial Sequence
  Description of Artificial Sequence:  Enzymatic Nucleic Acid
  misc_feature (31)..(31): n stands for inosine
gguggggucugaugaggccguuaggccgaanaguacag

SEQ ID NO: 14362 - RNA, 38 nt, Artificial Sequence
  Description of Artificial Sequence:  Enzymatic Nucleic Acid
  misc_feature (31)..(31): n stands for inosine
ggguggggcugaugaggccguuaggccgaangaguaca

SEQ ID NO: 14363 - RNA, 38 nt, Artificial Sequence
  Description of Artificial Sequence:  Enzymatic Nucleic Acid
  misc_feature (31)..(31): n stands for inosine
auggguggcugaugaggccguuaggccgaanuggagua

SEQ ID NO: 14364 - RNA, 38 nt, Artificial Sequence
  Description of Artificial Sequence:  Enzymatic Nucleic Acid
  misc_feature (31)..(31): n stands for inosine
gaugggugcugaugaggccguuaggccgaanguggagu

SEQ ID NO: 14365 - RNA, 38 nt, Artificial Sequence
  Description of Artificial Sequence:  Enzymatic Nucleic Acid
  misc_feature (31)..(31): n stands for inosine
agaugggucugaugaggccguuaggccgaangguggag

SEQ ID NO: 14366 - RNA, 38 nt, Artificial Sequence
  Description of Artificial Sequence:  Enzymatic Nucleic Acid
  misc_feature (31)..(31): n stands for inosine
uagaugggcugaugaggccguuaggccgaangggugga

SEQ ID NO: 14367 - RNA, 38 nt, Artificial Sequence
  Description of Artificial Sequence:  Enzymatic Nucleic Acid
  misc_feature (31)..(31): n stands for inosine
ucuagaugcugaugaggccguuaggccgaanuggggug

SEQ ID NO: 14368 - RNA, 38 nt, Artificial Sequence
  Description of Artificial Sequence:  Enzymatic Nucleic Acid
  misc_feature (31)..(31): n stands for inosine
cucuagaucugaugaggccguuaggccgaanguggggu

SEQ ID NO: 14369 - RNA, 38 nt, Artificial Sequence
  Description of Artificial Sequence:  Enzymatic Nucleic Acid
  misc_feature (31)..(31): n stands for inosine
acucuagacugaugaggccguuaggccgaanggugggg

SEQ ID NO: 14370 - RNA, 38 nt, Artificial Sequence
  Description of Artificial Sequence:  Enzymatic Nucleic Acid
  misc_feature (31)..(31): n stands for inosine
caaacucucugaugaggccguuaggccgaanaugggug

SEQ ID NO: 14371 - RNA, 38 nt, Artificial Sequence
  Description of Artificial Sequence:  Enzymatic Nucleic Acid
  misc_feature (31)..(31): n stands for inosine
aggcuucgcugaugaggccguuaggccgaanucaaacu

SEQ ID NO: 14372 - RNA, 38 nt, Artificial Sequence
  Description of Artificial Sequence:  Enzymatic Nucleic Acid
  misc_feature (31)..(31): n stands for inosine
agaaauaacugaugaggccguuaggccgaancuucgug

SEQ ID NO: 14373 - RNA, 38 nt, Artificial Sequence
  Description of Artificial Sequence:  Enzymatic Nucleic Acid
  misc_feature (31)..(31): n stands for inosine
uagaaauacugaugaggccguuaggccgaangcuucgu

SEQ ID NO: 14374 - RNA, 38 nt, Artificial Sequence
  Description of Artificial Sequence:  Enzymatic Nucleic Acid
  misc_feature (31)..(31): n stands for inosine
gugcuucucugaugaggccguuaggccgaanaaauaag

SEQ ID NO: 14375 - RNA, 38 nt, Artificial Sequence
  Description of Artificial Sequence:  Enzymatic Nucleic Acid
  misc_feature (31)..(31): n stands for inosine
uacacaugcugaugaggccguuaggccgaancuucuag

SEQ ID NO: 14376 - RNA, 38 nt, Artificial Sequence
  Description of Artificial Sequence:  Enzymatic Nucleic Acid
  misc_feature (31)..(31): n stands for inosine
aauacacacugaugaggccguuaggccgaanugcuucu

SEQ ID NO: 14377 - RNA, 38 nt, Artificial Sequence
  Description of Artificial Sequence:  Enzymatic Nucleic Acid
  misc_feature (31)..(31): n stands for inosine
uuccugggcugaugaggccguuaggccgaanuauaaau

SEQ ID NO: 14378 - RNA, 38 nt, Artificial Sequence
  Description of Artificial Sequence:  Enzymatic Nucleic Acid
  misc_feature (31)..(31): n stands for inosine
uuuccuggcugaugaggccguuaggccgaanguauaaa

SEQ ID NO: 14379 - RNA, 38 nt, Artificial Sequence
  Description of Artificial Sequence:  Enzymatic Nucleic Acid
  misc_feature (31)..(31): n stands for inosine
guuuccugcugaugaggccguuaggccgaangguauaa

SEQ ID NO: 14380 - RNA, 38 nt, Artificial Sequence
  Description of Artificial Sequence:  Enzymatic Nucleic Acid
  misc_feature (31)..(31): n stands for inosine
aguuuccucugaugaggccguuaggccgaanggguaua

SEQ ID NO: 14381 - RNA, 38 nt, Artificial Sequence
  Description of Artificial Sequence:  Enzymatic Nucleic Acid
  misc_feature (31)..(31): n stands for inosine
uaguuucccugaugaggccguuaggccgaangggguau

SEQ ID NO: 14382 - RNA, 38 nt, Artificial Sequence
  Description of Artificial Sequence:  Enzymatic Nucleic Acid
  misc_feature (31)..(31): n stands for inosine
caaaagcucugaugaggccguuaggccgaanuuuccug

SEQ ID NO: 14383 - RNA, 38 nt, Artificial Sequence
  Description of Artificial Sequence:  Enzymatic Nucleic Acid
  misc_feature (31)..(31): n stands for inosine
cuggcaaacugaugaggccguuaggccgaancuaguuu

SEQ ID NO: 14384 - RNA, 38 nt, Artificial Sequence
  Description of Artificial Sequence:  Enzymatic Nucleic Acid
  misc_feature (31)..(31): n stands for inosine
auaauacucugaugaggccguuaggccgaancaaaagc

SEQ ID NO: 14385 - RNA, 38 nt, Artificial Sequence
  Description of Artificial Sequence:  Enzymatic Nucleic Acid
  misc_feature (31)..(31): n stands for inosine
cauaauaccugaugaggccguuaggccgaangcaaaag

SEQ ID NO: 14386 - RNA, 38 nt, Artificial Sequence
  Description of Artificial Sequence:  Enzymatic Nucleic Acid
  misc_feature (31)..(31): n stands for inosine
cuuauauacugaugaggccguuaggccgaancauaaua

SEQ ID NO: 14387 - RNA, 38 nt, Artificial Sequence
  Description of Artificial Sequence:  Enzymatic Nucleic Acid
  misc_feature (31)..(31): n stands for inosine
gauaaaggcugaugaggccguuaggccgaanuaaacuu

SEQ ID NO: 14388 - RNA, 38 nt, Artificial Sequence
  Description of Artificial Sequence:  Enzymatic Nucleic Acid
  misc_feature (31)..(31): n stands for inosine
aagauaaacugaugaggccguuaggccgaanuguaaac

SEQ ID NO: 14389 - RNA, 38 nt, Artificial Sequence
  Description of Artificial Sequence:  Enzymatic Nucleic Acid
  misc_feature (31)..(31): n stands for inosine
aaagauaacugaugaggccguuaggccgaanguguaaa

SEQ ID NO: 14390 - RNA, 38 nt, Artificial Sequence
  Description of Artificial Sequence:  Enzymatic Nucleic Acid
  misc_feature (31)..(31): n stands for inosine
ccauggaacugaugaggccguuaggccgaanauaaagg

SEQ ID NO: 14391 - RNA, 38 nt, Artificial Sequence
  Description of Artificial Sequence:  Enzymatic Nucleic Acid
  misc_feature (31)..(31): n stands for inosine
gcucccaucugaugaggccguuaggccgaanaaagaua

SEQ ID NO: 14392 - RNA, 38 nt, Artificial Sequence
  Description of Artificial Sequence:  Enzymatic Nucleic Acid
  misc_feature (31)..(31): n stands for inosine
ggcucccacugaugaggccguuaggccgaangaaagau

SEQ ID NO: 14393 - RNA, 38 nt, Artificial Sequence
  Description of Artificial Sequence:  Enzymatic Nucleic Acid
  misc_feature (31)..(31): n stands for inosine
aagcagcucugaugaggccguuaggccgaancucccau

SEQ ID NO: 14394 - RNA, 38 nt, Artificial Sequence
  Description of Artificial Sequence:  Enzymatic Nucleic Acid
  misc_feature (31)..(31): n stands for inosine
aaagcagccugaugaggccguuaggccgaangcuccca

SEQ ID NO: 14395 - RNA, 38 nt, Artificial Sequence
  Description of Artificial Sequence:  Enzymatic Nucleic Acid
  misc_feature (31)..(31): n stands for inosine
caaaaagccugaugaggccguuaggccgaancuggcuc

SEQ ID NO: 14396 - RNA, 38 nt, Artificial Sequence
  Description of Artificial Sequence:  Enzymatic Nucleic Acid
  misc_feature (31)..(31): n stands for inosine
ucacaaaacugaugaggccguuaggccgaancagcugg

SEQ ID NO: 14397 - RNA, 38 nt, Artificial Sequence
  Description of Artificial Sequence:  Enzymatic Nucleic Acid
  misc_feature (31)..(31): n stands for inosine
aaaaaaaacugaugaggccguuaggccgaancacuauu

SEQ ID NO: 14398 - RNA, 38 nt, Artificial Sequence
  Description of Artificial Sequence:  Enzymatic Nucleic Acid
  misc_feature (31)..(31): n stands for inosine
uucuuguucugaugaggccguuaggccgaanucaaaaa

SEQ ID NO: 14399 - RNA, 38 nt, Artificial Sequence
  Description of Artificial Sequence:  Enzymatic Nucleic Acid
  misc_feature (31)..(31): n stands for inosine
uacauucucugaugaggccguuaggccgaanuuaguca

SEQ ID NO: 14400 - RNA, 38 nt, Artificial Sequence
  Description of Artificial Sequence:  Enzymatic Nucleic Acid
  misc_feature (31)..(31): n stands for inosine
cuaucuggcugaugaggccguuaggccgaanuuacauu

SEQ ID NO: 14401 - RNA, 38 nt, Artificial Sequence
  Description of Artificial Sequence:  Enzymatic Nucleic Acid
  misc_feature (31)..(31): n stands for inosine
cucuaucucugaugaggccguuaggccgaanaguuaca

SEQ ID NO: 14402 - RNA, 38 nt, Artificial Sequence
  Description of Artificial Sequence:  Enzymatic Nucleic Acid
  misc_feature (31)..(31): n stands for inosine
ucucuauccugaugaggccguuaggccgaangaguuac

SEQ ID NO: 14403 - RNA, 38 nt, Artificial Sequence
  Description of Artificial Sequence:  Enzymatic Nucleic Acid
  misc_feature (31)..(31): n stands for inosine
ucuucacucugaugaggccguuaggccgaanucacuau

SEQ ID NO: 14404 - RNA, 38 nt, Artificial Sequence
  Description of Artificial Sequence:  Enzymatic Nucleic Acid
  misc_feature (31)..(31): n stands for inosine
agcaguagcugaugaggccguuaggccgaanuucuuca

SEQ ID NO: 14405 - RNA, 38 nt, Artificial Sequence
  Description of Artificial Sequence:  Enzymatic Nucleic Acid
  misc_feature (31)..(31): n stands for inosine
uuagcagucugaugaggccguuaggccgaanuguucuu

SEQ ID NO: 14406 - RNA, 38 nt, Artificial Sequence
  Description of Artificial Sequence:  Enzymatic Nucleic Acid
  misc_feature (31)..(31): n stands for inosine
gauuuagccugaugaggccguuaggccgaanuaguguu

SEQ ID NO: 14407 - RNA, 38 nt, Artificial Sequence
  Description of Artificial Sequence:  Enzymatic Nucleic Acid
  misc_feature (31)..(31): n stands for inosine
gaggauuucugaugaggccguuaggccgaancaguagu

SEQ ID NO: 14408 - RNA, 38 nt, Artificial Sequence
  Description of Artificial Sequence:  Enzymatic Nucleic Acid
  misc_feature (31)..(31): n stands for inosine
uaacaugacugaugaggccguuaggccgaanauuuagc

SEQ ID NO: 14409 - RNA, 38 nt, Artificial Sequence
  Description of Artificial Sequence:  Enzymatic Nucleic Acid
  misc_feature (31)..(31): n stands for inosine
guaacaugcugaugaggccguuaggccgaangauuuag

SEQ ID NO: 14410 - RNA, 38 nt, Artificial Sequence
  Description of Artificial Sequence:  Enzymatic Nucleic Acid
  misc_feature (31)..(31): n stands for inosine
gaguaacacugaugaggccguuaggccgaanaggauuu

SEQ ID NO: 14411 - RNA, 38 nt, Artificial Sequence
  Description of Artificial Sequence:  Enzymatic Nucleic Acid
  misc_feature (31)..(31): n stands for inosine
uaacacugcugaugaggccguuaggccgaanuaacaug

SEQ ID NO: 14412 - RNA, 38 nt, Artificial Sequence
  Description of Artificial Sequence:  Enzymatic Nucleic Acid
  misc_feature (31)..(31): n stands for inosine
ucuaacaccugaugaggccguuaggccgaanaguaaca

SEQ ID NO: 14413 - RNA, 38 nt, Artificial Sequence
  Description of Artificial Sequence:  Enzymatic Nucleic Acid
  misc_feature (31)..(31): n stands for inosine
uuuaggaacugaugaggccguuaggccgaanauuucuc

SEQ ID NO: 14414 - RNA, 38 nt, Artificial Sequence
  Description of Artificial Sequence:  Enzymatic Nucleic Acid
  misc_feature (31)..(31): n stands for inosine
guuuaggacugaugaggccguuaggccgaangauuucu

SEQ ID NO: 14415 - RNA, 38 nt, Artificial Sequence
  Description of Artificial Sequence:  Enzymatic Nucleic Acid
  misc_feature (31)..(31): n stands for inosine
uggguuuacugaugaggccguuaggccgaanaaggauu

SEQ ID NO: 14416 - RNA, 38 nt, Artificial Sequence
  Description of Artificial Sequence:  Enzymatic Nucleic Acid
  misc_feature (31)..(31): n stands for inosine
uuggguuucugaugaggccguuaggccgaangaaggau

SEQ ID NO: 14417 - RNA, 38 nt, Artificial Sequence
  Description of Artificial Sequence:  Enzymatic Nucleic Acid
  misc_feature (31)..(31): n stands for inosine
agucauugcugaugaggccguuaggccgaanuuuagga

SEQ ID NO: 14418 - RNA, 38 nt, Artificial Sequence
  Description of Artificial Sequence:  Enzymatic Nucleic Acid
  misc_feature (31)..(31): n stands for inosine
aagucauucugaugaggccguuaggccgaanguuuagg

SEQ ID NO: 14419 - RNA, 38 nt, Artificial Sequence
  Description of Artificial Sequence:  Enzymatic Nucleic Acid
  misc_feature (31)..(31): n stands for inosine
gaagucaucugaugaggccguuaggccgaangguuuag

SEQ ID NO: 14420 - RNA, 38 nt, Artificial Sequence
  Description of Artificial Sequence:  Enzymatic Nucleic Acid
  misc_feature (31)..(31): n stands for inosine
agcagggacugaugaggccguuaggccgaanucauugg

SEQ ID NO: 14421 - RNA, 38 nt, Artificial Sequence
  Description of Artificial Sequence:  Enzymatic Nucleic Acid
  misc_feature (31)..(31): n stands for inosine
uggagcagcugaugaggccguuaggccgaanaagucau

SEQ ID NO: 14422 - RNA, 38 nt, Artificial Sequence
  Description of Artificial Sequence:  Enzymatic Nucleic Acid
  misc_feature (31)..(31): n stands for inosine
uuggagcacugaugaggccguuaggccgaangaaguca

SEQ ID NO: 14423 - RNA, 38 nt, Artificial Sequence
  Description of Artificial Sequence:  Enzymatic Nucleic Acid
  misc_feature (31)..(31): n stands for inosine
guuggagccugaugaggccguuaggccgaanggaaguc

SEQ ID NO: 14424 - RNA, 38 nt, Artificial Sequence
  Description of Artificial Sequence:  Enzymatic Nucleic Acid
  misc_feature (31)..(31): n stands for inosine
gggguuggcugaugaggccguuaggccgaancagggaa

SEQ ID NO: 14425 - RNA, 38 nt, Artificial Sequence
  Description of Artificial Sequence:  Enzymatic Nucleic Acid
  misc_feature (31)..(31): n stands for inosine
cggggguucugaugaggccguuaggccgaanagcaggg

SEQ ID NO: 14426 - RNA, 38 nt, Artificial Sequence
  Description of Artificial Sequence:  Enzymatic Nucleic Acid
  misc_feature (31)..(31): n stands for inosine
gcgggggucugaugaggccguuaggccgaangagcagg

SEQ ID NO: 14427 - RNA, 38 nt, Artificial Sequence
  Description of Artificial Sequence:  Enzymatic Nucleic Acid
  misc_feature (31)..(31): n stands for inosine
guggcgggcugaugaggccguuaggccgaanuuggagc

SEQ ID NO: 14428 - RNA, 38 nt, Artificial Sequence
  Description of Artificial Sequence:  Enzymatic Nucleic Acid
  misc_feature (31)..(31): n stands for inosine
gguggcggcugaugaggccguuaggccgaanguuggag

SEQ ID NO: 14429 - RNA, 38 nt, Artificial Sequence
  Description of Artificial Sequence:  Enzymatic Nucleic Acid
  misc_feature (31)..(31): n stands for inosine
agguggcgcugaugaggccguuaggccgaangguugga

SEQ ID NO: 14430 - RNA, 38 nt, Artificial Sequence
  Description of Artificial Sequence:  Enzymatic Nucleic Acid
  misc_feature (31)..(31): n stands for inosine
gagguggccugaugaggccguuaggccgaanggguugg

SEQ ID NO: 14431 - RNA, 38 nt, Artificial Sequence
  Description of Artificial Sequence:  Enzymatic Nucleic Acid
  misc_feature (31)..(31): n stands for inosine
ccugaggucugaugaggccguuaggccgaancgggggu

SEQ ID NO: 14432 - RNA, 38 nt, Artificial Sequence
  Description of Artificial Sequence:  Enzymatic Nucleic Acid
  misc_feature (31)..(31): n stands for inosine
cccugaggcugaugaggccguuaggccgaangcggggg

SEQ ID NO: 14433 - RNA, 38 nt, Artificial Sequence
  Description of Artificial Sequence:  Enzymatic Nucleic Acid
  misc_feature (31)..(31): n stands for inosine
ugcccugacugaugaggccguuaggccgaanuggcggg

SEQ ID NO: 14434 - RNA, 38 nt, Artificial Sequence
  Description of Artificial Sequence:  Enzymatic Nucleic Acid
  misc_feature (31)..(31): n stands for inosine
gugcccugcugaugaggccguuaggccgaanguggcgg

SEQ ID NO: 14435 - RNA, 38 nt, Artificial Sequence
  Description of Artificial Sequence:  Enzymatic Nucleic Acid
  misc_feature (31)..(31): n stands for inosine
gcgugccccugaugaggccguuaggccgaanagguggc

SEQ ID NO: 14436 - RNA, 38 nt, Artificial Sequence
  Description of Artificial Sequence:  Enzymatic Nucleic Acid
  misc_feature (31)..(31): n stands for inosine
guccugcgcugaugaggccguuaggccgaancccugag

SEQ ID NO: 14437 - RNA, 38 nt, Artificial Sequence
  Description of Artificial Sequence:  Enzymatic Nucleic Acid
  misc_feature (31)..(31): n stands for inosine
acuggucccugaugaggccguuaggccgaancgugccc

SEQ ID NO: 14438 - RNA, 38 nt, Artificial Sequence
  Description of Artificial Sequence:  Enzymatic Nucleic Acid
  misc_feature (31)..(31): n stands for inosine
aucaaacucugaugaggccguuaggccgaanuccugcg

SEQ ID NO: 14439 - RNA, 38 nt, Artificial Sequence
  Description of Artificial Sequence:  Enzymatic Nucleic Acid
  misc_feature (31)..(31): n stands for inosine
aaucaaaccugaugaggccguuaggccgaanguccugc

SEQ ID NO: 14440 - RNA, 38 nt, Artificial Sequence
  Description of Artificial Sequence:  Enzymatic Nucleic Acid
  misc_feature (31)..(31): n stands for inosine
aucagugccugaugaggccguuaggccgaancuccuca

SEQ ID NO: 14441 - RNA, 38 nt, Artificial Sequence
  Description of Artificial Sequence:  Enzymatic Nucleic Acid
  misc_feature (31)..(31): n stands for inosine
gugaucagcugaugaggccguuaggccgaancagcucc

SEQ ID NO: 14442 - RNA, 38 nt, Artificial Sequence
  Description of Artificial Sequence:  Enzymatic Nucleic Acid
  misc_feature (31)..(31): n stands for inosine
gggugauccugaugaggccguuaggccgaanugcagcu

SEQ ID NO: 14443 - RNA, 38 nt, Artificial Sequence
  Description of Artificial Sequence:  Enzymatic Nucleic Acid
  misc_feature (31)..(31): n stands for inosine
gcauugggcugaugaggccguuaggccgaanaucagug

SEQ ID NO: 14444 - RNA, 38 nt, Artificial Sequence
  Description of Artificial Sequence:  Enzymatic Nucleic Acid
  misc_feature (31)..(31): n stands for inosine
augcauugcugaugaggccguuaggccgaanugaucag

SEQ ID NO: 14445 - RNA, 38 nt, Artificial Sequence
  Description of Artificial Sequence:  Enzymatic Nucleic Acid
  misc_feature (31)..(31): n stands for inosine
gaugcauucugaugaggccguuaggccgaangugauca

SEQ ID NO: 14446 - RNA, 38 nt, Artificial Sequence
  Description of Artificial Sequence:  Enzymatic Nucleic Acid
  misc_feature (31)..(31): n stands for inosine
ugaugcaucugaugaggccguuaggccgaanggugauc

SEQ ID NO: 14447 - RNA, 38 nt, Artificial Sequence
  Description of Artificial Sequence:  Enzymatic Nucleic Acid
  misc_feature (31)..(31): n stands for inosine
guacgugacugaugaggccguuaggccgaancauuggg

SEQ ID NO: 14448 - RNA, 38 nt, Artificial Sequence
  Description of Artificial Sequence:  Enzymatic Nucleic Acid
  misc_feature (31)..(31): n stands for inosine
gggguacgcugaugaggccguuaggccgaanaugcauu

SEQ ID NO: 14449 - RNA, 38 nt, Artificial Sequence
  Description of Artificial Sequence:  Enzymatic Nucleic Acid
  misc_feature (31)..(31): n stands for inosine
cccaguggcugaugaggccguuaggccgaanuacguga

SEQ ID NO: 14450 - RNA, 38 nt, Artificial Sequence
  Description of Artificial Sequence:  Enzymatic Nucleic Acid
  misc_feature (31)..(31): n stands for inosine
gcccagugcugaugaggccguuaggccgaanguacgug

SEQ ID NO: 14451 - RNA, 38 nt, Artificial Sequence
  Description of Artificial Sequence:  Enzymatic Nucleic Acid
  misc_feature (31)..(31): n stands for inosine
ggcccagucugaugaggccguuaggccgaangguacgu

SEQ ID NO: 14452 - RNA, 38 nt, Artificial Sequence
  Description of Artificial Sequence:  Enzymatic Nucleic Acid
  misc_feature (31)..(31): n stands for inosine
uggcccagcugaugaggccguuaggccgaanggguacg

SEQ ID NO: 14453 - RNA, 38 nt, Artificial Sequence
  Description of Artificial Sequence:  Enzymatic Nucleic Acid
  misc_feature (31)..(31): n stands for inosine
gcuggccccugaugaggccguuaggccgaanuggggua

SEQ ID NO: 14454 - RNA, 38 nt, Artificial Sequence
  Description of Artificial Sequence:  Enzymatic Nucleic Acid
  misc_feature (31)..(31): n stands for inosine
gcagggcucugaugaggccguuaggccgaancccagug

SEQ ID NO: 14455 - RNA, 38 nt, Artificial Sequence
  Description of Artificial Sequence:  Enzymatic Nucleic Acid
  misc_feature (31)..(31): n stands for inosine
ugcagggccugaugaggccguuaggccgaangcccagu

SEQ ID NO: 14456 - RNA, 38 nt, Artificial Sequence
  Description of Artificial Sequence:  Enzymatic Nucleic Acid
  misc_feature (31)..(31): n stands for inosine
ggcugcagcugaugaggccguuaggccgaancuggccc

SEQ ID NO: 14457 - RNA, 38 nt, Artificial Sequence
  Description of Artificial Sequence:  Enzymatic Nucleic Acid
  misc_feature (31)..(31): n stands for inosine
gggcugcacugaugaggccguuaggccgaangcuggcc

SEQ ID NO: 14458 - RNA, 38 nt, Artificial Sequence
  Description of Artificial Sequence:  Enzymatic Nucleic Acid
  misc_feature (31)..(31): n stands for inosine
ugggcugccugaugaggccguuaggccgaanggcuggc

SEQ ID NO: 14459 - RNA, 38 nt, Artificial Sequence
  Description of Artificial Sequence:  Enzymatic Nucleic Acid
  misc_feature (31)..(31): n stands for inosine
uuuugggccugaugaggccguuaggccgaancagggcu

SEQ ID NO: 14460 - RNA, 38 nt, Artificial Sequence
  Description of Artificial Sequence:  Enzymatic Nucleic Acid
  misc_feature (31)..(31): n stands for inosine
ggguuuugcugaugaggccguuaggccgaancugcagg

SEQ ID NO: 14461 - RNA, 38 nt, Artificial Sequence
  Description of Artificial Sequence:  Enzymatic Nucleic Acid
  misc_feature (31)..(31): n stands for inosine
uggguuuucugaugaggccguuaggccgaangcugcag

SEQ ID NO: 14462 - RNA, 38 nt, Artificial Sequence
  Description of Artificial Sequence:  Enzymatic Nucleic Acid
  misc_feature (31)..(31): n stands for inosine
cuggguuucugaugaggccguuaggccgaanggcugca

SEQ ID NO: 14463 - RNA, 38 nt, Artificial Sequence
  Description of Artificial Sequence:  Enzymatic Nucleic Acid
  misc_feature (31)..(31): n stands for inosine
uugcccugcugaugaggccguuaggccgaanuuuuggg

SEQ ID NO: 14464 - RNA, 38 nt, Artificial Sequence
  Description of Artificial Sequence:  Enzymatic Nucleic Acid
  misc_feature (31)..(31): n stands for inosine
guugcccucugaugaggccguuaggccgaanguuuugg

SEQ ID NO: 14465 - RNA, 38 nt, Artificial Sequence
  Description of Artificial Sequence:  Enzymatic Nucleic Acid
  misc_feature (31)..(31): n stands for inosine
uguugccccugaugaggccguuaggccgaangguuuug

SEQ ID NO: 14466 - RNA, 38 nt, Artificial Sequence
  Description of Artificial Sequence:  Enzymatic Nucleic Acid
  misc_feature (31)..(31): n stands for inosine
gggcuugucugaugaggccguuaggccgaancccuggg

SEQ ID NO: 14467 - RNA, 38 nt, Artificial Sequence
  Description of Artificial Sequence:  Enzymatic Nucleic Acid
  misc_feature (31)..(31): n stands for inosine
aacgggcucugaugaggccguuaggccgaanuugcccu

SEQ ID NO: 14468 - RNA, 38 nt, Artificial Sequence
  Description of Artificial Sequence:  Enzymatic Nucleic Acid
  misc_feature (31)..(31): n stands for inosine
ggcuaacgcugaugaggccguuaggccgaancuuguug

SEQ ID NO: 14469 - RNA, 38 nt, Artificial Sequence
  Description of Artificial Sequence:  Enzymatic Nucleic Acid
  misc_feature (31)..(31): n stands for inosine
gggcuaaccugaugaggccguuaggccgaangcuuguu

SEQ ID NO: 14470 - RNA, 38 nt, Artificial Sequence
  Description of Artificial Sequence:  Enzymatic Nucleic Acid
  misc_feature (31)..(31): n stands for inosine
uccccuggcugaugaggccguuaggccgaancuaacgg

SEQ ID NO: 14471 - RNA, 38 nt, Artificial Sequence
  Description of Artificial Sequence:  Enzymatic Nucleic Acid
  misc_feature (31)..(31): n stands for inosine
auccccugcugaugaggccguuaggccgaangcuaacg

SEQ ID NO: 14472 - RNA, 38 nt, Artificial Sequence
  Description of Artificial Sequence:  Enzymatic Nucleic Acid
  misc_feature (31)..(31): n stands for inosine
gauccccucugaugaggccguuaggccgaanggcuaac

SEQ ID NO: 14473 - RNA, 38 nt, Artificial Sequence
  Description of Artificial Sequence:  Enzymatic Nucleic Acid
  misc_feature (31)..(31): n stands for inosine
ugaucccccugaugaggccguuaggccgaangggcuaa

SEQ ID NO: 14474 - RNA, 38 nt, Artificial Sequence
  Description of Artificial Sequence:  Enzymatic Nucleic Acid
  misc_feature (31)..(31): n stands for inosine
ccagccagcugaugaggccguuaggccgaanauccccu

SEQ ID NO: 14475 - RNA, 38 nt, Artificial Sequence
  Description of Artificial Sequence:  Enzymatic Nucleic Acid
  misc_feature (31)..(31): n stands for inosine
ggccagcccugaugaggccguuaggccgaanugauccc

SEQ ID NO: 14476 - RNA, 38 nt, Artificial Sequence
  Description of Artificial Sequence:  Enzymatic Nucleic Acid
  misc_feature (31)..(31): n stands for inosine
cucaggcccugaugaggccguuaggccgaanccaguga

SEQ ID NO: 14477 - RNA, 38 nt, Artificial Sequence
  Description of Artificial Sequence:  Enzymatic Nucleic Acid
  misc_feature (31)..(31): n stands for inosine
guugcucacugaugaggccguuaggccgaanccagcca

SEQ ID NO: 14478 - RNA, 38 nt, Artificial Sequence
  Description of Artificial Sequence:  Enzymatic Nucleic Acid
  misc_feature (31)..(31): n stands for inosine
uguugcuccugaugaggccguuaggccgaangccagcc

SEQ ID NO: 14479 - RNA, 38 nt, Artificial Sequence
  Description of Artificial Sequence:  Enzymatic Nucleic Acid
  misc_feature (31)..(31): n stands for inosine
cgagaugucugaugaggccguuaggccgaancucaggc

SEQ ID NO: 14480 - RNA, 38 nt, Artificial Sequence
  Description of Artificial Sequence:  Enzymatic Nucleic Acid
  misc_feature (31)..(31): n stands for inosine
ucccgagacugaugaggccguuaggccgaanuugcuca

SEQ ID NO: 14481 - RNA, 38 nt, Artificial Sequence
  Description of Artificial Sequence:  Enzymatic Nucleic Acid
  misc_feature (31)..(31): n stands for inosine
gacucccgcugaugaggccguuaggccgaanauguugc

SEQ ID NO: 14482 - RNA, 38 nt, Artificial Sequence
  Description of Artificial Sequence:  Enzymatic Nucleic Acid
  misc_feature (31)..(31): n stands for inosine
cugcuagacugaugaggccguuaggccgaanacucccg

SEQ ID NO: 14483 - RNA, 38 nt, Artificial Sequence
  Description of Artificial Sequence:  Enzymatic Nucleic Acid
  misc_feature (31)..(31): n stands for inosine
ccugcuagcugaugaggccguuaggccgaangacuccc

SEQ ID NO: 14484 - RNA, 38 nt, Artificial Sequence
  Description of Artificial Sequence:  Enzymatic Nucleic Acid
  misc_feature (31)..(31): n stands for inosine
ggccugcucugaugaggccguuaggccgaanaggacuc

SEQ ID NO: 14485 - RNA, 38 nt, Artificial Sequence
  Description of Artificial Sequence:  Enzymatic Nucleic Acid
  misc_feature (31)..(31): n stands for inosine
cuuaggcccugaugaggccguuaggccgaancuagagg

SEQ ID NO: 14486 - RNA, 38 nt, Artificial Sequence
  Description of Artificial Sequence:  Enzymatic Nucleic Acid
  misc_feature (31)..(31): n stands for inosine
augucuuacugaugaggccguuaggccgaanccugcua

SEQ ID NO: 14487 - RNA, 38 nt, Artificial Sequence
  Description of Artificial Sequence:  Enzymatic Nucleic Acid
  misc_feature (31)..(31): n stands for inosine
caugucuucugaugaggccguuaggccgaangccugcu

SEQ ID NO: 14488 - RNA, 38 nt, Artificial Sequence
  Description of Artificial Sequence:  Enzymatic Nucleic Acid
  misc_feature (31)..(31): n stands for inosine
uccucacacugaugaggccguuaggccgaanucuuagg

SEQ ID NO: 14489 - RNA, 38 nt, Artificial Sequence
  Description of Artificial Sequence:  Enzymatic Nucleic Acid
  misc_feature (31)..(31): n stands for inosine
uugcuuuucugaugaggccguuaggccgaancuuuuuu

SEQ ID NO: 14490 - RNA, 38 nt, Artificial Sequence
  Description of Artificial Sequence:  Enzymatic Nucleic Acid
  misc_feature (31)..(31): n stands for inosine
uucucccucugaugaggccguuaggccgaancuuuuug

SEQ ID NO: 14491 - RNA, 38 nt, Artificial Sequence
  Description of Artificial Sequence:  Enzymatic Nucleic Acid
  misc_feature (31)..(31): n stands for inosine
cuucuccccugaugaggccguuaggccgaanuuucucu

SEQ ID NO: 14492 - RNA, 38 nt, Artificial Sequence
  Description of Artificial Sequence:  Enzymatic Nucleic Acid
  misc_feature (31)..(31): n stands for inosine
cuuucucacugaugaggccguuaggccgaanccuucuc

SEQ ID NO: 14493 - RNA, 38 nt, Artificial Sequence
  Description of Artificial Sequence:  Enzymatic Nucleic Acid
  misc_feature (31)..(31): n stands for inosine
ccacauggcugaugaggccguuaggccgaancgucuca

SEQ ID NO: 14494 - RNA, 38 nt, Artificial Sequence
  Description of Artificial Sequence:  Enzymatic Nucleic Acid
  misc_feature (31)..(31): n stands for inosine
gcccacaucugaugaggccguuaggccgaanugcgucu

SEQ ID NO: 14495 - RNA, 38 nt, Artificial Sequence
  Description of Artificial Sequence:  Enzymatic Nucleic Acid
  misc_feature (31)..(31): n stands for inosine
ugcccacacugaugaggccguuaggccgaangugcguc

SEQ ID NO: 14496 - RNA, 38 nt, Artificial Sequence
  Description of Artificial Sequence:  Enzymatic Nucleic Acid
  misc_feature (31)..(31): n stands for inosine
ccccuccgcugaugaggccguuaggccgaancccacau

SEQ ID NO: 14497 - RNA, 38 nt, Artificial Sequence
  Description of Artificial Sequence:  Enzymatic Nucleic Acid
  misc_feature (31)..(31): n stands for inosine
cauugcugcugaugaggccguuaggccgaanccccguc

SEQ ID NO: 14498 - RNA, 38 nt, Artificial Sequence
  Description of Artificial Sequence:  Enzymatic Nucleic Acid
  misc_feature (31)..(31): n stands for inosine
ggcauugccugaugaggccguuaggccgaanagccccg

SEQ ID NO: 14499 - RNA, 38 nt, Artificial Sequence
  Description of Artificial Sequence:  Enzymatic Nucleic Acid
  misc_feature (31)..(31): n stands for inosine
aauggcaucugaugaggccguuaggccgaancugagcc

SEQ ID NO: 14500 - RNA, 38 nt, Artificial Sequence
  Description of Artificial Sequence:  Enzymatic Nucleic Acid
  misc_feature (31)..(31): n stands for inosine
acugaaaucugaugaggccguuaggccgaancauugcu

SEQ ID NO: 14501 - RNA, 38 nt, Artificial Sequence
  Description of Artificial Sequence:  Enzymatic Nucleic Acid
  misc_feature (31)..(31): n stands for inosine
cacugaaacugaugaggccguuaggccgaangcauugc

SEQ ID NO: 14502 - RNA, 38 nt, Artificial Sequence
  Description of Artificial Sequence:  Enzymatic Nucleic Acid
  misc_feature (31)..(31): n stands for inosine
gaagccaccugaugaggccguuaggccgaanaaauggc

SEQ ID NO: 14503 - RNA, 38 nt, Artificial Sequence
  Description of Artificial Sequence:  Enzymatic Nucleic Acid
  misc_feature (31)..(31): n stands for inosine
agcugggacugaugaggccguuaggccgaanccacuga

SEQ ID NO: 14504 - RNA, 38 nt, Artificial Sequence
  Description of Artificial Sequence:  Enzymatic Nucleic Acid
  misc_feature (31)..(31): n stands for inosine
cagagcugcugaugaggccguuaggccgaanaagccac

SEQ ID NO: 14505 - RNA, 38 nt, Artificial Sequence
  Description of Artificial Sequence:  Enzymatic Nucleic Acid
  misc_feature (31)..(31): n stands for inosine
ucagagcucugaugaggccguuaggccgaangaagcca

SEQ ID NO: 14506 - RNA, 38 nt, Artificial Sequence
  Description of Artificial Sequence:  Enzymatic Nucleic Acid
  misc_feature (31)..(31): n stands for inosine
gucagagccugaugaggccguuaggccgaanggaagcc

SEQ ID NO: 14507 - RNA, 38 nt, Artificial Sequence
  Description of Artificial Sequence:  Enzymatic Nucleic Acid
  misc_feature (31)..(31): n stands for inosine
agggucagcugaugaggccguuaggccgaancugggaa

SEQ ID NO: 14508 - RNA, 38 nt, Artificial Sequence
  Description of Artificial Sequence:  Enzymatic Nucleic Acid
  misc_feature (31)..(31): n stands for inosine
gaaggguccugaugaggccguuaggccgaanagcuggg

SEQ ID NO: 14509 - RNA, 38 nt, Artificial Sequence
  Description of Artificial Sequence:  Enzymatic Nucleic Acid
  misc_feature (31)..(31): n stands for inosine
uguagaagcugaugaggccguuaggccgaanucagagc

SEQ ID NO: 14510 - RNA, 38 nt, Artificial Sequence
  Description of Artificial Sequence:  Enzymatic Nucleic Acid
  misc_feature (31)..(31): n stands for inosine
auguagaacugaugaggccguuaggccgaangucagag

SEQ ID NO: 14511 - RNA, 38 nt, Artificial Sequence
  Description of Artificial Sequence:  Enzymatic Nucleic Acid
  misc_feature (31)..(31): n stands for inosine
aauguagacugaugaggccguuaggccgaanggucaga

SEQ ID NO: 14512 - RNA, 38 nt, Artificial Sequence
  Description of Artificial Sequence:  Enzymatic Nucleic Acid
  misc_feature (31)..(31): n stands for inosine
ucaaaugucugaugaggccguuaggccgaanaaggguc

SEQ ID NO: 14513 - RNA, 38 nt, Artificial Sequence
  Description of Artificial Sequence:  Enzymatic Nucleic Acid
  misc_feature (31)..(31): n stands for inosine
cccucaaacugaugaggccguuaggccgaanuagaagg

SEQ ID NO: 14514 - RNA, 38 nt, Artificial Sequence
  Description of Artificial Sequence:  Enzymatic Nucleic Acid
  misc_feature (31)..(31): n stands for inosine
ccuggcugcugaugaggccguuaggccgaancccucaa

SEQ ID NO: 14515 - RNA, 38 nt, Artificial Sequence
  Description of Artificial Sequence:  Enzymatic Nucleic Acid
  misc_feature (31)..(31): n stands for inosine
uccuggcucugaugaggccguuaggccgaangcccuca

SEQ ID NO: 14516 - RNA, 38 nt, Artificial Sequence
  Description of Artificial Sequence:  Enzymatic Nucleic Acid
  misc_feature (31)..(31): n stands for inosine
cuccuggccugaugaggccguuaggccgaanggcccuc

SEQ ID NO: 14517 - RNA, 38 nt, Artificial Sequence
  Description of Artificial Sequence:  Enzymatic Nucleic Acid
  misc_feature (31)..(31): n stands for inosine
cugcuccucugaugaggccguuaggccgaancugggcc

SEQ ID NO: 14518 - RNA, 38 nt, Artificial Sequence
  Description of Artificial Sequence:  Enzymatic Nucleic Acid
  misc_feature (31)..(31): n stands for inosine
ucugcucccugaugaggccguuaggccgaangcugggc

SEQ ID NO: 14519 - RNA, 38 nt, Artificial Sequence
  Description of Artificial Sequence:  Enzymatic Nucleic Acid
  misc_feature (31)..(31): n stands for inosine
uguccauccugaugaggccguuaggccgaancuccugg

SEQ ID NO: 14520 - RNA, 38 nt, Artificial Sequence
  Description of Artificial Sequence:  Enzymatic Nucleic Acid
  misc_feature (31)..(31): n stands for inosine
cucaucgccugaugaggccguuaggccgaanuccaucu

SEQ ID NO: 14521 - RNA, 38 nt, Artificial Sequence
  Description of Artificial Sequence:  Enzymatic Nucleic Acid
  misc_feature (31)..(31): n stands for inosine
ccagaaaacugaugaggccguuaggccgaanuccccuc

SEQ ID NO: 14522 - RNA, 38 nt, Artificial Sequence
  Description of Artificial Sequence:  Enzymatic Nucleic Acid
  misc_feature (31)..(31): n stands for inosine
cagaaucccugaugaggccguuaggccgaanaaaaugu

SEQ ID NO: 14523 - RNA, 38 nt, Artificial Sequence
  Description of Artificial Sequence:  Enzymatic Nucleic Acid
  misc_feature (31)..(31): n stands for inosine
ugccuccccugaugaggccguuaggccgaanaauccag

SEQ ID NO: 14524 - RNA, 38 nt, Artificial Sequence
  Description of Artificial Sequence:  Enzymatic Nucleic Acid
  misc_feature (31)..(31): n stands for inosine
ccuuuucucugaugaggccguuaggccgaanccuccca

SEQ ID NO: 14525 - RNA, 38 nt, Artificial Sequence
  Description of Artificial Sequence:  Enzymatic Nucleic Acid
  misc_feature (31)..(31): n stands for inosine
aagauauucugaugaggccguuaggccgaanuccuuuu

SEQ ID NO: 14526 - RNA, 38 nt, Artificial Sequence
  Description of Artificial Sequence:  Enzymatic Nucleic Acid
  misc_feature (31)..(31): n stands for inosine
uccaaaaacugaugaggccguuaggccgaanauauuug

SEQ ID NO: 14527 - RNA, 38 nt, Artificial Sequence
  Description of Artificial Sequence:  Enzymatic Nucleic Acid
  misc_feature (31)..(31): n stands for inosine
uuugcuuucugaugaggccguuaggccgaanuuccaaa

SEQ ID NO: 14528 - RNA, 38 nt, Artificial Sequence
  Description of Artificial Sequence:  Enzymatic Nucleic Acid
  misc_feature (31)..(31): n stands for inosine
cuaaaauucugaugaggccguuaggccgaancuuuagu

SEQ ID NO: 14529 - RNA, 38 nt, Artificial Sequence
  Description of Artificial Sequence:  Enzymatic Nucleic Acid
  misc_feature (31)..(31): n stands for inosine
uagguaaacugaugaggccguuaggccgaanucuaaaa

SEQ ID NO: 14530 - RNA, 38 nt, Artificial Sequence
  Description of Artificial Sequence:  Enzymatic Nucleic Acid
  misc_feature (31)..(31): n stands for inosine
auagguaacugaugaggccguuaggccgaangucuaaa

SEQ ID NO: 14531 - RNA, 38 nt, Artificial Sequence
  Description of Artificial Sequence:  Enzymatic Nucleic Acid
  misc_feature (31)..(31): n stands for inosine
cuuccauacugaugaggccguuaggccgaanuaaaggu

SEQ ID NO: 14532 - RNA, 38 nt, Artificial Sequence
  Description of Artificial Sequence:  Enzymatic Nucleic Acid
  misc_feature (31)..(31): n stands for inosine
acuuccaucugaugaggccguuaggccgaanguaaagg

SEQ ID NO: 14533 - RNA, 38 nt, Artificial Sequence
  Description of Artificial Sequence:  Enzymatic Nucleic Acid
  misc_feature (31)..(31): n stands for inosine
auggacaucugaugaggccguuaggccgaanaaccacu

SEQ ID NO: 14534 - RNA, 38 nt, Artificial Sequence
  Description of Artificial Sequence:  Enzymatic Nucleic Acid
  misc_feature (31)..(31): n stands for inosine
augagaaucugaugaggccguuaggccgaanacauaga

SEQ ID NO: 14535 - RNA, 38 nt, Artificial Sequence
  Description of Artificial Sequence:  Enzymatic Nucleic Acid
  misc_feature (31)..(31): n stands for inosine
aaugagaacugaugaggccguuaggccgaangacauag

SEQ ID NO: 14536 - RNA, 38 nt, Artificial Sequence
  Description of Artificial Sequence:  Enzymatic Nucleic Acid
  misc_feature (31)..(31): n stands for inosine
cacgaaugcugaugaggccguuaggccgaanaauggac

SEQ ID NO: 14537 - RNA, 38 nt, Artificial Sequence
  Description of Artificial Sequence:  Enzymatic Nucleic Acid
  misc_feature (31)..(31): n stands for inosine
gccacgaacugaugaggccguuaggccgaanagaaugg

SEQ ID NO: 14538 - RNA, 38 nt, Artificial Sequence
  Description of Artificial Sequence:  Enzymatic Nucleic Acid
  misc_feature (31)..(31): n stands for inosine
ucaaaacacugaugaggccguuaggccgaanccacgaa

SEQ ID NO: 14539 - RNA, 38 nt, Artificial Sequence
  Description of Artificial Sequence:  Enzymatic Nucleic Acid
  misc_feature (31)..(31): n stands for inosine
acccucagcugaugaggccguuaggccgaancuacaaa

SEQ ID NO: 14540 - RNA, 38 nt, Artificial Sequence
  Description of Artificial Sequence:  Enzymatic Nucleic Acid
  misc_feature (31)..(31): n stands for inosine
ccacccuccugaugaggccguuaggccgaanugcuaca

SEQ ID NO: 14541 - RNA, 38 nt, Artificial Sequence
  Description of Artificial Sequence:  Enzymatic Nucleic Acid
  misc_feature (31)..(31): n stands for inosine
gaguugagcugaugaggccguuaggccgaanccacccu

SEQ ID NO: 14542 - RNA, 38 nt, Artificial Sequence
  Description of Artificial Sequence:  Enzymatic Nucleic Acid
  misc_feature (31)..(31): n stands for inosine
cagaguugcugaugaggccguuaggccgaanugccacc

SEQ ID NO: 14543 - RNA, 38 nt, Artificial Sequence
  Description of Artificial Sequence:  Enzymatic Nucleic Acid
  misc_feature (31)..(31): n stands for inosine
cucagagucugaugaggccguuaggccgaanagugcca

SEQ ID NO: 14544 - RNA, 38 nt, Artificial Sequence
  Description of Artificial Sequence:  Enzymatic Nucleic Acid
  misc_feature (31)..(31): n stands for inosine
gggcucagcugaugaggccguuaggccgaanuugagug

SEQ ID NO: 14545 - RNA, 38 nt, Artificial Sequence
  Description of Artificial Sequence:  Enzymatic Nucleic Acid
  misc_feature (31)..(31): n stands for inosine
augggcuccugaugaggccguuaggccgaanaguugag

SEQ ID NO: 14546 - RNA, 38 nt, Artificial Sequence
  Description of Artificial Sequence:  Enzymatic Nucleic Acid
  misc_feature (31)..(31): n stands for inosine
aaaguaugcugaugaggccguuaggccgaancucagag

SEQ ID NO: 14547 - RNA, 38 nt, Artificial Sequence
  Description of Artificial Sequence:  Enzymatic Nucleic Acid
  misc_feature (31)..(31): n stands for inosine
aaaaguaucugaugaggccguuaggccgaangcucaga

SEQ ID NO: 14548 - RNA, 38 nt, Artificial Sequence
  Description of Artificial Sequence:  Enzymatic Nucleic Acid
  misc_feature (31)..(31): n stands for inosine
caaaaguacugaugaggccguuaggccgaanggcucag

SEQ ID NO: 14549 - RNA, 38 nt, Artificial Sequence
  Description of Artificial Sequence:  Enzymatic Nucleic Acid
  misc_feature (31)..(31): n stands for inosine
gagccaaacugaugaggccguuaggccgaanuaugggc

SEQ ID NO: 14550 - RNA, 38 nt, Artificial Sequence
  Description of Artificial Sequence:  Enzymatic Nucleic Acid
  misc_feature (31)..(31): n stands for inosine
acuagaggcugaugaggccguuaggccgaanccaaaag

SEQ ID NO: 14551 - RNA, 38 nt, Artificial Sequence
  Description of Artificial Sequence:  Enzymatic Nucleic Acid
  misc_feature (31)..(31): n stands for inosine
uuacuagacugaugaggccguuaggccgaanagccaaa

SEQ ID NO: 14552 - RNA, 38 nt, Artificial Sequence
  Description of Artificial Sequence:  Enzymatic Nucleic Acid
  misc_feature (31)..(31): n stands for inosine
cuuacuagcugaugaggccguuaggccgaangagccaa

SEQ ID NO: 14553 - RNA, 38 nt, Artificial Sequence
  Description of Artificial Sequence:  Enzymatic Nucleic Acid
  misc_feature (31)..(31): n stands for inosine
aucuuacucugaugaggccguuaggccgaanaggagcc

SEQ ID NO: 14554 - RNA, 38 nt, Artificial Sequence
  Description of Artificial Sequence:  Enzymatic Nucleic Acid
  misc_feature (31)..(31): n stands for inosine
guuuucagcugaugaggccguuaggccgaancaucuua

SEQ ID NO: 14555 - RNA, 38 nt, Artificial Sequence
  Description of Artificial Sequence:  Enzymatic Nucleic Acid
  misc_feature (31)..(31): n stands for inosine
aaguuuuccugaugaggccguuaggccgaanugcaucu

SEQ ID NO: 14556 - RNA, 38 nt, Artificial Sequence
  Description of Artificial Sequence:  Enzymatic Nucleic Acid
  misc_feature (31)..(31): n stands for inosine
ucuggcuacugaugaggccguuaggccgaanuuuucag

SEQ ID NO: 14557 - RNA, 38 nt, Artificial Sequence
  Description of Artificial Sequence:  Enzymatic Nucleic Acid
  misc_feature (31)..(31): n stands for inosine
cuaacucucugaugaggccguuaggccgaancuaaguu

SEQ ID NO: 14558 - RNA, 38 nt, Artificial Sequence
  Description of Artificial Sequence:  Enzymatic Nucleic Acid
  misc_feature (31)..(31): n stands for inosine
ccuaacuccugaugaggccguuaggccgaangcuaagu

SEQ ID NO: 14559 - RNA, 38 nt, Artificial Sequence
  Description of Artificial Sequence:  Enzymatic Nucleic Acid
  misc_feature (31)..(31): n stands for inosine
uggccuggcugaugaggccguuaggccgaanacaaccu

SEQ ID NO: 14560 - RNA, 38 nt, Artificial Sequence
  Description of Artificial Sequence:  Enzymatic Nucleic Acid
  misc_feature (31)..(31): n stands for inosine
cauggccucugaugaggccguuaggccgaanagacaac

SEQ ID NO: 14561 - RNA, 38 nt, Artificial Sequence
  Description of Artificial Sequence:  Enzymatic Nucleic Acid
  misc_feature (31)..(31): n stands for inosine
ucauggcccugaugaggccguuaggccgaangagacaa

SEQ ID NO: 14562 - RNA, 38 nt, Artificial Sequence
  Description of Artificial Sequence:  Enzymatic Nucleic Acid
  misc_feature (31)..(31): n stands for inosine
gccaucaucugaugaggccguuaggccgaanccuggag

SEQ ID NO: 14563 - RNA, 38 nt, Artificial Sequence
  Description of Artificial Sequence:  Enzymatic Nucleic Acid
  misc_feature (31)..(31): n stands for inosine
ggccaucacugaugaggccguuaggccgaangccugga

SEQ ID NO: 14564 - RNA, 38 nt, Artificial Sequence
  Description of Artificial Sequence:  Enzymatic Nucleic Acid
  misc_feature (31)..(31): n stands for inosine
caguguaacugaugaggccguuaggccgaanccaucau

SEQ ID NO: 14565 - RNA, 38 nt, Artificial Sequence
  Description of Artificial Sequence:  Enzymatic Nucleic Acid
  misc_feature (31)..(31): n stands for inosine
ucaguguacugaugaggccguuaggccgaangccauca

SEQ ID NO: 14566 - RNA, 38 nt, Artificial Sequence
  Description of Artificial Sequence:  Enzymatic Nucleic Acid
  misc_feature (31)..(31): n stands for inosine
auuuucagcugaugaggccguuaggccgaanuaaggcc

SEQ ID NO: 14567 - RNA, 38 nt, Artificial Sequence
  Description of Artificial Sequence:  Enzymatic Nucleic Acid
  misc_feature (31)..(31): n stands for inosine
acauuuuccugaugaggccguuaggccgaanuguaagg

SEQ ID NO: 14568 - RNA, 38 nt, Artificial Sequence
  Description of Artificial Sequence:  Enzymatic Nucleic Acid
  misc_feature (31)..(31): n stands for inosine
auagaaugcugaugaggccguuaggccgaanacauuuu

SEQ ID NO: 14569 - RNA, 38 nt, Artificial Sequence
  Description of Artificial Sequence:  Enzymatic Nucleic Acid
  misc_feature (31)..(31): n stands for inosine
aaauagaacugaugaggccguuaggccgaanugacauu

SEQ ID NO: 14570 - RNA, 38 nt, Artificial Sequence
  Description of Artificial Sequence:  Enzymatic Nucleic Acid
  misc_feature (31)..(31): n stands for inosine
cccaaaaucugaugaggccguuaggccgaanaauguga

SEQ ID NO: 14571 - RNA, 38 nt, Artificial Sequence
  Description of Artificial Sequence:  Enzymatic Nucleic Acid
  misc_feature (31)..(31): n stands for inosine
aagugucucugaugaggccguuaggccgaanacuauau

SEQ ID NO: 14572 - RNA, 38 nt, Artificial Sequence
  Description of Artificial Sequence:  Enzymatic Nucleic Acid
  misc_feature (31)..(31): n stands for inosine
uaaguguccugaugaggccguuaggccgaangacuaua

SEQ ID NO: 14573 - RNA, 38 nt, Artificial Sequence
  Description of Artificial Sequence:  Enzymatic Nucleic Acid
  misc_feature (31)..(31): n stands for inosine
gaguuaagcugaugaggccguuaggccgaanucuggac

SEQ ID NO: 14574 - RNA, 38 nt, Artificial Sequence
  Description of Artificial Sequence:  Enzymatic Nucleic Acid
  misc_feature (31)..(31): n stands for inosine
uugaguuacugaugaggccguuaggccgaanugucugg

SEQ ID NO: 14575 - RNA, 38 nt, Artificial Sequence
  Description of Artificial Sequence:  Enzymatic Nucleic Acid
  misc_feature (31)..(31): n stands for inosine
agaaauugcugaugaggccguuaggccgaanuuaagug

SEQ ID NO: 14576 - RNA, 38 nt, Artificial Sequence
  Description of Artificial Sequence:  Enzymatic Nucleic Acid
  misc_feature (31)..(31): n stands for inosine
caagaaaucugaugaggccguuaggccgaanaguuaag

SEQ ID NO: 14577 - RNA, 38 nt, Artificial Sequence
  Description of Artificial Sequence:  Enzymatic Nucleic Acid
  misc_feature (31)..(31): n stands for inosine
uaauaccacugaugaggccguuaggccgaanaaauuga

SEQ ID NO: 14578 - RNA, 38 nt, Artificial Sequence
  Description of Artificial Sequence:  Enzymatic Nucleic Acid
  misc_feature (31)..(31): n stands for inosine
ugcaaaaccugaugaggccguuaggccgaanaauaaua

SEQ ID NO: 14579 - RNA, 38 nt, Artificial Sequence
  Description of Artificial Sequence:  Enzymatic Nucleic Acid
  misc_feature (31)..(31): n stands for inosine
acuaacugcugaugaggccguuaggccgaancaaaaca

SEQ ID NO: 14580 - RNA, 38 nt, Artificial Sequence
  Description of Artificial Sequence:  Enzymatic Nucleic Acid
  misc_feature (31)..(31): n stands for inosine
caacuaaccugaugaggccguuaggccgaanugcaaaa

SEQ ID NO: 14581 - RNA, 38 nt, Artificial Sequence
  Description of Artificial Sequence:  Enzymatic Nucleic Acid
  misc_feature (31)..(31): n stands for inosine
uucuucuccugaugaggccguuaggccgaancuuucuu

SEQ ID NO: 14582 - RNA, 38 nt, Artificial Sequence
  Description of Artificial Sequence:  Enzymatic Nucleic Acid
  misc_feature (31)..(31): n stands for inosine
cucaggaccugaugaggccguuaggccgaancauuuuc

SEQ ID NO: 14583 - RNA, 38 nt, Artificial Sequence
  Description of Artificial Sequence:  Enzymatic Nucleic Acid
  misc_feature (31)..(31): n stands for inosine
ucuccucacugaugaggccguuaggccgaanacugcau

SEQ ID NO: 14584 - RNA, 38 nt, Artificial Sequence
  Description of Artificial Sequence:  Enzymatic Nucleic Acid
  misc_feature (31)..(31): n stands for inosine
cucuccuccugaugaggccguuaggccgaangacugca

SEQ ID NO: 14585 - RNA, 38 nt, Artificial Sequence
  Description of Artificial Sequence:  Enzymatic Nucleic Acid
  misc_feature (31)..(31): n stands for inosine
ugauauggcugaugaggccguuaggccgaanaaaacuc

SEQ ID NO: 14586 - RNA, 38 nt, Artificial Sequence
  Description of Artificial Sequence:  Enzymatic Nucleic Acid
  misc_feature (31)..(31): n stands for inosine
uuugauaucugaugaggccguuaggccgaanagaaaac

SEQ ID NO: 14587 - RNA, 38 nt, Artificial Sequence
  Description of Artificial Sequence:  Enzymatic Nucleic Acid
  misc_feature (31)..(31): n stands for inosine
uuuugauacugaugaggccguuaggccgaangagaaaa

SEQ ID NO: 14588 - RNA, 38 nt, Artificial Sequence
  Description of Artificial Sequence:  Enzymatic Nucleic Acid
  misc_feature (31)..(31): n stands for inosine
ccucguuucugaugaggccguuaggccgaanauaugga

SEQ ID NO: 14589 - RNA, 38 nt, Artificial Sequence
  Description of Artificial Sequence:  Enzymatic Nucleic Acid
  misc_feature (31)..(31): n stands for inosine
ccuccauccugaugaggccguuaggccgaancccucgu

SEQ ID NO: 14590 - RNA, 38 nt, Artificial Sequence
  Description of Artificial Sequence:  Enzymatic Nucleic Acid
  misc_feature (31)..(31): n stands for inosine
gaccuuaucugaugaggccguuaggccgaanaccuuuu

SEQ ID NO: 14591 - RNA, 38 nt, Artificial Sequence
  Description of Artificial Sequence:  Enzymatic Nucleic Acid
  misc_feature (31)..(31): n stands for inosine
ucuucccucugaugaggccguuaggccgaanaccuuau

SEQ ID NO: 14592 - RNA, 38 nt, Artificial Sequence
  Description of Artificial Sequence:  Enzymatic Nucleic Acid
  misc_feature (31)..(31): n stands for inosine
agagacggcugaugaggccguuaggccgaanucuuccc

SEQ ID NO: 14593 - RNA, 38 nt, Artificial Sequence
  Description of Artificial Sequence:  Enzymatic Nucleic Acid
  misc_feature (31)..(31): n stands for inosine
uagagacgcugaugaggccguuaggccgaangucuucc

SEQ ID NO: 14594 - RNA, 38 nt, Artificial Sequence
  Description of Artificial Sequence:  Enzymatic Nucleic Acid
  misc_feature (31)..(31): n stands for inosine
auagagaccugaugaggccguuaggccgaanggucuuc

SEQ ID NO: 14595 - RNA, 38 nt, Artificial Sequence
  Description of Artificial Sequence:  Enzymatic Nucleic Acid
  misc_feature (31)..(31): n stands for inosine
ugguauagcugaugaggccguuaggccgaanacggggu

SEQ ID NO: 14596 - RNA, 38 nt, Artificial Sequence
  Description of Artificial Sequence:  Enzymatic Nucleic Acid
  misc_feature (31)..(31): n stands for inosine
guugguaucugaugaggccguuaggccgaanagacggg

SEQ ID NO: 14597 - RNA, 38 nt, Artificial Sequence
  Description of Artificial Sequence:  Enzymatic Nucleic Acid
  misc_feature (31)..(31): n stands for inosine
guuugguucugaugaggccguuaggccgaanuauagag

SEQ ID NO: 14598 - RNA, 38 nt, Artificial Sequence
  Description of Artificial Sequence:  Enzymatic Nucleic Acid
  misc_feature (31)..(31): n stands for inosine
gguuuggucugaugaggccguuaggccgaanguauaga

SEQ ID NO: 14599 - RNA, 38 nt, Artificial Sequence
  Description of Artificial Sequence:  Enzymatic Nucleic Acid
  misc_feature (31)..(31): n stands for inosine
auugguuucugaugaggccguuaggccgaanuugguau

SEQ ID NO: 14600 - RNA, 38 nt, Artificial Sequence
  Description of Artificial Sequence:  Enzymatic Nucleic Acid
  misc_feature (31)..(31): n stands for inosine
aauugguucugaugaggccguuaggccgaanguuggua

SEQ ID NO: 14601 - RNA, 38 nt, Artificial Sequence
  Description of Artificial Sequence:  Enzymatic Nucleic Acid
  misc_feature (31)..(31): n stands for inosine
ggugaauucugaugaggccguuaggccgaanuuugguu

SEQ ID NO: 14602 - RNA, 38 nt, Artificial Sequence
  Description of Artificial Sequence:  Enzymatic Nucleic Acid
  misc_feature (31)..(31): n stands for inosine
uggugaaucugaugaggccguuaggccgaanguuuggu

SEQ ID NO: 14603 - RNA, 38 nt, Artificial Sequence
  Description of Artificial Sequence:  Enzymatic Nucleic Acid
  misc_feature (31)..(31): n stands for inosine
uguguuggcugaugaggccguuaggccgaanaauuggu

SEQ ID NO: 14604 - RNA, 38 nt, Artificial Sequence
  Description of Artificial Sequence:  Enzymatic Nucleic Acid
  misc_feature (31)..(31): n stands for inosine
acuguguucugaugaggccguuaggccgaanugaauug

SEQ ID NO: 14605 - RNA, 38 nt, Artificial Sequence
  Description of Artificial Sequence:  Enzymatic Nucleic Acid
  misc_feature (31)..(31): n stands for inosine
aacugugucugaugaggccguuaggccgaangugaauu

SEQ ID NO: 14606 - RNA, 38 nt, Artificial Sequence
  Description of Artificial Sequence:  Enzymatic Nucleic Acid
  misc_feature (31)..(31): n stands for inosine
cccaacugcugaugaggccguuaggccgaanuugguga

SEQ ID NO: 14607 - RNA, 38 nt, Artificial Sequence
  Description of Artificial Sequence:  Enzymatic Nucleic Acid
  misc_feature (31)..(31): n stands for inosine
gucccaaccugaugaggccguuaggccgaanuguuggu

SEQ ID NO: 14608 - RNA, 38 nt, Artificial Sequence
  Description of Artificial Sequence:  Enzymatic Nucleic Acid
  misc_feature (31)..(31): n stands for inosine
guguuuugcugaugaggccguuaggccgaanucccaac

SEQ ID NO: 14609 - RNA, 38 nt, Artificial Sequence
  Description of Artificial Sequence:  Enzymatic Nucleic Acid
  misc_feature (31)..(31): n stands for inosine
uguguuuucugaugaggccguuaggccgaangucccaa

SEQ ID NO: 14610 - RNA, 38 nt, Artificial Sequence
  Description of Artificial Sequence:  Enzymatic Nucleic Acid
  misc_feature (31)..(31): n stands for inosine
cuguguuucugaugaggccguuaggccgaangguccca

SEQ ID NO: 14611 - RNA, 38 nt, Artificial Sequence
  Description of Artificial Sequence:  Enzymatic Nucleic Acid
  misc_feature (31)..(31): n stands for inosine
acuuccugcugaugaggccguuaggccgaanuuuuggg

SEQ ID NO: 14612 - RNA, 38 nt, Artificial Sequence
  Description of Artificial Sequence:  Enzymatic Nucleic Acid
  misc_feature (31)..(31): n stands for inosine
ugacuucccugaugaggccguuaggccgaanuguuuug

SEQ ID NO: 14613 - RNA, 38 nt, Artificial Sequence
  Description of Artificial Sequence:  Enzymatic Nucleic Acid
  misc_feature (31)..(31): n stands for inosine
aacgugaccugaugaggccguuaggccgaanacuuccu

SEQ ID NO: 14614 - RNA, 38 nt, Artificial Sequence
  Description of Artificial Sequence:  Enzymatic Nucleic Acid
  misc_feature (31)..(31): n stands for inosine
aggaaacgcugaugaggccguuaggccgaanacugacu

SEQ ID NO: 14615 - RNA, 38 nt, Artificial Sequence
  Description of Artificial Sequence:  Enzymatic Nucleic Acid
  misc_feature (31)..(31): n stands for inosine
aaugaaaacugaugaggccguuaggccgaanaaacgug

SEQ ID NO: 14616 - RNA, 38 nt, Artificial Sequence
  Description of Artificial Sequence:  Enzymatic Nucleic Acid
  misc_feature (31)..(31): n stands for inosine
aaaugaaacugaugaggccguuaggccgaangaaacgu

SEQ ID NO: 14617 - RNA, 38 nt, Artificial Sequence
  Description of Artificial Sequence:  Enzymatic Nucleic Acid
  misc_feature (31)..(31): n stands for inosine
ccauuaaacugaugaggccguuaggccgaanaaaagga

SEQ ID NO: 14618 - RNA, 38 nt, Artificial Sequence
  Description of Artificial Sequence:  Enzymatic Nucleic Acid
  misc_feature (31)..(31): n stands for inosine
gagauagucugaugaggccguuaggccgaanaaucccc

SEQ ID NO: 14619 - RNA, 38 nt, Artificial Sequence
  Description of Artificial Sequence:  Enzymatic Nucleic Acid
  misc_feature (31)..(31): n stands for inosine
ugagauagcugaugaggccguuaggccgaangaauccc

SEQ ID NO: 14620 - RNA, 38 nt, Artificial Sequence
  Description of Artificial Sequence:  Enzymatic Nucleic Acid
  misc_feature (31)..(31): n stands for inosine
ugugagaucugaugaggccguuaggccgaanuggaauc

SEQ ID NO: 14621 - RNA, 38 nt, Artificial Sequence
  Description of Artificial Sequence:  Enzymatic Nucleic Acid
  misc_feature (31)..(31): n stands for inosine
uuagugugcugaugaggccguuaggccgaanauagugg

SEQ ID NO: 14622 - RNA, 38 nt, Artificial Sequence
  Description of Artificial Sequence:  Enzymatic Nucleic Acid
  misc_feature (31)..(31): n stands for inosine
gauuagugcugaugaggccguuaggccgaanagauagu

SEQ ID NO: 14623 - RNA, 38 nt, Artificial Sequence
  Description of Artificial Sequence:  Enzymatic Nucleic Acid
  misc_feature (31)..(31): n stands for inosine
cagauuagcugaugaggccguuaggccgaanugagaua

SEQ ID NO: 14624 - RNA, 38 nt, Artificial Sequence
  Description of Artificial Sequence:  Enzymatic Nucleic Acid
  misc_feature (31)..(31): n stands for inosine
uucagauucugaugaggccguuaggccgaanugugaga

SEQ ID NO: 14625 - RNA, 38 nt, Artificial Sequence
  Description of Artificial Sequence:  Enzymatic Nucleic Acid
  misc_feature (31)..(31): n stands for inosine
auccuuuccugaugaggccguuaggccgaanauuagug

SEQ ID NO: 14626 - RNA, 38 nt, Artificial Sequence
  Description of Artificial Sequence:  Enzymatic Nucleic Acid
  misc_feature (31)..(31): n stands for inosine
ccagcuaacugaugaggccguuaggccgaancucuucc

SEQ ID NO: 14627 - RNA, 38 nt, Artificial Sequence
  Description of Artificial Sequence:  Enzymatic Nucleic Acid
  misc_feature (31)..(31): n stands for inosine
uaugcgcccugaugaggccguuaggccgaancuaaugc

SEQ ID NO: 14628 - RNA, 38 nt, Artificial Sequence
  Description of Artificial Sequence:  Enzymatic Nucleic Acid
  misc_feature (31)..(31): n stands for inosine
gcuuaauacugaugaggccguuaggccgaancgccagc

SEQ ID NO: 14629 - RNA, 38 nt, Artificial Sequence
  Description of Artificial Sequence:  Enzymatic Nucleic Acid
  misc_feature (31)..(31): n stands for inosine
gcuuaaagcugaugaggccguuaggccgaancuuaaua

SEQ ID NO: 14630 - RNA, 38 nt, Artificial Sequence
  Description of Artificial Sequence:  Enzymatic Nucleic Acid
  misc_feature (31)..(31): n stands for inosine
gagcuuaacugaugaggccguuaggccgaanugcuuaa

SEQ ID NO: 14631 - RNA, 38 nt, Artificial Sequence
  Description of Artificial Sequence:  Enzymatic Nucleic Acid
  misc_feature (31)..(31): n stands for inosine
acucaaggcugaugaggccguuaggccgaancuuaaag

SEQ ID NO: 14632 - RNA, 38 nt, Artificial Sequence
  Description of Artificial Sequence:  Enzymatic Nucleic Acid
  misc_feature (31)..(31): n stands for inosine
uuacucaacugaugaggccguuaggccgaanagcuuaa

SEQ ID NO: 14633 - RNA, 38 nt, Artificial Sequence
  Description of Artificial Sequence:  Enzymatic Nucleic Acid
  misc_feature (31)..(31): n stands for inosine
uuuacucacugaugaggccguuaggccgaangagcuua

SEQ ID NO: 14634 - RNA, 38 nt, Artificial Sequence
  Description of Artificial Sequence:  Enzymatic Nucleic Acid
  misc_feature (31)..(31): n stands for inosine
aaauaccucugaugaggccguuaggccgaancauaaau

SEQ ID NO: 14635 - RNA, 38 nt, Artificial Sequence
  Description of Artificial Sequence:  Enzymatic Nucleic Acid
  misc_feature (31)..(31): n stands for inosine
ccaacuggcugaugaggccguuaggccgaanaaauacc

SEQ ID NO: 14636 - RNA, 38 nt, Artificial Sequence
  Description of Artificial Sequence:  Enzymatic Nucleic Acid
  misc_feature (31)..(31): n stands for inosine
ucccaacucugaugaggccguuaggccgaanagaaaua

SEQ ID NO: 14637 - RNA, 38 nt, Artificial Sequence
  Description of Artificial Sequence:  Enzymatic Nucleic Acid
  misc_feature (31)..(31): n stands for inosine
gucccaaccugaugaggccguuaggccgaangagaaau

SEQ ID NO: 14638 - RNA, 38 nt, Artificial Sequence
  Description of Artificial Sequence:  Enzymatic Nucleic Acid
  misc_feature (31)..(31): n stands for inosine
auauccugcugaugaggccguuaggccgaanucccaac

SEQ ID NO: 14639 - RNA, 38 nt, Artificial Sequence
  Description of Artificial Sequence:  Enzymatic Nucleic Acid
  misc_feature (31)..(31): n stands for inosine
uaauaucccugaugaggccguuaggccgaanaguccca

SEQ ID NO: 14640 - RNA, 38 nt, Artificial Sequence
  Description of Artificial Sequence:  Enzymatic Nucleic Acid
  misc_feature (31)..(31): n stands for inosine
cuagugaucugaugaggccguuaggccgaancucauua

SEQ ID NO: 14641 - RNA, 38 nt, Artificial Sequence
  Description of Artificial Sequence:  Enzymatic Nucleic Acid
  misc_feature (31)..(31): n stands for inosine
ucuagugacugaugaggccguuaggccgaangcucauu

SEQ ID NO: 14642 - RNA, 38 nt, Artificial Sequence
  Description of Artificial Sequence:  Enzymatic Nucleic Acid
  misc_feature (31)..(31): n stands for inosine
ucuucuagcugaugaggccguuaggccgaanauggcuc

SEQ ID NO: 14643 - RNA, 38 nt, Artificial Sequence
  Description of Artificial Sequence:  Enzymatic Nucleic Acid
  misc_feature (31)..(31): n stands for inosine
uuucuucucugaugaggccguuaggccgaanugauggc

SEQ ID NO: 14644 - RNA, 38 nt, Artificial Sequence
  Description of Artificial Sequence:  Enzymatic Nucleic Acid
  misc_feature (31)..(31): n stands for inosine
ugaaaaugcugaugaggccguuaggccgaancuuuucu

SEQ ID NO: 14645 - RNA, 38 nt, Artificial Sequence
  Description of Artificial Sequence:  Enzymatic Nucleic Acid
  misc_feature (31)..(31): n stands for inosine
uugaaaaucugaugaggccguuaggccgaangcuuuuc

SEQ ID NO: 14646 - RNA, 38 nt, Artificial Sequence
  Description of Artificial Sequence:  Enzymatic Nucleic Acid
  misc_feature (31)..(31): n stands for inosine
guugaaaacugaugaggccguuaggccgaanggcuuuu

SEQ ID NO: 14647 - RNA, 38 nt, Artificial Sequence
  Description of Artificial Sequence:  Enzymatic Nucleic Acid
  misc_feature (31)..(31): n stands for inosine
aaagcagucugaugaggccguuaggccgaanaaaaugg

SEQ ID NO: 14648 - RNA, 38 nt, Artificial Sequence
  Description of Artificial Sequence:  Enzymatic Nucleic Acid
  misc_feature (31)..(31): n stands for inosine
uucaaagccugaugaggccguuaggccgaanuugaaaa

SEQ ID NO: 14649 - RNA, 38 nt, Artificial Sequence
  Description of Artificial Sequence:  Enzymatic Nucleic Acid
  misc_feature (31)..(31): n stands for inosine
aguuucaacugaugaggccguuaggccgaancaguuga

SEQ ID NO: 14650 - RNA, 38 nt, Artificial Sequence
  Description of Artificial Sequence:  Enzymatic Nucleic Acid
  misc_feature (31)..(31): n stands for inosine
cccaggcacugaugaggccguuaggccgaanuuucaaa

SEQ ID NO: 14651 - RNA, 38 nt, Artificial Sequence
  Description of Artificial Sequence:  Enzymatic Nucleic Acid
  misc_feature (31)..(31): n stands for inosine
agaccccacugaugaggccguuaggccgaancaaguuu

SEQ ID NO: 14652 - RNA, 38 nt, Artificial Sequence
  Description of Artificial Sequence:  Enzymatic Nucleic Acid
  misc_feature (31)..(31): n stands for inosine
cagacccccugaugaggccguuaggccgaangcaaguu

SEQ ID NO: 14653 - RNA, 38 nt, Artificial Sequence
  Description of Artificial Sequence:  Enzymatic Nucleic Acid
  misc_feature (31)..(31): n stands for inosine
ucaugcuccugaugaggccguuaggccgaanaccccag

SEQ ID NO: 14654 - RNA, 38 nt, Artificial Sequence
  Description of Artificial Sequence:  Enzymatic Nucleic Acid
  misc_feature (31)..(31): n stands for inosine
ucccaucacugaugaggccguuaggccgaancucagac

SEQ ID NO: 14655 - RNA, 38 nt, Artificial Sequence
  Description of Artificial Sequence:  Enzymatic Nucleic Acid
  misc_feature (31)..(31): n stands for inosine
uccuaccccugaugaggccguuaggccgaanucucccu

SEQ ID NO: 14656 - RNA, 38 nt, Artificial Sequence
  Description of Artificial Sequence:  Enzymatic Nucleic Acid
  misc_feature (31)..(31): n stands for inosine
gaagaguacugaugaggccguuaggccgaancgcccuu

SEQ ID NO: 14657 - RNA, 38 nt, Artificial Sequence
  Description of Artificial Sequence:  Enzymatic Nucleic Acid
  misc_feature (31)..(31): n stands for inosine
ugaagagucugaugaggccguuaggccgaangcgcccu

SEQ ID NO: 14658 - RNA, 38 nt, Artificial Sequence
  Description of Artificial Sequence:  Enzymatic Nucleic Acid
  misc_feature (31)..(31): n stands for inosine
cccugaagcugaugaggccguuaggccgaanuaggcgc

SEQ ID NO: 14659 - RNA, 38 nt, Artificial Sequence
  Description of Artificial Sequence:  Enzymatic Nucleic Acid
  misc_feature (31)..(31): n stands for inosine
gacccugacugaugaggccguuaggccgaanaguaggc

SEQ ID NO: 14660 - RNA, 38 nt, Artificial Sequence
  Description of Artificial Sequence:  Enzymatic Nucleic Acid
  misc_feature (31)..(31): n stands for inosine
uuagaccccugaugaggccguuaggccgaanaagagua

SEQ ID NO: 14661 - RNA, 38 nt, Artificial Sequence
  Description of Artificial Sequence:  Enzymatic Nucleic Acid
  misc_feature (31)..(31): n stands for inosine
ugaucuuucugaugaggccguuaggccgaanacccuga

SEQ ID NO: 14662 - RNA, 38 nt, Artificial Sequence
  Description of Artificial Sequence:  Enzymatic Nucleic Acid
  misc_feature (31)..(31): n stands for inosine
ggcccacucugaugaggccguuaggccgaanaucuuua

SEQ ID NO: 14663 - RNA, 38 nt, Artificial Sequence
  Description of Artificial Sequence:  Enzymatic Nucleic Acid
  misc_feature (31)..(31): n stands for inosine
cgauccaacugaugaggccguuaggccgaancccacuu

SEQ ID NO: 14664 - RNA, 38 nt, Artificial Sequence
  Description of Artificial Sequence:  Enzymatic Nucleic Acid
  misc_feature (31)..(31): n stands for inosine
gcgauccacugaugaggccguuaggccgaangcccacu

SEQ ID NO: 14665 - RNA, 38 nt, Artificial Sequence
  Description of Artificial Sequence:  Enzymatic Nucleic Acid
  misc_feature (31)..(31): n stands for inosine
gccagcuucugaugaggccguuaggccgaancgaucca

SEQ ID NO: 14666 - RNA, 38 nt, Artificial Sequence
  Description of Artificial Sequence:  Enzymatic Nucleic Acid
  misc_feature (31)..(31): n stands for inosine
acagagcccugaugaggccguuaggccgaancuuagcg

SEQ ID NO: 14667 - RNA, 38 nt, Artificial Sequence
  Description of Artificial Sequence:  Enzymatic Nucleic Acid
  misc_feature (31)..(31): n stands for inosine
ucaaacagcugaugaggccguuaggccgaanccagcuu

SEQ ID NO: 14668 - RNA, 38 nt, Artificial Sequence
  Description of Artificial Sequence:  Enzymatic Nucleic Acid
  misc_feature (31)..(31): n stands for inosine
caucaaaccugaugaggccguuaggccgaanagccagc

SEQ ID NO: 14669 - RNA, 38 nt, Artificial Sequence
  Description of Artificial Sequence:  Enzymatic Nucleic Acid
  misc_feature (31)..(31): n stands for inosine
gcauaaaucugaugaggccguuaggccgaancaucaaa

SEQ ID NO: 14670 - RNA, 38 nt, Artificial Sequence
  Description of Artificial Sequence:  Enzymatic Nucleic Acid
  misc_feature (31)..(31): n stands for inosine
cccuaacucugaugaggccguuaggccgaancauaaau

SEQ ID NO: 14671 - RNA, 38 nt, Artificial Sequence
  Description of Artificial Sequence:  Enzymatic Nucleic Acid
  misc_feature (31)..(31): n stands for inosine
aaauacaucugaugaggccguuaggccgaanacccuaa

SEQ ID NO: 14672 - RNA, 38 nt, Artificial Sequence
  Description of Artificial Sequence:  Enzymatic Nucleic Acid
  misc_feature (31)..(31): n stands for inosine
gaagaguacugaugaggccguuaggccgaancgcaucc

SEQ ID NO: 14673 - RNA, 38 nt, Artificial Sequence
  Description of Artificial Sequence:  Enzymatic Nucleic Acid
  misc_feature (31)..(31): n stands for inosine
ugaagagucugaugaggccguuaggccgaangcgcauc

SEQ ID NO: 14674 - RNA, 38 nt, Artificial Sequence
  Description of Artificial Sequence:  Enzymatic Nucleic Acid
  misc_feature (31)..(31): n stands for inosine
gaaggugccugaugaggccguuaggccgaanacauccu

SEQ ID NO: 14675 - RNA, 38 nt, Artificial Sequence
  Description of Artificial Sequence:  Enzymatic Nucleic Acid
  misc_feature (31)..(31): n stands for inosine
gcagaaggcugaugaggccguuaggccgaancagacau

SEQ ID NO: 14676 - RNA, 38 nt, Artificial Sequence
  Description of Artificial Sequence:  Enzymatic Nucleic Acid
  misc_feature (31)..(31): n stands for inosine
cugcagaacugaugaggccguuaggccgaanugcagac

SEQ ID NO: 14677 - RNA, 38 nt, Artificial Sequence
  Description of Artificial Sequence:  Enzymatic Nucleic Acid
  misc_feature (31)..(31): n stands for inosine
gcugcagacugaugaggccguuaggccgaangugcaga

SEQ ID NO: 14678 - RNA, 38 nt, Artificial Sequence
  Description of Artificial Sequence:  Enzymatic Nucleic Acid
  misc_feature (31)..(31): n stands for inosine
cuggcugccugaugaggccguuaggccgaanaaggugc

SEQ ID NO: 14679 - RNA, 38 nt, Artificial Sequence
  Description of Artificial Sequence:  Enzymatic Nucleic Acid
  misc_feature (31)..(31): n stands for inosine
ugacuggccugaugaggccguuaggccgaancagaagg

SEQ ID NO: 14680 - RNA, 38 nt, Artificial Sequence
  Description of Artificial Sequence:  Enzymatic Nucleic Acid
  misc_feature (31)..(31): n stands for inosine
uucugacucugaugaggccguuaggccgaancugcaga

SEQ ID NO: 14681 - RNA, 38 nt, Artificial Sequence
  Description of Artificial Sequence:  Enzymatic Nucleic Acid
  misc_feature (31)..(31): n stands for inosine
cuucugaccugaugaggccguuaggccgaangcugcag

SEQ ID NO: 14682 - RNA, 38 nt, Artificial Sequence
  Description of Artificial Sequence:  Enzymatic Nucleic Acid
  misc_feature (31)..(31): n stands for inosine
ccagcuuccugaugaggccguuaggccgaanacuggcu

SEQ ID NO: 14683 - RNA, 38 nt, Artificial Sequence
  Description of Artificial Sequence:  Enzymatic Nucleic Acid
  misc_feature (31)..(31): n stands for inosine
gccucucccugaugaggccguuaggccgaancuucuga

SEQ ID NO: 14684 - RNA, 38 nt, Artificial Sequence
  Description of Artificial Sequence:  Enzymatic Nucleic Acid
  misc_feature (31)..(31): n stands for inosine
uccacugucugaugaggccguuaggccgaanccucucc

SEQ ID NO: 14685 - RNA, 38 nt, Artificial Sequence
  Description of Artificial Sequence:  Enzymatic Nucleic Acid
  misc_feature (31)..(31): n stands for inosine
caauccaccugaugaggccguuaggccgaanuugccuc

SEQ ID NO: 14686 - RNA, 38 nt, Artificial Sequence
  Description of Artificial Sequence:  Enzymatic Nucleic Acid
  misc_feature (31)..(31): n stands for inosine
caagaagccugaugaggccguuaggccgaancaaucca

SEQ ID NO: 14687 - RNA, 38 nt, Artificial Sequence
  Description of Artificial Sequence:  Enzymatic Nucleic Acid
  misc_feature (31)..(31): n stands for inosine
ccccaagacugaugaggccguuaggccgaancagcaau

SEQ ID NO: 14688 - RNA, 38 nt, Artificial Sequence
  Description of Artificial Sequence:  Enzymatic Nucleic Acid
  misc_feature (31)..(31): n stands for inosine
ucuccccacugaugaggccguuaggccgaanaagcagc

SEQ ID NO: 14689 - RNA, 38 nt, Artificial Sequence
  Description of Artificial Sequence:  Enzymatic Nucleic Acid
  misc_feature (31)..(31): n stands for inosine
uaaaaggacugaugaggccguuaggccgaancauacuc

SEQ ID NO: 14690 - RNA, 38 nt, Artificial Sequence
  Description of Artificial Sequence:  Enzymatic Nucleic Acid
  misc_feature (31)..(31): n stands for inosine
ggauaaaacugaugaggccguuaggccgaanaagcaua

SEQ ID NO: 14691 - RNA, 38 nt, Artificial Sequence
  Description of Artificial Sequence:  Enzymatic Nucleic Acid
  misc_feature (31)..(31): n stands for inosine
uggauaaacugaugaggccguuaggccgaangaagcau

SEQ ID NO: 14692 - RNA, 38 nt, Artificial Sequence
  Description of Artificial Sequence:  Enzymatic Nucleic Acid
  misc_feature (31)..(31): n stands for inosine
aauuacaucugaugaggccguuaggccgaanauaaaag

SEQ ID NO: 14693 - RNA, 38 nt, Artificial Sequence
  Description of Artificial Sequence:  Enzymatic Nucleic Acid
  misc_feature (31)..(31): n stands for inosine
aaauuacacugaugaggccguuaggccgaangauaaaa

SEQ ID NO: 14694 - RNA, 38 nt, Artificial Sequence
  Description of Artificial Sequence:  Enzymatic Nucleic Acid
  misc_feature (31)..(31): n stands for inosine
gguucuaccugaugaggccguuaggccgaanuuaaauu

SEQ ID NO: 14695 - RNA, 38 nt, Artificial Sequence
  Description of Artificial Sequence:  Enzymatic Nucleic Acid
  misc_feature (31)..(31): n stands for inosine
agagcucacugaugaggccguuaggccgaanuucuaca

SEQ ID NO: 14696 - RNA, 38 nt, Artificial Sequence
  Description of Artificial Sequence:  Enzymatic Nucleic Acid
  misc_feature (31)..(31): n stands for inosine
uagagcuccugaugaggccguuaggccgaanguucuac

SEQ ID NO: 14697 - RNA, 38 nt, Artificial Sequence
  Description of Artificial Sequence:  Enzymatic Nucleic Acid
  misc_feature (31)..(31): n stands for inosine
uuacuuagcugaugaggccguuaggccgaancucaggu

SEQ ID NO: 14698 - RNA, 38 nt, Artificial Sequence
  Description of Artificial Sequence:  Enzymatic Nucleic Acid
  misc_feature (31)..(31): n stands for inosine
gguuacuucugaugaggccguuaggccgaanagcucag

SEQ ID NO: 14699 - RNA, 38 nt, Artificial Sequence
  Description of Artificial Sequence:  Enzymatic Nucleic Acid
  misc_feature (31)..(31): n stands for inosine
cauucuuccugaugaggccguuaggccgaanuuacuua

SEQ ID NO: 14700 - RNA, 38 nt, Artificial Sequence
  Description of Artificial Sequence:  Enzymatic Nucleic Acid
  misc_feature (31)..(31): n stands for inosine
agaacagacugaugaggccguuaggccgaancauacau

SEQ ID NO: 14701 - RNA, 38 nt, Artificial Sequence
  Description of Artificial Sequence:  Enzymatic Nucleic Acid
  misc_feature (31)..(31): n stands for inosine
aagaacagcugaugaggccguuaggccgaangcauaca

SEQ ID NO: 14702 - RNA, 38 nt, Artificial Sequence
  Description of Artificial Sequence:  Enzymatic Nucleic Acid
  misc_feature (31)..(31): n stands for inosine
auaagaaccugaugaggccguuaggccgaanaggcaua

SEQ ID NO: 14703 - RNA, 38 nt, Artificial Sequence
  Description of Artificial Sequence:  Enzymatic Nucleic Acid
  misc_feature (31)..(31): n stands for inosine
ggcacauacugaugaggccguuaggccgaanaacagag

SEQ ID NO: 14704 - RNA, 38 nt, Artificial Sequence
  Description of Artificial Sequence:  Enzymatic Nucleic Acid
  misc_feature (31)..(31): n stands for inosine
aaggaugucugaugaggccguuaggccgaancacauaa

SEQ ID NO: 14705 - RNA, 38 nt, Artificial Sequence
  Description of Artificial Sequence:  Enzymatic Nucleic Acid
  misc_feature (31)..(31): n stands for inosine
caaggaugcugaugaggccguuaggccgaangcacaua

SEQ ID NO: 14706 - RNA, 38 nt, Artificial Sequence
  Description of Artificial Sequence:  Enzymatic Nucleic Acid
  misc_feature (31)..(31): n stands for inosine
aacaaggacugaugaggccguuaggccgaanuggcaca

SEQ ID NO: 14707 - RNA, 38 nt, Artificial Sequence
  Description of Artificial Sequence:  Enzymatic Nucleic Acid
  misc_feature (31)..(31): n stands for inosine
uuaaacaacugaugaggccguuaggccgaanauguggc

SEQ ID NO: 14708 - RNA, 38 nt, Artificial Sequence
  Description of Artificial Sequence:  Enzymatic Nucleic Acid
  misc_feature (31)..(31): n stands for inosine
uuuaaacacugaugaggccguuaggccgaangaugugg

SEQ ID NO: 14709 - RNA, 38 nt, Artificial Sequence
  Description of Artificial Sequence:  Enzymatic Nucleic Acid
  misc_feature (31)..(31): n stands for inosine
auacagagcugaugaggccguuaggccgaanccuuuaa

SEQ ID NO: 14710 - RNA, 38 nt, Artificial Sequence
  Description of Artificial Sequence:  Enzymatic Nucleic Acid
  misc_feature (31)..(31): n stands for inosine
ucauacagcugaugaggccguuaggccgaanagccuuu

SEQ ID NO: 14711 - RNA, 38 nt, Artificial Sequence
  Description of Artificial Sequence:  Enzymatic Nucleic Acid
  misc_feature (31)..(31): n stands for inosine
cuucauaccugaugaggccguuaggccgaanagagccu

SEQ ID NO: 14712 - RNA, 38 nt, Artificial Sequence
  Description of Artificial Sequence:  Enzymatic Nucleic Acid
  misc_feature (31)..(31): n stands for inosine
cugaugaccugaugaggccguuaggccgaanucccauc

SEQ ID NO: 14713 - RNA, 38 nt, Artificial Sequence
  Description of Artificial Sequence:  Enzymatic Nucleic Acid
  misc_feature (31)..(31): n stands for inosine
ugugcugacugaugaggccguuaggccgaanacggucc

SEQ ID NO: 14714 - RNA, 38 nt, Artificial Sequence
  Description of Artificial Sequence:  Enzymatic Nucleic Acid
  misc_feature (31)..(31): n stands for inosine
gaaugugccugaugaggccguuaggccgaanaugacgg

SEQ ID NO: 14715 - RNA, 38 nt, Artificial Sequence
  Description of Artificial Sequence:  Enzymatic Nucleic Acid
  misc_feature (31)..(31): n stands for inosine
agggaaugcugaugaggccguuaggccgaancugauga

SEQ ID NO: 14716 - RNA, 38 nt, Artificial Sequence
  Description of Artificial Sequence:  Enzymatic Nucleic Acid
  misc_feature (31)..(31): n stands for inosine
cuagggaacugaugaggccguuaggccgaanugcugau

SEQ ID NO: 14717 - RNA, 38 nt, Artificial Sequence
  Description of Artificial Sequence:  Enzymatic Nucleic Acid
  misc_feature (31)..(31): n stands for inosine
cucacuagcugaugaggccguuaggccgaanaaugugc

SEQ ID NO: 14718 - RNA, 38 nt, Artificial Sequence
  Description of Artificial Sequence:  Enzymatic Nucleic Acid
  misc_feature (31)..(31): n stands for inosine
gcucacuacugaugaggccguuaggccgaangaaugug

SEQ ID NO: 14719 - RNA, 38 nt, Artificial Sequence
  Description of Artificial Sequence:  Enzymatic Nucleic Acid
  misc_feature (31)..(31): n stands for inosine
ggcucacucugaugaggccguuaggccgaanggaaugu

SEQ ID NO: 14720 - RNA, 38 nt, Artificial Sequence
  Description of Artificial Sequence:  Enzymatic Nucleic Acid
  misc_feature (31)..(31): n stands for inosine
agccaguacugaugaggccguuaggccgaancucacua

SEQ ID NO: 14721 - RNA, 38 nt, Artificial Sequence
  Description of Artificial Sequence:  Enzymatic Nucleic Acid
  misc_feature (31)..(31): n stands for inosine
gagccagucugaugaggccguuaggccgaangcucacu

SEQ ID NO: 14722 - RNA, 38 nt, Artificial Sequence
  Description of Artificial Sequence:  Enzymatic Nucleic Acid
  misc_feature (31)..(31): n stands for inosine
caggagcccugaugaggccguuaggccgaanuaggcuc

SEQ ID NO: 14723 - RNA, 38 nt, Artificial Sequence
  Description of Artificial Sequence:  Enzymatic Nucleic Acid
  misc_feature (31)..(31): n stands for inosine
cugccaggcugaugaggccguuaggccgaanccaguag

SEQ ID NO: 14724 - RNA, 38 nt, Artificial Sequence
  Description of Artificial Sequence:  Enzymatic Nucleic Acid
  misc_feature (31)..(31): n stands for inosine
cgcugccacugaugaggccguuaggccgaanagccagu

SEQ ID NO: 14725 - RNA, 38 nt, Artificial Sequence
  Description of Artificial Sequence:  Enzymatic Nucleic Acid
  misc_feature (31)..(31): n stands for inosine
ccgcugcccugaugaggccguuaggccgaangagccag

SEQ ID NO: 14726 - RNA, 38 nt, Artificial Sequence
  Description of Artificial Sequence:  Enzymatic Nucleic Acid
  misc_feature (31)..(31): n stands for inosine
aaagccgccugaugaggccguuaggccgaanccaggag

SEQ ID NO: 14727 - RNA, 38 nt, Artificial Sequence
  Description of Artificial Sequence:  Enzymatic Nucleic Acid
  misc_feature (31)..(31): n stands for inosine
uccacaaacugaugaggccguuaggccgaanccgcugc

SEQ ID NO: 14728 - RNA, 38 nt, Artificial Sequence
  Description of Artificial Sequence:  Enzymatic Nucleic Acid
  misc_feature (31)..(31): n stands for inosine
ggcuagugcugaugaggccguuaggccgaanucuucca

SEQ ID NO: 14729 - RNA, 38 nt, Artificial Sequence
  Description of Artificial Sequence:  Enzymatic Nucleic Acid
  misc_feature (31)..(31): n stands for inosine
cuggcuagcugaugaggccguuaggccgaanagucuuc

SEQ ID NO: 14730 - RNA, 38 nt, Artificial Sequence
  Description of Artificial Sequence:  Enzymatic Nucleic Acid
  misc_feature (31)..(31): n stands for inosine
uucuggcucugaugaggccguuaggccgaanugagucu

SEQ ID NO: 14731 - RNA, 38 nt, Artificial Sequence
  Description of Artificial Sequence:  Enzymatic Nucleic Acid
  misc_feature (31)..(31): n stands for inosine
ucucuucucugaugaggccguuaggccgaancuaguga

SEQ ID NO: 14732 - RNA, 38 nt, Artificial Sequence
  Description of Artificial Sequence:  Enzymatic Nucleic Acid
  misc_feature (31)..(31): n stands for inosine
cucucuuccugaugaggccguuaggccgaangcuagug

SEQ ID NO: 14733 - RNA, 38 nt, Artificial Sequence
  Description of Artificial Sequence:  Enzymatic Nucleic Acid
  misc_feature (31)..(31): n stands for inosine
gagaggaccugaugaggccguuaggccgaanucccacu

SEQ ID NO: 14734 - RNA, 38 nt, Artificial Sequence
  Description of Artificial Sequence:  Enzymatic Nucleic Acid
  misc_feature (31)..(31): n stands for inosine
gguggagacugaugaggccguuaggccgaanacugucc

SEQ ID NO: 14735 - RNA, 38 nt, Artificial Sequence
  Description of Artificial Sequence:  Enzymatic Nucleic Acid
  misc_feature (31)..(31): n stands for inosine
ugguggagcugaugaggccguuaggccgaangacuguc

SEQ ID NO: 14736 - RNA, 38 nt, Artificial Sequence
  Description of Artificial Sequence:  Enzymatic Nucleic Acid
  misc_feature (31)..(31): n stands for inosine
cuugguggcugaugaggccguuaggccgaanaggacug

SEQ ID NO: 14737 - RNA, 38 nt, Artificial Sequence
  Description of Artificial Sequence:  Enzymatic Nucleic Acid
  misc_feature (31)..(31): n stands for inosine
aucuuggucugaugaggccguuaggccgaanagaggac

SEQ ID NO: 14738 - RNA, 38 nt, Artificial Sequence
  Description of Artificial Sequence:  Enzymatic Nucleic Acid
  misc_feature (31)..(31): n stands for inosine
gaucuuggcugaugaggccguuaggccgaangagagga

SEQ ID NO: 14739 - RNA, 38 nt, Artificial Sequence
  Description of Artificial Sequence:  Enzymatic Nucleic Acid
  misc_feature (31)..(31): n stands for inosine
uagaucuucugaugaggccguuaggccgaanuggagag

SEQ ID NO: 14740 - RNA, 38 nt, Artificial Sequence
  Description of Artificial Sequence:  Enzymatic Nucleic Acid
  misc_feature (31)..(31): n stands for inosine
uuagaucucugaugaggccguuaggccgaanguggaga

SEQ ID NO: 14741 - RNA, 38 nt, Artificial Sequence
  Description of Artificial Sequence:  Enzymatic Nucleic Acid
  misc_feature (31)..(31): n stands for inosine
uuggauuucugaugaggccguuaggccgaanaucuugg

SEQ ID NO: 14742 - RNA, 38 nt, Artificial Sequence
  Description of Artificial Sequence:  Enzymatic Nucleic Acid
  misc_feature (31)..(31): n stands for inosine
uuuuguuucugaugaggccguuaggccgaanauuuaga

SEQ ID NO: 14743 - RNA, 38 nt, Artificial Sequence
  Description of Artificial Sequence:  Enzymatic Nucleic Acid
  misc_feature (31)..(31): n stands for inosine
cuuuuguucugaugaggccguuaggccgaangauuuag

SEQ ID NO: 14744 - RNA, 38 nt, Artificial Sequence
  Description of Artificial Sequence:  Enzymatic Nucleic Acid
  misc_feature (31)..(31): n stands for inosine
ccugcuuucugaugaggccguuaggccgaanuuuggau

SEQ ID NO: 14745 - RNA, 38 nt, Artificial Sequence
  Description of Artificial Sequence:  Enzymatic Nucleic Acid
  misc_feature (31)..(31): n stands for inosine
cucuagcccugaugaggccguuaggccgaancuuuugu

SEQ ID NO: 14746 - RNA, 38 nt, Artificial Sequence
  Description of Artificial Sequence:  Enzymatic Nucleic Acid
  misc_feature (31)..(31): n stands for inosine
cuggcucucugaugaggccguuaggccgaanccugcuu

SEQ ID NO: 14747 - RNA, 38 nt, Artificial Sequence
  Description of Artificial Sequence:  Enzymatic Nucleic Acid
  misc_feature (31)..(31): n stands for inosine
ucucuucucugaugaggccguuaggccgaancucuagc

SEQ ID NO: 14748 - RNA, 38 nt, Artificial Sequence
  Description of Artificial Sequence:  Enzymatic Nucleic Acid
  misc_feature (31)..(31): n stands for inosine
cucucuuccugaugaggccguuaggccgaangcucuag

SEQ ID NO: 14749 - RNA, 38 nt, Artificial Sequence
  Description of Artificial Sequence:  Enzymatic Nucleic Acid
  misc_feature (31)..(31): n stands for inosine
caaagauucugaugaggccguuaggccgaanuccucuc

SEQ ID NO: 14750 - RNA, 38 nt, Artificial Sequence
  Description of Artificial Sequence:  Enzymatic Nucleic Acid
  misc_feature (31)..(31): n stands for inosine
aacaacaacugaugaggccguuaggccgaanauuuguc

SEQ ID NO: 14751 - RNA, 38 nt, Artificial Sequence
  Description of Artificial Sequence:  Enzymatic Nucleic Acid
  misc_feature (31)..(31): n stands for inosine
aaagaagacugaugaggccguuaggccgaanaacaaca

SEQ ID NO: 14752 - RNA, 38 nt, Artificial Sequence
  Description of Artificial Sequence:  Enzymatic Nucleic Acid
  misc_feature (31)..(31): n stands for inosine
uaaagaagcugaugaggccguuaggccgaangaacaac

SEQ ID NO: 14753 - RNA, 38 nt, Artificial Sequence
  Description of Artificial Sequence:  Enzymatic Nucleic Acid
  misc_feature (31)..(31): n stands for inosine
uguaaagacugaugaggccguuaggccgaanaggaaca

SEQ ID NO: 14754 - RNA, 38 nt, Artificial Sequence
  Description of Artificial Sequence:  Enzymatic Nucleic Acid
  misc_feature (31)..(31): n stands for inosine
auguguaacugaugaggccguuaggccgaanaagagga

SEQ ID NO: 14755 - RNA, 38 nt, Artificial Sequence
  Description of Artificial Sequence:  Enzymatic Nucleic Acid
  misc_feature (31)..(31): n stands for inosine
ugcguaugcugaugaggccguuaggccgaanuaaagaa

SEQ ID NO: 14756 - RNA, 38 nt, Artificial Sequence
  Description of Artificial Sequence:  Enzymatic Nucleic Acid
  misc_feature (31)..(31): n stands for inosine
uuugcguacugaugaggccguuaggccgaanuguaaag

SEQ ID NO: 14757 - RNA, 38 nt, Artificial Sequence
  Description of Artificial Sequence:  Enzymatic Nucleic Acid
  misc_feature (31)..(31): n stands for inosine
aggugguucugaugaggccguuaggccgaancguaugu

SEQ ID NO: 14758 - RNA, 38 nt, Artificial Sequence
  Description of Artificial Sequence:  Enzymatic Nucleic Acid
  misc_feature (31)..(31): n stands for inosine
ucacaggucugaugaggccguuaggccgaanuuugcgu

SEQ ID NO: 14759 - RNA, 38 nt, Artificial Sequence
  Description of Artificial Sequence:  Enzymatic Nucleic Acid
  misc_feature (31)..(31): n stands for inosine
gucacaggcugaugaggccguuaggccgaanguuugcg

SEQ ID NO: 14760 - RNA, 38 nt, Artificial Sequence
  Description of Artificial Sequence:  Enzymatic Nucleic Acid
  misc_feature (31)..(31): n stands for inosine
cugucacacugaugaggccguuaggccgaanugguuug

SEQ ID NO: 14761 - RNA, 38 nt, Artificial Sequence
  Description of Artificial Sequence:  Enzymatic Nucleic Acid
  misc_feature (31)..(31): n stands for inosine
gcugucaccugaugaggccguuaggccgaangugguuu

SEQ ID NO: 14762 - RNA, 38 nt, Artificial Sequence
  Description of Artificial Sequence:  Enzymatic Nucleic Acid
  misc_feature (31)..(31): n stands for inosine
uugccagccugaugaggccguuaggccgaanucacagg

SEQ ID NO: 14763 - RNA, 38 nt, Artificial Sequence
  Description of Artificial Sequence:  Enzymatic Nucleic Acid
  misc_feature (31)..(31): n stands for inosine
aaauugcccugaugaggccguuaggccgaancugucac

SEQ ID NO: 14764 - RNA, 38 nt, Artificial Sequence
  Description of Artificial Sequence:  Enzymatic Nucleic Acid
  misc_feature (31)..(31): n stands for inosine
uauaaaaucugaugaggccguuaggccgaanccagcug

SEQ ID NO: 14765 - RNA, 38 nt, Artificial Sequence
  Description of Artificial Sequence:  Enzymatic Nucleic Acid
  misc_feature (31)..(31): n stands for inosine
caguuacccugaugaggccguuaggccgaanauuuaua

SEQ ID NO: 14766 - RNA, 38 nt, Artificial Sequence
  Description of Artificial Sequence:  Enzymatic Nucleic Acid
  misc_feature (31)..(31): n stands for inosine
cuccuucccugaugaggccguuaggccgaanuuaccug

SEQ ID NO: 14767 - RNA, 38 nt, Artificial Sequence
  Description of Artificial Sequence:  Enzymatic Nucleic Acid
  misc_feature (31)..(31): n stands for inosine
uuuuucugcugaugaggccguuaggccgaanuuuaacc

SEQ ID NO: 14768 - RNA, 38 nt, Artificial Sequence
  Description of Artificial Sequence:  Enzymatic Nucleic Acid
  misc_feature (31)..(31): n stands for inosine
cuuuuuuccugaugaggccguuaggccgaanaguuuaa

SEQ ID NO: 14769 - RNA, 38 nt, Artificial Sequence
  Description of Artificial Sequence:  Enzymatic Nucleic Acid
  misc_feature (31)..(31): n stands for inosine
uugacugacugaugaggccguuaggccgaanucuucuu

SEQ ID NO: 14770 - RNA, 38 nt, Artificial Sequence
  Description of Artificial Sequence:  Enzymatic Nucleic Acid
  misc_feature (31)..(31): n stands for inosine
auugacugcugaugaggccguuaggccgaangucuucu

SEQ ID NO: 14771 - RNA, 38 nt, Artificial Sequence
  Description of Artificial Sequence:  Enzymatic Nucleic Acid
  misc_feature (31)..(31): n stands for inosine
gaauugaccugaugaggccguuaggccgaanaggucuu

SEQ ID NO: 14772 - RNA, 38 nt, Artificial Sequence
  Description of Artificial Sequence:  Enzymatic Nucleic Acid
  misc_feature (31)..(31): n stands for inosine
uagagaaucugaugaggccguuaggccgaanacugagg

SEQ ID NO: 14773 - RNA, 38 nt, Artificial Sequence
  Description of Artificial Sequence:  Enzymatic Nucleic Acid
  misc_feature (31)..(31): n stands for inosine
aaaaguagcugaugaggccguuaggccgaanaauugac

SEQ ID NO: 14774 - RNA, 38 nt, Artificial Sequence
  Description of Artificial Sequence:  Enzymatic Nucleic Acid
  misc_feature (31)..(31): n stands for inosine
aaaaaagucugaugaggccguuaggccgaanagaauug

SEQ ID NO: 14775 - RNA, 38 nt, Artificial Sequence
  Description of Artificial Sequence:  Enzymatic Nucleic Acid
  misc_feature (31)..(31): n stands for inosine
aaaaaaaacugaugaggccguuaggccgaanuagagaa

SEQ ID NO: 14776 - RNA, 38 nt, Artificial Sequence
  Description of Artificial Sequence:  Enzymatic Nucleic Acid
  misc_feature (31)..(31): n stands for inosine
ucugauuucugaugaggccguuaggccgaanaaaaaaa

SEQ ID NO: 14777 - RNA, 38 nt, Artificial Sequence
  Description of Artificial Sequence:  Enzymatic Nucleic Acid
  misc_feature (31)..(31): n stands for inosine
aucugauucugaugaggccguuaggccgaangaaaaaa

SEQ ID NO: 14778 - RNA, 38 nt, Artificial Sequence
  Description of Artificial Sequence:  Enzymatic Nucleic Acid
  misc_feature (31)..(31): n stands for inosine
cuauuauccugaugaggccguuaggccgaanauuugga

SEQ ID NO: 14779 - RNA, 38 nt, Artificial Sequence
  Description of Artificial Sequence:  Enzymatic Nucleic Acid
  misc_feature (31)..(31): n stands for inosine
auuugcugcugaugaggccguuaggccgaancuauuau

SEQ ID NO: 14780 - RNA, 38 nt, Artificial Sequence
  Description of Artificial Sequence:  Enzymatic Nucleic Acid
  misc_feature (31)..(31): n stands for inosine
uauuugcucugaugaggccguuaggccgaangcuauua

SEQ ID NO: 14781 - RNA, 38 nt, Artificial Sequence
  Description of Artificial Sequence:  Enzymatic Nucleic Acid
  misc_feature (31)..(31): n stands for inosine
cuauuugccugaugaggccguuaggccgaanggcuauu

SEQ ID NO: 14782 - RNA, 38 nt, Artificial Sequence
  Description of Artificial Sequence:  Enzymatic Nucleic Acid
  misc_feature (31)..(31): n stands for inosine
ucacuauucugaugaggccguuaggccgaancugggcu

SEQ ID NO: 14783 - RNA, 38 nt, Artificial Sequence
  Description of Artificial Sequence:  Enzymatic Nucleic Acid
  misc_feature (31)..(31): n stands for inosine
guuuuauucugaugaggccguuaggccgaanuuaucac

SEQ ID NO: 14784 - RNA, 38 nt, Artificial Sequence
  Description of Artificial Sequence:  Enzymatic Nucleic Acid
  misc_feature (31)..(31): n stands for inosine
acagcuaacugaugaggccguuaggccgaanuuuuauu

SEQ ID NO: 14785 - RNA, 38 nt, Artificial Sequence
  Description of Artificial Sequence:  Enzymatic Nucleic Acid
  misc_feature (31)..(31): n stands for inosine
aacagcuacugaugaggccguuaggccgaanguuuuau

SEQ ID NO: 14786 - RNA, 38 nt, Artificial Sequence
  Description of Artificial Sequence:  Enzymatic Nucleic Acid
  misc_feature (31)..(31): n stands for inosine
acaugaaccugaugaggccguuaggccgaancuaaggu

SEQ ID NO: 14787 - RNA, 38 nt, Artificial Sequence
  Description of Artificial Sequence:  Enzymatic Nucleic Acid
  misc_feature (31)..(31): n stands for inosine
ucaagacacugaugaggccguuaggccgaanaacagcu

SEQ ID NO: 14788 - RNA, 38 nt, Artificial Sequence
  Description of Artificial Sequence:  Enzymatic Nucleic Acid
  misc_feature (31)..(31): n stands for inosine
ugaaaucacugaugaggccguuaggccgaanacaugaa

SEQ ID NO: 14789 - RNA, 38 nt, Artificial Sequence
  Description of Artificial Sequence:  Enzymatic Nucleic Acid
  misc_feature (31)..(31): n stands for inosine
uuaauuaucugaugaggccguuaggccgaanaaaucaa

SEQ ID NO: 14790 - RNA, 38 nt, Artificial Sequence
  Description of Artificial Sequence:  Enzymatic Nucleic Acid
  misc_feature (31)..(31): n stands for inosine
aaugauuacugaugaggccguuaggccgaanaauuaau

SEQ ID NO: 14791 - RNA, 38 nt, Artificial Sequence
  Description of Artificial Sequence:  Enzymatic Nucleic Acid
  misc_feature (31)..(31): n stands for inosine
ucucuuaacugaugaggccguuaggccgaanauuaaga

SEQ ID NO: 14792 - RNA, 38 nt, Artificial Sequence
  Description of Artificial Sequence:  Enzymatic Nucleic Acid
  misc_feature (31)..(31): n stands for inosine
uuuauuaucugaugaggccguuaggccgaanucucuua

SEQ ID NO: 14793 - RNA, 38 nt, Artificial Sequence
  Description of Artificial Sequence:  Enzymatic Nucleic Acid
  misc_feature (31)..(31): n stands for inosine
auuuauuacugaugaggccguuaggccgaangucucuu

SEQ ID NO: 14794 - RNA, 38 nt, Artificial Sequence
  Description of Artificial Sequence:  Enzymatic Nucleic Acid
  misc_feature (31)..(31): n stands for inosine
ugaaaaggcugaugaggccguuaggccgaanuauuuau

SEQ ID NO: 14795 - RNA, 38 nt, Artificial Sequence
  Description of Artificial Sequence:  Enzymatic Nucleic Acid
  misc_feature (31)..(31): n stands for inosine
cuugaaaacugaugaggccguuaggccgaanaguauuu

SEQ ID NO: 14796 - RNA, 38 nt, Artificial Sequence
  Description of Artificial Sequence:  Enzymatic Nucleic Acid
  misc_feature (31)..(31): n stands for inosine
ucuugaaacugaugaggccguuaggccgaangaguauu

SEQ ID NO: 14797 - RNA, 38 nt, Artificial Sequence
  Description of Artificial Sequence:  Enzymatic Nucleic Acid
  misc_feature (31)..(31): n stands for inosine
uuuucucucugaugaggccguuaggccgaanaaaagga

SEQ ID NO: 14798 - RNA, 38 nt, Artificial Sequence
  Description of Artificial Sequence:  Enzymatic Nucleic Acid
  misc_feature (31)..(31): n stands for inosine
aaugguuucugaugaggccguuaggccgaancuuuucu

SEQ ID NO: 14799 - RNA, 38 nt, Artificial Sequence
  Description of Artificial Sequence:  Enzymatic Nucleic Acid
  misc_feature (31)..(31): n stands for inosine
auucuaaucugaugaggccguuaggccgaanuuuugcu

SEQ ID NO: 14800 - RNA, 38 nt, Artificial Sequence
  Description of Artificial Sequence:  Enzymatic Nucleic Acid
  misc_feature (31)..(31): n stands for inosine
aauucuaacugaugaggccguuaggccgaanguuuugc

SEQ ID NO: 14801 - RNA, 38 nt, Artificial Sequence
  Description of Artificial Sequence:  Enzymatic Nucleic Acid
  misc_feature (31)..(31): n stands for inosine
aggagcugcugaugaggccguuaggccgaanuaacaau

SEQ ID NO: 14802 - RNA, 38 nt, Artificial Sequence
  Description of Artificial Sequence:  Enzymatic Nucleic Acid
  misc_feature (31)..(31): n stands for inosine
gaaggagccugaugaggccguuaggccgaanaguaaca

SEQ ID NO: 14803 - RNA, 38 nt, Artificial Sequence
  Description of Artificial Sequence:  Enzymatic Nucleic Acid
  misc_feature (31)..(31): n stands for inosine
uuugaaggcugaugaggccguuaggccgaancugagua

SEQ ID NO: 14804 - RNA, 38 nt, Artificial Sequence
  Description of Artificial Sequence:  Enzymatic Nucleic Acid
  misc_feature (31)..(31): n stands for inosine
aguuugaacugaugaggccguuaggccgaanagcugag

SEQ ID NO: 14805 - RNA, 38 nt, Artificial Sequence
  Description of Artificial Sequence:  Enzymatic Nucleic Acid
  misc_feature (31)..(31): n stands for inosine
gaguuugacugaugaggccguuaggccgaangagcuga

SEQ ID NO: 14806 - RNA, 38 nt, Artificial Sequence
  Description of Artificial Sequence:  Enzymatic Nucleic Acid
  misc_feature (31)..(31): n stands for inosine
ccugaguucugaugaggccguuaggccgaanaaggagc

SEQ ID NO: 14807 - RNA, 38 nt, Artificial Sequence
  Description of Artificial Sequence:  Enzymatic Nucleic Acid
  misc_feature (31)..(31): n stands for inosine
caaaccugcugaugaggccguuaggccgaanuuugaag

SEQ ID NO: 14808 - RNA, 38 nt, Artificial Sequence
  Description of Artificial Sequence:  Enzymatic Nucleic Acid
  misc_feature (31)..(31): n stands for inosine
uacaaacccugaugaggccguuaggccgaanaguuuga

SEQ ID NO: 14809 - RNA, 38 nt, Artificial Sequence
  Description of Artificial Sequence:  Enzymatic Nucleic Acid
  misc_feature (31)..(31): n stands for inosine
cucauguacugaugaggccguuaggccgaancuacaaa

SEQ ID NO: 14810 - RNA, 38 nt, Artificial Sequence
  Description of Artificial Sequence:  Enzymatic Nucleic Acid
  misc_feature (31)..(31): n stands for inosine
uggacucacugaugaggccguuaggccgaanuaugcua

SEQ ID NO: 14811 - RNA, 38 nt, Artificial Sequence
  Description of Artificial Sequence:  Enzymatic Nucleic Acid
  misc_feature (31)..(31): n stands for inosine
ugauggaucugaugaggccguuaggccgaanacucaug

SEQ ID NO: 14812 - RNA, 38 nt, Artificial Sequence
  Description of Artificial Sequence:  Enzymatic Nucleic Acid
  misc_feature (31)..(31): n stands for inosine
cugauggacugaugaggccguuaggccgaangacucau

SEQ ID NO: 14813 - RNA, 38 nt, Artificial Sequence
  Description of Artificial Sequence:  Enzymatic Nucleic Acid
  misc_feature (31)..(31): n stands for inosine
ugacugaucugaugaggccguuaggccgaanauggacu

SEQ ID NO: 14814 - RNA, 38 nt, Artificial Sequence
  Description of Artificial Sequence:  Enzymatic Nucleic Acid
  misc_feature (31)..(31): n stands for inosine
uugacugacugaugaggccguuaggccgaangauggac

SEQ ID NO: 14815 - RNA, 38 nt, Artificial Sequence
  Description of Artificial Sequence:  Enzymatic Nucleic Acid
  misc_feature (31)..(31): n stands for inosine
ucuuugaccugaugaggccguuaggccgaanauggaug

SEQ ID NO: 14816 - RNA, 38 nt, Artificial Sequence
  Description of Artificial Sequence:  Enzymatic Nucleic Acid
  misc_feature (31)..(31): n stands for inosine
ccauucuucugaugaggccguuaggccgaanacugaug

SEQ ID NO: 14817 - RNA, 38 nt, Artificial Sequence
  Description of Artificial Sequence:  Enzymatic Nucleic Acid
  misc_feature (31)..(31): n stands for inosine
cuccagaucugaugaggccguuaggccgaanaaccauu

SEQ ID NO: 14818 - RNA, 38 nt, Artificial Sequence
  Description of Artificial Sequence:  Enzymatic Nucleic Acid
  misc_feature (31)..(31): n stands for inosine
acuccagacugaugaggccguuaggccgaangaaccau

SEQ ID NO: 14819 - RNA, 38 nt, Artificial Sequence
  Description of Artificial Sequence:  Enzymatic Nucleic Acid
  misc_feature (31)..(31): n stands for inosine
aagacucccugaugaggccguuaggccgaanauggaac

SEQ ID NO: 14820 - RNA, 38 nt, Artificial Sequence
  Description of Artificial Sequence:  Enzymatic Nucleic Acid
  misc_feature (31)..(31): n stands for inosine
cuacauuacugaugaggccguuaggccgaanacuccag

SEQ ID NO: 14821 - RNA, 38 nt, Artificial Sequence
  Description of Artificial Sequence:  Enzymatic Nucleic Acid
  misc_feature (31)..(31): n stands for inosine
uuauuacacugaugaggccguuaggccgaanucuccau

SEQ ID NO: 14822 - RNA, 38 nt, Artificial Sequence
  Description of Artificial Sequence:  Enzymatic Nucleic Acid
  misc_feature (31)..(31): n stands for inosine
uuguaacucugaugaggccguuaggccgaancucauua

SEQ ID NO: 14823 - RNA, 38 nt, Artificial Sequence
  Description of Artificial Sequence:  Enzymatic Nucleic Acid
  misc_feature (31)..(31): n stands for inosine
aagcacuucugaugaggccguuaggccgaanuaacuag

SEQ ID NO: 14824 - RNA, 38 nt, Artificial Sequence
  Description of Artificial Sequence:  Enzymatic Nucleic Acid
  misc_feature (31)..(31): n stands for inosine
aaugaacacugaugaggccguuaggccgaancacuuug

SEQ ID NO: 14825 - RNA, 38 nt, Artificial Sequence
  Description of Artificial Sequence:  Enzymatic Nucleic Acid
  misc_feature (31)..(31): n stands for inosine
uauuuuaacugaugaggccguuaggccgaanaacaagc

SEQ ID NO: 14826 - RNA, 38 nt, Artificial Sequence
  Description of Artificial Sequence:  Enzymatic Nucleic Acid
  misc_feature (31)..(31): n stands for inosine
auuuucagcugaugaggccguuaggccgaancuauuuu

SEQ ID NO: 14827 - RNA, 38 nt, Artificial Sequence
  Description of Artificial Sequence:  Enzymatic Nucleic Acid
  misc_feature (31)..(31): n stands for inosine
caauuuuccugaugaggccguuaggccgaanugcuauu

SEQ ID NO: 14828 - RNA, 38 nt, Artificial Sequence
  Description of Artificial Sequence:  Enzymatic Nucleic Acid
  misc_feature (31)..(31): n stands for inosine
uuaauucacugaugaggccguuaggccgaanuuucaau

SEQ ID NO: 14829 - RNA, 38 nt, Artificial Sequence
  Description of Artificial Sequence:  Enzymatic Nucleic Acid
  misc_feature (31)..(31): n stands for inosine
auauuauccugaugaggccguuaggccgaanuuaauuc

SEQ ID NO: 14830 - RNA, 38 nt, Artificial Sequence
  Description of Artificial Sequence:  Enzymatic Nucleic Acid
  misc_feature (31)..(31): n stands for inosine
aaaugauucugaugaggccguuaggccgaanaauauua

SEQ ID NO: 14831 - RNA, 38 nt, Artificial Sequence
  Description of Artificial Sequence:  Enzymatic Nucleic Acid
  misc_feature (31)..(31): n stands for inosine
caaaugaucugaugaggccguuaggccgaangaauauu

SEQ ID NO: 14832 - RNA, 38 nt, Artificial Sequence
  Description of Artificial Sequence:  Enzymatic Nucleic Acid
  misc_feature (31)..(31): n stands for inosine
auggcaaacugaugaggccguuaggccgaanauuggaa

SEQ ID NO: 14833 - RNA, 38 nt, Artificial Sequence
  Description of Artificial Sequence:  Enzymatic Nucleic Acid
  misc_feature (31)..(31): n stands for inosine
ucauaaaucugaugaggccguuaggccgaancaaauga

SEQ ID NO: 14834 - RNA, 38 nt, Artificial Sequence
  Description of Artificial Sequence:  Enzymatic Nucleic Acid
  misc_feature (31)..(31): n stands for inosine
gucauaaacugaugaggccguuaggccgaangcaaaug

SEQ ID NO: 14835 - RNA, 38 nt, Artificial Sequence
  Description of Artificial Sequence:  Enzymatic Nucleic Acid
  misc_feature (31)..(31): n stands for inosine
accauuuucugaugaggccguuaggccgaanucauaaa

SEQ ID NO: 14836 - RNA, 38 nt, Artificial Sequence
  Description of Artificial Sequence:  Enzymatic Nucleic Acid
  misc_feature (31)..(31): n stands for inosine
uuuguuagcugaugaggccguuaggccgaanccaacca

SEQ ID NO: 14837 - RNA, 38 nt, Artificial Sequence
  Description of Artificial Sequence:  Enzymatic Nucleic Acid
  misc_feature (31)..(31): n stands for inosine
ucuuuguucugaugaggccguuaggccgaanugccaac

SEQ ID NO: 14838 - RNA, 38 nt, Artificial Sequence
  Description of Artificial Sequence:  Enzymatic Nucleic Acid
  misc_feature (31)..(31): n stands for inosine
ucguucuucugaugaggccguuaggccgaanuuagugc

SEQ ID NO: 14839 - RNA, 38 nt, Artificial Sequence
  Description of Artificial Sequence:  Enzymatic Nucleic Acid
  misc_feature (31)..(31): n stands for inosine
aaaggaagcugaugaggccguuaggccgaancucguuc

SEQ ID NO: 14840 - RNA, 38 nt, Artificial Sequence
  Description of Artificial Sequence:  Enzymatic Nucleic Acid
  misc_feature (31)..(31): n stands for inosine
ugaaaggacugaugaggccguuaggccgaanugcucgu

SEQ ID NO: 14841 - RNA, 38 nt, Artificial Sequence
  Description of Artificial Sequence:  Enzymatic Nucleic Acid
  misc_feature (31)..(31): n stands for inosine
cucugaaacugaugaggccguuaggccgaanaagugcu

SEQ ID NO: 14842 - RNA, 38 nt, Artificial Sequence
  Description of Artificial Sequence:  Enzymatic Nucleic Acid
  misc_feature (31)..(31): n stands for inosine
acucugaacugaugaggccguuaggccgaangaagugc

SEQ ID NO: 14843 - RNA, 38 nt, Artificial Sequence
  Description of Artificial Sequence:  Enzymatic Nucleic Acid
  misc_feature (31)..(31): n stands for inosine
agaaacuccugaugaggccguuaggccgaanaaaggaa

SEQ ID NO: 14844 - RNA, 38 nt, Artificial Sequence
  Description of Artificial Sequence:  Enzymatic Nucleic Acid
  misc_feature (31)..(31): n stands for inosine
auuaucuccugaugaggccguuaggccgaanaaacucu

SEQ ID NO: 14845 - RNA, 38 nt, Artificial Sequence
  Description of Artificial Sequence:  Enzymatic Nucleic Acid
  misc_feature (31)..(31): n stands for inosine
acccagaccugaugaggccguuaggccgaanuuccacg

SEQ ID NO: 14846 - RNA, 38 nt, Artificial Sequence
  Description of Artificial Sequence:  Enzymatic Nucleic Acid
  misc_feature (31)..(31): n stands for inosine
uuccaccccugaugaggccguuaggccgaanacuguuc

SEQ ID NO: 14847 - RNA, 38 nt, Artificial Sequence
  Description of Artificial Sequence:  Enzymatic Nucleic Acid
  misc_feature (31)..(31): n stands for inosine
augguuuccugaugaggccguuaggccgaanccccauu

SEQ ID NO: 14848 - RNA, 38 nt, Artificial Sequence
  Description of Artificial Sequence:  Enzymatic Nucleic Acid
  misc_feature (31)..(31): n stands for inosine
uugcacaucugaugaggccguuaggccgaanuuucagc

SEQ ID NO: 14849 - RNA, 38 nt, Artificial Sequence
  Description of Artificial Sequence:  Enzymatic Nucleic Acid
  misc_feature (31)..(31): n stands for inosine
cuugcacacugaugaggccguuaggccgaanguuucag

SEQ ID NO: 14850 - RNA, 38 nt, Artificial Sequence
  Description of Artificial Sequence:  Enzymatic Nucleic Acid
  misc_feature (31)..(31): n stands for inosine
cacagacucugaugaggccguuaggccgaancacaugg

SEQ ID NO: 14851 - RNA, 38 nt, Artificial Sequence
  Description of Artificial Sequence:  Enzymatic Nucleic Acid
  misc_feature (31)..(31): n stands for inosine
caagacaccugaugaggccguuaggccgaanacuugca

SEQ ID NO: 14852 - RNA, 38 nt, Artificial Sequence
  Description of Artificial Sequence:  Enzymatic Nucleic Acid
  misc_feature (31)..(31): n stands for inosine
gacugacacugaugaggccguuaggccgaanacacaga

SEQ ID NO: 14853 - RNA, 38 nt, Artificial Sequence
  Description of Artificial Sequence:  Enzymatic Nucleic Acid
  misc_feature (31)..(31): n stands for inosine
ucuuggaccugaugaggccguuaggccgaanacaagac

SEQ ID NO: 14854 - RNA, 38 nt, Artificial Sequence
  Description of Artificial Sequence:  Enzymatic Nucleic Acid
  misc_feature (31)..(31): n stands for inosine
cacuucuucugaugaggccguuaggccgaanacugaca

SEQ ID NO: 14855 - RNA, 38 nt, Artificial Sequence
  Description of Artificial Sequence:  Enzymatic Nucleic Acid
  misc_feature (31)..(31): n stands for inosine
ucacuucucugaugaggccguuaggccgaangacugac

SEQ ID NO: 14856 - RNA, 38 nt, Artificial Sequence
  Description of Artificial Sequence:  Enzymatic Nucleic Acid
  misc_feature (31)..(31): n stands for inosine
caucucggcugaugaggccguuaggccgaanucacuuc

SEQ ID NO: 14857 - RNA, 38 nt, Artificial Sequence
  Description of Artificial Sequence:  Enzymatic Nucleic Acid
  misc_feature (31)..(31): n stands for inosine
aacaucuccugaugaggccguuaggccgaanugucacu

SEQ ID NO: 14858 - RNA, 38 nt, Artificial Sequence
  Description of Artificial Sequence:  Enzymatic Nucleic Acid
  misc_feature (31)..(31): n stands for inosine
aaggcacgcugaugaggccguuaggccgaanucccuaa

SEQ ID NO: 14859 - RNA, 38 nt, Artificial Sequence
  Description of Artificial Sequence:  Enzymatic Nucleic Acid
  misc_feature (31)..(31): n stands for inosine
caaggcaccugaugaggccguuaggccgaangucccua

SEQ ID NO: 14860 - RNA, 38 nt, Artificial Sequence
  Description of Artificial Sequence:  Enzymatic Nucleic Acid
  misc_feature (31)..(31): n stands for inosine
ggaaacaacugaugaggccguuaggccgaancacgggu

SEQ ID NO: 14861 - RNA, 38 nt, Artificial Sequence
  Description of Artificial Sequence:  Enzymatic Nucleic Acid
  misc_feature (31)..(31): n stands for inosine
aggaaacacugaugaggccguuaggccgaangcacggg

SEQ ID NO: 14862 - RNA, 38 nt, Artificial Sequence
  Description of Artificial Sequence:  Enzymatic Nucleic Acid
  misc_feature (31)..(31): n stands for inosine
gugggcuacugaugaggccguuaggccgaanaaacaag

SEQ ID NO: 14863 - RNA, 38 nt, Artificial Sequence
  Description of Artificial Sequence:  Enzymatic Nucleic Acid
  misc_feature (31)..(31): n stands for inosine
ugugggcucugaugaggccguuaggccgaangaaacaa

SEQ ID NO: 14864 - RNA, 38 nt, Artificial Sequence
  Description of Artificial Sequence:  Enzymatic Nucleic Acid
  misc_feature (31)..(31): n stands for inosine
uucuugugcugaugaggccguuaggccgaancuaggaa

SEQ ID NO: 14865 - RNA, 38 nt, Artificial Sequence
  Description of Artificial Sequence:  Enzymatic Nucleic Acid
  misc_feature (31)..(31): n stands for inosine
auucuugucugaugaggccguuaggccgaangcuagga

SEQ ID NO: 14866 - RNA, 38 nt, Artificial Sequence
  Description of Artificial Sequence:  Enzymatic Nucleic Acid
  misc_feature (31)..(31): n stands for inosine
cauucuugcugaugaggccguuaggccgaanggcuagg

SEQ ID NO: 14867 - RNA, 38 nt, Artificial Sequence
  Description of Artificial Sequence:  Enzymatic Nucleic Acid
  misc_feature (31)..(31): n stands for inosine
ugcauucucugaugaggccguuaggccgaanugggcua

SEQ ID NO: 14868 - RNA, 38 nt, Artificial Sequence
  Description of Artificial Sequence:  Enzymatic Nucleic Acid
  misc_feature (31)..(31): n stands for inosine
uugauguucugaugaggccguuaggccgaancauucuu

SEQ ID NO: 14869 - RNA, 38 nt, Artificial Sequence
  Description of Artificial Sequence:  Enzymatic Nucleic Acid
  misc_feature (31)..(31): n stands for inosine
cuguuugacugaugaggccguuaggccgaanuuugcau

SEQ ID NO: 14870 - RNA, 38 nt, Artificial Sequence
  Description of Artificial Sequence:  Enzymatic Nucleic Acid
  misc_feature (31)..(31): n stands for inosine
uaucuguucugaugaggccguuaggccgaanauguuug

SEQ ID NO: 14871 - RNA, 38 nt, Artificial Sequence
  Description of Artificial Sequence:  Enzymatic Nucleic Acid
  misc_feature (31)..(31): n stands for inosine
cgaguauccugaugaggccguuaggccgaanuuugaug

SEQ ID NO: 14872 - RNA, 38 nt, Artificial Sequence
  Description of Artificial Sequence:  Enzymatic Nucleic Acid
  misc_feature (31)..(31): n stands for inosine
ggcuagcgcugaugaggccguuaggccgaanuaucugu

SEQ ID NO: 14873 - RNA, 38 nt, Artificial Sequence
  Description of Artificial Sequence:  Enzymatic Nucleic Acid
  misc_feature (31)..(31): n stands for inosine
augaggcucugaugaggccguuaggccgaancgaguau

SEQ ID NO: 14874 - RNA, 38 nt, Artificial Sequence
  Description of Artificial Sequence:  Enzymatic Nucleic Acid
  misc_feature (31)..(31): n stands for inosine
uuaaaugacugaugaggccguuaggccgaancuagcga

SEQ ID NO: 14875 - RNA, 38 nt, Artificial Sequence
  Description of Artificial Sequence:  Enzymatic Nucleic Acid
  misc_feature (31)..(31): n stands for inosine
uuuaaaugcugaugaggccguuaggccgaangcuagcg

SEQ ID NO: 14876 - RNA, 38 nt, Artificial Sequence
  Description of Artificial Sequence:  Enzymatic Nucleic Acid
  misc_feature (31)..(31): n stands for inosine
aauuuaaacugaugaggccguuaggccgaanaggcuag

SEQ ID NO: 14877 - RNA, 38 nt, Artificial Sequence
  Description of Artificial Sequence:  Enzymatic Nucleic Acid
  misc_feature (31)..(31): n stands for inosine
gccaaagacugaugaggccguuaggccgaancacuccu

SEQ ID NO: 14878 - RNA, 38 nt, Artificial Sequence
  Description of Artificial Sequence:  Enzymatic Nucleic Acid
  misc_feature (31)..(31): n stands for inosine
ucggccaacugaugaggccguuaggccgaanaugcacu

SEQ ID NO: 14879 - RNA, 38 nt, Artificial Sequence
  Description of Artificial Sequence:  Enzymatic Nucleic Acid
  misc_feature (31)..(31): n stands for inosine
ccacuguccugaugaggccguuaggccgaanccaaaga

SEQ ID NO: 14880 - RNA, 38 nt, Artificial Sequence
  Description of Artificial Sequence:  Enzymatic Nucleic Acid
  misc_feature (31)..(31): n stands for inosine
uacaccaccugaugaggccguuaggccgaanucggcca

SEQ ID NO: 14881 - RNA, 38 nt, Artificial Sequence
  Description of Artificial Sequence:  Enzymatic Nucleic Acid
  misc_feature (31)..(31): n stands for inosine
acacacaccugaugaggccguuaggccgaanuuacacc

SEQ ID NO: 14882 - RNA, 38 nt, Artificial Sequence
  Description of Artificial Sequence:  Enzymatic Nucleic Acid
  misc_feature (31)..(31): n stands for inosine
aauaguuacugaugaggccguuaggccgaancacaaaa

SEQ ID NO: 14883 - RNA, 38 nt, Artificial Sequence
  Description of Artificial Sequence:  Enzymatic Nucleic Acid
  misc_feature (31)..(31): n stands for inosine
ccuuaaaucugaugaggccguuaggccgaanuuaugca

SEQ ID NO: 14884 - RNA, 38 nt, Artificial Sequence
  Description of Artificial Sequence:  Enzymatic Nucleic Acid
  misc_feature (31)..(31): n stands for inosine
aaaauucccugaugaggccguuaggccgaanuuuccuu

SEQ ID NO: 14885 - RNA, 38 nt, Artificial Sequence
  Description of Artificial Sequence:  Enzymatic Nucleic Acid
  misc_feature (31)..(31): n stands for inosine
uguauaaacugaugaggccguuaggccgaanuaacuuu

SEQ ID NO: 14886 - RNA, 38 nt, Artificial Sequence
  Description of Artificial Sequence:  Enzymatic Nucleic Acid
  misc_feature (31)..(31): n stands for inosine
ucuugguucugaugaggccguuaggccgaanuauaaaa

SEQ ID NO: 14887 - RNA, 38 nt, Artificial Sequence
  Description of Artificial Sequence:  Enzymatic Nucleic Acid
  misc_feature (31)..(31): n stands for inosine
auauucuucugaugaggccguuaggccgaanuuuguau

SEQ ID NO: 14888 - RNA, 38 nt, Artificial Sequence
  Description of Artificial Sequence:  Enzymatic Nucleic Acid
  misc_feature (31)..(31): n stands for inosine
uauauucucugaugaggccguuaggccgaanguuugua

SEQ ID NO: 14889 - RNA, 38 nt, Artificial Sequence
  Description of Artificial Sequence:  Enzymatic Nucleic Acid
  misc_feature (31)..(31): n stands for inosine
auaucugucugaugaggccguuaggccgaancauauau

SEQ ID NO: 14890 - RNA, 38 nt, Artificial Sequence
  Description of Artificial Sequence:  Enzymatic Nucleic Acid
  misc_feature (31)..(31): n stands for inosine
cuuauauccugaugaggccguuaggccgaanuagcaua

SEQ ID NO: 14891 - RNA, 38 nt, Artificial Sequence
  Description of Artificial Sequence:  Enzymatic Nucleic Acid
  misc_feature (31)..(31): n stands for inosine
accauguccugaugaggccguuaggccgaanucuuaua

SEQ ID NO: 14892 - RNA, 38 nt, Artificial Sequence
  Description of Artificial Sequence:  Enzymatic Nucleic Acid
  misc_feature (31)..(31): n stands for inosine
ccaaaccacugaugaggccguuaggccgaanucugucu

SEQ ID NO: 14893 - RNA, 38 nt, Artificial Sequence
  Description of Artificial Sequence:  Enzymatic Nucleic Acid
  misc_feature (31)..(31): n stands for inosine
gaaauauacugaugaggccguuaggccgaanaccaaac

SEQ ID NO: 14894 - RNA, 38 nt, Artificial Sequence
  Description of Artificial Sequence:  Enzymatic Nucleic Acid
  misc_feature (31)..(31): n stands for inosine
agaaauaucugaugaggccguuaggccgaangaccaaa

SEQ ID NO: 14895 - RNA, 38 nt, Artificial Sequence
  Description of Artificial Sequence:  Enzymatic Nucleic Acid
  misc_feature (31)..(31): n stands for inosine
ucaugacucugaugaggccguuaggccgaanaaauaua

SEQ ID NO: 14896 - RNA, 38 nt, Artificial Sequence
  Description of Artificial Sequence:  Enzymatic Nucleic Acid
  misc_feature (31)..(31): n stands for inosine
auucaucacugaugaggccguuaggccgaanacuagaa

SEQ ID NO: 14897 - RNA, 38 nt, Artificial Sequence
  Description of Artificial Sequence:  Enzymatic Nucleic Acid
  misc_feature (31)..(31): n stands for inosine
augaagaucugaugaggccguuaggccgaanuauacaa

SEQ ID NO: 14898 - RNA, 38 nt, Artificial Sequence
  Description of Artificial Sequence:  Enzymatic Nucleic Acid
  misc_feature (31)..(31): n stands for inosine
uaugaagacugaugaggccguuaggccgaanguauaca

SEQ ID NO: 14899 - RNA, 38 nt, Artificial Sequence
  Description of Artificial Sequence:  Enzymatic Nucleic Acid
  misc_feature (31)..(31): n stands for inosine
uuauaugacugaugaggccguuaggccgaanaugguau

SEQ ID NO: 14900 - RNA, 38 nt, Artificial Sequence
  Description of Artificial Sequence:  Enzymatic Nucleic Acid
  misc_feature (31)..(31): n stands for inosine
auauuauacugaugaggccguuaggccgaanaagaugg

SEQ ID NO: 14901 - RNA, 38 nt, Artificial Sequence
  Description of Artificial Sequence:  Enzymatic Nucleic Acid
  misc_feature (31)..(31): n stands for inosine
uauuuuuacugaugaggccguuaggccgaanuauauua

SEQ ID NO: 14902 - RNA, 38 nt, Artificial Sequence
  Description of Artificial Sequence:  Enzymatic Nucleic Acid
  misc_feature (31)..(31): n stands for inosine
cccaauuacugaugaggccguuaggccgaanaaauauu

SEQ ID NO: 14903 - RNA, 38 nt, Artificial Sequence
  Description of Artificial Sequence:  Enzymatic Nucleic Acid
  misc_feature (31)..(31): n stands for inosine
auuaaguucugaugaggccguuaggccgaanuacgauu

SEQ ID NO: 14904 - RNA, 38 nt, Artificial Sequence
  Description of Artificial Sequence:  Enzymatic Nucleic Acid
  misc_feature (31)..(31): n stands for inosine
aauuaagucugaugaggccguuaggccgaanguacgau

SEQ ID NO: 14905 - RNA, 38 nt, Artificial Sequence
  Description of Artificial Sequence:  Enzymatic Nucleic Acid
  misc_feature (31)..(31): n stands for inosine
aucaauuacugaugaggccguuaggccgaanuugguac

SEQ ID NO: 14906 - RNA, 38 nt, Artificial Sequence
  Description of Artificial Sequence:  Enzymatic Nucleic Acid
  misc_feature (31)..(31): n stands for inosine
aguugccacugaugaggccguuaggccgaanuuuauca

SEQ ID NO: 14907 - RNA, 38 nt, Artificial Sequence
  Description of Artificial Sequence:  Enzymatic Nucleic Acid
  misc_feature (31)..(31): n stands for inosine
aaagcagucugaugaggccguuaggccgaanccaaguu

SEQ ID NO: 14908 - RNA, 38 nt, Artificial Sequence
  Description of Artificial Sequence:  Enzymatic Nucleic Acid
  misc_feature (31)..(31): n stands for inosine
auaaaagccugaugaggccguuaggccgaanuugccaa

SEQ ID NO: 14909 - RNA, 38 nt, Artificial Sequence
  Description of Artificial Sequence:  Enzymatic Nucleic Acid
  misc_feature (31)..(31): n stands for inosine
aacauaaacugaugaggccguuaggccgaancaguugc

SEQ ID NO: 14910 - RNA, 38 nt, Artificial Sequence
  Description of Artificial Sequence:  Enzymatic Nucleic Acid
  misc_feature (31)..(31): n stands for inosine
aaggagaccugaugaggccguuaggccgaanaacauaa

SEQ ID NO: 14911 - RNA, 38 nt, Artificial Sequence
  Description of Artificial Sequence:  Enzymatic Nucleic Acid
  misc_feature (31)..(31): n stands for inosine
auggaaggcugaugaggccguuaggccgaanacagaac

SEQ ID NO: 14912 - RNA, 38 nt, Artificial Sequence
  Description of Artificial Sequence:  Enzymatic Nucleic Acid
  misc_feature (31)..(31): n stands for inosine
uuauggaacugaugaggccguuaggccgaanagacaga

SEQ ID NO: 14913 - RNA, 38 nt, Artificial Sequence
  Description of Artificial Sequence:  Enzymatic Nucleic Acid
  misc_feature (31)..(31): n stands for inosine
uuuauggacugaugaggccguuaggccgaangagacag

SEQ ID NO: 14914 - RNA, 38 nt, Artificial Sequence
  Description of Artificial Sequence:  Enzymatic Nucleic Acid
  misc_feature (31)..(31): n stands for inosine
aaauuuaucugaugaggccguuaggccgaanaaggaga

SEQ ID NO: 14915 - RNA, 38 nt, Artificial Sequence
  Description of Artificial Sequence:  Enzymatic Nucleic Acid
  misc_feature (31)..(31): n stands for inosine
aaaauuuacugaugaggccguuaggccgaangaaggag

SEQ ID NO: 14916 - RNA, 38 nt, Artificial Sequence
  Description of Artificial Sequence:  Enzymatic Nucleic Acid
  misc_feature (31)..(31): n stands for inosine
uaguauuucugaugaggccguuaggccgaanaaaaauu

SEQ ID NO: 14917 - RNA, 38 nt, Artificial Sequence
  Description of Artificial Sequence:  Enzymatic Nucleic Acid
  misc_feature (31)..(31): n stands for inosine
guugaauucugaugaggccguuaggccgaanuauuuug

SEQ ID NO: 14918 - RNA, 38 nt, Artificial Sequence
  Description of Artificial Sequence:  Enzymatic Nucleic Acid
  misc_feature (31)..(31): n stands for inosine
uucuuugucugaugaggccguuaggccgaanaauuagu

SEQ ID NO: 14919 - RNA, 38 nt, Artificial Sequence
  Description of Artificial Sequence:  Enzymatic Nucleic Acid
  misc_feature (31)..(31): n stands for inosine
uuuuucuucugaugaggccguuaggccgaanuugaauu

SEQ ID NO: 14920 - RNA, 38 nt, Artificial Sequence
  Description of Artificial Sequence:  Enzymatic Nucleic Acid
  misc_feature (31)..(31): n stands for inosine
aaaaaaagcugaugaggccguuaggccgaancuuuuuc

SEQ ID NO: 14921 - RNA, 38 nt, Artificial Sequence
  Description of Artificial Sequence:  Enzymatic Nucleic Acid
  misc_feature (31)..(31): n stands for inosine
gaaaaaaacugaugaggccguuaggccgaanagcuuuu

SEQ ID NO: 14922 - RNA, 38 nt, Artificial Sequence
  Description of Artificial Sequence:  Enzymatic Nucleic Acid
  misc_feature (31)..(31): n stands for inosine
uuauuuuacugaugaggccguuaggccgaanaaaaaaa

SEQ ID NO: 14923 - RNA, 38 nt, Artificial Sequence
  Description of Artificial Sequence:  Enzymatic Nucleic Acid
  misc_feature (31)..(31): n stands for inosine
uuuauuuucugaugaggccguuaggccgaangaaaaaa

SEQ ID NO: 14924 - RNA, 38 nt, Artificial Sequence
  Description of Artificial Sequence:  Enzymatic Nucleic Acid
  misc_feature (31)..(31): n stands for inosine
uaaauuugcugaugaggccguuaggccgaanuuuauuu

SEQ ID NO: 14925 - RNA, 38 nt, Artificial Sequence
  Description of Artificial Sequence:  Enzymatic Nucleic Acid
  misc_feature (31)..(31): n stands for inosine
gauaaauucugaugaggccguuaggccgaanaguuuau

SEQ ID NO: 14926 - RNA, 38 nt, Artificial Sequence
  Description of Artificial Sequence:  Enzymatic Nucleic Acid
  misc_feature (31)..(31): n stands for inosine
cuaaacaacugaugaggccguuaggccgaanauaaauu

SEQ ID NO: 14927 - RNA, 38 nt, Artificial Sequence
  Description of Artificial Sequence:  Enzymatic Nucleic Acid
  misc_feature (31)..(31): n stands for inosine
ucuaaacacugaugaggccguuaggccgaangauaaau

SEQ ID NO: 14928 - RNA, 38 nt, Artificial Sequence
  Description of Artificial Sequence:  Enzymatic Nucleic Acid
  misc_feature (31)..(31): n stands for inosine
uuuuucuccugaugaggccguuaggccgaancucuaaa

SEQ ID NO: 14929 - RNA, 38 nt, Artificial Sequence
  Description of Artificial Sequence:  Enzymatic Nucleic Acid
  misc_feature (31)..(31): n stands for inosine
cauuucaacugaugaggccguuaggccgaanuuuuucu

SEQ ID NO: 14930 - RNA, 38 nt, Artificial Sequence
  Description of Artificial Sequence:  Enzymatic Nucleic Acid
  misc_feature (31)..(31): n stands for inosine
auuuuuugcugaugaggccguuaggccgaanaccauuu

SEQ ID NO: 14931 - RNA, 38 nt, Artificial Sequence
  Description of Artificial Sequence:  Enzymatic Nucleic Acid
  misc_feature (31)..(31): n stands for inosine
caauuuuucugaugaggccguuaggccgaanagaccau

SEQ ID NO: 14932 - RNA, 38 nt, Artificial Sequence
  Description of Artificial Sequence:  Enzymatic Nucleic Acid
  misc_feature (31)..(31): n stands for inosine
aaauauuucugaugaggccguuaggccgaancaauuuu

SEQ ID NO: 14933 - RNA, 38 nt, Artificial Sequence
  Description of Artificial Sequence:  Enzymatic Nucleic Acid
  misc_feature (31)..(31): n stands for inosine
uuuuccaucugaugaggccguuaggccgaanaaaauau

SEQ ID NO: 14934 - RNA, 38 nt, Artificial Sequence
  Description of Artificial Sequence:  Enzymatic Nucleic Acid
  misc_feature (31)..(31): n stands for inosine
uaacauuucugaugaggccguuaggccgaanuuuucca

SEQ ID NO: 14935 - RNA, 38 nt, Artificial Sequence
  Description of Artificial Sequence:  Enzymatic Nucleic Acid
  misc_feature (31)..(31): n stands for inosine
auacaauccugaugaggccguuaggccgaancuaaacu

SEQ ID NO: 14936 - RNA, 38 nt, Artificial Sequence
  Description of Artificial Sequence:  Enzymatic Nucleic Acid
  misc_feature (31)..(31): n stands for inosine
aagugaaacugaugaggccguuaggccgaanuucgaaa

SEQ ID NO: 14937 - RNA, 38 nt, Artificial Sequence
  Description of Artificial Sequence:  Enzymatic Nucleic Acid
  misc_feature (31)..(31): n stands for inosine
aaagugaacugaugaggccguuaggccgaanguucgaa

SEQ ID NO: 14938 - RNA, 38 nt, Artificial Sequence
  Description of Artificial Sequence:  Enzymatic Nucleic Acid
  misc_feature (31)..(31): n stands for inosine
acaaaaagcugaugaggccguuaggccgaanaaagguu

SEQ ID NO: 14939 - RNA, 38 nt, Artificial Sequence
  Description of Artificial Sequence:  Enzymatic Nucleic Acid
  misc_feature (31)..(31): n stands for inosine
aaacaaaacugaugaggccguuaggccgaanugaaagg

SEQ ID NO: 14940 - RNA, 38 nt, Artificial Sequence
  Description of Artificial Sequence:  Enzymatic Nucleic Acid
  misc_feature (31)..(31): n stands for inosine
gugaaauacugaugaggccguuaggccgaanuaaaaca

SEQ ID NO: 14941 - RNA, 38 nt, Artificial Sequence
  Description of Artificial Sequence:  Enzymatic Nucleic Acid
  misc_feature (31)..(31): n stands for inosine
ugugaaaucugaugaggccguuaggccgaanguaaaac

SEQ ID NO: 14942 - RNA, 38 nt, Artificial Sequence
  Description of Artificial Sequence:  Enzymatic Nucleic Acid
  misc_feature (31)..(31): n stands for inosine
cacaguugcugaugaggccguuaggccgaanaaauagg

SEQ ID NO: 14943 - RNA, 38 nt, Artificial Sequence
  Description of Artificial Sequence:  Enzymatic Nucleic Acid
  misc_feature (31)..(31): n stands for inosine
uacacagucugaugaggccguuaggccgaanugaaaua

SEQ ID NO: 14944 - RNA, 38 nt, Artificial Sequence
  Description of Artificial Sequence:  Enzymatic Nucleic Acid
  misc_feature (31)..(31): n stands for inosine
auuuacaccugaugaggccguuaggccgaanuugugaa

SEQ ID NO: 14945 - RNA, 38 nt, Artificial Sequence
  Description of Artificial Sequence:  Enzymatic Nucleic Acid
  misc_feature (31)..(31): n stands for inosine
gaauuauucugaugaggccguuaggccgaancaauuua

SEQ ID NO: 14946 - RNA, 38 nt, Artificial Sequence
  Description of Artificial Sequence:  Enzymatic Nucleic Acid
  misc_feature (31)..(31): n stands for inosine
ggaauuaucugaugaggccguuaggccgaangcaauuu

SEQ ID NO: 14947 - RNA, 38 nt, Artificial Sequence
  Description of Artificial Sequence:  Enzymatic Nucleic Acid
  misc_feature (31)..(31): n stands for inosine
cauggacacugaugaggccguuaggccgaanaauuauu

SEQ ID NO: 14948 - RNA, 38 nt, Artificial Sequence
  Description of Artificial Sequence:  Enzymatic Nucleic Acid
  misc_feature (31)..(31): n stands for inosine
ucauggaccugaugaggccguuaggccgaangaauuau

SEQ ID NO: 14949 - RNA, 38 nt, Artificial Sequence
  Description of Artificial Sequence:  Enzymatic Nucleic Acid
  misc_feature (31)..(31): n stands for inosine
auuuucaucugaugaggccguuaggccgaanacaggaa

SEQ ID NO: 14950 - RNA, 38 nt, Artificial Sequence
  Description of Artificial Sequence:  Enzymatic Nucleic Acid
  misc_feature (31)..(31): n stands for inosine
cauuuucacugaugaggccguuaggccgaangacagga

SEQ ID NO: 14951 - RNA, 38 nt, Artificial Sequence
  Description of Artificial Sequence:  Enzymatic Nucleic Acid
  misc_feature (31)..(31): n stands for inosine
ggauaauucugaugaggccguuaggccgaancauuuuc

SEQ ID NO: 14952 - RNA, 38 nt, Artificial Sequence
  Description of Artificial Sequence:  Enzymatic Nucleic Acid
  misc_feature (31)..(31): n stands for inosine
ucuacacucugaugaggccguuaggccgaanauaauuu

SEQ ID NO: 14953 - RNA, 38 nt, Artificial Sequence
  Description of Artificial Sequence:  Enzymatic Nucleic Acid
  misc_feature (31)..(31): n stands for inosine
aucuacaccugaugaggccguuaggccgaangauaauu

SEQ ID NO: 14954 - RNA, 38 nt, Artificial Sequence
  Description of Artificial Sequence:  Enzymatic Nucleic Acid
  misc_feature (31)..(31): n stands for inosine
agggugaucugaugaggccguuaggccgaanucaaaua

SEQ ID NO: 14955 - RNA, 38 nt, Artificial Sequence
  Description of Artificial Sequence:  Enzymatic Nucleic Acid
  misc_feature (31)..(31): n stands for inosine
uagggugacugaugaggccguuaggccgaangucaaau

SEQ ID NO: 14956 - RNA, 38 nt, Artificial Sequence
  Description of Artificial Sequence:  Enzymatic Nucleic Acid
  misc_feature (31)..(31): n stands for inosine
ccauagggcugaugaggccguuaggccgaanaugguca

SEQ ID NO: 14957 - RNA, 38 nt, Artificial Sequence
  Description of Artificial Sequence:  Enzymatic Nucleic Acid
  misc_feature (31)..(31): n stands for inosine
auccauagcugaugaggccguuaggccgaanugauggu

SEQ ID NO: 14958 - RNA, 38 nt, Artificial Sequence
  Description of Artificial Sequence:  Enzymatic Nucleic Acid
  misc_feature (31)..(31): n stands for inosine
uauccauacugaugaggccguuaggccgaangugaugg

SEQ ID NO: 14959 - RNA, 38 nt, Artificial Sequence
  Description of Artificial Sequence:  Enzymatic Nucleic Acid
  misc_feature (31)..(31): n stands for inosine
auauccaucugaugaggccguuaggccgaanggugaug

SEQ ID NO: 14960 - RNA, 38 nt, Artificial Sequence
  Description of Artificial Sequence:  Enzymatic Nucleic Acid
  misc_feature (31)..(31): n stands for inosine
gcaaaacucugaugaggccguuaggccgaanccaauau

SEQ ID NO: 14961 - RNA, 38 nt, Artificial Sequence
  Description of Artificial Sequence:  Enzymatic Nucleic Acid
  misc_feature (31)..(31): n stands for inosine
uuaauaaacugaugaggccguuaggccgaancaaaacu

SEQ ID NO: 14962 - RNA, 38 nt, Artificial Sequence
  Description of Artificial Sequence:  Enzymatic Nucleic Acid
  misc_feature (31)..(31): n stands for inosine
cuuaauaacugaugaggccguuaggccgaangcaaaac

SEQ ID NO: 14963 - RNA, 38 nt, Artificial Sequence
  Description of Artificial Sequence:  Enzymatic Nucleic Acid
  misc_feature (31)..(31): n stands for inosine
aaugaauucugaugaggccguuaggccgaancuuaaua

SEQ ID NO: 14964 - RNA, 38 nt, Artificial Sequence
  Description of Artificial Sequence:  Enzymatic Nucleic Acid
  misc_feature (31)..(31): n stands for inosine
ggcugaaacugaugaggccguuaggccgaanaauuugc

SEQ ID NO: 14965 - RNA, 38 nt, Artificial Sequence
  Description of Artificial Sequence:  Enzymatic Nucleic Acid
  misc_feature (31)..(31): n stands for inosine
auucaggccugaugaggccguuaggccgaanaaaugaa

SEQ ID NO: 14966 - RNA, 38 nt, Artificial Sequence
  Description of Artificial Sequence:  Enzymatic Nucleic Acid
  misc_feature (31)..(31): n stands for inosine
gacauucacugaugaggccguuaggccgaancugaaau

SEQ ID NO: 14967 - RNA, 38 nt, Artificial Sequence
  Description of Artificial Sequence:  Enzymatic Nucleic Acid
  misc_feature (31)..(31): n stands for inosine
agacauuccugaugaggccguuaggccgaangcugaaa

SEQ ID NO: 14968 - RNA, 38 nt, Artificial Sequence
  Description of Artificial Sequence:  Enzymatic Nucleic Acid
  misc_feature (31)..(31): n stands for inosine
auauaggccugaugaggccguuaggccgaanacauuca

SEQ ID NO: 14969 - RNA, 38 nt, Artificial Sequence
  Description of Artificial Sequence:  Enzymatic Nucleic Acid
  misc_feature (31)..(31): n stands for inosine
aauauauacugaugaggccguuaggccgaancagacau

SEQ ID NO: 14970 - RNA, 38 nt, Artificial Sequence
  Description of Artificial Sequence:  Enzymatic Nucleic Acid
  misc_feature (31)..(31): n stands for inosine
gaauauaucugaugaggccguuaggccgaangcagaca

SEQ ID NO: 14971 - RNA, 38 nt, Artificial Sequence
  Description of Artificial Sequence:  Enzymatic Nucleic Acid
  misc_feature (31)..(31): n stands for inosine
aagagcagcugaugaggccguuaggccgaanaauauau

SEQ ID NO: 14972 - RNA, 38 nt, Artificial Sequence
  Description of Artificial Sequence:  Enzymatic Nucleic Acid
  misc_feature (31)..(31): n stands for inosine
caaagagccugaugaggccguuaggccgaanagaauau

SEQ ID NO: 14973 - RNA, 38 nt, Artificial Sequence
  Description of Artificial Sequence:  Enzymatic Nucleic Acid
  misc_feature (31)..(31): n stands for inosine
auacaaagcugaugaggccguuaggccgaancagagaa

SEQ ID NO: 14974 - RNA, 38 nt, Artificial Sequence
  Description of Artificial Sequence:  Enzymatic Nucleic Acid
  misc_feature (31)..(31): n stands for inosine
gaauacaacugaugaggccguuaggccgaanagcagag

SEQ ID NO: 14975 - RNA, 38 nt, Artificial Sequence
  Description of Artificial Sequence:  Enzymatic Nucleic Acid
  misc_feature (31)..(31): n stands for inosine
uucaaaggcugaugaggccguuaggccgaanaauacaa

SEQ ID NO: 14976 - RNA, 38 nt, Artificial Sequence
  Description of Artificial Sequence:  Enzymatic Nucleic Acid
  misc_feature (31)..(31): n stands for inosine
gguucaaacugaugaggccguuaggccgaanagaauac

SEQ ID NO: 14977 - RNA, 38 nt, Artificial Sequence
  Description of Artificial Sequence:  Enzymatic Nucleic Acid
  misc_feature (31)..(31): n stands for inosine
ggguucaacugaugaggccguuaggccgaangagaaua

SEQ ID NO: 14978 - RNA, 38 nt, Artificial Sequence
  Description of Artificial Sequence:  Enzymatic Nucleic Acid
  misc_feature (31)..(31): n stands for inosine
uuuuaacgcugaugaggccguuaggccgaanuucaaag

SEQ ID NO: 14979 - RNA, 38 nt, Artificial Sequence
  Description of Artificial Sequence:  Enzymatic Nucleic Acid
  misc_feature (31)..(31): n stands for inosine
guuuuaaccugaugaggccguuaggccgaanguucaaa

SEQ ID NO: 14980 - RNA, 38 nt, Artificial Sequence
  Description of Artificial Sequence:  Enzymatic Nucleic Acid
  misc_feature (31)..(31): n stands for inosine
ccacaggacugaugaggccguuaggccgaanuuuuaac

SEQ ID NO: 14981 - RNA, 38 nt, Artificial Sequence
  Description of Artificial Sequence:  Enzymatic Nucleic Acid
  misc_feature (31)..(31): n stands for inosine
gugccacacugaugaggccguuaggccgaanauguuuu

SEQ ID NO: 14982 - RNA, 38 nt, Artificial Sequence
  Description of Artificial Sequence:  Enzymatic Nucleic Acid
  misc_feature (31)..(31): n stands for inosine
agugccaccugaugaggccguuaggccgaangauguuu

SEQ ID NO: 14983 - RNA, 36 nt, Artificial Sequence
  Description of Artificial Sequence:  Enzymatic Nucleic Acid
cgcugugauggcaugcacuaugcgcgacccgagccc

SEQ ID NO: 14984 - RNA, 36 nt, Artificial Sequence
  Description of Artificial Sequence:  Enzymatic Nucleic Acid
auccuugauggcaugcacuaugcgcggccgccaggc

SEQ ID NO: 14985 - RNA, 36 nt, Artificial Sequence
  Description of Artificial Sequence:  Enzymatic Nucleic Acid
ggagaugauggcaugcacuaugcgcgaaccacuucc

SEQ ID NO: 14986 - RNA, 36 nt, Artificial Sequence
  Description of Artificial Sequence:  Enzymatic Nucleic Acid
ucucgugauggcaugcacuaugcgcgggcuccagcc

SEQ ID NO: 14987 - RNA, 36 nt, Artificial Sequence
  Description of Artificial Sequence:  Enzymatic Nucleic Acid
cgucuugauggcaugcacuaugcgcggcggcuccag

SEQ ID NO: 14988 - RNA, 36 nt, Artificial Sequence
  Description of Artificial Sequence:  Enzymatic Nucleic Acid
cugagugauggcaugcacuaugcgcggcccgucucg

SEQ ID NO: 14989 - RNA, 36 nt, Artificial Sequence
  Description of Artificial Sequence:  Enzymatic Nucleic Acid
ccccgugauggcaugcacuaugcgcggcccugagcg

SEQ ID NO: 14990 - RNA, 36 nt, Artificial Sequence
  Description of Artificial Sequence:  Enzymatic Nucleic Acid
ucguuugauggcaugcacuaugcgcggccgccgccg

SEQ ID NO: 14991 - RNA, 36 nt, Artificial Sequence
  Description of Artificial Sequence:  Enzymatic Nucleic Acid
ccucuugauggcaugcacuaugcgcgguucgccgcc

SEQ ID NO: 14992 - RNA, 36 nt, Artificial Sequence
  Description of Artificial Sequence:  Enzymatic Nucleic Acid
gcccgugauggcaugcacuaugcgcggcucccccgg

SEQ ID NO: 14993 - RNA, 36 nt, Artificial Sequence
  Description of Artificial Sequence:  Enzymatic Nucleic Acid
cugcuugauggcaugcacuaugcgcggcccggugcc

SEQ ID NO: 14994 - RNA, 36 nt, Artificial Sequence
  Description of Artificial Sequence:  Enzymatic Nucleic Acid
cgacgugauggcaugcacuaugcgcgggccugcucg

SEQ ID NO: 14995 - RNA, 36 nt, Artificial Sequence
  Description of Artificial Sequence:  Enzymatic Nucleic Acid
gagcgugauggcaugcacuaugcgcggacgcggccu

SEQ ID NO: 14996 - RNA, 36 nt, Artificial Sequence
  Description of Artificial Sequence:  Enzymatic Nucleic Acid
gugagugauggcaugcacuaugcgcggcgacgcggc

SEQ ID NO: 14997 - RNA, 36 nt, Artificial Sequence
  Description of Artificial Sequence:  Enzymatic Nucleic Acid
cacagugauggcaugcacuaugcgcgaggaccccgg

SEQ ID NO: 14998 - RNA, 36 nt, Artificial Sequence
  Description of Artificial Sequence:  Enzymatic Nucleic Acid
gcgcaugauggcaugcacuaugcgcgagcaggaccc

SEQ ID NO: 14999 - RNA, 36 nt, Artificial Sequence
  Description of Artificial Sequence:  Enzymatic Nucleic Acid
gcgcgugauggcaugcacuaugcgcgacagcaggac

SEQ ID NO: 15000 - RNA, 36 nt, Artificial Sequence
  Description of Artificial Sequence:  Enzymatic Nucleic Acid
cagcgugauggcaugcacuaugcgcggcacagcagg

SEQ ID NO: 15001 - RNA, 36 nt, Artificial Sequence
  Description of Artificial Sequence:  Enzymatic Nucleic Acid
agcagugauggcaugcacuaugcgcggcgcacagca

SEQ ID NO: 15002 - RNA, 36 nt, Artificial Sequence
  Description of Artificial Sequence:  Enzymatic Nucleic Acid
cugagugauggcaugcacuaugcgcgagcgcgcaca

SEQ ID NO: 15003 - RNA, 36 nt, Artificial Sequence
  Description of Artificial Sequence:  Enzymatic Nucleic Acid
gcagaugauggcaugcacuaugcgcgagcugagcag

SEQ ID NO: 15004 - RNA, 36 nt, Artificial Sequence
  Description of Artificial Sequence:  Enzymatic Nucleic Acid
agaagugauggcaugcacuaugcgcgagacagcuga

SEQ ID NO: 15005 - RNA, 36 nt, Artificial Sequence
  Description of Artificial Sequence:  Enzymatic Nucleic Acid
caguuugauggcaugcacuaugcgcgaggaucuuuu

SEQ ID NO: 15006 - RNA, 36 nt, Artificial Sequence
  Description of Artificial Sequence:  Enzymatic Nucleic Acid
aaacuugauggcaugcacuaugcgcgaguucaggau

SEQ ID NO: 15007 - RNA, 36 nt, Artificial Sequence
  Description of Artificial Sequence:  Enzymatic Nucleic Acid
gcuugugauggcaugcacuaugcgcgaugaugugcu

SEQ ID NO: 15008 - RNA, 36 nt, Artificial Sequence
  Description of Artificial Sequence:  Enzymatic Nucleic Acid
agaugugauggcaugcacuaugcgcgagugucuggc

SEQ ID NO: 15009 - RNA, 36 nt, Artificial Sequence
  Description of Artificial Sequence:  Enzymatic Nucleic Acid
cccugugauggcaugcacuaugcgcgauuggagaug

SEQ ID NO: 15010 - RNA, 36 nt, Artificial Sequence
  Description of Artificial Sequence:  Enzymatic Nucleic Acid
ucaggugauggcaugcacuaugcgcgaaagaccauu

SEQ ID NO: 15011 - RNA, 36 nt, Artificial Sequence
  Description of Artificial Sequence:  Enzymatic Nucleic Acid
cauuuugauggcaugcacuaugcgcgaggcaaagac

SEQ ID NO: 15012 - RNA, 36 nt, Artificial Sequence
  Description of Artificial Sequence:  Enzymatic Nucleic Acid
uuacuugauggcaugcacuaugcgcgaccauuucag

SEQ ID NO: 15013 - RNA, 36 nt, Artificial Sequence
  Description of Artificial Sequence:  Enzymatic Nucleic Acid
ccuuuugauggcaugcacuaugcgcggcuuuccuua

SEQ ID NO: 15014 - RNA, 36 nt, Artificial Sequence
  Description of Artificial Sequence:  Enzymatic Nucleic Acid
augcuugauggcaugcacuaugcgcgagccuuucgc

SEQ ID NO: 15015 - RNA, 36 nt, Artificial Sequence
  Description of Artificial Sequence:  Enzymatic Nucleic Acid
acaggugauggcaugcacuaugcgcgagauuuaguu

SEQ ID NO: 15016 - RNA, 36 nt, Artificial Sequence
  Description of Artificial Sequence:  Enzymatic Nucleic Acid
uuccaugauggcaugcacuaugcgcgaggcagauuu

SEQ ID NO: 15017 - RNA, 36 nt, Artificial Sequence
  Description of Artificial Sequence:  Enzymatic Nucleic Acid
uacugugauggcaugcacuaugcgcgagaauuguuu

SEQ ID NO: 15018 - RNA, 36 nt, Artificial Sequence
  Description of Artificial Sequence:  Enzymatic Nucleic Acid
guguuugauggcaugcacuaugcgcgaagguuaaag

SEQ ID NO: 15019 - RNA, 36 nt, Artificial Sequence
  Description of Artificial Sequence:  Enzymatic Nucleic Acid
auuugugauggcaugcacuaugcgcgagcuguagaa

SEQ ID NO: 15020 - RNA, 36 nt, Artificial Sequence
  Description of Artificial Sequence:  Enzymatic Nucleic Acid
agguaugauggcaugcacuaugcgcgagcuagauau

SEQ ID NO: 15021 - RNA, 36 nt, Artificial Sequence
  Description of Artificial Sequence:  Enzymatic Nucleic Acid
gauugugauggcaugcacuaugcgcgagauucuguu

SEQ ID NO: 15022 - RNA, 36 nt, Artificial Sequence
  Description of Artificial Sequence:  Enzymatic Nucleic Acid
uguauugauggcaugcacuaugcgcgacuaauaaau

SEQ ID NO: 15023 - RNA, 36 nt, Artificial Sequence
  Description of Artificial Sequence:  Enzymatic Nucleic Acid
cuguaugauggcaugcacuaugcgcgaucucuacga

SEQ ID NO: 15024 - RNA, 36 nt, Artificial Sequence
  Description of Artificial Sequence:  Enzymatic Nucleic Acid
gauuuugauggcaugcacuaugcgcgacuguacauc

SEQ ID NO: 15025 - RNA, 36 nt, Artificial Sequence
  Description of Artificial Sequence:  Enzymatic Nucleic Acid
aauuuugauggcaugcacuaugcgcgggggauuuca

SEQ ID NO: 15026 - RNA, 36 nt, Artificial Sequence
  Description of Artificial Sequence:  Enzymatic Nucleic Acid
ucaguugauggcaugcacuaugcgcgauguguauaa

SEQ ID NO: 15027 - RNA, 36 nt, Artificial Sequence
  Description of Artificial Sequence:  Enzymatic Nucleic Acid
uccuuugauggcaugcacuaugcgcgagucaugugu

SEQ ID NO: 15028 - RNA, 36 nt, Artificial Sequence
  Description of Artificial Sequence:  Enzymatic Nucleic Acid
cccggugauggcaugcacuaugcgcgagggaaugac

SEQ ID NO: 15029 - RNA, 36 nt, Artificial Sequence
  Description of Artificial Sequence:  Enzymatic Nucleic Acid
aguaaugauggcaugcacuaugcgcgagugauguua

SEQ ID NO: 15030 - RNA, 36 nt, Artificial Sequence
  Description of Artificial Sequence:  Enzymatic Nucleic Acid
aguguugauggcaugcacuaugcgcgaaguggaaac

SEQ ID NO: 15031 - RNA, 36 nt, Artificial Sequence
  Description of Artificial Sequence:  Enzymatic Nucleic Acid
gggauugauggcaugcacuaugcgcgaaagugucaa

SEQ ID NO: 15032 - RNA, 36 nt, Artificial Sequence
  Description of Artificial Sequence:  Enzymatic Nucleic Acid
uccauugauggcaugcacuaugcgcgagggaucaaa

SEQ ID NO: 15033 - RNA, 36 nt, Artificial Sequence
  Description of Artificial Sequence:  Enzymatic Nucleic Acid
uuaugugauggcaugcacuaugcgcgguuuuccauc

SEQ ID NO: 15034 - RNA, 36 nt, Artificial Sequence
  Description of Artificial Sequence:  Enzymatic Nucleic Acid
cguugugauggcaugcacuaugcgcgauuugauaug

SEQ ID NO: 15035 - RNA, 36 nt, Artificial Sequence
  Description of Artificial Sequence:  Enzymatic Nucleic Acid
cagguugauggcaugcacuaugcgcgagaagcccua

SEQ ID NO: 15036 - RNA, 36 nt, Artificial Sequence
  Description of Artificial Sequence:  Enzymatic Nucleic Acid
cuucaugauggcaugcacuaugcgcgaggucagaag

SEQ ID NO: 15037 - RNA, 36 nt, Artificial Sequence
  Description of Artificial Sequence:  Enzymatic Nucleic Acid
ugcuuugauggcaugcacuaugcgcgacaggucaga

SEQ ID NO: 15038 - RNA, 36 nt, Artificial Sequence
  Description of Artificial Sequence:  Enzymatic Nucleic Acid
uuauaugauggcaugcacuaugcgcgaaaugcccau

SEQ ID NO: 15039 - RNA, 36 nt, Artificial Sequence
  Description of Artificial Sequence:  Enzymatic Nucleic Acid
uuuguugauggcaugcacuaugcgcggaugugugag

SEQ ID NO: 15040 - RNA, 36 nt, Artificial Sequence
  Description of Artificial Sequence:  Enzymatic Nucleic Acid
uuggaugauggcaugcacuaugcgcgaucuaugauu

SEQ ID NO: 15041 - RNA, 36 nt, Artificial Sequence
  Description of Artificial Sequence:  Enzymatic Nucleic Acid
cugggugauggcaugcacuaugcgcgguggugugcu

SEQ ID NO: 15042 - RNA, 36 nt, Artificial Sequence
  Description of Artificial Sequence:  Enzymatic Nucleic Acid
gaggaugauggcaugcacuaugcgcgaagaguaugg

SEQ ID NO: 15043 - RNA, 36 nt, Artificial Sequence
  Description of Artificial Sequence:  Enzymatic Nucleic Acid
caguaugauggcaugcacuaugcgcgaauugaggac

SEQ ID NO: 15044 - RNA, 36 nt, Artificial Sequence
  Description of Artificial Sequence:  Enzymatic Nucleic Acid
gguagugauggcaugcacuaugcgcgaguacaauug

SEQ ID NO: 15045 - RNA, 36 nt, Artificial Sequence
  Description of Artificial Sequence:  Enzymatic Nucleic Acid
guguuugauggcaugcacuaugcgcgaagggagugg

SEQ ID NO: 15046 - RNA, 36 nt, Artificial Sequence
  Description of Artificial Sequence:  Enzymatic Nucleic Acid
acucuugauggcaugcacuaugcgcgguguucaagg

SEQ ID NO: 15047 - RNA, 36 nt, Artificial Sequence
  Description of Artificial Sequence:  Enzymatic Nucleic Acid
cagguugauggcaugcacuaugcgcgauuugaacuc

SEQ ID NO: 15048 - RNA, 36 nt, Artificial Sequence
  Description of Artificial Sequence:  Enzymatic Nucleic Acid
uucauugauggcaugcacuaugcgcgaggguaacuc

SEQ ID NO: 15049 - RNA, 36 nt, Artificial Sequence
  Description of Artificial Sequence:  Enzymatic Nucleic Acid
uuuuuugauggcaugcacuaugcgcgaucaggguaa

SEQ ID NO: 15050 - RNA, 36 nt, Artificial Sequence
  Description of Artificial Sequence:  Enzymatic Nucleic Acid
uucguugauggcaugcacuaugcgcggccuuacgga

SEQ ID NO: 15051 - RNA, 36 nt, Artificial Sequence
  Description of Artificial Sequence:  Enzymatic Nucleic Acid
caauuugauggcaugcacuaugcgcggucgccuuac

SEQ ID NO: 15052 - RNA, 36 nt, Artificial Sequence
  Description of Artificial Sequence:  Enzymatic Nucleic Acid
uugguugauggcaugcacuaugcgcgaauucgucgc

SEQ ID NO: 15053 - RNA, 36 nt, Artificial Sequence
  Description of Artificial Sequence:  Enzymatic Nucleic Acid
guuggugauggcaugcacuaugcgcgaugggaauug

SEQ ID NO: 15054 - RNA, 36 nt, Artificial Sequence
  Description of Artificial Sequence:  Enzymatic Nucleic Acid
aagaaugauggcaugcacuaugcgcgacuguagaau

SEQ ID NO: 15055 - RNA, 36 nt, Artificial Sequence
  Description of Artificial Sequence:  Enzymatic Nucleic Acid
uuuguugauggcaugcacuaugcgcgaauaguaaga

SEQ ID NO: 15056 - RNA, 36 nt, Artificial Sequence
  Description of Artificial Sequence:  Enzymatic Nucleic Acid
uucugugauggcaugcacuaugcgcgauuuugucaa

SEQ ID NO: 15057 - RNA, 36 nt, Artificial Sequence
  Description of Artificial Sequence:  Enzymatic Nucleic Acid
cacgaugauggcaugcacuaugcgcgaaguauaaag

SEQ ID NO: 15058 - RNA, 36 nt, Artificial Sequence
  Description of Artificial Sequence:  Enzymatic Nucleic Acid
ccuuaugauggcaugcacuaugcgcgacgacaagua

SEQ ID NO: 15059 - RNA, 36 nt, Artificial Sequence
  Description of Artificial Sequence:  Enzymatic Nucleic Acid
guuaaugauggcaugcacuaugcgcgagauuugaau

SEQ ID NO: 15060 - RNA, 36 nt, Artificial Sequence
  Description of Artificial Sequence:  Enzymatic Nucleic Acid
auaugugauggcaugcacuaugcgcgacugaggugu

SEQ ID NO: 15061 - RNA, 36 nt, Artificial Sequence
  Description of Artificial Sequence:  Enzymatic Nucleic Acid
uuuauugauggcaugcacuaugcgcgauauauaugc

SEQ ID NO: 15062 - RNA, 36 nt, Artificial Sequence
  Description of Artificial Sequence:  Enzymatic Nucleic Acid
uuucaugauggcaugcacuaugcgcgagugaugaau

SEQ ID NO: 15063 - RNA, 36 nt, Artificial Sequence
  Description of Artificial Sequence:  Enzymatic Nucleic Acid
uguuuugauggcaugcacuaugcgcgacagugauga

SEQ ID NO: 15064 - RNA, 36 nt, Artificial Sequence
  Description of Artificial Sequence:  Enzymatic Nucleic Acid
guuuuugauggcaugcacuaugcgcggauguuucac

SEQ ID NO: 15065 - RNA, 36 nt, Artificial Sequence
  Description of Artificial Sequence:  Enzymatic Nucleic Acid
ucaagugauggcaugcacuaugcgcgaccugcuguu

SEQ ID NO: 15066 - RNA, 36 nt, Artificial Sequence
  Description of Artificial Sequence:  Enzymatic Nucleic Acid
gguuuugauggcaugcacuaugcgcgaagcaccugc

SEQ ID NO: 15067 - RNA, 36 nt, Artificial Sequence
  Description of Artificial Sequence:  Enzymatic Nucleic Acid
acuuuugauggcaugcacuaugcgcgauagagagcc

SEQ ID NO: 15068 - RNA, 36 nt, Artificial Sequence
  Description of Artificial Sequence:  Enzymatic Nucleic Acid
gccuuugauggcaugcacuaugcgcgacuuucauag

SEQ ID NO: 15069 - RNA, 36 nt, Artificial Sequence
  Description of Artificial Sequence:  Enzymatic Nucleic Acid
uccggugauggcaugcacuaugcgcggagggaaaug

SEQ ID NO: 15070 - RNA, 36 nt, Artificial Sequence
  Description of Artificial Sequence:  Enzymatic Nucleic Acid
ccauaugauggcaugcacuaugcgcgaacuuccggc

SEQ ID NO: 15071 - RNA, 36 nt, Artificial Sequence
  Description of Artificial Sequence:  Enzymatic Nucleic Acid
agucgugauggcaugcacuaugcgcgagguaaccca

SEQ ID NO: 15072 - RNA, 36 nt, Artificial Sequence
  Description of Artificial Sequence:  Enzymatic Nucleic Acid
ucaguugauggcaugcacuaugcgcggcagguaacc

SEQ ID NO: 15073 - RNA, 36 nt, Artificial Sequence
  Description of Artificial Sequence:  Enzymatic Nucleic Acid
uuucuugauggcaugcacuaugcgcgagucgcaggu

SEQ ID NO: 15074 - RNA, 36 nt, Artificial Sequence
  Description of Artificial Sequence:  Enzymatic Nucleic Acid
gcgagugauggcaugcacuaugcgcgagauuucuca

SEQ ID NO: 15075 - RNA, 36 nt, Artificial Sequence
  Description of Artificial Sequence:  Enzymatic Nucleic Acid
aauagugauggcaugcacuaugcgcggagcagauuu

SEQ ID NO: 15076 - RNA, 36 nt, Artificial Sequence
  Description of Artificial Sequence:  Enzymatic Nucleic Acid
cgaguugauggcaugcacuaugcgcgaaauagcgag

SEQ ID NO: 15077 - RNA, 36 nt, Artificial Sequence
  Description of Artificial Sequence:  Enzymatic Nucleic Acid
cucuuugauggcaugcacuaugcgcgaguuacgucc

SEQ ID NO: 15078 - RNA, 36 nt, Artificial Sequence
  Description of Artificial Sequence:  Enzymatic Nucleic Acid
cccugugauggcaugcacuaugcgcgauccucuuca

SEQ ID NO: 15079 - RNA, 36 nt, Artificial Sequence
  Description of Artificial Sequence:  Enzymatic Nucleic Acid
cucagugauggcaugcacuaugcgcgaagauuguau

SEQ ID NO: 15080 - RNA, 36 nt, Artificial Sequence
  Description of Artificial Sequence:  Enzymatic Nucleic Acid
augcuugauggcaugcacuaugcgcgagcaagauug

SEQ ID NO: 15081 - RNA, 36 nt, Artificial Sequence
  Description of Artificial Sequence:  Enzymatic Nucleic Acid
aaacaugauggcaugcacuaugcgcgauuugacugu

SEQ ID NO: 15082 - RNA, 36 nt, Artificial Sequence
  Description of Artificial Sequence:  Enzymatic Nucleic Acid
uuaaaugauggcaugcacuaugcgcgacauuugacu

SEQ ID NO: 15083 - RNA, 36 nt, Artificial Sequence
  Description of Artificial Sequence:  Enzymatic Nucleic Acid
aguggugauggcaugcacuaugcgcgagugagguuu

SEQ ID NO: 15084 - RNA, 36 nt, Artificial Sequence
  Description of Artificial Sequence:  Enzymatic Nucleic Acid
auugaugauggcaugcacuaugcgcgaauuagagug

SEQ ID NO: 15085 - RNA, 36 nt, Artificial Sequence
  Description of Artificial Sequence:  Enzymatic Nucleic Acid
uuucaugauggcaugcacuaugcgcgauugacaauu

SEQ ID NO: 15086 - RNA, 36 nt, Artificial Sequence
  Description of Artificial Sequence:  Enzymatic Nucleic Acid
gguuuugauggcaugcacuaugcgcgacauugacaa

SEQ ID NO: 15087 - RNA, 36 nt, Artificial Sequence
  Description of Artificial Sequence:  Enzymatic Nucleic Acid
cuuuuugauggcaugcacuaugcgcgguaaaucugg

SEQ ID NO: 15088 - RNA, 36 nt, Artificial Sequence
  Description of Artificial Sequence:  Enzymatic Nucleic Acid
gaugaugauggcaugcacuaugcgcgacggccuuuu

SEQ ID NO: 15089 - RNA, 36 nt, Artificial Sequence
  Description of Artificial Sequence:  Enzymatic Nucleic Acid
caaguugauggcaugcacuaugcgcgaggauuuguc

SEQ ID NO: 15090 - RNA, 36 nt, Artificial Sequence
  Description of Artificial Sequence:  Enzymatic Nucleic Acid
cgguaugauggcaugcacuaugcgcgaagucaggau

SEQ ID NO: 15091 - RNA, 36 nt, Artificial Sequence
  Description of Artificial Sequence:  Enzymatic Nucleic Acid
auaugugauggcaugcacuaugcgcggguacaaguc

SEQ ID NO: 15092 - RNA, 36 nt, Artificial Sequence
  Description of Artificial Sequence:  Enzymatic Nucleic Acid
gguuaugauggcaugcacuaugcgcgaggggugcca

SEQ ID NO: 15093 - RNA, 36 nt, Artificial Sequence
  Description of Artificial Sequence:  Enzymatic Nucleic Acid
ugcuuugauggcaugcacuaugcgcgggaaugauua

SEQ ID NO: 15094 - RNA, 36 nt, Artificial Sequence
  Description of Artificial Sequence:  Enzymatic Nucleic Acid
agucaugauggcaugcacuaugcgcgaccuugcuuc

SEQ ID NO: 15095 - RNA, 36 nt, Artificial Sequence
  Description of Artificial Sequence:  Enzymatic Nucleic Acid
aaaguugauggcaugcacuaugcgcgacaccuugcu

SEQ ID NO: 15096 - RNA, 36 nt, Artificial Sequence
  Description of Artificial Sequence:  Enzymatic Nucleic Acid
uggaaugauggcaugcacuaugcgcgaaaagucaca

SEQ ID NO: 15097 - RNA, 36 nt, Artificial Sequence
  Description of Artificial Sequence:  Enzymatic Nucleic Acid
cucuuugauggcaugcacuaugcgcgauuauuggaa

SEQ ID NO: 15098 - RNA, 36 nt, Artificial Sequence
  Description of Artificial Sequence:  Enzymatic Nucleic Acid
gucagugauggcaugcacuaugcgcgauccaggaua

SEQ ID NO: 15099 - RNA, 36 nt, Artificial Sequence
  Description of Artificial Sequence:  Enzymatic Nucleic Acid
gcuguugauggcaugcacuaugcgcgagcauccagg

SEQ ID NO: 15100 - RNA, 36 nt, Artificial Sequence
  Description of Artificial Sequence:  Enzymatic Nucleic Acid
gcucuugauggcaugcacuaugcgcgaauucuguuu

SEQ ID NO: 15101 - RNA, 36 nt, Artificial Sequence
  Description of Artificial Sequence:  Enzymatic Nucleic Acid
ccaugugauggcaugcacuaugcgcggcugagugau

SEQ ID NO: 15102 - RNA, 36 nt, Artificial Sequence
  Description of Artificial Sequence:  Enzymatic Nucleic Acid
agccaugauggcaugcacuaugcgcgaaccaaggug

SEQ ID NO: 15103 - RNA, 36 nt, Artificial Sequence
  Description of Artificial Sequence:  Enzymatic Nucleic Acid
agaguugauggcaugcacuaugcgcgagccacaacc

SEQ ID NO: 15104 - RNA, 36 nt, Artificial Sequence
  Description of Artificial Sequence:  Enzymatic Nucleic Acid
cuaugugauggcaugcacuaugcgcgaaauguagau

SEQ ID NO: 15105 - RNA, 36 nt, Artificial Sequence
  Description of Artificial Sequence:  Enzymatic Nucleic Acid
ucccaugauggcaugcacuaugcgcgagucccaacu

SEQ ID NO: 15106 - RNA, 36 nt, Artificial Sequence
  Description of Artificial Sequence:  Enzymatic Nucleic Acid
uggcaugauggcaugcacuaugcgcgaucugugaua

SEQ ID NO: 15107 - RNA, 36 nt, Artificial Sequence
  Description of Artificial Sequence:  Enzymatic Nucleic Acid
uuuggugauggcaugcacuaugcgcgacaucuguga

SEQ ID NO: 15108 - RNA, 36 nt, Artificial Sequence
  Description of Artificial Sequence:  Enzymatic Nucleic Acid
guuaaugauggcaugcacuaugcgcgaugaaaccca

SEQ ID NO: 15109 - RNA, 36 nt, Artificial Sequence
  Description of Artificial Sequence:  Enzymatic Nucleic Acid
gucggugauggcaugcacuaugcgcgauuuuuucca

SEQ ID NO: 15110 - RNA, 36 nt, Artificial Sequence
  Description of Artificial Sequence:  Enzymatic Nucleic Acid
uccguugauggcaugcacuaugcgcgggcauuuuuu

SEQ ID NO: 15111 - RNA, 36 nt, Artificial Sequence
  Description of Artificial Sequence:  Enzymatic Nucleic Acid
aguuuugauggcaugcacuaugcgcgagguccucuc

SEQ ID NO: 15112 - RNA, 36 nt, Artificial Sequence
  Description of Artificial Sequence:  Enzymatic Nucleic Acid
caagaugauggcaugcacuaugcgcgaguuucaggu

SEQ ID NO: 15113 - RNA, 36 nt, Artificial Sequence
  Description of Artificial Sequence:  Enzymatic Nucleic Acid
cugugugauggcaugcacuaugcgcgaagacaguuu

SEQ ID NO: 15114 - RNA, 36 nt, Artificial Sequence
  Description of Artificial Sequence:  Enzymatic Nucleic Acid
guccgugauggcaugcacuaugcgcgaguaaaaucc

SEQ ID NO: 15115 - RNA, 36 nt, Artificial Sequence
  Description of Artificial Sequence:  Enzymatic Nucleic Acid
uagugugauggcaugcacuaugcgcgauuguucugu

SEQ ID NO: 15116 - RNA, 36 nt, Artificial Sequence
  Description of Artificial Sequence:  Enzymatic Nucleic Acid
acauuugauggcaugcacuaugcgcgaugaugguaa

SEQ ID NO: 15117 - RNA, 36 nt, Artificial Sequence
  Description of Artificial Sequence:  Enzymatic Nucleic Acid
ggaaaugauggcaugcacuaugcgcgauucaugaug

SEQ ID NO: 15118 - RNA, 36 nt, Artificial Sequence
  Description of Artificial Sequence:  Enzymatic Nucleic Acid
ucuugugauggcaugcacuaugcgcgagggaaacau

SEQ ID NO: 15119 - RNA, 36 nt, Artificial Sequence
  Description of Artificial Sequence:  Enzymatic Nucleic Acid
gcaggugauggcaugcacuaugcgcgauaggugccu

SEQ ID NO: 15120 - RNA, 36 nt, Artificial Sequence
  Description of Artificial Sequence:  Enzymatic Nucleic Acid
cucugugauggcaugcacuaugcgcgaggcauaggu

SEQ ID NO: 15121 - RNA, 36 nt, Artificial Sequence
  Description of Artificial Sequence:  Enzymatic Nucleic Acid
guauaugauggcaugcacuaugcgcgauuccuggcu

SEQ ID NO: 15122 - RNA, 36 nt, Artificial Sequence
  Description of Artificial Sequence:  Enzymatic Nucleic Acid
uuucgugauggcaugcacuaugcgcgaggagguaug

SEQ ID NO: 15123 - RNA, 36 nt, Artificial Sequence
  Description of Artificial Sequence:  Enzymatic Nucleic Acid
gguuuugauggcaugcacuaugcgcggcaggaggua

SEQ ID NO: 15124 - RNA, 36 nt, Artificial Sequence
  Description of Artificial Sequence:  Enzymatic Nucleic Acid
gugauugauggcaugcacuaugcgcgacugagguuu

SEQ ID NO: 15125 - RNA, 36 nt, Artificial Sequence
  Description of Artificial Sequence:  Enzymatic Nucleic Acid
caugaugauggcaugcacuaugcgcgagucuaaagu

SEQ ID NO: 15126 - RNA, 36 nt, Artificial Sequence
  Description of Artificial Sequence:  Enzymatic Nucleic Acid
auuagugauggcaugcacuaugcgcgaugacagucu

SEQ ID NO: 15127 - RNA, 36 nt, Artificial Sequence
  Description of Artificial Sequence:  Enzymatic Nucleic Acid
ggggaugauggcaugcacuaugcgcgaccauuagca

SEQ ID NO: 15128 - RNA, 36 nt, Artificial Sequence
  Description of Artificial Sequence:  Enzymatic Nucleic Acid
aggcuugauggcaugcacuaugcgcgggggacacca

SEQ ID NO: 15129 - RNA, 36 nt, Artificial Sequence
  Description of Artificial Sequence:  Enzymatic Nucleic Acid
aacagugauggcaugcacuaugcgcggugcugcuuc

SEQ ID NO: 15130 - RNA, 36 nt, Artificial Sequence
  Description of Artificial Sequence:  Enzymatic Nucleic Acid
auaaaugauggcaugcacuaugcgcgagcgugcugc

SEQ ID NO: 15131 - RNA, 36 nt, Artificial Sequence
  Description of Artificial Sequence:  Enzymatic Nucleic Acid
ucuuuugauggcaugcacuaugcgcgaauaaacagc

SEQ ID NO: 15132 - RNA, 36 nt, Artificial Sequence
  Description of Artificial Sequence:  Enzymatic Nucleic Acid
accuuugauggcaugcacuaugcgcgauccucuucu

SEQ ID NO: 15133 - RNA, 36 nt, Artificial Sequence
  Description of Artificial Sequence:  Enzymatic Nucleic Acid
auagaugauggcaugcacuaugcgcgaccuucaucc

SEQ ID NO: 15134 - RNA, 36 nt, Artificial Sequence
  Description of Artificial Sequence:  Enzymatic Nucleic Acid
cuuugugauggcaugcacuaugcgcgagugauagac

SEQ ID NO: 15135 - RNA, 36 nt, Artificial Sequence
  Description of Artificial Sequence:  Enzymatic Nucleic Acid
uuccaugauggcaugcacuaugcgcgagagcccuuc

SEQ ID NO: 15136 - RNA, 36 nt, Artificial Sequence
  Description of Artificial Sequence:  Enzymatic Nucleic Acid
uugaaugauggcaugcacuaugcgcgagugagguau

SEQ ID NO: 15137 - RNA, 36 nt, Artificial Sequence
  Description of Artificial Sequence:  Enzymatic Nucleic Acid
gugauugauggcaugcacuaugcgcgagcuccagau

SEQ ID NO: 15138 - RNA, 36 nt, Artificial Sequence
  Description of Artificial Sequence:  Enzymatic Nucleic Acid
aggugugauggcaugcacuaugcgcgauguuagagu

SEQ ID NO: 15139 - RNA, 36 nt, Artificial Sequence
  Description of Artificial Sequence:  Enzymatic Nucleic Acid
ccacaugauggcaugcacuaugcgcgaggugcaugu

SEQ ID NO: 15140 - RNA, 36 nt, Artificial Sequence
  Description of Artificial Sequence:  Enzymatic Nucleic Acid
agccaugauggcaugcacuaugcgcgacaggugcau

SEQ ID NO: 15141 - RNA, 36 nt, Artificial Sequence
  Description of Artificial Sequence:  Enzymatic Nucleic Acid
agucgugauggcaugcacuaugcgcgagccacacag

SEQ ID NO: 15142 - RNA, 36 nt, Artificial Sequence
  Description of Artificial Sequence:  Enzymatic Nucleic Acid
agaguugauggcaugcacuaugcgcggcagccacac

SEQ ID NO: 15143 - RNA, 36 nt, Artificial Sequence
  Description of Artificial Sequence:  Enzymatic Nucleic Acid
uuuuuugauggcaugcacuaugcgcgggauaaggag

SEQ ID NO: 15144 - RNA, 36 nt, Artificial Sequence
  Description of Artificial Sequence:  Enzymatic Nucleic Acid
cuuuuugauggcaugcacuaugcgcgauuuuucgga

SEQ ID NO: 15145 - RNA, 36 nt, Artificial Sequence
  Description of Artificial Sequence:  Enzymatic Nucleic Acid
uauuuugauggcaugcacuaugcgcgagaagaagac

SEQ ID NO: 15146 - RNA, 36 nt, Artificial Sequence
  Description of Artificial Sequence:  Enzymatic Nucleic Acid
guaguugauggcaugcacuaugcgcgagucuuuauu

SEQ ID NO: 15147 - RNA, 36 nt, Artificial Sequence
  Description of Artificial Sequence:  Enzymatic Nucleic Acid
aacuuugauggcaugcacuaugcgcgaucugggucc

SEQ ID NO: 15148 - RNA, 36 nt, Artificial Sequence
  Description of Artificial Sequence:  Enzymatic Nucleic Acid
cugcuugauggcaugcacuaugcgcgauccaaagga

SEQ ID NO: 15149 - RNA, 36 nt, Artificial Sequence
  Description of Artificial Sequence:  Enzymatic Nucleic Acid
gcucaugauggcaugcacuaugcgcgacugcucauc

SEQ ID NO: 15150 - RNA, 36 nt, Artificial Sequence
  Description of Artificial Sequence:  Enzymatic Nucleic Acid
ccgcuugauggcaugcacuaugcgcgacacugcuca

SEQ ID NO: 15151 - RNA, 36 nt, Artificial Sequence
  Description of Artificial Sequence:  Enzymatic Nucleic Acid
ggcauugauggcaugcacuaugcgcgauaagggagc

SEQ ID NO: 15152 - RNA, 36 nt, Artificial Sequence
  Description of Artificial Sequence:  Enzymatic Nucleic Acid
gcuggugauggcaugcacuaugcgcgaucauaaggg

SEQ ID NO: 15153 - RNA, 36 nt, Artificial Sequence
  Description of Artificial Sequence:  Enzymatic Nucleic Acid
ccgggugauggcaugcacuaugcgcgaaacucccac

SEQ ID NO: 15154 - RNA, 36 nt, Artificial Sequence
  Description of Artificial Sequence:  Enzymatic Nucleic Acid
uccggugauggcaugcacuaugcgcgacguagguga

SEQ ID NO: 15155 - RNA, 36 nt, Artificial Sequence
  Description of Artificial Sequence:  Enzymatic Nucleic Acid
agccaugauggcaugcacuaugcgcgaguccggcac

SEQ ID NO: 15156 - RNA, 36 nt, Artificial Sequence
  Description of Artificial Sequence:  Enzymatic Nucleic Acid
uuucaugauggcaugcacuaugcgcgagccacaguc

SEQ ID NO: 15157 - RNA, 36 nt, Artificial Sequence
  Description of Artificial Sequence:  Enzymatic Nucleic Acid
auuuuugauggcaugcacuaugcgcgacagccacag

SEQ ID NO: 15158 - RNA, 36 nt, Artificial Sequence
  Description of Artificial Sequence:  Enzymatic Nucleic Acid
uucagugauggcaugcacuaugcgcgauuuucacag

SEQ ID NO: 15159 - RNA, 36 nt, Artificial Sequence
  Description of Artificial Sequence:  Enzymatic Nucleic Acid
ucuuuugauggcaugcacuaugcgcgagcauuuuca

SEQ ID NO: 15160 - RNA, 36 nt, Artificial Sequence
  Description of Artificial Sequence:  Enzymatic Nucleic Acid
guacuugauggcaugcacuaugcgcggcuggccgug

SEQ ID NO: 15161 - RNA, 36 nt, Artificial Sequence
  Description of Artificial Sequence:  Enzymatic Nucleic Acid
gucauugauggcaugcacuaugcgcgagagcuuugu

SEQ ID NO: 15162 - RNA, 36 nt, Artificial Sequence
  Description of Artificial Sequence:  Enzymatic Nucleic Acid
ucaguugauggcaugcacuaugcgcgaucagagcuu

SEQ ID NO: 15163 - RNA, 36 nt, Artificial Sequence
  Description of Artificial Sequence:  Enzymatic Nucleic Acid
uagcuugauggcaugcacuaugcgcgagucaucaga

SEQ ID NO: 15164 - RNA, 36 nt, Artificial Sequence
  Description of Artificial Sequence:  Enzymatic Nucleic Acid
uggguugauggcaugcacuaugcgcgaagauuuuua

SEQ ID NO: 15165 - RNA, 36 nt, Artificial Sequence
  Description of Artificial Sequence:  Enzymatic Nucleic Acid
acguuugauggcaugcacuaugcgcgagaugguggc

SEQ ID NO: 15166 - RNA, 36 nt, Artificial Sequence
  Description of Artificial Sequence:  Enzymatic Nucleic Acid
cccagugauggcaugcacuaugcgcgagguuaacca

SEQ ID NO: 15167 - RNA, 36 nt, Artificial Sequence
  Description of Artificial Sequence:  Enzymatic Nucleic Acid
uggugugauggcaugcacuaugcgcgaggcucccag

SEQ ID NO: 15168 - RNA, 36 nt, Artificial Sequence
  Description of Artificial Sequence:  Enzymatic Nucleic Acid
accauugauggcaugcacuaugcgcgagaggcccuc

SEQ ID NO: 15169 - RNA, 36 nt, Artificial Sequence
  Description of Artificial Sequence:  Enzymatic Nucleic Acid
acaauugauggcaugcacuaugcgcgaccaucagag

SEQ ID NO: 15170 - RNA, 36 nt, Artificial Sequence
  Description of Artificial Sequence:  Enzymatic Nucleic Acid
uucaaugauggcaugcacuaugcgcgaaucaccauc

SEQ ID NO: 15171 - RNA, 36 nt, Artificial Sequence
  Description of Artificial Sequence:  Enzymatic Nucleic Acid
guauuugauggcaugcacuaugcgcgaacaaucacc

SEQ ID NO: 15172 - RNA, 36 nt, Artificial Sequence
  Description of Artificial Sequence:  Enzymatic Nucleic Acid
auuugugauggcaugcacuaugcgcgaguauucaac

SEQ ID NO: 15173 - RNA, 36 nt, Artificial Sequence
  Description of Artificial Sequence:  Enzymatic Nucleic Acid
uaaguugauggcaugcacuaugcgcgacguuugcuc

SEQ ID NO: 15174 - RNA, 36 nt, Artificial Sequence
  Description of Artificial Sequence:  Enzymatic Nucleic Acid
ugcugugauggcaugcacuaugcgcgauccuuguug

SEQ ID NO: 15175 - RNA, 36 nt, Artificial Sequence
  Description of Artificial Sequence:  Enzymatic Nucleic Acid
gcuuuugauggcaugcacuaugcgcggcugcuggug

SEQ ID NO: 15176 - RNA, 36 nt, Artificial Sequence
  Description of Artificial Sequence:  Enzymatic Nucleic Acid
gcucgugauggcaugcacuaugcgcgaaagcuuucg

SEQ ID NO: 15177 - RNA, 36 nt, Artificial Sequence
  Description of Artificial Sequence:  Enzymatic Nucleic Acid
gagcuugauggcaugcacuaugcgcggcaaagcuuu

SEQ ID NO: 15178 - RNA, 36 nt, Artificial Sequence
  Description of Artificial Sequence:  Enzymatic Nucleic Acid
ucacuugauggcaugcacuaugcgcgagacuuuuau

SEQ ID NO: 15179 - RNA, 36 nt, Artificial Sequence
  Description of Artificial Sequence:  Enzymatic Nucleic Acid
aacauugauggcaugcacuaugcgcgacucagacuu

SEQ ID NO: 15180 - RNA, 36 nt, Artificial Sequence
  Description of Artificial Sequence:  Enzymatic Nucleic Acid
cucaaugauggcaugcacuaugcgcgaucacucaga

SEQ ID NO: 15181 - RNA, 36 nt, Artificial Sequence
  Description of Artificial Sequence:  Enzymatic Nucleic Acid
uuccuugauggcaugcacuaugcgcgaacaucacuc

SEQ ID NO: 15182 - RNA, 36 nt, Artificial Sequence
  Description of Artificial Sequence:  Enzymatic Nucleic Acid
accguugauggcaugcacuaugcgcgagaauccucc

SEQ ID NO: 15183 - RNA, 36 nt, Artificial Sequence
  Description of Artificial Sequence:  Enzymatic Nucleic Acid
gaaauugauggcaugcacuaugcgcgagaucuucca

SEQ ID NO: 15184 - RNA, 36 nt, Artificial Sequence
  Description of Artificial Sequence:  Enzymatic Nucleic Acid
gaagaugauggcaugcacuaugcgcgaggaacucca

SEQ ID NO: 15185 - RNA, 36 nt, Artificial Sequence
  Description of Artificial Sequence:  Enzymatic Nucleic Acid
gaaugugauggcaugcacuaugcgcgacuuucugga

SEQ ID NO: 15186 - RNA, 36 nt, Artificial Sequence
  Description of Artificial Sequence:  Enzymatic Nucleic Acid
uuucuugauggcaugcacuaugcgcggcugccaggu

SEQ ID NO: 15187 - RNA, 36 nt, Artificial Sequence
  Description of Artificial Sequence:  Enzymatic Nucleic Acid
guucuugauggcaugcacuaugcgcgagauaaaaga

SEQ ID NO: 15188 - RNA, 36 nt, Artificial Sequence
  Description of Artificial Sequence:  Enzymatic Nucleic Acid
aucuuugauggcaugcacuaugcgcgaccacguugu

SEQ ID NO: 15189 - RNA, 36 nt, Artificial Sequence
  Description of Artificial Sequence:  Enzymatic Nucleic Acid
aaucaugauggcaugcacuaugcgcgaaaucuucac

SEQ ID NO: 15190 - RNA, 36 nt, Artificial Sequence
  Description of Artificial Sequence:  Enzymatic Nucleic Acid
aaaauugauggcaugcacuaugcgcgacaaaucuuc

SEQ ID NO: 15191 - RNA, 36 nt, Artificial Sequence
  Description of Artificial Sequence:  Enzymatic Nucleic Acid
ccgggugauggcaugcacuaugcgcgaaggccaaaa

SEQ ID NO: 15192 - RNA, 36 nt, Artificial Sequence
  Description of Artificial Sequence:  Enzymatic Nucleic Acid
auaauugauggcaugcacuaugcgcggggguucuua

SEQ ID NO: 15193 - RNA, 36 nt, Artificial Sequence
  Description of Artificial Sequence:  Enzymatic Nucleic Acid
ucucaugauggcaugcacuaugcgcgauaaucgggg

SEQ ID NO: 15194 - RNA, 36 nt, Artificial Sequence
  Description of Artificial Sequence:  Enzymatic Nucleic Acid
uuucuugauggcaugcacuaugcgcgacauaaucgg

SEQ ID NO: 15195 - RNA, 36 nt, Artificial Sequence
  Description of Artificial Sequence:  Enzymatic Nucleic Acid
gaaguugauggcaugcacuaugcgcggaguaucucc

SEQ ID NO: 15196 - RNA, 36 nt, Artificial Sequence
  Description of Artificial Sequence:  Enzymatic Nucleic Acid
cauuuugauggcaugcacuaugcgcgagaggaaguc

SEQ ID NO: 15197 - RNA, 36 nt, Artificial Sequence
  Description of Artificial Sequence:  Enzymatic Nucleic Acid
agauuugauggcaugcacuaugcgcggggagccauc

SEQ ID NO: 15198 - RNA, 36 nt, Artificial Sequence
  Description of Artificial Sequence:  Enzymatic Nucleic Acid
uuuguugauggcaugcacuaugcgcgaaagauagau

SEQ ID NO: 15199 - RNA, 36 nt, Artificial Sequence
  Description of Artificial Sequence:  Enzymatic Nucleic Acid
cacguugauggcaugcacuaugcgcggcucuuggug

SEQ ID NO: 15200 - RNA, 36 nt, Artificial Sequence
  Description of Artificial Sequence:  Enzymatic Nucleic Acid
gaccaugauggcaugcacuaugcgcgacgucgcucu

SEQ ID NO: 15201 - RNA, 36 nt, Artificial Sequence
  Description of Artificial Sequence:  Enzymatic Nucleic Acid
cacagugauggcaugcacuaugcgcgaauacuccgu

SEQ ID NO: 15202 - RNA, 36 nt, Artificial Sequence
  Description of Artificial Sequence:  Enzymatic Nucleic Acid
ucccaugauggcaugcacuaugcgcgagcaauacuc

SEQ ID NO: 15203 - RNA, 36 nt, Artificial Sequence
  Description of Artificial Sequence:  Enzymatic Nucleic Acid
guccuugauggcaugcacuaugcgcgauccauuugu

SEQ ID NO: 15204 - RNA, 36 nt, Artificial Sequence
  Description of Artificial Sequence:  Enzymatic Nucleic Acid
gacugugauggcaugcacuaugcgcgaaaaguccuc

SEQ ID NO: 15205 - RNA, 36 nt, Artificial Sequence
  Description of Artificial Sequence:  Enzymatic Nucleic Acid
ucaggugauggcaugcacuaugcgcggacugcaaaa

SEQ ID NO: 15206 - RNA, 36 nt, Artificial Sequence
  Description of Artificial Sequence:  Enzymatic Nucleic Acid
ucccuugauggcaugcacuaugcgcgaggcgacugc

SEQ ID NO: 15207 - RNA, 36 nt, Artificial Sequence
  Description of Artificial Sequence:  Enzymatic Nucleic Acid
auccuugauggcaugcacuaugcgcgaugccuuccc

SEQ ID NO: 15208 - RNA, 36 nt, Artificial Sequence
  Description of Artificial Sequence:  Enzymatic Nucleic Acid
gcucuugauggcaugcacuaugcgcgauccucaugc

SEQ ID NO: 15209 - RNA, 36 nt, Artificial Sequence
  Description of Artificial Sequence:  Enzymatic Nucleic Acid
guacuugauggcaugcacuaugcgcgaggagcucuc

SEQ ID NO: 15210 - RNA, 36 nt, Artificial Sequence
  Description of Artificial Sequence:  Enzymatic Nucleic Acid
gauuuugauggcaugcacuaugcgcgaggaguagag

SEQ ID NO: 15211 - RNA, 36 nt, Artificial Sequence
  Description of Artificial Sequence:  Enzymatic Nucleic Acid
uccagugauggcaugcacuaugcgcgaugaucugau

SEQ ID NO: 15212 - RNA, 36 nt, Artificial Sequence
  Description of Artificial Sequence:  Enzymatic Nucleic Acid
gccagugauggcaugcacuaugcgcgaguccagcau

SEQ ID NO: 15213 - RNA, 36 nt, Artificial Sequence
  Description of Artificial Sequence:  Enzymatic Nucleic Acid
uucugugauggcaugcacuaugcgcgaaaucuuggc

SEQ ID NO: 15214 - RNA, 36 nt, Artificial Sequence
  Description of Artificial Sequence:  Enzymatic Nucleic Acid
uuccaugauggcaugcacuaugcgcgaaguucugca

SEQ ID NO: 15215 - RNA, 36 nt, Artificial Sequence
  Description of Artificial Sequence:  Enzymatic Nucleic Acid
caaauugauggcaugcacuaugcgcgaccuaguuuu

SEQ ID NO: 15216 - RNA, 36 nt, Artificial Sequence
  Description of Artificial Sequence:  Enzymatic Nucleic Acid
ugaagugauggcaugcacuaugcgcgaaaucaccua

SEQ ID NO: 15217 - RNA, 36 nt, Artificial Sequence
  Description of Artificial Sequence:  Enzymatic Nucleic Acid
uuguaugauggcaugcacuaugcgcgauuugcuuga

SEQ ID NO: 15218 - RNA, 36 nt, Artificial Sequence
  Description of Artificial Sequence:  Enzymatic Nucleic Acid
uauggugauggcaugcacuaugcgcgauugauuggg

SEQ ID NO: 15219 - RNA, 36 nt, Artificial Sequence
  Description of Artificial Sequence:  Enzymatic Nucleic Acid
ccuguugauggcaugcacuaugcgcgaguauggcau

SEQ ID NO: 15220 - RNA, 36 nt, Artificial Sequence
  Description of Artificial Sequence:  Enzymatic Nucleic Acid
gaaggugauggcaugcacuaugcgcgaggaguugag

SEQ ID NO: 15221 - RNA, 36 nt, Artificial Sequence
  Description of Artificial Sequence:  Enzymatic Nucleic Acid
guccuugauggcaugcacuaugcgcgagagaaggca

SEQ ID NO: 15222 - RNA, 36 nt, Artificial Sequence
  Description of Artificial Sequence:  Enzymatic Nucleic Acid
aacuuugauggcaugcacuaugcgcgggagcugaaa

SEQ ID NO: 15223 - RNA, 36 nt, Artificial Sequence
  Description of Artificial Sequence:  Enzymatic Nucleic Acid
aucauugauggcaugcacuaugcgcgagagcuuccu

SEQ ID NO: 15224 - RNA, 36 nt, Artificial Sequence
  Description of Artificial Sequence:  Enzymatic Nucleic Acid
gacauugauggcaugcacuaugcgcgaucagagcuu

SEQ ID NO: 15225 - RNA, 36 nt, Artificial Sequence
  Description of Artificial Sequence:  Enzymatic Nucleic Acid
ucugaugauggcaugcacuaugcgcgaucaucagag

SEQ ID NO: 15226 - RNA, 36 nt, Artificial Sequence
  Description of Artificial Sequence:  Enzymatic Nucleic Acid
auuuaugauggcaugcacuaugcgcgauaucugaca

SEQ ID NO: 15227 - RNA, 36 nt, Artificial Sequence
  Description of Artificial Sequence:  Enzymatic Nucleic Acid
gaaagugauggcaugcacuaugcgcgauuuacauau

SEQ ID NO: 15228 - RNA, 36 nt, Artificial Sequence
  Description of Artificial Sequence:  Enzymatic Nucleic Acid
aggcuugauggcaugcacuaugcgcgaugaacuuga

SEQ ID NO: 15229 - RNA, 36 nt, Artificial Sequence
  Description of Artificial Sequence:  Enzymatic Nucleic Acid
uucuuugauggcaugcacuaugcgcgaaagguuuug

SEQ ID NO: 15230 - RNA, 36 nt, Artificial Sequence
  Description of Artificial Sequence:  Enzymatic Nucleic Acid
gcauuugauggcaugcacuaugcgcggguaaaaguu

SEQ ID NO: 15231 - RNA, 36 nt, Artificial Sequence
  Description of Artificial Sequence:  Enzymatic Nucleic Acid
gguggugauggcaugcacuaugcgcgauucgguaaa

SEQ ID NO: 15232 - RNA, 36 nt, Artificial Sequence
  Description of Artificial Sequence:  Enzymatic Nucleic Acid
ucaaaugauggcaugcacuaugcgcgauggaggugg

SEQ ID NO: 15233 - RNA, 36 nt, Artificial Sequence
  Description of Artificial Sequence:  Enzymatic Nucleic Acid
gucauugauggcaugcacuaugcgcgaaacauggag

SEQ ID NO: 15234 - RNA, 36 nt, Artificial Sequence
  Description of Artificial Sequence:  Enzymatic Nucleic Acid
guaguugauggcaugcacuaugcgcgaucaaacaug

SEQ ID NO: 15235 - RNA, 36 nt, Artificial Sequence
  Description of Artificial Sequence:  Enzymatic Nucleic Acid
gcuguugauggcaugcacuaugcgcggcccugguag

SEQ ID NO: 15236 - RNA, 36 nt, Artificial Sequence
  Description of Artificial Sequence:  Enzymatic Nucleic Acid
gccaaugauggcaugcacuaugcgcgagagugcugc

SEQ ID NO: 15237 - RNA, 36 nt, Artificial Sequence
  Description of Artificial Sequence:  Enzymatic Nucleic Acid
uucagugauggcaugcacuaugcgcgaugggagagg

SEQ ID NO: 15238 - RNA, 36 nt, Artificial Sequence
  Description of Artificial Sequence:  Enzymatic Nucleic Acid
cgcuuugauggcaugcacuaugcgcgagcaugggag

SEQ ID NO: 15239 - RNA, 36 nt, Artificial Sequence
  Description of Artificial Sequence:  Enzymatic Nucleic Acid
ugaagugauggcaugcacuaugcgcggcuucagcau

SEQ ID NO: 15240 - RNA, 36 nt, Artificial Sequence
  Description of Artificial Sequence:  Enzymatic Nucleic Acid
gcuguugauggcaugcacuaugcgcgaguccaggug

SEQ ID NO: 15241 - RNA, 36 nt, Artificial Sequence
  Description of Artificial Sequence:  Enzymatic Nucleic Acid
uugagugauggcaugcacuaugcgcggaggccuugg

SEQ ID NO: 15242 - RNA, 36 nt, Artificial Sequence
  Description of Artificial Sequence:  Enzymatic Nucleic Acid
caaguugauggcaugcacuaugcgcgaaucuugagc

SEQ ID NO: 15243 - RNA, 36 nt, Artificial Sequence
  Description of Artificial Sequence:  Enzymatic Nucleic Acid
acucuugauggcaugcacuaugcgcgaagucaaucu

SEQ ID NO: 15244 - RNA, 36 nt, Artificial Sequence
  Description of Artificial Sequence:  Enzymatic Nucleic Acid
ucagaugauggcaugcacuaugcgcgagccccgacu

SEQ ID NO: 15245 - RNA, 36 nt, Artificial Sequence
  Description of Artificial Sequence:  Enzymatic Nucleic Acid
gacauugauggcaugcacuaugcgcgagacagcccc

SEQ ID NO: 15246 - RNA, 36 nt, Artificial Sequence
  Description of Artificial Sequence:  Enzymatic Nucleic Acid
gcugaugauggcaugcacuaugcgcgaucagacagc

SEQ ID NO: 15247 - RNA, 36 nt, Artificial Sequence
  Description of Artificial Sequence:  Enzymatic Nucleic Acid
aauggugauggcaugcacuaugcgcgagaaacuggg

SEQ ID NO: 15248 - RNA, 36 nt, Artificial Sequence
  Description of Artificial Sequence:  Enzymatic Nucleic Acid
gcccaugauggcaugcacuaugcgcgagcuggaaug

SEQ ID NO: 15249 - RNA, 36 nt, Artificial Sequence
  Description of Artificial Sequence:  Enzymatic Nucleic Acid
gccuuugauggcaugcacuaugcgcggcugacgugc

SEQ ID NO: 15250 - RNA, 36 nt, Artificial Sequence
  Description of Artificial Sequence:  Enzymatic Nucleic Acid
accugugauggcaugcacuaugcgcggcuugccuuc

SEQ ID NO: 15251 - RNA, 36 nt, Artificial Sequence
  Description of Artificial Sequence:  Enzymatic Nucleic Acid
gugguugauggcaugcacuaugcgcgguaggugaac

SEQ ID NO: 15252 - RNA, 36 nt, Artificial Sequence
  Description of Artificial Sequence:  Enzymatic Nucleic Acid
cucagugauggcaugcacuaugcgcgguggucguag

SEQ ID NO: 15253 - RNA, 36 nt, Artificial Sequence
  Description of Artificial Sequence:  Enzymatic Nucleic Acid
cagcuugauggcaugcacuaugcgcgagcguggucg

SEQ ID NO: 15254 - RNA, 36 nt, Artificial Sequence
  Description of Artificial Sequence:  Enzymatic Nucleic Acid
gcacgugauggcaugcacuaugcgcggauuuuccuu

SEQ ID NO: 15255 - RNA, 36 nt, Artificial Sequence
  Description of Artificial Sequence:  Enzymatic Nucleic Acid
agcagugauggcaugcacuaugcgcgacgcgauuuu

SEQ ID NO: 15256 - RNA, 36 nt, Artificial Sequence
  Description of Artificial Sequence:  Enzymatic Nucleic Acid
gggagugauggcaugcacuaugcgcgagcacgcgau

SEQ ID NO: 15257 - RNA, 36 nt, Artificial Sequence
  Description of Artificial Sequence:  Enzymatic Nucleic Acid
gggggugauggcaugcacuaugcgcgggggagcagc

SEQ ID NO: 15258 - RNA, 36 nt, Artificial Sequence
  Description of Artificial Sequence:  Enzymatic Nucleic Acid
gaguaugauggcaugcacuaugcgcgaggaccaccg

SEQ ID NO: 15259 - RNA, 36 nt, Artificial Sequence
  Description of Artificial Sequence:  Enzymatic Nucleic Acid
cguguugauggcaugcacuaugcgcgaaacucuaga

SEQ ID NO: 15260 - RNA, 36 nt, Artificial Sequence
  Description of Artificial Sequence:  Enzymatic Nucleic Acid
ggcuuugauggcaugcacuaugcgcggugucaaacu

SEQ ID NO: 15261 - RNA, 36 nt, Artificial Sequence
  Description of Artificial Sequence:  Enzymatic Nucleic Acid
auacaugauggcaugcacuaugcgcgaugugcuucu

SEQ ID NO: 15262 - RNA, 36 nt, Artificial Sequence
  Description of Artificial Sequence:  Enzymatic Nucleic Acid
aaauaugauggcaugcacuaugcgcgacaugugcuu

SEQ ID NO: 15263 - RNA, 36 nt, Artificial Sequence
  Description of Artificial Sequence:  Enzymatic Nucleic Acid
acuggugauggcaugcacuaugcgcgaaaagcuagu

SEQ ID NO: 15264 - RNA, 36 nt, Artificial Sequence
  Description of Artificial Sequence:  Enzymatic Nucleic Acid
auaugugauggcaugcacuaugcgcgauaauacugg

SEQ ID NO: 15265 - RNA, 36 nt, Artificial Sequence
  Description of Artificial Sequence:  Enzymatic Nucleic Acid
aaaagugauggcaugcacuaugcgcgagcuggcucc

SEQ ID NO: 15266 - RNA, 36 nt, Artificial Sequence
  Description of Artificial Sequence:  Enzymatic Nucleic Acid
aaucaugauggcaugcacuaugcgcgaaaaagcagc

SEQ ID NO: 15267 - RNA, 36 nt, Artificial Sequence
  Description of Artificial Sequence:  Enzymatic Nucleic Acid
aaaauugauggcaugcacuaugcgcgacaaaaagca

SEQ ID NO: 15268 - RNA, 36 nt, Artificial Sequence
  Description of Artificial Sequence:  Enzymatic Nucleic Acid
aaaagugauggcaugcacuaugcgcgacuauuaaaa

SEQ ID NO: 15269 - RNA, 36 nt, Artificial Sequence
  Description of Artificial Sequence:  Enzymatic Nucleic Acid
uuaguugauggcaugcacuaugcgcgaaaaaaaaaa

SEQ ID NO: 15270 - RNA, 36 nt, Artificial Sequence
  Description of Artificial Sequence:  Enzymatic Nucleic Acid
aguuaugauggcaugcacuaugcgcgauucuuguua

SEQ ID NO: 15271 - RNA, 36 nt, Artificial Sequence
  Description of Artificial Sequence:  Enzymatic Nucleic Acid
cuuguugauggcaugcacuaugcgcgacuauuucuc

SEQ ID NO: 15272 - RNA, 36 nt, Artificial Sequence
  Description of Artificial Sequence:  Enzymatic Nucleic Acid
uucuuugauggcaugcacuaugcgcgacuugucacu

SEQ ID NO: 15273 - RNA, 36 nt, Artificial Sequence
  Description of Artificial Sequence:  Enzymatic Nucleic Acid
uuuagugauggcaugcacuaugcgcgaguaguguuc

SEQ ID NO: 15274 - RNA, 36 nt, Artificial Sequence
  Description of Artificial Sequence:  Enzymatic Nucleic Acid
aguaaugauggcaugcacuaugcgcgaugaggauuu

SEQ ID NO: 15275 - RNA, 36 nt, Artificial Sequence
  Description of Artificial Sequence:  Enzymatic Nucleic Acid
ucuaaugauggcaugcacuaugcgcgacugaguaac

SEQ ID NO: 15276 - RNA, 36 nt, Artificial Sequence
  Description of Artificial Sequence:  Enzymatic Nucleic Acid
gaaguugauggcaugcacuaugcgcgauuggguuua

SEQ ID NO: 15277 - RNA, 36 nt, Artificial Sequence
  Description of Artificial Sequence:  Enzymatic Nucleic Acid
uggagugauggcaugcacuaugcgcgagggaaguca

SEQ ID NO: 15278 - RNA, 36 nt, Artificial Sequence
  Description of Artificial Sequence:  Enzymatic Nucleic Acid
gguggugauggcaugcacuaugcgcgggggguugga

SEQ ID NO: 15279 - RNA, 36 nt, Artificial Sequence
  Description of Artificial Sequence:  Enzymatic Nucleic Acid
uccugugauggcaugcacuaugcgcggugcccugag

SEQ ID NO: 15280 - RNA, 36 nt, Artificial Sequence
  Description of Artificial Sequence:  Enzymatic Nucleic Acid
ucaauugauggcaugcacuaugcgcgaaacuggucc

SEQ ID NO: 15281 - RNA, 36 nt, Artificial Sequence
  Description of Artificial Sequence:  Enzymatic Nucleic Acid
cuccuugauggcaugcacuaugcgcgaaucaaacug

SEQ ID NO: 15282 - RNA, 36 nt, Artificial Sequence
  Description of Artificial Sequence:  Enzymatic Nucleic Acid
cagugugauggcaugcacuaugcgcgagcuccucaa

SEQ ID NO: 15283 - RNA, 36 nt, Artificial Sequence
  Description of Artificial Sequence:  Enzymatic Nucleic Acid
gugauugauggcaugcacuaugcgcgagugcagcuc

SEQ ID NO: 15284 - RNA, 36 nt, Artificial Sequence
  Description of Artificial Sequence:  Enzymatic Nucleic Acid
ugaugugauggcaugcacuaugcgcgauugggugau

SEQ ID NO: 15285 - RNA, 36 nt, Artificial Sequence
  Description of Artificial Sequence:  Enzymatic Nucleic Acid
ggcugugauggcaugcacuaugcgcgagggcuggcc

SEQ ID NO: 15286 - RNA, 36 nt, Artificial Sequence
  Description of Artificial Sequence:  Enzymatic Nucleic Acid
uugcuugauggcaugcacuaugcgcgaggccagcca

SEQ ID NO: 15287 - RNA, 36 nt, Artificial Sequence
  Description of Artificial Sequence:  Enzymatic Nucleic Acid
ccucaugauggcaugcacuaugcgcgaugucuuagg

SEQ ID NO: 15288 - RNA, 36 nt, Artificial Sequence
  Description of Artificial Sequence:  Enzymatic Nucleic Acid
cuccuugauggcaugcacuaugcgcgacaugucuua

SEQ ID NO: 15289 - RNA, 36 nt, Artificial Sequence
  Description of Artificial Sequence:  Enzymatic Nucleic Acid
uuucuugauggcaugcacuaugcgcgaugccuucuc

SEQ ID NO: 15290 - RNA, 36 nt, Artificial Sequence
  Description of Artificial Sequence:  Enzymatic Nucleic Acid
cgucuugauggcaugcacuaugcgcgaaauucuuuc

SEQ ID NO: 15291 - RNA, 36 nt, Artificial Sequence
  Description of Artificial Sequence:  Enzymatic Nucleic Acid
uggugugauggcaugcacuaugcgcggucucaaauu

SEQ ID NO: 15292 - RNA, 36 nt, Artificial Sequence
  Description of Artificial Sequence:  Enzymatic Nucleic Acid
gcccaugauggcaugcacuaugcgcgauggugcguc

SEQ ID NO: 15293 - RNA, 36 nt, Artificial Sequence
  Description of Artificial Sequence:  Enzymatic Nucleic Acid
aauggugauggcaugcacuaugcgcgauugcugagc

SEQ ID NO: 15294 - RNA, 36 nt, Artificial Sequence
  Description of Artificial Sequence:  Enzymatic Nucleic Acid
aggguugauggcaugcacuaugcgcgagagcuggga

SEQ ID NO: 15295 - RNA, 36 nt, Artificial Sequence
  Description of Artificial Sequence:  Enzymatic Nucleic Acid
gcccuugauggcaugcacuaugcgcgaaauguagaa

SEQ ID NO: 15296 - RNA, 36 nt, Artificial Sequence
  Description of Artificial Sequence:  Enzymatic Nucleic Acid
cucauugauggcaugcacuaugcgcggcuguccauc

SEQ ID NO: 15297 - RNA, 36 nt, Artificial Sequence
  Description of Artificial Sequence:  Enzymatic Nucleic Acid
ccccuugauggcaugcacuaugcgcgaucgcugucc

SEQ ID NO: 15298 - RNA, 36 nt, Artificial Sequence
  Description of Artificial Sequence:  Enzymatic Nucleic Acid
auggaugauggcaugcacuaugcgcgauagaaccac

SEQ ID NO: 15299 - RNA, 36 nt, Artificial Sequence
  Description of Artificial Sequence:  Enzymatic Nucleic Acid
caaaaugauggcaugcacuaugcgcgaugccacgaa

SEQ ID NO: 15300 - RNA, 36 nt, Artificial Sequence
  Description of Artificial Sequence:  Enzymatic Nucleic Acid
caaauugauggcaugcacuaugcgcgaaaacaugcc

SEQ ID NO: 15301 - RNA, 36 nt, Artificial Sequence
  Description of Artificial Sequence:  Enzymatic Nucleic Acid
ugcuaugauggcaugcacuaugcgcgaaaucaaaac

SEQ ID NO: 15302 - RNA, 36 nt, Artificial Sequence
  Description of Artificial Sequence:  Enzymatic Nucleic Acid
acccuugauggcaugcacuaugcgcgagugcuacaa

SEQ ID NO: 15303 - RNA, 36 nt, Artificial Sequence
  Description of Artificial Sequence:  Enzymatic Nucleic Acid
gggcuugauggcaugcacuaugcgcgagaguugagu

SEQ ID NO: 15304 - RNA, 36 nt, Artificial Sequence
  Description of Artificial Sequence:  Enzymatic Nucleic Acid
cagugugauggcaugcacuaugcgcgaucuuacuag

SEQ ID NO: 15305 - RNA, 36 nt, Artificial Sequence
  Description of Artificial Sequence:  Enzymatic Nucleic Acid
guuuuugauggcaugcacuaugcgcgagugcaucuu

SEQ ID NO: 15306 - RNA, 36 nt, Artificial Sequence
  Description of Artificial Sequence:  Enzymatic Nucleic Acid
ggagaugauggcaugcacuaugcgcgaaccuaacuc

SEQ ID NO: 15307 - RNA, 36 nt, Artificial Sequence
  Description of Artificial Sequence:  Enzymatic Nucleic Acid
gccauugauggcaugcacuaugcgcgauggccugga

SEQ ID NO: 15308 - RNA, 36 nt, Artificial Sequence
  Description of Artificial Sequence:  Enzymatic Nucleic Acid
auuuuugauggcaugcacuaugcgcgaguguaaggc

SEQ ID NO: 15309 - RNA, 36 nt, Artificial Sequence
  Description of Artificial Sequence:  Enzymatic Nucleic Acid
ugugaugauggcaugcacuaugcgcgauuuucagug

SEQ ID NO: 15310 - RNA, 36 nt, Artificial Sequence
  Description of Artificial Sequence:  Enzymatic Nucleic Acid
caaaaugauggcaugcacuaugcgcgagaauaauac

SEQ ID NO: 15311 - RNA, 36 nt, Artificial Sequence
  Description of Artificial Sequence:  Enzymatic Nucleic Acid
cugugugauggcaugcacuaugcgcgaaaacagaau

SEQ ID NO: 15312 - RNA, 36 nt, Artificial Sequence
  Description of Artificial Sequence:  Enzymatic Nucleic Acid
uuucaugauggcaugcacuaugcgcgaacuaacugu

SEQ ID NO: 15313 - RNA, 36 nt, Artificial Sequence
  Description of Artificial Sequence:  Enzymatic Nucleic Acid
ucuuuugauggcaugcacuaugcgcgacaacuaacu

SEQ ID NO: 15314 - RNA, 36 nt, Artificial Sequence
  Description of Artificial Sequence:  Enzymatic Nucleic Acid
cuucuugauggcaugcacuaugcgcgagcuuucuuu

SEQ ID NO: 15315 - RNA, 36 nt, Artificial Sequence
  Description of Artificial Sequence:  Enzymatic Nucleic Acid
auuuuugauggcaugcacuaugcgcgauucuucuca

SEQ ID NO: 15316 - RNA, 36 nt, Artificial Sequence
  Description of Artificial Sequence:  Enzymatic Nucleic Acid
gacugugauggcaugcacuaugcgcgauuuucauuc

SEQ ID NO: 15317 - RNA, 36 nt, Artificial Sequence
  Description of Artificial Sequence:  Enzymatic Nucleic Acid
cuccuugauggcaugcacuaugcgcgaggacugcau

SEQ ID NO: 15318 - RNA, 36 nt, Artificial Sequence
  Description of Artificial Sequence:  Enzymatic Nucleic Acid
gcccuugauggcaugcacuaugcgcgguuuugauau

SEQ ID NO: 15319 - RNA, 36 nt, Artificial Sequence
  Description of Artificial Sequence:  Enzymatic Nucleic Acid
uccauugauggcaugcacuaugcgcgagcccucguu

SEQ ID NO: 15320 - RNA, 36 nt, Artificial Sequence
  Description of Artificial Sequence:  Enzymatic Nucleic Acid
ccuuuugauggcaugcacuaugcgcgagauuagugu

SEQ ID NO: 15321 - RNA, 36 nt, Artificial Sequence
  Description of Artificial Sequence:  Enzymatic Nucleic Acid
uuccaugauggcaugcacuaugcgcgauccuuucag

SEQ ID NO: 15322 - RNA, 36 nt, Artificial Sequence
  Description of Artificial Sequence:  Enzymatic Nucleic Acid
auaugugauggcaugcacuaugcgcggccagcuaau

SEQ ID NO: 15323 - RNA, 36 nt, Artificial Sequence
  Description of Artificial Sequence:  Enzymatic Nucleic Acid
uuacuugauggcaugcacuaugcgcgaaggagcuua

SEQ ID NO: 15324 - RNA, 36 nt, Artificial Sequence
  Description of Artificial Sequence:  Enzymatic Nucleic Acid
aauuaugauggcaugcacuaugcgcgauaccaccuu

SEQ ID NO: 15325 - RNA, 36 nt, Artificial Sequence
  Description of Artificial Sequence:  Enzymatic Nucleic Acid
ccuugugauggcaugcacuaugcgcgauaaauuaca

SEQ ID NO: 15326 - RNA, 36 nt, Artificial Sequence
  Description of Artificial Sequence:  Enzymatic Nucleic Acid
uggcuugauggcaugcacuaugcgcgauuaacuaau

SEQ ID NO: 15327 - RNA, 36 nt, Artificial Sequence
  Description of Artificial Sequence:  Enzymatic Nucleic Acid
caaagugauggcaugcacuaugcgcgaguugaaaau

SEQ ID NO: 15328 - RNA, 36 nt, Artificial Sequence
  Description of Artificial Sequence:  Enzymatic Nucleic Acid
aguuuugauggcaugcacuaugcgcgaaagcaguug

SEQ ID NO: 15329 - RNA, 36 nt, Artificial Sequence
  Description of Artificial Sequence:  Enzymatic Nucleic Acid
ccaggugauggcaugcacuaugcgcgaaguuucaaa

SEQ ID NO: 15330 - RNA, 36 nt, Artificial Sequence
  Description of Artificial Sequence:  Enzymatic Nucleic Acid
augcuugauggcaugcacuaugcgcgagaccccagg

SEQ ID NO: 15331 - RNA, 36 nt, Artificial Sequence
  Description of Artificial Sequence:  Enzymatic Nucleic Acid
cccauugauggcaugcacuaugcgcgaugcucagac

SEQ ID NO: 15332 - RNA, 36 nt, Artificial Sequence
  Description of Artificial Sequence:  Enzymatic Nucleic Acid
guaggugauggcaugcacuaugcgcggcccuuuccu

SEQ ID NO: 15333 - RNA, 36 nt, Artificial Sequence
  Description of Artificial Sequence:  Enzymatic Nucleic Acid
cuuagugauggcaugcacuaugcgcggauccaaggc

SEQ ID NO: 15334 - RNA, 36 nt, Artificial Sequence
  Description of Artificial Sequence:  Enzymatic Nucleic Acid
ucaaaugauggcaugcacuaugcgcgagagccagcu

SEQ ID NO: 15335 - RNA, 36 nt, Artificial Sequence
  Description of Artificial Sequence:  Enzymatic Nucleic Acid
agcauugauggcaugcacuaugcgcgaaacagagcc

SEQ ID NO: 15336 - RNA, 36 nt, Artificial Sequence
  Description of Artificial Sequence:  Enzymatic Nucleic Acid
aauagugauggcaugcacuaugcgcgaucaaacaga

SEQ ID NO: 15337 - RNA, 36 nt, Artificial Sequence
  Description of Artificial Sequence:  Enzymatic Nucleic Acid
acuugugauggcaugcacuaugcgcgauaaauagca

SEQ ID NO: 15338 - RNA, 36 nt, Artificial Sequence
  Description of Artificial Sequence:  Enzymatic Nucleic Acid
aaauaugauggcaugcacuaugcgcgauagacccua

SEQ ID NO: 15339 - RNA, 36 nt, Artificial Sequence
  Description of Artificial Sequence:  Enzymatic Nucleic Acid
aggcgugauggcaugcacuaugcgcgauccuaaaua

SEQ ID NO: 15340 - RNA, 36 nt, Artificial Sequence
  Description of Artificial Sequence:  Enzymatic Nucleic Acid
guaggugauggcaugcacuaugcgcggcauccuaaa

SEQ ID NO: 15341 - RNA, 36 nt, Artificial Sequence
  Description of Artificial Sequence:  Enzymatic Nucleic Acid
gcagaugauggcaugcacuaugcgcgauccuaaaua

SEQ ID NO: 15342 - RNA, 36 nt, Artificial Sequence
  Description of Artificial Sequence:  Enzymatic Nucleic Acid
aggugugauggcaugcacuaugcgcgagacauccua

SEQ ID NO: 15343 - RNA, 36 nt, Artificial Sequence
  Description of Artificial Sequence:  Enzymatic Nucleic Acid
ggcugugauggcaugcacuaugcgcgagaaggugca

SEQ ID NO: 15344 - RNA, 36 nt, Artificial Sequence
  Description of Artificial Sequence:  Enzymatic Nucleic Acid
agcagugauggcaugcacuaugcgcgaauccacugu

SEQ ID NO: 15345 - RNA, 36 nt, Artificial Sequence
  Description of Artificial Sequence:  Enzymatic Nucleic Acid
agaagugauggcaugcacuaugcgcgagcaauccac

SEQ ID NO: 15346 - RNA, 36 nt, Artificial Sequence
  Description of Artificial Sequence:  Enzymatic Nucleic Acid
ggaagugauggcaugcacuaugcgcgauacucuucu

SEQ ID NO: 15347 - RNA, 36 nt, Artificial Sequence
  Description of Artificial Sequence:  Enzymatic Nucleic Acid
aauuaugauggcaugcacuaugcgcgauggauaaaa

SEQ ID NO: 15348 - RNA, 36 nt, Artificial Sequence
  Description of Artificial Sequence:  Enzymatic Nucleic Acid
uucuaugauggcaugcacuaugcgcgaguuaaauua

SEQ ID NO: 15349 - RNA, 36 nt, Artificial Sequence
  Description of Artificial Sequence:  Enzymatic Nucleic Acid
gagcuugauggcaugcacuaugcgcgagguucuaca

SEQ ID NO: 15350 - RNA, 36 nt, Artificial Sequence
  Description of Artificial Sequence:  Enzymatic Nucleic Acid
uucuuugauggcaugcacuaugcgcggguuacuuag

SEQ ID NO: 15351 - RNA, 36 nt, Artificial Sequence
  Description of Artificial Sequence:  Enzymatic Nucleic Acid
gcauaugauggcaugcacuaugcgcgauucuucggu

SEQ ID NO: 15352 - RNA, 36 nt, Artificial Sequence
  Description of Artificial Sequence:  Enzymatic Nucleic Acid
agaggugauggcaugcacuaugcgcgauacauucuu

SEQ ID NO: 15353 - RNA, 36 nt, Artificial Sequence
  Description of Artificial Sequence:  Enzymatic Nucleic Acid
aagaaugauggcaugcacuaugcgcgagaggcauac

SEQ ID NO: 15354 - RNA, 36 nt, Artificial Sequence
  Description of Artificial Sequence:  Enzymatic Nucleic Acid
uggcaugauggcaugcacuaugcgcgauaagaacag

SEQ ID NO: 15355 - RNA, 36 nt, Artificial Sequence
  Description of Artificial Sequence:  Enzymatic Nucleic Acid
uguggugauggcaugcacuaugcgcgacauaagaac

SEQ ID NO: 15356 - RNA, 36 nt, Artificial Sequence
  Description of Artificial Sequence:  Enzymatic Nucleic Acid
uuaaaugauggcaugcacuaugcgcgaaggaugugg

SEQ ID NO: 15357 - RNA, 36 nt, Artificial Sequence
  Description of Artificial Sequence:  Enzymatic Nucleic Acid
ucauaugauggcaugcacuaugcgcgagagagccuu

SEQ ID NO: 15358 - RNA, 36 nt, Artificial Sequence
  Description of Artificial Sequence:  Enzymatic Nucleic Acid
cucuuugauggcaugcacuaugcgcgauacagagag

SEQ ID NO: 15359 - RNA, 36 nt, Artificial Sequence
  Description of Artificial Sequence:  Enzymatic Nucleic Acid
aggcuugauggcaugcacuaugcgcgacuagggaau

SEQ ID NO: 15360 - RNA, 36 nt, Artificial Sequence
  Description of Artificial Sequence:  Enzymatic Nucleic Acid
uuccaugauggcaugcacuaugcgcgaaaagccgcu

SEQ ID NO: 15361 - RNA, 36 nt, Artificial Sequence
  Description of Artificial Sequence:  Enzymatic Nucleic Acid
aacaaugauggcaugcacuaugcgcgaaagauuugu

SEQ ID NO: 15362 - RNA, 36 nt, Artificial Sequence
  Description of Artificial Sequence:  Enzymatic Nucleic Acid
aggaaugauggcaugcacuaugcgcgaacaaagauu

SEQ ID NO: 15363 - RNA, 36 nt, Artificial Sequence
  Description of Artificial Sequence:  Enzymatic Nucleic Acid
guuugugauggcaugcacuaugcgcgguauguguaa

SEQ ID NO: 15364 - RNA, 36 nt, Artificial Sequence
  Description of Artificial Sequence:  Enzymatic Nucleic Acid
ugucaugauggcaugcacuaugcgcgaggugguuug

SEQ ID NO: 15365 - RNA, 36 nt, Artificial Sequence
  Description of Artificial Sequence:  Enzymatic Nucleic Acid
gcuguugauggcaugcacuaugcgcgacaggugguu

SEQ ID NO: 15366 - RNA, 36 nt, Artificial Sequence
  Description of Artificial Sequence:  Enzymatic Nucleic Acid
guuauugauggcaugcacuaugcgcgacuauuugcu

SEQ ID NO: 15367 - RNA, 36 nt, Artificial Sequence
  Description of Artificial Sequence:  Enzymatic Nucleic Acid
augaaugauggcaugcacuaugcgcgagcuaagguu

SEQ ID NO: 15368 - RNA, 36 nt, Artificial Sequence
  Description of Artificial Sequence:  Enzymatic Nucleic Acid
caagaugauggcaugcacuaugcgcgaugaacagcu

SEQ ID NO: 15369 - RNA, 36 nt, Artificial Sequence
  Description of Artificial Sequence:  Enzymatic Nucleic Acid
gaaauugauggcaugcacuaugcgcgaagacaugaa

SEQ ID NO: 15370 - RNA, 36 nt, Artificial Sequence
  Description of Artificial Sequence:  Enzymatic Nucleic Acid
aguaaugauggcaugcacuaugcgcgaauucuaaug

SEQ ID NO: 15371 - RNA, 36 nt, Artificial Sequence
  Description of Artificial Sequence:  Enzymatic Nucleic Acid
ugcuaugauggcaugcacuaugcgcgaaaccugagu

SEQ ID NO: 15372 - RNA, 36 nt, Artificial Sequence
  Description of Artificial Sequence:  Enzymatic Nucleic Acid
ggacuugauggcaugcacuaugcgcgauguaugcua

SEQ ID NO: 15373 - RNA, 36 nt, Artificial Sequence
  Description of Artificial Sequence:  Enzymatic Nucleic Acid
uucuaugauggcaugcacuaugcgcgauuaagacuc

SEQ ID NO: 15374 - RNA, 36 nt, Artificial Sequence
  Description of Artificial Sequence:  Enzymatic Nucleic Acid
uauuaugauggcaugcacuaugcgcgaagucuccau

SEQ ID NO: 15375 - RNA, 36 nt, Artificial Sequence
  Description of Artificial Sequence:  Enzymatic Nucleic Acid
uagcuugauggcaugcacuaugcgcgauuauuacaa

SEQ ID NO: 15376 - RNA, 36 nt, Artificial Sequence
  Description of Artificial Sequence:  Enzymatic Nucleic Acid
acaagugauggcaugcacuaugcgcgacuuuguaac

SEQ ID NO: 15377 - RNA, 36 nt, Artificial Sequence
  Description of Artificial Sequence:  Enzymatic Nucleic Acid
augaaugauggcaugcacuaugcgcgaagcacuuug

SEQ ID NO: 15378 - RNA, 36 nt, Artificial Sequence
  Description of Artificial Sequence:  Enzymatic Nucleic Acid
auuuuugauggcaugcacuaugcgcgagugcuauuu

SEQ ID NO: 15379 - RNA, 36 nt, Artificial Sequence
  Description of Artificial Sequence:  Enzymatic Nucleic Acid
uguuuugauggcaugcacuaugcgcgaauuuucagu

SEQ ID NO: 15380 - RNA, 36 nt, Artificial Sequence
  Description of Artificial Sequence:  Enzymatic Nucleic Acid
uaauuugauggcaugcacuaugcgcgauguuucaau

SEQ ID NO: 15381 - RNA, 36 nt, Artificial Sequence
  Description of Artificial Sequence:  Enzymatic Nucleic Acid
auuauugauggcaugcacuaugcgcgaguuaauuca

SEQ ID NO: 15382 - RNA, 36 nt, Artificial Sequence
  Description of Artificial Sequence:  Enzymatic Nucleic Acid
aauggugauggcaugcacuaugcgcgaaaugauugg

SEQ ID NO: 15383 - RNA, 36 nt, Artificial Sequence
  Description of Artificial Sequence:  Enzymatic Nucleic Acid
uuuguugauggcaugcacuaugcgcgauaaauggca

SEQ ID NO: 15384 - RNA, 36 nt, Artificial Sequence
  Description of Artificial Sequence:  Enzymatic Nucleic Acid
gugcuugauggcaugcacuaugcgcgguucuuuguu

SEQ ID NO: 15385 - RNA, 36 nt, Artificial Sequence
  Description of Artificial Sequence:  Enzymatic Nucleic Acid
uaucuugauggcaugcacuaugcgcgagaaacucug

SEQ ID NO: 15386 - RNA, 36 nt, Artificial Sequence
  Description of Artificial Sequence:  Enzymatic Nucleic Acid
acguaugauggcaugcacuaugcgcgauuaucucag

SEQ ID NO: 15387 - RNA, 36 nt, Artificial Sequence
  Description of Artificial Sequence:  Enzymatic Nucleic Acid
gguuuugauggcaugcacuaugcgcgagccccauuc

SEQ ID NO: 15388 - RNA, 36 nt, Artificial Sequence
  Description of Artificial Sequence:  Enzymatic Nucleic Acid
uugcaugauggcaugcacuaugcgcgaugguuucag

SEQ ID NO: 15389 - RNA, 36 nt, Artificial Sequence
  Description of Artificial Sequence:  Enzymatic Nucleic Acid
acuugugauggcaugcacuaugcgcgacaugguuuc

SEQ ID NO: 15390 - RNA, 36 nt, Artificial Sequence
  Description of Artificial Sequence:  Enzymatic Nucleic Acid
agacaugauggcaugcacuaugcgcgagacuugcac

SEQ ID NO: 15391 - RNA, 36 nt, Artificial Sequence
  Description of Artificial Sequence:  Enzymatic Nucleic Acid
caagaugauggcaugcacuaugcgcgacagacuugc

SEQ ID NO: 15392 - RNA, 36 nt, Artificial Sequence
  Description of Artificial Sequence:  Enzymatic Nucleic Acid
acugaugauggcaugcacuaugcgcgaagacacaga

SEQ ID NO: 15393 - RNA, 36 nt, Artificial Sequence
  Description of Artificial Sequence:  Enzymatic Nucleic Acid
gguguugauggcaugcacuaugcgcgacuucuugga

SEQ ID NO: 15394 - RNA, 36 nt, Artificial Sequence
  Description of Artificial Sequence:  Enzymatic Nucleic Acid
caucuugauggcaugcacuaugcgcgggugucacuu

SEQ ID NO: 15395 - RNA, 36 nt, Artificial Sequence
  Description of Artificial Sequence:  Enzymatic Nucleic Acid
auuaaugauggcaugcacuaugcgcgaucucggugu

SEQ ID NO: 15396 - RNA, 36 nt, Artificial Sequence
  Description of Artificial Sequence:  Enzymatic Nucleic Acid
caaggugauggcaugcacuaugcgcgacgggucccu

SEQ ID NO: 15397 - RNA, 36 nt, Artificial Sequence
  Description of Artificial Sequence:  Enzymatic Nucleic Acid
ggaaaugauggcaugcacuaugcgcgaaggcacggg

SEQ ID NO: 15398 - RNA, 36 nt, Artificial Sequence
  Description of Artificial Sequence:  Enzymatic Nucleic Acid
guuugugauggcaugcacuaugcgcgauucuugugg

SEQ ID NO: 15399 - RNA, 36 nt, Artificial Sequence
  Description of Artificial Sequence:  Enzymatic Nucleic Acid
gcuagugauggcaugcacuaugcgcggaguaucugu

SEQ ID NO: 15400 - RNA, 36 nt, Artificial Sequence
  Description of Artificial Sequence:  Enzymatic Nucleic Acid
uuaauugauggcaugcacuaugcgcgaauuuaaaug

SEQ ID NO: 15401 - RNA, 36 nt, Artificial Sequence
  Description of Artificial Sequence:  Enzymatic Nucleic Acid
agaugugauggcaugcacuaugcgcgacuccuccuu

SEQ ID NO: 15402 - RNA, 36 nt, Artificial Sequence
  Description of Artificial Sequence:  Enzymatic Nucleic Acid
acuguugauggcaugcacuaugcgcgggccaaagau

SEQ ID NO: 15403 - RNA, 36 nt, Artificial Sequence
  Description of Artificial Sequence:  Enzymatic Nucleic Acid
aguuaugauggcaugcacuaugcgcgaccacugucg

SEQ ID NO: 15404 - RNA, 36 nt, Artificial Sequence
  Description of Artificial Sequence:  Enzymatic Nucleic Acid
acacaugauggcaugcacuaugcgcgaguuacacca

SEQ ID NO: 15405 - RNA, 36 nt, Artificial Sequence
  Description of Artificial Sequence:  Enzymatic Nucleic Acid
acacaugauggcaugcacuaugcgcgacaguuacac

SEQ ID NO: 15406 - RNA, 36 nt, Artificial Sequence
  Description of Artificial Sequence:  Enzymatic Nucleic Acid
acacaugauggcaugcacuaugcgcgacacaguuac

SEQ ID NO: 15407 - RNA, 36 nt, Artificial Sequence
  Description of Artificial Sequence:  Enzymatic Nucleic Acid
acacaugauggcaugcacuaugcgcgacacacaguu

SEQ ID NO: 15408 - RNA, 36 nt, Artificial Sequence
  Description of Artificial Sequence:  Enzymatic Nucleic Acid
acacaugauggcaugcacuaugcgcgacacacacag

SEQ ID NO: 15409 - RNA, 36 nt, Artificial Sequence
  Description of Artificial Sequence:  Enzymatic Nucleic Acid
acacaugauggcaugcacuaugcgcgacacacacac

SEQ ID NO: 15410 - RNA, 36 nt, Artificial Sequence
  Description of Artificial Sequence:  Enzymatic Nucleic Acid
ccacaugauggcaugcacuaugcgcgacacacacac

SEQ ID NO: 15411 - RNA, 36 nt, Artificial Sequence
  Description of Artificial Sequence:  Enzymatic Nucleic Acid
acccaugauggcaugcacuaugcgcgacacacacac

SEQ ID NO: 15412 - RNA, 36 nt, Artificial Sequence
  Description of Artificial Sequence:  Enzymatic Nucleic Acid
acccaugauggcaugcacuaugcgcgacccacacac

SEQ ID NO: 15413 - RNA, 36 nt, Artificial Sequence
  Description of Artificial Sequence:  Enzymatic Nucleic Acid
acauaugauggcaugcacuaugcgcgacccacaccc

SEQ ID NO: 15414 - RNA, 36 nt, Artificial Sequence
  Description of Artificial Sequence:  Enzymatic Nucleic Acid
acacaugauggcaugcacuaugcgcgauacacccac

SEQ ID NO: 15415 - RNA, 36 nt, Artificial Sequence
  Description of Artificial Sequence:  Enzymatic Nucleic Acid
aaacaugauggcaugcacuaugcgcgacauacaccc

SEQ ID NO: 15416 - RNA, 36 nt, Artificial Sequence
  Description of Artificial Sequence:  Enzymatic Nucleic Acid
caaaaugauggcaugcacuaugcgcgacacauacac

SEQ ID NO: 15417 - RNA, 36 nt, Artificial Sequence
  Description of Artificial Sequence:  Enzymatic Nucleic Acid
augcaugauggcaugcacuaugcgcgaaaacacaca

SEQ ID NO: 15418 - RNA, 36 nt, Artificial Sequence
  Description of Artificial Sequence:  Enzymatic Nucleic Acid
uuaugugauggcaugcacuaugcgcgacaaaacaca

SEQ ID NO: 15419 - RNA, 36 nt, Artificial Sequence
  Description of Artificial Sequence:  Enzymatic Nucleic Acid
uguagugauggcaugcacuaugcgcgauauauucuu

SEQ ID NO: 15420 - RNA, 36 nt, Artificial Sequence
  Description of Artificial Sequence:  Enzymatic Nucleic Acid
uucauugauggcaugcacuaugcgcgaugacuagaa

SEQ ID NO: 15421 - RNA, 36 nt, Artificial Sequence
  Description of Artificial Sequence:  Enzymatic Nucleic Acid
acauuugauggcaugcacuaugcgcgaucaugacua

SEQ ID NO: 15422 - RNA, 36 nt, Artificial Sequence
  Description of Artificial Sequence:  Enzymatic Nucleic Acid
aaauaugauggcaugcacuaugcgcgauucaucaug

SEQ ID NO: 15423 - RNA, 36 nt, Artificial Sequence
  Description of Artificial Sequence:  Enzymatic Nucleic Acid
guauaugauggcaugcacuaugcgcgaaaauacauu

SEQ ID NO: 15424 - RNA, 36 nt, Artificial Sequence
  Description of Artificial Sequence:  Enzymatic Nucleic Acid
gauuaugauggcaugcacuaugcgcgaaaucccaau

SEQ ID NO: 15425 - RNA, 36 nt, Artificial Sequence
  Description of Artificial Sequence:  Enzymatic Nucleic Acid
uuuauugauggcaugcacuaugcgcgaauuaaguug

SEQ ID NO: 15426 - RNA, 36 nt, Artificial Sequence
  Description of Artificial Sequence:  Enzymatic Nucleic Acid
aaaagugauggcaugcacuaugcgcgaguugccaag

SEQ ID NO: 15427 - RNA, 36 nt, Artificial Sequence
  Description of Artificial Sequence:  Enzymatic Nucleic Acid
cagaaugauggcaugcacuaugcgcgauaaaagcag

SEQ ID NO: 15428 - RNA, 36 nt, Artificial Sequence
  Description of Artificial Sequence:  Enzymatic Nucleic Acid
ggagaugauggcaugcacuaugcgcgagaacauaaa

SEQ ID NO: 15429 - RNA, 36 nt, Artificial Sequence
  Description of Artificial Sequence:  Enzymatic Nucleic Acid
cuaaaugauggcaugcacuaugcgcgaaggauaaau

SEQ ID NO: 15430 - RNA, 36 nt, Artificial Sequence
  Description of Artificial Sequence:  Enzymatic Nucleic Acid
cauuuugauggcaugcacuaugcgcgaaaguuuuuc

SEQ ID NO: 15431 - RNA, 36 nt, Artificial Sequence
  Description of Artificial Sequence:  Enzymatic Nucleic Acid
uuuagugauggcaugcacuaugcgcgaauuuuuuga

SEQ ID NO: 15432 - RNA, 36 nt, Artificial Sequence
  Description of Artificial Sequence:  Enzymatic Nucleic Acid
acuaaugauggcaugcacuaugcgcgauuuaguuuu

SEQ ID NO: 15433 - RNA, 36 nt, Artificial Sequence
  Description of Artificial Sequence:  Enzymatic Nucleic Acid
acaauugauggcaugcacuaugcgcgagcuaaacua

SEQ ID NO: 15434 - RNA, 36 nt, Artificial Sequence
  Description of Artificial Sequence:  Enzymatic Nucleic Acid
ccauaugauggcaugcacuaugcgcgaaucagcuaa

SEQ ID NO: 15435 - RNA, 36 nt, Artificial Sequence
  Description of Artificial Sequence:  Enzymatic Nucleic Acid
agguuugauggcaugcacuaugcgcggaaaacccca

SEQ ID NO: 15436 - RNA, 36 nt, Artificial Sequence
  Description of Artificial Sequence:  Enzymatic Nucleic Acid
acaaaugauggcaugcacuaugcgcgaaaaagugaa

SEQ ID NO: 15437 - RNA, 36 nt, Artificial Sequence
  Description of Artificial Sequence:  Enzymatic Nucleic Acid
uaaaaugauggcaugcacuaugcgcgaaacaaaaag

SEQ ID NO: 15438 - RNA, 36 nt, Artificial Sequence
  Description of Artificial Sequence:  Enzymatic Nucleic Acid
uuacaugauggcaugcacuaugcgcgaguugugaaa

SEQ ID NO: 15439 - RNA, 36 nt, Artificial Sequence
  Description of Artificial Sequence:  Enzymatic Nucleic Acid
auuuaugauggcaugcacuaugcgcgacaguuguga

SEQ ID NO: 15440 - RNA, 36 nt, Artificial Sequence
  Description of Artificial Sequence:  Enzymatic Nucleic Acid
auuggugauggcaugcacuaugcgcgaauuuacaca

SEQ ID NO: 15441 - RNA, 36 nt, Artificial Sequence
  Description of Artificial Sequence:  Enzymatic Nucleic Acid
auggaugauggcaugcacuaugcgcgaggaauuauu

SEQ ID NO: 15442 - RNA, 36 nt, Artificial Sequence
  Description of Artificial Sequence:  Enzymatic Nucleic Acid
auuuuugauggcaugcacuaugcgcgauggacagga

SEQ ID NO: 15443 - RNA, 36 nt, Artificial Sequence
  Description of Artificial Sequence:  Enzymatic Nucleic Acid
auuugugauggcaugcacuaugcgcgauuuucaugg

SEQ ID NO: 15444 - RNA, 36 nt, Artificial Sequence
  Description of Artificial Sequence:  Enzymatic Nucleic Acid
aucuaugauggcaugcacuaugcgcgacuggauaau

SEQ ID NO: 15445 - RNA, 36 nt, Artificial Sequence
  Description of Artificial Sequence:  Enzymatic Nucleic Acid
augguugauggcaugcacuaugcgcgaaauauaucu

SEQ ID NO: 15446 - RNA, 36 nt, Artificial Sequence
  Description of Artificial Sequence:  Enzymatic Nucleic Acid
aaaggugauggcaugcacuaugcgcgaaaacuagcc

SEQ ID NO: 15447 - RNA, 36 nt, Artificial Sequence
  Description of Artificial Sequence:  Enzymatic Nucleic Acid
acauuugauggcaugcacuaugcgcgaggcugaaau

SEQ ID NO: 15448 - RNA, 36 nt, Artificial Sequence
  Description of Artificial Sequence:  Enzymatic Nucleic Acid
gcagaugauggcaugcacuaugcgcgauucaggcug

SEQ ID NO: 15449 - RNA, 36 nt, Artificial Sequence
  Description of Artificial Sequence:  Enzymatic Nucleic Acid
auaggugauggcaugcacuaugcgcgagacauucag

SEQ ID NO: 15450 - RNA, 36 nt, Artificial Sequence
  Description of Artificial Sequence:  Enzymatic Nucleic Acid
aagagugauggcaugcacuaugcgcgagagaauaua

SEQ ID NO: 15451 - RNA, 36 nt, Artificial Sequence
  Description of Artificial Sequence:  Enzymatic Nucleic Acid
gaauaugauggcaugcacuaugcgcgaaagagcaga

SEQ ID NO: 15452 - RNA, 36 nt, Artificial Sequence
  Description of Artificial Sequence:  Enzymatic Nucleic Acid
ggguuugauggcaugcacuaugcgcgaaaggagaau

SEQ ID NO: 15453 - RNA, 36 nt, Artificial Sequence
  Description of Artificial Sequence:  Enzymatic Nucleic Acid
ugccaugauggcaugcacuaugcgcgaggauguuuu

SEQ ID NO: 15454 - RNA, 38 nt, Artificial Sequence
  Description of Artificial Sequence:  Enzymatic Nucleic Acid
  misc_feature (31)..(31): n stands for inosine
cggccagccugaugaggccguuaggccgaancaccuug

SEQ ID NO: 15455 - RNA, 38 nt, Artificial Sequence
  Description of Artificial Sequence:  Enzymatic Nucleic Acid
  misc_feature (31)..(31): n stands for inosine
cgacggcccugaugaggccguuaggccgaancagcacc

SEQ ID NO: 15456 - RNA, 38 nt, Artificial Sequence
  Description of Artificial Sequence:  Enzymatic Nucleic Acid
  misc_feature (31)..(31): n stands for inosine
agggcgaccugaugaggccguuaggccgaanccagcag

SEQ ID NO: 15457 - RNA, 38 nt, Artificial Sequence
  Description of Artificial Sequence:  Enzymatic Nucleic Acid
  misc_feature (31)..(31): n stands for inosine
agccacagcugaugaggccguuaggccgaancgacggc

SEQ ID NO: 15458 - RNA, 38 nt, Artificial Sequence
  Description of Artificial Sequence:  Enzymatic Nucleic Acid
  misc_feature (31)..(31): n stands for inosine
gagccacacugaugaggccguuaggccgaangcgacgg

SEQ ID NO: 15459 - RNA, 38 nt, Artificial Sequence
  Description of Artificial Sequence:  Enzymatic Nucleic Acid
  misc_feature (31)..(31): n stands for inosine
agagccaccugaugaggccguuaggccgaanggcgacg

SEQ ID NO: 15460 - RNA, 38 nt, Artificial Sequence
  Description of Artificial Sequence:  Enzymatic Nucleic Acid
  misc_feature (31)..(31): n stands for inosine
ccacgcagcugaugaggccguuaggccgaanccacagg

SEQ ID NO: 15461 - RNA, 38 nt, Artificial Sequence
  Description of Artificial Sequence:  Enzymatic Nucleic Acid
  misc_feature (31)..(31): n stands for inosine
cuccacgccugaugaggccguuaggccgaanagccaca

SEQ ID NO: 15462 - RNA, 38 nt, Artificial Sequence
  Description of Artificial Sequence:  Enzymatic Nucleic Acid
  misc_feature (31)..(31): n stands for inosine
gcggcccgcugaugaggccguuaggccgaanucuccac

SEQ ID NO: 15463 - RNA, 38 nt, Artificial Sequence
  Description of Artificial Sequence:  Enzymatic Nucleic Acid
  misc_feature (31)..(31): n stands for inosine
ggcggccccugaugaggccguuaggccgaangucucca

SEQ ID NO: 15464 - RNA, 38 nt, Artificial Sequence
  Description of Artificial Sequence:  Enzymatic Nucleic Acid
  misc_feature (31)..(31): n stands for inosine
acagaggccugaugaggccguuaggccgaancccgggu

SEQ ID NO: 15465 - RNA, 38 nt, Artificial Sequence
  Description of Artificial Sequence:  Enzymatic Nucleic Acid
  misc_feature (31)..(31): n stands for inosine
cccacagacugaugaggccguuaggccgaancggcccg

SEQ ID NO: 15466 - RNA, 38 nt, Artificial Sequence
  Description of Artificial Sequence:  Enzymatic Nucleic Acid
  misc_feature (31)..(31): n stands for inosine
acccacagcugaugaggccguuaggccgaangcggccc

SEQ ID NO: 15467 - RNA, 38 nt, Artificial Sequence
  Description of Artificial Sequence:  Enzymatic Nucleic Acid
  misc_feature (31)..(31): n stands for inosine
aaacccaccugaugaggccguuaggccgaanaggcggc

SEQ ID NO: 15468 - RNA, 38 nt, Artificial Sequence
  Description of Artificial Sequence:  Enzymatic Nucleic Acid
  misc_feature (31)..(31): n stands for inosine
aaacacuacugaugaggccguuaggccgaancaaaccc

SEQ ID NO: 15469 - RNA, 38 nt, Artificial Sequence
  Description of Artificial Sequence:  Enzymatic Nucleic Acid
  misc_feature (31)..(31): n stands for inosine
gaaacacucugaugaggccguuaggccgaangcaaacc

SEQ ID NO: 15470 - RNA, 38 nt, Artificial Sequence
  Description of Artificial Sequence:  Enzymatic Nucleic Acid
  misc_feature (31)..(31): n stands for inosine
agaucaagcugaugaggccguuaggccgaanaaacacu

SEQ ID NO: 15471 - RNA, 38 nt, Artificial Sequence
  Description of Artificial Sequence:  Enzymatic Nucleic Acid
  misc_feature (31)..(31): n stands for inosine
gcagaucacugaugaggccguuaggccgaanagaaaca

SEQ ID NO: 15472 - RNA, 38 nt, Artificial Sequence
  Description of Artificial Sequence:  Enzymatic Nucleic Acid
  misc_feature (31)..(31): n stands for inosine
gccugggccugaugaggccguuaggccgaanaucaaga

SEQ ID NO: 15473 - RNA, 38 nt, Artificial Sequence
  Description of Artificial Sequence:  Enzymatic Nucleic Acid
  misc_feature (31)..(31): n stands for inosine
ugagccugcugaugaggccguuaggccgaancagauca

SEQ ID NO: 15474 - RNA, 38 nt, Artificial Sequence
  Description of Artificial Sequence:  Enzymatic Nucleic Acid
  misc_feature (31)..(31): n stands for inosine
cugagccucugaugaggccguuaggccgaangcagauc

SEQ ID NO: 15475 - RNA, 38 nt, Artificial Sequence
  Description of Artificial Sequence:  Enzymatic Nucleic Acid
  misc_feature (31)..(31): n stands for inosine
gcugagcccugaugaggccguuaggccgaanggcagau

SEQ ID NO: 15476 - RNA, 38 nt, Artificial Sequence
  Description of Artificial Sequence:  Enzymatic Nucleic Acid
  misc_feature (31)..(31): n stands for inosine
guaugcugcugaugaggccguuaggccgaanccugggc

SEQ ID NO: 15477 - RNA, 38 nt, Artificial Sequence
  Description of Artificial Sequence:  Enzymatic Nucleic Acid
  misc_feature (31)..(31): n stands for inosine
uuguaugccugaugaggccguuaggccgaanagccugg

SEQ ID NO: 15478 - RNA, 38 nt, Artificial Sequence
  Description of Artificial Sequence:  Enzymatic Nucleic Acid
  misc_feature (31)..(31): n stands for inosine
uuuuuguacugaugaggccguuaggccgaancugagcc

SEQ ID NO: 15479 - RNA, 38 nt, Artificial Sequence
  Description of Artificial Sequence:  Enzymatic Nucleic Acid
  misc_feature (31)..(31): n stands for inosine
ugucuuuucugaugaggccguuaggccgaanuaugcug

SEQ ID NO: 15480 - RNA, 38 nt, Artificial Sequence
  Description of Artificial Sequence:  Enzymatic Nucleic Acid
  misc_feature (31)..(31): n stands for inosine
uguaaguacugaugaggccguuaggccgaanucuuuuu

SEQ ID NO: 15481 - RNA, 38 nt, Artificial Sequence
  Description of Artificial Sequence:  Enzymatic Nucleic Acid
  misc_feature (31)..(31): n stands for inosine
uaauuguacugaugaggccguuaggccgaanuaugucu

SEQ ID NO: 15482 - RNA, 38 nt, Artificial Sequence
  Description of Artificial Sequence:  Enzymatic Nucleic Acid
  misc_feature (31)..(31): n stands for inosine
gccuuaaucugaugaggccguuaggccgaanuaaguau

SEQ ID NO: 15483 - RNA, 38 nt, Artificial Sequence
  Description of Artificial Sequence:  Enzymatic Nucleic Acid
  misc_feature (31)..(31): n stands for inosine
guuguauucugaugaggccguuaggccgaanccuuaau

SEQ ID NO: 15484 - RNA, 38 nt, Artificial Sequence
  Description of Artificial Sequence:  Enzymatic Nucleic Acid
  misc_feature (31)..(31): n stands for inosine
ugaagagucugaugaggccguuaggccgaanuauuagc

SEQ ID NO: 15485 - RNA, 38 nt, Artificial Sequence
  Description of Artificial Sequence:  Enzymatic Nucleic Acid
  misc_feature (31)..(31): n stands for inosine
auuugaagcugaugaggccguuaggccgaanuuguauu

SEQ ID NO: 15486 - RNA, 38 nt, Artificial Sequence
  Description of Artificial Sequence:  Enzymatic Nucleic Acid
  misc_feature (31)..(31): n stands for inosine
uaauuugacugaugaggccguuaggccgaanaguugua

SEQ ID NO: 15487 - RNA, 38 nt, Artificial Sequence
  Description of Artificial Sequence:  Enzymatic Nucleic Acid
  misc_feature (31)..(31): n stands for inosine
aaguaauucugaugaggccguuaggccgaanaagaguu

SEQ ID NO: 15488 - RNA, 38 nt, Artificial Sequence
  Description of Artificial Sequence:  Enzymatic Nucleic Acid
  misc_feature (31)..(31): n stands for inosine
ccccugcacugaugaggccguuaggccgaanuaauuug

SEQ ID NO: 15489 - RNA, 38 nt, Artificial Sequence
  Description of Artificial Sequence:  Enzymatic Nucleic Acid
  misc_feature (31)..(31): n stands for inosine
cugucccccugaugaggccguuaggccgaancaaguaa

SEQ ID NO: 15490 - RNA, 38 nt, Artificial Sequence
  Description of Artificial Sequence:  Enzymatic Nucleic Acid
  misc_feature (31)..(31): n stands for inosine
agucccuccugaugaggccguuaggccgaanuccccug

SEQ ID NO: 15491 - RNA, 38 nt, Artificial Sequence
  Description of Artificial Sequence:  Enzymatic Nucleic Acid
  misc_feature (31)..(31): n stands for inosine
ccaguccacugaugaggccguuaggccgaanucccucu

SEQ ID NO: 15492 - RNA, 38 nt, Artificial Sequence
  Description of Artificial Sequence:  Enzymatic Nucleic Acid
  misc_feature (31)..(31): n stands for inosine
ccaaagcccugaugaggccguuaggccgaanuccaagu

SEQ ID NO: 15493 - RNA, 38 nt, Artificial Sequence
  Description of Artificial Sequence:  Enzymatic Nucleic Acid
  misc_feature (31)..(31): n stands for inosine
ugggccaacugaugaggccguuaggccgaanccagucc

SEQ ID NO: 15494 - RNA, 38 nt, Artificial Sequence
  Description of Artificial Sequence:  Enzymatic Nucleic Acid
  misc_feature (31)..(31): n stands for inosine
gauuauugcugaugaggccguuaggccgaanccaaagc

SEQ ID NO: 15495 - RNA, 38 nt, Artificial Sequence
  Description of Artificial Sequence:  Enzymatic Nucleic Acid
  misc_feature (31)..(31): n stands for inosine
ugauuauucugaugaggccguuaggccgaangccaaag

SEQ ID NO: 15496 - RNA, 38 nt, Artificial Sequence
  Description of Artificial Sequence:  Enzymatic Nucleic Acid
  misc_feature (31)..(31): n stands for inosine
cugauuaucugaugaggccguuaggccgaanggccaaa

SEQ ID NO: 15497 - RNA, 38 nt, Artificial Sequence
  Description of Artificial Sequence:  Enzymatic Nucleic Acid
  misc_feature (31)..(31): n stands for inosine
ugccacuccugaugaggccguuaggccgaanauuauug

SEQ ID NO: 15498 - RNA, 38 nt, Artificial Sequence
  Description of Artificial Sequence:  Enzymatic Nucleic Acid
  misc_feature (31)..(31): n stands for inosine
uugcucaccugaugaggccguuaggccgaanccacucu

SEQ ID NO: 15499 - RNA, 38 nt, Artificial Sequence
  Description of Artificial Sequence:  Enzymatic Nucleic Acid
  misc_feature (31)..(31): n stands for inosine
ccacccuucugaugaggccguuaggccgaancucacug

SEQ ID NO: 15500 - RNA, 38 nt, Artificial Sequence
  Description of Artificial Sequence:  Enzymatic Nucleic Acid
  misc_feature (31)..(31): n stands for inosine
cugcacuccugaugaggccguuaggccgaanucaccuc

SEQ ID NO: 15501 - RNA, 38 nt, Artificial Sequence
  Description of Artificial Sequence:  Enzymatic Nucleic Acid
  misc_feature (31)..(31): n stands for inosine
gccaucgccugaugaggccguuaggccgaancacucag

SEQ ID NO: 15502 - RNA, 38 nt, Artificial Sequence
  Description of Artificial Sequence:  Enzymatic Nucleic Acid
  misc_feature (31)..(31): n stands for inosine
acagaagacugaugaggccguuaggccgaanccaucgc

SEQ ID NO: 15503 - RNA, 38 nt, Artificial Sequence
  Description of Artificial Sequence:  Enzymatic Nucleic Acid
  misc_feature (31)..(31): n stands for inosine
uacagaagcugaugaggccguuaggccgaangccaucg

SEQ ID NO: 15504 - RNA, 38 nt, Artificial Sequence
  Description of Artificial Sequence:  Enzymatic Nucleic Acid
  misc_feature (31)..(31): n stands for inosine
cuuacagacugaugaggccguuaggccgaanaggccau

SEQ ID NO: 15505 - RNA, 38 nt, Artificial Sequence
  Description of Artificial Sequence:  Enzymatic Nucleic Acid
  misc_feature (31)..(31): n stands for inosine
ugucuuaccugaugaggccguuaggccgaanaagaggc

SEQ ID NO: 15506 - RNA, 38 nt, Artificial Sequence
  Description of Artificial Sequence:  Enzymatic Nucleic Acid
  misc_feature (31)..(31): n stands for inosine
auugugagcugaugaggccguuaggccgaanucuuaca

SEQ ID NO: 15507 - RNA, 38 nt, Artificial Sequence
  Description of Artificial Sequence:  Enzymatic Nucleic Acid
  misc_feature (31)..(31): n stands for inosine
gaauugugcugaugaggccguuaggccgaanugucuua

SEQ ID NO: 15508 - RNA, 38 nt, Artificial Sequence
  Description of Artificial Sequence:  Enzymatic Nucleic Acid
  misc_feature (31)..(31): n stands for inosine
uggaauugcugaugaggccguuaggccgaanagugucu

SEQ ID NO: 15509 - RNA, 38 nt, Artificial Sequence
  Description of Artificial Sequence:  Enzymatic Nucleic Acid
  misc_feature (31)..(31): n stands for inosine
uuuggaaucugaugaggccguuaggccgaanugagugu

SEQ ID NO: 15510 - RNA, 38 nt, Artificial Sequence
  Description of Artificial Sequence:  Enzymatic Nucleic Acid
  misc_feature (31)..(31): n stands for inosine
ucacuuuucugaugaggccguuaggccgaanaauugug

SEQ ID NO: 15511 - RNA, 38 nt, Artificial Sequence
  Description of Artificial Sequence:  Enzymatic Nucleic Acid
  misc_feature (31)..(31): n stands for inosine
aucacuuucugaugaggccguuaggccgaangaauugu

SEQ ID NO: 15512 - RNA, 38 nt, Artificial Sequence
  Description of Artificial Sequence:  Enzymatic Nucleic Acid
  misc_feature (31)..(31): n stands for inosine
ggcuccagcugaugaggccguuaggccgaanucauuuc

SEQ ID NO: 15513 - RNA, 38 nt, Artificial Sequence
  Description of Artificial Sequence:  Enzymatic Nucleic Acid
  misc_feature (31)..(31): n stands for inosine
uaggcucccugaugaggccguuaggccgaanugucauu

SEQ ID NO: 15514 - RNA, 38 nt, Artificial Sequence
  Description of Artificial Sequence:  Enzymatic Nucleic Acid
  misc_feature (31)..(31): n stands for inosine
cacuuguacugaugaggccguuaggccgaancuccagu

SEQ ID NO: 15515 - RNA, 38 nt, Artificial Sequence
  Description of Artificial Sequence:  Enzymatic Nucleic Acid
  misc_feature (31)..(31): n stands for inosine
gcacuugucugaugaggccguuaggccgaangcuccag

SEQ ID NO: 15516 - RNA, 38 nt, Artificial Sequence
  Description of Artificial Sequence:  Enzymatic Nucleic Acid
  misc_feature (31)..(31): n stands for inosine
gaagcacucugaugaggccguuaggccgaanuaggcuc

SEQ ID NO: 15517 - RNA, 38 nt, Artificial Sequence
  Description of Artificial Sequence:  Enzymatic Nucleic Acid
  misc_feature (31)..(31): n stands for inosine
ccgguagacugaugaggccguuaggccgaancacuugu

SEQ ID NO: 15518 - RNA, 38 nt, Artificial Sequence
  Description of Artificial Sequence:  Enzymatic Nucleic Acid
  misc_feature (31)..(31): n stands for inosine
uucccggucugaugaggccguuaggccgaanaagcacu

SEQ ID NO: 15519 - RNA, 38 nt, Artificial Sequence
  Description of Artificial Sequence:  Enzymatic Nucleic Acid
  misc_feature (31)..(31): n stands for inosine
aguuuccccugaugaggccguuaggccgaanuagaagc

SEQ ID NO: 15520 - RNA, 38 nt, Artificial Sequence
  Description of Artificial Sequence:  Enzymatic Nucleic Acid
  misc_feature (31)..(31): n stands for inosine
gccaaguccugaugaggccguuaggccgaanuuucccg

SEQ ID NO: 15521 - RNA, 38 nt, Artificial Sequence
  Description of Artificial Sequence:  Enzymatic Nucleic Acid
  misc_feature (31)..(31): n stands for inosine
cgaggccacugaugaggccguuaggccgaanucaguuu

SEQ ID NO: 15522 - RNA, 38 nt, Artificial Sequence
  Description of Artificial Sequence:  Enzymatic Nucleic Acid
  misc_feature (31)..(31): n stands for inosine
augaccgacugaugaggccguuaggccgaanccaaguc

SEQ ID NO: 15523 - RNA, 38 nt, Artificial Sequence
  Description of Artificial Sequence:  Enzymatic Nucleic Acid
  misc_feature (31)..(31): n stands for inosine
aaugaccgcugaugaggccguuaggccgaangccaagu

SEQ ID NO: 15524 - RNA, 38 nt, Artificial Sequence
  Description of Artificial Sequence:  Enzymatic Nucleic Acid
  misc_feature (31)..(31): n stands for inosine
gacauaaacugaugaggccguuaggccgaanaccgagg

SEQ ID NO: 15525 - RNA, 38 nt, Artificial Sequence
  Description of Artificial Sequence:  Enzymatic Nucleic Acid
  misc_feature (31)..(31): n stands for inosine
uugaacaucugaugaggccguuaggccgaanacauaaa

SEQ ID NO: 15526 - RNA, 38 nt, Artificial Sequence
  Description of Artificial Sequence:  Enzymatic Nucleic Acid
  misc_feature (31)..(31): n stands for inosine
uguaaucucugaugaggccguuaggccgaanaacauag

SEQ ID NO: 15527 - RNA, 38 nt, Artificial Sequence
  Description of Artificial Sequence:  Enzymatic Nucleic Acid
  misc_feature (31)..(31): n stands for inosine
uggagauccugaugaggccguuaggccgaanuaaucuu

SEQ ID NO: 15528 - RNA, 38 nt, Artificial Sequence
  Description of Artificial Sequence:  Enzymatic Nucleic Acid
  misc_feature (31)..(31): n stands for inosine
auaaauggcugaugaggccguuaggccgaanaucugua

SEQ ID NO: 15529 - RNA, 38 nt, Artificial Sequence
  Description of Artificial Sequence:  Enzymatic Nucleic Acid
  misc_feature (31)..(31): n stands for inosine
caauaaaucugaugaggccguuaggccgaanagaucug

SEQ ID NO: 15530 - RNA, 38 nt, Artificial Sequence
  Description of Artificial Sequence:  Enzymatic Nucleic Acid
  misc_feature (31)..(31): n stands for inosine
gcaauaaacugaugaggccguuaggccgaangagaucu

SEQ ID NO: 15531 - RNA, 38 nt, Artificial Sequence
  Description of Artificial Sequence:  Enzymatic Nucleic Acid
  misc_feature (31)..(31): n stands for inosine
cuaacagacugaugaggccguuaggccgaancaauaaa

SEQ ID NO: 15532 - RNA, 38 nt, Artificial Sequence
  Description of Artificial Sequence:  Enzymatic Nucleic Acid
  misc_feature (31)..(31): n stands for inosine
ucacuaaccugaugaggccguuaggccgaanaagcaau

SEQ ID NO: 15533 - RNA, 38 nt, Artificial Sequence
  Description of Artificial Sequence:  Enzymatic Nucleic Acid
  misc_feature (31)..(31): n stands for inosine
uccauguucugaugaggccguuaggccgaanucacuaa

SEQ ID NO: 15534 - RNA, 38 nt, Artificial Sequence
  Description of Artificial Sequence:  Enzymatic Nucleic Acid
  misc_feature (31)..(31): n stands for inosine
cuccaugucugaugaggccguuaggccgaangucacua

SEQ ID NO: 15535 - RNA, 38 nt, Artificial Sequence
  Description of Artificial Sequence:  Enzymatic Nucleic Acid
  misc_feature (31)..(31): n stands for inosine
cgacuccacugaugaggccguuaggccgaanuugguca

SEQ ID NO: 15536 - RNA, 38 nt, Artificial Sequence
  Description of Artificial Sequence:  Enzymatic Nucleic Acid
  misc_feature (31)..(31): n stands for inosine
cucaguaacugaugaggccguuaggccgaanuacacga

SEQ ID NO: 15537 - RNA, 38 nt, Artificial Sequence
  Description of Artificial Sequence:  Enzymatic Nucleic Acid
  misc_feature (31)..(31): n stands for inosine
uuguucuccugaugaggccguuaggccgaanuaaugua

SEQ ID NO: 15538 - RNA, 38 nt, Artificial Sequence
  Description of Artificial Sequence:  Enzymatic Nucleic Acid
  misc_feature (31)..(31): n stands for inosine
uuuguuuucugaugaggccguuaggccgaanuucucag

SEQ ID NO: 15539 - RNA, 38 nt, Artificial Sequence
  Description of Artificial Sequence:  Enzymatic Nucleic Acid
  misc_feature (31)..(31): n stands for inosine
cacaguuucugaugaggccguuaggccgaanuuuuugu

SEQ ID NO: 15540 - RNA, 38 nt, Artificial Sequence
  Description of Artificial Sequence:  Enzymatic Nucleic Acid
  misc_feature (31)..(31): n stands for inosine
aucaccaccugaugaggccguuaggccgaanuuuuguu

SEQ ID NO: 15541 - RNA, 38 nt, Artificial Sequence
  Description of Artificial Sequence:  Enzymatic Nucleic Acid
  misc_feature (31)..(31): n stands for inosine
cgagacaucugaugaggccguuaggccgaanaaucacc

SEQ ID NO: 15542 - RNA, 38 nt, Artificial Sequence
  Description of Artificial Sequence:  Enzymatic Nucleic Acid
  misc_feature (31)..(31): n stands for inosine
ccgagacacugaugaggccguuaggccgaangaaucac

SEQ ID NO: 15543 - RNA, 38 nt, Artificial Sequence
  Description of Artificial Sequence:  Enzymatic Nucleic Acid
  misc_feature (31)..(31): n stands for inosine
uggacccgcugaugaggccguuaggccgaanacaugga

SEQ ID NO: 15544 - RNA, 38 nt, Artificial Sequence
  Description of Artificial Sequence:  Enzymatic Nucleic Acid
  misc_feature (31)..(31): n stands for inosine
uuugaaaucugaugaggccguuaggccgaanacccgag

SEQ ID NO: 15545 - RNA, 38 nt, Artificial Sequence
  Description of Artificial Sequence:  Enzymatic Nucleic Acid
  misc_feature (31)..(31): n stands for inosine
auuugaaacugaugaggccguuaggccgaangacccga

SEQ ID NO: 15546 - RNA, 38 nt, Artificial Sequence
  Description of Artificial Sequence:  Enzymatic Nucleic Acid
  misc_feature (31)..(31): n stands for inosine
uugagauucugaugaggccguuaggccgaanaaaugga

SEQ ID NO: 15547 - RNA, 38 nt, Artificial Sequence
  Description of Artificial Sequence:  Enzymatic Nucleic Acid
  misc_feature (31)..(31): n stands for inosine
acacguugcugaugaggccguuaggccgaanauuugaa

SEQ ID NO: 15548 - RNA, 38 nt, Artificial Sequence
  Description of Artificial Sequence:  Enzymatic Nucleic Acid
  misc_feature (31)..(31): n stands for inosine
ugacacgucugaugaggccguuaggccgaanagauuug

SEQ ID NO: 15549 - RNA, 38 nt, Artificial Sequence
  Description of Artificial Sequence:  Enzymatic Nucleic Acid
  misc_feature (31)..(31): n stands for inosine
gcacaaagcugaugaggccguuaggccgaanacacguu

SEQ ID NO: 15550 - RNA, 38 nt, Artificial Sequence
  Description of Artificial Sequence:  Enzymatic Nucleic Acid
  misc_feature (31)..(31): n stands for inosine
uugcacaacugaugaggccguuaggccgaanugacacg

SEQ ID NO: 15551 - RNA, 38 nt, Artificial Sequence
  Description of Artificial Sequence:  Enzymatic Nucleic Acid
  misc_feature (31)..(31): n stands for inosine
ggguaucucugaugaggccguuaggccgaancacaaag

SEQ ID NO: 15552 - RNA, 38 nt, Artificial Sequence
  Description of Artificial Sequence:  Enzymatic Nucleic Acid
  misc_feature (31)..(31): n stands for inosine
cuuuucugcugaugaggccguuaggccgaanuaucuug

SEQ ID NO: 15553 - RNA, 38 nt, Artificial Sequence
  Description of Artificial Sequence:  Enzymatic Nucleic Acid
  misc_feature (31)..(31): n stands for inosine
ucuuuucucugaugaggccguuaggccgaanguaucuu

SEQ ID NO: 15554 - RNA, 38 nt, Artificial Sequence
  Description of Artificial Sequence:  Enzymatic Nucleic Acid
  misc_feature (31)..(31): n stands for inosine
cucuuuuccugaugaggccguuaggccgaangguaucu

SEQ ID NO: 15555 - RNA, 38 nt, Artificial Sequence
  Description of Artificial Sequence:  Enzymatic Nucleic Acid
  misc_feature (31)..(31): n stands for inosine
uaccaucacugaugaggccguuaggccgaanaacaaau

SEQ ID NO: 15556 - RNA, 38 nt, Artificial Sequence
  Description of Artificial Sequence:  Enzymatic Nucleic Acid
  misc_feature (31)..(31): n stands for inosine
uuaccauccugaugaggccguuaggccgaangaacaaa

SEQ ID NO: 15557 - RNA, 38 nt, Artificial Sequence
  Description of Artificial Sequence:  Enzymatic Nucleic Acid
  misc_feature (31)..(31): n stands for inosine
ggaaauuccugaugaggccguuaggccgaanuuaccau

SEQ ID NO: 15558 - RNA, 38 nt, Artificial Sequence
  Description of Artificial Sequence:  Enzymatic Nucleic Acid
  misc_feature (31)..(31): n stands for inosine
cugucccacugaugaggccguuaggccgaanaaauucu

SEQ ID NO: 15559 - RNA, 38 nt, Artificial Sequence
  Description of Artificial Sequence:  Enzymatic Nucleic Acid
  misc_feature (31)..(31): n stands for inosine
gcuguccccugaugaggccguuaggccgaangaaauuc

SEQ ID NO: 15560 - RNA, 38 nt, Artificial Sequence
  Description of Artificial Sequence:  Enzymatic Nucleic Acid
  misc_feature (31)..(31): n stands for inosine
cuucuugccugaugaggccguuaggccgaanucccagg

SEQ ID NO: 15561 - RNA, 38 nt, Artificial Sequence
  Description of Artificial Sequence:  Enzymatic Nucleic Acid
  misc_feature (31)..(31): n stands for inosine
gcccuucucugaugaggccguuaggccgaancuguccc

SEQ ID NO: 15562 - RNA, 38 nt, Artificial Sequence
  Description of Artificial Sequence:  Enzymatic Nucleic Acid
  misc_feature (31)..(31): n stands for inosine
aauaguaacugaugaggccguuaggccgaancccuucu

SEQ ID NO: 15563 - RNA, 38 nt, Artificial Sequence
  Description of Artificial Sequence:  Enzymatic Nucleic Acid
  misc_feature (31)..(31): n stands for inosine
cugggaaucugaugaggccguuaggccgaanuaaagcc

SEQ ID NO: 15564 - RNA, 38 nt, Artificial Sequence
  Description of Artificial Sequence:  Enzymatic Nucleic Acid
  misc_feature (31)..(31): n stands for inosine
uguagcugcugaugaggccguuaggccgaanaauagua

SEQ ID NO: 15565 - RNA, 38 nt, Artificial Sequence
  Description of Artificial Sequence:  Enzymatic Nucleic Acid
  misc_feature (31)..(31): n stands for inosine
auguagcucugaugaggccguuaggccgaangaauagu

SEQ ID NO: 15566 - RNA, 38 nt, Artificial Sequence
  Description of Artificial Sequence:  Enzymatic Nucleic Acid
  misc_feature (31)..(31): n stands for inosine
cauguagccugaugaggccguuaggccgaanggaauag

SEQ ID NO: 15567 - RNA, 38 nt, Artificial Sequence
  Description of Artificial Sequence:  Enzymatic Nucleic Acid
  misc_feature (31)..(31): n stands for inosine
gaucaugucugaugaggccguuaggccgaancugggaa

SEQ ID NO: 15568 - RNA, 38 nt, Artificial Sequence
  Description of Artificial Sequence:  Enzymatic Nucleic Acid
  misc_feature (31)..(31): n stands for inosine
gcugaucacugaugaggccguuaggccgaanuagcugg

SEQ ID NO: 15569 - RNA, 38 nt, Artificial Sequence
  Description of Artificial Sequence:  Enzymatic Nucleic Acid
  misc_feature (31)..(31): n stands for inosine
agcauagccugaugaggccguuaggccgaanaucaugu

SEQ ID NO: 15570 - RNA, 38 nt, Artificial Sequence
  Description of Artificial Sequence:  Enzymatic Nucleic Acid
  misc_feature (31)..(31): n stands for inosine
gccagcaucugaugaggccguuaggccgaancugauca

SEQ ID NO: 15571 - RNA, 38 nt, Artificial Sequence
  Description of Artificial Sequence:  Enzymatic Nucleic Acid
  misc_feature (31)..(31): n stands for inosine
accaugcccugaugaggccguuaggccgaancauagcu

SEQ ID NO: 15572 - RNA, 38 nt, Artificial Sequence
  Description of Artificial Sequence:  Enzymatic Nucleic Acid
  misc_feature (31)..(31): n stands for inosine
gaagaccacugaugaggccguuaggccgaanccagcau

SEQ ID NO: 15573 - RNA, 38 nt, Artificial Sequence
  Description of Artificial Sequence:  Enzymatic Nucleic Acid
  misc_feature (31)..(31): n stands for inosine
uucacagacugaugaggccguuaggccgaanaccaugc

SEQ ID NO: 15574 - RNA, 38 nt, Artificial Sequence
  Description of Artificial Sequence:  Enzymatic Nucleic Acid
  misc_feature (31)..(31): n stands for inosine
ugcuucaccugaugaggccguuaggccgaanaagacca

SEQ ID NO: 15575 - RNA, 38 nt, Artificial Sequence
  Description of Artificial Sequence:  Enzymatic Nucleic Acid
  misc_feature (31)..(31): n stands for inosine
uuaauuuucugaugaggccguuaggccgaancuucaca

SEQ ID NO: 15576 - RNA, 38 nt, Artificial Sequence
  Description of Artificial Sequence:  Enzymatic Nucleic Acid
  misc_feature (31)..(31): n stands for inosine
aauagacucugaugaggccguuaggccgaanuaacuuu

SEQ ID NO: 15577 - RNA, 38 nt, Artificial Sequence
  Description of Artificial Sequence:  Enzymatic Nucleic Acid
  misc_feature (31)..(31): n stands for inosine
uaauagaccugaugaggccguuaggccgaanguaacuu

SEQ ID NO: 15578 - RNA, 38 nt, Artificial Sequence
  Description of Artificial Sequence:  Enzymatic Nucleic Acid
  misc_feature (31)..(31): n stands for inosine
uacauaaucugaugaggccguuaggccgaanacuggua

SEQ ID NO: 15579 - RNA, 38 nt, Artificial Sequence
  Description of Artificial Sequence:  Enzymatic Nucleic Acid
  misc_feature (31)..(31): n stands for inosine
gacaacuacugaugaggccguuaggccgaanuacauaa

SEQ ID NO: 15580 - RNA, 38 nt, Artificial Sequence
  Description of Artificial Sequence:  Enzymatic Nucleic Acid
  misc_feature (31)..(31): n stands for inosine
acggacuccugaugaggccguuaggccgaanaaccaca

SEQ ID NO: 15581 - RNA, 38 nt, Artificial Sequence
  Description of Artificial Sequence:  Enzymatic Nucleic Acid
  misc_feature (31)..(31): n stands for inosine
caugagaccugaugaggccguuaggccgaanacucaga

SEQ ID NO: 15582 - RNA, 38 nt, Artificial Sequence
  Description of Artificial Sequence:  Enzymatic Nucleic Acid
  misc_feature (31)..(31): n stands for inosine
auuccaugcugaugaggccguuaggccgaanacggacu

SEQ ID NO: 15583 - RNA, 38 nt, Artificial Sequence
  Description of Artificial Sequence:  Enzymatic Nucleic Acid
  misc_feature (31)..(31): n stands for inosine
caauuccacugaugaggccguuaggccgaanagacgga

SEQ ID NO: 15584 - RNA, 38 nt, Artificial Sequence
  Description of Artificial Sequence:  Enzymatic Nucleic Acid
  misc_feature (31)..(31): n stands for inosine
caacagaucugaugaggccguuaggccgaanuucaauu

SEQ ID NO: 15585 - RNA, 38 nt, Artificial Sequence
  Description of Artificial Sequence:  Enzymatic Nucleic Acid
  misc_feature (31)..(31): n stands for inosine
ucuccaaccugaugaggccguuaggccgaanauaguuc

SEQ ID NO: 15586 - RNA, 38 nt, Artificial Sequence
  Description of Artificial Sequence:  Enzymatic Nucleic Acid
  misc_feature (31)..(31): n stands for inosine
uuaagacacugaugaggccguuaggccgaancuuuucu

SEQ ID NO: 15587 - RNA, 38 nt, Artificial Sequence
  Description of Artificial Sequence:  Enzymatic Nucleic Acid
  misc_feature (31)..(31): n stands for inosine
acaauuuacugaugaggccguuaggccgaanacaagcu

SEQ ID NO: 15588 - RNA, 38 nt, Artificial Sequence
  Description of Artificial Sequence:  Enzymatic Nucleic Acid
  misc_feature (31)..(31): n stands for inosine
guucuugccugaugaggccguuaggccgaanuacaauu

SEQ ID NO: 15589 - RNA, 38 nt, Artificial Sequence
  Description of Artificial Sequence:  Enzymatic Nucleic Acid
  misc_feature (31)..(31): n stands for inosine
ucaguucucugaugaggccguuaggccgaancuguaca

SEQ ID NO: 15590 - RNA, 38 nt, Artificial Sequence
  Description of Artificial Sequence:  Enzymatic Nucleic Acid
  misc_feature (31)..(31): n stands for inosine
uuuaguuccugaugaggccguuaggccgaanuucuugc

SEQ ID NO: 15591 - RNA, 38 nt, Artificial Sequence
  Description of Artificial Sequence:  Enzymatic Nucleic Acid
  misc_feature (31)..(31): n stands for inosine
ccacauuucugaugaggccguuaggccgaanuucaguu

SEQ ID NO: 15592 - RNA, 38 nt, Artificial Sequence
  Description of Artificial Sequence:  Enzymatic Nucleic Acid
  misc_feature (31)..(31): n stands for inosine
ccaguugacugaugaggccguuaggccgaanucaaucc

SEQ ID NO: 15593 - RNA, 38 nt, Artificial Sequence
  Description of Artificial Sequence:  Enzymatic Nucleic Acid
  misc_feature (31)..(31): n stands for inosine
uucccagucugaugaggccguuaggccgaanaagucaa

SEQ ID NO: 15594 - RNA, 38 nt, Artificial Sequence
  Description of Artificial Sequence:  Enzymatic Nucleic Acid
  misc_feature (31)..(31): n stands for inosine
guauuccccugaugaggccguuaggccgaanuugaagu

SEQ ID NO: 15595 - RNA, 38 nt, Artificial Sequence
  Description of Artificial Sequence:  Enzymatic Nucleic Acid
  misc_feature (31)..(31): n stands for inosine
cgaagaagcugaugaggccguuaggccgaanuauuccc

SEQ ID NO: 15596 - RNA, 38 nt, Artificial Sequence
  Description of Artificial Sequence:  Enzymatic Nucleic Acid
  misc_feature (31)..(31): n stands for inosine
ucgaagaacugaugaggccguuaggccgaanguauucc

SEQ ID NO: 15597 - RNA, 38 nt, Artificial Sequence
  Description of Artificial Sequence:  Enzymatic Nucleic Acid
  misc_feature (31)..(31): n stands for inosine
uucgaagacugaugaggccguuaggccgaangguauuc

SEQ ID NO: 15598 - RNA, 38 nt, Artificial Sequence
  Description of Artificial Sequence:  Enzymatic Nucleic Acid
  misc_feature (31)..(31): n stands for inosine
ugcuucgacugaugaggccguuaggccgaanaagggua

SEQ ID NO: 15599 - RNA, 38 nt, Artificial Sequence
  Description of Artificial Sequence:  Enzymatic Nucleic Acid
  misc_feature (31)..(31): n stands for inosine
uaugcugacugaugaggccguuaggccgaancuucgaa

SEQ ID NO: 15600 - RNA, 38 nt, Artificial Sequence
  Description of Artificial Sequence:  Enzymatic Nucleic Acid
  misc_feature (31)..(31): n stands for inosine
ucuuaugccugaugaggccguuaggccgaanaugcuuc

SEQ ID NO: 15601 - RNA, 38 nt, Artificial Sequence
  Description of Artificial Sequence:  Enzymatic Nucleic Acid
  misc_feature (31)..(31): n stands for inosine
guuucuuacugaugaggccguuaggccgaancugaugc

SEQ ID NO: 15602 - RNA, 38 nt, Artificial Sequence
  Description of Artificial Sequence:  Enzymatic Nucleic Acid
  misc_feature (31)..(31): n stands for inosine
gguuuacacugaugaggccguuaggccgaanuuucuua

SEQ ID NO: 15603 - RNA, 38 nt, Artificial Sequence
  Description of Artificial Sequence:  Enzymatic Nucleic Acid
  misc_feature (31)..(31): n stands for inosine
uaggucuccugaugaggccguuaggccgaanuuuacaa

SEQ ID NO: 15604 - RNA, 38 nt, Artificial Sequence
  Description of Artificial Sequence:  Enzymatic Nucleic Acid
  misc_feature (31)..(31): n stands for inosine
gguuuuuacugaugaggccguuaggccgaanucucggu

SEQ ID NO: 15605 - RNA, 38 nt, Artificial Sequence
  Description of Artificial Sequence:  Enzymatic Nucleic Acid
  misc_feature (31)..(31): n stands for inosine
ggguuuuucugaugaggccguuaggccgaangucucgg

SEQ ID NO: 15606 - RNA, 38 nt, Artificial Sequence
  Description of Artificial Sequence:  Enzymatic Nucleic Acid
  misc_feature (31)..(31): n stands for inosine
ccagacugcugaugaggccguuaggccgaanuuuuuag

SEQ ID NO: 15607 - RNA, 38 nt, Artificial Sequence
  Description of Artificial Sequence:  Enzymatic Nucleic Acid
  misc_feature (31)..(31): n stands for inosine
cccagacucugaugaggccguuaggccgaanguuuuua

SEQ ID NO: 15608 - RNA, 38 nt, Artificial Sequence
  Description of Artificial Sequence:  Enzymatic Nucleic Acid
  misc_feature (31)..(31): n stands for inosine
ucccagaccugaugaggccguuaggccgaangguuuuu

SEQ ID NO: 15609 - RNA, 38 nt, Artificial Sequence
  Description of Artificial Sequence:  Enzymatic Nucleic Acid
  misc_feature (31)..(31): n stands for inosine
ucacuccccugaugaggccguuaggccgaanacugggu

SEQ ID NO: 15610 - RNA, 38 nt, Artificial Sequence
  Description of Artificial Sequence:  Enzymatic Nucleic Acid
  misc_feature (31)..(31): n stands for inosine
aguuaaggcugaugaggccguuaggccgaancucaaaa

SEQ ID NO: 15611 - RNA, 38 nt, Artificial Sequence
  Description of Artificial Sequence:  Enzymatic Nucleic Acid
  misc_feature (31)..(31): n stands for inosine
auaguuaacugaugaggccguuaggccgaanugcucaa

SEQ ID NO: 15612 - RNA, 38 nt, Artificial Sequence
  Description of Artificial Sequence:  Enzymatic Nucleic Acid
  misc_feature (31)..(31): n stands for inosine
uauaguuacugaugaggccguuaggccgaangugcuca

SEQ ID NO: 15613 - RNA, 38 nt, Artificial Sequence
  Description of Artificial Sequence:  Enzymatic Nucleic Acid
  misc_feature (31)..(31): n stands for inosine
ccaucuaucugaugaggccguuaggccgaanuuaaggu

SEQ ID NO: 15614 - RNA, 38 nt, Artificial Sequence
  Description of Artificial Sequence:  Enzymatic Nucleic Acid
  misc_feature (31)..(31): n stands for inosine
ucacuccgcugaugaggccguuaggccgaanuuacacc

SEQ ID NO: 15615 - RNA, 38 nt, Artificial Sequence
  Description of Artificial Sequence:  Enzymatic Nucleic Acid
  misc_feature (31)..(31): n stands for inosine
gucacucccugaugaggccguuaggccgaanguuacac

SEQ ID NO: 15616 - RNA, 38 nt, Artificial Sequence
  Description of Artificial Sequence:  Enzymatic Nucleic Acid
  misc_feature (31)..(31): n stands for inosine
caauccuucugaugaggccguuaggccgaanucacucc

SEQ ID NO: 15617 - RNA, 38 nt, Artificial Sequence
  Description of Artificial Sequence:  Enzymatic Nucleic Acid
  misc_feature (31)..(31): n stands for inosine
acaauccucugaugaggccguuaggccgaangucacuc

SEQ ID NO: 15618 - RNA, 38 nt, Artificial Sequence
  Description of Artificial Sequence:  Enzymatic Nucleic Acid
  misc_feature (31)..(31): n stands for inosine
ugcacaggcugaugaggccguuaggccgaanuacaauc

SEQ ID NO: 15619 - RNA, 38 nt, Artificial Sequence
  Description of Artificial Sequence:  Enzymatic Nucleic Acid
  misc_feature (31)..(31): n stands for inosine
gcugcacacugaugaggccguuaggccgaanuguacaa

SEQ ID NO: 15620 - RNA, 38 nt, Artificial Sequence
  Description of Artificial Sequence:  Enzymatic Nucleic Acid
  misc_feature (31)..(31): n stands for inosine
ugcugcaccugaugaggccguuaggccgaanguguaca

SEQ ID NO: 15621 - RNA, 38 nt, Artificial Sequence
  Description of Artificial Sequence:  Enzymatic Nucleic Acid
  misc_feature (31)..(31): n stands for inosine
cuggaugccugaugaggccguuaggccgaancacaggu

SEQ ID NO: 15622 - RNA, 38 nt, Artificial Sequence
  Description of Artificial Sequence:  Enzymatic Nucleic Acid
  misc_feature (31)..(31): n stands for inosine
ccacuggacugaugaggccguuaggccgaancugcaca

SEQ ID NO: 15623 - RNA, 38 nt, Artificial Sequence
  Description of Artificial Sequence:  Enzymatic Nucleic Acid
  misc_feature (31)..(31): n stands for inosine
agcccacucugaugaggccguuaggccgaanaugcugc

SEQ ID NO: 15624 - RNA, 38 nt, Artificial Sequence
  Description of Artificial Sequence:  Enzymatic Nucleic Acid
  misc_feature (31)..(31): n stands for inosine
cagcccaccugaugaggccguuaggccgaangaugcug

SEQ ID NO: 15625 - RNA, 38 nt, Artificial Sequence
  Description of Artificial Sequence:  Enzymatic Nucleic Acid
  misc_feature (31)..(31): n stands for inosine
uggucauccugaugaggccguuaggccgaancccacug

SEQ ID NO: 15626 - RNA, 38 nt, Artificial Sequence
  Description of Artificial Sequence:  Enzymatic Nucleic Acid
  misc_feature (31)..(31): n stands for inosine
uucuucuucugaugaggccguuaggccgaanucaucag

SEQ ID NO: 15627 - RNA, 38 nt, Artificial Sequence
  Description of Artificial Sequence:  Enzymatic Nucleic Acid
  misc_feature (31)..(31): n stands for inosine
guucuucucugaugaggccguuaggccgaangucauca

SEQ ID NO: 15628 - RNA, 38 nt, Artificial Sequence
  Description of Artificial Sequence:  Enzymatic Nucleic Acid
  misc_feature (31)..(31): n stands for inosine
aaaugugccugaugaggccguuaggccgaanuucuucu

SEQ ID NO: 15629 - RNA, 38 nt, Artificial Sequence
  Description of Artificial Sequence:  Enzymatic Nucleic Acid
  misc_feature (31)..(31): n stands for inosine
gacaaaugcugaugaggccguuaggccgaancuguucu

SEQ ID NO: 15630 - RNA, 38 nt, Artificial Sequence
  Description of Artificial Sequence:  Enzymatic Nucleic Acid
  misc_feature (31)..(31): n stands for inosine
cugacaaacugaugaggccguuaggccgaanugcuguu

SEQ ID NO: 15631 - RNA, 38 nt, Artificial Sequence
  Description of Artificial Sequence:  Enzymatic Nucleic Acid
  misc_feature (31)..(31): n stands for inosine
auggaccccugaugaggccguuaggccgaanacaaaug

SEQ ID NO: 15632 - RNA, 38 nt, Artificial Sequence
  Description of Artificial Sequence:  Enzymatic Nucleic Acid
  misc_feature (31)..(31): n stands for inosine
uuuuucaucugaugaggccguuaggccgaanacccuga

SEQ ID NO: 15633 - RNA, 38 nt, Artificial Sequence
  Description of Artificial Sequence:  Enzymatic Nucleic Acid
  misc_feature (31)..(31): n stands for inosine
guuuuucacugaugaggccguuaggccgaangacccug

SEQ ID NO: 15634 - RNA, 38 nt, Artificial Sequence
  Description of Artificial Sequence:  Enzymatic Nucleic Acid
  misc_feature (31)..(31): n stands for inosine
caacaaaacugaugaggccguuaggccgaanuuuuuca

SEQ ID NO: 15635 - RNA, 38 nt, Artificial Sequence
  Description of Artificial Sequence:  Enzymatic Nucleic Acid
  misc_feature (31)..(31): n stands for inosine
gcaacaaacugaugaggccguuaggccgaanguuuuuc

SEQ ID NO: 15636 - RNA, 38 nt, Artificial Sequence
  Description of Artificial Sequence:  Enzymatic Nucleic Acid
  misc_feature (31)..(31): n stands for inosine
cuuccaaacugaugaggccguuaggccgaancaacaaa

SEQ ID NO: 15637 - RNA, 38 nt, Artificial Sequence
  Description of Artificial Sequence:  Enzymatic Nucleic Acid
  misc_feature (31)..(31): n stands for inosine
agauuccacugaugaggccguuaggccgaanccacuuc

SEQ ID NO: 15638 - RNA, 38 nt, Artificial Sequence
  Description of Artificial Sequence:  Enzymatic Nucleic Acid
  misc_feature (31)..(31): n stands for inosine
uccaccagcugaugaggccguuaggccgaanauuccau

SEQ ID NO: 15639 - RNA, 38 nt, Artificial Sequence
  Description of Artificial Sequence:  Enzymatic Nucleic Acid
  misc_feature (31)..(31): n stands for inosine
cuuccacccugaugaggccguuaggccgaanagauucc

SEQ ID NO: 15640 - RNA, 38 nt, Artificial Sequence
  Description of Artificial Sequence:  Enzymatic Nucleic Acid
  misc_feature (31)..(31): n stands for inosine
cccaccgucugaugaggccguuaggccgaancuuccac

SEQ ID NO: 15641 - RNA, 38 nt, Artificial Sequence
  Description of Artificial Sequence:  Enzymatic Nucleic Acid
  misc_feature (31)..(31): n stands for inosine
ccccaccgcugaugaggccguuaggccgaangcuucca

SEQ ID NO: 15642 - RNA, 38 nt, Artificial Sequence
  Description of Artificial Sequence:  Enzymatic Nucleic Acid
  misc_feature (31)..(31): n stands for inosine
agggauuccugaugaggccguuaggccgaanacacgcu

SEQ ID NO: 15643 - RNA, 38 nt, Artificial Sequence
  Description of Artificial Sequence:  Enzymatic Nucleic Acid
  misc_feature (31)..(31): n stands for inosine
cuucgcagcugaugaggccguuaggccgaanauucuga

SEQ ID NO: 15644 - RNA, 38 nt, Artificial Sequence
  Description of Artificial Sequence:  Enzymatic Nucleic Acid
  misc_feature (31)..(31): n stands for inosine
acuucgcacugaugaggccguuaggccgaangauucug

SEQ ID NO: 15645 - RNA, 38 nt, Artificial Sequence
  Description of Artificial Sequence:  Enzymatic Nucleic Acid
  misc_feature (31)..(31): n stands for inosine
uacuucgccugaugaggccguuaggccgaanggauucu

SEQ ID NO: 15646 - RNA, 38 nt, Artificial Sequence
  Description of Artificial Sequence:  Enzymatic Nucleic Acid
  misc_feature (31)..(31): n stands for inosine
guaaccaacugaugaggccguuaggccgaanuacuucg

SEQ ID NO: 15647 - RNA, 38 nt, Artificial Sequence
  Description of Artificial Sequence:  Enzymatic Nucleic Acid
  misc_feature (31)..(31): n stands for inosine
gguaaccacugaugaggccguuaggccgaanguacuuc

SEQ ID NO: 15648 - RNA, 38 nt, Artificial Sequence
  Description of Artificial Sequence:  Enzymatic Nucleic Acid
  misc_feature (31)..(31): n stands for inosine
ugggggugcugaugaggccguuaggccgaanuaaccaa

SEQ ID NO: 15649 - RNA, 38 nt, Artificial Sequence
  Description of Artificial Sequence:  Enzymatic Nucleic Acid
  misc_feature (31)..(31): n stands for inosine
cugggggucugaugaggccguuaggccgaanguaacca

SEQ ID NO: 15650 - RNA, 38 nt, Artificial Sequence
  Description of Artificial Sequence:  Enzymatic Nucleic Acid
  misc_feature (31)..(31): n stands for inosine
ucugggggcugaugaggccguuaggccgaangguaacc

SEQ ID NO: 15651 - RNA, 38 nt, Artificial Sequence
  Description of Artificial Sequence:  Enzymatic Nucleic Acid
  misc_feature (31)..(31): n stands for inosine
uuucugggcugaugaggccguuaggccgaanuggguaa

SEQ ID NO: 15652 - RNA, 38 nt, Artificial Sequence
  Description of Artificial Sequence:  Enzymatic Nucleic Acid
  misc_feature (31)..(31): n stands for inosine
auuucuggcugaugaggccguuaggccgaangugggua

SEQ ID NO: 15653 - RNA, 38 nt, Artificial Sequence
  Description of Artificial Sequence:  Enzymatic Nucleic Acid
  misc_feature (31)..(31): n stands for inosine
uauuucugcugaugaggccguuaggccgaanggugggu

SEQ ID NO: 15654 - RNA, 38 nt, Artificial Sequence
  Description of Artificial Sequence:  Enzymatic Nucleic Acid
  misc_feature (31)..(31): n stands for inosine
uuauuucucugaugaggccguuaggccgaanggguggg

SEQ ID NO: 15655 - RNA, 38 nt, Artificial Sequence
  Description of Artificial Sequence:  Enzymatic Nucleic Acid
  misc_feature (31)..(31): n stands for inosine
uuuauuuccugaugaggccguuaggccgaanggggugg

SEQ ID NO: 15656 - RNA, 38 nt, Artificial Sequence
  Description of Artificial Sequence:  Enzymatic Nucleic Acid
  misc_feature (31)..(31): n stands for inosine
acucaaggcugaugaggccguuaggccgaanuauucca

SEQ ID NO: 15657 - RNA, 38 nt, Artificial Sequence
  Description of Artificial Sequence:  Enzymatic Nucleic Acid
  misc_feature (31)..(31): n stands for inosine
gacucaagcugaugaggccguuaggccgaanguauucc

SEQ ID NO: 15658 - RNA, 38 nt, Artificial Sequence
  Description of Artificial Sequence:  Enzymatic Nucleic Acid
  misc_feature (31)..(31): n stands for inosine
ggacucaacugaugaggccguuaggccgaangguauuc

SEQ ID NO: 15659 - RNA, 38 nt, Artificial Sequence
  Description of Artificial Sequence:  Enzymatic Nucleic Acid
  misc_feature (31)..(31): n stands for inosine
uggacucacugaugaggccguuaggccgaanggguauu

SEQ ID NO: 15660 - RNA, 38 nt, Artificial Sequence
  Description of Artificial Sequence:  Enzymatic Nucleic Acid
  misc_feature (31)..(31): n stands for inosine
gugugauucugaugaggccguuaggccgaanacucaag

SEQ ID NO: 15661 - RNA, 38 nt, Artificial Sequence
  Description of Artificial Sequence:  Enzymatic Nucleic Acid
  misc_feature (31)..(31): n stands for inosine
ugugugaucugaugaggccguuaggccgaangacucaa

SEQ ID NO: 15662 - RNA, 38 nt, Artificial Sequence
  Description of Artificial Sequence:  Enzymatic Nucleic Acid
  misc_feature (31)..(31): n stands for inosine
uaauugugcugaugaggccguuaggccgaanauuggac

SEQ ID NO: 15663 - RNA, 38 nt, Artificial Sequence
  Description of Artificial Sequence:  Enzymatic Nucleic Acid
  misc_feature (31)..(31): n stands for inosine
uuuaauugcugaugaggccguuaggccgaanugauugg

SEQ ID NO: 15664 - RNA, 38 nt, Artificial Sequence
  Description of Artificial Sequence:  Enzymatic Nucleic Acid
  misc_feature (31)..(31): n stands for inosine
gcuuuaaucugaugaggccguuaggccgaanugugauu

SEQ ID NO: 15665 - RNA, 38 nt, Artificial Sequence
  Description of Artificial Sequence:  Enzymatic Nucleic Acid
  misc_feature (31)..(31): n stands for inosine
ucaguacacugaugaggccguuaggccgaanccccgcu

SEQ ID NO: 15666 - RNA, 38 nt, Artificial Sequence
  Description of Artificial Sequence:  Enzymatic Nucleic Acid
  misc_feature (31)..(31): n stands for inosine
uaaucguccugaugaggccguuaggccgaanuacaugc

SEQ ID NO: 15667 - RNA, 38 nt, Artificial Sequence
  Description of Artificial Sequence:  Enzymatic Nucleic Acid
  misc_feature (31)..(31): n stands for inosine
auuuccugcugaugaggccguuaggccgaanucucuuu

SEQ ID NO: 15668 - RNA, 38 nt, Artificial Sequence
  Description of Artificial Sequence:  Enzymatic Nucleic Acid
  misc_feature (31)..(31): n stands for inosine
uaauuucccugaugaggccguuaggccgaanugucucu

SEQ ID NO: 15669 - RNA, 38 nt, Artificial Sequence
  Description of Artificial Sequence:  Enzymatic Nucleic Acid
  misc_feature (31)..(31): n stands for inosine
gaugacagcugaugaggccguuaggccgaanuaauuuc

SEQ ID NO: 15670 - RNA, 38 nt, Artificial Sequence
  Description of Artificial Sequence:  Enzymatic Nucleic Acid
  misc_feature (31)..(31): n stands for inosine
aggaugaccugaugaggccguuaggccgaanuguaauu

SEQ ID NO: 15671 - RNA, 38 nt, Artificial Sequence
  Description of Artificial Sequence:  Enzymatic Nucleic Acid
  misc_feature (31)..(31): n stands for inosine
gguaaggacugaugaggccguuaggccgaanacagugu

SEQ ID NO: 15672 - RNA, 38 nt, Artificial Sequence
  Description of Artificial Sequence:  Enzymatic Nucleic Acid
  misc_feature (31)..(31): n stands for inosine
auugguaacugaugaggccguuaggccgaanaugacag

SEQ ID NO: 15673 - RNA, 38 nt, Artificial Sequence
  Description of Artificial Sequence:  Enzymatic Nucleic Acid
  misc_feature (31)..(31): n stands for inosine
gauugguacugaugaggccguuaggccgaangaugaca

SEQ ID NO: 15674 - RNA, 38 nt, Artificial Sequence
  Description of Artificial Sequence:  Enzymatic Nucleic Acid
  misc_feature (31)..(31): n stands for inosine
augggauucugaugaggccguuaggccgaanuaaggau

SEQ ID NO: 15675 - RNA, 38 nt, Artificial Sequence
  Description of Artificial Sequence:  Enzymatic Nucleic Acid
  misc_feature (31)..(31): n stands for inosine
aaugggaucugaugaggccguuaggccgaanguaagga

SEQ ID NO: 15676 - RNA, 38 nt, Artificial Sequence
  Description of Artificial Sequence:  Enzymatic Nucleic Acid
  misc_feature (31)..(31): n stands for inosine
uugaaaugcugaugaggccguuaggccgaanauuggua

SEQ ID NO: 15677 - RNA, 38 nt, Artificial Sequence
  Description of Artificial Sequence:  Enzymatic Nucleic Acid
  misc_feature (31)..(31): n stands for inosine
uuugaaaucugaugaggccguuaggccgaangauuggu

SEQ ID NO: 15678 - RNA, 38 nt, Artificial Sequence
  Description of Artificial Sequence:  Enzymatic Nucleic Acid
  misc_feature (31)..(31): n stands for inosine
cuuugaaacugaugaggccguuaggccgaanggauugg

SEQ ID NO: 15679 - RNA, 38 nt, Artificial Sequence
  Description of Artificial Sequence:  Enzymatic Nucleic Acid
  misc_feature (31)..(31): n stands for inosine
uucuccuucugaugaggccguuaggccgaanaaauggg

SEQ ID NO: 15680 - RNA, 38 nt, Artificial Sequence
  Description of Artificial Sequence:  Enzymatic Nucleic Acid
  misc_feature (31)..(31): n stands for inosine
cauggcuccugaugaggccguuaggccgaancuucucc

SEQ ID NO: 15681 - RNA, 38 nt, Artificial Sequence
  Description of Artificial Sequence:  Enzymatic Nucleic Acid
  misc_feature (31)..(31): n stands for inosine
gaccacaucugaugaggccguuaggccgaancucugcu

SEQ ID NO: 15682 - RNA, 38 nt, Artificial Sequence
  Description of Artificial Sequence:  Enzymatic Nucleic Acid
  misc_feature (31)..(31): n stands for inosine
agaccacacugaugaggccguuaggccgaangcucugc

SEQ ID NO: 15683 - RNA, 38 nt, Artificial Sequence
  Description of Artificial Sequence:  Enzymatic Nucleic Acid
  misc_feature (31)..(31): n stands for inosine
aaccagagcugaugaggccguuaggccgaanaccacau

SEQ ID NO: 15684 - RNA, 38 nt, Artificial Sequence
  Description of Artificial Sequence:  Enzymatic Nucleic Acid
  misc_feature (31)..(31): n stands for inosine
acaaccagcugaugaggccguuaggccgaanagaccac

SEQ ID NO: 15685 - RNA, 38 nt, Artificial Sequence
  Description of Artificial Sequence:  Enzymatic Nucleic Acid
  misc_feature (31)..(31): n stands for inosine
acacaacccugaugaggccguuaggccgaanagagacc

SEQ ID NO: 15686 - RNA, 38 nt, Artificial Sequence
  Description of Artificial Sequence:  Enzymatic Nucleic Acid
  misc_feature (31)..(31): n stands for inosine
cuggggugcugaugaggccguuaggccgaanacauaca

SEQ ID NO: 15687 - RNA, 38 nt, Artificial Sequence
  Description of Artificial Sequence:  Enzymatic Nucleic Acid
  misc_feature (31)..(31): n stands for inosine
ucuggggucugaugaggccguuaggccgaangacauac

SEQ ID NO: 15688 - RNA, 38 nt, Artificial Sequence
  Description of Artificial Sequence:  Enzymatic Nucleic Acid
  misc_feature (31)..(31): n stands for inosine
aucuggggcugaugaggccguuaggccgaanggacaua

SEQ ID NO: 15689 - RNA, 38 nt, Artificial Sequence
  Description of Artificial Sequence:  Enzymatic Nucleic Acid
  misc_feature (31)..(31): n stands for inosine
caaucuggcugaugaggccguuaggccgaanugggaca

SEQ ID NO: 15690 - RNA, 38 nt, Artificial Sequence
  Description of Artificial Sequence:  Enzymatic Nucleic Acid
  misc_feature (31)..(31): n stands for inosine
ccaaucugcugaugaggccguuaggccgaangugggac

SEQ ID NO: 15691 - RNA, 38 nt, Artificial Sequence
  Description of Artificial Sequence:  Enzymatic Nucleic Acid
  misc_feature (31)..(31): n stands for inosine
accaaucucugaugaggccguuaggccgaangguggga

SEQ ID NO: 15692 - RNA, 38 nt, Artificial Sequence
  Description of Artificial Sequence:  Enzymatic Nucleic Acid
  misc_feature (31)..(31): n stands for inosine
caccaauccugaugaggccguuaggccgaanggguggg

SEQ ID NO: 15693 - RNA, 38 nt, Artificial Sequence
  Description of Artificial Sequence:  Enzymatic Nucleic Acid
  misc_feature (31)..(31): n stands for inosine
gagauuagcugaugaggccguuaggccgaanauuucuc

SEQ ID NO: 15694 - RNA, 38 nt, Artificial Sequence
  Description of Artificial Sequence:  Enzymatic Nucleic Acid
  misc_feature (31)..(31): n stands for inosine
gagagauucugaugaggccguuaggccgaanagauuuc

SEQ ID NO: 15695 - RNA, 38 nt, Artificial Sequence
  Description of Artificial Sequence:  Enzymatic Nucleic Acid
  misc_feature (31)..(31): n stands for inosine
cacaggagcugaugaggccguuaggccgaanauuagag

SEQ ID NO: 15696 - RNA, 38 nt, Artificial Sequence
  Description of Artificial Sequence:  Enzymatic Nucleic Acid
  misc_feature (31)..(31): n stands for inosine
uccacaggcugaugaggccguuaggccgaanagauuag

SEQ ID NO: 15697 - RNA, 38 nt, Artificial Sequence
  Description of Artificial Sequence:  Enzymatic Nucleic Acid
  misc_feature (31)..(31): n stands for inosine
aauccacacugaugaggccguuaggccgaanagagauu

SEQ ID NO: 15698 - RNA, 38 nt, Artificial Sequence
  Description of Artificial Sequence:  Enzymatic Nucleic Acid
  misc_feature (31)..(31): n stands for inosine
gaauccaccugaugaggccguuaggccgaangagagau

SEQ ID NO: 15699 - RNA, 38 nt, Artificial Sequence
  Description of Artificial Sequence:  Enzymatic Nucleic Acid
  misc_feature (31)..(31): n stands for inosine
uacugguacugaugaggccguuaggccgaanaauccac

SEQ ID NO: 15700 - RNA, 38 nt, Artificial Sequence
  Description of Artificial Sequence:  Enzymatic Nucleic Acid
  misc_feature (31)..(31): n stands for inosine
guacuggucugaugaggccguuaggccgaangaaucca

SEQ ID NO: 15701 - RNA, 38 nt, Artificial Sequence
  Description of Artificial Sequence:  Enzymatic Nucleic Acid
  misc_feature (31)..(31): n stands for inosine
gccguacucugaugaggccguuaggccgaanuaggaau

SEQ ID NO: 15702 - RNA, 38 nt, Artificial Sequence
  Description of Artificial Sequence:  Enzymatic Nucleic Acid
  misc_feature (31)..(31): n stands for inosine
ugccguaccugaugaggccguuaggccgaanguaggaa

SEQ ID NO: 15703 - RNA, 38 nt, Artificial Sequence
  Description of Artificial Sequence:  Enzymatic Nucleic Acid
  misc_feature (31)..(31): n stands for inosine
uugaguggcugaugaggccguuaggccgaanccguacu

SEQ ID NO: 15704 - RNA, 38 nt, Artificial Sequence
  Description of Artificial Sequence:  Enzymatic Nucleic Acid
  misc_feature (31)..(31): n stands for inosine
guuugagucugaugaggccguuaggccgaanugccgua

SEQ ID NO: 15705 - RNA, 38 nt, Artificial Sequence
  Description of Artificial Sequence:  Enzymatic Nucleic Acid
  misc_feature (31)..(31): n stands for inosine
cguuugagcugaugaggccguuaggccgaangugccgu

SEQ ID NO: 15706 - RNA, 38 nt, Artificial Sequence
  Description of Artificial Sequence:  Enzymatic Nucleic Acid
  misc_feature (31)..(31): n stands for inosine
agcguuugcugaugaggccguuaggccgaanuggugcc

SEQ ID NO: 15707 - RNA, 38 nt, Artificial Sequence
  Description of Artificial Sequence:  Enzymatic Nucleic Acid
  misc_feature (31)..(31): n stands for inosine
ucagcguucugaugaggccguuaggccgaanaguggug

SEQ ID NO: 15708 - RNA, 38 nt, Artificial Sequence
  Description of Artificial Sequence:  Enzymatic Nucleic Acid
  misc_feature (31)..(31): n stands for inosine
uacauguccugaugaggccguuaggccgaancguuuga

SEQ ID NO: 15709 - RNA, 38 nt, Artificial Sequence
  Description of Artificial Sequence:  Enzymatic Nucleic Acid
  misc_feature (31)..(31): n stands for inosine
accguacacugaugaggccguuaggccgaanucagcgu

SEQ ID NO: 15710 - RNA, 38 nt, Artificial Sequence
  Description of Artificial Sequence:  Enzymatic Nucleic Acid
  misc_feature (31)..(31): n stands for inosine
aauggcaucugaugaggccguuaggccgaanaccguac

SEQ ID NO: 15711 - RNA, 38 nt, Artificial Sequence
  Description of Artificial Sequence:  Enzymatic Nucleic Acid
  misc_feature (31)..(31): n stands for inosine
ggaggaaucugaugaggccguuaggccgaancauagac

SEQ ID NO: 15712 - RNA, 38 nt, Artificial Sequence
  Description of Artificial Sequence:  Enzymatic Nucleic Acid
  misc_feature (31)..(31): n stands for inosine
gggaggaacugaugaggccguuaggccgaangcauaga

SEQ ID NO: 15713 - RNA, 38 nt, Artificial Sequence
  Description of Artificial Sequence:  Enzymatic Nucleic Acid
  misc_feature (31)..(31): n stands for inosine
gcgggggacugaugaggccguuaggccgaanaauggca

SEQ ID NO: 15714 - RNA, 38 nt, Artificial Sequence
  Description of Artificial Sequence:  Enzymatic Nucleic Acid
  misc_feature (31)..(31): n stands for inosine
ugcgggggcugaugaggccguuaggccgaangaauggc

SEQ ID NO: 15715 - RNA, 38 nt, Artificial Sequence
  Description of Artificial Sequence:  Enzymatic Nucleic Acid
  misc_feature (31)..(31): n stands for inosine
gaugcgggcugaugaggccguuaggccgaanaggaaug

SEQ ID NO: 15716 - RNA, 38 nt, Artificial Sequence
  Description of Artificial Sequence:  Enzymatic Nucleic Acid
  misc_feature (31)..(31): n stands for inosine
ugaugcggcugaugaggccguuaggccgaangaggaau

SEQ ID NO: 15717 - RNA, 38 nt, Artificial Sequence
  Description of Artificial Sequence:  Enzymatic Nucleic Acid
  misc_feature (31)..(31): n stands for inosine
gugaugcgcugaugaggccguuaggccgaanggaggaa

SEQ ID NO: 15718 - RNA, 38 nt, Artificial Sequence
  Description of Artificial Sequence:  Enzymatic Nucleic Acid
  misc_feature (31)..(31): n stands for inosine
ugugaugccugaugaggccguuaggccgaangggagga

SEQ ID NO: 15719 - RNA, 38 nt, Artificial Sequence
  Description of Artificial Sequence:  Enzymatic Nucleic Acid
  misc_feature (31)..(31): n stands for inosine
ggaugugacugaugaggccguuaggccgaancggggga

SEQ ID NO: 15720 - RNA, 38 nt, Artificial Sequence
  Description of Artificial Sequence:  Enzymatic Nucleic Acid
  misc_feature (31)..(31): n stands for inosine
aguggaugcugaugaggccguuaggccgaanaugcggg

SEQ ID NO: 15721 - RNA, 38 nt, Artificial Sequence
  Description of Artificial Sequence:  Enzymatic Nucleic Acid
  misc_feature (31)..(31): n stands for inosine
ccaguggacugaugaggccguuaggccgaanugaugcg

SEQ ID NO: 15722 - RNA, 38 nt, Artificial Sequence
  Description of Artificial Sequence:  Enzymatic Nucleic Acid
  misc_feature (31)..(31): n stands for inosine
auaccagucugaugaggccguuaggccgaanaugugau

SEQ ID NO: 15723 - RNA, 38 nt, Artificial Sequence
  Description of Artificial Sequence:  Enzymatic Nucleic Acid
  misc_feature (31)..(31): n stands for inosine
aauaccagcugaugaggccguuaggccgaangauguga

SEQ ID NO: 15724 - RNA, 38 nt, Artificial Sequence
  Description of Artificial Sequence:  Enzymatic Nucleic Acid
  misc_feature (31)..(31): n stands for inosine
ccaauacccugaugaggccguuaggccgaanuggaugu

SEQ ID NO: 15725 - RNA, 38 nt, Artificial Sequence
  Description of Artificial Sequence:  Enzymatic Nucleic Acid
  misc_feature (31)..(31): n stands for inosine
ccuccaaccugaugaggccguuaggccgaanccaauac

SEQ ID NO: 15726 - RNA, 38 nt, Artificial Sequence
  Description of Artificial Sequence:  Enzymatic Nucleic Acid
  misc_feature (31)..(31): n stands for inosine
ggcucguucugaugaggccguuaggccgaancgcacuc

SEQ ID NO: 15727 - RNA, 38 nt, Artificial Sequence
  Description of Artificial Sequence:  Enzymatic Nucleic Acid
  misc_feature (31)..(31): n stands for inosine
gggcucgucugaugaggccguuaggccgaangcgcacu

SEQ ID NO: 15728 - RNA, 38 nt, Artificial Sequence
  Description of Artificial Sequence:  Enzymatic Nucleic Acid
  misc_feature (31)..(31): n stands for inosine
cuuggcugcugaugaggccguuaggccgaancucguug

SEQ ID NO: 15729 - RNA, 38 nt, Artificial Sequence
  Description of Artificial Sequence:  Enzymatic Nucleic Acid
  misc_feature (31)..(31): n stands for inosine
gcuuggcucugaugaggccguuaggccgaangcucguu

SEQ ID NO: 15730 - RNA, 38 nt, Artificial Sequence
  Description of Artificial Sequence:  Enzymatic Nucleic Acid
  misc_feature (31)..(31): n stands for inosine
agcuuggccugaugaggccguuaggccgaanggcucgu

SEQ ID NO: 15731 - RNA, 38 nt, Artificial Sequence
  Description of Artificial Sequence:  Enzymatic Nucleic Acid
  misc_feature (31)..(31): n stands for inosine
gacagcuucugaugaggccguuaggccgaancugggcu

SEQ ID NO: 15732 - RNA, 38 nt, Artificial Sequence
  Description of Artificial Sequence:  Enzymatic Nucleic Acid
  misc_feature (31)..(31): n stands for inosine
agacagcucugaugaggccguuaggccgaangcugggc

SEQ ID NO: 15733 - RNA, 38 nt, Artificial Sequence
  Description of Artificial Sequence:  Enzymatic Nucleic Acid
  misc_feature (31)..(31): n stands for inosine
acugagaccugaugaggccguuaggccgaancuuggcu

SEQ ID NO: 15734 - RNA, 38 nt, Artificial Sequence
  Description of Artificial Sequence:  Enzymatic Nucleic Acid
  misc_feature (31)..(31): n stands for inosine
ugucacugcugaugaggccguuaggccgaanacagcuu

SEQ ID NO: 15735 - RNA, 38 nt, Artificial Sequence
  Description of Artificial Sequence:  Enzymatic Nucleic Acid
  misc_feature (31)..(31): n stands for inosine
uuugucaccugaugaggccguuaggccgaanagacagc

SEQ ID NO: 15736 - RNA, 38 nt, Artificial Sequence
  Description of Artificial Sequence:  Enzymatic Nucleic Acid
  misc_feature (31)..(31): n stands for inosine
uauggguucugaugaggccguuaggccgaanucacuga

SEQ ID NO: 15737 - RNA, 38 nt, Artificial Sequence
  Description of Artificial Sequence:  Enzymatic Nucleic Acid
  misc_feature (31)..(31): n stands for inosine
aggguaugcugaugaggccguuaggccgaanuuuguca

SEQ ID NO: 15738 - RNA, 38 nt, Artificial Sequence
  Description of Artificial Sequence:  Enzymatic Nucleic Acid
  misc_feature (31)..(31): n stands for inosine
aaggguaucugaugaggccguuaggccgaanguuuguc

SEQ ID NO: 15739 - RNA, 38 nt, Artificial Sequence
  Description of Artificial Sequence:  Enzymatic Nucleic Acid
  misc_feature (31)..(31): n stands for inosine
caaggguacugaugaggccguuaggccgaangguuugu

SEQ ID NO: 15740 - RNA, 38 nt, Artificial Sequence
  Description of Artificial Sequence:  Enzymatic Nucleic Acid
  misc_feature (31)..(31): n stands for inosine
uucacaagcugaugaggccguuaggccgaanuaugggu

SEQ ID NO: 15741 - RNA, 38 nt, Artificial Sequence
  Description of Artificial Sequence:  Enzymatic Nucleic Acid
  misc_feature (31)..(31): n stands for inosine
cuucacaacugaugaggccguuaggccgaanguauggg

SEQ ID NO: 15742 - RNA, 38 nt, Artificial Sequence
  Description of Artificial Sequence:  Enzymatic Nucleic Acid
  misc_feature (31)..(31): n stands for inosine
ucuucacacugaugaggccguuaggccgaangguaugg

SEQ ID NO: 15743 - RNA, 38 nt, Artificial Sequence
  Description of Artificial Sequence:  Enzymatic Nucleic Acid
  misc_feature (31)..(31): n stands for inosine
ucccuggacugaugaggccguuaggccgaanuccucca

SEQ ID NO: 15744 - RNA, 38 nt, Artificial Sequence
  Description of Artificial Sequence:  Enzymatic Nucleic Acid
  misc_feature (31)..(31): n stands for inosine
uccucccucugaugaggccguuaggccgaanaaguccu

SEQ ID NO: 15745 - RNA, 38 nt, Artificial Sequence
  Description of Artificial Sequence:  Enzymatic Nucleic Acid
  misc_feature (31)..(31): n stands for inosine
uuccuccccugaugaggccguuaggccgaangaagucc

SEQ ID NO: 15746 - RNA, 38 nt, Artificial Sequence
  Description of Artificial Sequence:  Enzymatic Nucleic Acid
  misc_feature (31)..(31): n stands for inosine
gagcaaaucugaugaggccguuaggccgaanauuuuua

SEQ ID NO: 15747 - RNA, 38 nt, Artificial Sequence
  Description of Artificial Sequence:  Enzymatic Nucleic Acid
  misc_feature (31)..(31): n stands for inosine
ucaauuagcugaugaggccguuaggccgaancaaauug

SEQ ID NO: 15748 - RNA, 38 nt, Artificial Sequence
  Description of Artificial Sequence:  Enzymatic Nucleic Acid
  misc_feature (31)..(31): n stands for inosine
cuucaauucugaugaggccguuaggccgaanagcaaau

SEQ ID NO: 15749 - RNA, 38 nt, Artificial Sequence
  Description of Artificial Sequence:  Enzymatic Nucleic Acid
  misc_feature (31)..(31): n stands for inosine
uacaguuucugaugaggccguuaggccgaanuuuuuuc

SEQ ID NO: 15750 - RNA, 38 nt, Artificial Sequence
  Description of Artificial Sequence:  Enzymatic Nucleic Acid
  misc_feature (31)..(31): n stands for inosine
guacuuaccugaugaggccguuaggccgaanuuuuguu

SEQ ID NO: 15751 - RNA, 38 nt, Artificial Sequence
  Description of Artificial Sequence:  Enzymatic Nucleic Acid
  misc_feature (31)..(31): n stands for inosine
auaacaagcugaugaggccguuaggccgaanuacuuac

SEQ ID NO: 15752 - RNA, 38 nt, Artificial Sequence
  Description of Artificial Sequence:  Enzymatic Nucleic Acid
  misc_feature (31)..(31): n stands for inosine
gauaacaacugaugaggccguuaggccgaanguacuua

SEQ ID NO: 15753 - RNA, 38 nt, Artificial Sequence
  Description of Artificial Sequence:  Enzymatic Nucleic Acid
  misc_feature (31)..(31): n stands for inosine
ggauaacacugaugaggccguuaggccgaangguacuu

SEQ ID NO: 15754 - RNA, 38 nt, Artificial Sequence
  Description of Artificial Sequence:  Enzymatic Nucleic Acid
  misc_feature (31)..(31): n stands for inosine
ugccgcuucugaugaggccguuaggccgaanauaacaa

SEQ ID NO: 15755 - RNA, 38 nt, Artificial Sequence
  Description of Artificial Sequence:  Enzymatic Nucleic Acid
  misc_feature (31)..(31): n stands for inosine
uugccgcucugaugaggccguuaggccgaangauaaca

SEQ ID NO: 15756 - RNA, 38 nt, Artificial Sequence
  Description of Artificial Sequence:  Enzymatic Nucleic Acid
  misc_feature (31)..(31): n stands for inosine
gacacauucugaugaggccguuaggccgaanccgcuug

SEQ ID NO: 15757 - RNA, 38 nt, Artificial Sequence
  Description of Artificial Sequence:  Enzymatic Nucleic Acid
  misc_feature (31)..(31): n stands for inosine
uacaaagccugaugaggccguuaggccgaanacacauu

SEQ ID NO: 15758 - RNA, 38 nt, Artificial Sequence
  Description of Artificial Sequence:  Enzymatic Nucleic Acid
  misc_feature (31)..(31): n stands for inosine
uuguacaacugaugaggccguuaggccgaancugacac

SEQ ID NO: 15759 - RNA, 38 nt, Artificial Sequence
  Description of Artificial Sequence:  Enzymatic Nucleic Acid
  misc_feature (31)..(31): n stands for inosine
uucacauucugaugaggccguuaggccgaanuacaaag

SEQ ID NO: 15760 - RNA, 38 nt, Artificial Sequence
  Description of Artificial Sequence:  Enzymatic Nucleic Acid
  misc_feature (31)..(31): n stands for inosine
gacuuugucugaugaggccguuaggccgaanaccgcuu

SEQ ID NO: 15761 - RNA, 38 nt, Artificial Sequence
  Description of Artificial Sequence:  Enzymatic Nucleic Acid
  misc_feature (31)..(31): n stands for inosine
cccgacuucugaugaggccguuaggccgaanuugaccg

SEQ ID NO: 15762 - RNA, 38 nt, Artificial Sequence
  Description of Artificial Sequence:  Enzymatic Nucleic Acid
  misc_feature (31)..(31): n stands for inosine
guggaaggcugaugaggccguuaggccgaanaucaccc

SEQ ID NO: 15763 - RNA, 38 nt, Artificial Sequence
  Description of Artificial Sequence:  Enzymatic Nucleic Acid
  misc_feature (31)..(31): n stands for inosine
acguggaacugaugaggccguuaggccgaanagaucac

SEQ ID NO: 15764 - RNA, 38 nt, Artificial Sequence
  Description of Artificial Sequence:  Enzymatic Nucleic Acid
  misc_feature (31)..(31): n stands for inosine
cacguggacugaugaggccguuaggccgaangagauca

SEQ ID NO: 15765 - RNA, 38 nt, Artificial Sequence
  Description of Artificial Sequence:  Enzymatic Nucleic Acid
  misc_feature (31)..(31): n stands for inosine
ggucacgucugaugaggccguuaggccgaanaaggaga

SEQ ID NO: 15766 - RNA, 38 nt, Artificial Sequence
  Description of Artificial Sequence:  Enzymatic Nucleic Acid
  misc_feature (31)..(31): n stands for inosine
uggucacgcugaugaggccguuaggccgaangaaggag

SEQ ID NO: 15767 - RNA, 38 nt, Artificial Sequence
  Description of Artificial Sequence:  Enzymatic Nucleic Acid
  misc_feature (31)..(31): n stands for inosine
ggaccccucugaugaggccguuaggccgaanucacgug

SEQ ID NO: 15768 - RNA, 38 nt, Artificial Sequence
  Description of Artificial Sequence:  Enzymatic Nucleic Acid
  misc_feature (31)..(31): n stands for inosine
aggacccccugaugaggccguuaggccgaangucacgu

SEQ ID NO: 15769 - RNA, 38 nt, Artificial Sequence
  Description of Artificial Sequence:  Enzymatic Nucleic Acid
  misc_feature (31)..(31): n stands for inosine
uaauuucacugaugaggccguuaggccgaanaccccug

SEQ ID NO: 15770 - RNA, 38 nt, Artificial Sequence
  Description of Artificial Sequence:  Enzymatic Nucleic Acid
  misc_feature (31)..(31): n stands for inosine
guaauuuccugaugaggccguuaggccgaangaccccu

SEQ ID NO: 15771 - RNA, 38 nt, Artificial Sequence
  Description of Artificial Sequence:  Enzymatic Nucleic Acid
  misc_feature (31)..(31): n stands for inosine
gguugcaacugaugaggccguuaggccgaanuaauuuc

SEQ ID NO: 15772 - RNA, 38 nt, Artificial Sequence
  Description of Artificial Sequence:  Enzymatic Nucleic Acid
  misc_feature (31)..(31): n stands for inosine
ugucaggucugaugaggccguuaggccgaancaaagua

SEQ ID NO: 15773 - RNA, 38 nt, Artificial Sequence
  Description of Artificial Sequence:  Enzymatic Nucleic Acid
  misc_feature (31)..(31): n stands for inosine
gcaugucacugaugaggccguuaggccgaanuugcaaa

SEQ ID NO: 15774 - RNA, 38 nt, Artificial Sequence
  Description of Artificial Sequence:  Enzymatic Nucleic Acid
  misc_feature (31)..(31): n stands for inosine
ugcauguccugaugaggccguuaggccgaanguugcaa

SEQ ID NO: 15775 - RNA, 38 nt, Artificial Sequence
  Description of Artificial Sequence:  Enzymatic Nucleic Acid
  misc_feature (31)..(31): n stands for inosine
gggcugcacugaugaggccguuaggccgaanucagguu

SEQ ID NO: 15776 - RNA, 38 nt, Artificial Sequence
  Description of Artificial Sequence:  Enzymatic Nucleic Acid
  misc_feature (31)..(31): n stands for inosine
cagugggccugaugaggccguuaggccgaancauguca

SEQ ID NO: 15777 - RNA, 38 nt, Artificial Sequence
  Description of Artificial Sequence:  Enzymatic Nucleic Acid
  misc_feature (31)..(31): n stands for inosine
gcucagugcugaugaggccguuaggccgaancugcaug

SEQ ID NO: 15778 - RNA, 38 nt, Artificial Sequence
  Description of Artificial Sequence:  Enzymatic Nucleic Acid
  misc_feature (31)..(31): n stands for inosine
ugcucagucugaugaggccguuaggccgaangcugcau

SEQ ID NO: 15779 - RNA, 38 nt, Artificial Sequence
  Description of Artificial Sequence:  Enzymatic Nucleic Acid
  misc_feature (31)..(31): n stands for inosine
cugcucagcugaugaggccguuaggccgaanggcugca

SEQ ID NO: 15780 - RNA, 38 nt, Artificial Sequence
  Description of Artificial Sequence:  Enzymatic Nucleic Acid
  misc_feature (31)..(31): n stands for inosine
uccugcuccugaugaggccguuaggccgaanugggcug

SEQ ID NO: 15781 - RNA, 38 nt, Artificial Sequence
  Description of Artificial Sequence:  Enzymatic Nucleic Acid
  misc_feature (31)..(31): n stands for inosine
cgcucucccugaugaggccguuaggccgaancucagug

SEQ ID NO: 15782 - RNA, 38 nt, Artificial Sequence
  Description of Artificial Sequence:  Enzymatic Nucleic Acid
  misc_feature (31)..(31): n stands for inosine
caccacaacugaugaggccguuaggccgaanacacgcu

SEQ ID NO: 15783 - RNA, 38 nt, Artificial Sequence
  Description of Artificial Sequence:  Enzymatic Nucleic Acid
  misc_feature (31)..(31): n stands for inosine
gucugcagcugaugaggccguuaggccgaancaccaca

SEQ ID NO: 15784 - RNA, 38 nt, Artificial Sequence
  Description of Artificial Sequence:  Enzymatic Nucleic Acid
  misc_feature (31)..(31): n stands for inosine
cugucugccugaugaggccguuaggccgaanugcacca

SEQ ID NO: 15785 - RNA, 38 nt, Artificial Sequence
  Description of Artificial Sequence:  Enzymatic Nucleic Acid
  misc_feature (31)..(31): n stands for inosine
gaucuguccugaugaggccguuaggccgaancagugca

SEQ ID NO: 15786 - RNA, 38 nt, Artificial Sequence
  Description of Artificial Sequence:  Enzymatic Nucleic Acid
  misc_feature (31)..(31): n stands for inosine
cguagauccugaugaggccguuaggccgaanucugcag

SEQ ID NO: 15787 - RNA, 38 nt, Artificial Sequence
  Description of Artificial Sequence:  Enzymatic Nucleic Acid
  misc_feature (31)..(31): n stands for inosine
ucaaacgucugaugaggccguuaggccgaanaucuguc

SEQ ID NO: 15788 - RNA, 38 nt, Artificial Sequence
  Description of Artificial Sequence:  Enzymatic Nucleic Acid
  misc_feature (31)..(31): n stands for inosine
ccaugugacugaugaggccguuaggccgaanuucucaa

SEQ ID NO: 15789 - RNA, 38 nt, Artificial Sequence
  Description of Artificial Sequence:  Enzymatic Nucleic Acid
  misc_feature (31)..(31): n stands for inosine
accaugugcugaugaggccguuaggccgaanguucuca

SEQ ID NO: 15790 - RNA, 38 nt, Artificial Sequence
  Description of Artificial Sequence:  Enzymatic Nucleic Acid
  misc_feature (31)..(31): n stands for inosine
guaccaugcugaugaggccguuaggccgaanagguucu

SEQ ID NO: 15791 - RNA, 38 nt, Artificial Sequence
  Description of Artificial Sequence:  Enzymatic Nucleic Acid
  misc_feature (31)..(31): n stands for inosine
uuguaccacugaugaggccguuaggccgaanugagguu

SEQ ID NO: 15792 - RNA, 38 nt, Artificial Sequence
  Description of Artificial Sequence:  Enzymatic Nucleic Acid
  misc_feature (31)..(31): n stands for inosine
gccaagcucugaugaggccguuaggccgaanuaccaug

SEQ ID NO: 15793 - RNA, 38 nt, Artificial Sequence
  Description of Artificial Sequence:  Enzymatic Nucleic Acid
  misc_feature (31)..(31): n stands for inosine
gugggccacugaugaggccguuaggccgaancuuguac

SEQ ID NO: 15794 - RNA, 38 nt, Artificial Sequence
  Description of Artificial Sequence:  Enzymatic Nucleic Acid
  misc_feature (31)..(31): n stands for inosine
aggcugugcugaugaggccguuaggccgaanccaagcu

SEQ ID NO: 15795 - RNA, 38 nt, Artificial Sequence
  Description of Artificial Sequence:  Enzymatic Nucleic Acid
  misc_feature (31)..(31): n stands for inosine
gaggcugucugaugaggccguuaggccgaangccaagc

SEQ ID NO: 15796 - RNA, 38 nt, Artificial Sequence
  Description of Artificial Sequence:  Enzymatic Nucleic Acid
  misc_feature (31)..(31): n stands for inosine
agaggcugcugaugaggccguuaggccgaanggccaag

SEQ ID NO: 15797 - RNA, 38 nt, Artificial Sequence
  Description of Artificial Sequence:  Enzymatic Nucleic Acid
  misc_feature (31)..(31): n stands for inosine
gcagaggccugaugaggccguuaggccgaanugggcca

SEQ ID NO: 15798 - RNA, 38 nt, Artificial Sequence
  Description of Artificial Sequence:  Enzymatic Nucleic Acid
  misc_feature (31)..(31): n stands for inosine
uuggcagacugaugaggccguuaggccgaancuguggg

SEQ ID NO: 15799 - RNA, 38 nt, Artificial Sequence
  Description of Artificial Sequence:  Enzymatic Nucleic Acid
  misc_feature (31)..(31): n stands for inosine
auuggcagcugaugaggccguuaggccgaangcugugg

SEQ ID NO: 15800 - RNA, 38 nt, Artificial Sequence
  Description of Artificial Sequence:  Enzymatic Nucleic Acid
  misc_feature (31)..(31): n stands for inosine
ggauuggccugaugaggccguuaggccgaanaggcugu

SEQ ID NO: 15801 - RNA, 38 nt, Artificial Sequence
  Description of Artificial Sequence:  Enzymatic Nucleic Acid
  misc_feature (31)..(31): n stands for inosine
cauggauucugaugaggccguuaggccgaancagaggc

SEQ ID NO: 15802 - RNA, 38 nt, Artificial Sequence
  Description of Artificial Sequence:  Enzymatic Nucleic Acid
  misc_feature (31)..(31): n stands for inosine
acauggaucugaugaggccguuaggccgaangcagagg

SEQ ID NO: 15803 - RNA, 38 nt, Artificial Sequence
  Description of Artificial Sequence:  Enzymatic Nucleic Acid
  misc_feature (31)..(31): n stands for inosine
ucccacaucugaugaggccguuaggccgaanauuggca

SEQ ID NO: 15804 - RNA, 38 nt, Artificial Sequence
  Description of Artificial Sequence:  Enzymatic Nucleic Acid
  misc_feature (31)..(31): n stands for inosine
cucccacacugaugaggccguuaggccgaangauuggc

SEQ ID NO: 15805 - RNA, 38 nt, Artificial Sequence
  Description of Artificial Sequence:  Enzymatic Nucleic Acid
  misc_feature (31)..(31): n stands for inosine
caggugugcugaugaggccguuaggccgaancaacucu

SEQ ID NO: 15806 - RNA, 38 nt, Artificial Sequence
  Description of Artificial Sequence:  Enzymatic Nucleic Acid
  misc_feature (31)..(31): n stands for inosine
acaggugucugaugaggccguuaggccgaangcaacuc

SEQ ID NO: 15807 - RNA, 38 nt, Artificial Sequence
  Description of Artificial Sequence:  Enzymatic Nucleic Acid
  misc_feature (31)..(31): n stands for inosine
aacaggugcugaugaggccguuaggccgaanggcaacu

SEQ ID NO: 15808 - RNA, 38 nt, Artificial Sequence
  Description of Artificial Sequence:  Enzymatic Nucleic Acid
  misc_feature (31)..(31): n stands for inosine
caaacaggcugaugaggccguuaggccgaanugggcaa

SEQ ID NO: 15809 - RNA, 38 nt, Artificial Sequence
  Description of Artificial Sequence:  Enzymatic Nucleic Acid
  misc_feature (31)..(31): n stands for inosine
ugcaaacacugaugaggccguuaggccgaanugugggc

SEQ ID NO: 15810 - RNA, 38 nt, Artificial Sequence
  Description of Artificial Sequence:  Enzymatic Nucleic Acid
  misc_feature (31)..(31): n stands for inosine
uugcaaaccugaugaggccguuaggccgaanguguggg

SEQ ID NO: 15811 - RNA, 38 nt, Artificial Sequence
  Description of Artificial Sequence:  Enzymatic Nucleic Acid
  misc_feature (31)..(31): n stands for inosine
caaguucucugaugaggccguuaggccgaancaaacag

SEQ ID NO: 15812 - RNA, 38 nt, Artificial Sequence
  Description of Artificial Sequence:  Enzymatic Nucleic Acid
  misc_feature (31)..(31): n stands for inosine
aguauccacugaugaggccguuaggccgaanuucuugc

SEQ ID NO: 15813 - RNA, 38 nt, Artificial Sequence
  Description of Artificial Sequence:  Enzymatic Nucleic Acid
  misc_feature (31)..(31): n stands for inosine
uuccaaagcugaugaggccguuaggccgaanuauccaa

SEQ ID NO: 15814 - RNA, 38 nt, Artificial Sequence
  Description of Artificial Sequence:  Enzymatic Nucleic Acid
  misc_feature (31)..(31): n stands for inosine
auuuccaacugaugaggccguuaggccgaanaguaucc

SEQ ID NO: 15815 - RNA, 38 nt, Artificial Sequence
  Description of Artificial Sequence:  Enzymatic Nucleic Acid
  misc_feature (31)..(31): n stands for inosine
aacauggucugaugaggccguuaggccgaancauucaa

SEQ ID NO: 15816 - RNA, 38 nt, Artificial Sequence
  Description of Artificial Sequence:  Enzymatic Nucleic Acid
  misc_feature (31)..(31): n stands for inosine
gaacauggcugaugaggccguuaggccgaangcauuca

SEQ ID NO: 15817 - RNA, 38 nt, Artificial Sequence
  Description of Artificial Sequence:  Enzymatic Nucleic Acid
  misc_feature (31)..(31): n stands for inosine
gagaacaucugaugaggccguuaggccgaanuggcauu

SEQ ID NO: 15818 - RNA, 38 nt, Artificial Sequence
  Description of Artificial Sequence:  Enzymatic Nucleic Acid
  misc_feature (31)..(31): n stands for inosine
agagaacacugaugaggccguuaggccgaanguggcau

SEQ ID NO: 15819 - RNA, 38 nt, Artificial Sequence
  Description of Artificial Sequence:  Enzymatic Nucleic Acid
  misc_feature (31)..(31): n stands for inosine
gcuauuagcugaugaggccguuaggccgaanaacaugg

SEQ ID NO: 15820 - RNA, 38 nt, Artificial Sequence
  Description of Artificial Sequence:  Enzymatic Nucleic Acid
  misc_feature (31)..(31): n stands for inosine
gugcuauucugaugaggccguuaggccgaanagaacau

SEQ ID NO: 15821 - RNA, 38 nt, Artificial Sequence
  Description of Artificial Sequence:  Enzymatic Nucleic Acid
  misc_feature (31)..(31): n stands for inosine
gucauuugcugaugaggccguuaggccgaancuauuag

SEQ ID NO: 15822 - RNA, 38 nt, Artificial Sequence
  Description of Artificial Sequence:  Enzymatic Nucleic Acid
  misc_feature (31)..(31): n stands for inosine
augucauucugaugaggccguuaggccgaanugcuauu

SEQ ID NO: 15823 - RNA, 38 nt, Artificial Sequence
  Description of Artificial Sequence:  Enzymatic Nucleic Acid
  misc_feature (31)..(31): n stands for inosine
gaucaaaacugaugaggccguuaggccgaanucauuug

SEQ ID NO: 15824 - RNA, 38 nt, Artificial Sequence
  Description of Artificial Sequence:  Enzymatic Nucleic Acid
  misc_feature (31)..(31): n stands for inosine
aagcuccacugaugaggccguuaggccgaanaucaaaa

SEQ ID NO: 15825 - RNA, 38 nt, Artificial Sequence
  Description of Artificial Sequence:  Enzymatic Nucleic Acid
  misc_feature (31)..(31): n stands for inosine
cauucuuacugaugaggccguuaggccgaancuccaug

SEQ ID NO: 15826 - RNA, 38 nt, Artificial Sequence
  Description of Artificial Sequence:  Enzymatic Nucleic Acid
  misc_feature (31)..(31): n stands for inosine
ugcaaggacugaugaggccguuaggccgaancauucuu

SEQ ID NO: 15827 - RNA, 38 nt, Artificial Sequence
  Description of Artificial Sequence:  Enzymatic Nucleic Acid
  misc_feature (31)..(31): n stands for inosine
uccugcaacugaugaggccguuaggccgaanaugcauu

SEQ ID NO: 15828 - RNA, 38 nt, Artificial Sequence
  Description of Artificial Sequence:  Enzymatic Nucleic Acid
  misc_feature (31)..(31): n stands for inosine
guccugcacugaugaggccguuaggccgaangaugcau

SEQ ID NO: 15829 - RNA, 38 nt, Artificial Sequence
  Description of Artificial Sequence:  Enzymatic Nucleic Acid
  misc_feature (31)..(31): n stands for inosine
cuuggucccugaugaggccguuaggccgaancaaggau

SEQ ID NO: 15830 - RNA, 38 nt, Artificial Sequence
  Description of Artificial Sequence:  Enzymatic Nucleic Acid
  misc_feature (31)..(31): n stands for inosine
gucuccuucugaugaggccguuaggccgaanuccugca

SEQ ID NO: 15831 - RNA, 38 nt, Artificial Sequence
  Description of Artificial Sequence:  Enzymatic Nucleic Acid
  misc_feature (31)..(31): n stands for inosine
agucuccucugaugaggccguuaggccgaanguccugc

SEQ ID NO: 15832 - RNA, 38 nt, Artificial Sequence
  Description of Artificial Sequence:  Enzymatic Nucleic Acid
  misc_feature (31)..(31): n stands for inosine
gcagacaucugaugaggccguuaggccgaanucuccuu

SEQ ID NO: 15833 - RNA, 38 nt, Artificial Sequence
  Description of Artificial Sequence:  Enzymatic Nucleic Acid
  misc_feature (31)..(31): n stands for inosine
agcaaggccugaugaggccguuaggccgaanacauagu

SEQ ID NO: 15834 - RNA, 38 nt, Artificial Sequence
  Description of Artificial Sequence:  Enzymatic Nucleic Acid
  misc_feature (31)..(31): n stands for inosine
uugagcaacugaugaggccguuaggccgaancagacau

SEQ ID NO: 15835 - RNA, 38 nt, Artificial Sequence
  Description of Artificial Sequence:  Enzymatic Nucleic Acid
  misc_feature (31)..(31): n stands for inosine
cuugagcacugaugaggccguuaggccgaangcagaca

SEQ ID NO: 15836 - RNA, 38 nt, Artificial Sequence
  Description of Artificial Sequence:  Enzymatic Nucleic Acid
  misc_feature (31)..(31): n stands for inosine
cugucuugcugaugaggccguuaggccgaancaaggca

SEQ ID NO: 15837 - RNA, 38 nt, Artificial Sequence
  Description of Artificial Sequence:  Enzymatic Nucleic Acid
  misc_feature (31)..(31): n stands for inosine
uccugucucugaugaggccguuaggccgaanagcaagg

SEQ ID NO: 15838 - RNA, 38 nt, Artificial Sequence
  Description of Artificial Sequence:  Enzymatic Nucleic Acid
  misc_feature (31)..(31): n stands for inosine
ggucuucccugaugaggccguuaggccgaanucuugag

SEQ ID NO: 15839 - RNA, 38 nt, Artificial Sequence
  Description of Artificial Sequence:  Enzymatic Nucleic Acid
  misc_feature (31)..(31): n stands for inosine
cuuuucuucugaugaggccguuaggccgaanucuuccu

SEQ ID NO: 15840 - RNA, 38 nt, Artificial Sequence
  Description of Artificial Sequence:  Enzymatic Nucleic Acid
  misc_feature (31)..(31): n stands for inosine
ucuuuucucugaugaggccguuaggccgaangucuucc

SEQ ID NO: 15841 - RNA, 38 nt, Artificial Sequence
  Description of Artificial Sequence:  Enzymatic Nucleic Acid
  misc_feature (31)..(31): n stands for inosine
ccacgcaacugaugaggccguuaggccgaanucuuuuc

SEQ ID NO: 15842 - RNA, 38 nt, Artificial Sequence
  Description of Artificial Sequence:  Enzymatic Nucleic Acid
  misc_feature (31)..(31): n stands for inosine
gagcugcccugaugaggccguuaggccgaanaccacgc

SEQ ID NO: 15843 - RNA, 38 nt, Artificial Sequence
  Description of Artificial Sequence:  Enzymatic Nucleic Acid
  misc_feature (31)..(31): n stands for inosine
cugugagccugaugaggccguuaggccgaanccugacc

SEQ ID NO: 15844 - RNA, 38 nt, Artificial Sequence
  Description of Artificial Sequence:  Enzymatic Nucleic Acid
  misc_feature (31)..(31): n stands for inosine
ggacugugcugaugaggccguuaggccgaancugccug

SEQ ID NO: 15845 - RNA, 38 nt, Artificial Sequence
  Description of Artificial Sequence:  Enzymatic Nucleic Acid
  misc_feature (31)..(31): n stands for inosine
uaggacugcugaugaggccguuaggccgaanagcugcc

SEQ ID NO: 15846 - RNA, 38 nt, Artificial Sequence
  Description of Artificial Sequence:  Enzymatic Nucleic Acid
  misc_feature (31)..(31): n stands for inosine
ucuaggaccugaugaggccguuaggccgaanugagcug

SEQ ID NO: 15847 - RNA, 38 nt, Artificial Sequence
  Description of Artificial Sequence:  Enzymatic Nucleic Acid
  misc_feature (31)..(31): n stands for inosine
acgcucuacugaugaggccguuaggccgaanacuguga

SEQ ID NO: 15848 - RNA, 38 nt, Artificial Sequence
  Description of Artificial Sequence:  Enzymatic Nucleic Acid
  misc_feature (31)..(31): n stands for inosine
cacgcucucugaugaggccguuaggccgaangacugug

SEQ ID NO: 15849 - RNA, 38 nt, Artificial Sequence
  Description of Artificial Sequence:  Enzymatic Nucleic Acid
  misc_feature (31)..(31): n stands for inosine
aucgugggcugaugaggccguuaggccgaanccacacg

SEQ ID NO: 15850 - RNA, 38 nt, Artificial Sequence
  Description of Artificial Sequence:  Enzymatic Nucleic Acid
  misc_feature (31)..(31): n stands for inosine
ugaucgugcugaugaggccguuaggccgaanugccaca

SEQ ID NO: 15851 - RNA, 38 nt, Artificial Sequence
  Description of Artificial Sequence:  Enzymatic Nucleic Acid
  misc_feature (31)..(31): n stands for inosine
gugaucgucugaugaggccguuaggccgaangugccac

SEQ ID NO: 15852 - RNA, 38 nt, Artificial Sequence
  Description of Artificial Sequence:  Enzymatic Nucleic Acid
  misc_feature (31)..(31): n stands for inosine
ugugaucgcugaugaggccguuaggccgaanggugcca

SEQ ID NO: 15853 - RNA, 38 nt, Artificial Sequence
  Description of Artificial Sequence:  Enzymatic Nucleic Acid
  misc_feature (31)..(31): n stands for inosine
guuuccugcugaugaggccguuaggccgaanaucgugg

SEQ ID NO: 15854 - RNA, 38 nt, Artificial Sequence
  Description of Artificial Sequence:  Enzymatic Nucleic Acid
  misc_feature (31)..(31): n stands for inosine
agguuucccugaugaggccguuaggccgaanugaucgu

(The sequence listing continues in the following parts.)
